United States Patent Application Publication US 2024/0093182 A1 - sequence listing, part 15

SEQ ID NO: 31574 - DNA, 1102 bp, Artificial sequence
  DNA replication origin
aagagtaaggggcagtgaagctgtgatgttactgcaggaagggagtagggtggtatccagacgcgaaagggttaatgggagttgtcctcatgactggaggagtaggggcccctcctcccaccagaggaaaccgggggtctgctggtgggagtgaggaggcagggtttagaggtgcagccatctgtagagagacctggactgggcatgaagggtcagacacccctgggcagagggtgagattaagccaggggcagttggggaagggggctctttcagaagatgccattgggagacagtgccctgactggtagacatccacccacagaaggagctggaccctagctgccccagtgggcaaggacacttgaagatcaaatctgttccggcctggcagcctctccccagctgggcaggggccccaggcaccgtgatgtggagtcaagccgcctatacctcccttggctgccccagggctgctaggtcaggatcgcccactaccagcaacctgggggtggccctggggcaggagggaggctgtgccaacgtggcagctgaaatgggcattgtgtgggccctgtctgtctatgtggtatttccatggtgccagctggggactgggggtggggggcagtctctcaagagttgagttgatagtgcctagcttgggttgcagctgcgtcaatgatgggacgggaacagagaggtggcagccgagacataaggcacctgttcctcaggacttgtctgcctgcacccctgccctgcctgagtcttgagcctcccccatgtaggaaagcctcctgggcccacccctagcccccagcagctgtccccacaaactgcaccctaattacagaaacatcacagctgtgaggggctcacagtagagtttggtcaacttgtagtactatgggggaaactgagaccttcaaaaggatgatggcatggcctgggtgacagagttggaagcagagcctgatggactggaacccagggcccctgaccctgggccaaggccatattcggtcccccaccctttccatcttgacaccagacaaggaccgaggcatttggactcctgttctcaggcccgtttgcccca

SEQ ID NO: 31575 - DNA, 1071 bp, Artificial sequence
  DNA replication origin
cgaggtccctggccttgccctgaagcccctcaggggcctggtgcaccaaatgtcaaccttgggccggttcttgatcctaagaagggagattggggacgagtggcgctggcctctgggctgcccaccccttgcaggccagagagagaactgggcttatataagggaggcctgaagcagtggtgcagtgacagacaggcaccaacaggcgggagaggcattgcccccacccctccccaggacctgcagggaggctggggtctctgggcctgctgacctctgcagtaatcaaggcccccaggagtcccttggtgagatccggagctcccaagcccagcccaaggtaatgtggagatccacccaaaccctgctttccagggctccagagccagtccagagccccaggaatgagaaggaggaggggtggatgcaggcagaagccaggaggcttgctgagagtgtggggctgataatgggcggtgggggcgggaggagagggtgagtgagtgggaggagggccctgcagccctgtgtgggagcagagggggtgctgagccagcgggggagtgtgtgtaattgtgtgcatgtggcatgtgcatgcctgtgggtgtgtgcgagggtgtgccctgtgcactcgtatccacagctgctggggagcagggtgtaaacaaggcaaaggctggggaggagggtgctcgctgcacttgggggagaggtggcggtgtcccgcctccggagcctctgagccaggcaggtttgggttccgctgctgattgtgccctaaagaggccaccgagtccctcgggtccccatttgcaaaatggggttcatgggagtaagcacctcatgggcctgggtgtacagaaaagatgatgcctcgagtacatgcgcagtaagtggtcggtcctgctcggtcatgcaaggagcggctgacgggtttggagagctcgtgtggctttagcaggtcctgggcacccaagccacaccccctgtatggggtccacacaccttgctgacgggcaagggaggtttgtgcgaaggtgccggccatatcgcctcccacctacagccccc

SEQ ID NO: 31576 - DNA, 875 bp, Artificial sequence
  DNA replication origin
ggggaccagcaaatttgaagttttcttgcataactgactgggttgtcagggagactcacatacaaatgaaatggatggagaaaaatagtgaggcggcttgtcggcagctctgtgtggggcccgcgtaggagcaggacaagagcaaggcccagttgaatgaagtgggtgaggaggggctagccacctgaagctgaggctgtgtcccctcccgcccccacacaggtatgtccagagcctcctggacatcatggagttcctggacaaggatcccgaggaccatcgcaccctgagccagtgagtgggggccctgggtggggcaggaaggcaggtgttggccaggggcatctggggttgcagcccctggggcagaagtacagcaggatggaagaaaagacccctgccttcagaaacatccagtctgagtggggagacagactctgcttcagggagccccaagtttgatgggagagacatggactccattctcactgttccctgagcccggtgggcaagacccaggccctgccatggggaggatgagaactctgggctttcgagtgggaagcctgccggcaggcagctaaaagatcagagtgggctttgggaggagcagggagggcactgggagtccatcggattgggaagggtagagcgggtgaagacaccgtggagaggggagtcagaagcggagaagagtctgggggtgtcccatgtgaacatctgccctgccccacaggttcactgacgccctggtcaccatccggaaccggcacaacgacgtggtgcccaccatggcacaaggcgtgcttgagtacaaggacacctacggcgatgaccccgtctccaaccagaacatccagtacttcctggaccgc

SEQ ID NO: 31577 - DNA, 1204 bp, Artificial sequence
  DNA replication origin
aagtcacggactccgggcctcagtcttctcctctgaactgaatggcaagacctagggtgtccccttccttctgggtctaacaagtcaagggttcccagcacaggggtcttaatcatagaccacagactcccctaaattccctgacaagcagtgcgtgtctgggggttgagggttcttcaggttgaggaactgtagctttgcttggattctcagagtctggggccagggaaggactggggggatggaaaggaaagctcgcagctggccaaggctgcccaggtcctatcagcaaagctcttctccagctgggctctgcgggaagggccctcaccttgagatagatgacagcatcggtcccaaagccttccatggagaagagctgcaggtctccctggaagtacttggcgtagaggcgggaaatggggagcccataaccaaagccagcctgcagcggggcaggaaggcagtgaggatgaggaggctggcaggggcctcctggagctgcagggactgatgcagggagggaagggtgtggagctggggtcacatggcaggggtcccagagctgggaggggacatgtgggaggggacactgaggtaagaagtgtgtgtggggtgaatggggcaatcatgaatgcgggagggaggcttgggcagagagaggagttccgctcaggggccaggaagtcagagcaggccccacggctcctttgagtctcaagttttctaacagggaggtgctgacaagttggacaacaccaggagaaaggtagaaattgggggtttgggagctacagaagagagggaagatggaggaaaggtgacagagagacatccgacaggtgagatctgtgcagactggggagatgtgggaggtgcgggggcccagattcaagacaggtgactgtcacagacggccacacagaagctgagtgagcagggagataaggaagtgagtgaggagagaagcctccctcaggaggtgggaggggctggggtgaagccatctcaccagcggcgttcccccggtgccaggctggggggtgggtgctgtggagtacatgtagctgaagagtcgctcaatcttcctcaagggaacacccccacctcggtcactcatctgggagagatgggatgtgtcagggattctttacagctcattttccccaccccgcccaatacccctgaccttctcatggtcttc

SEQ ID NO: 31578 - DNA, 1064 bp, Artificial sequence
  DNA replication origin
agggagggtttcctcatgccttaggcagcggggtggctggagagtgagaggtgggaaacaggaactttgagtcacacaggctggggctgaattccccctccttcacttactgtgactttgctcctggacctctcagggcctcagtttcctcagctgtaaaatggggctaataatatcttctttacacaggattaaatgagccagaagtgaactgcagctaacacttggcagcattactaggtcaggagtctggggatgtggtttccctggaagagcactctggagagattatccaggggtgggaggagagggaggggtgggagggtgtatatgtgttttcctaacttgccccaaccttgcctccgggcccatccgagccttcaccatcctccgcggagctggcactgtcccgaagcctggagcgggatggccggtgtctccggcccttggccaacagttgggcccgggccttgtgtaaactgctgtccagtctggccgtctctggcacagccaagtccaggtctgcgaaccgggggaggggagcagagaccagacacatgagaggtgacggcaagcccagaggcccacctcaggggccacctgcacccacaccccaggcattcaacccgtgttcttgagtgctgggagcacagacagatgaaaaacagggtgtctccccgtctcaggtgggagtgggcgggtgtgcaggggaagcagaaatgccggcgctaaaatacagcgccgtgtgatgaaccctcctgtagacacggaggaacggcagccctgtttggatgcatcagaggaggaaacaccaaagctgggttttaacgtctgggtaggagtctgtaagagatgaggtgggcaaaacaggtatatgcaatgctaggaagtagggaaacaagggtggtacctccagggacagttggagggtagctttgtggagagaagggttgagggatgaggctggagagatgatggaaataatggccaccatttaagaaacacttactacacaccagacagtgtacatacatcatctctcactcaaaacaacccggtggggt

SEQ ID NO: 31579 - DNA, 1068 bp, Artificial sequence
  DNA replication origin
gtccagccccgcccgcgcctcctgcttccagcgaacctgttccctctccccacatcccccgccctccatctcccccggctctgggacccttcccgccgacctcacccccacccccgggatggagcggctcgagcccgcccggagccccccgcggccggggtgacggtccccccacccctctcctgcccggcccccgcctcgagcaccatgggcctgaggggttcccggggcgccagacgctgaagatgaccgatgccggaggtgaggggccgggcgccctggggtggaccgggaactggggctagggccactcgggcccgcggtgggaccctgagtggggttgggcagggctaagcgacaagggcctttcttcccctatccctagggggaccgcacggggctggggtgccgggctgtcaggggagggggcggagataggatttatggccctaatcccctccctcccgcccgacgcccggagaaattaataaaaagctggtgtggggggagggggagagggcttaactctttcttgcccggcggggagttgtgctgatggtttggagagaaactagccaccgggctctgactggggagaagggctctgagagtggagtaggtgccctgtccccaacctcaccccatctccaacagtgctttgagggggtgcccgactcctgaggactaccccaagcctggggccagtggacggccggcgatatgggaaggggggaccacctctctggctccacaactgcctccccgaccgctagtctcctttcccatccacctcttcccggcctctcccagttgcacttctctctgtcgctttctcctcttcaggggccctttcctatcgcctgcccgaagggcttctcccttctctcccaccctcgggcgtcacttagagcggcggaagcccttgttcccagtgccagttcccgtggccccactctcggtgtgatctctttcttctcagcagccctgtggactctccgccagtttgtgtgtctgtctctgcttcttcctactcctcacttccttccgctcccgctcccgctccctccc

SEQ ID NO: 31580 - DNA, 712 bp, Artificial sequence
  DNA replication origin
ggctagtttctctccaaaccatcagcacaactccccgccgggcaagaaagagttaagccctctccccctccccccacaccagctttttattaatttctccgggcgtcgggcgggagggaggggattagggccataaatcctatctccgccccctcccctgacagcccggcaccccagccccgtgcggtccccctagggataggggaagaaaggcccttgtcgcttagccctgcccaaccccactcagggtcccaccgcgggcccgagtggccctagccccagttcccggtccaccccagggcgcccggcccctcacctccggcatcggtcatcttcagcgtctggcgccccgggaacccctcaggcccatggtgctcgaggcgggggccgggcaggagaggggtggggggaccgtcaccccggccgcggggggctccgggcgggctcgagccgctccatcccgggggtgggggtgaggtcggcgggaagggtcccagagccgggggagatggagggcgggggatgtggggagagggaacaggttcgctggaagcaggaggcgcgggcggggctggaccaggagacctgacgggaggatgctccgtgtgtgtgtgcgtgtgcgtgtgcgtgtgtgtgtgtgtgacagagagagagagagagagaagagcgaagagcgagcgccacctccctccccgcccctgccgcccgccag

SEQ ID NO: 31581 - DNA, 1417 bp, Artificial sequence
  DNA replication origin
agagcgagcgccacctccctccccgcccctgccgcccgccaggcctggccggacgcggggcccccgcctggcagggccgattcgcgcggcgtcgcgtcggcaggggtccgcgggggtctccggggaaggggcgtcggggtggggggcgcgtggcggagaagccgggcgcccaggagacaaagagcgggagggagcgagggggcgggggcgggggagggcggcggggaggaggcggctggggccggggagcggagttgcagctacttctctgcccgcgggagacgcggcgcaccggagtctgcgcgggtgggagcggctccggggcggtcccgccacgggacccacggggcttccgcctcctctgccgggtccatcagggctcccgattagttcattcattcaacaaacgtccgccgagcagccggggcgccgaggctggaggggacagcggtgaacagaacccccgccccctaactgcgctcaaggccagtgggccagtcgggggctcagacgagtggggaggccctcacgagcctgggcgccatgggcccagctaacagagggcacttcttgccggaagggagagcgcacccctggcccggcctgggtccaggcggccgcggcgggagctgggctgggggattcccagaggatgtgatgtgttggctacaactgcgggccagggtagggaagtgccagggggtgttgggggtgggagggcaagaggggaagataaattgaagctggggaggtgcagggggcttgcactttattctaccagccgcccaccccgccgcccacacacacacacacacacacacacacacgcgcgcgcgcgcacacacacaaaattaagaggagggaggggctcaggtgtgcatttaggaagcacccttggctcccctggagacagggttacagagggcactctgaaggcagggagacccgctggaggctattgagggccggtggcagtgggcataaagattacagattaagctgagagcccttcaggatgcaggcctgaagaagctgacaccgaagaagctgacaggatttggggacctgctggactaggaggtgagggaggaggggtctaggatggctgtggaccttggcttgaggcaggaagccctggagcaggtgggggtggggacggatgagatcagacttggacccagtgcgctgatggtagtggcaggccagccagggaggcaatgtagggatccacaaccagctaccgcacgtcacagcttggcaggtgccaggcgctctcagatcatctattgtcaccctcacaataaacccacaaggtgggtgtttccattacccactgcctcagagaaaacagagacttagaagaaggaaagtgctttgctcaagagcaagtggtgaaaggccaggcgcagtggctcac

SEQ ID NO: 31582 - DNA, 1184 bp, Artificial sequence
  DNA replication origin
cccttcaggatgcaggcctgaagaagctgacaccgaagaagctgacaggatttggggacctgctggactaggaggtgagggaggaggggtctaggatggctgtggaccttggcttgaggcaggaagccctggagcaggtgggggtggggacggatgagatcagacttggacccagtgcgctgatggtagtggcaggccagccagggaggcaatgtagggatccacaaccagctaccgcacgtcacagcttggcaggtgccaggcgctctcagatcatctattgtcaccctcacaataaacccacaaggtgggtgtttccattacccactgcctcagagaaaacagagacttagaagaaggaaagtgctttgctcaagagcaagtggtgaaaggccaggcgcagtggctcacgactgtaatcccagcactttgggaggccaaggtgggtggattacatgaggtcaggagttcgagaccagcctggccaacatggtgaaacccttgtctctactaaaaatacaaaaattagtcaggcatggtggcgctactctggaggctgaggcatgagaattgcttgaacctgggaggtggaggttggagtgagctgagattgtgccactgcctttcagcctggccaacagagtgaaactcaaatctcaaaaaaaaaaaaaaaaaaaaaaaaaaaaaaaaaaaaaaaaggcaagtggtgaagctggatcaggggtctagagtcagaggagaggtgtggagtctataggacagagttccctgatggcccacaggactctgcagtccgaggcctccgggaagtggcctgttgaaccaggacaatcttgtgactatgagtgaggacagaattaacagcctttagggtctgagggtatcctaggggatttataggagtttgggggtctctgggtgtcttcagaatcttctggcagccatgaggctagattgtggaaatctggggaaggggtggggtttctgttgacagctgtgggggctgcatctggctgtcttaaaggggttgtgctttgtaggcatctggtgagatctgagtggtgggctgtagtggggggcttgattatatagaccctgtacatcccaagggggtggggagatgatgggtatgtttgccaggccataggacccaggaggagcccctgttcccctattcctagtga

SEQ ID NO: 31583 - DNA, 901 bp, Artificial sequence
  DNA replication origin
gtctggaaaggaagggtaggtgagcgctgcatttccggggtcagagtgacaggccatgttcctgaggtgtatgcagagtatgaaagggaggggcacgccaaaggtctgttagtgcattctacttacagacatcctctgggtaccttctagatgtccagtattgttctcatcaccatgatgggcaaagccatagttgatcgttgttcttgtgcatctgcaaaccagtgactgtgtcatcatcacacgctggcatggggctctgtaggagagaacaggcttactgagctgctaaagcaggaggaacctgattcgggtggaggtgggagtagggctgtgctgttggagggagctgtgggggcttttttggagaagtgacacacagcagagagctgaagggtgagctagagggaaataactaggcaagcaggagggtagatgggggacattccaggcagaggggacagcacacgtaaaggccctgtggcaagtctgaggatctgcaggaaggcctgtgtggctgggggacagagagcaagggatgtttgcagcaaatactggcctgagactgagtgccaacatggctatgaggttgtggcgccttttaacagagcaagtcaggaaaggaggcataggtttgtgcagctgcgggggcctggtctggggcatggtacctgggaggagctgggagctaaagctgggagttgggagcaagggtgggctgggacttgagatttgcagctcagagtgcacagaggtagtgtgggagatgggccggtgccccagggcagtgagtatagagagaacagaggatccggaactgagctgtgggggactggaggtctgcgctggggtcacctggaagctgggagagaaccaggattgttcaggaagccacaagtgc

SEQ ID NO: 31584 - DNA, 1690 bp, Artificial sequence
  DNA replication origin
gagaatggcagcaccgtggcaactgcagccagccccgcgcccgaggagccaaaggcccaagcggccccggagaaggaggcggcggcggtagcgccgccagagaggggggtgggcaatggccgggccccggacgtggcccctgaggaggtagatgaatccaagaaggaggacttctcggaggcggacttggtggacgtgagcgcctacagtgggctcggggaggactctgcgggcagtgccctggaggaggacgacgaagacgacgaggaggatggggagcccccctacgagcccgagtcggggtgcgtggagatcccggggctgtcggaggaggaggacccagccccgagccggaagatccatttcagcacggcgcccatccaagtaagtgagcccccccgccctgcccccgcgccgcccctgccacgtgcacgcggccgcccccgctcgccagccagccagccgggtttggcaggctgagtcagcccctgccacccagcccccttcccagaagttcccaccctcaggggggcgtgggggagttccagctgtttgtcagagagggattttcaggtgtgcgaggggggtggcctgccccgacctgccctcaggttcctccgcctgctgccccgccccgccgctccgcggaacccgccctgccccacgcgggtcctgggacacctgctttcccttcctcacccggacattccttcctccagaggctgccagaggctggggttgggtagtgtgaaggggtgtgtgtgtcttcaggagagacatttgcccttcactgggtagagagggggccggggtgctttccccctgtatgggagctggatgaggtgagaaaggggaaagccaggaacttctcaaaacgaagctgcaggggaccgcaggcagcccttcctctattctgtttgtacccccaccccaactttgcagaagtgaaagagggaagcagatcgtgagggtgagctggtctgtggccatgtgactggctggcgccgtgttccctgggggtccctgcaggccagctgcccggtcctccttgcacagggaggggcactttgtgtggtccttgatggggagaggccttctgcaggcatggaggaggaggaggtggggctgggatccccctgggtgcctggcagtagtgggcatgcctttactcttggctgctcaataggacagactcccatggccttggcaggccccaagtgttcttgccacattctctgggagccctgaaagagggatgggagctgccccttttgggggtctcatccccacggccactattggtggttggtttgtgggttgtgccagagctttgagatcctcagaacagccctgatggggagggaacatcccctggggggaatcaaaaaccccaggccacccctccccccacttcccaccaccctccactcttggctagcacattcagcctgcagggttcttcctcaccgccccaggctcagctgcacccggccccaggtccgccccatggaagtgtccaggtccctggactctccttggcctggaccctgccctgcctttacccttccctagccaaagcaccatctgtttgcttgtcgtttccataactactcctggactctgaagcttcccaactttcctctcactcgcccagaatgtcagcctctgcccctctcccacctcccacccc

SEQ ID NO: 31585 - DNA, 1007 bp, Artificial sequence
  DNA replication origin
gcagcctgcgccgccgccgcacccgccgtcccggctgcaggagacgcggaagctgttcgaacggagcgccccagcggccgcaggcggcgacaaggaggccgcggcgcggcggctgctgaggcaggagcgcgccggcctgcaggaccggaagctggacgtcgtggtgcgcttcaacggcagcaccgaggcgctggacaagctggacgctgacgccgtgtcccccacggtcagccagctcagcgccgtcttcgagaaggccgactcgaggaccggcctccaccgcgggcccgggctccccagggccgcaggggttccccaggtcaactcgaagctggtcagcaagcggtcccgggtgttccagcccccgccgccgccgccgcccgccccgtcgggggatgccccggccgagaaagagcgatgccccgcagggcagcagcccccgcagcaccgagtggcccctgcccggccgccccccaagccccgggaggtgcgcaagattaagccggtggaggtggaggagagcggggagtcggaggccgagtcggcgcccggggaggtgatccaggccgaggttacggtccacgcggccctggagaatggcagcaccgtggcaactgcagccagccccgcgcccgaggagccaaaggcccaagcggccccggagaaggaggcggcggcggtagcgccgccagagaggggggtgggcaatggccgggccccggacgtggcccctgaggaggtagatgaatccaagaaggaggacttctcggaggcggacttggtggacgtgagcgcctacagtgggctcggggaggactctgcgggcagtgccctggaggaggacgacgaagacgacgaggaggatggggagcccccctacgagcccgagtcggggtgcgtggagatcccggggctgtcggaggaggaggacccagccccgagccggaagatccatttcagcacggcgcccatccaagtaagtgagcccccccgccctgcccccgcgc

SEQ ID NO: 31586 - DNA, 1154 bp, Artificial sequence
  DNA replication origin
aaaaaatctccaagcgccctgtgtgtgggtcgcctcccccaatcaagctgccgaagacagccagccccgcttcaaaagcccgagcggcctggtacggtcgcccccacccaaattagcaaagcggcgtctggggccggtgggagcgcgcgccctgcccgcgaagcagccgcggtgtcgccggctcacatcgtccgagacggtgtcagcggggctggcagcccgggcgtcccccagtccggccggaggcctcggctctcggggggcccggcaccccaacgcccatggctgctccgccggcccgggccgctccgccgccgcgcctccctccctccctccctcccccccgtgccccgagcctcggtctttctctggctttgcccgagcggcggctgccggagaccgagcggctgcccttctcgcagccgccgctgggggactggcacctctgggtcctaaagggatcggatttccggggccggagcctgtgagccctccccttcccctccacccgaacggatcccctcccctccccagccctcgcggagagccttccgctgcccccggacgttggccagcactcttcaacctgcttccatcacaacttctgactgcggtcacaacccacagaaccgcacctccatgaaatattggggggaggcagtacatccacgatggtctcagtgtgaggggagggggtttgtagggaggggcagaggttcattcttcagtgtcctcggagctagctcttcggtgtgcttcaagcctttagcatcagaatcgctgggcacttggtaaaaatgcagatttctgggatctctctcgaaccttgtgaaggagaatctccgaggctgaacccaggaatctgcattttaacacttcactacaggcaatctttggcccccttggaggtgtgaaaccttggtccagcgctggtgacctttcgatggtgggggaggggtggtgaagaaaggaggtgaaccccgtcatccaagtagcaggggatcaccaaaactgccgaagtctggaaaggatgtcctgtcgcctgtctgctgtgcacccgtcttcaggcccctaccctggcactcctgcctctcaaaccggaaggaagggtttgggagcaggaattcgagaggcctggggccaaagtttcgcca

SEQ ID NO: 31587 - DNA, 1207 bp, Artificial sequence
  DNA replication origin
tcccccaagctctggctagctccaccctcttgaagcccaaaccccctagaagggtctgttaaaggggtttgtccggagattcataatcctttggacaagggagacccaagagcacccctgtaattccagtttgctctaagctgctaccggaaatgctgggagtccgagggtctctgggcctggtagctggttctcagctccttctcccaccctcagaaactgggggcttccccacctggccagacgcgtgggcacagaccccttgggctgggaccagttaagatgatctaccaccaagggtgtgggagattctgggcagaacacaggggcctgcgccctcctccaatccacacaagagcttctgagtacattgtacaaacttccaaaccccaactgggtgaggtttctgtcttctccggacttctatattggggttggggggcctgtggggaggggttttcaagacccaatcttgagtttggaaatctaagtcccaaagcttgctcctgacagaggccttctaagaagggttaggagacagacttcttcaccctgcaccatcccaaagtgcaaaactggggaggggtaagtttcctgggcaactgggcaaagatgcaggtggcatttggaaagtgtgaggtctgggttcacttccggctctagctcacaacctagatcttccctcttccttagcaccagcctcaggatcagtcctgcggttcctggcccctcccgatcccaatatccagggttcccaggcggcttccccacaccccatcccccacgctgtactctaagctcttttgcacatggtaacgcgttaatatcccacaaaacccacacacacccctgcagtggagtggtaggagggctccctttgccagcccttccaggccaggggggagagagtgggagattaggaaaaggaggaagaggatggaggggaagagggcgggggaggaggcagaggccgcagaaaggcctgagatgcaggaagcagctgggagtggggggaggctttgtgcctgagttgttctctgggtcctagggcccattgtgttcaccagtttctgggatgtgtggaatgaaccagctcacctggacctgtccagagggcggactctcacacccagggcccaggcagcgccagcaccctagctgtgtatgcggggggtgcagagggcatcaaacagctttctgggttgcc

SEQ ID NO: 31588 - DNA, 2138 bp, Artificial sequence
  DNA replication origin
ggaggtgggcgtggtaggtgatgtggacagcgggtgggacagctggtggaagcgaggagaggggattcgagtcacagcaggagccctgcggggtacaccccagcccgcccgcctgggtgcctgtcaggccgctcaccgacatgctcaggaaggctcagaaacgtctcatggtccaaggtgtgcacaaagacacggcccacaagtgggtgtagcgtggtctgctgggcctcggtgtcccccagccctgccaggagaactgtggggaccccacaagtcccaaacacacaggccagcctcagtcctgggcaggggataagctcccttccccaccaagtccttggagcccctaagggaccgagagaagcgcttcctttgctgcctcccaggaagggattggggtggggatgggggagcaagccctgctgggctagacattttaatcgtctgggtttcgggattcgagggagaacctctcccacaacctttccattccttgttttaggcccctattaatggtgcagtgggcagggactgatgtttgactgggaagtgtgtgtgtgagggtgtgtgtgtgtgtgaggggatgtgggggggtgtgtgtgtgaaggtatgtgtgagggtctgtgaggatgtgtgtgagggtgtgtgtgcaagtgagtgtgtgtgagagggtgtgtgtgagggtgtgtgtgtgtgaaggtgtgtgtggggggtgtgtgtttgcggggggtgtgtgggggtatgtgggggtatgtgggggtgtgtgtggggggtgtgtgtgacggtgtgtggggtgtgtgtgtgacggtgtgtgtgagggtgtgtgtgtgagggtgtgtgagggtgtgtgagggtgtgtgtgtgagggtgtgtgagggtgtgtgagggtgtgtgtgagggtgtgtgtgtgagggtgccgtgagggtgtgtgtgagggtgtgtgtgggtgtgtgtgtgtgtgagggtgtgtatgtgtgaaaggcactgggaaaagaatcccatgctaaatgcccaagagcccagaggagaggaagacggggccaggagcctacagaggaggaagggtagccattctgggcctggagacccccaccttcctcccctaaaatacagggaagaagaaggcctgccctagaggccagtaggagctgagcaaaaggaatcctaagtccaagagaggagcagaggacctggccgccagctccaccctccctcccagggccaaatttagcctgggcttagaagctgcggcccagccagctcattaaagggcccacgaccctttgggcctgtgctgtcagacccacccgggccctaggacacctccagccctcagagctcccagccccttcatcccagagcccagctcccagccccattccctggatccccagctggccatggcattaacaccccaaagcccttctggcgcctgcctcacccaacccagatccctcttctgtgggccctccacacctccgtcttaccacccctaaatcctgccccctcatcctgggcctccccgctgaacaaggccccaacttgcccacgaggagaggagtccagaagagtgtctcagccatggctgcccggcctggcccgcccggtgagtgacagagacagggggcagggaggagaggagggaaggagggaggtggctcggggcagctgggtcccagcgtcagcctcccctccccgcctggagcatgcaccaaatctgggatagacaccctcctcgcactcattgtccctccaaccgtcccctccagtggccacagtgttttttaaaccaccaaccaggccacctccatcctcccttaaaactctaatggttctcatggcccctgagttcccagctcatccccagttggtggctttctggcctgtcctgaacctggtcagctggtctagaatcccatcctctgcccctacccttccaaccccaggcccctgctcagcctcactccgctcctgcctagcttggcagactctctcaagtctccaagccgtcgtccaggctattgcctctgcctgcagttcccttcccaccttcattcaagcagcaaccttccagtcacctttccagactctgcacagatgtcctctcctctctgaagcctttctgacctcccttcttc

SEQ ID NO: 31589 - DNA, 756 bp, Artificial sequence
  DNA replication origin
gcgccgagcggggcatttgaagcccaagatgtagaagcaatcaggaaggccgtgggatgattcataaggaaagattgccctctctgcgggctagagtgttgctggggccgtgggggtgctgggcagccgcggagggggtgcggagcgtgggcgggtggaggatgagaaactttggcgcggactcggcggggcggggtccttgcgccccctgctgaccgatgctgagcactgcgtctcccggtccaacgcttactggggcaggagccggagcgggaagacccgggttattgctgggtgcggacccccacctctagatctggaaagtaaagccagggatggggcagcccaagcctcttaaagaggtagtcgggccggtgaggtcggccccgccccggccccattgcttagcgttgcccgacacctagtggccgtctggggagccgctagcgcggtgggagtggttagctaacttctggactatttgcggactttttggttctttggctaaaagtgacctggaggcattggctggctttgggggactggggatggccccgagagcgggcttttaagatgtctaggtgctggaggttagggtgtctcctaattttgaggtacatttcaagtcttgggggggcctcccttccaatcagccgctcccattctcctagccccgcccccgccaccccacctgcccagggaatgggggcgggatgagggctggacctcccttctctcctccctcgccctcctcct

SEQ ID NO: 31590 - DNA, 1026 bp, Artificial sequence
  DNA replication origin
gggttagcgtccgctcatgcgtggcctcacactccgcgtgcctcctgctccgaccccgaggagaaactcccgtctgctccgacgactggcccgggccccttttatactgtcctgatggagagcagggaggaaccctgcccctcggagagggggagccggccgcccgtgccccagccaatcagagctgcctggcccggcccccaatttgggagttggaatggagagggggaggaggagggaagggagtccaccccacatctcccctcttcgcagctctgcctccccagccccccagcccagcctgggccagaggtgctgtggtaggggtgcagctgggtcctcagaatggcgtgggctaaccagtgggtaggggtgcccctctgctctcttcctgggacctccaatctagaagaagtggaactggggaactggggagctgggtggggagacttccaaaggtggaagggttgggggtgttggggagggggtcctcctggctgtgccccagtcaccctctgatatcctggcaagagctaagggaggggcataaagaggcatgctgaggacctctccaaaacagaggaagctgggaattaaaaagatgtgcctgtttgggggtgtcttctggtgtggctaggggatggagcttaggaatatttggggaacaatttacagattcctttctagacattaagaatcagatatctgagggaggggtgcaggcaagggagttttaattttgaggatgtcaattcttctgctgtgctccagaacagaatcaaatgccttcctccaaaccctaggcatgattgagagatggagtggggaggctgaggtgcagggtgagaaacatgactaggtggcctctgcagaagaaagctttggtggttgggtgatggagcagccaaggtaggggtgggggattctagggacacagaggtggggattggggcttgcaatcccctaaaaattcatcccccaaactcttccaccccagagttgggaagtatttttagtgggaggcct

SEQ ID NO: 31591 - DNA, 894 bp, Artificial sequence
  DNA replication origin
ggtgtggctaggggatggagcttaggaatatttggggaacaatttacagattcctttctagacattaagaatcagatatctgagggaggggtgcaggcaagggagttttaattttgaggatgtcaattcttctgctgtgctccagaacagaatcaaatgccttcctccaaaccctaggcatgattgagagatggagtggggaggctgaggtgcagggtgagaaacatgactaggtggcctctgcagaagaaagctttggtggttgggtgatggagcagccaaggtaggggtgggggattctagggacacagaggtggggattggggcttgcaatcccctaaaaattcatcccccaaactcttccaccccagagttgggaagtatttttagtgggaggcctgtgatcattggtgacttagagaagagttttgtttgccatggctgtggccaggggctgcttagagaccctccttcccagcacagtcaaaccagagagaacctgggtggagggagggcacttagctaaaggggtgtctttctgggagctgcataaagccccttctccagttgtacctggactcagtgttggggatgtatgggatattttgggtgtctgggtgaaactttcctttgggggtgtgggatgggctgcagaggatgattgactttgttttaggggctacttcccactgcctcatctctttcttgaaaatcccggtcattgctctatgccttaggaaccagagagaatcatctgtacactctgaaagggtctggggacccgaaggacagcaggctatatctaaggaagatggctctagaactccacgtcctttcttcctccatgtcccattcccccaacaaggctctgcctcaaccccaatctacctcgtc

SEQ ID NO: 31592 - DNA, 870 bp, Artificial sequence
  DNA replication origin
gtcaaaggtggaggagcagctgagaggctgctatacttgcccaggtgaggggcttggatccggtaggtgggaatggagacagagagaagaggatgggcttgagagccctttgggaagcaaaatttacaggtgctggggttggattggatgtggggtggggttggtgaggaacagggatgatcccgggcttctggctgggcaaggaccctgcttgggggacaatatgctgagtttggtgcctgttgccggccctgtagttgatccttttcactgagtggttacttcaggccttctggggccagccgtgtgctggggagagctctggggacaatagctcctattctgggagagtggggagccaggaagaggaataaaacacacacaaaaatgcccctcccttgaggcagcactggctgtgtgattttgagtaaatgctccatctcggaacttcatttccccagtctgtgaactggggtagtagtgagaccatcttgctggtctatgtcttgctcagtaaatggaagcctctggacacaaaggatgatgggagtgccaatgagagataaggaaggctgcacggaggaggcagctttccagccaggcttgggagggtgggtgacagggttcaaatgcagtgtttaagtgggaggaaaggcaccgcccagcctgggaagcttgacatagattgagtgagagacagacagacagaaagagagataaggccataggcagaggaagataaggctggaaaagtaggctggggccaacttctggaggcctgggattctgggggaaggagttatactcagtggtggccatagagagttggtgactgcctttgagaggagaatggttgtgatccttttgccg

SEQ ID NO: 31593 - DNA, 1117 bp, Artificial sequence
  DNA replication origin
gttctcacaatcttatgaacaagatctatgatccccattttagagatgaggaaactcaggcacggaaaagggaagtaacttgtccacagtcacaccgctgggagaaggagcggctgggatttgaactggaagtctgagcccgcaggccaagctctcatagcgcgactgcactgctccttctgtgcgccaggcactgtgctaggagccaggatgaacctgacagttgtaccccagtcctcccagagaggatcctcaggagggtgggatgggagtgggcagccaggcagagcggggcgctgggagagaccctgcagcagagcgggacggccagggacccaagggagtttttgaagagaagtgtagccagaaacgcctaggggagagcggggggtgggatggtaggtggagaggggcctgttccaagcagagcagggcagggtctgcgctgggcaggatgcccggggcctcggggctcaggaggggagcgctgggggacggaggtggctggaaggccggaaggcagtgagagcacgttagctagtcctgagcggcagggcctgggggtgactggggagctcgggtcctccccagtgggaggggaccacggcgcaggaggcagagcggggaggaaggatgaggcacctggtggcaagaccactctggctgctgcctttcggagaaagacttgggccctaggagggaggggcagggagaggagctgggaggctgtggcaggagtttgcagagactgcaaggcaggaggaaggagacggcgctcggggagaatccacaggtggagagatattaagggagaaccccatttgatggccattttgcagcggagagttaaaagcccacacttagctgccagacctcagtttgaagcagaagtcgccattcatttgcaatgcgaccaagggcaagtgacttaacctctctgaacctcggtttcctcatctgtaaagcagagctaatgacccatgtatctcattgtgaagaccgttgtaaagattgagacaatgtaagcaggcgtctggacctgagtcctaagtaaacccgagcattctggacactgtcctttaggtctttttgcagacatccaagtctgggggaaaga

SEQ ID NO: 31594 - DNA, 1515 bp, Artificial sequence
  DNA replication origin
cttggatgtcctcctctgtccctctttctcctgctctggccacccccaacatcggcaacaccctcctcacttaacttgagctccagaaccatttgctgagccactgcatctcccatccaccctacccctggggacccctgcttactccaccctccccaatatcttctggactgaattgtttttgttttgttgtgtttaatgtcaaccagaagactgaattgtttttgaagggaaggaaaggaaaagaaacggaagaagaaaaaggaggaggaggggaagaagaggaggagaaagaagaaggaaaaggaagaagaaatagagaagaaaacggaggagaggaggaagaaggtggggaagaaagaggaggaggaagaggaagagagctgcctggccaaattttgtggaatgttggatgttgcgggtgacagactgtagaggctgtggctgatgtcatcttctttcagggagaatttgattgcctcctggtagccagatagcatacagggaagtcatcttgatgcagtgaagctggtctaggtccagtttgcccttattcctgggtgtggctctttccagggtctcacctgtaagccacattgatggaagtagagaccgtgcttgcaaaaaaaattgaggctggggtggggaggagagagcccagaggtgatctgggggctcaggagcgcaggatggtggggggacactagtgtgtatttgtcggtggatgggaaggaagttcatcaagtgggaggtggaggcagcccagggagaacagggactgtgggtggcagagcaggagggtagggccctctgagcctgggggacagcaggggttgcaggtgggggtggggggaagccagcaagcttgcttgttgggggtataggattgtggtagggtcctgcctacctccctgtggagaagctggagaggggcagggcagccccggtggtgtgggcagatggagaagggatgggatgcagtgagggactggggctcaggtggaggagggggccaaatgtggggaagaggctcagtgaagggagggaccctccgcggggaaagagttcagtgagaagagcgggaggcgtcatggaggccccatctctttatctagctggggccatctgagagcagtgactgtacccccatccaactctgtccctcccccgcaacatggaggccccagcccaagacttgcagtggggagtgggggggcagcctccagtgtttgttcttgtccaaggctggggtggggagcaataagccaaggccccagactttccgcctcatggtgggtgtgggccagggaggtcctgcacccactgcccgccctctaaccagggggctgagactttcgcccctgggtgctggtgcctaggaatggaggcagggaaagggctgggggctcactctcccctccctccatgcactgcaggggcaggcagtgggacaggcagtcgagctggatttgtttctcattcgctcttggctcctctggtggaaaaatcgaagcg

SEQ ID NO: 31595 - DNA, 1046 bp, Artificial sequence
  DNA replication origin
tgcttccagagccccaggatggcagcacccccttcctacccacagggcccgctgtggtagccctgtgggctccgcaccgcaccgctctctctgttctccaccccaccgcagtgaagtgggggcagggcctctgctggctgcccaggaggacacccgccgctcctccactgcctccctcctcaagactagcagtgggtggctgggcccagatgcctgctccccggctgctggcgggctcaggtgtctgcagagcgtcctcctgctccctgccatccttgcacgcccctctatttcaggcagcctggcccctgctcagtgccctctctggaagcctgctccttggccagcagacctggctcccccaggtccagcctctacctgcccgctcctcccgtccccttgagggggctttgcttcaaaggggtggagctagggctcctcctccctgtgaggttgcgctgggggtaggagcctggaggggagtcagaggcagggctgaggaaccagaggctcctctcactctgagtcagtcacagggaggggagggtggagggggcggcaaggaggtggaccgagaaagagccggccacagagatgtccagggaatggggcagggctgggtggcagcatcacagtgtctggagggccaggtacacatccaagtgcacaccgtcatgcagcgatttagagacgggccccaacctctgcaggcttcagccttggattgtgaacagaggggacacacagcacaggaccagctgaccagatcccagccaccgcttgtttgcactcacaagtaaattgatgccgacaacctggagcggagggctggtggtgtgtgagtgtgagtatgtgtgtgtgtgttgggagaataacagaggattcaaccagtgtcacccaaaaggggcaaggaccccgcagcactgggaaagggtcacaaaagccttcctcgccttagaggagtcaacatgctgtcttcccaatccaacttgattatctgtctgctcagcagcccccatgatccccacctcccaagaaaacactgt

SEQ ID NO: 31596 - DNA, 1066 bp, Artificial sequence
  DNA replication origin
ctgctgggccaaaccactacctcctccctgcctggctctcctgcctcccccagccttgggcctggcctcctccaaggctagcactgccctgcctgcttactgcggtgggcaccaagacgccactgttactgctactggggagagacctgtgggcaatcctggtccccaaggctggcccagcagtgcctgctgctaggtaaccgaggtcctgctccaggtgggggatgctggaccccaactgccagcagggatggggatgagatggagcaggggggagggggtgtctacgtggagctgcttgcacaggcttcagctcttccagatgtgcagaggttccagatgtggggatgactcagcccggaatgaggaggggtgggcggtgcatgggggaatggtgagcagggggatctgaggccctgagcagctgccagctgctgcctcctgtcctccggaatttgcagcccctcaaaaccccagaggtgggcgaagtggtatttaatagctgctgggagctgcccatatgtgtggccctcaagtgtcccaccatgtgctgggaaagagacctcagggccaggggctcagctaggagagagagaaagggagaaagtggaaggcgggcagaggaagtgggaggaggaccgagagtggcagggaggacggagagtgggaggggcagggagaagcccaggactaaaatggtggcccctacttgggcccactttcaagtgtggcactgggaggagagtgtattggttcagaggactgtgtgtgtgtgtgcgcacgtgtgcgtgtgtgcacgcatgcaagcaaatgtgaccttgctgctggagtggaggttatgcgggtggagaaggagctgtgttgggtgagcattgtgtgtctggtgtgtgtatgctgcgtttgtgagctgggtgctggatgatgtgtatgttgggtgtggcagagtgcaggagcatgttctataccatctgtgtgatagagaaggactgtgggtacagcgactgtgtagtgatgggctgtgatggggaaagggtgtttgtttatgccaagttacatgtgcctttgg

SEQ ID NO: 31597 - DNA, 1599 bp, Artificial sequence
  DNA replication origin
ctccaagtgctggggttataagcgtgagccactgtgcctggcctggttgccagttttaacaaagaaaaacacagaacatcccattaaatgtgaatttcagatagaaaagtaaattttagcataagtatgtctcaaatattgcatgggcccaggtgtagtagctcacgcctgtaatcccaacactttgggaggccaaggtgggcatatcacttgaggccaggagttggagaccagcctggccaacaaggtaaaaccctgtctctactaaaaatacaaaaaattagctggacatagtggcacatgcctgtaatcccagctacttgggaggctgaagcatgagaattgcttgaatctgggaggtggaggttgcagtgagctcacaccactccattccagtcttggttctcaaaaaatatatatatattgcatgggacataattatactaaaatgaaattattcatcgtttatctgaaatttggatttacctgggcctcctgtcttttgtccggcaaccctagatctgggtcaggttgatgccagagacccagagagcagctatgccagcctcctccccctcctcctgcccctcttcagggcactggtgcccgcctagttccctcacccccactcctgctgaccccccacatctgtcccttgagttcccacatgcccttctcagcaccctcatttcaccccgcagggtatcttcctcctctaagctcaaccattttcccattttcctctcccgtaagggccacacctctgtagggctcccagcctgggcaggatagcagggagtgtggggtagagaccccaggccttgctgttgcagtggggcctgggtggggacaagaagaaccctggcagcccaagttggcaacgactcaagaggtggaggctccagcactctcaggacgaggtccccctgccaaggtccacctgcaggggaggaggggagacggcggccccttcccttctccaagctcacagtcacttcaaatacagaggggccagatcccaatacccctcggatcaggagactagaagattatcttcttaaggggcaaaaagggctaggaggtaatgggaaatagagacagggaaagggagagagagagcagggagacagcataagaaacagaccgagagactgggggtgcaggaccaaaccagggacaaggagaagggaccagagaaaccgagaaaaacagacgcctccgccgaggcagacagaggtgaacagagagaggagaaacagacgggagaacagagggaaaggctgggaactcgagagaaactgggtgcggacagatgggaagaaaccgaaacagaaaaacagaggctgggagaaacggggagagacacagaggggttaaatataagacagagaacatgactgggagagatgagggagaagggtgagaggcagagagcaaggaaagagaagaaacgcccacgacgtcgggggtgtttttcaggggtcaagacagattggcgacacagcaggaggcgcccaaggacatgacgttgagcctctcagggtcccccttggccgggccagggagcagcgccccacgctccatcaccccctctccccc

SEQ ID NO: 31598 - DNA, 846 bp, Artificial sequence
  DNA replication origin
tggggctaagtgctggcccaggtgtccaaagctcaggcgggaaggagctggaaggataagctgaggctaataaggggtccaaagtccctattcacagagacgtgctaggtgtcagataaggtggtgggtggtggccacttcccaccacaggatccccctcagaggtgggagaacccagcctctcccagagcctcctccgctgcccccacctccacctccacagcaaagagagaaaggaagtagctaactgtgtgtggtcaggaggaaatcctgattctggaaggtggcgaccaggctccagaagcaggctcctgacctacaagggtagggcccaaaagttcaacaaccttacctcccagtctcaccttttgggggccagccagcaggctgaacagcaaggtgggcgcgaggccggggacccaagcttgggacatcctggcttgggggccactgagctttcctgtgtagagaaggcggggctgcgacctctcccacttctctccacctatggggccccgcctcgggatgggggcggagctgcaccgggagaggcggactcggggcagggaggggctgggaggaggaagggaggaagggaggcgcagaggtctgggttgggttttgggatttgggaggtagaagagattaacggatttttaaaaaagcggtcccgggcgcggtggctcacgcctgtaataccagcactttgggaggatcacttcaggtcaggagttcgagaccagcttggcctacatggtgagaccccccgtctccactagaaatacaaaatttagccgggcgtggtggcgggtgcctgtaatcccaactactcaggagcctgaggca

SEQ ID NO: 31599 - DNA, 1727 bp, Artificial sequence
  DNA replication origin
ttttaagcacgggaataacaagtcttgtttgcgctttagaaagatctccctaagtgcagtgtgtgggataaactgcagggggtgagatggagacaagcctggaggcagaaatcaggtagttcattaggataggctgggctagggatgaaggtggcttggtcgagggctgtaaccgtgaaatgggaataagtgggcctaggtctattttgcaggcagcgctgtcaggatgatggagtgagggaaaaagaaatcacaataatttcttagtgttttagcctacacagctgggcgaatggggagcgacatctatttatgataggagaccttgggaaggactggatttgagggggtggtggagggaaattcgagcctgcttttggctgggagatgctcattaggcatccaagaggaggcgtgaggtagttaaatatgtgaatctgagtcccagggagaagtctcggcgggagattaagtcttgagattcatcagaccagagatggtctgtgaagccgcagatcaggatgacagccactatgggaatgaacaaagatgaagaccggagaccccaagacagacctccggggcagccatcactgagagagggcggaggaggagggggaagtgaaggctcctgaggagaaggccatgtggaggagggaaaccaggggaaggtggagtcggagacattggaagaacaggtaaggaggccatggccaagcgtgtcaaatgccactgagagataggcaggggaagggacctttggccttggtgacatgtaggtcactgatgatctggactagagtcatctcctgtaacggtggggacaaacggctgcttggagcagcacagaatgaaagtggggaggggggaggtggaacagcagatgccagaagggctgggggcctccagggagagtttctaaaggaggaagggtgggcatgttataagcggatgataatgatccgggaaggggagaaaggctctgcagagacaactgcagggccaggccctaaggagcaggagggctggggcccagtgcaggctggaggagcacgatgcagcttccactgtgctctggcgggggaagggggcacgcgtggatactgggtggcaagtgtggggcatggaggtgaggtgtgctggtgtgggtgcatcctttctttctctgaagcgtgtggtggcattgccagctgaaattgaggttgggggtgtgggagatttgaaatgagtcatttcaagagcggggaagtgaagctgtgaaagcacattggaggaaccgagggcctgcgcgaaacgtgtggttttgatttggaaatgagtctagtcacacaggggtgctggttcttgagccatagttggatccaactggagtttggagtttggagtttctctgggtgagcacagtgaatggggaaaaggggtaaaggatgcagggtagtgactgtaaggatggtttaaggacatggtgatggcgctgccaacaggcaaagactgctggttcagagggctgggtgggctcagagaattgctggcatggtgtggtggtgacataggacctacctgagctggaagtacaggaggtgatgttcagagtgggaggcttgaggtgatcagagctgacaagataaggtatgtccacttgagactgtggccaaggtagagtggaggaaagcctgttggtgttaaggagcttctctgaatattcttacttggcccttcccaacttt

SEQ ID NO: 31600 - DNA, 1306 bp, Artificial sequence
  DNA replication origin
accgccggcgccccgcacgcacgcacgcggcccgtgccccacttccccggctggggccgcccgcagccccgccaggaccccgcgcgcccccgcgcccggcctgcccgcccgcccggccgtcggagcacctcgcccgcctcgtcctcctccaggccgctgaagctccacactaccaggccctgcagcagcaggatggccagcgccgtggcaatcgccagcttgtagcgccgcaccagcttctgcactcgcgcgctcgccaccatcttcctgcccgggacgcggggcgcgcgcccagccctgcaacccggccgcgagcgcgcgcacgggcgcggggctgagccgccccccctcctccacgcctagggaggcgggccgggcgcgcgccggggcggggccgggggcggggcctgcggggccaaagcacggcgcaccgcaggctaggggtggagccggggctcgcaacaccttcagtcccggcagtcgcgggcgtgggcttgagcgcgtgccttctgcgctcgtgtctccgccggtgcccctggctcccacgtgtgctcccctccacctggacggcgagcgcctggtgctggggagtggagggtctgcggcacaacctctcttgcctggtgtcgggggtcgtgggcgagttcagtcccacgcgggtaagctctcggtcccgggggcccagggaacgccagggctcccagagacgccgccttgggagagggcgtgtgagagccacaggcgtctgcttaaaaacctggaggccgcacctgcggggcaaagtctaaccccttgactggcatcagagagccttcacgaatcctcctttccgctctgcgctcatcctaagcatcctcaggccgctcccagagtcgtggttctcaaactactctagcgtgtgttggagtctcttggaggtcttgataaaacagatttttagtgcccctcctccctcccccagagtgtctgctttggtaggtcggtagtgaggcctaagcattagaattttcagcaggttcccaggtgatgctgatgcctttgctctgggaccaaacttggagaaccagtagacctcgacacatgctgctccctctgccaagtccccaccccctacaccatcagtggcatcctccctgtgcgtccccagcactgtgcagtgagcaccaatcatacatccggtcgtgactgctctgggatctcgccctgccttggacacccagcaatgctcaagaaatgttgcggaaagcaagcaggggaggcccagattcccgtctaaccagctgtccctaacatttgtttgagaacc

SEQ ID NO: 31601 - DNA, 1869 bp, Artificial sequence
  DNA replication origin
cctagcctgcggtgcgccgtgctttggccccgcaggccccgcccccggccccgccccggcgcgcgcccggcccgcctccctaggcgtggaggagggggggcggctcagccccgcgcccgtgcgcgcgctcgcggccgggttgcagggctgggcgcgcgccccgcgtcccgggcaggaagatggtggcgagcgcgcgagtgcagaagctggtgcggcgctacaagctggcgattgccacggcgctggccatcctgctgctgcagggcctggtagtgtggagcttcagcggcctggaggaggacgaggcgggcgaggtgctccgacggccgggcgggcgggcaggccgggcgcgggggcgcgcggggtcctggcggggctgcgggcggccccagccggggaagtggggcacgggccgcgtgcgtgcgtgcggggcgccggcggtcgcccagagcggagcatccggcccccggcactcccttccccagcaggcctagggagctgcgcgcgggggcagtgcgtgacctggagacccgggccctggtggattgggagtcgggcggggggagcaggtcatgctagggtggtctccggccaagggagcgatgaaggtcaggcgcggcgagcggggctgggaggcggggctgggcccgaacctgctcggaggtggggagccccaggccaaactttctgaagttgggagggggcggggatatgcgcgccgtgggcggaggagtagggccaagggactcagggcgtccttccccagctgagcccgaggggcagcggccggtgaggaaggggagctcgggggtggaattcaggcctgggacaaagtgtgtacccgggaactgaaggaacagggagtgacgccgaaggagagaactggagtattcccgaggtgtggcttcctcagccgggggtttgaagaacctggatgggtctccggagggcagggagaggaggaactgagctggtgagttggcctcaggaccttagggaattagggaggggccctctggctttaagggaatggggactgtaacagagccccagccgcagagcaggggcaaccaacagccgtctcagcccccaagtccctgcctcgagggtctttctccctcttccccgatgtggtttcagcgggaggctcagacacctcagcggtgtggtgaggaagggtccattgggtctgggttcgtgctgcggagatggagaggacaggccacaccacagccctaagctgtggcccagaggtcaggacctccctgcccccagcgcccctgttctgctgcctccagggctccgggtcagagactctatctgctgctgtcctccggcaagccccgatacccgcgaccccttaccgcatctcgccagtctggaaggcctggtgtggagacagaagagctgcccttgcctttttttgggagaacccagagggtgggatggtgatgggggctggaacagagtcacatgagaccataactccaaaaggaggtgggggcgggggtggggctggctccgtgacatccgtggggtgtagacctacaagtaggacaagcaagtaggagagtgtttcaggcccagtgtaagaagactgtttgggcagatgggacattccaagatggaatgggctgccaaagcagttagggagccctctgaccctggaatatgtgaccactctgggctaccgcccccatcccccaccacctcctcctccagcttcctggctgaatgaataggggaatcctgggctggaatgtttgaaaaagcttgtgcggtccaggcacccattgctgcttggaccccctcagctgctccctcacctgactctggggttgccaggcagcataacggggtgcatgggaa

SEQ ID NO: 31602 - DNA, 692 bp, Artificial sequence
  DNA replication origin
tactaaaaatacaaaaaattagccaggcatggtggtgcgaacctgtaatcccggctacgtgggaggctgaggcacaagaatcgcttgaacccaagaggcagaggttggagtgagccgagattgcaccactgcactccagcctgggcaatagagtgagactgcctcagaaaaacaaacacttactgagtgtgtactacagccagacactctcctaggtgctacgactatgtcagtgaacaaaacaggaaaaaagccctgcccttggggaacttacaatcttctgaggagaaagacaaattaaaaaaacagtataaataaatagtaggatgagaggaaatattgtgcgatggtgaaaagcagaggaggagggagggctggcactgtaaatccagtggtctgggtggccctactgagaagatgccatctgaacaaagaattgaaggaggcaaggagtgtgagcagtggggctatctgggggagggtttgccaggcacaggggatagtgggtgcaagggttggagccaggagtgccaggggggatgaggggacgcagagaaaaccactgtggctgcaggagagtgagcatgacaaattcccagatgaggtcagagaggcctgggtggagaagggggcatccagacagctcatggagcctctgtaggctcctgtaagggccttggtttttatcctaa

SEQ ID NO: 31603 - DNA, 683 bp, Artificial sequence
  DNA replication origin
cccttggggaacttacaatcttctgaggagaaagacaaattaaaaaaacagtataaataaatagtaggatgagaggaaatattgtgcgatggtgaaaagcagaggaggagggagggctggcactgtaaatccagtggtctgggtggccctactgagaagatgccatctgaacaaagaattgaaggaggcaaggagtgtgagcagtggggctatctgggggagggtttgccaggcacaggggatagtgggtgcaagggttggagccaggagtgccaggggggatgaggggacgcagagaaaaccactgtggctgcaggagagtgagcatgacaaattcccagatgaggtcagagaggcctgggtggagaagggggcatccagacagctcatggagcctctgtaggctcctgtaagggccttggtttttatcctaagaggggaagccactggaggtttggagcaggggagtggtgaaatgggattttaagagttgtaacagaaacaccagctgctgtgatgagaacggaatttaggggaacaagagtaggagctggaagaccagggaatccaggcagggatagtgagggaggtgttgagaagggatggcattccacatgtattctgaaggtggccccgatgggatttactgatggagtggatgtggggtgtgagggaaagagagt

SEQ ID NO: 31604 - DNA, 956 bp, Artificial sequence
  DNA replication origin
ctcacagtccagaatgaaggacagacacataaagatgagtataatacaaggtggatcatgaattgtagctaatatttattgggtacttactaagtgccagtgactgctgtaagctcttggtgtgttttactccttcagttctccccaacctctgttagctacatgtctcatagattgattcatagataagactgaagcctggtgattgtctacggttttataagtagcaagtggcagagccaggatgaatacccagtggataggtattagtgccagaggtcccacttggccatcaagctctactgtctctgatgataaagtagcaaacagggacctaagttggttggggggggcgctaactcagtctggcattcacggtgttcaggggagatttcctgaaggactaaggaattagctagacagaggtgagtgggggggagggagggccatcgctggggagggccagacgtgggagccacctcctggaaatctacacagcatctaggccaggcagggactggagcgtgtgaggaagctgcgaaagcaggcaggacccagcttccaaaggaaagtggtccgtatcctagaggtagctgcaagtttgaagggttttacgtaggggagagacttggccagatttttagaaagatcaccggggagctgggtgaaagtggatggaaggacagagacaagcactgaggcagtgagtggggaggagagaggagaaattcaggaagaagagttttccccatgatggttattcgggggttaagtagaggacagggagcagttttagaggacacccagcttctgctcctaatcagggggattggggtgatctgatgaggtcagtattggatgtcaacccagtcttctggcgcccagtccgtgccctttcgcctcgtggcactgccagcaataatgcccgcgggccacgggtgaacgtgaaccgagct

SEQ ID NO: 31605 - DNA, 2120 bp, Artificial sequence
  DNA replication origin
ccccacccaagtccaccaggccaagccagcttttcctattgcctaggtgctggcggggggcgggggaggggcgggtaccttccccccagtgcactcgtccagaggtggggcttccgaagctcgccgggacctccaagttcctctcccggggaactgccccgccccctctcttcccgcggggggccagtacctgaggaagcggacaccctgcaacctggcttcctgccaactccgagagagggcggcccgggcccccagcacccccgagctcccggcgcacagcctccccaggcgcagcatcccgacgtagacagccatggctcgctttgccctgcgtcccggcccgagtaaacttttaaagtgagccggggcggggcgggcgcgcagcgggcggggaggcggggagggtggcctctgcctatggggtgcggcggattcggtctccgccggcggggcggggcggggcgcggcggcggcgacttcgcgcggggccaccttcccctccgaccccgcggccctccccctcccaccctcgaagaatagccctggtttcctctggatccgaaggccccagctgcagtccgaaacagatcttcctcgcgaccatcctcaggggcctggatgttagaagcgcaaaaatttgttgatttcctagagggagagccagcagcacatccgtgaggggccagatggcaaggtcaagatccatccatcccctgccccctcgggtcacgtgctggccccgctacttgcgagccgggggccaaaggagcaggcgcgaagcgtccttgaggcatgccagctggagcagagggccccgcggggttggggaggcagccagaacaaagggtgtcgcgggtgagccccctgcgggcccgctggcgccagagtcccagctgaggccagatgtcagcttcagaaggaacaccagttgtaccccatctcacaggaggcatcctcccatccctcctcggcgcctctgccttgaccttctgcacagggttgggggccggacacgtaaggtggcctcagggactgggacctgtgtatttcatcctccatctgcctgtcttggggcctgtggcacagttccctgtgctgccccaggtgtgaatggaaagcaaccctatgcccctccttagggttcctgaggcccaggggtgagtggggtactaagacctgggcagagctgcgggacagagaaggtgatagctctggtcctggctaggaaaagtggcactgggcaccaaagagtagcacagtttatacctgttccaggtccacactgcctcggcctagccatgactcttcctctagagaaggagctggagaagaatggggcaaaggccctggcagtgtgacctcccctctcctgactggaggagatgaagtaaaccctgccaggcagaaggggtggctgagagtggagcctggcctgaggtgacctttgcccttatctgggaactctggctccacttgggtcatgagaaggagtccatgctgggcctctttatgatcttgagcgtgacctcaaatcctccctggaaccccggttcctagggagggtccccacacttcagtttctgtggggttggggcaggaagagacagaggaacaaagagatcaccggaggctgggcctgcaagggtgtgctttcctaattagactaactgtctttgatagcggaccagggaatgtggagggctggggcattcacaagtctgggttcccagccgtggctggcaggcttagcctctagcatgctgggtgaccctgggtaaaccactgtccctctcttggcctatgaagtgtggggtgggtactgatcttgtaggtccttccactcttctggctagtttgagggtcagtcctagagtgggagagaagtgagttcctccttgaactttgctccagcctcggcttttcaagacactgggctttcctgactcttcctaggtgcacaggccgtggcatcatagccatcagtttcagggtatcttgtacatgccaggctcttcaaggacattttctctgaccctcacaaacaccctgcaaggaacaggcatggcttggaatgtgtctttgtttttatggatgaagaaactgaatcccaaagaggt

SEQ ID NO: 31606 - DNA, 1348 bp, Artificial sequence
  DNA replication origin
caagtagcggggccagcacgtgacccgagggggcaggggatggatggatcttgaccttgccatctggcccctcacggatgtgctgctggctctccctctaggaaatcaacaaatttttgcgcttctaacatccaggcccctgaggatggtcgcgaggaagatctgtttcggactgcagctggggccttcggatccagaggaaaccagggctattcttcgagggtgggagggggagggccgcggggtcggaggggaaggtggccccgcgcgaagtcgccgccgccgcgccccgccccgccccgccggcggagaccgaatccgccgcaccccataggcagaggccaccctccccgcctccccgcccgctgcgcgcccgccccgccccggctcactttaaaagtttactcgggccgggacgcagggcaaagcgagccatggctgtctacgtcgggatgctgcgcctggggaggctgtgcgccgggagctcgggggtgctgggggcccgggccgccctctctcggagttggcaggaagccaggttgcagggtgtccgcttcctcaggtactggccccccgcgggaagagagggggcggggcagttccccgggagaggaacttggaggtcccggcgagcttcggaagccccacctctggacgagtgcactggggggaaggtacccgcccctcccccgccccccgccagcacctaggcaataggaaaagctggcttggcctggtggacttgggtggggagggggctttggttggtggctgcagtgacttcgagttctggtccaagactctcgattccttctcctttatgggcacagagggcaaggagtgtgggctttaaggagaatattccgatggggaggggcaagggccaaggcctgggctgtacccccaggacactgcctctgagttggaaccccttcatgggcaaacttggggatcagccccagtctccccgacccaggccactaaacttagcagtctcctgtctcctcatcagctgctcactaacatggctttaattctttgctgcctactcctgggcctatttccttctgtcctcagtgcaaggggtgggatggaagctggcaggcagaggatttcagttcccagtagcttcactgcctctgcagcagcacagtaagtaaagctgccttcccggtgtgaccagtccttgggaggaccccgtgagatggcaaatgtgaaagtgcttgagacacagagagcaggctgccactcatgttatcagggctgttagcttcagcagcaccactggggagccctgtgcactactgagcctgtcctaccactcaactcggccagatactaagtctat

SEQ ID NO: 31607 - DNA, 822 bp, Artificial sequence
  DNA replication origin
gacatggggatgagtccaggccagatgttcaaaggagaccctctcagccagccctccttccagaaagcagatgtgagaaaagatagtctgacctcatcagcacctggtgggtgaaggagataggtggcaggggagtaaatataatacatacatacatttatatttatagaaatctcaggaagaaattgcagcatgggaagatggacagcaaagcaccgatgtcctgctagaacgtcctggcaggtgggggctggcagagttggggcatgggctttaaaaccctttctggaagcaaggggtggggcaaggatctgatgattgtttccacgtggcagggaaagaggaacagaggaaggatgatcctgggagggtggccatcctgatgaccaacctgttgtggttctgattgacttggggggggggtctcagcaacagcttctccaagaggagctggagggtggggaaggcatgaaggctggggagaggctcagccttccttctccccaggacactgctgggtggagctgggttggtagtggagtgcccgaggccccctgccaggacgtgtctaggtgtaggcagctctgtgcatcagcagaggctgtggggagaaggtatgggtggaggtgagaaggtcagtagtctctccggtggaaggcagaggccagtcaccaggactggctgggtcagaacctgcaaagaggcaaagatcgatgtcagtactccaacaacacagatgatgcttgaagaaaatggtggaagtcctgggcaggaccttttcctcccttcaacaggggacccagtcgtcccctcctctctctg

SEQ ID NO: 31608 - DNA, 1050 bp, Artificial sequence
  DNA replication origin
cagccttccttctccccaggacactgctgggtggagctgggttggtagtggagtgcccgaggccccctgccaggacgtgtctaggtgtaggcagctctgtgcatcagcagaggctgtggggagaaggtatgggtggaggtgagaaggtcagtagtctctccggtggaaggcagaggccagtcaccaggactggctgggtcagaacctgcaaagaggcaaagatcgatgtcagtactccaacaacacagatgatgcttgaagaaaatggtggaagtcctgggcaggaccttttcctcccttcaacaggggacccagtcgtcccctcctctctctgtaaaaatggagggtctgcctgaccctccagggccagggggtatcctggaagataccagctcacttgctggaatcaccaaagagggacataggggacctgtttacctggcccccacctgtttaatggcggccagctttcttggacctcttggtggggaacttgcagctgcggaaggcgtccgtgtcacggatgtgctggcccttgaacttggcaggtgaggcacaggtggcatctgggcgggaggccttggcttccagccacctggagagacagaaacttgctggggctggggaagaaggtgggagtgctggggggaagggcagtgaactatggggccaggattgacttggccacaggatagtctgaagctgtcatcttcattttacaaatggggaaactgaggctcccagggtcccatgcttattaggtagcagatctaggatgcatgtccaacatgtcttagtgcagggctaatgtgcctctatcacatgagggtgggctctgggagtgacatggaagtgttcttaccgccgaaggccccggagctggcaggtacacttccaggggttattggtaagggcgagggtctccaggctgtcgaaggggaagttggagggtagctggttcaagcggttgttctccaaatggacgtgtttcagcgtggttacacccaggaaggcaccatctgagaactggggagcaaggtgggagcaagg

SEQ ID NO: 31609 - DNA, 826 bp, Artificial sequence
  DNA replication origin
ccagcaccgggaagttgttgcgctgtaggttgagcagcttggtcttctctgacaccttggggatcttctgcagccccaccttgtcgcagatgacgtgctgcaggtcgctgtggcagtggcagttctgggggcaggcggccagcgccggcagcagaccagccaggaggccgaggctgagcaagagcattgggcggaccatggctgggacgcctggggccggggctgggggcagcagcggcggcggggcgcgggcagcggcgagtcctaggcgctcgggtctgccgccctctttatacggtggccctgaccgcagccggcagccgagccagctcctacgtggagcatcgaggccactgggcttaactcgctcgcgcccagagatgcgcccccgccctccacggggaagggggcggggccgttcccccagccggctaccgtgcatgagggggtgggaccgtggcccccgagccccgagccctgagccccggctgtagccccccgctctcctatggtgctcctctgcctaccgcctttcccggggcttttctgggaagggggaatagttatgtctggagccccgagtttacatcggagagagggaggcgttccctcaacttatttgtttgctcaggtttgagcctccacgccgcgccatccacacacgctcggccgggtgccctggatgcgaggcgggaggaagcggggccggacagctggatgcgtctccctgcggtgggccagctgcctgcgctttaaaggggcgcttgtgcggcgcctgccgagcgtgagagccgccccggcgtcggtctcccacttcagactcgac

SEQ ID NO: 31610 - DNA, 1368 bp, Artificial sequence
  DNA replication origin
cgcccagagatgcgcccccgccctccacggggaagggggcggggccgttcccccagccggctaccgtgcatgagggggtgggaccgtggcccccgagccccgagccctgagccccggctgtagccccccgctctcctatggtgctcctctgcctaccgcctttcccggggcttttctgggaagggggaatagttatgtctggagccccgagtttacatcggagagagggaggcgttccctcaacttatttgtttgctcaggtttgagcctccacgccgcgccatccacacacgctcggccgggtgccctggatgcgaggcgggaggaagcggggccggacagctggatgcgtctccctgcggtgggccagctgcctgcgctttaaaggggcgcttgtgcggcgcctgccgagcgtgagagccgccccggcgtcggtctcccacttcagactcgacgcgccgaagctggccctgggtagacccgagctccttccccaccctcgggcgcgcccccacccctctcttccaaccccgcttgcgtttctgtcgccggcgccctcatcccctttttccaccgctgaaggctaagcagagaagtgggaagtgggggagagtggcccacaggaatggcaaacacacctggaaaccacaggccacaagcacagtcgcaccatcccccctccttcatcgccccgaaatatctccatccctcatccccaaccctagtggtcaggacccgcccctgaggggtctcagggtggcggctgagtggcgccgaggtgtacttggcagatgccacattcgggcggtggccccaggactgtgaggaggggtgcgggagggggtggggcaggtcgagggaccagccctggacggctctggctgccagaccctaagttctgtgggcagtcccgccccagcccgccagatttctgtgtgcccacttgccagccacgatgtccggattcctgtggaaaggggagggtgagcaggcagggtcacagctctggcctcagggtgagctccaagctgcctggcacaggatattgtctgtgatgaggggtggaaggagaaaccagaacccacattgaaccaaaccccagccgtgccagagccagagcagctgatatgggggaagcttggtgcagggaggaggatggatgagatctggtatccgttgattaaaggggacctaggatacggggtaactagcctctcttcccttacccagtaccctcgtgttggggcctggtttccagggcctgcccttttcccaaacctctctgccccttgcctctaggataggagggtcatacttggcctagaccattccttgatggtatttaggcttctccaaggctggcttctg

SEQ ID NO: 31611 - DNA, 1085 bp, Artificial sequence
  DNA replication origin
aaggggagggtgagcaggcagggtcacagctctggcctcagggtgagctccaagctgcctggcacaggatattgtctgtgatgaggggtggaaggagaaaccagaacccacattgaaccaaaccccagccgtgccagagccagagcagctgatatgggggaagcttggtgcagggaggaggatggatgagatctggtatccgttgattaaaggggacctaggatacggggtaactagcctctcttcccttacccagtaccctcgtgttggggcctggtttccagggcctgcccttttcccaaacctctctgccccttgcctctaggataggagggtcatacttggcctagaccattccttgatggtatttaggcttctccaaggctggcttctggtttttctgttgctcaggctttccaaccactggaaatgggggaggtggggtgggggtaccactggtttttaaaatcactgcttaggttgtttttttattttgatggaaataaattcacgggaaactctccagagcttgggggacgcctgccccaaggccaggcacttgttcagggtttgcagaatgcgggggtggggttgtgtctgtgccactcctagctgggccaaggcaggctggctttctcatcaagtttatggggccttcagcttggaagggaggagccggggatgtggcctgaaatcaggaaggtggggttaaggcagccaggggatggggggagaagtgtggggtgttggtaataccggagccacaggcacagacaggtggctgctccagggaaacggggcactgagagagctccagctggaagagaatggtgtccctgctctcaattttctttcagatctggggccctgcagagatctagtctgctcactcccagcacctctgcctcctgaccccaggcccctaccaatgatgtctctgtttccaccattcggctgccctccactttcccttttcttttatgaattccttcccatttcctcagatagctcacctgatccctctgcacgtgctgagccctcttcaaacaccctttctggaccctctaggttgcttatggaaccac

SEQ ID NO: 31612 - DNA, 1837 bp, Artificial sequence
  DNA replication origin
gaacctgcctaacagacagctgggttctgatccagctgtgtgaccttgagcaagatacggaacctccctgagtttctgttgggtcattggtgaagtgggaccaatggctacttgaaaggattgttgggaagatttggagagaaaataatgtgaaagtacctagcacagagcctggtactgaaaataccttaaacctatgttcatttcttaaaaagtcaagaggaggctgctgctgccttgggcaggcacgctgggaggtaagggggcaggcacgctgcgaggtaagggggcaggcgcgctgcgaggtaagggggcaggcgcgctgggaggtaagggggcaggcgcgctgcgaggtaagggggcaggcgcgctgggaggtaagggggcaggcgcgctgcgaggtaagggggcaggcgcgctgcgaggtaagggggcaggcgcgctgggaggtaagggggcaggagcgctgcgaggtaagggggcaggcgcgctgcgaggtaagggggcaggcgcgctgggaggtaagggggcaggcgcgctgggaggtaagggggcaggcgcgctgggaggtaagggggcaggcaggaggcaagtttccattcctgtgaactgggaatctatgtgccttttggaacccagctgtttttatttcttgggtcaaggtacaacctgctttatctggccctgcctacgagggatgccccaggttcaccaatcaaaacaaataaaaactaaaaatgaggttggttggggaggaagggggctgggagatgggagataatagttaaagagtatggggtttctttcttaggtgatgacaatatttaaaattgactgtggtgatagttacacatatttgtgaatatactaaagaccactgaattctatactttaaatggtagattgtcccagcactttgagagactgaggcaggaggattgcttgagcccatgagttctagaccagcctaggcaacatagcaagatcctgtgtctatgtttaaaaattagttaagacatggtggcacattcctacagtcccagctactcaggaggctgaggtgggaggactgcttgagcccaggagttcgaggctgcagtgagctatgatcatgtcgctacagtgagtcactgcactccagcacgggtgacggaatgagatcctgtctctagaaaatgggggaggtgggagtgaactggagagtatgtgaattacatctcaatcaagctgttatacatatataaaaagaatacttcttgctagactaatctggcaacaatgtgaaaaagaattaaattagagtagcttaaaaataaaaaattggggccaggcgcagtggttcatgcctgtaatcccagcactttggtaggctgaggcaggcggattgcttgaggtcaggagtttgaggaccagcctggccaacatggtaaaacctcgcctctactaaaaatacaaaagttagttgggtgtggtggtgggtatctgcaatcccagttacttgggagggtgaggaaggagaatcacttgaattagggaggcagaggttgcagtgagctgagatcgcatgactacactccagcctgggtgacagggcaagactctgtctcaaaaaacaagaacaacaacaaaaatgggttggtatctcaaagggataccaagggtgagggttaaattaagtagataatccacatcaaggtgctctgcactctcaatgacaaggaataggacgtctgaaagtgctagttcccctcagtgtcttcccttctccatcctgtagtagctgccaagagagcccaccagcaagaagccaaagaaaacagaagctctttatgccaaa

SEQ ID NO: 31613 - DNA, 1469 bp, Artificial sequence
  DNA replication origin
cgtgggctccgcccccgcccctactcacgtgtacgtaaagcgccgcgcgccggcccgcaggctcaggactcggggaccctcctgcgttctccacgcggcggcgcctctgggccgctctggctgctgccgcccagccgcgagcccgggctccggggagcgccatggcgcccagcgcagcgcggcgcactgacccgagcaggagacgcgcgcagggatcactgtgagtgcgcagccggcggaaggaagaggggctgcgtgaccgcgcgacaagagggcccgggcccggggctgcggcgccacctgccgggcgcccgggcgctcactgcggcctcctgtcggttctttccccaggccgcgaggcgggctgcttgccttttggcaccttgtgcccgggcgagttcccggacccatccaggagctcttagtttgttcagtcaattccttgacatttgatgtgcctggctcagaactgggcgctggggacatctaggtgcataaagccaggttgcattctggcaggagagaggcaagccaaccggccaggacaggcaaggcgtattaattccgtgcctgctggacaccagagccgtccgcctcagtgctgtgaggtcatctgttttaagagtgtgggagtcagtagggcagaagagacacttgggctggatctttcttttaatttcatttacaaatatttgggagaggggaggtcttgaactcctcggcctcaagcgatcctcctgcctcagcatctagagtaactaaggattaagggcatgagccaccaccagggctatgcacgggatcttggaggagcagaaaatcccaggggcaattggcttggccgggagagtagactgttttgggtcaggccaacccaagcatctggaggtgtacgtgctggaaggacagtcagatggtgtgtgtaggagagagggggaaggcgcaggggaaggcctggggaagcaggcacctgaacaactgtcccacaaagcagaaacatcatgggcttcagaggcaggcggtgcaggacagttctcccagtggccttgaactgacctggttctcccctcctttcttgcttgtagttctcaagaataactgtagacgcctgtaatcccagcactttgggaggccgaggcgggcagatcacttgagatcagaagttcaagaccagcctagccaacatgctgaaaccccgtctttaccaaaaatacaaaaattatccaagcgtggtggtgggcacctgtaatcccagctacacgggaggctgagcagggagaatccctcgaacctgggaggcggaggttgcagtgagctgagacagtgccactgcactccagcctgggtgatggagcaagactgtctcaataaataaataaataaaactgtagagtgtgcagagaatgcaacatcctgagggaaggaaggactggccagcacagccatgctctgttccagtccccctagaa

SEQ ID NO: 31614 - DNA, 1303 bp, Artificial sequence
  DNA replication origin
ctgaaaggcccgatccccccccagaaccgctgtgaggggggcagagggaggtccctcgacaggatgtggccttagtcgaggaaggcgggaagcaggggctggcacccccgacgccccacccgccccccgtggcctagcagcagggcggggcgaggcgggtcatgcacccctaccagccagccactcccacccagccctcggctcccgcaactcgcgggggtcctcgcccgggtcccccgccccgccccgcccggctggtgacgtcacggcgctcgtcggcgccgcctgtggcgtcacaggccgggcccgcagggctttctaggggtccgtcgctcttgaagccgccggcggcgggcgcgtgcgcggcccgatgaagaaggaggtttccaagccgtctccgcccaagttgatcggtggatgcgcgcccccgcgcggggcaccggttgctgtggacgcagtggcggccgttggctggcgggtgcggcgcagcctcggtgtctctgggccggcggtgcagggcaacgtttcatggtgccgggcggcaccatgaagtctctaaagaaggattcccgcctcagaataactccgaccagattattagaggcctcagagaatgtcaaaggttggcgctggctgccttgggcgctcgggagaacccgagaggggaagcggtccccggaaagagttcaggacacggggcctggaggatggggatggcaccagggatggaggaaagatcacggggaagtggggtactgggcataggacccttagggatggggggcaaggcaggaagagcctacagcgcactgggccttggggatggggacataggaagtgggagactgacagaggggcctcagggaccactggctggggagatggccttgcgctacctctaaccacatcttagggtggcatgcaggaggcaggatccccggactggatgaagtgcagaagagccaggaaagagtttaagggtagaagggccaggaattggggtccttgggaagaggaaagaatgaagtgttgaaaccagccaccttgatgggattatttggtagaggagggtcggggagcggggcaggcgtcacttaggattcctgctggaaaaacccagaagaaaggccttgcttggctagttctctttttgactgccttttcctaccacgtgcactttccagctggatgacacttatccagctcctttagcctggaaagaatcgctagatatgactgcttcctaccctctacagctttcttctggttgcacctgggagagccacagggcgtctgatagcgg

SEQ ID NO: 31615 - DNA, 1644 bp, Artificial sequence
  DNA replication origin
attggcgcccgacgtgggaggaagaggacagaggctgctcggggtgggcccctcattccccagagcctcaccatccccttgccctgctcacccacagggctgctgggcttcccagagggcagggcctgctccagcccctccttggtctctgtggattctggaggtttggcaaatgggtcaaaggtcgaggcaccacctcggaagagagagaggaagaggagatgggttgacaaaaagggcaggtgttggtctgacccctttccagagaagctgtcctcctaacacaaacagtatctgctgccccttggccctgcctggaagtcccccagctcctcactcacactctctggccctcttcttaccaggtgtgtcggaggtctccagggaggctccccaagggtcagccccagtgctggggagtttgtggtggggagagttcagggcccaggggtctgtggtggggggcccagcaggcagcactggggtcctgccccagggctcagaggaggagagcatgggagtcagatcccagggctggcttcgggacaggacggttcctgaggggatcggagaccaggggtctgcagaaggcccccaggaggatccactggcctctgtgttcggcctaaaacctgaaatgggaacagcatagacatgatcccaggcccacccttatccctcgcccagggcccttcccagttacccagcccaagttgggaggcagaagatccatgtcacagatggcctgcagcctcaggaccacccagcaggctggagcccctatttgacaagtgaccccaggaactgggacctgcaggtgtgggcgactcaggccaccttcccaggcgtgctgagcaagtgagtgcagcgagagaacattttgctgcgtttcctaggagctgggcccttcagacattctccatagccctcactacgaaagcctgtcccacaggcggcggaggctcaaggtggtgagtgacttgcccggtgacactcagattttgggaggaggtgcttggcccagcaagtggctgggaaggaggaggctcttgggccagcctggaagtctcttgcagccctgcatgcccacctgggatgtcccatgggtcagcagagcagtgtgtggagggcggggccagggcaggtacgaagatgtcagccaagtccaggatggaggactgtggaggggagaggcagccgcggctcagaagtgggcggggcctggagggagggcaggccctgacctgtcaggctaatgccagttcattctctttattcattccacagatacctattcatgatccctcacctctgcacagtgctttacagtttataatgtttcttcatccacagagtacctgattttcataacaaccctgtgaggtaggtagggcagatgatgtacccattttatggatgagccagccagcgcacagagggtggaatgggtttgcctgaagtcacacagccagggagaggcagagctgggatagaatccaggccagcagaaaggggcaggaaggccaaaggcagatgtttttcaaccagcctacctccctaggtcagtgtccaagagaaactggccacagtgaacatggacggaaaggagaccacagcacccgggcgtggcatggacagctttgg

SEQ ID NO: 31616 - DNA, 1329 bp, Artificial sequence
  DNA replication origin
gagagctgagaacgagggttccagtctttattatgcgggcgttcagtttctagctcccgggccgtggtccgcgtccagcttccagagccgccgcgggataccagccgccactggctcggcgttccactagcaccggcgccccgcccagccccgggtccggaggcggggccgcggagcgtccggcgcaggcgcaggccggtatgggacggggcggggctcagaggaaggggttggtgccggtctgcgggggcgggggccgcggcccggctgagctcggcgtgggcagcagcggctgcggtgcgaaggctccggcctgcgggaagacgctaaccgaggcggggagggtcaagccagctggcacgctgctgagcgggaggggcagagaggcgctgtaggtcatggagcccaggggcgcccccacaggcccgcctgccaggcccagcgccggcgagccggtgcgcatctggtttagcgtcggcctgcccggctcgcccgcgccgaacgggttggtgggggacggagcgctgagacctgcagaacgagagtggctttgagtgacccggggttcagagccctacaccgggaggtcgtggaagttgggaagaagagtgggctcctccggcggaggctaggctctgaaagcaggagcccctgggttgagggacaagggcatatcttacctgtcaggaaggggttccgggtctttgcaacctggggtgccttgaccaacgagtcaaggttgaccaaggaggaagctgagggacccaggaaggactcgggagtccggcaagctcgggcctctttgcttggctgggttagtgcttcccctagtatgcccaggtccagggcatctggctccttcgtgccattttgcttggaactggggctggggtctccaaacaggtccagctctggaatagaaatgctagagctaattggtggggaaagggattggcgcccgacgtgggaggaagaggacagaggctgctcggggtgggcccctcattccccagagcctcaccatccccttgccctgctcacccacagggctgctgggcttcccagagggcagggcctgctccagcccctccttggtctctgtggattctggaggtttggcaaatgggtcaaaggtcgaggcaccacctcggaagagagagaggaagaggagatgggttgacaaaaagggcaggtgttggtctgacccctttccagagaagctgtcctcctaacacaaacagtatctgctgccccttggccctgcctggaagtcccccagctcctcactcacactctctggccctcttcttaccaggtgtgtcggaggtc

SEQ ID NO: 31617 - DNA, 1571 bp, Artificial sequence
  DNA replication origin
ggcgagccgggcaggccgacgctaaaccagatgcgcaccggctcgccggcgctgggcctggcaggcgggcctgtgggggcgcccctgggctccatgacctacagcgcctctctgcccctcccgctcagcagcgtgccagctggcttgaccctccccgcctcggttagcgtcttcccgcaggccggagccttcgcaccgcagccgctgctgcccacgccgagctcagccgggccgcggcccccgcccccgcagaccggcaccaaccccttcctctgagccccgccccgtcccataccggcctgcgcctgcgccggacgctccgcggccccgcctccggacccggggctgggcggggcgccggtgctagtggaacgccgagccagtggcggctggtatcccgcggcggctctggaagctggacgcggaccacggcccgggagctagaaactgaacgcccgcataataaagactggaaccctcgttctcagctctcaccaagtggactttttgcggggtgtggcggccgggtctcgaccacagcgtggatcaccggctgtttaggaaactgcagctgcacaacgtggggtgcaaaactgccccgcttcctttacagctcttctcaaccctcacctccatcccccgtcacccaggcaccttcgcttccagatgctgccaggctgtcactcaattcggtcatttcattcatttatcacacatgggcactggggttgggctaacagcaagagacaataggcctttgttcctatttattgggtactgcttacgtgctaagcagatcagtttatttaatgcttgcaacgactctctgaggtagaaaatattgttaattccgttcaggatcccggctacataatctgtggggctcaatacaaaataaaaatgtaggggctccttgttcaaaatcgtatgaagaatttcaaaacagggacaacagagcatgaaaccaagcgcaaagcccactgcagtgcgattgcacaggtatctcaccttgcagccggcactactcccatttttcaggcaaggaaaccgtggctcagagaggttgaatggcatgctcaaagtcacaaagctggcatggggcggggctggaactcaagagtcagacagtctggctccaaggcctggagatcccaggctgggccccagatttaattcagcaaatattgactgactgctgtggacaaagtgctgggctcaccttggagggatccaacctccaggagctcgagcgcagcagggtagacaagccaggggcacgtgatgcggctgtggcagaagccaagtgcaggagctcccaggctcctttgttttactgagtcaccttaaatgtaactctgccctctcccttgcttcgccaaggctagcgagaaactcagtcttagccacacaggaggaatcggaccccttctgggggtttatgtggagtctgggaaaccaagggtggggtgaggcctggtactcaatccaggaggggcccctatgaccaccctcgcctgtttttcttctcaatgctccctgatcactggaccactggacactgatgtgtcctc

SEQ ID NO: 31618 - DNA, 1192 bp, Artificial sequence
  DNA replication origin
gggtcttgactgttgagaccatgtgggtgtggagctgatccagggagaccatgcagaggagcagagaagagggctcaggtccaggcttaagtaagcctgtgaaagacacagatggaggcagggcatggtggctcacgcctgtaatcccagcactttgggaggccgaggagggtggatcacctgaggtcaggagttttagaccaacctgaccaacatggagaaacccccatctctactaaaaatacaaaattagccgggcatggtggcgcatgcctgtaatccttgctactcgggaggctgaggcaggagaatcgcttgaacccgggaggcggaggttgcggtgagccgagatttcatgattgcaccccagcctgggcaacaagagcgaaactctgtctcaaaaaaagaagaaagaaagaaagaaagaaagacacagaagggaagcagccagggtgcaaaggacagcaccccagagatgaaggacagagtgcctacatgtcagactcctgaggggccagcctggctgggacagaaaaatgtccactggcttcagcaacatggaggccattggtgtgcttagtgggcgtcgttctagtgaagtcaggctgagagcagaagttgccgagtcggctgaggaggaagaggaaagggaggggagacagagagagatgatgggtgcttgacatgagaggatagatgggaagacactgtcaagatggatggagctaattaagacacatttcgatgggaaggattcgtttgagagaaagtggtggacgccatcaaggatagaagagatggtggtcctgggtgactctgagaatgtggggtgtggcgggttgttggaagggttggctagccggagggtccagtgggtgctccaaagaacatgttctggctagaaggaatgaggttaagctcagagagccagaagcctgccttgaatgtagaggaatctggggtgatgacaaacctccaagtgtgaccatggtgagggtcattgagaggtcaaggggccataaggtccttggataatggagcgacttgaaattgaggtaagagctggatgagaagaccatgagccaagaccgaagcatcccaaaagtgaggtggagtggcagccccaggcagggaagagacagaatgacttatggcaccaacctcctagcaggaggggtcttataaggaggga

SEQ ID NO: 31619 - DNA, 1454 bp, Artificial sequence
  DNA replication origin
agtccgggctgagcaactgcagaaagagggaagacaggcagtagatgagggcagaggcaagatcttggagacactcgtgaactgtaagaaggggatttttattttttgagacagagtctcgctctgtcacccaggctggagtgcagtggtgtgatctcggctcactgcaacctccgcatcctgggttcaaggctggtctcgaactcctgacctcaggtgatccatctgccttggcctcccaaagtgctgggattacaggcatgagccaccatacccgaccccatttttttttagccagagtctcactctgttgcccaggctggagtgcagtggatcttggctctctgcaacctccacctcctaggtttaagcgattcttgtgcctcagccttccaagtagctgggactacaggagcgcgccaccatgcccagctaatttttgtatttttagtagagacggggtttcgccatgttgcctaggctggtctcaaactcctgacctcaagcgatccatctgcctcagcctccgaagtgctgggattacaggtgtgagccaccgtgcctggccagagaaggggatttttgatgacagtagaagcaagctattgaaaggctttagtcaggagggttaccagttagatctgcgttttggaaagatcccaccagcttcccagtggagaatgaactggaaaggggcaagagtgaaagcaggggcagataggaggctatagcagcacccagggggagatgggggagcagagatgcagagaaagggatgggctggaagtcggtcaaggaggaaacgtcgtcaggatgggcggcgacaaagaaggcggtgtccagggtgacttgcaaggtggggccgttccctcaagagagggcatggggtgggggtggggggacaactcatggggttcattgtgggacctgtgggtttgagatgtgcacatggaggcagagatgacactgcttggaggacagaggagaggcttcaggagagaggattgggggtcttgactgttgagaccatgtgggtgtggagctgatccagggagaccatgcagaggagcagagaagagggctcaggtccaggcttaagtaagcctgtgaaagacacagatggaggcagggcatggtggctcacgcctgtaatcccagcactttgggaggccgaggagggtggatcacctgaggtcaggagttttagaccaacctgaccaacatggagaaacccccatctctactaaaaatacaaaattagccgggcatggtggcgcatgcctgtaatccttgctactcgggaggctgaggcaggagaatcgcttgaacccgggaggcggaggttgcggtgagccgagatttcatgattgcaccccagcctgggcaacaagagcgaaactctgtctcaaaaaaagaagaaagaaagaaagaaagaaagacacagaagggaagca

SEQ ID NO: 31620 - DNA, 1496 bp, Artificial sequence
  DNA replication origin
gggcacagggtactattggagaaaggcccttgacccagcatccagcactggggtgcaaggaaggcttcctggaagcagtgtcagaacagtccctgaggagctggcactgcactggaaggaaggggagaggagggaagggatgaggacgggagaggaggggaggagggccttacagccagagccaggtctcaggagcagaccggaggtggggtgggggaagggccaggcatgcaggggtggtccagactggcactggggaccggtgtccggaagaccctccactgggcccgcaggcaggcgcagggagtgccctaggggcccgctcgcccgcccgtacctgcggctcgcggcgaggcctgcaccggcgcggggcagcagaaggacgcggcccaaccaggcccgcgcgcccagcatggctgctcggggccgtgggcccggccgctgaggacaggaagggaagtcaggaggctgcgaggggcgggccgggcacctacggagccgcgggcgggtcttcgccgggacttgggacagtgtggctggtctccgagcgtcgccctgcggcggagcgcagaattgcagatcaggcacccgagccttgggaggacccattctgtgcataaaactgggctctgcccctgcctggggaggacagcccttctcaagggaatagggagagttgtgggatctagggctgggagatgctagggacatgggatgccagagcttcagctcattttgtccaacccctgcccattttacaaatgagaaatgagatccaaggcgaaggcgtaccttggccaggtccaccagctaacaaggtttgctttttgcagcctcctcgtctctaggtcctactcaaatcctacccactccaggaagtcttccttaaataatactgatgagcccattttatgtctcataggttacacatggcctcattggctacattcagccaatatttattaagtgcctgccgcctgccactctgcaaggcactgagtatacaatggtgggcagagagaaacaaggctcctgccctcacatggctcacagtctgttgagagcggcagatgctaattcgacagccataccgataaacacccacgtgacaagtccgtgagggtataacgtaacaagtgacctgatctggtggaaggggcaaaggatgaaggcttccctgaggaaatcacatttgtgaagccatggagaacgagagaaaggaacttggagggtgctcagggggagtgctggggaaggaggcagaggtacagtttgtgcaaaggtcccgtggcttgtcagtgagtccgggctgagcaactgcagaaagagggaagacaggcagtagatgagggcagaggcaagatcttggagacactcgtgaactgtaagaaggggatttttattttttgagacagagtctcgctctgtcacccaggctggagtgcagtggtgtgatctcggctcactgcaacctccgcatcctgggttcaaggctg

SEQ ID NO: 31621 - DNA, 1027 bp, Artificial sequence
  DNA replication origin
tgttctgacactgcttccaggaagccttccttgcaccccagtgctggatgctgggtcaagggcctttctccaatagtaccctgtgccctgtcacagtcctttattgctgcatggacctttcgttatttaggtctgcctgcagtcccacttccaggctgaactccctgaggtctctgattccctaggtgtcctggagtctggcccaggacctggccccacaggagtcccagcaggtgggcgctgagtgagggagtccccatgtctggtttcctctgtttgtccctcacctggtcgagtcccagaccctactgatcttggcctgtccagccaccaacagtaggctgccttccagtggggccacacccaggcctgccagagagatgcctccaagcagctgctccaggaagggccgggggaggggcctggggaggggtaagaatggagccccaagaaccattctgcccattgtgacccgccctgacctcacagccatccttcccaccgccaggcccaggaggttgggggagactaacctggcaaggagcccccaatgagccacctctcctcaccccccaaaaaacataagggggagcacaaaggccacagtctcccccatggttcagaaaggtgggttgggctgggagcaggggtcctactggggtgctgagtgaaatggagcaggtgctggggggcctgggagaaggtgggtggaggcccctggcttgcctgatgcaccagtcctcgccaggggtagctcctcccgggacaaggaccgaagtgcgacggtcagtagttcagtgcccatgcctgctggagggaaaggaagccatccttcatctacaccccagagggtccccaaccgcctgatccacgagaagtcaccatacctcctacaacatgcctacaatcctgtggactggtgagcacctctcctggggccctgcctggaatcgctggggtcctgggcccctcccagaccccctgggctactgagtgatgccccaccctgctgggtctaggtacccct

SEQ ID NO: 31622 - DNA, 1202 bp, Artificial sequence
  DNA replication origin
agagtcaacccacaggacagaaggtaatagcctaagccagaggtcagaatatcattggttcacagaggaccagtaagttacttgtccccctagagcccagaatgtcattagccaagtcagggtcactgggtcactgaccaagtcaggggacagaaggtcatcatctaggttaaggtgagagggtcactgctgacaccagcagtcgggtcttcaccgatagctaccgacaggctaggggcaaggaggtcactgccagtcaggaggacaggaagctatgggtgaggccaggagccagtaggtccctgaccagcataggaatcagaaggccaaagcctgggctaaggcgggcgtggggcactgacccggcgtgggaaacttgggggcctcagcgaagccaccgtattcctcatcatagccctcatccagctgctggaagcagcgattgttcacggtggcggcagagggcggcagctggcggtcacccacgctgatctctgatcgggccagcagggcagtggtgacacgctggctattttctagcagggtgttcttgttctgtttccactgcgggaggtgggggcacacctggaggtcagctagggggaggggctcttgtttcctagtcccccaccctggtcccccaactcccggaggcacacccacctgttctcgtattctcagcaacactgtgcggaagccgactcgggtcaagccatcctcaggagggaaataggtgcccccgacaaagggctggaggttgggagtcagccacacattcatgggccagcccccgccgctgctggtggcctggcggagagagggcgagggtgaggggagctgctctgagcccatgtggcgcatacactcccgaggagggctgctcacctgcacgaacgtcatgtacaccttgtccacgtcaggccgctcctcacggtctaccttcacactcacaaagtcctcactgagcaggcggccaatctcctcattctggaaggactcctcttccatcatgtggcaccagtggcaggtggagtacccgactgaacagggccatggggagaggtcagggggccagcaacgggtcagagggaggctggccaagtggccctggctacatggaagacgtcctggcctctagtctcctggaagacccgccaggccgagaggaccctcccccatccactgccactccctgcccacac

SEQ ID NO: 31623 - DNA, 1256 bp, Artificial sequence
  DNA replication origin
ttaaccctaccggcagcgggccctcgtgggtttgtgctttccacgcgtgcacacgcacgcgcagaccccggcccttgccccgcctacctccccgagttctggggctcagtcggctctagctctctcctgccgccggcgccactccagaaagctgtgggtacccgggagcggagcgccgcgggtgtgctgggcgccggtggaggggggaacagcgaggattagacgccgggaagcacttccccaacatctgcgagaggtagacacggcggaacctagtgggtcagtcagttccctctccggagattttggggcgcttgcgccactgcggagaggcggcgggatgggtcggatgacctccatcaccacccctcactttgctgaggccatcacccctgggcgttgttcactctcctaaggctgcaccacccacgcagcccccgcgcacctcccgccaccgcagagggttggggtcgtctcagttcccgccccggccgatggggggaggggatgggggaagtggcagagtggctgctgcgccgtcgtctccctggttgccctttcgccgaatccatgcacagagttgtgtaaatgaggccgggcgggctcatttgcatttcatgctaatgagcagatcccctaagtgcctttttttcctggcgggagtctctgctctcattctgagtatgcggcgcctgagtcttgaaccccgtgccgtcttctgggaaaggggggctatttatggttgctccgcgcgtctgacaccttcttccctcccgagaggccgcagtctgccgggtcggcctgcccttcccgccaggatagaggccccggggctggcgcgagaagtagggacgcccaacaccccttctttgcagaggggaaaatgaggacagagaggctggcccagcccaatgatcaggtcccctggtggtcagcaggccccacaccctcatccatcatcccggccacccctgggctctggactgaactctgttctagaacatgcccgaaaggagggcaggcacaaacgcaccatctagataaattgagatccacatgcacttccctgggttcaggacctaggggagaccggccacgcaagacaggatctgatccctgtactcggcatgttggggctgatggccagtcggagatgcttacccttagcctgagtgccagagaggaggcagaggcagaacctacagggaaggcaaagaagacctgaaaccatctttatttaactccagccctccaag

SEQ ID NO: 31624 - DNA, 1230 bp, Artificial sequence
  DNA replication origin
cggcgaagccgccccgagagggcgaacgaaaaggggggcagcggcggagggcgggggtccggggaggggcgccccctcttcccgcggcgcagctggagccggatctaaggggtcagcatcgtcccggctccgcgccaggcggcgggggaggggaggagggatctctttaggggtgggcttggagggggtgggggcggctccttcccccgccccgccgcgggctcactgtccgggaggggcggggagacagtggggggcagtcccgggcgggagtggaggcggagatgccgccgccgcagccgccgcggtggctgccgctgccgtagctgtcgccggcgccacagcctcctcctccggccgagacgcggagcgagcgagcgaaagcggcggcgaggagccccgcgcacaccacagctggatccctcacttcaacttcaagcctcggccccgcccccagacagccccgcagccaatcgccggacgccgccggccccgagccgcgcgcccattggccgtccgccgtggcagtgcgggcgggagcgcagggagagaaccacagctggaatccgattcccaccccaaaacccaggaccgcccctctcccctccccttgcccctgggtccgctcccgaaggctggagccaatcagactgctgcccagaccgaacccactttcctattggccattggggtctttgggactcccttggagggagcccgaagaatcagagtattcggcgcggggtcctggcgtagggccgcaggccccaggcatcctttgtccacgacccctgatttgggcagcagccggaggacggagctcagctctgggcgggcctggggaagaaaggagacaggcggcacgggggtgagggttgtcaccagggggtcccagagcgaaatcccaggtctccacctggttaatctcccaccctggagttgagcttggctgcgggactgggggagggaaggagcggagctggatgtcctgggggtggggcttcaggctggaggggcccagtcttggagaaacgggcggagctcgagaaaggctagggtaggcatggtctgggcgtggcctccacaaatctcttgggcttattggtcatactcccgagtcaattctgagacttcgaccctgacctcgtaaccctaacccgctggacctgacctcacattgacgctcctgggcttcatccctttgcccctagggaccttttgaagggcgtg

SEQ ID NO: 31625 - DNA, 1171 bp, Artificial sequence
  DNA replication origin
gctggtgtctccgcacggtctgtaacccatatccttcggggcacgacggccaggcgcggggtcagaagggggacgggccgcaccgccgggggtcgggggggaagaagacccaccgccaggtgagtcgaagtgagcccggagggtaggcggatggggggggggctgccagggaggggagggggcaccagagtgggagcggagacgcgagcaggtctcgtcggtaacccgggcttaccccacctgcgtacacacacctcagtcttcctgggttgggggggtggggatccaggccaggagaagagagctgtgccccgctggctcgcagctggacgccctccagatgtggtcaggggagggtcgtcatcctccagatgtgggaagcttcgggagcctgggagctgtactctgcccgcgccggttagcgagctgggtttggtttccgagtttggtggggggtgggtgggggcggtggggaggaagctgcggggacggaggaggggggaccgcaatctcctgggtttccctccttcccccgccccaaagtttgcggcggattctagggtctgatcccccaacctggtccttgaggctgaggtttttactgacctagaaggagatgttggggggcggggaccaggtcctggcccacctcaccccccacctcgcgggttggaggcacaacaaggagattccggcggcggctgatgtcaggggcgcagaatgagaacaagatgtggtggaggggagctgtctgcccccggagctgggagtggagcccctttccgctagagcccagtgccgcgggtgcctcctacccgatctccattcgatgcagggtgcttaagattgggttggggagttttatgctggatttttcttgtggagggaaagactgtgtcaagagcttttttagcaagtgggggatggggttaagctggtccaggttactcctcccctttcacaaataaagagtgctcctgcagaccaggtatgggggactgcaggcccgcgaaagtcttgaggggacagtaatactgtcagtgtgttcactaaggaggactcgggtccaccaccccagcgtagactccgcagataggtttggggaatgcaagccccacattccagggagatggatttagcactgctccctgtctgcccaggctggagtggt

SEQ ID NO: 31626 - DNA, 641 bp, Artificial sequence
  DNA replication origin
gaagggcggagacagcccagggctcccactaagtcctcagcagcagggaggcctcactcagtgacagcagtgtctgctccagggagggttttgtccgcatacctggtgctgagggccccatgggggtgagcgggagtccccagcaggctgggcagatgactgacagctgtccagcgggctcaggggtgcggagagtaagaagtcccagaagctgccatggccctgtgcttgcaggcactgcggcgtgaacgtcccgccatctgggccctggagcctgagcaggctgggagtggggggttgccagggaaggcagcaaggagatgtggggggctgagacagagacacagagtgggcacagagagggagacagagacacatgggggaatggggacacagagggagacagagaggagactgatgggggcgagacagaggcacggagggcaagatggagacgggggaggagggcaggaagagagacgcgcaggcaggggagaaaggatatggagggagagatgagccacagcggagacagacagagacaaatggagccacagagacacacagggagacagagacacagagagggagctgaagacagagaccgagtcccagatgcaaatgagggcagagacggggtg

SEQ ID NO: 31627 - DNA, 1441 bp, Artificial sequence
  DNA replication origin
atgcctggacaccctaaatgtggcctttgagggcaaaggttgatggacacctcccaccccagccagtcccttggtctccagatagaggagccctggctgaagagctagggctgaggaccaagcagagctttgggggatgatcctttgcagctgactggccccagacattcaaaggctatctggtgtgggagggagaggggcattgttttggagatgtctgctaaggtgttctcttgttcttttaggcatcccctggctccaggctctcccagttctgcaaacaaggggagcatatcctgtgcacagcacactagaatagaatattagaatatcagggggttgggggctgagccagaaacacccaagaaatgtaggttctggtggaaaagtcattctgtttcatggatgattatgccaaatgccgcaagagaggcttcaggggacaaaggagagctgctcatccccagctctccttcggaagggcttcacgaaggtggtggcttttgaacggagcctcgaaagatgaatggaattgacagtggcttgggtggtgggggtggggggaggtgggagatggaggggtgggtaggagcagagagatctaggtggagggattaaggcacatgcacagggtggcactcgatgctctgaaggacagtcaggttttcctccctgccctggccccgaggtgtctgagcagtgattgatgttagcccagcgaggaagccggtgcttcccattggtgcaggctgggtggaggagggcctagaggctatttctgttgttcagatcagaggcaaagagggccccaagtaaggccatagctatgggaacgaggggttgtgggtaggacgcaatttcactggcaggttctctgggccggggcaccttagtgtccagagggaggaagggtgggcaagaatcctagataacccgaagtttctaaggcagaatcccgagcatgatggcgccacccgggaaggagcaggtttgggagaggaggcgagagggtttgttttggatgcactgagtttgagatggctgtgggccatcccaggagggagatcaggcaggctctggatctctggatgagaagccaggggcttggagagattgtttagtgtcgtctacaccccagtgacagccagagaggtaggagtgggggtactggtggagggagcgggcttagactgaactctgaggaatgctggcctgagggaagagaggcggtgaaatgagcactgggaaggggaagaggtggttgctcagggtcggggaagccaagggaggctcagctgctgctgaggcatccactaagaggagggctgggaagagggtccctggacagagctggagctgtggggcccagagttcagaactgaatgagtctggagtcccacagaagctttctgcttttaggcacgggggaaggagattggag

SEQ ID NO: 31628 - DNA, 613 bp, Artificial sequence
  DNA replication origin
gagcactgggaaggggaagaggtggttgctcagggtcggggaagccaagggaggctcagctgctgctgaggcatccactaagaggagggctgggaagagggtccctggacagagctggagctgtggggcccagagttcagaactgaatgagtctggagtcccacagaagctttctgcttttaggcacgggggaaggagattggagaagtaatggatgcaggcataactgataggccagggcccaggggagccgggggcgggggtagggggtgacaggggggcggcgggggagcacatcaaagaatcaaagtgcaggtggaggaacggctggctcccttccaggagaggaagagagacagtgggatgcacaacacagagctctttggaggagggacgtggagccccccatgtaagcctgcaacgaggggccaggtggggagtagggctgggggctgcagagtccagaaggattgaggcagctcctgggggagagaggagacctaagaagggaggaaccagggactgtgaataaaggcatgaaacagccatggggccaccacccacagggaatcacttgtccagtcagcacatgttcgtgcctctctctagcgat

SEQ ID NO: 31629 - DNA, 1943 bp, Artificial sequence
  DNA replication origin
tcccctgagcctcagactcgaggaccctggaaggaaattgaaagaccccagacagaacagctcagcccgaggacgccacttcagtccctcggtgtcttcccttcatcttccccaagtcccggccccctccctggccccatttttacctctctccctgtctctgggacagttttttctttcttcttagcaggtcagtaggttccccagtaattacatacttctccttaagaagttattaaaaaatacttgattgctacttttgataaggacataaatattgggtaattggcatctcaggggatcattttcattaactcagtttacagccctaacgaggcctttaattatcaagtgggatctccagggggctgctcgggatatgcagcaccatggggtcccacaggaatgctggcttcgccccgaattctggtgctggggcagggaacagcagagcacaggctcatcgtggggccagaccgggagccagccctgacagcgccagccggacccaagtgggtgatgaaggggccaaaggctcagaggtgatttaaaatattggtacattttggcaagagccacatcccatccccacatcctccaaggacttgtcctgagctgagacagcttgcggggtctccaacaggggcctggggcaaggggtgaaggggtgggagatgggggagtatggtctacggccagatcttgactccactgaagccggacgtctgggactcctccgggacctcagcacaggcacgcacacacggggtgccccacacacgtgcacacagaggattctaagtcccttccttctccggcccatccaccagtctggcagggatggagatggtgcccttggtgggttgatgggggcagaggcaaggaggtgcctcccttccgtgtcctcaagggggaagggacttaaaatcgaagcaaacctcacaacaccaatgaccatcacggctatgacaggttgcacagcagcggagcgtgaacacgagcacagagacacggaggcggagtggaggggcacgggcatggggcacgggaggcatgccggctcatgatcgcgtacctaccccctgggagtcgacaggcagctgaatacagcttaactgtccactcgcatcttcccgtttgctgatttcctacagggaaagggggaggcaggggagggctgctggtcacaggcgctcggggccttcagatatcggcagtgtcgagagaggatgaagaaaaggaggggcgcaaaccccacagcaggggaactgagagacacggggaatgggggggcagagaggggacagaacagccttccagaattcaactacaggccctcaggccagaatgaatctgaagggtgagtgcagaggccaaaaagatggggacaagggcaggtccccccataatcctaataataacagccaccattcattaagggtgtgcctggcatgggaaactgcctccttaacaccagctggcttccttgcaaggtaggaagtgggttccaggatcgccatcttacacaagagaaacccgagatttggagaagttgcggaaactgccccaaatcatacagagtaagaggtggatctgggcctggaacccgagtctgtggctcagaacaccactctcctctcaccggttcggaggcagtgggcttggggaatgggtaggaagcaaggaaaggaatggacgaaagtcagagtcaacacggagccaagtcaggcctcataacgtctcatgctctcagcttaagtcccttcagatcagaacagatccagctgctccgtttgagatgggatgtgacaagtaatgctgagatgatggctctgatgttatttagtatcaattaatggcctcacacagggcctgctgcctgttcatttaattaagtgtgtgaatgataaatacacagggattcagggcgctgccccctgcaa

SEQ ID NO: 31630 - DNA, 852 bp, Artificial sequence
  DNA replication origin
gcaggaacactcccagcttccccagaagcatggcacagcgtggcacagcccagcacggtcaggggagagggcacagcacaggggcacagtaacctgtgggtcggagcctcccaggctgggggcagaagggaaggcagagggctggccccctgggcctgccagctcgtccatcagcttcagctcccactccagggagccctggatcagcagggatatggtgtcaaacagctgcctgtcctggggagccagcccgtaaggggagccggagaggcaggggagcaggggtcagagggcagtgatgggaagtgtcgtggaaggggattgacaagagaaacagaggagaaagaggtgacacccagacaacacacatgcacatgtgcacacacacaaaaacacacacagcaacaaagagaaaaagaggagggggtggggaagagggaaggcgaaggaggaaggagagatgggagatggaaaatgagcagagcccacggcggggggagagagagagagcggtaaagagaagataaaaggatggagagatggaagagaatcaggcaggttaaagggtgggtaggaaagagatttggcagttgggcaagggtaagaaagaaacaggaaggaaacagaaaacttagccttgaacctatgagtcaggaaggggaggccagaccaggctggaggagcagggcatggctaagctggcccgtctgctggggtggccctgtggggtgagtgtgggcagccatccctggggaggggcagtgactgctcgctcagcatccaggacggagggcgggagcctccaggaggagcctagggtttgtgtgctgcccgcttggctcccgcccacca

SEQ ID NO: 31631 - DNA, 1448 bp, Artificial sequence
  DNA replication origin
gagttagtccctgcccttggggacctctcagattagcagggaagacagactcttcataactaaatataatccaaggcacgccgtaacaaggtgtaaagctctgtaaagtattttgcccagagatgaaggtagggggacaggagagggagggtatgtgtggatgagtggaaaggaagagggcagacaaagaaggggctgaaagaacttgcccagtggaggggtagaagtccctggtctgactgcctgggaaaggggaatcttctccactcccacccctatcccatgcccagccagatcttggttctgatagcctatagccaaggagacttcccttctagtgacctcctggctgcccagagagataggaggtggcttgccccttctgcactcttactggctcccacccacacctgccgctgagcagccaaggaaggaaacaccttctcttgagaacaagggccagaaaaggggtcaccggggtgaaactggacagacctgtgggcaaaggcagggaagagaagggccagggaaagatttgccagggagaattccttctgagccccaacaagcggtgctgagttggcgtctgggattgtgttaaggaagacagggcaacagcgggattgagagatggagggatccccgcatctgaggggataccgggagaaggagagctgaggcaagcaggagaaggagagcactgacaagcccattttacagatcaggaatgtagagtttcagccttaggaggaggacgaggacgaggacactcacgtggggctcctcctggggcttcacctgtccttccccccccaaccctgatcaggctgaagcagagggaattcacacatgttgggtgcccactaagtgtgccaggaaatacgctttgcctaccctttccattcaatcctcagagaaccctgggaggaagattctcttctatgattgtctctattttacggatgtgaaagtagaggcccagagacgtgccgaggtgatgtggcaaggtcagggagccacagagcctaagagggcagcagtttaagaggacataagaggcccccgctggacgatgctgcggcccccacccccgcctcacgggtacacacccgcggagcacaccccgtgtgctccccgtgtggcgcctgccagtggtctctggaacctgatggggaagaggtcagcttcctgattgagcacagaagcccttcccattttacagatgaggaaactgacctccggagaggaacgtgaccttctcaaagattccttttttactaggaaagattgttaaatccctctccctacgtcccctactcaatgactcatcggccccacggacttgttcgggagtgggagcgcctgtgtatcccagttcccccttggaaatagactcgactcctggactgttagcctcggtatttagagagacatccccctggcttggc

SEQ ID NO: 31632 - DNA, 1592 bp, Artificial sequence
  DNA replication origin
ccccaaagtccctcccagggaggcgctgtcgcaacccgcgggacgggggcagggagaccggacccagaggcactggggtagggctcggcagggcgggtccgggcggagcgcggggtgcggagggcggaggcggctccggcgcccgctctgcccgccgctgggtccgaccgcgctcgccttccttgcagccgcgcctcggccccatggacgccctgtgcggttccggggagctcggctccaagttctgggtaaggcgcggggctccggggtcactgcgcgggggccagggtcggccggcttcgcccggtccccgccgcctgccttcccgcggggccggcaggtatcccgggacggagcccctgagacggcctgggcgcccgggagggggcgatgggctcgggagggaggttggctgcgccgcccggagccgggtcccacgcggtgtcggggacctgccctgctctgcccttcccggctgcagcactggggagcccgggaaagtgaggaagagtgcgcggctggggcgcaaaggcacagtgcgtggctgggtgagtcggctccatcccagcccctccgtcgggtgcggaaggggcgtttcgcaatcagccgcgggttcctgatggagggtcttccctcagcatctgcctcaggttaggactcggttgcccacctgggcatggattgcccccagggcatccagagcacctgctcaaccaggtgttttgggaggccggctgtgcagtgtcccacccttcttaggaaggtttcctgccaccttcttttctctaggtaagactgaggtctgagagcaggccatccccaccactccggactcagaagggagaagcagaccccagtctggagacaggtgcagggtgtcaggattcctgtagtccaactcccttctcacagatggagaaagggaggcccagagagaggaagggacttgcccaaagttacccagttcaatgaaggcagagctgggatagaaaaacaggctacaggccaggtgcagtggttcacgcctgtaatcccaccctttgggaggcagaggtgggaggatcacttcagcccaggagttttagattactgtgagctatgatcgcaccactgcactgtggcctgggcgaaagagtgagaccctgtctctaaaaaaataaataaataagaaaagaaaatcaagcctttggtgactctcactccaaatctctttctaagacaggctgctcttcagcctgctgactccagcctccagcacagttcaggtgagctaagtgcatacagcctaggagctttcttaccaacttgcaaaacttacttgcctctatgaggcaagtgatcatgtggtctccgttttacagagggagctcagattaaaggtgcttctctgtggtcattaaaggggtgtccagggcttgtgaatcccaatctctaagtcttttcctattttgagtatttgtacatatatgccctttgtgtgtgtacgcacacacgcaggcacgtggggtgttacccaagagttcgtgctgtgcacgtgtgtgcacaggtgtataagtctggagctatgctcttgggctgtgtttagaatgggc

SEQ ID NO: 31633 - DNA, 1402 bp, Artificial sequence
  DNA replication origin
gggccagtggtgctggtgggtcctccaaggggagattcccagctagctggaagtcaaactctcgagcccaagagtttgagaccagcctgagcaacatagcaagaccctgtctctacaaaaaagttaagatattagccaggcctggtggcatacgcctagagtcctagctactcaagaggctgaggtgggaagactgcctgagcctgagaggttgaggctgccgtgagctgtgatggcaccaccgcactccagtctaggtgacagagagagaccctgtctcaaaaaaaaaaaaaaaaaaaaagagagagagagacaccagtcactgggctggggccactggggcccaccctactccaatatgacctcaccaaatgaggccacgttcacaggtaccaggtgttgggagctgaacatatctttctgggagacacaacttaagctatcacagaaggggaggcctggctatgattatggctggagggctccatgtagtcgagaggagagtgtcccaacaatgaagagactcggtcatgtcaataggtgaaggtgtagagcttccagcagaggtggccagggtgaagctcagcggcaaagggggcaacagcgcagcaagttcctgaggaggcagaggaaggccagggctcgggggcaggggcagcctccgacagcctgagcaccagaaaaaggaggacaagccactggagggcagtttgtgagtggcaaggagtttgtgggtggcagggagttctcaatgggtggctaagcaagaaggcaggtagctgctgagaggggtggggggctgggatgggcctgaagggaagagaagagaggtgaagaaggccccaagagcgggggcggattagggacctagagaaggttgctaggcagtgctgggggccactgagtttggaaaggtggatttgagcggcaagagtctttgtggtcatgtggcggaatctagagcccccagcagcctaggagaaggagcagggaagtccagtcaatggaaacgtggcatttcttcccgccatatgtcaggaggtaagaaggcaggcaggtgaggctggtggtgagagcgtcatcgatagggcgtgcagcagggtccatggtggatagagaacgaggtgaaggcagagtggagccaggaggtcgtggtcttgaggcagtactgggttgaccctccctggcccaagaggttggagggggtggaggtttcagaggccaggggtgcagtggagactgcgggtaaaagcaaagggcagcagaggagggagcagccatgggggcagcactgcccacctcactcctctctcctccccacagcatcctgatcaggtttatctccaaccccatggccccctcctggtggggcttcctggtggctgggctgatgttcctgtgc

SEQ ID NO: 31634 - DNA, 1149 bp, Artificial sequence
  DNA replication origin
ggcgcgcccaggatataaatccgggcgcgggcccctgctgtggctcctctccctgcacactcaggagagggagcttccttctaaagacctttcttttatctgaagccgcacagcccggcaggctgtgctgacttggtggaggcagcagcggcagagcagcctgagcagcagcctgagcaggaaacctgctggggtggggagggcaggtgtctgcagcccctgagaagaaggccctggtgggccccagaccctggcatcgtttcaggggaggtctctagccgccccagcctgcaccatgtgggccccaaggtgtcgccggttctggtctcgctgggagcaggtggcagcgctgctgctgctgctgctactgctcggggtgcccccgcgaagcctggcgctgccgcccatccgctattcccacgccggcatctgccccaacgacatgaatcccaacctctgggtggacgcacagagcacctgcaggcgggagtgtgagacggaccaggtgagtggggtccagagaccagagatggaccacgtgagcctgtgagtgacgggggtgggagccgtcggggagggactgtgtgggagtgtgaggaggacaacgtgagtggggtccagaagccacagtgtgaggcggaccaggtgagtggtgtccggaagcaggagtgtgagatggaccaggtgagtgggatccagaagccacagtgtgaggcagaccaggtgaatggggtccagaagccgcaatgtgagatggaccaggtgagtggtatctagaagtgggagtgtgaggttgaccaggtgagtggggtccagaagccggtgtgtgaggcggaccaggtgagtggggtccagaagccacagtgtgagatggaccaggtgagtgggatccagaagctggagtgtgaggcggaccaggtgagtgggatctagaagtgggagtatgaggtggaccaggtgagtggggtccagaagccacagtgtgagatggaccaggtgagtgggatccagaagctggagtgtgaggcggaccaggtgagtgggatctagaagtgggagtatgaggtggaccaggtgagtggggtccagaagccacagtgtgagatggaccaggtgagtgggatccagaagctggagtgtgaggcggac

SEQ ID NO: 31635 - DNA, 1142 bp, Artificial sequence
  DNA replication origin
gcactacggggacgctgggccgggcaccgggctgtgtggagaagtgagcgcgctcgtctgacccccgtgcccgccaccccgagccactaacggcgatctcccaaggcctgcccgaggcctctgtcctctgtcctcagccccgcagcggcaacgtcttgcactcggcgagctcgccgctcccgaccctcccgcgcccccgccctgccgcgctgctccccgcccagccgcgggtctgtggtccaagccgccccgaagcagcccgtaagtatctcggggcgccgggcggggtcggcgaggagacgggagccccgggcccaggcggcggaggaggggctgcagcggcgtcgagccctgggccctcgggagctcggggacggcggggtcgcggccctgggcgccgagggggcagcgccaggacccgaggggagcggctccgaggggccgccggcgcgtcgggctcgtcctgggcagttggccggggacgggcggcccggggcgagctgacgggaattggggggttggggtgcccggaggagcgacgagctcgcggtggaacgctggggttcgaggggccggtggccgcgaggctgaaaatggtgccgaggaaccggtgctcccccaggctctggccggctcccaggagcccggggcgggggccacggggcggggagcagcgggtcgggttacggcgggggaggggagcggctgacccggcgccccgacctgctcggtgctgggtgcccagccgggagaggttgctcttccatttcccgggccttcctcctccttctccgaggaggctcgtactctcttcctcctccacctccacctcctcttgctgttgctgctgctgtagcgcttgggctccgagggctgtgagcagaaatctaatgagatctaactggctgtttatgtaattcttcacactcctgcctgtcttaaggcgttgctttgtaactaccttccaccgagcctgaatttcgctcggctgcaccttcaagcaattgggcttaatcagctgcctctgccggcactcaggcttttgacttggaaagtgtttgtagtttgggggcagccagagattctttttccctttgtcaccacgaatatggaaaatagaacagacgaattaagaccaactt

SEQ ID NO: 31636 - DNA, 1657 bp, Artificial sequence
  DNA replication origin
gcgcgggagggtcgggagcggcgagctcgccgagtgcaagacgttgccgctgcggggctgaggacagaggacagaggcctcgggcaggccttgggagatcgccgttagtggctcggggtggcgggcacgggggtcagacgagcgcgctcacttctccacacagcccggtgcccggcccagcgtccccgtagtgcgcccgctacacgccgggccagagcttcgctccttctgccgcggcgcgcgccccgcctctcgttttatggcctcctccccgcccccatcccctccgtcggggtgcgcgcgcccgctccgcgtcacacagctccggcggcgcagccattccccgcgctccccgcccggcaccccggtcccccgccggccggctccgcccctgccctgccccccgacgccattggccaagtcccgcctgcccctgtccggacgcgcggcggacgcaggggtggggaagccgcaccctccgggctccaggagggccaatgaaccgacgatcggagcactggggacggaatgaagagaacgtctggaaagggactgtgggggcagacgtgccaatgagagagaaaggggtggggtagggcggctgacgcccggtttaggcggagagcgccgggcagagggggagggggacgaagctggtggcgaagcggctcaggagaaccggggctggaggagcggcaagagtacccagaaagtgccctctccgcgggggtctgcggccaaggaggatcctgctcgtggaatagctaccaaatcggcctccagcccaccccaggggcggggtagagaaagggcaaactgtgaccgggacttgtgcacccgattaattgaatattaatcaccccaaggcctaggccaaccgccacccagagagtggcagctgcagaacccaaagacgtggagccgggctgggggtggggaagggaggccgccacagctcccgccccgccggcagtttaactgcttccgcagcctcaggcctcccggtgcgaccccggctgcgactcggatccgtttattccaaatgtcccagcccacgccgtgcccagagtgtggcgacacgaggccaaactgcgtatgtatctgtgtccatgtctacacacacacgcatgcgtgcatttctagggcttgctggatcgcaggtgcacagaataaacgcggtgcctgcttgtaaagcgcgtttaagatcattcttggctgaaatatgtgcgggtacctagggagtggggtaagagagggactcgtggtggggggcgggtaagtgcctttttcacaacctgccccagagaaatacacgaaattacatcgggagtggaatcgagcgtccctctcagctaaaaatattactcacaggtagcaacgacgcctgattggctgcgctggtcccttcgcaacgaggcgattggctgcctggtatccaggagaccgacgtcaaactcggactgggaaaaggggaaagtctggggggagcgaaggaggggacggggagaaagaagcaatgaatgaaacgcccatcgcctggccttcccctttcccctttcccctctcctctccattcttggagcacttcctggaaaaacaccagttggggcgccgccttcccctccaaacgttggggcctgcactctcaacctgctat

SEQ ID NO: 31637 - DNA, 1197 bp, Artificial sequence
  DNA replication origin
agatgctaatcgctgcggatcgcccgccccagcttaaggtcaggaggtaacgcgacccgcggttataaataaccgctcagggcggcggccgagggcagcgcgctggacccgcgcccctcgccagccgccgggccggcttgattactgccctccccggcccgaccgcgggcacctgaacgccgacagcagagcacggcgacctctggggctagcgcgcaaggtcagaccaggtccagggcttccctgccctctgcggggaccctggagcaccgacagccccacctccccacctccaagccccactcccatctcccaccaggggcaagaaggtggagggaggccagcggacacaacccgaggacccaggcggcctgcgcctccgcgccaagcctgggggtggccgatggcaagggaggcccggagtaacccagccagtgagggccaggctgcagctaacactgatcctgcttctggggccgacacaggcctggtctgtgatggtgggacttaccagagcttagtggaaagaaaatccctgagtctggggcttcaggagtctcaggctggggagggactctggtagcacccatgaggggacacgtggttgtgccccagggaggccagccacctgctctccacttgcccttggatagaaaagggaggtggatttaacctgctccaggagacatgacttttatttttaagactttttaaaattgaagttaagcacacacacagaacactgcacaaatcaaagtgtacaactgaaagaatttgcacatgctttgcatacctgtgcaaccagcacccaaattaaaaaacagcacctcaccggcacccagaagcccctcgagaccccttccacctactgttcccgagtccagcctctctcctgactcagcccgcaggcgctctggcctgcttctgaactgtgtgtagatggagccatacagtgggtgccgttttgcgtctggtttcttttgctgcatattatgtttgtgaggtttgtcagtactctcacaggcagtcaagggctgttcgtacccattgctggtggcttgccattgtgtggctctgttaaaatgtattcacccatgttactgctaatggacatttggggaggttccagttcctggctatggtgaatagtgccactatgaacattctagttcctgtgtattgtgaacatatgaatgc

SEQ ID NO: 31638 - DNA, 1024 bp, Artificial sequence
  DNA replication origin
agtggcacatacacatatgtgtgggagtctggtgtgctgggtgtgcctcagtaggtaggtggctgcccaggggagtgtgtgcttggcatgtgtttacgaggggtgtaaggagtgtctgcagcaagtgtgtagggggtgggccacatgtgtgtaggtcaggtatgtatagttggggtgtgggcggatattggaggagtgtcttagtggtcagggggaggcttgaggcaggggaggaaggcctggaggggccactccctcactctgcaaacccccctctggccacatggtcagcctgtggccgatgcgccctgaccagtcaatgaactcagggtctggaagagtcagcggcttttccaacctctttgccaaatgggatgtcagcatgggggcaggggtggtgggggtgcaggctggggaaggtggcaatgacttcatgaccagactactgagcaggtggggagagggggcagggcgctggaggccggctgggtgggggatccactctgggtggggaggcagcccaggctcatgcttcctcaggaccgctggattccctttgtggggaggacctcctggagggtctgcagggggctcccttggactgaaaaccctccagggactgttgcatggggtcccaataagctaacaacagccctggaaggtaaggcctcttgtccctatttgacagatgaggaaactgaggctgggagaggcagccacacagctagagtgaatggtgaactggactaggaacatgggtgggcgtgtttcccacactgccccacagtgacacagcgggggcggggacagcccttaaaatccgatcctccgcgaacaccttgaatcctcaaacctccatccatccaaaaggggctccgccttggggaggcccttcgcacacttctctacaatttgaggggccgtcggctgcaataaccacatagtggggccactacaagtcaacagaagcagaccctctctccaaaaacacagcagaccctgtctccaacacagactaggccta

SEQ ID NO: 31639 - DNA, 1327 bp, Artificial sequence
  DNA replication origin
tccgcttgccaccatggagctggaggacggtgtggtgtatcaggaggagcccggcggctccggggccgtgatgtcggagcgggtgtccggcctggccggctccatctaccgcgagttcgagcggcttatcgggcgctatgacgaggaggtggtcaaagagctgatgccgctggtggtggctgtgctggagaacctggactcggtgttcgcgcaggaccaggagcaccaggtggagctggagctgctgcgggacgacaacgagcagctcatcacccagtacgagcgggagaaggcgctgcgcaagcacgctgaggaggtgaggccggcggcagggcgggggccgcgggatccgtctccgggggcggccggggcggggtcgcggcccggtcggggactagaggcgcgacgggcctcctggagggcgggcctgaggccgatgccccctgggaccgatcccggcggcctccaggtaccccgggagccaggccggcgttggaagccgaggccggctactgagtgtcctgggaagggagcgagatggaggaggcagggcccggggaggaagcggcagcctggcctgaggacacctggggttggccaagggcggagattgttgggtgtctggttgcttcttgttgagggaagtttccgaccaccgtgggatagtcagatggcggttcaaagttttacccttggggagggggacacttctgccctggatatgtaacttccgctagttccagtacctttccagggggttgccttgctttgggaagttagagatctccctctttcggtcagtttcttcttgacgttttaatcttgttgagaaagacgtcttattttatgttctatgtgccttggttgacactttgtcaacttttagatgttgtgtggcagtactcaataaatatataaacaatttcgttggtatcccaaaccaaagcattcctccgtatcaggttgtaaccttggacagttcccttcaaaaaccctccgtttatttataaaaaggattggggggcggggttgggaagatgtaggtgacagttggcaacactttttccgtctgagtttccttcttagactgctgtttatacgtgcatttggccacctgttaactctagcacccgagcagtgacctgggcgccctcacctcgactctgtgaaccttttggagttctagggtgcaagtgataggtccttggcttcttgagactgacaaggagtttagctttcagcctgcgttggcgttatttctgtggaccttatcaaaggcaggtgatgtgtcctatttttgtttctcaagcacctagcacacctgctt

SEQ ID NO: 31640 - DNA, 1529 bp, Artificial sequence
  DNA replication origin
gaccacctcctcgtcatagcgcccgataagccgctcgaactcgcggtagatggagccggccaggccggacacccgctccgacatcacggccccggagccgccgggctcctcctgatacaccacaccgtcctccagctccatggtggcaagcggacgggcgggcggcccggggcgtcgccggcagaggggcggcacctgcccgcacgggacggacccgactcgggctgggacgggtactagggctggagcccgggccggggctggggctgggcccggcggggtgggggccggggccggaggaggggaggggtggcgtaggcgctctcaccccaaccgccgctgcaccaactgccggggcggcccggccgcgcgcgccacacgtcatccgcggggcggggccggcgccgcgtcggcccgatgggcggggcgccgcgggaggccaggcgcggccgggggcggggccaagcgtcttcgggcgctggcggaggaagccatggcgtcaacacccggcgccgcgaagacggtgcgggcgccaatgggaaagactgcggtcggcgggtggggagaagtatccatccacagcgggattcgcggggcgggtcccaggggaaagggaggggttcgggaagagtgacgagttaacttagctggcatttctatggctttttaaagctcacaaagcacctactcacttcatccccacaacaggcgtaaagaggtagatatttggacctcgtttcacagacaaagaaactaggcccaggaaagtggcgttgctctcaaggtcacgcagctacaacgggaaacgggctgagccgggactcaaaccaattacccagattgagaattccgggctccgaaaaaaactggaaacagaaagggagggaaaaaaaaccataaccagggtctgcccaagtggaaaggtggtctcgaatagaatagaactgttttgtgctatggaagagcaagggtgagatgaggggaaatgggagtgactgctaataggtatgggatttcgttttgggataataaaaatgttctaaaaaatgtattatagtgatgaatacacaactctaaatatgctaaaagacattcaactttacacgttaagtgagtgaatcatatggcgtgtgaattatatctcaagttattaaaaaataaacaggaagggtgatagcattctggagaagggtgaaactggaacgttacatgtggcactttcccacatagtgtgtctgctacttctggccaacttgggacggggacatttccaggctccagccaccctcctctcctcaagtcttgaagtggggcggaaagggtaagtgggaggttggggaacagaggaggtaaggggtggagtcactggagtgaataagtcccatgacaagtgaggtttctgccgcctgggagagtgtcacgtgtggggaatgacacaacgcccacgcctagagcgggctgagtcaaggatcccggtgtgctcatctaacgtccgcaaatgggacggaagacactctcaaaagtccctt

SEQ ID NO: 31641 - DNA, 1937 bp, Artificial sequence
  DNA replication origin
gctcactgcaagctctgcctcccgggttcacgccattctcctgcctcagcctcctgagtagctgggactacaggtgcccgccaccatgcccagctaatttttttgtatttttagtagacattgggtttcactgtgttagccaggatggtctcgatctcctgacctcgtgatctgcctgccttggcctcccaaagtgctgggattacaggtgtgagccaccgcacctggccccctttttttttttttttaatttttgagatggaatctcaatctgttgcccaggctggagtgcagtggcacgatctcagctcactgcaacctctgcttccggggttcaagcgattctcctgcctcagcctcctgagtagctgggattacaggcatgcgccactacgcccggctaatttttgtatttttcttggggacggggtttcaccacgttggtcaggcttgtctcgaactcctgacctcgtgatccacccgcctcggcctctcaaagtgctgggattacaggcgtgagctaccgcatccagcctgaatttctattaatacttttacacaaagcgtggcctgtttgttttggggcgtgagatgagcataccaggacttgggggaatgaacatgtgtgtagtgaagctggagggttacagcctccccagttaaggacagtcttcccaggaaggaaagaagaggtgaaagcagaggggtggtcctgactgtaccctgagtagccatcagtgacctgaccaaggggagcagatagctctcccctggacagagaaaagtccgtgcaatttcgagacctgttttcacagttgacatttggtaatccaaatgagagtgtgtttcagatcgaagccaaaaaataacagtgcccccagatgagggcacatgacagtcattgtcaatgtgtggtgggctaatgctctgtaactagaagtttggaaagccgataaggtataacagaggccagattgtcatccatctggccagtgacaggtgatcagcgcagtgctaggggcactcgggtgatggcatgattgctgtggtcagctcagagtcctgaggggaagcaagcgggctctcaccatctcagggcagtaccactgctgtgcggctgtcagtcagtgctgcaggcgccgagaggaggggcttgtgaccgccccagggaagctgggcatcaccaaagggagcttgtttgccagggacactgcaagtaggaagtgtctacaggtcgatgacaggcctaatctctatgacagggtctagactttcctcagggtccaggggcgcacctcagggtgaactggaaaactcgaccgcactttagtgccaggtgggcagggatccccatgtcagggtgggagtggggcggctgattggggctggaaatgtaggtggggaggcggcagccagggagcagggcatcctgcgagaagagcatcccgctaaggagtctgaacgccatcctgtaggcgggggagtcatcaaggcagggcagaggcaggaccagatggccgtttgaggtgctgagcaaagctcccggtttgcgcggagaggtgagatcgaggccccttgggaggccgaggcttaaccagggctcaagcagaggggagggaaggctggatttcagaggtagggaggataaggaccgtgggtgcacgacggggagggagagccaagtcaaggttaatgccggtgctcgggcggatggtgaaagcagcagatggccttgaccggggtagagaactcgagcacaggagcaggttctgtgtgtgtgtgtgtgtgtgtgtgtgtgtaggagcttttggggtcacgggaagtactgagaggtgaggagtgggatttgggacgtgcgtagttgaactcataggacgtccaggtggagaaggaatcacttcctgtctctggatccgtctcgatctctgcctggcgag

SEQ ID NO: 31642 - DNA, 938 bp, Artificial sequence
  DNA replication origin
cccgagtgcgcccagcccgcgcgccgcggcctccctcaccctcgggcctcgcagacgccgcagcaacgcgtcctcgtcgttctcgacgtcgccgaagaccagctcctccaagcaccgctccacggccggtttgtcctcctccagcctcaggcggttccgctgccggagccgtctctcttcctccgccgccgcgactgcaatcgcagcggccgccgcgctcggccgggccggcggtttccgctgggatgaaggggcaggcttttggggaggcccgcctggccccgctccggctttccagtccggcctcattccgggcttccgcttcggcttcgctccggttctccggtccagtttcattcgtctcctccgctccggcggcatcgttaggtttgaggagaaacgcaggcgctcacgtggaacctcgctgcgcatgcgcccaggcccctcgcgggccgccgccgccgaagccccgggggccggaaggagcctgcgcagcctcttgccacgtgaccagcactccctccctctacgtaactcccgctcccctacccagccccgccccgtgtgggagttcctccgggagggccaatcttccgggtgtagggggaagcggcgtgactggagtggaaaatttttccaacacaatttcgcagctgcaacatattgaaaggagcgcaagaaaccccgactatacactgggacggctgaatggaacttctgcttttcctcttggctgtaaccacttgacttgacacaagccccaatacgctttccacccttcgtcttggtacggtccttggagtacggagcctgcagagggtcccacggtggaagcgagagaggagggtatgtagggaagtgggccaatcggggcgcgggtcacggcgcaggcgcgctggggagggagggctatgctaatgttgttgatatcctggggc

SEQ ID NO: 31643 - DNA, 1515 bp, Artificial sequence
  DNA replication origin
aggttccacgtgagcgcctgcgtttctcctcaaacctaacgatgccgccggagcggaggagacgaatgaaactggaccggagaaccggagcgaagccgaagcggaagcccggaatgaggccggactggaaagccggagcggggccaggcgggcctccccaaaagcctgccccttcatcccagcggaaaccgccggcccggccgagcgcggcggccgctgcgattgcagtcgcggcggcggaggaagagagacggctccggcagcggaaccgcctgaggctggaggaggacaaaccggccgtggagcggtgcttggaggagctggtcttcggcgacgtcgagaacgacgaggacgcgttgctgcggcgtctgcgaggcccgagggtgagggaggccgcggcgcgcgggctgggcgcactcgggcggggcgcgcggtgggcggtgaagctccggggggcggagcctgggcgacctgcggcggcggggagcgctcaggtgggagggagcccgagaacgcgggcgcggagggtcgcagctgcgggtccctcgcctccctgctccagactgaaagtgcctggagggcggggaccgcgtctttctccgcccctggaggcgccgctgctcgggtatctgctttgcgaactgtggtcgtgagcatctttcgctgctgctcgactccgctagcctcttcccaaactgagggtggtcttttgatcacctgcctcagttccttgtgattcaggaattcgatttcgttgatggaatcaattcgtgggcacgggcctgggcatctccgttgtaactatgtccccatgtgactatgagacccaccatgttttgagaatgatcgtgtattccgttcatttagcaaatattggtgaacctgttagttgccagataccctttctggcaatggcaaaccctgcgtgattgatcatactttttgcacacattttgctatccctttaaattctataccaggcttttcttgagagagtcccggacattgttctaggcactggaggagacacagcaatggacaaaactgacaaaaatccctgccttttggcgcttgtgtgctagtggcagagacaagatagaggagataaacgagtaaacttcaggtttgttggtgacaagtgctgaagagaaaaaaggacattcgggaaagggagatgggcgtgtgtagaggcctgtgaaattttagataaagggggcagaggaaagctcaccgagaattacccaggccatgtttattacacaaatgctgacctagttaatgtcagctgcttaccagagccgccttcgggtgcttgtaggagaagtggcagcaatctttttgggaagtacagaactattactggaaacatgctgaactgtgcgacggttttgtcgtctggaaaaggaacagtgtacggaggtgggagctgttgggtttgaaggctattagactagtagtagagcaagtagaaaccacttggacatttctatcattggttttgggaagctcaaactc

SEQ ID NO: 31644 - DNA, 1702 bp, Artificial sequence
  DNA replication origin
gtccccggggcccagcccttcccctcggcgccctggacgcactgccggaacccggctgagaggctgcaggctgcgcgcggacctggggagcagggagggtcggcggaggctgccggcggctggcggtttcgggcaataatccctgcctctctttctctgtgtgtctgctgtgtctgctccttccccgccccccggaagcaggagaagaactgccccggagcgcagcagccaccctccgaccatgccccggtgaggggggcggacttcgagggcaacttgccgcggactgcctgggcttagccagcgagctacgcgctcccgggagcccggaattgcacggcgcagcccggcggggggctatcgtctatgtcttcttggggcgccagacgaatcggggtctcgtttttgctggaagagcccagtgttggtggcttcaggtggctgctgccgccgccgccgccgccgccgctgctagtgcggtttccgccgctggtgcgaagagaagagacacgcgagcggggagacctccaaggcagcgaggcatcggacatgtgtcagcacatctggggcgcacatccgtcgagcccgaggggagatttgccggaacaattcaaactgcgatattgatcttgggggtgactgtccctggccggctgtcgggtgggagtgcgagtgtgcactcgctcggaagtgtgtgcgagtgtgtatgtgtgtgtgccgtgtcgggctccccccttccccccgttttcccgtcgagtgatgcacttggaatgagaatcagaggatggaaatagtctgggaggtgctttttcttcttcaagccaatttcatcgtctgcatatcaggtacgggacgcgccgaagtcactggctgatttggattatgttgtgatgtctggggtgtatggggttttattgtatatagccgcggggcagagagaggggtggcgagaccctttgagttctgcgggtttgccgccttcagaatcaaaaatcttctcagcccaagggtgtgtgaatgtgtgtgttttgcgggggggggtggttaggatctgtgtgcagtcctagaagggtgaaggaaaaagtggtgggggatgagaaagaagaggcagatgggtgttgattttcaactgctttcctggctgagaactctggcgccgaaatccgagccttggcaacaaccacccccatcccctggctttcaaagttcccagactcggtggttcctggctggcaaaatggacgcggggccctgcccgggtatctaaccactttcaagagactgcgggaggatgcgggactggagagtaccagcagggatcagagatatgtcctccatgccttacccaaacacatcaggactgattgtgatgctttgaaacctgctgacacaccctcctctacccccccaattttcttgttaaagcactacagtgtcacaaataccactttctttacatcacggtgttttttaattcccagtagcaaggatgtgctggctcagacctctcagtctacttgggcctgtctgtgcttttaagagcaaacgggatttcagggtgttgaggtgaaagaggttgggcttgtggacacctgtgcctgagtgtgttaggacgagttctggtttttgagcactgtctttgttgatgcagggaattggggttgggaggaagctgggagggaaaggggaaagcccctggacc

SEQ ID NO: 31645 - DNA, 1518 bp, Artificial sequence
  DNA replication origin
tcccttaattctcataattctgaggtttgtgttattaaccccctattatctttggtctacccagggcagccaaagaggcgcagagaagaatgacaaggtgcccagcaagcggcaggatcaaagcctgggtctctaattcccaggctggagattctgggctgcctgctcctcctgcacggggcgaaaagcccacctgggatccgagcgggcggccgcgccactctcgcaggctccatacacccgccactacccgcctgtaccacctgcagccggcagcgcagcctcctcgcgggtcccgcagggcgcgctgcaggtgcgctgggcgtcccgaagccccgccctcgcgtccctgccccgcgcccagctcctcacgctcggtgcccgcgccccgcagcggcagcgcagaacgcaccgcctctgccagagcccgggaagcgctcgggcgaagaggaggagccaagggtaccgagcgggtggagtcgggagccggagagcggtggaggcggatttcctgggcccggccctctggcgctaccatggcgtttggcaagagtcaccgggatccctacgcgacctccgtgggccacctcataggtaaggaggcgcggggagagacgcccaggcaggcaggggaccgtgggatcctttcctgcttgatccattctcggcctgcagaggacggagttagtccaacttgaaaaaattattcccctccccccgcaactttcccaaggcacccgcattccacccggccccctttcgtcgtttccttcttggccaactcactgtagaacctcagtcctcaaaaatgtaccttcctttcgatgccgcctggggagtggaaccaaacaggtgaaccgcgggagtcaggcatggagtgtttgggcctccacgaggagacaccagaaacttctcggtaggggaagttattcctaaaggcacattctccagggcacggtattgttatgcccgttttacagatcagaagaggaggctctgggagactaagtgatgtggccttactgtgaggggcaggtctccccaaaccagttttctctagtgccaagcttatacaacctggattacttttctgggtaaacaaagagaatgaaaatgcttggcattggagtgaagaggaggggaacataggagccatctggggccacggaggtctctcgcaggccactagggactacaccagcatccacctaaatgatttctctctcctccggatgtaccttgcatgatgtatgtagaagccagtgattggactcctaccagcaccagctcactgctccttcttttccctgattcctcccttgggaattgggtgtggcacgagtgcatattaatgccaggcaaagtgtgatgatgtcaggaacttagtggggtgatgaaatcgtgagaacctagtagttgtagtaaagaggcccagatttggaaaatttagatcacagctctactaactgctgtgacaccgaacacaccacttaaacagaaccttagtttacacatcct

SEQ ID NO: 31646 - DNA, 1415 bp, Artificial sequence
  DNA replication origin
tgaatcccacctttatcccgcctccctacggcgtgctcaggtccctgctggagaacccgctgaagctcccccttcaccacgaagacggtgagcgctgccgcggccccgctccgggaagggacgacgctccgggggtccccctccgcggccgggcacgcccgctggagcatcccccaaccccgctcccgccctgtcccgcggcgccccggccccgcgctgatgaaattgaggagctcacccagcacccttcctccccttcctcctcctccatgaaaggggagggacccctcctgagctacatttaaaagagcttcgggcacccggcctccctgggtcccgctcctgcggcgcgggtgggaggtgtaacttgacaggtcaggatcgttccctagaacgaggcacacccgcacgcagagcgagcccgcctgcggagggcagagcctcccgggctggggaggagaaaccctggggcctggttctgtgcggggcagggggcgggggtcggcttgagggagggggtttcactgcgtagcctgggttttggggttgtgttacagcttctgttactggttagtatttggaactcacgaggtgtgagagaagactcgttttcttctggtgaagggtagctgagaaagcggggtgggggctggggccggtggggggagtggtctctcggcgggaagccgtgcacgcctccagcgttgacactttcccggtgcactttttctggtgggaggggagagcggagcaggctcacgtgtaaccgcgcaggagcctcctctggcttgagccctttcttggtaagtcccaaaccttcccaagacaaccttggccttagcagtagaggaggggtacgtgtgatgaggccccaaacccggctaagtgatgccacggatttgggttgatgcgatttcatgccttcggtatcacagtagcaaatgcgaaccgtgcggctcacagtgtaaagttctgaaaggttatttggctacaaatagcttgggagtacttgcaccttcttttctaggagaggacaacctgttgcattgcaagagtttgcaatctgcagatgatagccagggacccctccctaactatcctttaaggaagagcatttgggaggaaggggctgcctgcaggcttttgcatctgtgggtgttttaagtcagattttcagatgagatggtagagggttagaatggatggcagtggaggctgtgtttctctgaagatgaaactcagaagcaaattccttaatcccagattccacccacgactgaatactagaattggcaagatccggaatgcttgttaaagacctaatgggcgagcagtacttccaggtagcaaatagctgcatacttccaacataaatgtatagaataactcaccttttccaatagctctgcttttga

SEQ ID NO: 31647 - DNA, 904 bp, Artificial sequence
  DNA replication origin
agttagccatggcaagagagggacatgtggagcgcttgggttggaagtggggtgggttcagaggaaggagtgactgcttccaactgggaaactaaggagcatttcataggaaaagtgatgaaattcaacatgaaaatgggtaggatttagatacttaaagactgcttaggcctagaagacagcagactgaagcaatgaggctttttgtgcctccatatttccacctgcaaaacaagaatcagatcatctttgcccttaggatcctccacagaaaatagccaaagaggagacagggtgctatattgaacagcctggcctggggagcagggggtggctgggattgtatttagctgtgtgtaacacttggcaggtcactttccttctctagaccccaaggctctcatctagaaaatgaagagattcaccagatggaatatatcaaaagcatcctctgacccaaacattatcctgtgatccttacagtgccttggggaaggtttctgagaatgggtaatgggcttcctgctcgcatagacactttaatgaacgggtgtcaaaactgtggcgtggttacagggtcatggtcagggggccaggatgtctggggtcctgtctgggctttttctattttcatctatctgcctgggccctcaaatcttcatcctcacttcacctatagtcatttccacctcccatccaaatgcacccactcctaccccctcctccaccactgctgcacacaggggagaaaagtaagaagggagggagcagagggaagagggagaaacagagaaggagggagatagagaggggtgaggggagagggagggggagagagaaaaaaagagggagggagtggaggagtaaggtagagagagagtgagagaaacaatgacagagatgg

SEQ ID NO: 31648 - DNA, 1659 bp, Artificial sequence
  DNA replication origin
tcgatctcttctccaacttgtctcttacagaagggcgccgcgttcccgcgctcctccccttcccctcgccccgcccctccccagcgaggccccgcctcgctgcccgagcccggcgggaatgaatggcagcgtagccgccgcgccgctcggggtgccgattggctgaccggcgcgctgacgcgccggcgaccgcgggtgcacgcaggcgaacagagccggcgggggcggagccgggctccggggcggggcgcaggagccccggggcggaggagccggggaggcgggaggcgggaggcgggaggtgttggggccgttgaagcggcctccctcccgcccccagccgcccggtctggccccagccctgtcccgacccccggcctggcccactccgaccctacccggccgaagggttccgctggacacgcaggcggcctccggagcagcccaagcccatgagggccgcgcgcccggccgccggtgctgacgagacggagctcctggcccccgaggaggagcagaggatcaatgcggttcaagaatcgattccagcggtgagagggatggcgtcccggtcccgctgcccgtgtcagaagcgggttcccaaatcccgccgttaagcgcacggctcccggctcctcacctggattcatcctgggtggatcccgcaccttggccagggatcagttccctggggattccccaccctgctgtccctgggcgatccccttcctccaaggatgggagctcctgcctcacccgggtctcccctcgcgatctgcggacctcagatggattcccggccccgggactccaagcctgtcctccttcccggggatccctttgctcctggggctcaccctcccgacccccatacaggctgggctctggctctctctgggaacccgaaccccagccccgggcaccgcccccgagtcctccgacctggctttggcctccatccctttacctccagggtgggggtctcccggggcgcgcggaacggggtggcgccctgcggagagatttgtcgtaaagcggggtgctaggcattttgggtgctttgtgaacggccctagcaacagggaaactgaggcacgctccgccagcttagccctgcctggccgtgtaggggccttgctggttctccagctgaacgtcccagggcggtgctatttttgggctctgcgaaggggcatgttagctttcgggtggcgagacctgctgtggaggcgccggtgttaggaaacgaggaggaggaaccgtggaggcgccaccggaaggctggccgactgctcattcactgtagagctggtggaaatgccgggctggggggcgccgtggccttactcccctctggggctccaccgtctaacaatggatggaggttagcccatgactctgagaggaactccgggcttttcttttctgtttaagtgggtgaaagttcacctctccagggcatatggtaactgcatccctttgtgtgaattcccggaccttcaccaccagcatgtttgctgggggtgcagtgacaggggaaattttaagaaatgcatgaaatcttccaagaaggttgttgagtttttagacactaccttttatttcagaattttaaagtacacattttttttttctttccaatctccatgccctcactgc

SEQ ID NO: 31649 - DNA, 898 bp, Artificial sequence
  DNA replication origin
gaccgggacgccatccctctcaccgctggaatcgattcttgaaccgcattgatcctctgctcctcctcgggggccaggagctccgtctcgtcagcaccggcggccgggcgcgcggccctcatgggcttgggctgctccggaggccgcctgcgtgtccagcggaacccttcggccgggtagggtcggagtgggccaggccgggggtcgggacagggctggggccagaccgggcggctgggggcgggagggaggccgcttcaacggccccaacacctcccgcctcccgcctcccgcctccccggctcctccgccccggggctcctgcgccccgccccggagcccggctccgcccccgccggctctgttcgcctgcgtgcacccgcggtcgccggcgcgtcagcgcgccggtcagccaatcggcaccccgagcggcgcggcggctacgctgccattcattcccgccgggctcgggcagcgaggcggggcctcgctggggaggggcggggcgaggggaaggggaggagcgcgggaacgcggcgcccttctgtaagagacaagttggagaagagatcgagggagggagagaagtggtgaaggaggagatggaccaggaaatcttaaaagcattgtgaagaaaatagcagcaaacaagcagccctacctcattcattttttcttcatcattaatttctccatccctcctttcatttattccttcatcattttgagggccagctcccgcgaggctattgtgagaggatccagggcagaatgaaaaacctgtccttgtctgacccttgagggagttgagatctctgagcgtcttctaactctgagattcagtgagatccacaaaaggaggaatcctctgcaaggatccttttatgttatcctccag

SEQ ID NO: 31650 - DNA, 1103 bp, Artificial sequence
  DNA replication origin
tcattttttcttcatcattaatttctccatccctcctttcatttattccttcatcattttgagggccagctcccgcgaggctattgtgagaggatccagggcagaatgaaaaacctgtccttgtctgacccttgagggagttgagatctctgagcgtcttctaactctgagattcagtgagatccacaaaaggaggaatcctctgcaaggatccttttatgttatcctccagtttattttttattttattttatttttatccaggcagctttcaaataaacgagttgacttgaatcagggtcctgtcgctaaacctaaactcagagggcttcctggaagagaagttcaaataaaaatgaatgaatgggccaggtgctgtggttcatgcctgtaatcccagcactttgggaagccaaggtgggcggatcacctgaggtcaggagttcgagaccagcctggccaacttggtgaaaccttgtctctactaaaaatacaaaaattagccgggagtggtggcgggctcctgtaatcccagctactcggggggctgagatgggagaatcacttgaacttgggagatagaggttgcagtgagccgagattgcaccactgcattccagcctgggtgacagagtgagactctgtctctctctctctctctcacacacacacacatacacacagaatgaatgaatgggtgatttgtcgagcctttccaggatcactgatggaagttatatgtgttcccttccaggtatcgtgtccatacccagcccccagcctgcaggctagagactctgaagtggcatgaggccagcctgctaggagtgctcattcgacctacagtaaagcattggaaagccagggaattctgtcacccataattctagttccctttccttgaaccttccagagaggtgctttccatgcttcaatcttcccaagagctcctccagatgggcattatccaacttattttacagataaggctgaggcttatagtggtcaataaacttgccaaaggcaaaagtaaggctcctacctacctttcgctaactttaaagacccacctcctttcagtacgtcagactatctctccctgt

SEQ ID NO: 31651 - DNA, 844 bp, Artificial sequence
  DNA replication origin
tattaaaaaaaatacaaaaattagctgggtgtggtggggcatgtctgtagtcccagctacttgggaggccaaggtgggagaatcacctagaccagggaggttgaggctgcagtgagctatgatttcaccactgcaatacagcctgggtgacagagactctatctaaaaagaaagaaagaaagaggaagggaggaaaagaaaggaaaggaaagggaaagggaaagggaaacggaaaaggaaaagggaaagggaagagggaggaaggaaggaaaggagggagggaggaagtcaggaaggaagggaggaagggagggagggaggaaggaaggaaggaaggaagggaggaagggagggagggaggaaggaaggaaggaaggaagggagggagggagggagggaggaaggaaggaaggaagggagtgggggagggaggaacgaacgaacgaaagaaagacagacctgagactgggtaatttataaagaaaagaggtttaattggctcatggttctgcaggctgcacaggatcatgatgttggcatctgctcagcttctggagagacctaaggaaacttagaatcatggcagaaggtgaagggggaagcaggcaggtcacatggccagagcaagagcaagagagagagagcataaagatgccacacacttttaaatgaccagaactcatgagaactcactaccgtgaggacagtaccaagagatggtactaaaccattcatgggaaatccacttccatgatccagtcacctcccaccaggctgcatctgcaacactggagattacatttaaacatgagatttgagtggggcacacatccaaactatatca

SEQ ID NO: 31652 - DNA, 930 bp, Artificial sequence
  DNA replication origin
aaaaatgacttgtccgagttatatcagggtggaccccgggcaagactcaggtgcctctgctgtcagctcacctttcaagtttctggtccccactcgcacccactgagaccagagaccgatttacctgaggcagaaggtgctgcacgcattcttgtgaaatttgaggggaccgagaaggaatctcaggaagtttgtttacactgggggcctggagaccttcgggaaaatagccagaaccaaaacggaccagtcagcagacgcagacacacacaaagtgacagggacacagaagcagaagctgaactgggcagagcgggcagcggccgacccacctcgcacggccgcccccgccagcgccaggtgcagggctcatagcgggccagcagagggcgcgccgcccccagggagccgagcggcggccgcgcggagccgggcgggctaggggagccgcaggcgagccagtcgcgcccctgaggctaggccactcagggtgcaggacccggccaaggaggaggaggatggtgaggagcggaaccccctcgtgggcccgaggggcagacagacaggagtgcttcctaagaattacatcacgctgcgcaacgctgcggctctcggactccctggtgcaaaggggggtggggtaggggctgtgtgtgtgtgtgtgtgtgtgtgtgtatatatgtgtgttggggggaggggacttagagcaagagcccgggagagaagaagacgcgctcggggaaaacgctccatgcacatggagaaatttcttgctccgaactgcatgcaccgagaaacgagcccccagcacttccccgctgctcccctcccagtgcaaagcacccagctagtgagaaaccctccagccccacctcaagcaccgccccccctccccaaacaccggctctgcaccctccagcccggctccag

SEQ ID NO: 31653 - DNA, 641 bp, Artificial sequence
  DNA replication origin
ttttacaatgaagcctcagatagtcgcgggggcagggtgccctctctggggggaataatgccgttattcctcggctctcagttaatgaataccctaacgtctgtcccacggctgacggaggcagcgccggggagggggctcggctccggggccaggctattgaaatgaggagccatcgaggctgcgtcgggagggaagaaagcgccgggctggagggacagggcgggcggggccgggggcattgagactgcgctggggaccaggcgcaggtttgaaataattagcatagattcgccgggactccggacttggggggttggggggggtggggggtggggtggaaggaacgccgggagggaggcgcggagaggtggcagggaggtggggagggagcaaaggagagcgactttggagtccaagataaataaagagagcgctgagcagtgtcaggaggctggcccacgtggagctgtgaggacgggcgccactggggactgaggcggagggacgcatgcgagagtcaggcgtcggtcccaaggagttggctttttaaggggtggggtgggagtgatgttttgcacgtccctttaatgggttacgtgccttctgcccctatctaatcttaaagcgcaaagattccg

SEQ ID NO: 31654 - DNA, 1268 bp, Artificial sequence
  DNA replication origin
tctctcagacagggaggtaagtggggaaataagttgctactaagggcaaggacaaaggtctaggactttctcttttttccagaaagaagagacatgactgatcatatgtgctgacagaaaggtgcctacggttgggggaaaggacacagatagagtagagggggtggtgcttcttggttggacaaggacttagggagaaaggggtggggtggaatcttgggcacaggaggtaggattagcccttgacaggtggaggagcatccctttcatgcagcaggagggaaggcaggaaggacggtgcacatgtgcacagctgtaggtggggtggcaggaagatgagggcatcctttcctgattgcctctattttctcttcaaagtaggaggcgaggtcatcccatgagagtgagatggtcagcttcccaggctgggggcctgaagttcctgggaggaggtttggaaggcacggtgtggggctgggggtgggggtagaggaagggctggtggggacagttgggaggatggtcagtctctgttgggggccagctgctgttgtaggccatctatttgtgttggcatgtgtccacacagttgactggtctctctctagtgaagttctggtgtccagagttgggaatggaaaaggttcgttgttggattgactacaaagctgcaaggcttgatgggttatatgtgaccaggggacaaggtggcgagggattgacagtgacagcaggagagtggtttaaatgaataataaggacctataggcctgcaaggaagggagggaaattagcatgcaggaaaaaggttatcttaatcaagacaaagggtgggcattgcaggagttagtgaaaaagaaatatgagaggatgatggctactgtggctaggagggaagtgttgatggggagacttcagaggtggtcattggagggctgtgactctgatcatgggagaggggcgttgaaatggaagggattcaagttcattgactgaggccagggtgatgcatgggttgacttgggatggagacagaaaatgggagcaggagcccttgttggataaatattggggaggtactgtggggtcaatagagcaaagcaatgagtgggaaaggggaaggctcaagatggcaaggggagacagttttgttcaaggcaagaagataaagaacacttaaggtctggaaagtgaattcacaggataaagagtaggtcttgggtcagactgtcagagggtccccagacacctttaagtacatttcacag

SEQ ID NO: 31655 - DNA, 1689 bp, Artificial sequence
  DNA replication origin
actgtgactgtcaaaatgatcctggccctgcactcccagttggagcataagaggcagtggcctcaggtttgtccttgggtggtgaggagccgataagcctggacctctggccaggggaggccagaggctggcattagagctgccatacgggcccacatcttcatagcctgggaaggagggagttcagaggctaaggcctttgcctcctgggagccagcccttctggctctttgccttttgccaagacctcctcaccctccctgtttctgagtgtaggccaagaacagctgcgcacagatgtccctttgcttgggaagagggtgggatggatgcaccatgctgtgaatttggctgccagtattgtgtatgtgtgtatgtgtgtgtgaatgtgtgtgaggggtgtgtgtatgagggtatgtatgagggtgtgtgtgaggggtgtgtgtgaggggtttgtgcatgtgaggggtttgtgtgtgtgagggatgtgtgaggggtgtgtgtgtgagggtgtgtgtattcgaatgtgagaattgtatgaggggtatgtgtgtgaggagtatgtgaaggtgtgtgagggtgcatgaggagtgtgggagagcgatgcatgtgtgtgaggatgtatgtgaggggtgtgatggtgtgtgtgagagtgtgtgtgtgaagggtgtgttcaaggagtgtgtgtgaggtgggggtgtgaggggtgtgcgtgaggggtctgtgcaaggagtgtgagggtgtgtgtcagaagtgtgaggggtgtgtgagggtgtgtgtcagaagtgtgaggggtgtgtgaggggtgtgtgtgagggatgcatgtgtgagggtgtatgagggatgtctggggtgtgtgtgtgaagggtctgtgcaaggattgtgtgtgaggtgagtgaggagtatgtgtgaggagtatgtgtgaggggtgtgtgagggtgtgtgtaagggtgtgtgtaaggggtgtgtgtgagaggtgtgtgaaggtgcaggtgtgtgtgagggtgtatgtgtaaggggtgtgtgagtgtgtgagggtgtatgtgtaaggggtgtgtgaggggtctgtgtatgaggtgtgtgtgtagaggggtgtgtgtgagggtgtatgtgtgtagaggggtgtgagggtgtatgtgtgaggagtgtgtgaatgtgtgtaataggtgtgtgtgagggtctgtgtgtgagcagtctgtgaggggtctgtgtgtgagggtgtgtgtgtgggtgtgtgtgcgcgtgagggttgtgtgtgaggggtgtgtgtgaggggtgtgtgtgaggctgtgtatgtgtgagggtgtgtgtgaggggtgtacgtgagggtgtatgtgtgaggggtgtgtgagggttcgtgtgtgtgtgtgttttgaaaaggccttactgagtattttttcagaaggtctgagttccagccccctcttctactttcgccttgacttgcggacctgggttttgtggaatgatggcagatggcatcgccaggttgttgtgaggctgggttggaaggtacttggatgccacagcagagttgggtttctgtacacagtagggagctgtgcagggatttcaagcaggggaatgatgtgattagatcttgtttccaggggccctttagaggttcaggacacagcctcttaaatgcttgcctttagatgctgtcatacctgggaaataggaagtgac

SEQ ID NO: 31656 - DNA, 1297 bp, Artificial sequence
  DNA replication origin
cagcacatcagctacccggagaacgcggacgcggaagcaccgctgctcagcacccccgaagaaacacggaatccagagaggcacaggcaccgccccggcgcgcacagctgcactcagcggcttccttcctactacatacatacataggagtgggagccgaggaccacttgttgcttgcggacttcctctagcataaaagatggaaagaaaacacacaccgaagcaagggaccaaaggaacagaaaagaaacgcagagatcataggaaaactgcaaagaaatacttgataatatcttccaaacgattagagaagacataacattcattaagaatacacatatagatgtatatatacgtgtatgtgtgtatgtatatattattatgtgtgcatatatatgcatgtgtatgtgcgtatatttgtattaactgtagaagataaagctagacactagtaaaagtggtaaagcagattttaataatatactattgtaatagggaagaaggtacctcgtgaacggaactgaactttgtgcagaagtgactaggtgtttaagagggaggaggagggaatgtgaaggggatgagcaggaactcagtagtcaggaaagtgaaacttgtgaagggtgggtcagtgtaagtaaggttaggcgacagtgcctgttagatggctgttatgggagtcagggtcctatcctcccacagtaactgggagataggccctttgcttcctggtgattgcatgttggaggaatggctttcaggttcttgagaaggatactcctgatgtgtaggagacattacatcccagagagacagaggaaggattcacaattgtttagttttttgttgttgttgttaactctttaagaaagggacatcaggggctgcttgtaaggtgttggcaatagccaacagtgagttcttttggcagctttcccaggaagatactttagggggtctggggtcatcctatggatgcagctttgagcagttaaaaactatgtgtttaggccgggcgctgtggctcacgcctgtaaccccaacactttgggaggccgaggcaggtgcatcacggggtcaggaattcaagatcagcctggtcaagatggtgaaaccccgtctctactaaaaatacaaaaaattagctgggcatcgtggtgagtgcctgtagtcccagctacttgggaggcttgaggcagagaattgcttaacccaggaggcggaggttgcagtgagctgagatcgcaccaatgtattccagccggggcgacagagcgaaactccgtctcaaaaaaaa

SEQ ID NO: 31657 - DNA, 898 bp, Artificial sequence
  DNA replication origin
gggggcggagtaacagtggggcgtttgagaggatggagggttgaatgccaaaacttcgtaatcgtagaaaattctggaaagccgccggcggggcaaggccacgaggatcctcctcgcagcaccgcgccgcgcggggcccaggggccgcgctcacgcccgccgctcggcgcagacacgagtgcccccgacttgagccgaacctctagccgatgccggcgccgccgccgccggggatgcgtaagccgactgggaagcgagggggggaggcggcctgcgcggcaccgcccgacctggccgcggcgggctgaggtaggtgtggcggccgcagtaacgcaaacctgagggctcctccgctgcggagcggcgggcgggcgcggaggccgagggcgagcggggcagccgcccgctcgtcgccgctgaccccgagcccggccgcggtttccgccccctgccgtggcgggcgggcctcccctgcgctaccccctcgcccgcgcccgccagcgcccgaggccggggagaaaggggagcagcgggagccggggactaccggagatgggagcacgcctcctgctgctgtcgtccagccccaggttccggaggaatgctcgctccccgctggagtcctaccagcccaacacggacctgagccgcgaccacgcgggctgcagcctgcagcacatcagctacccggagaacgcggacgcggaagcaccgctgctcagcacccccgaagaaacacggaatccagagaggcacaggcaccgccccggcgcgcacagctgcactcagcggcttccttcctactacatacatacataggagtgggagccgaggaccacttgttgcttgcggacttcctctagcataaaagatggaaagaaaacacacaccgaagcaa

SEQ ID NO: 31658 - DNA, 1358 bp, Artificial sequence
  DNA replication origin
gctggcggcccagcgtcgttctcctcctgcgcgaggcggccaaggcctgctggcccggagccgcgcctccacccgcgcgaggtagggcttcgaggaccggcgcggcgcaggtctccggaggcctcccgagaggggctagggtcgccgggccgcgcgtgggagcgggtggggcccgggaggagacggcgccccggaggggagtgcgaggcctgggccgacggttacgggcgccgaccggcgttgcctggcctgaacgcccggcctttcggtggagggcagcttgcccctgtatgttgcgcccttccgtgggtcagaccggcggcaaggtgaggcggcggcggcagcagcagccgccttgggctcctggacgcgctcccgaggtggggcgggttggggagtggggattggagcgtgatggctggacgtcgccttctcggcgcggcaggtcccgggagacggggggacgaggcgcagtcccgccctcgggagagcggagccaccttcactgagggcgcccggtttggccccggaaaggcaggaagggggcggggaagggatggcgagctcggggtgcaccgcctgtttcttttctggttaggtatcgtccttggagaagatggaagcggagaggcggccggcgccgggctcgccctccgagggcctgtttgcggacgggcacctgatcttgtggacgctgtgctcggtcctgctgccggtgttcatcaccttctggtgtagcctccagcggtcgcgccggcagctgcaccgcagggacatcttccgcaagagcaagcacgggtggcgcgacacggacctgttcagccagcccacctactgctgcgtgtgcgcgcagcacattctgcagggcgccttctgcgactgctgcgggctccgcgtggacgagggctgcctcaggaaggccgacaagcgcttccagtgcaaggagattatgctcaagaatgacaccaaggtcctggacgccatgccccaccactggatccggggcaacgtgcccctgtgcagttactgtatggtttgcaagcagcagtgtggctgtcaacccaagctttgcgattacaggtatggtcttcgtggacactcactgtcccagaatgcgccgtgggaatcaggatttcatagagtggtgtagaggcctgctttaatctctgctgatgacctaaactcattttgaggaaacaagctaataaataaacatccctgagtttgtgcaagcgtggcagctttgcagtagtcatttgctgagacgatgcatccagcctccactcctcagccagcctgcccttttgggtaataaaacttggctcctaacgttaatacagaggtttctaagtggtgcc

SEQ ID NO: 31659 - DNA, 1444 bp, Artificial sequence
  DNA replication origin
gatggcagcttccgagacggttaggctacggcttcaatttgattacccgccgccagctaccccgcactgtacggccttctggcttctggtcgacttgaacagatgccgagtcgtcacagatctcattagtctcatccgccagcgcttcggcttcagttctggggccttcctaggcctctacctggagggggggctcttgccccccgccgagagcgcgcgccttgtgagagacaacgactgcctcaggtgcgcggcgcagggagcgggacggccgggtgggcggcgggcgggggacgcgcctgcgcacgcccgggcctgaagccgctagacctggtagtggaggggatgggggatggggaaggggacgagggttggaggggggtggggctgtaaaaatgcacgttcgcgaaccccggagatcctgattggtgtagtcaactttggggctcaggaatctgcattttattattattttttattattatttttttttttttgagacggagtcctgctttgtcacccaggctggagtacagtggcgcgatctcggttcactgcaacctccacctcccgggttcaagcaattttcctgcctcagcctcccgagtagctgggactacaggcgtccgccaccacgcccggctaatttttgtatttttagtagagatggggtttcaccatattggtcaaggtggtctcgaactcctgacctcagttgatccgcttgcatcggcctctcaaagtgctgggattgcaggcgtgcaccaccgcatcctgcccctattatttttatttttgagactgagtctcattctgtcacccaggctggagtgcagtggcgcgatctcagctcactgcagcctccacctcccgggttcaatcgatcctcccacctcagcctcccgagtagctgggcttacaggcgggcgccaccatgcccggctaattttttgtttgtttgtttgtatttttagtagagacggggtttcaccgtgttggccaggctggtcttgaactcctgacgttaagtgatcctcccggcttcccaaagtgctgggattacaggcgtgagcctccgcgcctggctggaatctgcagtgtaacgagcatccttcccgggatgcttctgatgacaggagaatcaaacttggaaaatccctgatgcctaagggcagggccaggctttctttcagccttgatttagcacatccgcgcttagctaggcactgtgcgactctgttgcgtgcccatggtgcagatgtgccggagacccggccttacccatggcggccttcagggtcaggtgcaggaagctgacaaaggggaatcgttgtgttttcttcataacctgctgttgtccagccttagttctcatgtgcccagtgtcccctgagacttctggtggcgtatcattttgtgtctcacccagacattttgggattct

SEQ ID NO: 31660 - DNA, 1434 bp, Artificial sequence
  DNA replication origin
gcgggccgggccgcggggcacagccgggggccggcggcggcgcgcggactccgcatcccgcaccccgatggtagccgaggagctggtaggtcgggggcagctgcgccggggaccccctgccggagacccgaaggcggcggggtcggggcgatggggagcctgaggtgcaggtgcagggtgcgacgcgccctccaggtaccccgggggcgggacgctccggacgcagaggtgtcctgggggctctcggccgccgcgcgctgtcaggcaggcccatctttccctccctcgtctgcgccccctctcgtccttccccgccggttgtctgcccgcgggctcctgacagatcgcgtgtgcgcggctctgggcggcgctctgcggccgcgccgtcctccccacgcgcgtcactgtcctcgggggcggggggcgagggcgcgacgcccgggtcgcctctctgcacctcaacttaaccggagcgtgcacacccgcctgcgaggctgacccgagcgcgtcccacccaaggtcgcccagccccgcgggcgtttacttttcaaaggtcgtgtgtacacagtctgagccggagctgccccttcacttctggagcctcgcccaacttctcaccctcggctcgcccgccggcgcagcccctgggagttccgtgcggcgagccaggggaactgggaagatgggccgggacatcggccggttgtgatccaaccgtgtttcgggctgagggaccgttcgaaccgaattggggtctggaggtcggaggctcaggggcgtctcggggggaatttgcattcgtagcccctgcaggcgtgtccggaggggtggaggccgtccagcctggggtgtctgccgacctcacgcccgggggccccgacggtcacgtgtccggccccgcctgcggcccagggcccggggtctgcgatctggagggaccgcgccagttttggggttacgatgtgctaggagaggcagtggctggatgcctcgaacgcgggctttctggcgttcaactcttttgtgccctagctgaaggtcttcctgtttcccttccagggagggataggagaagaaaggtgctgatcgtggtaggcggtgctgtggcgactcggaacggcatgggagccctgggcgtttcgggatcttcctctcctgggggatgtcctgggtggcggcgccttcctgccgccgttaacacaaacccggtggacttcgctccaggtgcgagtcgaggcctctcaagctgggtagggtgtatgcgcagggcaattagtgaggttaacctgggtatctttcccctactgtagtgcgcgttacttcgtgtttagatttgtctccagtgaaatctaggctgctggacctggtgcaacagtatctgttagttactgatcaaggaacaccgttcacaaaaagctattaattctggcaact

SEQ ID NO: 31661 - DNA, 1266 bp, Artificial sequence
  DNA replication origin
ggagcgggtgaggatgggctggctggagggggtgagggtgggcgtgctggagggggtgagggtgggcgtgctggagggggtgagggtgggtgtgttggagggggtgagggtgggtgtgctggagggggtgagggtgggtgtgctggagggggtgagggtgggtgtgttggagggggtgagggtgggtgtgttggagggggtgagggtgggcgggctggagggggtgagggtgggtgtgctggagcgggtgaggatgggctggctggagggggtgagggtgggcgtgctggagggggtgagggtgggcgggctggagggggtgagggtgggtgtgttggagggggtgagggtgggtgtgttggagggggtgagggtgggtgtgctggagggggtgagggtgggtgtgctgcagggggtgagggtgggccggctggagggggtgagggtgggtgggctggagggggtgagggtgggccggctggagggggtgagggagggtgggctggagggggtgagggagggtggactgaggaagggctgctgagtgaaggtcacagtgcaagaacaattccacagcgcttgtcccaatcagggaacctttaaggaacaagatatcggatggcaattttgtattttcctttttaggtaagacatatccaatgctgtcagctggatagagggaaaggaggggttactaggggacccacaacttaggggcaaggtcttggaccaggagcagaaacacaggggctggctgagtgctgcagggagccctcagccaacctgtgtccccactctggctgcttgtctctgcctgttgagatttcaccaaactaccactgtgttaatggactagaatcttgcaaccctctctagatgacccaggaaaatggatgctcagaaatcaaaaagaagcttgagactgcatggaaaaatcactagtgaattaaaatcttatttctgtttttttcaatcctgtctgtttcctaagaaaaagctggtgccggaatgaacgcgtatctttttgttgttgttttgacactgacaaaaattccttttgcagatggctactgaggcttcaaaggggcaatgtatcatgcaaataatttttttcagctatgacgtgtacagttcagtttgatttatttttgatgtcagaaacaaaatggaaagttagcgctttaaaaatgagcatggctggctgaataaataaataatatgctcttggccagaatctgccagtgcctccttaattgtccattgatt

SEQ ID NO: 31662 - DNA, 942 bp, Artificial sequence
  DNA replication origin
ccagcttgaagtcattggcacttctgagagtggatgctgatctgtccatgtgttccctttgggtttccccaggatggccaggctgtagcctcccgctgtggggcagagtgaaaccccctgccccaggagaggtacatctgtgcttgaggctctggggcttcatgctcttgtcccacggccactgtgtcctgggcccttccatgttccaggtgcaatgctagttctggcagtactgcagggaacaaggcaggccaaatcccagccctcctgagctcatgttctgcggggagaaggaacatacatcacacgatttcaggtactgctgagggctaagaagaagagaaaatagggagctgttggcgagggggcctgggcctactctgtttaggtgggtagctgggagtggcctccctgaggaataggccttggacttgggaggcagagaactgtgagaaaggcattccaaggagcagataacagcaagtgtgcaggacctggcatgggaaggaactgattgatgtgttggtaggacaggtggagggctggggcctccaagagggacagtggtagagatgactgagagaggcagacaagcgctggatggtaaatgacttgtgagccaggcaaggcagatgggaaccctcaggaggaggtcagaagggcagaggcatatggctggtgctctagaaagatcccagtggctccctgaattaaggaaggacggggatgcatgtttggaagcagggtggccagtggaagtttattggagaagtgcagtggagagctgatggcgtcttgggtgagggttgtacagtggaggtggggagaggcagtgggatttaaaatttatatttggagacaagttatggtagattctgatggattggaaatgggttatgaggtgaggggagagagaaaaattagagtgaactctaggttctt

SEQ ID NO: 31663 - DNA, 825 bp, Artificial sequence
  DNA replication origin
ccacccaaatctcatattgaattgtagctctcataattcccacgtgttgttggagggacccagtggcagataattgaatcatgggggcggtttcccccgtactgttctcatggtagtgaataagtctcaggagatctgatgtttttataagggaaaccccttttgcttagctctcattctcccttgtcagccaccatgtaagatgcacttttcaccttctaccatgattgtgaggcctccccaactacgtgagaccgtgagtccatttaaaactctttttctttataagttacccagtcttgggtatgtctttatcagcagtatgaaaatggactaatacaccgagtgactgaatgatgggtagggcgacttcaagggggtgggagtgtgagggaagcagtgggaatgtgggaatggcaggataagtgtgagagcaagagtgtgagagagcgagtgtctgcgagtgagggggagagagtgtgggcgaagactgagcaggagtgcgtgaagctgtgagaacgtgggagtgggagtggccatgggtgtgagtgagagggctgagtgtgagtaaagtgagtgtgagtgggtccatgtgagtgtgtagagtgtgtgaggggtgtgagtctcagagggtgtgtgagactgtgagggcacaggggagtgtgggtgtgagtgtgggagtgtgcaaatgagagaggacttgactgtgcatatgtgaggagagagcctgtgtgtgtgtgtgtgtgtgtcctgctggcgaggatgaagacaggctgttgatggggtgggtctgaccaggtacttcccatctcactctcaccacat

SEQ ID NO: 31664 - DNA, 931 bp, Artificial sequence
  DNA replication origin
tgaggcgggccgaggtcaggggtttaagaccagcctaaccagcatggtgaaaccccgtctctactaaaaatacaaaaattagccgggcggggtggcacgtgcctgtaatcccagctactcgggaggctgaggcaggagaatggcttgaacttgagaaggggaggttgcagtgagtggagattgcaccactgcactctagcctgggcaacagagcgagactccatctcaaaaaaaaaaaaaaaaagaaagaaaagaaaaagaaaaaaaaagattcattcaaagagcacaggaaaaatggaactaaagtggtgttttggtggtgggataatcagagtaggtaggggcagtgaagagaacagggctgtgacctaggtgatgagcatctatcagggtggtaatggaaggaatagaaaagagaatgaaagggggcagtcaggaggagagactgagttgctatccaaggctgaaaagaaaatcttgggtgcagctggggacacgaagcagctctggaagcctaactgcgatggagattcagatgtaggagccagatgcgcagaagtgttgctggtgctataaaagagggcggaggcactgccagagtgggcagtgagaagacttcgaagagggtcaagggcagagcaacaaggagagccagtatttagggagtgggcggagcaacaggagccaggagagaggaaggagaacctggcttcctggggtcacaggagccaagggagggcagcttcaggagagatcaggggagtgcgtgtggaagagcaccataagaatgcagaagatgctaaggccctgagctgctgggtgacctccgagtcaatccgagtgatgggaggggctgtcagcctgcagtggatgaaggaggatggcagggaagactcaaggacccttggtgtttaaggggaggaggaggagg

SEQ ID NO: 31665 - DNA, 1404 bp, Artificial sequence
  DNA replication origin
cccagccccagcacggcccggtcccgcatgccaccgccccgcgaggaccgctctccaagggctgcctggggccccgcgcccgtactctcctaacccggagctcttggcagcccattgctgcctggctacccggggaggaggaggcgcaggagtgagctgcccgagaccgcagggcaagtaagcggctgacggcggaaagaccctggggaaggggctttgcggccggctagaaacattttccccaagcggctccgcaaaatgaccagcctgttccgccggagcagcagcggcagcggcgggggtggcaccgccggggcacgcgggggcgggggaggcacggccgccccccaggagctcaacaacagccggcctgcccgccaggtgcgccgcctggagttcaaccaggccatggacgacttcaagaccatgttccccaacatggattacgacatcatcgaatgcgtgctgcgcgccaacagcggcgctgtggacgccaccatcgaccagctgctgcagatgaacctggagggcggtggcagcagcggcggcgtctatgaggacagctccgactcggaggacagcatccccccggaggtaggggcgcagcccgggtaattccaaccaccactggaggacagcatccccccggaggtaggggcacggcccgggtaattccaaccaccactggaacctctaagaggacctgggttactccgctatctgggttctaattagcaagcagccttacttcccctagggaaaagtaccatccgtcagtcaccttattttatgggcagaaatcatgcagtcattcaacaaacactgagcgcccactcagtggtgtgcgagacgtggcactagaccctgagtcaggaggcatcagaatcaaggtgcttgttaaaaatgcaggtgcctgggccccaccccaacatactgaactccacatcaggcgtagagtccgctagtggccaagtcagaccaaatttctgccctcctggagctcacagtccagtgtggactagaagcgcgagtcgggtactgacggccagagtggtaagtgctcgatggagacgtggaagcagcagaaaggagtgacttcccagaggaagcgatggctaagccgaaaccctaagctgagacccaaaggaagagtgaagccgggggaagggtgtgcaggcaaagggaacagcttgtgcagagtctgggaggtgaaatagtgcctcactggctagggaactggcagcaggaccatctgtcagggtcctagagtgagaggagatcaatgaggttgacaaagccctgacgctgagaaaaagagtgcggctggggccgggcgaggtggctcatgcctgtaatcccagcactttgggaggccgaggcaggtggatcatgagttcaggagtt

SEQ ID NO: 31666 - DNA, 1607 bp, Artificial sequence
  DNA replication origin
cccgcccggccccgggcgcggtcctcgccggcgccccgcgcgcaatcccggccgcggccccggcccagcggccccaccttctcgggacccgttgcccaggcgccgccgggagggccgggccgtcgcgagtttgattcccggggctgtcggcgcggctccccgggagctccgcgtgcggcaggtccccgcccgcccttccttcccgagcccccacctcatcccgggccccgggcgcggggggcgtgcgggcatctggggggccgggagcggggcgcgcgattagaccggggggcgcgggccagcgccgcagggaagggagacgaggcctcccggagccggcttcgcccgagtcccctctcccgccgctcccccttttgtgtgggcgcccctccccgcagtgcccgggcctgggggcgcaggctgggcggcgacggcaggcgggggcgcctgctgggagccgagcgcctttcagggggaggggagcttcgcttcctgccccccgccgatgtcacaggtcggctcagccttttttggtccctcccggtcccctgggagctgtatctcccgtcagctcggccagggaaagttgggaatgcgctgtccccgcccctgctcgcccgccccgccggctcctgtgccccaggctctgagctccaaggggggctggtgtcagcgtttattcattcctccctcttccttttctcggtcgcgtggtcgccttacacccagcactgccctgcccatttcttttccccttaaaaaaagttttagctctaagaaacgtacactgaaattaaattcctgagacggaatgtgttttaaggggagggagggtttagattttcctttttttggtggagtagtggagtagaagatgaggggactccctgggagtttagaaacaagatgccctggaggcgatagaggatacaagaagaccatccaccgtgctccccacctgatccgcagtcagcgtcttgtagcgagaggaatgagccttccctgggtgatcccgcagcacctgagccacctggcccaggagaaaggactcagggagatgtactgggcctttcaccccttttctttatagccagctgtgcctgaaggaggtgagggaccccaggaattctctcacggaggaagtcatctcaccatgtggttgggcccctgctggatcaagtgtgaagctgggtcctctctgttgttgggggtcagtgccactggtacctcagtttgaatatggtgccatctctgggatggagaggtgctgctgggagaaacctggctcgggtctccaggaagctggagcgtgtgcagcagggctgggtgtgaaacccgctgtccactttctgcagctggaagggccaggacaagggaaacaggatactgctaccgacctgggcacatccttgaatagaagagagaccctggacagcgaggatggcccagggatgttgatatgactagggctgtatccccagctcctgggccaggccaactagggccagaggttggagtcatgggcccctttgagaatctggtgaaagctctaactcctctccttccaaaatgcatgtgtgtagggagacacctgtattcaacaccag

SEQ ID NO: 31667 - DNA, 1447 bp, Artificial sequence
  DNA replication origin
ctcccggggagccgcgccgacagccccgggaatcaaactcgcgacggcccggccctcccggcggcgcctgggcaacgggtcccgagaaggtggggccgctgggccggggccgcggccgggattgcgcgcggggcgccggcgaggaccgcgcccggggccgggcgggagccgcgggagcgcgggggtcttaccgggcagcgccacgcgcgtccgctccgcgcgggccgcaggggccgggccgcgggccgggcgggggaggggctgcaatccgcagcggtggcggcggggccaggctcggcggcggcggcgcggctggggcgcggggaggcggagaaagtgaggcgaggccggcttcctagcggcgggcggcgagaaatgcagctgtccctgcgcggctgccggcagggccacaagtggggccgcgcggggaggagcggggctgcgggcggggcggggcgggggcccggctgcggcgcccccgggccctttccctatggccgacccctttccagagaggagggaagcggacctgggggtccggaaacctacatggttgccgggggtggagaggggagcacccagtgaaggctggaaaaatgccctccgtgtacctccctccccggccgcagtgactccctagcttgcgggcaggagggcgtgagcggggtgcctcgacctcccgcgcagagcggggtgcggggcatcctgcccctcccagctgcggagagggtgggcggaggagacctgagacctccgagactccgcggggagctaagagcagggctgcccgacaggttccaggtcagtgccaggaacccagggtgaggacgcacagctggggcttgggacacaggtgtggaggaggggcacctccctggaattagggccccggaaaggaaaccaaatcaaatgctgaggacacaggagatggtgggaagggggagcaaatcaaagctatcactcgtccacaccgacagataccacctgccatctcccattttctcctcccccaacctccccagcatccctgatcacttcaagggctgctgagccctgggaagattttccacggaagaacttgtttaataaatgggaaactgacctttgctatacttttcccacgtgctttcatttcagactccaatttgggagtaggtagcctaggtcaggtggtgaccaccaagcaccctgctacctaggggatctgaggagggtgaagaaggccagatgcaaactaagctctgtccccaaacaacttgcaaagggtctgcaccctcctcctggaaaagtctgccttacagacccatttgcccatctgggcccagaaccccaggaatagcccccctctcccctcctctgagcgcttgcaatttgctagccttgctgagacagatcgacacgctcagcctcagagacagctgatggtaaaaaccacaaaccaaagtgc

SEQ ID NO: 31668 - DNA, 1004 bp, Artificial sequence
  DNA replication origin
agaacatctggaaagaggggttggttagaaagttagaggactcagccttggagaaacccctggggcaggcagagctgaagaaatgagggaatggatagaaagacgcagaggctaggaagccatgagggtgggaatggtttcaaggaggcgttagcaacatccagggctccaatggagtgaaggaatgggatagggaggaggcccatgggttgaaacaatgaggagcctaaggttgcctcccttggaaaggcatcttcccctagaaagatgccggtgcctccctgtaaaaatcaccttcccctaggatgaaggggaagaaagtcagattgtaggaagttgaggattgaatagggcttgaagaagcagagagtgggtctggttgcttcttaggggaggcctactgatgaatgcagaagagagaaacagggcaatgacttgagggcagggcagggttggggccaggttcccttagaagggggtatcctgaagtgtttgtagttttgaagcagaggggaggagaaagaagaactaacagagtttcctgaagcacataggaggttgggctggaaagcaaaagggacatctctggaagagcagagacaatagggcctgaaccaggcagaagtggaggagtgaggcggtgagagaaggagaaatgaacaggatctgataaccagtggagggccagggaagctgcacaggagacagaggcttccagcctctgagccagaggtggattcaggagagtaggaggaggtggcttaggtagggaagcggtctcagtcgcctttagcctccttgagttttaggtgtctgggagactcacaggtggccctctgtaggcggctggtgtgaggggctggagccctgggggctcagaggcagtggtgggagtgggtggaggtgtctgggggtggggaagttgtgagaggcagggaaggggtctgagaaaaagcttccagaaggacagacccaaaaggaggagtatgttagcaaagcccaag

SEQ ID NO: 31669 - DNA, 1176 bp, Artificial sequence
  DNA replication origin
ggagccgggagggaggggaggaggagcgcccgcccgcccgccagcccggggcccggcccccctgtcccccccgtgcccccccgggggggcccccagtacctggaacaggaacgcggtccagttggcctccatggctgcggcggccgacccccctcctccccactccccccgctcggggagcctcctcagccggaggaggcgacaacaaagcggcggcggcggcggcggcaacggcagcggcggctcctcaacatggcagcgccgagcgcggccacttccggtaacctccgggacgcaccaccgcggcggcgagcgcgggcggggggggagccccggcccggccgccgccgcccccagtcgcccggaccccctctgggcgtccccgctgccggctcgccgcctcggagctcagccagtgcccgctggcggtggggtcagggcccccgcgggggggctggggtggggcccggggcggggatggggcgcggcgtccccccccgcgggggtgtgtggtgctgcggtccgtggctcaggcagctggagcagggggagctcaggagagaagatggaggacgccagggtctggcgctggcccgctgggcacagctgggccgtctcccgtgactcagacacggtgtccagcaccgtcgcgtccctgttagaccctcagcggagggcacaggccacggcggacactcggctcttcagtcgctcatgcacagcatggtccccacctccaaactgggggaagccctttcgacttcgagcctctcttccttttggcatttcctccccggccggctaagccctctgcgctctcgctatgatatgcatctcatggcgagatggccttccaactcaagcagggaatcccactggggtgcagcctcagatcctctcagtgtggagggaaacacttcccacgcgtagagatgtcattactgggttattcttgggtgaagggctgagcctccccatcctccccttcactccaagataggatgtgaaattctatcccaacacccctcctctcccgccaaaaataaaaacaagtgagatagtatagacaaattattttagtcctttagtacagtctgtttcctccttcacccccagaacaaaaatcgaacttctggttggacagcgtcagatgtcactgaggtgaccccagcctgt

SEQ ID NO: 31670 - DNA, 878 bp, Artificial sequence
  DNA replication origin
gagggtgacgtcgcgcgtgcgtgcgcgtgcgctgaacgtagccctcgcagcacccgttgcgctcccgcgcgtgcgtgttgggatcgaatcgctgtttccttccgcttctcttcctctgtctcccccccatatccgtgcgccgagctgataaaggcgccattttggaggggccgcgggagacgtggtgccgctgcgggctcgctctgccgtgcgctaggcttggtgggaaggcctgttctcgagtccgcgcttttcgtcaccgccatgtcgggaggtggtgtgattcgtggccccgcagggaacaacgattgccgcatctacgtgggtaacttacctccagacatccgaaccaaggacattgaggacgtgttctacaaatacggcgctatccgcgacatcgacctcaagaatcgccgcgggggaccgcccttcgccttcgttgagttcgaggacccgcggtgaggcggcatggggcttgcagccttgaggaaataggtccgagtagttggggaaggctccaaggccttaacatagagaacggggaagcgggggctcttagagaggttggggcgagactgtatcgcccatgcaggagtcgagtaaggagctgagttgatgtggcttctctggcgcctcgccttggacgtccccggagcccattcgcaggctggagcgggaaactgaggcgctgagggctggtgtagtggttgggagcctggcgtgtttctgggtgggggaggggccattcctattatgcggcgcatgtgggctcttccacgttgggtgcgcatgtgcggggggtttgctggttcccaactgagcgagcttctcctcctggtgtttctcatcccttttactttctgcgatcccgcagagac

SEQ ID NO: 31671 - DNA, 904 bp, Artificial sequence
  DNA replication origin
gaccgggagggaggtgggggggtcagcccccccacccggccagccgccccgtccgggagggaggtgggggggtcagccccccgcctggccagccgccccgtccgggaggtgaggggcacctctgcccggctgcccctactgggaagtgaggagcccctctgcccggccagccgccccgtccgggagggaggtggtggggtcagccccccgcccggccagccgccccgtccgggagggaggtggggggggtcagccccctgcccggccagccgccccgtccgggaggtgaggggcgcctctgcccggccgcccctactgggaagtgaggagccccgctgcccggccagccgccccgtccgggagggaggtgggggggtcagccccccgcccggccagccgccccgtccgggaggtgaggggcgcctctgcccggccaccacccggtctgggaggtgtacccaacagctcattgagaacgggccatgatgacaatggcggttttgtggaatagaaaggggggaaaggtggggaaaagattgagaaatcggatggttgccgtgtctgtgtagaaagaagtagacatgggagacttttcattttgttctgtactaagaaaaattcttctgccttgggatcctgttgatctgtgaccttacccccaaccctgtgctctctgaaacatgtgctgtgtccactcagggttaaatggattaagggcggtgcaagatgtgctttgttaaacagacgcttgaagtcagcatgctcgttaagagtcatcaccactccctaatctcaagtacccagggacacaaacgctgcggaaggccgcagggtcctctgcctaggaaaaccagagacctttgttcacttgtttatctgctgaccttccctccactattgtcct

SEQ ID NO: 31672 - DNA, 1205 bp, Artificial sequence
  DNA replication origin
gacggggcggctggccgggcagggggctgaccccccccacctccctcccggacggggcggctggccgggcggggggctgaccccaccacctccctcccggacggggcggctggccgggcagaggggctcctcacttcccagtaggggcagccgggcagaggtgcccctcacctcccggacggggcggctggccaggcggggggctgacccccccacctccctcccggacggggcggctggccgggtgggggggctgacccccccacctccctcccggtcggggcggccggccaggcagaggggctcctcacttcccagtaggggcggccgggcagaggcgcccctcacctcccggagggggcggctggccgggcggggggctgatccccccacctccctcctggagggggcggctggccaggaggggggctgacccccccccacctccctcccggacggggtggctgccgggcggagacgctcctcacttcccagatggggtggctgccgggcggaggggctcctcacttctcagacggggcggctgctgggcggaggggctcctcacttctcagacagggcggttgctaggcagagggtctcctcacttctcagacggggcggccgggcagagatgctcctcacatcccggacggggcgacagggcagaggcgctccccacatctcagaggatgggcggccgggcagagacgctcctcacttcctagatgggatggcggccgggaagaggcgctcctcactttccagactgggcagccaggcagaggggctcctcacatcccagacgatgcgcggccaggcagagacgctcctcacttcccagacggggtggcggccgggcagaggctgcaatctccgcactttgggaggccaaggcaggctgctgggaggtggatgttgtagcgagccgagatcacgccactgcactccagcctgggcaccattgagcactgagtgaaggagactccgtctgcaatcccggcacctcgggaggccgaggctggcggatcactcgcggttaggagctggagaccagcccggccaacacatcgaaaccccgtctccacccaaaaaacacgaaaaccagttacgcgtggcggcgcgcacctgcaatcgcaggcactcggcaggctgaggcaggagaatcaggcagggaggttgcagtgagccgagatggcagcagt

SEQ ID NO: 31673 - DNA, 1317 bp, Artificial sequence
  DNA replication origin
cccaccagttgatggacatttgggttgtttccactttttagctattatgcataatattgctaggaacattcatgggcaagattttgtgtgaatatactctttcattttgccggggggtagggtgggaatataccaaggtgtggaatttctgggttttatgttaactctatgctatccttttgaggaatggccagactgttttcaaaagtgcctgcattttatattcctacaagcagtgttggagggtttcaatgtctcctcatcctcaccaacacattattatttgccttttttattatacccatcctagggactgtgaagcggtgtctcattgtggtttttatttgcatttccttaatagctaatgatgttggccatcttttctcatatgcttatggaccatttgtatatcttttgaggagagatgtctattcagattctttgcccgtttttcattggattttttattattattattgagttgatggtgttctttatgtattgtggatactagactttcatcaaagatttaattttgcaaatgttttctcccattccttgggcctgtattttcactttcttgctagtgtccttggaaatacaaaagttttactttgggtgaagtccaatttgtctgtttttttctcgtcacttgtgcttttgatgtcacgtccaagaaactattgcctaacccaagatcacaaagatttactcctacattttcttctaagaattttagctcttgcatttaggtcagtgatctattttgagttgacttttgtgtatggtgtgaggtagagtccaacatcatttgttttacatgtggatacccagttgtcccacatcaatggttgaaaaggctatcctttcaccactaaattgtcttgacaccattataaaaaatcagttgcctataaatgtaagagtttctgaactgccaattctatttcaatgatctacatatttatctttatgccagtaccacactgtcctcatgactgtagctaagtagtaaattgtgaaatctggaagtgtgaatcctccatctttgctctaatttttatgatttgttgtctattctgagtcctttgcatttccatatgactggtaggaccagcttatcaatttctgttaaaaatccagctgggatttttgatagggattgtgttgactggtagatcaatttggggagtattgccatcttaacaatatgaagttttccagtccatgaacatggatgtctttccatttagttaagtcttctttaatttcttttaataatgtgttctaattttcagtgtacatgtcttgcacatt

SEQ ID NO: 31674 - DNA, 1553 bp, Artificial sequence
  DNA replication origin
gcccccacccaccgctcaccttcacggaggcgagtccgcactgggccctggggaggagcgatggcccgaggcagagcacaggcaggggcggtgttccctgggctcctcctgcagctgcagcagccgccgccgccgcggtctccggctcccgcagcccgaggccgatcgctccctgccgcggtccgcccttggagtttcgccggccgcccgcgctccgcctcacgccgcccgcccgcccgcccgctccgcactggcgcctcacagctccgctccgctctgccgctgagcgcggccgacgcgcggcccccgctgaaatagtgccccgcccccgcccccccgccgcgcgcgccgccgtccgcgctccccattggctgagcccgcccggccccgcactgcgggcttctccccgcgccgctctcgccccacatcttgtttcctcccacaatgcctcggggcggagggagggggtggggaggaggagctggagcgggtgggggagggagccgtggccttaagaaaggagaggaatgcggacccctccccccggggctggagaggccaggcctgaaaaggaataaagagacatggtcctgagagaggaggagagggaagggtgtggagacccccagtcccaaggagaaaaaagggagagggggatggagatttcagacccagggaacagatggggctgaggtagagaccccaaccttagagaggggaggagatgaagtcaccagcctcagaggaaaagacaggacactccctcctcccgtatctgtgagaaagagagggacagccagccctatggagagggagaggcataggagccccaggactccctcccctcaccttccgggaaggtcccttcttcctcctttgttctttgaggctgaaggacctaaactcccagctgggcccccagccggtatttgtctacaggagcaatggagacagagccgaagcaaaattgatggggatgtgtctttggtacgcaggcctctgctgtccttgcacatttatggccttggggtcctgggatgggggtgagagtgagcgatttcttgtcgtctgtccctgcctgtccaggtagacaaggttggaggagagtgaatagaagcccccagaggtggtgcctgtcagagctgtgaggagccttcaaaaaccacccatccacacccctcactttataaaggagagaatccaagtacagagagccctgccagatcccgcaggtcaggcttgacttgcttctagctgaaaagaggtgcacccaggaagcagcccctctggaggctcaagagactacttctgggagagtgggtgtgaacgtgcgcgttgggagcctgcctgccctcactccatcccactcccaggaaagatcctcaggcctgcggttttctttctggtctgttttatacagaagtgtctacctcaagggctgacgagcctttattgggaaccaagcattttggccatacagtagggattaagaagctgccggggatagctcccactcccatcttttccccttcgcctctccaaaccatggtcag

SEQ ID NO: 31675 - DNA, 1954 bp, Artificial sequence
  DNA replication origin
gggggcgtcccccgggtggcgggcctgtgtccgtcgcgtgcgactctacacgacccggccctcgccgcggtggccctgcggcctccttagccggccccaaggcctggaacagggctggccccgcagcccttggcgttgacggtccgggcagcgcagcgcgcccccgccgcccctccctctcggcgcagcccgggctgcgccaccctttgccccggccaccctcgtggcgctgctggaggcccgggctgcggagctgccgctgcccccgcccccgggagtctctctgcgctgcgtggaggcccctgatgtcaggggccggggaagagggggtggagagggctcgggcgtgacgcggctcctcctgccgccaccgccaccctctggggcgtccttcctgcagcgaggacgcccagtcactccggcgctgttccaggccgggtgggggagggcggccgaccggccggggcctgcggacctggccggcggcgcgggcgggaggtcggggggaaggaggatgcttcctcgttccccaggtgctgcccttcgggaccgcagcgctctggaggatgggatagtggagggatacggcccacttggagagcccgaagagggaagtagaagtgtgtgtgtattggcgggtggggatggtggtccgtgtcattcggagatttagcctttttttttggttgcaaaaccaggaatagaggatgggagctgtcctggggtgccctttgtgcttttcacaggagccttggctcgtgactgaggctgctggcctggggccctctggccatcttcctcctatctggaggcccaggtcccttgctttttcccaaggagggaggggctaggctggacaccttcctgtgctttgcttaccggcaccttggacaggggtggtaggggttgggcttcacctctctcagatgcctggggggccattgtagtcgtaagaccaatattatgtaaccgcaggctctttcctggagagtaaggtggcttttaattactgtaacaaagttgctcctttggactttgggaatgaggcagtggagcaggtgagcttgcaggcaaaatggtgccaatttcatactttcactttgctgtctaaccaggccccacccccacccctgggtttgtaaacagtgcccccttctgagtggtaacctggaataggccaccaggtgacactagtttttcttcacttatacagagccttataatgtaagaacctttctccctgtgctgctgttgtacctttgctcagacccatttgagtttaccccatttatctcatttcaaccattagtatttaaaatgaagatgttgatttgcccaaggtcacgtaactagtcattccttgaacagggttctccgaatctttcctcagcaccacatggtgctcacagactccagttgaggctctgacttttcctctccagaatgtgggggcagagggtgctggtctactacctctttgctctgccagtttctgccgaagtggaaccagccctgcttagtttggcagtgctatctagatgaaggggccttggatgcggtcaagggctgcctggctggcagctggcatgtgtgcattctctgcatgtggtgcaggctgaaatggtggtggtgagttctgttttccctttcagccatctagcccacaggctattgtgaactccgagatcaaggtggcctggaatgataccaaggatatgtccttgagcaggcagcctcctgtgtagccttccatcagatagagctggaatgacagcatctcttgtccattgggctgggccacagaggggtgcttttaggggtgggatgatgggggagatagttactgctccatgtgttgggactgtggtcaaggacaaagggctcatcccctctgttcctgcatagtacctcacatgttgccacctgtcaggcacgtcctgagattccgctcgtc

SEQ ID NO: 31676 - DNA, 1138 bp, Artificial sequence
  DNA replication origin
tagttctaagtgggcttttatgctaaaagcctctggggatatctgttttgaaaataaagataggtgtcccctccttgctgtcatctagcccagacactctgcttgctctctggctgtctgctccctgggaaggctttaggaggaccacccaggacaggatgaccatgctgccatctgctctggagctgggtctcagtgcagagggacagtgactgtggatggttgcagtctctggtgggaggtgaggatagaagtgataaagagctaagaggagcttctgggagccttggaggaggtcagtcttgcagtggtgaagccaggacataggagatggagcagggctgtgagaggaggagattctgaggaggatgcaggggaaatcttgtctgttaatgaaataggagtggggtggggtttggggtggggtggtcattgccgtttgagctgctgattttcatgagtcgccttcaaaactctcgtgtagggttgacaatgtgggggggtgggggatccagcttattcttttattttcaagtccattcttggggctggtggggaggcaggagaatacccctccctaagcccttagtgtgtgccgagcttgctttgtgatgttggcaggggaggggagacctgggtggtgactgagttccctttatcaaacccttcagtgggcacaaaattgagtgcttgattttaggttttatttttttatgaatgtccaaatctgtgtttccccctgccctcccagactgtgtggccagttgaaagtgtctggtttgtgttcatctctccctcatttctggagcagggcctgagaccctgccacatctcctatgctctgcatccacgcctcttttggacattaaaggttgattgatgcacctctgcactgtttgggtctctttggggatgaggggttggcatggtggcagtggtgccacacagtgggtgagggtggagagtctccagggtggaatagaatggggactgaagggaagaccagccactagatactgattggcctgtagcagcacttatttgtgcctaggcttatgccccttaagtagaggaaaactaaccagcagcactcacccttaagggctcctgggttctgccttccttggtggtgatggcc

SEQ ID NO: 31677 - DNA, 1237 bp, Artificial sequence
  DNA replication origin
tccgatttctcaatcttttccccacctttcccccctttctattccacaaaaccgccattgtcatcatggcctgttctcaatgagctgttgggtacacctcccagacagggtggtggccgggcagaggggctcctcacttcccagcaggggtggccgggcagaggagcccctcacctcccggacgtggtggctggcagggtggggggctgacccccccccacctccctcccggacggggcggctggccgggcagaggggctcttcacttcccagtaggggcggctgggcagaggcgcccctcacctcccggacggggctgccagcggggcagggggctgaccccccacctccccccaggatggggcggccggccaggcggggggctgaccccccccacctccctcccagatggggcggctggccgggcggggggctgacccccacctccctcccggacggggtggctgccgagcggagacgctcctcacttcccagacggggtggctgccaggcggaggggctcctcacttctcagacggggcggccgggcagagacgctcttcacctcccagatggggtcgcggccgggcagagacgctcctcacctcccagacggggtcgcagccgggcagaggtgctcctcacatcccagacggggcggcggggcagaggcgctccccacatctcagacgatgggcggccgggcagagatgctcctcacttcttagatgggatggcggccaggcagagacgctcctcactttccagactgggcaaccaggcagaggggctcctcacatcccagacgatgggcggccaggcagagacgctcctcacttcccagatggggtggcggccgggcagaggctgcaatctcggcactttgggaggccaaggcaggctgctgggaggtggaggttgtagtgagccgagatcacgcctctgcactccagcctgggcaccattgagcactgagtgaacgagactccgtctgcaatcccggcacctcgggaggccgaggctggtggatcactcgcggttaggagctggagaccagcccagccaacacagcgaaaccccatctccaccagaaaaacacgaaaaccagttacgcgtggcggcgcgcgcctgcaatcgcaggcactaggcaggctgaggcaggagaatcaggcagggaggttgcagtgagccgagatggcagcagtacagtccagcttcggctcggcatcagagggag

SEQ ID NO: 31678 - DNA, 948 bp, Artificial sequence
  DNA replication origin
gaggtgaggagcgtctctgcccggccgcgaccccatctgggaggtgaagagcgtctctgcccggccgccccgtctgagaagtgaggagcccctccgcctggcagccaccccgtctgggaagtgaggagcgtctccgctcggcagccaccccgtccgggagggaggtgggggtcagccccccgcccggccagccgccccatctgggagggaggtggggggggtcagccccccgcctggccggccgccccatcctggggggaggtggggggtcagccccctgccccgctggcagccccgtccgggaggtgaggggcgcctctgcccagccgcccctactgggaagtgaagagcccctctgcccggccagccgccccgtccgggagggaggtgggggggggtcagccccccaccctgccagccaccacgtccgggaggtgaggggctcctctgcccggccacccctgctgggaagtgaggagcccctctgcccggccaccaccctgtctgggaggtgtacccaacagctcattgagaacaggccatgatgacaatggcggttttgtggaatagaaaggggggaaaggtggggaaaagattgagaaatcggatagttgccgtgtctgtgtagaaagaagtagacatgggagacttttcattttgttctgtactaagaaaaattcttctgccttgggatcctgttgatctgtgaccttacccccaaccctgtgctctctgaaacatgtgctgtgtccactcagggttaaatggtttaagggcagtgcaagatgtgctttgttaaacagatgcttgaaggcagcatgcttcttaagagtcatcaccactccctaatctcaagtacccacggacacaaacactgcggaaggccgcagggtcctctgcctaggaaaaccagagacctttgttcacttgtttatctgctgaccttcc

SEQ ID NO: 31679 - DNA, 1505 bp, Artificial sequence
  DNA replication origin
tcccgcaggctcgcgcggtctccaacgagatcgtgcgcttccccactgatcagctgactccggaccaggagcgctcactcatgttcatgcaatggggccagctgttggaccacgacctcgacttcacccctgagccggccgcccgggcctccttcgtcactggcgtcaactgcgagaccagctgcgttcagcagccgccctgcttcccgctcaaggtggccctgcttcccgcccactgcctgggttgggagaggggagattgtttctggaaggggccatctcccttctgtgcccaggtttcctttcccagacgctgaggaaggctggccctgcctcccttgtgtccacagcactggctgctcagctatgacctgtctccttcctgcgcctgggctcagccagctggcagccagggccgtccatttgctcactgcctctggcaggccaagggagagagggttgttcctccttggctgacaggagtcctgttggtggaatcactggctctttgttaggttgggagagggttctgggaggagaccttctcagtgccccccaagcctccatgctcagtcctgtttccgccccactgagagggcagccccaacccccatcacacagaaagagagagcctgggggtctggtgggtgccgtgggacagggctgggagtgggcagggtggtcgaggcactgctgagtagggaaggaggaggagagaaaggagagagcgcctgagagagggagagacagacaggagaatgtcagggccagagggagagcaggcacagcagagagaaggggagagagacgggcgacgctttagtgaggagggatccgaggcctggcggtgcccagacccaggggttgcccaggttcccagttcagtgttctgctcattaaccctgcacctcagaggctgttgctgatggcgccctaggcagcgatccctttcgggcctccggaggcctctctgcaggttgagggtaccagaggtcctgagggcagggggagatccagttctgcctgggcaccttccttgccctcggtgagccagtctagcctctctctgtgcctcagatcccgcccaatgacccccgcatcaagaaccaagccgactgcatcccgttcttccgctcctgcccggcttgccccgggagcaacatcaccatccgcaaccagatcaacgcgctcacttccttcgtggacgccagcatggtgtacggcagcgaggagcccctggccaggaacctgcgcaacatgtccaaccagctggggctgctggccgtcaaccagcgcttccaagacaacggccgggccctgctgccctttgacaacctgcacgatgacccctgtctcctcaccaaccgctcagcgcgcatcccctgcttcctggcaggtcagctttggggtggggaccagaggtggcataggagatgttccctgttggagccacagtgagtctgtttgtgagcagcttgtgggtttgtacttagagagactgtcct

SEQ ID NO: 31680 - DNA, 1895 bp, Artificial sequence
  DNA replication origin
tggatcacttgaggtcaggagttcaagaccagcctggccaacatggtgaaaccctgtatctactaaaaatacaaaaattagcttcttgcctaaggaaaaatacaaaaattacttcttgcctaaggaaataattgatgatgtggctagaggctagggcgtggtggcgggcacctgtaatcccagctactcgggaggctgaggcagaagaatcgcttgaaccattgcacatcagcctgggcaacagagcaagataacgtctcaaaaaaaaaaaaaaaaaaggctggggacaatgctggcccctcctttcctgccccttccccccatttcaggggcccctctgtgtgtaccttccaaccccagtgggggaggagaaagagttcagtctccaggatcagaccttcctctacctcaccccacccccagcttagaggacataaaagcgcagattgagctaagaggagctgacaatatcaggtgagctgtggaggtggggtccttggaagctggatgacagcagctggcaaggggataagagagcagtgagcccctccctcaaggaggtctggctttatccatagacagggccctctgaggtggggctgaggtacaaagggggattgagcagcccaggagaagagagatgggggttcccttcttctcttctctcagatgcatggtggacttaggaccttgctgggctgggggtctcactgcagagatgaagctgcttctggccctagcagggctcctggccattctggccacgccccagccctctgaaggtgctgctccaggtaacagttcccaaggtgggagaagatggtgtgttggggtggttgtgttccagagaccccttttctcagagcaggccttcctagctctggggcctgatagggggttggggcccattcctgactttgtgatccctgctctgggcagctgtcctgggggaggtggacacctcgttggtgctgagctccatggaggaggccaagcagctggtggacaaggcctacaaggagcggcgggaaaggtggggcacgaggcactgcccagctctgggcaaggatgtcccaggcctttcagagaagcagcaggcagcagggagcttgaaggtgggagagggggactatggggacccatgtggactccctttctgtctgtctgtccctgtgtttctggatgggagaacagcttaaaagccatccttcccaaagccttgcctctgtctggacacccaggtccatatcctttttataaaaggaagccttcctcccacccgtgggcctgcctgcatggtcctgcatgtctgcccctgggctggggctctgctgggtgggtctgtatcccttctctggccctcactcctcctttctccaagcagcatcaagcagcggcttcgcagcggctcagccagccccatggaactcctatcctacttcaagcagccggtggcagccaccaggacggcggtgagggccgctgactacctgcacgtggctctagacctgctggagaggaagctgcggtccctgtggcgaaggccattcaatgtcactggtactgttgcccatcacaccccaggtccctgctccactagtgactcctcctagggaccccagccgtctctcagtgatcccctcaacttcttcctccagggagtctcaggagtctccagggctcctcagcctcaggttgcctgggataggaagtgaggcggctcagctcccccattgttctttcccccggcagatgtgctgacgcccgcccagctgaatgtgttgtccaagtcaagcggctgcgcctaccaggacgtgggggtgacttgcccggagcaggacaaataccgcaccatcaccgggatgtgcaacaacaggtgcggctggctgggggtg

SEQ ID NO: 31681 - DNA, 958 bp, Artificial sequence
  DNA replication origin
gcatggggagcaagtgggacagcagaatattcttagtgaggggcactagctctgaggcctgggcctggagctgctccaggctcagtttcctttgtaatagaggaatctggagcaaatggtgtttgaggcttcctcatcttagatcttctctagaaatggccaagtaggggctctggccttgactcagatcttgtgtttcagcacatgcgggaggtggcccagcggcggcagcagctggaggtggagcatgaacaggctcggctcagcctacgggagaagcaggaggaggtccggagactgcagcaggtggggcggcagtgagggaagctggcaggctgctggacaccagctttgccactcactcattccacaagcatttactgtgtgcccggcactgtgctaggcgtcggggagactgtggggaacaaagaccaggtccctgagcagtcagcaaattagcatccaggagtgagctgatttcagacactgatgagcacagtggtggagaagaacagggtgatgtgacaaagtgactgggatggggtgaggagccactttagaggtcatcagggaaggcctccctgaggaggtgacaattgaccttgccagccaggaggtgtagacatgcacatgctctgtggcagggaagagctgaagaagcctgagaccaatgtggctagaatacagcaagggatgggcagcgtggtgggagtagacaagaacccgatcctgtcgggccttaacggccatgggaagagtttgggtattttgctctgtgagtagatagaagctcctgaaagatcctaagtgggggagtgacatgatctgagtcataattttacaggatcacatggctggtattatggagggtggactgtgggagcaggcgtggagcagggcctgggcggtggcctgggagggagatggtggctgtctggacagagatgcatgcagtgga

SEQ ID NO: 31682 - DNA, 1111 bp, Artificial sequence
  DNA replication origin
gcttgggggaagccaggagaagggtctggctggacttgcgctgctctaggccaagcccagatttggatgatacagaacccctatcttggggaacaccacatccccgggggcccaggcagcctcctagttctctgccagtcgctgaaggacacccaggacagttattgagtgcagagcagggctgctgctggaagctaaaaagggaaagctttggcctggataaaggacccatctcccagggcacacgtgggtcccaggatctcaaagcacttatggctccaggacacaggggtgcagcctttgtacttacacatcagctggagacaatgggaggtgggtgggcagacagtacccctctttgctcttgctaggcagggatctcttgctggctgaatgatggggtgggaacctgctctgggcaggctgggctggggcaggctgccctggggccctgttctcaggtgccagccccttgcccctgggcatttccaggccacgccccaggaggatgcggacaacctacccgtgattctaggggagccagagaaagagcagagggtgcagcagctggtaagtcctaggtcaagggctggaggcagcctgctgtgggcagatgtaccttccctcatgaggagcacttggttctgacccctcaggaatcggagctcagcaagaagcggaagaaatgcgagagcctggagcaggaagcccggaaaaagcagaggcgatgtgaggagctggtgagctcttgagggcaacccagaggccagctcctcccttcaccccggccagccaggtggtgggctccctctcagctctgctcccacccctgctgccctcaagaacacattttccctcctgctcctttcctttcctggctggtgcaggttccagcaggggaggaaggccttgcctgggaggagggcagggtcctctgtgtggggagagggggaatgtgggtgctgggctccctcctgagagctcctctgcccgctcaggaactgcagctgagacaagcgcagaatgagaatgcccgcctggtggaggagaactcccggctcagtgggagagccacagagaaggagcaggtaccacttccgcccaggtgctg

SEQ ID NO: 31683 - DNA, 1123 bp, Artificial sequence
  DNA replication origin
ggaacgaccaccgggatctcccctgcaccgtgctcagaaccccaaggactcagtggtggtgtgcgcactcccaggggctggggagctttcccgtcctgggcagggtccacctccaagcctcccgtgctcgtacctgcgccgtgccctcccctgggggctccagggttccgccctccataggcctgcgcccagcggggcctggccggccgcccctgccgcgctgccagtggtacggcccggccgcaaatccctggttgtcctggcagccgcccggggcccagcccgcgccgcctcctcccgccgccgccgtagagcggggacgcccccgtcagcgcccgcctggctggccaggcctggccccagctacccgggggcggcggtgcgtccgccccggctccaggtacaggcaaccctcactgagcggggggcttaggcagcccctgtctcgagggccagggacccgcttaggacccccagaacttaagggtctggcttctcgccatcatcctaggtaggcagcaagtaggtcctcctccttctgggaagagggctgggaggagagaccaggcagtgatctgatagtgaccaagacctccgggtggggggaggcttcttgctcagattttgtctccctggctggccctggaagggagatgcaccctcccatcaagacctgtcctcccccaaagtttgcacggataatcggaaggtgtggtagggtgggcttgggggaagccaggagaagggtctggctggacttgcgctgctctaggccaagcccagatttggatgatacagaacccctatcttggggaacaccacatccccgggggcccaggcagcctcctagttctctgccagtcgctgaaggacacccaggacagttattgagtgcagagcagggctgctgctggaagctaaaaagggaaagctttggcctggataaaggacccatctcccagggcacacgtgggtcccaggatctcaaagcacttatggctccaggacacaggggtgcagcctttgtacttacacatcagctggagacaatgggaggtgggtgggcagacagtacccctctttgctcttgctaggcagggatctcttgctggctgaatgatgg

SEQ ID NO: 31684 - DNA, 939 bp, Artificial sequence
  DNA replication origin
cagcatcctttgatcctaaactcagatgtagagttaatcctttccaactgctgggatggggtagagtgaggctgctggttttctgagaccccagtcaaggtggaagcaggtggctacccccctaggttttcatgctaactcctcctttgggaggagatgaggagtgggagaagtgccccagccctcaggtgaccattggccttacccctcctctggctaggtgagtgcccccttgccccggccggggaccagcttggagttgtgtcggaaggccctagcccgccagcgagcccgggacctcagtgagacagccagtgcactgctggccaaggacaagcagattgctgccttgcagcgggagtgcagggagctgcaggccaggctcactctggtgggcaaggtgcgaggaggccctggtcacctcttccagctcagccctgcacagggccatctgcctgttgtgggatgcagacaagatgttaatgagacgcaaatgaaagggagggtggaggttgctgggagtaggttcccctggcaacggcccaggtgggagaggggagaagggggtggagccatgagtcccagacctgggcatttctgtgctccaggcttgaggctgtttgccggtgggtctggctgtatgcatccacacatcccctgtgtgaagggatgttcacaaggtatttagcacagtgctgggcacattgagagcacccaagaaataagttactgagaatgaccgcataggggctcgcgggagcatgtggccacatacgcatgcacatgtaaccaggcatgtacccatgggagggtgtgcacagtctcgcgcatcggagcccctccagcaaggcgaagggctctgcaggggatggcatggggcgggcaaggattaggcctgagtcccctccctgtccctgtcccccaacctcaggagggtcc

SEQ ID NO: 31685 - DNA, 1048 bp, Artificial sequence
  DNA replication origin
tttggggacaggcccaatctggagctgctgagggccctgggggagctgcggcagcgctgtgccatccttaaggaggaaaaccagatgctggtgaggcttggagactggggtgctgcgttctggctggagccaggccctctgcctcagtgccctcctcaccccatgaacatctttccaagtgggggctcaatggaggtgacaaaatcctgagacccagagagggtgaacccctgcctagagttgccaaggaccccactgtgagcctagggctctagcccaagacttgggctgttaggactgggtctgtggggtgctccctacatgccccaattctgcctgaccccttgtcagaggaagagcagcttccctgagacagaagagaaggtgcggaggctgaagaggaagaacgccgagctggcggtcattgccaagcgcctggaggagagggcccgaaagctgcaggaaacgaacctgagggtggtgaggaaaggaggctgctgggcggaggctgggtgaccaaggaagaggggagccagggctgggcctgagggctgtctgaagcttgggagtcacggtctcagctcagcacctaggaaagcaagaatctaggggctaaggtgcaggaagggcagaggctggccaggcaaggaggccaaaggtttctggagctgcagggggcagagaagagctggatggggaggttcctgagcaggcagggagcaggattctggattaccacgtgctggtgctggcggcagccttctgctgagctcatctcagggtatagagctggagtgggggcagggatgagacccatcacagtggcagccccaaattagcagcatcctttgatcctaaactcagatgtagagttaatcctttccaactgctgggatggggtagagtgaggctgctggttttctgagaccccagtcaaggtggaagcaggtggctacccccctaggttttcatgctaactcctcctttgggaggagatgaggagtgggagaagtgccccagccctcaggtgaccattggccttacccct

SEQ ID NO: 31686 - DNA, 966 bp, Artificial sequence
  DNA replication origin
gaagtggaggctttcctgaaggtaagggatctgtggagggctggggtctgcaaggtgggggtctctcaccatgtcctccagcctggccaggaggtgaggcgaggtatgcatccccaatgcccacctgtcctctcttggcctgtctgtgggtccatctctgtggctatctgtcctctcttcatcgagcagaaatctgaggggctccatttctttcgtcatttgtctgtccttctgaccctctttgcctgtctgtctagatctggccctgctgctgccccgtccctctctgtgcctcctcctgacagtgtgtctgtctgtgtctcttcttccatgagtctgtctgtccttaggggctgggggatacagggggagtgtggaggtgcacagagaatcagtgcagaggaagtagattgaggggagggggcttggtgctgggctgaggcagggttggggtgggtgtgagcaggctcctgtagaagagggaaggaacaggactttgggggagggcaggggagtctggagggatgggagtgggagctcgagctcgcatgtccctggaggagaagatgggtaggaatgggaaggatcagggaggagcaggagggtgccaggtttgggggtgtctatgtggacagggaggactggacagttccttctcctaggcctcctctgctcctctctgaaggcctgggacataggggaaaccgtttcatctccatgtctccttggaccatggatggtggatgcttccacagggaaggctctggctgggtgacgtgggtttctgaggtgctgtcctcggtcctttcccatgccaggccaagctgaatatgagctttggggacaggcccaatctggagctgctgagggccctgggggagctgcggcagcgctgtgccatccttaaggaggaaaaccagatgctggtgaggcttggagactggggtgctgcgttctggctggagc

SEQ ID NO: 31687 - DNA, 882 bp, Artificial sequence
  DNA replication origin
gagctggatgcttgctggcccaggctgggcagacaagcctctgctccttcagggtcagttccccccacgggcctggagctcccgtctcctttgggcttggaactctcctcagacctcagttcttgaagctgcagagctgccggaggagtatcagcgatgcttggggctgcactgctaggttcaccccctcgacctggagtccagctatgccaggtgggcagtgcccatggctccatggctccagggtccccaggccgtgggagggttgtcagttgctccatggtactgccaaggggccccagaacccgggccgggggacatcacccagccaggtggggggactggcgagggtcatgccaggccagcccctctcccctctgagctcttgcttcaccgacgctccatccaaggttggctgagctcttccccacccacaaaggaggctgcagaaggcgccagggctgctggagctggagccaggggtatgtgagctatgtttgctggtagctgtgtgtgtgcgcgagtatgtggaggagcgagggtgtccctgtgggggtagggaggatgtgcagaggccaccgacagctgcgcctgggtgagggtgcgtgtgtgtgtctccaggtctgtccgtgcaggtcaatgctgtctcatgtgttgggaagatgggtgcccccacttctgtgtgttgaggggggtggtgctgtgtgtcactgtctgcccatttcagagttgccagttgtttgtgtgtgtgtgtgtgggtgtctgtattgcagggctgtggcagtatgtgatgctgtccctggttgtatctgagtgtgtcagtgtcgtgcagctgtgtgcatcggtgtcgttgtgtgtctgtcagtgtctgtgggtctggcc

SEQ ID NO: 31688 - DNA, 709 bp, Artificial sequence
  DNA replication origin
aggcaagtctggcgccatgctgagtcaccgcccacaaggcccagggcgggccctcggggggccctggcagggttggggggatcttaggaagccacaaggagggctggggggctcttggagcaggagtcaggaggcctgggcagcctgaagagtacacgccgacggacagacagacagtgcagtcacccataaagtagaaagcactactaacagcactggagggtgtagtgtttcctactttatggatgagtgtactgtgggcttcggagatcacgccactgctgccgcccgctgcccgccaccatcttcctcggcgctcggggacctcgtgtgacaggtgagcaccttacggcccctccctaccctgcccagatgcctgaaaggcctccatggctttcctgcccttcctggttccggacagctggggaaaggccacagcagctcctctgctgccctgcagtctttgggggcggggagggctggacatgtggaaccctgatgcagccgcagcgtcaaggacgaggaaggggtgggaagggatggtacgtggaggggaatgggtggtgggaccagggacccaatgctaataaagactggactgtgcttctcttttgtctgagactctgttgctggggtggggagctgaatgcgggcggcaggcacatggacagtatgggcgcacagaagggctgggagggagaacctctgt

SEQ ID NO: 31689 - DNA, 1737 bp, Artificial sequence
  DNA replication origin
ttttgggcactcaccgagggccctgtcgaggagccctggtcttctggggtcaccctcaatgccctgagtcagtcccaggctcttgagccatcccttggagctggtgccacggggggaagggcagctggggccggaagccacctgcccagggcatgagagagggtccccagccctcccgcgggcccacccccttctgtttcctgtcagtctgtcctccccagggagggagggagggagggcgctcatcccctgcgggcgggggcggggcgcgctctgagaccgttgggcgccctgagatctggcccacgtggcctcggggttataagccctgccctccctgaagggaaccccacttcggagcctggagcacagggcgagctctcctccgccctgcagcctcaggtaaggatccggaccttcactgctgccccaactggggctcctcagctcggggcctctaggggcttgggctgctggtctgggtggaggcgcgttgggggtgtcgaggagcttgggtgcaagccccatgcgggaagctcagggcaaagcgccttgaaaccctctctagtgaaggaaggtaaaatggctccgggaccccaggcggggaaagaggtgtccaaggaggagggctggagagtaaggcggggatggcagagggtacgcagaggctgagaagtgggaccagtgtctcaaggggcgccagcctcttcctccgcccaacatggccaccatttttgttgggatagccttgggctcctgccaggggaacagcagggcagtgagggagtcaggactttgggctggtggggaggccgagaatcaaggctctggggagtcaggactttggggctggtggagtggctggggactgaggccctggggggtcaggaccttgggctgctatggaggctgggactgaggctctgggggagtcaggaccttgagctggtggggaggctgggaattgaggccctggtgtgttcaagaccttgggctggtggggaggccagggcctgaggccctggggggtcaggaccctgggctgttggggaggctggggacttaggccctggggggtcaggatcttgggctggtggggaggctgaagggtggggactgaggctctgggcagtcaggacctcacggttggggtggactggagaccaagaccttggcaggggagctgtggctgcctcatttggacgctggagggtggctagcgtggctggaagcggccagccaggggttcacagaactgaaggtgaggcctccagaggccctagtctctacctgagtgtctctgaaactggggggatggggtggagcctttagggggaagggaagagggaactgaagaggaagtgggggagggaggtagaggaggcaagtctggcgccatgctgagtcaccgcccacaaggcccagggcgggccctcggggggccctggcagggttggggggatcttaggaagccacaaggagggctggggggctcttggagcaggagtcaggaggcctgggcagcctgaagagtacacgccgacggacagacagacagtgcagtcacccataaagtagaaagcactactaacagcactggagggtgtagtgtttcctactttatggatgagtgtactgtgggcttcggagatcacgccactgctgccgcccgctgcccgccaccatcttcctcggcgctcggggacctcgtgtgacaggtgagcaccttacggcccc

SEQ ID NO: 31690 - DNA, 1052 bp, Artificial sequence
  DNA replication origin
tgggcgggccggggggcggcaaaccggcaggcaatgggccgctccatcacttccacaacccgcacttccgccgcgaccagccacagctgctcgtgcacctcaagcgcctcaccagcgccaacaaggccaagctggcggccggcctggaggtgccctgccgcccgcccaaccgcttccagcggctgctcatcacctcggcctccgccgccaccgcgccactgcagcaccagcagccgccgccgcccgcggggccccggcccgagccgcacggtgagtccggactgcccgtgccctcgcccacagtgggcacatgggcggcggggagcaaccgccgctggagggcgcattttcgcacgtcctcacgctatgggcgtcggaaaggcgccggggacccattggccgctgtgcttcccgagactggcggtcccgccaccgccgccgttctcagcggcaccagcacggtggccaccggccctcccctggagggtccgtaagcattcggccccttctgagcccactggcagcaaaagggacctccgcctcttaggctcccttctactcgtccccggtttgaaccccaggagtttacctggttgtaagcctccgtttaccttcctgagacccacactgtccactgtaaacatgtggactcagtagtccttcgttgaaacattgggtctggaagaaacaaaaggggctcctttgctcccgtgggaagcagagtggagtcaccctacgggttaaggcgggatggaacaaaatcgtagtcaagagaatttagaacattacggttgggcgtggtggctcacgcctgtaatcccagcactttgggaggccgaggcgggtgcatcacgaggttaggagtttgagaccggcctaaccaacagggtgaaacctcgtctctactaaaaatacaaaaattagccaggcatggtggtgcacgcctgtaatcccagctacttaggagactgaggcaggagaatcgcttgaacccaggaggcagaggttgcagtaagccgagatagtgccactgcactccagtctgagcaaca

SEQ ID NO: 31691 - DNA, 1093 bp, Artificial sequence
  DNA replication origin
tggttttgaagagctcgggctcggccccggcccccgcagtcccgccaccgccccccggcccgggcgggctgagcagctcggcctcgaagagcggctgatcgataagcagcccctcgccgcggccgtcccagcggatggagcggtagcgcgggctgttcaccaggcgccacagcttggcggggaagttgttggggttgatgggggtggagagcagcgcctccatcgccccgccgggccggggcctcgccccccgagcctagctctcccacaccgttctcgatccctccccggccttcgcctcgccctgcccgctcctgccggcgcccatccgccgcgtaccagggaccgttggcgcacgaggccccgcggcgcctcccagcgcggccaatggggcctcgagttcccgccacgcggcgtgggcacctccccctcggcggccgcgtgccccagctcggcccgccggacgcctgcgggacccgggcaggagccccttccccaggcgttcccagacttcaggccgggaaggctgtctgccggggtgttctaagtcctgacaagagagaagcccagttatccaccgtggaataccaagaggcgtgtgtttcggcccagccaactagtggagacttggaatgcagagaaagtgtgcgttaggcagcagagttggtcgttctggggaccaaagggtctggtctgtaatctttgctaacagtggaactgcttacctctcaaacaaaaatgatgctactggaggtataatatcttgagtaaacgaactcaccttttagatagtagccctttgtatcttttaagatacactcttttaagtcagtatttgttcaagacaatttactcaaggttagatgaaaactgaggtccctaggaggagggaatcacaagaatctaagtactatcttgtgtgcctgcccaactagctggtggcattttagacattaaagagaaataaagatgggacagaattctacggtatccataagaatcgatccctagccaatcaataaataagaatgtaacaagagctgtgctgattcaaaaagagaggttcatttgaaaacggaaattggccgggcgc

SEQ ID NO: 31692 - DNA, 956 bp, Artificial sequence
  DNA replication origin
agaaagactctttcccttagacccgcataagggtaaggcaggagtggggatgggaaagtgctgtcctgaggaaaaggagccaggtatggcagctggtttcagagagaagggaaatcaggcgcctacaagccactgaagcttcaatctggtgggtgaaggagacaaagaggagtgggtggggggattcagtcccacgcctctagagggccttcaccgacgctttcaaaaggaagacgtgtttgagagctgggcttatcttcttgttagacccacattgctgacaagcccccattacctgccaagtaacctgctctgcctgctaatcagaggggaattcctgaggaatacccacagcaagcaaaaggaactcccctcccaaccaccagggaggggacccggggggatccacgcgcctgggaggagccaggagacccaaggacagccaggggagagagagagaggaggcccggcagacacccacggggaaggtggggggacagctgagaggacagatgggggaagctgggaaggagcatcagccagagcgggaggaggggaggaccgggaatgatgcagaggtacggaaccctgcagaggcagggaagatggagaagagaggctgtctgggggacagtcaaggagaaaaggctggcatgccaggtgagggatggaatggtggaagagggaagggactggagccccaagccagctcaaagacatcccgtgctccccgaccaacctcctaacatcccattcagcctactagccacatcccacatccccaagcaaggattcagcgggtgggaccaagagggagaggcggaggtaaagggatgtacccctgcagggcggggcctagagatctgcagtcaagggcagtggctgcggggccaggatggaccacagaatttccattcctggccttcgaccatctccggcacccaaagattgaagca

SEQ ID NO: 31693 - DNA, 1364 bp, Artificial sequence
  DNA replication origin
ccaccaaaactgtggggcttctctagttccagggtgctgctgttaagccactacaggtgacagctgattgaatatctatcaggatagcatcttcagggtgcccagaatatcaccagaggtggtttacaatgatcctattaattttccattaactgtaacagcccttctctcaccccaagtccagggaagcccttaactcctaagagctaggaggaggcagtgagatgggaaaggcctagagagctgtaggccctggcccagaccaggcccttaacctggtagtatctcttcggtgtcttttaggtgtcccttgtgcttaggggcaggttaaagaattcagtagatgagaggatttcctccttccctcccttccttccatagacatgtggatttggtgtgtgcactattggttcagtctcttctcagaaagcctgctggttttggcccccaccaacagatagctcctctttttctcttctgggctaccctgaaaagagcatgggcttcacagtcagcttcatctaatttcaaatcctagcaccaccacttagttaaattacatactttctctctaagcttgagtctcacgagtaagacaggataaggtttacttcttggggcttgaaaagttttactgagataatgttagaaactgcctggctcattgtagatgcttaataaaatgtcaggttttcttttattactcccttctcccccaaacaagacaaaagccctggtgtctgaaagttacaaggtgcaggaagtttggggttccagccacctccctctgtgactcttggtgacattttgagccccttattcctggtccttattccttggccctctacccaactctctctactccgctgctcctgggtttcaagtttcgtttttttgtatagcttctgtggtcgatacttctagctcttcactttcccagactaagaaatcctttctcctccaagaagggctttcttacccagagatcagaatgtgaaacaagggagagatggagctgaaggagtagggttgggtaggggcgttggaataaaaagctcatttccctttccaggagcgtggaatgactaacctggcaccattctaaggggaaagaaaggtttaacgaagtcacgggattgaaggaccctgatgggcaggggcatggtgggtagtggttttggagggaaaggaggaagcaaatggggtgcgggtaggtgagctccaccttgggatccagagcaggcgtcgggggaacttaggggagggggcgcggggatgggtttgtaagagggcatggggtggctcaccttagaagaagggaaatgagaagatgtgggcggtcccgtagcccagattcctgaaag

SEQ ID NO: 31694 - DNA, 1209 bp, Artificial sequence
  DNA replication origin
gtcctgggtgactctgcatactctgcgcatccgggggtcgcgggctgcgaggccggcccccagctgggcaccccgacccacttcgcgccggcaccgctagcagctgaggtacaggccccgccccggggccgactcgctccgcccccgccgccgggcccctcccgcagcggtccgcactcggggaggcgggagggtgacggcggtgctgcgaggtcggcgcgcagctccgccgcgggtcgctcgggcgctgtccaggcggagccggccccgcccgggctgcagccatggtaaggcaggcaggcaggcgggcgggcgcggggcagggctggggtgcgcagggccggtcgctcccgggcggctgcaaggggacccgcggcaccgcagccgcggctgtgcagggtgggaggcgccgtcgccggccccgggcacaggctggcactgctgccgggcggcggtgcgtcgctgctcccaagtttttccctctgagcagccacggagtgggcgccaacccctgggtgatgcctgcgctctaggacgaaggggtgggtccgtgctgagggaggtgcccgctggtggagacgcgcttgttgggctggggaaggcgcatcagtaataagcggaggtgagggtccccatcctcgcctgggtcagcttttacctgagtaacccctcctcacccacctaccctgggcacaggggccagtaccaacttcatttggaaaacgcagaggaggcccacaaacactgcctgcctcaccaggagggatggtaagacgcttggcccctccttccctcagcctgacaaggggcagtccctggccctttcccaaagggaccccagagagggggaggcccagcccaccatcctgcccggtgggattagctatatccttctgcccctgggacaggaaccatgggaaagcttcctcctgctgcatctacccgctccctccccaccagccaggtccctctgcagtgtgtgggggtgggggcacccatccctgccacctgcctgtagtgggaagagaaacagtaaccccagccagcctccctggaggtgcccaggtaggaagtttttgatgcttggctctgaagatgtaatctcttctcctgacattgttgccagagcctgccacaaataacgtaagggtgtcaggacctctaggccacacaccgtcctctcctctcagtctggaagccccacagcct

SEQ ID NO: 31695 - DNA, 1522 bp, Artificial sequence
  DNA replication origin
gaaaaacttgggagcagcgacgcaccgccgcccggcagcagtgccagcctgtgcccggggccggcgacggcgcctcccaccctgcacagccgcggctgcggtgccgcgggtccccttgcagccgcccgggagcgaccggccctgcgcaccccagccctgccccgcgcccgcccgcctgcctgcctgccttaccatggctgcagcccgggcggggccggctccgcctggacagcgcccgagcgacccgcggcggagctgcgcgccgacctcgcagcaccgccgtcaccctcccgcctccccgagtgcggaccgctgcgggaggggcccggcggcgggggcggagcgagtcggccccggggcggggcctgtacctcagctgctagcggtgccggcgcgaagtgggtcggggtgcccagctgggggccggcctcgcagcccgcgacccccggatgcgcagagtatgcagagtcacccaggacagagcggggagcctcagctcctcgtccccgggctgcactggacacctggctcttttttactcagctccagaagcaccgcgggggcttgagccagttcccaaagaaaaaggaacggcccacctgacatccccagaaggagacgcctttggaagggagggggagttgctgcatgagttggagagaaaccattagttaccgcagggattcaacaaggttttcacaaagtgaatccggctgatgcccaagttactgatcactacacctcctaaaggggaatgtcagatattctccacctccacccgagctgtgaaggggcaggttagaggcaggttcccttcatgcagtaccccagattacagattaaagaggatttgctgcacaaattatccagggatcatctgctggaaggatagaagggagaggctgagtggctttaacagggcggtgtagccttgcctgtggctgaggacagtggggagggcctcaggagaggccaacccaggcgtgacccaggcccagctgggccactcttcctctgacaagcaggtgagatgccgaggggacagatgccccagaagctttagaggcattagaggctcagaaaggtcagagcagcagctaggggaaggcagatgcttggtgagtggggtgttggtgagggattccctgagctaagtagggtctgagctggtcaggctcctgtggaagtttccagaagcatgtcccttcctgacccgcaagacccctctctcaatggcaggctgactggcttctgcctgaatacactctggacaaaactgagacccacaggcacggccctctctgttggtagaagtgccagaggcctgcctgctgtatttcagtctgacctgtgaaccagtagcactggttgggaccagtcagaactcagccaggggagggaagagggcctggggcagcaggtaagatcaggctgagaaaaacaatggggctgctactggagatgttattggctgtttggcactggtggactggaagatggcagggtgttcatgagccagccg

SEQ ID NO: 31696 - DNA, 1256 bp, Artificial sequence
  DNA replication origin
aggagcaagacccggagcccgaggaggaggcggcggttgagggtgaggaggaggaggagggcgcggcgacggcggcggcagccccggggcactcggccgtgccgccgccgccgccccagctgccgcctttgcccccgctcccgcgaccgctgtcagagcgcatcacccgcgaggaggtggagggcgaaagcctggacctgtgcctgcagcagctctacaaatagttaagtagctgggcttggctggtggtgggcccgcggtccccaccgcgccggcctcggacgcggctccctcggcccctcaaactgctctcttttctgctcctctcccccgcacccgcgcctgccgccgctgaaagcgcccccgctgctcggacccgggcggtcggctgagagctgcccacgcccgcctcggcccccacgcccgcctcggcccccacgcctcctacccggccttgaagccgctctcctgagccccggcgccctcccgccgggcccgggcccctcatcccctttcacctcggcccccagcttctagctccacttcacgcaacctttccctttcctgcctggaaaggtccttcctcccaggcttgagctccctcttcttcccagatcccttctttctccgggaggtttcctcccaccccagtctgtcttttcccgggctgagtgccttgttgtttggcggcagagacgcgactcctttctagactgagctgcgaggtgcctcctgcgtaactgcaacaatgatggttataccggccccgtatccagatgagagaatggagtagattttccgtcaggtgctcagtgttgaaagtgaagggctttttagatgttttcacacagggaagcctagtctcttagtttagacatttgacattccataattgagggaagtgggaaggaattgagagggaagggtaagcaaaattttgcaagcaagccttcgggtgaaagagccataattcattaaagtggaaaagtcaggctgttttgattaaattgcaattaggtgcagtattttcagtccattaagtagatgggatggggtggggagaaagcagatggcttagctacacagatgaaagtctaaaatagaaaggtcaaggctttgcctttcatcccagttctggtttttataggcctgaaatagaaacggtttacaattgcgtttctcaatggaattgttccgaaataatgacagaggagaatactagtaagtctctgaaaacattggtaaacctgggaagt

SEQ ID NO: 31697 - DNA, 1420 bp, Artificial sequence
  DNA replication origin
cgcggagggagcccaagggcgcgggacccccggccggggcgggagacgcgcgccaggggctgggcgagtctgcggggccaggtttggggcgggggtgcggagctggaatcgccgcttcctcctccgcgtcgtccccatgggttcggactccatggggtccgggtggggctggggacgccctccgtcctctcgtgacgccgcgtttccctcggagagtcctggggacacttaggtccaggggcgccgccctgggggccttccactgtgggactgggcgccctcgaaatttctcggagcgcgtcgtctgccccgacccgggtcgaggtaaccgcagccgagttcctccctggccgcgtctcggcgcctccccggtgtccttgccaagggggtgggcgcgaggtcctgcccgacggaacgcgggagcctctgccgcgagcgcctccccggagctggcgcttaggggcggccccgacctttcgccacttccagttcaccctgcttggccgccgacctcctctggtgtctttcccggagtggtgggcttttctccggtcttgggggcgtgcgggggtgggggacacctgttcttctggacttcttgtccggaagattgctacctctgccttcagtcttagctgcgagagtttaaaaagccaggtgagcgagtgtcttgttttcctccgcttggagcggagctgcaccctcgcccgccccccagtcccgccgctgtgaaaggccccagagaactgctccgaagctttgctggggtttttgctttctggcctccttgctgatttgctgtccttgcaacttgggaggctcttgagtgagtccttgcctttggtgaatctgaaggctaacgagacagctgtcttttcctccctgcccttccttccttgttcttccttgttccaaagcattgggcaagaagggtagcggtcagcttccctgtgcctcacagagcattaaagatgcaagaagttcagtaaaccgcctcactggctctggggtgggacttgatttcacatggttattgctcccccgtgctttcctgcctctgggggccacagggcctatgaatggctgagtcttgcctccggtgaggaacattttcattcttctaaactgtgttttgagtggctgcaagttcttttccccagaaacaggcccagcctggggagagctgtgcagacttcccccttggcaccatcccctgtccccagctccatgataggatctcaggcaggagtgcagtgggagcctcatccgcttcctcagttgggctttgccgccgcaggttagcattcaatgacagcatttcttggatctgtcttgatatttctgtgcttgaaccaaaatcaagaagcttagagttaggggtggaaaatggaaaataaacaccatgcgcgagaaaactgtt

SEQ ID NO: 31698 - DNA, 909 bp, Artificial sequence
  DNA replication origin
cgtctctgcccggccgcccatcgtctgggatgtgaggagcccctctgcctggctgcccagtctggaaagtgaggagtgcctcttcccggccgccatcccatctaggaagtgaggagcgtctctgcccggccgcccatcgtctgagatgtggggagcgcctctgccccgccgccccgtctgggatgtgaggagcgcctctgcccggccgcgaccccgtctgggaagtgaggagccgtctctgcccggccgccccatctgagaagtgaggagaccctccgcccagcagccaccccgtgtgggaagtgaggagtgtctccgcccggcagccaccctgtctgggagggaggtgggggtcagccccccgcccggccagccgccccgtccgggagggaggtcggggggtcagccccccgcctggccagctgccgcgtccgggaggtgaggggctcctctgcccggccgcccctactgggaagtgagaagcccctctgcccggccaccaccccgtctggaaggtgtacccaacagctcattgagaacgggccatgatgacaatggcggttttgtggaatagaaaagggggaaaggtggggaaaagattgcgaaatcggatgactgctgtgtctgtgtagaaagaagtagacatgggagacttttcattttgttctgtactaagaaaaattcttctgccttgggatcctgttgatctatgaccttacccccaaccctgtgctctctgaaacatgtgctgtgtccactcagggttaaatggattaagggcggtgcaagatgtgctttgttaaacagatgcttgaaggcagcatgctcgttaagagtcatcaccactccctaatctcaagtacccagggacacaaacactgcggaaggccgcagggtcctctgcctagg

SEQ ID NO: 31699 - DNA, 1222 bp, Artificial sequence
  DNA replication origin
cacagcagtcatccgatttcgcaatcttttccccacctttcccccttttctattccacaaaaccgccattgtcatcatggcccgttctcaatgagctgttgggtacaccttccagacggggtggtggccgggcagaggggcttctcacttcccagtaggggcggccgggcagaggagcccctcacctcccggacgcggcagctggccaggcggggggctgaccccccgacctccctcccggacggggcggctggccgggcggggggctgacccccacctccctcccagacagggtggctgccgggcggagacactcctcacttcccacacggggtggctgctgggcggagggtctcctcacttctcagatggggcggccgggcagagacggctcctcacttcccagacggggtcgcggccgggcagaggcgctcctcacatcccagacggggcggcggggcagaggcgctccccacatctcagacgatgggcggccgggcagagacgctcctcacttcctagatgggatggcggccgggaagaggcactcctcactttccagactgggcagccaggcagaggggctcctcacatcccagacgatgggcggccgggcagagacgctcctcacttcctagatgggatggtggctgggcagagacgctcctcactttccagactgggcagccaggcagaggggctcctcacatcccagacgatgggcggccaggcagagaggctcctcacttcccagacggggtggcggccgggcagaggctgcaatctcggcactttgggaggccaaggcaggcggctgggaggtggaggttgtagcgagccgagatcacgccactgcacttcagcctgggcaccattgagcactgagtgaaccagactccgtctgcaatcccggcacctcgggaggctgaggctggcggatcactcgcggttaggagctggagaccagcccggccaacacagcgaaaccccgtctccaccaaataaatacgaaaaccagtcaggcgtggcggcacgcgcctgcaatcgcaggcactcagcaggctgaggcaggagaatcaggcagggaggttgcagtgagtcgagatggcatcagtacagtccagcttcggctcggcatcagagggagaccgtggggagagggagagggagagggacaggaaactcattttcttagttttgctttttcctccttcccccccaa

SEQ ID NO: 31700 - DNA, 1457 bp, Artificial sequence
  DNA replication origin
atccatttaactctgagtggacacagcacatgtttcagagagcacagggttgggggtaatgtcatagatcaacaggatcccaaggcagaagaatttttcttagtacagaacaaaatgaaaagtctcccatgtctacttctttctacacagacacggcaaccatccgatttctcaatcttttccccacctttcccccctttctattccacaaagccgccattgtcatcctggcccgttctcaatgagctgttgggcacacctcccagacggggtggtggccgggcagaggggctcctcacttcccagtaggggcggccaggcagaggcaaccctcacctcccggatggggcggctggccgggcggggggctgacccccccacctccctcccggacagggcggctggcctggcgggggctgacccccccccatctccctcccggacggggtggctgccgggcggagaggctcctcacttctcatacggggcggctgccgggcggagggtcttctcacttctcagacggggcggccgggcagagacgctcctcacctcccagacggggtggcggccgggcagagacgctcctcacctcccagacggggtcgcagctgggcagtggtgctcctcacatcccagacggggcggcggggcagaggcgctccccacatctcagacgatgggcggccgggcagagacgatcctcacttcctagatgggatggcggccaggcagagacgctcctcactttccagactgggcagccaggcagaggggctcctcacatcccagacagggcggcggggcagaggcgctccccacatcccagacgatgggcggccgggcagagacgctcctcacttcctagatgtgatggcggccgggaagaggcgctcctcacttcccagatgggatggcggccgggcagagacgctcctcacttttcagactgggcagccaggcagaggggctcctcacatcccagacgatgggcggccaggcagagaggctcctcacttcccagacggggtggcggccgggcagaggctgcaatctcggcacttcgggaggccaaggcaggcggatgggaggtggaggttgtagcgagccgagatcacgccactgcactccagcctgggcgccattgagcactgagtgaaccagactcggtctgcaatcccggcacctcgggaggccgaggctggcggatcactcgcggttaggagctggagaccagcccggccaacacagcgaaaccccgtctccaccaaataaatacgaaaaccagtcaggcgtggcggcgcgtgcctgcaattgcaggcactccgcaggctgaggcaggagaatcaggcagggaggttgcagtgagccgagatggcagcagtatcgtccagcctcggctcggcatgagagggagaccatggggagagggagaccatggggagagggagagggag

SEQ ID NO: 31701 - DNA, 893 bp, Artificial sequence
  DNA replication origin
gtctctgcctggccgccatcccatctaggaagtgaggatcgtctctgcccggccgcccatcgtctgagatgtggggagcgcctctgccccgccgccccgtctgggatgtgaggagcaccactgcccagctgcgaccccgtctgggaggtgaggagcgtctctgcccggccgccaccccgtctgggaggtgaggagcgtctctgcccggccgccccgtctgagaagtgagaagaccctccgcccggcagccgccccgtatgagaagtgaggagcctctccgcccggcagccaccccgtccgggagggagatgggggggggtcagcccccgccaggccagccgccctgtccgggagggaggtgggggggtcagccccccgcccggccagccgccccatccgggaggtgagggttgcctctgcctggccgcccctactgggaagtgaggagcccctctgcccggccaccaccccgtctgggaggtgtgcccaacagctcattgagaacgggccaggatgacaatggcggctttgtggaatagaaaggggggaaaggtggggaaaagattgagaaatcggatggttgccgtgtctgtgtagaaagaagtagacatgggagacttttcattttgttctgtactaagaaaaattcttctgccttgggatcctgttgatctatgacattacccccaaccctgtgctctctgaaacatgtgctgtgtccactcagagttaaatggattaagggcggtgcaagatgtgctttgttaaacagatgcttgaaggcagcatgctcattaagagtcatcaccactccctaatctcaagtacccagggacacaaacgctgcggaaggccgcagggtcctctgcctaggaaaaccagagacctttgtt

SEQ ID NO: 31702 - DNA, 847 bp, Artificial sequence
  DNA replication origin
atcggagctggaggggcgggggggttgtcggtgattggggtaggtggaggagggggcactatcttggaaagcttaaaatattaaatgatgtggggcttggatggaaaggacaggagttggggtgcaaagagctgcaaggaccaggcctggatccaaaggcctctcgatcttgcttcctggatggccagaactgcgcgtacaaactctctccccattttattcatttcattcatttgggtaggggagtgggagggggattctcccttgtttctaccagagcaaggattcttatcccctgggccagtgcggggctgtcaccttccattgctctcctctttccctcatcgtgtctgcacccaggagttgtggggcgggtgggttggggaggagcaaccttttttttccctccctctgcggctctcaactgagaaaggcaccttctccggtggtgggggttgggggtggtggtgaggcggtggcttttctcttgccttccctgaggcagtagggacagaaggtcactgaaagaacggaacgagggtagaatgggagaacgcatttcttagagctatgtcaatctcagagtgtgtgcggtcaaactccctaaggaaactcgcctccccttccccctttttttatttctctggggatgttgtggctcttaacccctctttggttctggaaggtaggaaagagtgatacagaggttatcttttagtcttctcgagtagtagcaggtagttttgaatatcttcttcaggatcgcatggaattgaacagagccctggggacagcacagctgctctgagacctgcagggctatttggtctgtgactggcttcccttt

SEQ ID NO: 31703 - DNA, 1638 bp, Artificial sequence
  DNA replication origin
ctgcgcagggctgggacctgtgctggatcgttaggcttccgaagagatggtcgccatccttgtcgtggtcgcgggcgccgtcagaggggcggcggcggccggcgctggcagtggctgggcgcgcgggggcgtcatggggcaggtcccgcgggaagtgggggaagtagccagagatctgctggatggggcggatggggccggggcacacgtcgatggccacatgctcctggatgcaaacggtcgccttttccccgcgccgccgggggtcatacaggcagcgcctcgccgcccccgcacggcctggcccggagcgacccccgccgggggcggctcagcaggcccggcatggcgcggcggggcctccgcgaaggccagcgcgagtgagtgccaggggcgggcgggcagggggccggcccagcccgtgtcacccggcagcaaccacgcagcgtgagtgtgcgggctgcccaggcagcgcggagcggagagagctgcgtggggccacactcactcgcactcacaccggcggacacgccggcctgggaccccgtgcgcgcactccctcgggacaagcggggagccagcaggacagggacccacggatcgcacactcactcacacgttcctgcaggtgccagcacatgcggggctccgttcgctctcacgggacacacgaaggtgtgcaaggacaatgcaagtgcacgcacacgtgtgcagacacgtagtggaagcatccactcgctcatacctgtaagacacacacacacacaaacatatgcacacatacagagttggttgaggatgctgtaacacagtacaccccctaatgcacacacacacagacacacgcacacacaggtgatcaagggcacccaggggagaatcttccatacccccaaggacccctaacaagatgcacaaacatgcacccatagaagtaatcaggggaccctgggcacaactccctctctccttccccatctaccaggacatggagtcacactcctaggcatgtgtggacaggctgcctacacacgggcaggacatgtatatgctcaactgtacaaggacactgcgggcacactctgcgcacacatattctcaggtcacataaacacagcactctgtaacctggagtcagtccctcacttggtcagtgagtgggctgaagcacccactgggacagggtggctgagaaccaggacagggcctggtcaggaggggttgagggcagggcctgggaagtgagtgatgcaatgaggttgggcagtaccaccccccacccaaccacccactgcaggcctcccacatcatcgggtcactaaacaaatcccagagggcccagccccagctgttgcctggctttccagaaacagaactcggttgggaatcgctgctgcttggacaggtctgtccccagaaagccctgggcatggatggagtcctgtctaccctctggtttccactgacacatttacctaccaacattctgtccaagtctcctcttctgagccctcaccagaatcacccttaatggagagtcacagggagaagacgtccacccgcgcatgagaagacaggcctggaacagagccttcctgcacagcctcagaagggacccaccttgctgacaccttgatc

SEQ ID NO: 31704 - DNA, 938 bp, Artificial sequence
  DNA replication origin
gtccacggacaccagaggaggaaccgccaaggtttatccaaaggacaagcggcgcggcggtcctcctagctcctcggcccgcgcgccacccgggaggccgaaccggccccagccctgggccccctccccagcccgccccagccccgaccctccgctgcggggccctcccggagcggccggccagcggggagcaactacgctgccggctgcaacgcgtgtctccccgggacgcagctccgcccttcccgggaacaaaagcggctgcccgcgcctgagctcccaaacggctggcgggcagggagcgggcgccgcgcgccggctccccggagcccagccccgcaaatgggacacccacagcgggtgcccccaaacttcccacctctcccgtccggtcgggggaggggtcggggccggtgggcagggcgcggagagcgcacgaagcgcttagggggtctgcggccccgcggcggggggttatgccaagggagaacgcgacgacgcgagggggagggacggagggcaccccgaagccggggaccgccaagccggagccagtggagtggggcgaagtcggcgagttggaaacttcctgcaatcgtccactcctagcctttggcgttcggctggtcctctggcggcttggcgggcggctgcgcagggctgggacctgtgctggatcgttaggcttccgaagagatggtcgccatccttgtcgtggtcgcgggcgccgtcagaggggcggcggcggccggcgctggcagtggctgggcgcgcgggggcgtcatggggcaggtcccgcgggaagtgggggaagtagccagagatctgctggatggggcggatggggccggggcacacgtcgatggccacatgctcctggatgcaaacggtcgccttttccccgcgccgccgggggtcatacaggcagcgcctcgccg

SEQ ID NO: 31705 - DNA, 698 bp, Artificial sequence
  DNA replication origin
gccagccgtttgggagctcaggcgcgggcagccgcttttgttcccgggaagggcggagctgcgtcccggggagacacgcgttgcagccggcagcgtagttgctccccgctggccggccgctccgggagggccccgcagcggagggtcggggctggggcgggctggggagggggcccagggctggggccggttcggcctcccgggtggcgcgcgggccgaggagctaggaggaccgccgcgccgcttgtcctttggataaaccttggcggttcctcctctggtgtccgtggaccccgccgcggcgttctccagggccgcggacctttgcccaccggttgcgcccgctgccccgggcagaaaggacccccctcctcccggaccgagccccgagccccatggagcaggcaagggccagagtcccggggccgaggcccgaccggcggacgctccgggaccttttcccgcccccgagggtgcatgtccggccggggccgggactggctgggaaaccgaggccagaagaggtcgcaatccagcgaggaatcggtttgtgtggggtgggggtgggatgggagacccctccccaaccccaccagccccagcccagctgtggcctcagccatgtcactcagaaaaccagcgtcaaaccccaccctgcccaggatgtggaccttgcctggtgagagtcccgctcggat

SEQ ID NO: 31706 - DNA, 1032 bp, Artificial sequence
  DNA replication origin
cggacctttgcccaccggttgcgcccgctgccccgggcagaaaggacccccctcctcccggaccgagccccgagccccatggagcaggcaagggccagagtcccggggccgaggcccgaccggcggacgctccgggaccttttcccgcccccgagggtgcatgtccggccggggccgggactggctgggaaaccgaggccagaagaggtcgcaatccagcgaggaatcggtttgtgtggggtgggggtgggatgggagacccctccccaaccccaccagccccagcccagctgtggcctcagccatgtcactcagaaaaccagcgtcaaaccccaccctgcccaggatgtggaccttgcctggtgagagtcccgctcggatttccccagggcccctccaccgcgcagcaggggtgtctgcgctgggcccaggcattcaccagggcctgcaggctgccagcctggagtttccctaggatcaaatgtgccaccggaagctgaaggtggggacgaccagtggccccccccggagcgaaaacccccgcatctctccaggatgggggatctgcttgggggtccacttaggggtgtatccctcaggcattggaagtgcggatgggaggccccgagccatggtggctcccccagtccccagttctttctctgtgtgaatccagctttgcagggacggggatgtggtgcatttcccggaagagccggggtcctggggtgtggggagctggggctggggtgtggggaggggcccagggtgggcaagcagaagcaggactggcacaggcctctggagggcctgggggaggctggacgccccggggtgcacccttgcctgtccgctcttctaagggtccgtctcggtttgcccatctgtaaatagggttgattgtccctgctctacgtggctgttgtgagcattcaatgagcactgccagtcctcggagactcttgggtttttttattgtgctaaaatatacaagtataaatttcccattgcaaccatttctttttgctcctt

SEQ ID NO: 31707 - DNA, 784 bp, Artificial sequence
  DNA replication origin
gccagaagcaaaaagaccagtgggcactgcctgaggccgtgtcaccgtgctgccaacagcttctgtgcccaaacaggtggcttccctggccctgaccccgggttcccaccagtgcctccacccagccctctgtggggctgccctcccatggagtctgacctctgtccacagaagggggagggcaggaggctgattccaggtcagggagctgttaggggggctcttggatagaccctccccagctagtgagttggcaagagacagaaactgaccccatggtttaggggcggctcccacgggagggacaggaggagtaagccatgagaggaggccctggctggtgctggcactgaggggatagattggggggcatctggctttgagaggagagcctctcccccaaaccccagccctgcccctccctgggcctctcagatgctgttgctggtgaagtgttcaggagaggagattctgattctcaagtatcattcagcctgaaaaaggaagttttgacacgggctgcagtatggatgaagcctgaagacattctgccgactgaagggaggtagacacaaaagcacagatactgggtgattgcacttatatgaggttcctagaacagtcacatccatggagaaggaagcagaaaggcggttgccaggggccgggggaggacgaatggggagctgctgtttaatgggtccagtttcaattttgcaggatgaagaggcttctggagatgggttgcacacagtgtgaaggtagaaggtactgagcatgactg

SEQ ID NO: 31708 - DNA, 786 bp, Artificial sequence
  DNA replication origin
agaagcaaaaagaccagtgggcactgcctgaggccgtgtcaccgtgctgccaacagcttctgtgcccaaacaggtggcttccctggccctgaccccgggttcccaccagtgcctccacccagccctctgtggggctgccctcccatggagtctgacctctgtccacagaagggggagggcaggaggctgattccaggtcagggagctgttaggggggctcttggatagaccctccccagctagtgagttggcaagagacagaaactgaccccatggtttaggggcggctcccacgggagggacaggaggagtaagccatgagaggaggccctggctggtgctggcactgaggggatagatgggggggcatctggctttgagaggagagcctctcccccaaaccccagccctgcccctccctgggcctctcagatgctgttgctggtgaagtgttcaggagaggagattctgattctcaagtatcattcagcctgaaaaaggaagttttgacacgggctgcagtatggatgaagcctgaagacattctgccgactgaagggaggtagacacaaaagcacagatactgggtgattgcacttatatgaggttcctagaacagtcacatccatggagaaggaagcagaaaggcggttgccaggggccgggggaggacgaatggggagctgctgtttaatgggtccagtttcaattttgcaggatgaagaggcttctggagatgggttgcacacagtgtgaaggtagaaggtactgagcatgactgaactg

SEQ ID NO: 31709 - DNA, 1049 bp, Artificial sequence
  DNA replication origin
cggcgttctccagggccgcggacctttgcccaccggttgcgcccgctgccccgggcagaaaggacccccctcctcccggaccgagccccgagccccatggagcaggcaagggccagagtcccggggccgaggcccgaccggcggacgctccgggaccttttcccgcccccgagggtgcatgtccggccggggccgggactggctgggaaaccgaggccagaagaggtcgcaatccagcgaggaatcggtttgtgtggggtgggggtgggatgggagacccctccccaaccccaccagccccagcccagctgtggcctcagccatgtcactcagaaaaccagcgtcaaaccccaccctgcccaggatgtggaccttgcctggtgagagtcccgctcggatttccccagggcccctccaccgcgcagcaggggtgtctgcgctgggcccaggcattcaccagggcctgcaggctgccagcctggagtttccctaggatcaaatgtgccaccggaagctgaaggtggggacgaccagtggccccccccggagcgaaaacccccgcatctctccaggatgggggatctgcttgggggtccacttaggggtgtatccctcaggcattggaagtgcggatgggaggccccgagccatggtggctcccccagtccccagttctttctctgtgtgaatccagctttgcagggacggggatgtggtgcatttcccggaagagccggggtcctggggtgtggggagctggggctggggtgtggggaggggcccagggtgggcaagcagaagcaggactggcacaggcctctggagggcctgggggaggctggacgccccggggtgcacccttgcctgtccgctcttctaagggtccgtctcggtttgcccatctgtaaatagggttgattgtccctgctctacgtggctgttgtgagcattcaatgagcactgccagtcctcggagactcttgggtttttttattgtgctaaaatatacaagtataaatttcccattgcaaccatttctttttgctcct

SEQ ID NO: 31710 - DNA, 727 bp, Artificial sequence
  DNA replication origin
gcccgccagccgtttgggagctcaggcgcgggcagccgcttttgttcccgggaagggcggagctgcgtcccggggagacacgcgttgcagccggcagcgtagttgctccccgctggccggccgctccgggagggccccgcagcggagggtcggggctggggcgggctggggagggggcccagggctggggccggttcggcctcccgggtggcgcgcgggccgaggagctaggaggaccgccgcgccgcttgtcctttggaaaaaccttggcggttcctcctctggtgtccgtggaccccgccgcggcgttctccagggccgcggacctttgcccaccggttgcgcccgctgccccgggcagaaaggacccccctcctcccggaccgagccccgagccccatggagcaggcaagggccagagtcccggggccgaggcccgaccggcggacgctccgggaccttttcccgcccccgagggtgcatgtccggccggggccgggactggctgggaaaccgaggccagaagaggtcgcaatccagcgaggaatcggtttgtgtggggtgggggtgggatgggagacccctccccaaccccaccagccccagcccagctgtggcctcagccatgtcactcagaaaaccagcgtcaaaccccaccctgcccaggatgtggaccttgcctggtgagagtcccgctcggatttccccagggcccctccaccgcgca

SEQ ID NO: 31711 - DNA, 925 bp, Artificial sequence
  DNA replication origin
ggggtccacggacaccagaggaggaaccgccaaggtttttccaaaggacaagcggcgcggcggtcctcctagctcctcggcccgcgcgccacccgggaggccgaaccggccccagccctgggccccctccccagcccgccccagccccgaccctccgctgcggggccctcccggagcggccggccagcggggagcaactacgctgccggctgcaacgcgtgtctccccgggacgcagctccgcccttcccgggaacaaaagcggctgcccgcgcctgagctcccaaacggctggcgggcagggagcgggcgccgcgcgccggctccccggagcccagccccgcaaatgggacacccacagcgggtgcccccaaacttcccacctctcccgtccggtcgggggaggggtcggggccggtgggcagggcgcggagagcgcacgaagcgcttagggggtctgcggccccgcggcggggggttatgccaagggagaacgcgacgacgcgagggggagggacggagggcaccccgaagccggggaccgccaagccggagccagtggagtggggcgaagtcggcgagttggaaacttcctgcaatcgtccactcctagcctttggcgttcggctggtcctctggcggcttggcgggcggctgcgcagggctgggacctgtgctggatcgttaggcttccgaagagatggtcgccatccttgtcgtggtcgcgggcgccgtcagaggggcggcggcggccggcgctggcagtggctgggcgcgcgggggcgtcatggggcaggtcccgcgggaagtgggggaagtagccagagatctgctggatggggcggatggggccggggcacacgtcgatggccacatgctcctggatgcaaacggtcgccttttccccgcgccgccgggggtcatac

SEQ ID NO: 31712 - DNA, 1712 bp, Artificial sequence
  DNA replication origin
ttcggctggtcctctggcggcttggcgggcggctgcgcagggctgggacctgtgctggatcgttaggcttccgaagagatggtcgccatccttgtcgtggtcgcgggcgccgtcagaggggcggcggcggccggcgctggcagtggctgggcgcgcgggggcgtcatggggcaggtcccgcgggaagtgggggaagtagccagagatctgctggatggggcggatggggccggggcacacgtcgatggccacatgctcctggatgcaaacggtcgccttttccccgcgccgccgggggtcatacaggcagcgcctcgccgcccccgcacggcctggcccggagcgacccccgccgggggcggctcagcaggcccggcatggcgcggcggggcctccgcgaaggccagcgcgagtgagtgccaggggcgggcgggcagggggccggcccagcccgtgtcacccggcagcaaccacgcagcgtgagtgtgcgggctgcccaggcagcgcggagcggagagagctgcgtggggccacactcactcgcactcacaccggcggacacgccggcctgggaccccgtgcgcgcactccctcgggacaagcggggagccagcaggacagggacccacggatcgcacactcactcacacgttcctgcaggtgccagcacatgcggggctccgttcgctctcacgggacacacgaaggtgtgcaaggacaatgcaagtgcacgcacacgtgtgcagacacgtagtggaagcatccactcgctcatacctgtaagacacacacacacacaaacatatgcacacatacagagttggttgaggatgctgtaacacagtacaccccctaatgcacacacacacagacacacgcacacacaggtgatcaagggcacccaggggagaatcttccatacccccaaggacccctaacaagatgcacaaacatgcacccatagaagtaatcaggggaccctgggcacaactccctctctccttccccatctaccaggacgtggagtcacactcctaggcatgtgtggacaggctgcctacacacgggcaggacatgtatatgctcaactgtacaaggacactgcgggcacactctgcgcacacatattctcaggtcacataaacacagcactctgtaacctggagtcagtccctcacttggtcagtgagtgggctgaagcacccactgggacagggtggctgagaaccaggacagggcctggtcaggaggggttgagggcagggcctgggaagtgagtgatgcaatgaggttgggcagtaccaccccccacccaaccacccactgcaggcctcccacatcatcgggtcactaaacaaatcccagagggcccagccccagctgttgcctggctttccagaaacagaactcggttgggaatcgctgctgcttggacaggtctgtccccagaaagccctgggcatggatggagtcctgtctaccctctggtttccactgacacatttacctaccaacattctgtccaagtctcctcttctgagccctcaccagaatcacccttaatggagagtcacagggagaagacgtccacccgcgcatgagaagacaggcctggaacagagccttcctgcacagcctcagaagggacccaccttgctgacaccttgatcttggactcatggcctccagtactgtgagacagtaacgttctg

SEQ ID NO: 31713 - DNA, 1108 bp, Artificial sequence
  DNA replication origin
aaagacaagacaatattgcccagtgagtcaagcatgatcgtagcacaaagaagcagggcactcttccccagagcaggccagttcagagaggcagtccagggctatgccccagtatggctcccgccgtgctcctgcgcggtgtcccagggcctcctggcaccttcttatcatcagcctggggcgaaatgccagaccagatggtagaggcagaagtcaagcaggcaggtgccgtccagggcattccaggccagctgagtgtgcagccagcgcccaattcagacggcgccccaggccaaggctggcccgcttagggaccgcgctcgggctggacgtcgcgctcagcgcgcagggcccccatggacgtcgcgccgctgacctagctgtcagacatcgccacgaggagtaggcaggctcgggaggccgaaacgctgtgctcacctcgagcactgccaggctgctggagaggctttccggggcacagaagctgcagcggcgcggggcggtgggctgtgagcgagcatatgtaggggagcgtttcccgcgagaaagcagaacctgcgccagccgagggccctagggctgctggtaggaggactgttctctatcgtccagctgctcccgacctcttctctgaactggccctgctctggggaacagcgccctgcttctttgtgcgacgatcacgcttgactcattgggcaacattgtcttgtcttttccttccttttatggacatagtcctcgctcactccagacttgtcctgtgaattgtatggggaggttgggccctggggagctttccctcacggcttttagaatctcaacacccttgccgcccgccctggctgggtggagatacaaccagaagacagacaccgctcccctaaaccccagcctccagtataagctacaaaataaaaatgtgggcagggtgaggtggctcatgcctgtaatcctagctctttgggaggccgaggcgggtggatcagctgagctcaggagttagagaccagcctggccaacatggtgaaaccccgtctttactaaaaatacaaaaaaattagcccgacatggtggcgggcatctgtagtccaggctactttggagg

SEQ ID NO: 31714 - DNA, 1931 bp, Artificial sequence
  DNA replication origin
ttggccatgctggtctcgaactcctgggctcaggtgatccacccgcctctgcctcccaacgtgctggcatttcaggctggagcacccgcgcccggcctgagacgcatccttatcagggactcccaactcgtctcgccgggccacgcgcacacaccctcaccgcgcacacccgtgcacacgctcccccagccggtgctgacacgcgtgtgcacacacaagctcgcgcgctgcccagtcctcccgcaccctcgcggcccccggcgcacacgcaacccgggaccccagcgccaccgacgctcaccggtcgcccgcggggggatcctctgcaggggcgggagctgggggcacggaggggaccgccgaggggcacctggggccggagcccgggagctcacctgcactggccgatggccgcgccgcggagagggccaggagcgccagcagcatccgcatcttgcgggacagcaaagagtcctctgagccgggggtcgcgcaccgaggaggccgccgcgggtgcagcgatcctgccggcctgggttttatagcggagccgcgacgggagggagccccgacagctggacgcgggaggcggctcctccccctggcggggcctgccctcccctctccaccttcccctgtccctcatctgaaatcctccgctctccccggtcccccgccctgcctggccacctcttgccctgtgcgcaaggccccctcacccactccgcgtcctctccactcagcagcggcgccctgcccctcccccatcctactcctggtccctggtttgggaacagggacacgacaccacaaagtgcttgacccacacaaagatgagtgccccatgatgactttgatcattctggcgccacccctgcgcagtggtcttgaatgggaccttggaatggccttggggtgggggtgggggtgggggtggagatggcctcgaagagatgagaggctgaggggcgtgtgatgccgtttgttgaatcagtggccgcagaaaggctctcctatctctctttggcagtggccattgattctctgggtctcatctcttctatttcctcccaggctgctccaaacttaatttctaagcagaccaaagacctttcttcgaatacagagcaaagctgtccctaaactactgcccttgctggtgtttatgtgatgaccagggagggttgatggggcagaattaagaaatggattgtaagaggattcggtgagggagaagctgatggggtcaaaggggaggagctaggttctttgagccccccaggtggagagatgagatgggaagagaagagactggggtctgaatggacccctggttctcccatctggcaagacctccagaggagtccaggggaagttcccttaagggcggctccaacatttggggaaatggggtcccccccatgcccccaagctgcctcttgtctcctctcttagctgtgccctcctgctactgcaggtcctctgtgtcccacatggggtgggggcttctgtgggagtttgggaagctcaggctggggtgcgggagagggacggggaaccaggcagtggacctggacctcctccatcaatccatcaacaggaagccccctttttctggtttagccactccccatccgctgccaacctctcagtccctaccgaccttcgaacctgggctagggacttctgaagggggattgcctcccccagaaggattcaggcaaagatgcttcctccttgcttagggttgaggctgactccccgctcctggcccaggatcacacagcctcacagagcagctttgatcctacagagaggcaggagggaggtgagggggtgtccatgccaggcttagggctctattgtcaacaccactgtataatgtaatcaccagcctgcgaccatgacagccacaggagggattccacacc

SEQ ID NO: 31715 - DNA, 1001 bp, Artificial sequence
  DNA replication origin
gctgagtggagaggacgcggagtgggtgagggggccttgcgcacagggcaagaggtggccaggcagggcgggggaccggggagagcggaggatttcagatgagggacaggggaaggtggagaggggagggcaggccccgccagggggaggagccgcctcccgcgtccagctgtcggggctccctcccgtcgcggctccgctataaaacccaggccggcaggatcgctgcacccgcggcggcctcctcggtgcgcgacccccggctcagaggactctttgctgtcccgcaagatgcggatgctgctggcgctcctggccctctccgcggcgcggccatcggccagtgcaggtgagctcccgggctccggccccaggtgcccctcggcggtcccctccgtgcccccagctcccgcccctgcagaggatccccccgcgggcgaccggtgagcgtcggtggcgctggggtcccgggttgcgtgtgcgccgggggccgcgagggtgcgggaggactgggcagcgcgcgagcttgtgtgtgcacacgcgtgtcagcaccggctgggggagcgtgtgcacgggtgtgcgcggtgagggtgtgtgcgcgtggcccggcgagacgagttgggagtccctgataaggatgcgtctcaggccgggcgcgggtgctccagcctgaaatgccagcacgttgggaggcagaggcgggtggatcacctgagcccaggagttcgagaccagcatggccaacatggtgaaatcccatctctaccaaaaatacaaacattagccggacgtggtggcacacgcctgtaatcccagctactcgggaggctgaggcccgagaatcgcttgaacccaggaggtggaggttgcagtgagatcacgccactgcactccagcctggtgctccgtttaaaaaaaaaaaaaaaaaaaaaaaaaaaaaaaaaaaaggatgcttctcggacccgcctcaacgcacgccttcttttctcacccagcctcct

SEQ ID NO: 31716 - DNA, 966 bp, Artificial sequence
  DNA replication origin
cgcgggtgctccagcctgaaatgccagcacgttgggaggcagaggcgggtggatcacctgagcccaggagttcgagaccagcatggccaacatggtgaaatcccatctctaccaaaaatacaaacattagccggacgtggtggcacacgcctgtaatcccagctactcgggaggctgaggcccgagaatcgcttgaacccaggaggtggaggttgcagtgagatcacgccactgcactccagcctggtgctccgtttaaaaaaaaaaaaaaaaaaaaaaaaaaaaaaaaaaaaggatgcttctcggacccgcctcaacgcacgccttcttttctcacccagcctcctccgtctgcccgtgggtttccgtccgtcccgctgggactcagcgctgggtgactgccccgcggccagagcaagggcggtctggcagggtcctggaagccgcgcttcccacacgggttccttgcccctgagggtcgcaagctcccctggcctccctaacctccagcgctgaattgggagcctggcgggggcggggggtgggggacccggagccccaaggcctctgcggagccggtctttccggacagggtgattttcgtttaaagattaatggtgaagccgagctcttaattattcctctaggtgggaggtggcaggaaaggcatgttaatatttgataagaagctaaaggcgcttcaagcggctgggcacagggatccgatcctggaggcaccttctttgcaaccccagaccccatcaccggaagaccccctctgccagttctcagcccaaccacccctcggatggttcttggggtccacgcaggctgaaacctcctctcccaagttaggtgctccatcctcaaagcggcggagtgaggggtgaaggtgtcctctgcacagagaggagccagcgtgtgccctttgcagcagggactggctgagctgtcttagagggtcga

SEQ ID NO: 31717 - DNA, 1611 bp, Artificial sequence
  DNA replication origin
attggcgggaagatgggacgatgcgttacgtgcggagatgcgtccccctccccggcgctcctgcgcgcggttagcttggggaggggcggagcgtgcggccctgggcggccgttaccgggaacagtgtctggcctcgggtcccgtgaccctcggcggagctggcgggagggggcggaagtggcaagagggcgtgaggagggaaggagagggaggagagagaggagagagaagggcggagtaggaggcaggggaagggggcggggcggaagagtcacgtgatccggcatggaggcggtggcggcgaccgggaggagccgccggggcagaagccgcacttgttagtgtggggggaggtgggggcgggggacgccgacaccgtcaccgtcacccagggacgccgaggagaaggcgggaggggggtgggggcgagatcaggctccgaccccccgccgaggggatgaggggagcatgggtgccaaggagtcacggatcggattcctcagctacgaggaggcgctgaggagaggtgaggggggaggggtctgggcgagctgcctgggaggcccgcgacgggcagcctggagggtgggtaaccgggagggagaggggagattgagggcgtggggcgcctgaggcggaagggaaaggcggccggccttggggagtgtggtggaggagagaggtcgggtgggaagcagcgtttgggaattagggccgtttggaaaggggcttgtcctgagagagggggatcggcgctggcagggcagtgcccgtgctcgctggtggcgttgtgatcctggatgtgtccagggaagtcctctccccgttttcttgggcggctccagcccatccagcccccctcatccttcattgccattttctcctatcattccttcataaaaacctcaaataacatcctaacctcgttcctaacagccttagctggaaggggacgaggaggcggctgcaaagcgctcctctctgctactggaagccccttcgtatctggggagtccctgccttttcccagagcctatgcctgtctcttgagggctgtggccatccgcttctgccacccttcaccgtttgagcggctgactttgataagaacgatctgaaatgaagttgtgtttgaggtgagatgagactggacagctggcgttggcaccagaccttgtcttaggtttcatctcctccgacgttgaccaaagcctttgactgcacttgatgcccagttctcgctccatccctctccatgaaatggcattgggaagtccagcattcagatattgtgttaaatctccctttagagactggcctggctgccagtcccggcctgctgcttattggctctgaggcacagtatattgttggcagccccaaccccctaccactcactctgataccgctgtccatgatcactaaagcacacactaactggaagtgtcttgttgcacagtttatggccggaatgtcttaatttttcatgactgggatttcagtgtgtgtagatctgtgtatgcttgtatttcttttagacatttaatggatattcttggtaagaagtgaaaaaacattaagaagattaggagctaggcattattgttaaca

SEQ ID NO: 31718 - DNA, 945 bp, Artificial sequence
  DNA replication origin
gggccgacggcggtcccaccgcactgtcgcgaaggcaggcgaagaacagggccacactgagtggggacaactgggcccgggcccagaggacacgaaggaaggtccgggagaaggaattcctagtttcagggaagaaaaggtggctcgagtgaggaaactgcgggggcaacggtctctcgtcgccgggaccccgccgtgtgccgcccagggacgcgagggggcgctgctgccgcgccaggggcgagggtcccggggcctcctgagcacctcccggccctgcccggccaactcagactacacccggactctgcccaccgcgtttccgccctcggcctcgggtccctggagggctcgcgggtaggaagagtcggggtggcgggactttcgccgacacccggctccccgcctggtggctgcgcacacgaggccggcgacgggacttgcccgcgtctcagcgcctcctgtgtgaagcgggaccgctgcggtacctgccccagggaaggccgcggggagggttacagagcccgtaggcactggcggggatctttatacacccccaaaacacacacatcccacccagtacccagcacccagcacccagcacggagggcttattattaacaacttcctggaggccgcaggggcagtgctggctcactgtgtcccttctccctttcagctctccctagacctctgtcccaaatcagaaaagaattttacaaactgtgctttcctctcggggagcccccaccacggcgtaacccagcaggcaggaatggcacacgtgcaggaaaatgagttcaacagccttaccaggtggtgtcaggatcagcatctgacagtattcttgggagaaggggcgccagcctctcctggcctgctgtgcgctctgccaaagtcttcgctcgaccccgcacatcttgctccgttccctagtccagatcc

SEQ ID NO: 31719 - DNA, 1123 bp, Artificial sequence
  DNA replication origin
gagggttacagagcccgtaggcactggcggggatctttatacacccccaaaacacacacatcccacccagtacccagcacccagcacccagcacggagggcttattattaacaacttcctggaggccgcaggggcagtgctggctcactgtgtcccttctccctttcagctctccctagacctctgtcccaaatcagaaaagaattttacaaactgtgctttcctctcggggagcccccaccacggcgtaacccagcaggcaggaatggcacacgtgcaggaaaatgagttcaacagccttaccaggtggtgtcaggatcagcatctgacagtattcttgggagaaggggcgccagcctctcctggcctgctgtgcgctctgccaaagtcttcgctcgaccccgcacatcttgctccgttccctagtccagatcccagctggaggggccagctgcagccacccctaagaatgaggaaatgggagcggggtggggggctgggttctgtgttggcggttgccgtggctttgctccgagttctggagccaaaccgcccactccctgagacggctaggtcacagaagcagtgggtcagaagccagaggggacgtggggagtgccaccctggagcctaccggcacacctgctgagatggaggcctcagatgggcaagggggtgaaggggacaagccactagagcaggtgaagtggggtgtgagggagggagggaaggagggtcccggaggggctggttttggaaagtagagaacatgaaattcaggaaagaagagaagaacaatgatagggtacctgagatagcaagaggcctaaagcacaagaactttcattcattcagaagtttatgcatgacctgtgttcctggcgagatgatggggaagaggtcgcctctcattgttggttatgaagacttgagagtatgtgtatgtatacacatggtctgtgtgtggttgtgtggtgtgtgtgctgtgttggaggagttgatcagccagagtcctgtctctaggacctggaggagcctgtgtcccatctcctctccatgcacctccctccccctggcctttcccttcagagtggtctggacgggatcttccttgttctccccg

SEQ ID NO: 31720 - DNA, 1012 bp, Artificial sequence
  DNA replication origin
tgggcagaggcgcccctcacctcccagacggggcggctggccgggcggagggctgacccccccacctccctcccggacagggtggctggccaggcggggggctgacccccccacctccctcccggacggggcggctggccgggtgggggggctgacccccccatctccctccaggacggggtggctggccgggctgaggggctcctcacttcccagtaggggcggccgggcagaggcgcccctcacctcccggacggggcggctggccgggcagggggctgacccccccacctcccttccggacggcacggctggccaggcggggggctgacccccccacctccctcccggacggcacggctggccaggcggggggctgacccccccacctccctcccggatggggcggctggccgggtggggggctgaccccccccacctccctcccggacggggtggctgccgggcggagacgctcctcacttcccagatggggtggctgccgggcggagaggctcctcacttctcagacggggcagctgccgggcggaggggctcctcacttctcagacggggtggttgccaggcagagggtctcctcacttctcagacggggcggccgggcagagacgctcctcacctcccagacggggtctcggcagggcagaggcactcctcacatcccagatggggcggcggggcagaggcgctccccacatctcagacgatgggcgggcgggcagagacgctcctcacttcctagatgtgatggcggctgggaagaggcgctcctcacttcctagatgggatggcggccgggcggagacgctcctcactttccagactgggcagccaggcagaggggctcctcacatcccagacgatgggtggccaggcagagacactcctcacttcccagacggggtggcggccgggcagaggctgcaatctcggcactttgggaggccaaggcaggcggctgctccttgccctcgggccccgcggggcccgt

SEQ ID NO: 31721 - DNA, 953 bp, Artificial sequence
  DNA replication origin
ctgggaagtgaggagcccctctgcccggccagctgccccgtccgggagggaggttggggggtcagccccccgcccggccagccgccctgtccgggagggaggtgggggggtcagccctccgcccggccagccgccccgtctgggaggtgaggggcgcctctgcccagccgcccctactgggaagtgaggagcccctctgcccggccagccgccccgtcctggagggaggtgggggtgtcggccccccgcccggccagccgccccgtccgggagggaggtgggggtgtcggccccccgcccggccagccgccccgtccgggagggaggtgggggtgttggccccccgcccggccagccgccccgtccgggagggaggtggggggggtcagcccccctgcccggccagccgccccgtctgggaggtgaggggcgcctctgcccggccgcccctactgggaagtgaggagcccctctgcccggccaccaccccgtctgggaggtgtgcccaacggctcattgagaacgggccatgatgacaatggtggctttgtggaatagaaaggcgggaaaggtggggaaaggattgagaaattggatggttgccgtgtctgtgtagaaggaggtagacatgggagacttttcattttgttctgcactaagaaaaattcctctgccttgggatcctgttgatctgtgaccttgcccccaaccctgtgctctctgaaacatgtgctgtgtccactcagggttaaatggattaagggcggtgcaagatgtgctttgttaaacagatgcttgaaggcagcatgctcgttaagagtcatcaccaatccctaatctcaagtaatcagggacacaaacactgcggaaggccgcagggtcctctgcctaggaaaaccagagacctttgttcacttgtttatctgctgaccttccctccactattgtcccat

SEQ ID NO: 31722 - DNA, 1112 bp, Artificial sequence
  DNA replication origin
taacgtcctccatgtacttcctcccgccctggtcggagaagacgctcactcccagcgagtacagccccgccatggccggctggccgggatcccgccggtcccacgcagcccgccgaatccggcggcgggagacacactaggcgctcgccggccaactattgtttatcttcgacgacgccgagaagggggagggggcggacccggagaagggggggcgcgcgatgtctggacttgtccgcgagagctgggccggagcgccggagcgagcagagccaggcagttgcgcctgcgcactgcgcttccccccaccgcccgcgcccaccacacaaatcaggcgttctcccccgctgacgtcactcggctctctaagctcgaccaatccggagtcgagtggagcgagcccgccctccgtccccgccttcgctcccgcctgcgacggccgcgctgcctcctcccgccgctggcgctgggcccgcgcatctcctagtttgcttcccctacgccgcgggcgttttcgccctccgggttgtcggcagttgttgatcctttcccgagcggcttggtctgtgtaggcttttggctcagtccagcgttcttaatgcggcctgctggccttggcgtcccgctgcttgctttgctaggaaggtggtgtgggctcgggcccccagcgagtggagaatgaagggagaagagttcaccctcctcctaagcgaaatggcgggaaacctcccttccaaagggcgattgtgagctggccggaacaagtgctgcacccttgagctggatctgggtgggacgtattcgactgggaatggaggagggagggagtccagttctgttgtttaaaaagcacttaggaaatttccaccgtcagctgcacagtctcggttcacataactaggtatgtcagagacgtaagagggctgtattctaacgaattcctaggcagatcttttcagcttttgttaaaggtagtgctcgttccgaccagctctggatacagcattttattcctgcggtatcacttcaagttatcacttgaaaataactgacaaacactgccaagagccccagtgctctaacggtttggtgatcgtcccctctcttcaccg

SEQ ID NO: 31723 - DNA, 1403 bp, Artificial sequence
  DNA replication origin
aagtatacgaaggcctgtgctgagtgttcaagaagtcagtcagtattattctacttatattaataaatgaactgatgaaatgacaatggcgagatctcgatcttcaacaataagggagatggaaactgaagcaagaagtggtctacaaacctagctcaaattgttgagattaccggccgtgccccttattcagatcaacccctcctcggctgatcgccggcgcgagccagcctaggctcccggaaggtaaacacatcgccaagggctgggcagaaggcgggtgtgggacgggtgagtggccagctaaaagtgattggcagctgccatgtccacgtgctccgagcttggaaccagctgtcgcgagaattcgatgtaaacagaccagtctccctgtcctccggctccaacctgaaacgctcacgtgagcgggacaggagtctggatcatgttgcttttcttttcaaagccacgaaggttctgtcttccaaaaaaaatgtacatgttcgtaattattccccagctgcctgcgtttgcaaccgaacctgacacctcggcttcacccgaacttacatgctgttgtgttttccctccagccccagcggattggacacattcagaaggcgggtccgcctctttcctacttgctggttggcgaagctgacctccaagggcggtgcccggccatagccggtttgcttctgggattggctagagggggtggttccgctgaggcgtggtaggaagtggctgccgtcaatcactcggggagactccaaacagtgagcctagagctggagactagcgttaaccggcggggcggccggtgagagggctggcagggctttggctttggggaggcttggggaggacgagggactggcggcgtgaggggactgggtcgggctggcaggaattcgacaggagagaggtgtcgatactggagggggaggggaacagtgcaaggggccggagggcggccgggggcagcggtggctccgtgttggaggttaagtgggcagcgccgtacgagtgtctttcaggagactggggcctgagtggctggcgagggtcgtccccaggagacagggcccttaaagggcagggcttgggagactgtggttcgagaaagcaagaatgggatgagaatgagagggctgaggggctggaggtgcaggtatcctctgaggaggtggtggctctgctccttggggcagagggtgttttggttgtaggaggtggggcgcacaggtttagagttttcacatcaggtgtgaatgctccctacttaaaaatggttttcggtgccttcaagatgagttccaggttgtgggcttccctgagccctgtaagagatctttgatattgctgtcagtcctcttttaaccttaaccaagccgactcca

SEQ ID NO: 31724 - DNA, 1317 bp, Artificial sequence
  DNA replication origin
aatggctgtgggattcaataatgtggaagtctctgcattaattgatttgttgaaaaagaaacggggacgacattaactttggaagagcggtttcagtacagagagggggcaaagcctcattggagtgtgttcaaagagagaaagggaggaaagcagttgtagacagcaagtccagacatctctttcaaggagttttgattaagggaaagagagaaatgggggcggtaactagaagaggaaatgaggtcaagaaggtctttctttttttctttttaatggaagaaatactagcatagtgatggcaagagggggtgggggctggtgcatacatggagggattgaccttggtagaaggaagggggactgtgtatacacagatgcagggggtgggtggattccaggacaggactttaaatacctttctgatggcttccattttctcgatgaagccgtcatctaagccctccactgaaagcgagaatggtggagaagatattgacagtttgagggtagaggagaaacgatgaagtaatcatttaggagggtgaaagagtgaatgcgctcaggaaatagcactggagggcagcattaaaggtccgtctggtgtgagtgatcatcaggtcaggctcagacccgttagcatggtgtgctttcctccctgctgtgagtcgctgcgggggacggggagtgggtagaagttggatttaacaaggttgtggtttcaccaggccggtatggccaagggaaagagggatgcagaagctgagagtgtgtgcaagggactgagtctaacaactggatgtggtgggaagagaggacatggagttgggggatagtgaaaagcaggcgggatcaatgtattatacaccctggtgaggctgaaggctgcttggaattgggttagcagaggcagagaaccagaaggagaagagacaacagtcagtgtgggatatatgagattaggattgtgatgagatttgcagttattgttaattccatcaaaggaagagccatggcagtgagtggcagaggggatggagaagggcgctggaagggaggagggtcagggcctgagaggccaggttgctgacagggtcatctgtgtgagtatgatcgggttagtgttgtgacactgttagagtggcagtgaagcagaagctggaatcgttaaggaatagggagtgtgagtgtgctgagggcatggggcgggcacaggaacagactgtaacaagaaggggcagtgggtggaataatcttacaacacagtcaaagttgggggttttatgaaagaaagaaaagtctgcatctacgaggagc

SEQ ID NO: 31725 - DNA, 1723 bp, Artificial sequence
  DNA replication origin
tgccgccaggccgtcgatcactgcctggacgtgaggagtgtggtggtgaaggacactccctggacagagtcgcttcccatcacggcttccccgccggaccgcacctcccggagccctggcgccagccagcccggtttagcggccggaccgggctcccccgcggtcccaggtctggttggggtgggggccgcggcctcggtgaccccagcccgcagcggcccggcccgtcccgtccacttaaacaaattgccgctgacaggcgcgcagtctctctggagccgccgccctcccgtcgcctccctcccgtcccaattatcccgcgcagggtggggccaactggctgggatggggcgggggacgcggggagagcgggcggctcgactccctcctggtcgcggggtggcccggggaagcgtctccgcagccacggcctgtgtggccccgtccctggtcttcccgggggatgcgagggcaaggcccagcctggcagctgtgggccctggaagggcgtcgttctgcacctaagggcgagatcacgcggccgagaaccaaggccgcatcccggatggacttcgggtgactttcccggagttctggggaatcccctaacccggggagctgcagacgactcactggccccgggccgcggttccgcgggtggccgctgtacgcttgagacacctggtccgcagaagtcaggtgcacgtctgtgcaccgtcgtgcgttggatgtgcatggaggcgagatcgtggttatggatgtctgggatcacgggagcgtgaacggggcgatcgactgagtgacttgagagacggggtagagcgcaggaaggacccctaggacgggcccacctgcgacgggcggcggtgggggagtggggggcttgccggcgcgttcacaggctctgggttcgcgttcggaaacgctttcgcagggagcgggtcgggattccccggagcagcacggtgacggcgtgccacaatccgggctccagctgtgccgcctccgccctccccatccctgctaaggggcacctggcctggctgtcaacttcccctcgaaccatgggtttgccttgtggacccgcagcttcccctctgcctgcttctgctctgtcgcgccttcggaagggcatgctgctctctcccctccactccctcctttacacatgaggaccctgaatcccagaggtgcagtcatgtacccaaggccacgtacctgctggtggcagagctgggatgggaccctgggaccttaaagagagcaagtccaaacccactcctaagaagccggtgctgctgagctgcctacccctgctcctacagcaaggtgatcctgagatgccagggctgccaccctcccctgggctcttgctctgaattcgagacatacaggatgcactgtccctttgcctctagagcctccagttctaggtctgcagtgggagggctgccttccagctacacaggggcaagggagcagctgcaaattcagtctctcagcccaggcaggaagcctgatggagtcaggatggggatcagtggggtcagcattctggatgggataggggcacaggacagggaggtcagttcggatttgggtccctctaagggaactggccagggtgtgaagcagccaggtgcagacagggataggctcactaggcgtgtgactttgtgaccttgggcaaggccctgcccttctctggggctcaggcttgctt

SEQ ID NO: 31726 - DNA, 1871 bp, Artificial sequence
  DNA replication origin
acacgaccccgagcggagagggggcgccctccttctcccgcgcccagaggcccggccgctctggcccgagccccagcctggcctccgacccagctccgggtcgtggcgccgcctgggggtccctgcgccccggaaagagacagcaggcactggaaagcgaggccggtgggcgggcgagtcgggaggctcgggcggccgaggtccgggagcggatcccaggtggcgggagctggtgagtggagccatggccgagccctgctggggccggcgcgggcgggagcgggacgcggccttgcgctggggaaacgcggggaccccctacccgcgcccgccttcaccggaagactcggaaggaacctggagttctccgcaggcccgggccccgccctgagctttccagcggccgggaggagcggatcctcggggccaggaaggtgagcgcacctttcgctgagcacagggcggcaccgcgcgggcggaccccggattctccacccgcgacccaacgaattttcgccctatccggtaccggagacgaaagtctccttcttccgaaataccggcttcctctcttcgccctgccaaccacttttttagtttcttctcatctctcggaagcgcacgtctcctaagttaaggagtgctgagtaacgcgtgagggagttggggtgtctgcgagcacctgtgattgaagccccctcttctgtgatcagtcttcgttttctgtcttccggcagcctcagtttcccccccatgaagtgatggtgtgtgtgtgtgtgtgtgtgtgtgtgtgtgtgtgtgtgtgtgtgtcgggccccgtgtggtgccctctgtgcgcagcgagagctataactcaaggtgtgcacggggagagtgaagcgaccacgcacctgcttccaatcgggctcgggcgcgaacactcaggctgattcctgaaggtcgttttctgaaggaaaagacagagcatgcactagccacgggtgacattcccacccgtacaaccgcgtggtgggcgcgtacatccaacattgacccatgcaggcgcccgcccactgcgcacaccggtcgcagggcacttcgttgttgaacgttgggagcagcgtttgaaggccggatctctcctggcagtgcggattcgggaccggcggaagcagtatggcctctgcgaccgttatccctacttttcggggccgaccccagggccctcacaactcctcatcaccgcatatgtgagcgccgcccccacagggttttctccacgacctcgttcttggctaggtcgcacctctcttagtacctcctctctggccagaacgaatctttgactccgagctgcgcagtctacgcagacggggcaggatccactgcagttttccacaggcaaatacctgctggctccaccttaggcgagatgtggcctctcggggagggacccgttgtggacacgtttgcgcagccggtgaggtgaccagataataaccagggcagctttccttagccgggaacccaggtaccggcctaggaatccgtgaatacattcgcaaagtcgcgcgcgcgcgcgcgcgcgtgtgtgtgtgtgtgtgtgtgtgtgtgtgtgtagacacatacttttgtccttgtaagagtatgtgtacatctaaatgtgtgcgttttagacattagtccatttcattagtccatccatagctggtccaggggtccgaggcctgaagagtttgaaacactcaggcctgggttatttgaccgagaaacctggcggcgacagtgcagcggctgcatctggggacggcgaccccacctacagtggcaccgaccttccctctggctttccggggctctgtccgggccaggatcccaccactcgccccgcc

SEQ ID NO: 31727 - DNA, 852 bp, Artificial sequence
  DNA replication origin
gctcttgagggagcgcagatgcgcggcgggcgggtgcgggcccagtgccgagacgtgcagccccgcctcggccgctgctgccgccgccgccgccgcggccgccgcccccgccaggcccgggtcgggcagcggcttggccagcgcgccgggcggcagcgcgagtgccgggaagaaggagggctgcgccgccgccagaaaggcggacatggggaagtcggcgggccgtggcgcgtggaacgggtggtaagccatggcgctggccgccagcgccggctctctcatcgggacatccggcccaggcgcccgggggccggggccggggccgggggcgcgcggctcggacccccggcccgggcggcggcgcgcgcggtggacggacgacccgggtggcgggcgcagcagctgctcctcggggcttcccgtccggcgcaccgcaaggggcacccggctctgtgcgcgggggcggcgggggctctgcgcggggccgggctgggccgggctgagctggcccgctccggcgccggggaccacgcgcgactggttagatcttgtcgtgatctctggaaaactgtgactatctcacatgtcctgcccagctcggatcccctgcgctaacgagccaggccccccttgattgctgattttacgctttttggaccaattgtgggtctccgggggcggggttttgacagctcaggccaagctccggccgggagggggggcctgggagaaggtgtcggaagcctcagcagtaagaaaacatgtcaacagaataaaatattaaccaatgacgggccgccgggccccgagacccctcctcctgccccggcccccaccgcccgcccgcgcctg

SEQ ID NO: 31728 - DNA, 1987 bp, Artificial sequence
  DNA replication origin
agccgggtgccccttgcggtgcgccggacgggaagccccgaggagcagctgctgcgcccgccacccgggtcgtccgtccaccgcgcgcgccgccgcccgggccgggggtccgagccgcgcgcccccggccccggccccggcccccgggcgcctgggccggatgtcccgatgagagagccggcgctggcggccagcgccatggcttaccacccgttccacgcgccacggcccgccgacttccccatgtccgcctttctggcggcggcgcagccctccttcttcccggcactcgcgctgccgcccggcgcgctggccaagccgctgcccgacccgggcctggcgggggcggcggccgcggcggcggcggcggcagcagcggccgaggcggggctgcacgtctcggcactgggcccgcacccgcccgccgcgcatctgcgctccctcaagagcctggagcccgaggacgaggtggaggacgaccccaaggtgacgctggaggccaaggagctgtgggaccagttccacaagctaggcacggagatggtcatcaccaagtccgggaggtagggctgccggccggctggaaggcgcgcgggcgggcgggcgggctggggcacgggactgcacggatcagagcagagctggggactcccggctcccggctcccggctccaggttctggccctgacgccacgcttcgctcccacggacaaccaagttgacttttctcgtttggcaccggagcgatttttttttaaaacaaaaacgctaaaatcctccgaatgaaataaaacgaaaacatactgctaaagaatagccccaaccgttctgagtcccagcgcagaggaggccccgcggcttggccctggcggtctcctccgccccgcgctctcgctcttctgcgtccgggtccgtctccgagctcgggggaaattcagcctctctcagactctgctccgaccccgaagcccctagtgggacctgggcccagctaaccccacgctggttgctcggttcctggcagcgagccccgggtcagccgagccctccgcctcaccgggctgggagccctttctccaccgcgggcatccgagccctggacgcatccgccgccccaggccttaaagcctgaagaaagccacagccccggcccctccacccttcgactcagccaccgagaatccaggcctcgggttcaccctcttcccccgaactgcacggccaggatgtcttatcaggctctgtagcccagttcccaatacaaacaccctccagatttatttctgggagcttccgtcccaagtgggtatttcccctgaacgaatttcggggagattaaggagaagcgagaatatttctagagggcctagacttctctcctgggcatcagctttcatctcagatcagggagaaagagggtccccagatctgagcacaaggcctaaaggaggctgtttaggagagggtctgacaggcagaaatgggatctcctgggagcaacaaccacaggtggggtcgtccgggcagtgatgagagggcagagcagccgaccacaggggaaacagccaggcggcagcggtgtgcgcaacgaggagggataaataaaggaggagtggggtcctggaacctagaacagccggttccaatgggatctcctcccttccctccctcccaggcggatgttcccccccttcaaggtgcgagtcagcggcctggacaagaaggccaagtatatcctgctgatggacattgtagccgctgacgattgccgctataagttccacaactcgcgctggatggtggcgggcaaggccgaccctgagatgcccaaacgcatgtacatccacccagacagcccagccacgggggagcagtggatggctaagcctgtggccttccacaagctgaagctgaccaacaacatctctgacaagcacggcttcgtgagtgttggggcagggtggggacggtgcaggagcttgttgac

SEQ ID NO: 31729 - DNA, 1849 bp, Artificial sequence
  DNA replication origin
cagctgcggggagagggcgcgcggattacaggggcctgggcggaggccgacgagcaggatcagggacactcgggaagggctgctctcggggaggccgagtcggaggagctgctggagtcgggcaaagggcagctgcaggtcacctaatccaagaccccagatttacagtggaaggaacccagccctggagaggaaaccctacagctatagaattacacggcgcccaaggggccaggctcggagtccggccggatcttctggctaccggggaccgccctcgtaggggagtcccgggacggaaaccccatcccagacactcgccgacgtttccttcctggcctttcaggttagcgggtggctcagcaaaagaccagcccagcgacctgaggaccccccgccgccacctccctgtccctcctccggtccgaccctcacctcgggcccggtgcaggcgcagcggactgggcgctgcgcccggggaggtgggtggttcccgcgcggggggagggtcgcacgacgaggcgtctgactccgcgccatcgcgctcgggtttgcagtgctcctcgtacaagcgtagagacggcagcgtcagctgcttcctggggatgagcggatgaaccaggtcagcggggagcccatccctccatccctcctgctcgctgctcccgcgggcacccgccacagggctgctgtcctcggcctctcaccttttctcccgccggccgttcccggtgtcccggaagcccttggcaaacgggttgttgtcgatcttcagctgtgtgatctgcggggaccaagggggcggcgctaagtcaggccgtggctcttccagcgtggtcggtggcaccccgaggtcagcgggtgctggccgcagagggaagacccggggagcgtccacttggtacccacccgcctgggatgggacgccccgagctgaggccggtgggagggcctcgcggaaagcgacggggtctgtcctccaaaagcttcattcgaggaattatccctagacaggcctagacagccccacacaggcctaaagcagtgccacagtgtcggaaccagcccaagcatgcacacccgcccgcgggcttgcgcaagttaaacgactccgcacccgagcaggcgcgaacagagactgcagttcacacgcaaggctgcaggtacacacaaagccaaatcacactcacgggctcgcacacacgcaagtgtgcacagacataacaaacgcctacggaaccaaacgaattcacatgcctccacaggtatccaacacaccccaaacggggcacgcacagcccagcgtacaccttggttcacaaagccacaacgaccggcacggacactcgtaccctctctttcactcgacagtggcgcacaagggcacaggcctagaggggtgatgctctgccccactagaacaagggtggagaagccgcaagcagaaaaagccctttgattggaaggtaattctctaagcgcctcccaaggggtctggggcctagactgacccagagcagtagccaggagtgctttggggggctgtgtcacctgtcccaccctctggctccccccgagagagtgaaaactgggccccgggttctgagcatcggtagagcctgggcagattgcctcgggcgccctctcttcacttacattctcattcctgagccaagaaataaacgaataaaatgtaaaaatgtcagcgcgggcccggagtctcagctaattgttaagtaaacatctccatcagaacgacggcccagctgttcgctcgccccaggggagcctgtgtgtgcgcgcggtgggattgagagggcgccttgaggacttccgtgagtgctgcgcg

SEQ ID NO: 31730 - DNA, 860 bp, Artificial sequence
  DNA replication origin
cctctgcggccagcacccgctgacctcggggtgccaccgaccacgctggaagagccacggcctgacttagcgccgcccccttggtccccgcagatcacacagctgaagatcgacaacaacccgtttgccaagggcttccgggacaccgggaacggccggcgggagaaaaggtgagaggccgaggacagcagccctgtggcgggtgcccgcgggagcagcgagcaggagggatggagggatgggctccccgctgacctggttcatccgctcatccccaggaagcagctgacgctgccgtctctacgcttgtacgaggagcactgcaaacccgagcgcgatggcgcggagtcagacgcctcgtcgtgcgaccctccccccgcgcgggaaccacccacctccccgggcgcagcgcccagtccgctgcgcctgcaccgggcccgaggtgagggtcggaccggaggagggacagggaggtggcggcggggggtcctcaggtcgctgggctggtcttttgctgagccacccgctaacctgaaaggccaggaaggaaacgtcggcgagtgtctgggatggggtttccgtcccgggactcccctacgagggcggtccccggtagccagaagatccggccggactccgagcctggccccttgggcgccgtgtaattctatagctgtagggtttcctctccagggctgggttccttccactgtaaatctggggtcttggattaggtgacctgcagctgccctttgcccgactccagcagctcctccgactcggcctccccgagagcagcccttcccgagtgtccctgatcctgctcgtcggcctccgcccaggcccctgtaatccgcgcg

SEQ ID NO: 31731 - DNA, 1920 bp, Artificial sequence
  DNA replication origin
ttcggcctgaggagcctggagaaggagcgcgccgaagctcggaggaaggacgaggggcgcaaggaggcggccgagggcaaggagcagggcctggcgccgctggtggtgcagacagacagtgcgtcccccctgggcgccggacacctgcccggcctggccttttccagccacttgcacgggcagcagttctttgggccgctgggagccggccagccgctcttcctgcaccctggacagttcaccatgggccctggcgccttctccgccatgggcatgggtcacctactggcctcggtggcaggcggcggcaacggcggaggtggcgggcctgggaccgccgcggggctggacgcaggcgggctgggtcccgcggccagcgcagcaagcaccgccgcgcccttcccgttccacctctcccagcacatgctggcatctcaggtaaggcctgtgaccccgcggcagcgccagcgagggagaaggcccagggagctggcggcgaggccagcggagggcctgaggggtgccagggtcgctgggatcctctggcaggcaagaactccatccaggggaggccccgggatgccctttaggacacctgggttctgagagacgaggactgtgttgtaagtccaggggctggccagggcgccgcttctgactcccgtgtgacctttggcaagtccctgaccctctctgggcctgcttccttccctatagccccagcgaggagtgcggtgcccatcgagactcttctcaccctcacagaccagggccacccctggcttgtgaagtcttctctcctggcctcaggacatttttcttgagaacaaagacccttggctccctgtccattctgaaaggctaaggtggccagacagacaaagggagaaggaacatttgcattattttctggacagttgaccaccagccctcccagaggtctctggcccctcccaggccttctacgaagtcctctgtcctggtgaaggacaaggctggtctttcccctaccttgagttcccagcacccccagccacatgtcagggatgagaactcagctcttcaggccccattgaaattccaagctcccaggggagtgttgacgaaaatgtggctggggcacagtaaggagatccgatggggacagtggcctctttggttgcttgggtggaatattccctgtggaaagatttggaatctcttcattcattttcttccctctgaggtttctggcaaattgaacccctgagatcttatctcaagggaaggaaaatagcagttcaggtctgagaaagctcctttgcttcagcagcaaatattttaaaagttgggttggtgggtgggggggtggggggttgggaggcaggcgattctgaaatgagttttacacacagctcagtgttagggtgtgtggagtgtttgaggtatcaccatcactcatctggggctctgggctggaagggaagcctctggagaaagttcagggcccagaggtttaatctgcacccctgattatttgtgtatatgaatgcctcctccccagacaaactggtaataatcaccagcatcacagaggtcatgaggaagtcagggcttctagacacagcctggccaacaggtgcatgacccgggtgagaataccagcacctgggaggcatccgttggtagggctgctggtggttacattcccaggccagtgcagcccatcccagacatcaggtagagccaaatcccaagagaactgaagcctccctccttcctcccaacctgggatgccaggtctgaaatgcccagtaggacctgactgtctcaggagggggtattttctcaggcctgatgaagctgcctcttttcttcttcctgctagagccaggcctgaggctccctgggagcccagtgcaatcatcagccccctgccct

SEQ ID NO: 31732 - DNA, 1128 bp, Artificial sequence
  DNA replication origin
cttttctcctttatttaaataaatactcattctgtgctgtacacgtcccaagcagcaggggcaggcagcccgggtggcctgcgtggcaggggagcagctgggcagcccctcacttgggcgactcccggcctggggagagggctcgctggctctccagcccactcaccagtctctggatgctctgcagttcattggccgcctccttggccgagccactgggcgacagggcaccgcgggatggggcccctactttgcggagagccagctcgggcagggggctaggctcccggctgtttccaccagcggccttggagccctcagaggccagcccggtggtgaggaggctagtgctaggcgggatggtgaccgggatctgataggggctgaaacgcagtcggggccgggcactgcccaggaaggggctccgggagagggagccggcggctgcggcggcggcagctgcagcactagtggcgggcaaagccgaggcggctgcggctgctgctgccatgtaggtgtaggggtaggggaagaggcctccgaaagtgggcattggaattccctggaagaaacagaacaagacgagggttagacatcttgcctgaagtctttctgaagttgggctgggtgctatcccctggacaccgtgcccttctgttttagggatgtaaaaccacaattcgcataactataaccacaggcagcacaggtaagcatgagccagtgtgcctgtggccaaacccagttagaagggtgagatcgcttcaggctaccatgcaaaggcctgccatcaagttctgtgctgggcattacagcaggggtaatggaaaggacattccaggtgactgccctagcacgggtgaaggccttgagggagaaaacggggcaggcatagggccaggtggcaaacaggcagctttgggtgtcttggaggttctgctcattgagaacagtgtcctcgccacccctcctatctgcaggctctgaagggcagagggcacacatgctggggaaggcactttgcaaagtctccttctgcctgctcatggttctcctgcctgggccaggaggaggacacgggtgccaaccagttcataaactggcctgaaagttctacagggaatgcct

SEQ ID NO: 31733 - DNA, 1567 bp, Artificial sequence
  DNA replication origin
gcccgggtttggctcgcccggcccgcgggctccacctcaggttttcacttttcgctccggagcgagaacgaaacgacaaaaacgcaagaaaacaataaaacgctagaaagcgaagtgaacggcgctgtgcgctctgtgggtcgcgcggggctggggcgctgcacgcgcgcaaggagggacgagaggcggggacaaaaggctgcgcgcccctcgcccggcggcagctgcaccccggggacggcagggcggcacggcggcagggcggctggggcgctggcggagccgcgaggccgggcggcgccggcgcgggacgcggggtgcgtcccaggccggggctggactccccctgccggccgctcccgcagctccgcgcaacgggcctgggcacccacccgggccgggaggagagcagccgagcggcctggactcctggcttctgactccctttccgggaaaccacactggaaacccatctcctttcaatgcttctgggtgggtgggctgggaggatgggtgttccttgtccaacctctcccttcggaggaggggtttggctgtgtcccacccccgtactccccgccaaatatcgctgagcctagaattctttcccctctctctgcctcctgaacctcaaagacaaacatttcctccgcgtcagggctgttggctagagtggcaaaatctggactaaaaggtcttactttaactcatctatctaaatccctcttgggagagtggagagtggggtcagtgggctatttccattcctgcctcagtttcccctgtataataatgggcttggctggggtctctccggggtccagctgtgtcagtctccattaggctggtccttccccgagacccactcctgcaaggacagctgcctcccaccccgcgccggtgagctccccctccttgcccagctagcaggtgtctccagcccccacttctagcagtgggagctgggcgggcactcctttagccctgggtctggtcggtcaccgagcacgccacctccttcccagttctctcctctttaagccttggggaccctgaacgccctgccccaacaggctgcccaccttgggcactgcacagggtggggcttggggagggtgctggcttccaaaacaccagggacgttgagatggaggaacggtgatggtgaaggtggaatggacagttgggcccccagactcccaggacgcctttgtgggccgatacatttgcaaggagcgagagagagagaaccaggcccgcctcttcaggatggtgctgcccccaggccacgccgaatgcggctggagcagggaggggactcagccagtgcacgagtgggaggttgcagtagaacgtatcccaaccccagagggtgggttctggcttccctgcctcagacctgcgggcaggtccgggaacccgacagggacagagaagcccgttttccagcctaaatagaagctcgtgggcagcgcgtttgctggaggtcgctttgggctgaaacgcctctcatactcctagaggagcggcgcgtttgcgtcccgcggcttctcactttcagcaggac

SEQ ID NO: 31734 - DNA, 855 bp, Artificial sequence
  DNA replication origin
aaaaggaagtccaagtgcaaaaccgccccgggcgtgctcggacacgttcagcgcccggcaaccagcctccaccccgaaggcgctcccgggagggtgcccaggagacccggagctcgggcttcctcccaagagggcgggggctccctccgctgccgccctgtcctgcgagcagggagcgctcggcctcctgcgggatcccgcctgaccgccggtgctccgcacctcggggccaaggacagcgaaggagggggaggaagcgggactggattttgggtccttcccagagcggaggaaggcaggctcggggtataaatccagggctcgtagaggctgtccctcaaggggccgtcccataaccgggaaatagggggtcccggcctcaagccggggcgcttgagcgtgagagtcccggggagagcgaggctgagcgcgcccctcccgccccaggagcaccccacgcaggagttcgcggtcagctggggaggcgggcccgggagctgcggccttcgggagggcagggccaggccataccggtggctccggttctccacagcagcggcgggggagtggaggaggaagggcttgagggctcggaagattccgattaacccgagaggaaatgaggtcccctgggccttgggatccgggcggcttagccgctaggggtctctcggagcccctgcactcacaccctccatctccgagttcctccgggaatcgcacgcgccaccccacaccgacacgcacaattccctcttagacctcacacgccccacacgcgagagcccgaggcgacaggctaggccgccagcaggtatcgccatcgtcccagcactggccctcctgccacgcgtg

SEQ ID NO: 31735 - DNA, 1010 bp, Artificial sequence
  DNA replication origin
tcacagcccgcctcgggcgagagcgggagatagactgcggaccccggcaagcggggcacggaggcacagccaccgacacaggcagagccgggtccggagcccggcacaggccgccgagggaccgagggactccggggctgcggacacactgagcggagggcttgaggctcggggtggggccttctcccctgctgccagaaccgcccggcagcgccagctcggcgaccttccaggctgctgcagaccccagcttgtcctcttctgcgcgcccgcggggctgggccctcgcgttctctctgcgggaagtgagccgccggcctccggcctcctgggcccctccgaagggggctgtggctggcatccgcagcgcgcggggcgcacggccctaggagcgcggggcccactcgacggtgaggacttacgggcgggataggggaaggatcggcggggatccagcgctcctccagcggagagggccccctcggctccgacccgccctcctcaccaccctcatccggctcttcagggcggggtcttcagggtcgagggcaggatgtgccctgtggagctgctcacctaagttcctgcctccataggggaggctttgggctgcgttattccagcgggaggtggtggggactggggagggcccaggggtcagcctgagaatctcgcccttggattaaaagccaccaatgctctgggtcaagtctcaatgggaggctggggatgtaagacccgttggctggggaatgccagagttggagggggtggggcttagaagcctgtttccagctgaccttttatgtccccagatgagctctggcaccctcagagattaaccctacacacgtttcctaagggcacacggctagaaagcagcccagttaacaccagtcgagggtcatttccactgcaatacagtcaccggctgggtgatgggacccaggccagatgtcgtccctgcactaggctctcagctcttttctctttcaaagtacagtgtagca

SEQ ID NO: 31736 - DNA, 1042 bp, Artificial sequence
  DNA replication origin
tggttgtcgagcctcggctgagagccgggctgctcgcccttgcttcccgcctctctaatctaaaccatgcggggctcccagcccctacccggctcgcggggcccgagggccaagaggagggcactgggccgcgcggtggaggagccggcggctcgcgtggggctcgggatcttggggaccgcgacgccggggaaccctggagcccccctccccgggggacagcgggcgcagactgattgacagcggcgacgtcagcgcggagggggggcggccccagagggagggagggaggaggagggaattgaggccccaaagtgcagccttggagatcaagggcccgctccagagccgggatgtgtccagccccgagggcacggcaggcagctggaccctgacccagcggcgcggagtcggagccccggccgtcccgcgctcctcggacccgaacctgcaggggacctcgggccgctggcgcctccgcatgcggcaccgcaattagggtgagtgtgggttccagccgagtggggacgagctgggcgtgcggggctggggccacaggggctcagggttaggctgcggggacggacaggaggatgagctggaaaggggtgagtcacgcgacccggggaagaacttcaggggcggtcaaagttgcaggaaggcggcgcgaagtgccttgggtcgggccgccgcctcggcccgacacccagtagttggggcacgagccctcctctctgagtaacgcgatgaattgggtctagagatccaagagcatagaaatatcgacagcgccagcaccctaagaacaaggccgtgacaggcggagcggtggcctggaaattggtgtttgcagaatatgcaaggccaaggaagagggccccggtactggagcgaaaatccgtgtagatatgtgagtgatcagaacactagactcagagcctttgatgcaatagactagtcaaaattaaagcaaggaacattatatataaataatgatcgatgattaaagattattggaatgtgaacaattaccaaagaaagg

SEQ ID NO: 31737 - DNA, 1356 bp, Artificial sequence
  DNA replication origin
ctaggtttccgaggctcggcccgcgttcgcacgtggcccgaggcgggtgctggcgctggccatgtccagcgagtctcactccctgcaggctgtggccgaagactggtccgcctgtcaaccttatctttatgggtttttcccaacccagactggccccggcccctttttatctcctgggttgcacttggcttgtttactttgcgaggtcctgggagtcgaagtctaagcccgggatgaggaggcctctgaacaagatgggcgagaggcctgagcccggggatgctccgggagggcccggggagagcgggaagaaggtaggaagagaaaggcggggcattccgcctcaagaagggccgtcagacctacagaaagctccgctggagcgcccaggtccagcaggatggggaagagcagggaggtggaaaggggaagcggagcaagcggggcacacccttaagggatgcgggcaggctggcctctcaggctgtgctctcatcccgaggccccaggacctgcttcgggcagggagcaggcacctgagtaggcgagggaatcagccaagacagccgaagaaatgtagctgtgccaggcagggctaagcggttcctgtgaatgggcccagcctgctggcctggtccttcactgggaagggtgtgggtctttaggcccaaagcagagccctgtggcgctaaagtgtgcctgagtgagcctgtaggttcgaactcgagcaccaggtaggggaggcctgggctgagggcagagcctggatcagtcacccaggagagtgtggctgctcaggctggtgggatgctgtgtgaggggctgtgtttgggtgtgaggatgtctgtgccagaacgggaagaggatgtgtgtggacggggagtgtgttggagtgaaagcctttggttcaggaagtctctacctcagtgctgtctgaggggttgggtgagggcagatgggtgagctgggcctgaggtcctgaggccctctctgcacacaggtgtggagctgcaggagcctgggccctgccctccagcctggctctcctttcctgcatggccaggaggtgtcctggctgtcctgggcccacagagaggcctggaccccagttattggggaacagccgagaaggcccaggcctcaggctccaccggagctcagtaggagtgagggactcggggtgcagctgtggcaatgccgagagggcggtccctcccctagacctactcatcacagaaccccacacccaggggcaggcagacattgaactgccgcagaccctcccaggtccacagcctgaagggaggaggcgagggacctgccttccttgcgggttccctcctccagctcaggagg

SEQ ID NO: 31738 - DNA, 970 bp, Artificial sequence
  DNA replication origin
gattgtcggcaggactcgctttcaggaggacctggctgcattcaggacggtctgcccgttcgttctccactggacatggctcgctttctctgccttttgggtccttctccactttgagccctcggggctactctgggacaagcaagagctagagctagagatagaggagagggcggtaagagagagggagacccccgtagcatctgagcgagcctggaccaagtgtccagctccaacaacccgtagagggcctgggacccaacggcgagggggcaggaggaggccaccccgccggtgcgcacgggagccgctgcggggatccgaggcctctgggacgtcgccgagggcttcacagtgataatcggacgatcacagcgcacgggatgccgcctggggatctgtgtgcactatctgcaggcgcgcgcctggccgagggtgcgtgcgcctctccctgtctgtgtctgccccgggagcctgtggcgatggcccgccacagaaatgttcatgagtgagcaggagtgtcgtctaacctgcgctggccactatgtgtgtcctctgagggttcctccgtaggtgcagctttaaaggaggaagttttagccaccgattaattcttttatattcacgaatagttcaaaatcgttctgtgaaacgaaatctggagccatgggctccgggcgggcagggttccgcacagctcttcgggtctggttcttctttcctcaggctccgcgtggagccctgggcctggcagacacaagtttctctccctcccatccccagaccatcgagaacatcaaggtggggctgcatgagaaggagctctggaagaagttccacgaggcgggcaccgagatgatcatcactaaggctggcaggtcagcgctgggagatttacttccggggatggcggtggggagcaaggggggccagggaggtcccttagaagtcctctcggccccggcctggt

SEQ ID NO: 31739 - DNA, 820 bp, Artificial sequence
  DNA replication origin
caggctcctcaaaggccttccagaaagcacttagttagtgtcagcctggccccctgggctgtggaaatgaagcccagcagggagaaggagaggggaaggccagggccccttagcctcctctcagcctaggctatgacgcgtgccaaagtggcagtgagcccttcgctcctggccccctatgtggacactggccctggagggaagccatggctgccctctgctgttgccacctggaatgatgacaggaaacaagctgagtgcaggcccccggtgccaggccagcccaagtatggccagggctgccccattttgtggctgtttctgtggcagttacaaaatggtggcctgcagggggcgggattcttggccttaccccagggaagggggaggtgaggcagctgctgccctccctgcttcagctgttggcccaccaggagagaggcagggccgggaaagggtggtgcaagatccagctgcgcccccaggccccataggggggctggtaagcaggaggcagggttgggttcctgagcccctcacttcccccattcctggagagggggtggggtgggtatttgaaaatgctttcaattgacatctgagacaaattcttccacaaggtttataagtccctagacttgcagctagaacttccctcctccctccaggcacgcacacatccacacatgcgcacttgcacaccgctcacatgcgcctgggcacacacaccccacatccccacgtccccgccctgcagtgcttgcacaggcctctcctccagcaagagaggggcacaggcggggctgggtggggcgtgggc

SEQ ID NO: 31740 - DNA, 1538 bp, Artificial sequence
  DNA replication origin
cgggcatctggaccagacccggccccctcccccacggcccaagggcgcacctcgcggcccccctccctcggcgcccgccggccccggcactcaccaggcagaagaggttacagtgacaatcttccaggctggccccgttcggcacgaaggaggcactcatcgtccctcacagcagccgccgccggcgccacaacccaccatccgccattaccgccgcctccgaccagagagagaaacacagacaccggggagggccggggggggggtagtggttgggggggcggtggaagaggaggccgccgggcgcccgccctccccacccacccccccgccgccgccgccgccgccgccgccgcgagcagcccccgccgcccggccggcacccagccgcccggggccgagggccggaggcgggagggccgcgccgcgctcgcctggcgggccggactgcggatcccgcagacgctcgtccctctctgggggacggaggggatgtgtgcccctaccacaagaaaaataataaattacacaataaataatcaaaatcaagtccgagacggcagagcccaagcccaggacggttctcccgggcggagaggcgcccgcacaggagcgggaagggcgagaaccgggagagaagcccaggcccccggcgcggcagcggcgatgtccttaagcccagagtctcctcagcggcggaggtggtggcggcgtctgcgggctcagaccattctctggctctgtcttcgtgtcgttcctgggccaagccggcctaaagtttgccctcctgtggcctcaccggctggacgccgtagtctcccccattttgtgggcccagcgggcggtgtttttccccctttaatccgaattcacgggttttcccttcgctttaatggcggccacagggaccagctcgccctctctgctcacccattggccgccttgaggtcacgtgggcccgggctcggttgggagggggagagagaagtgagcgagggagggccgggaagctttcggcggaggcggtgagctcgggggacggggcagccagctggtggccactaacatagcgccatctgctgggtgccccggccagtataaaacgacccggggccctggccctctctttgcggggaaatttacagtccaggaaggttcatttcacaaatcagtgagaattacgtggaaatcagtttgagttctttggaagagaaagtattggcaaaaattccaagacattctcatttatttcgcgaggccgctggggtgcaggtgcaaacctctggatttgggagtcagatgatctggatggggataagactcctcaacctaaaagttgtgatatgaagatataaatttaagaaacaaaatattgccctgtagttaatagactgggaattagagccacactgcctgggttccaagcttgagcaaatcacttcctgctctgtgtctttactcatctgtaaaatggggaaaacatatcccttaccccacaagcttattgtaatgagttaatacaaattaagcaggtagcc

SEQ ID NO: 31741 - DNA, 1579 bp, Artificial sequence
  DNA replication origin
gccacgcagcaccaggagctgctggaaacctgcccgcccaccgcgctgcatggcgcgctggacgccctcgcccaactgggcaactgcgcctggcgcgtcaacgggcgcgtgctggacctggtgctgcagctcttccaggccaagggctgcccctacctaggcgtgccggccccgccctccgaggcgccccagccgcccgaagcccacctgccgcacagcgccgcgcccgcccgcaaggccgagctgcaccgggagctggcgcactgccagaaggtggcccgggagatgcacagcctgcgggcggaagcgctgtaccgcctctcgctggcgcagcacctgcgggaccgcgtcttctggcggccgcacaacatggacttccgcagccgcacctacccctgcccgccgcacttcaaccacctgggcagcgacgtggcgcgggccctgctggagttcgcccagggccgcccgctcggcccgcgcggcctggattggctcaagatccacctggtcaacctcacggggttgaagaagcgggagcctctgcggaagcgcctggcctttgcggaggaggtgatggatgacatcttggactccgcggaccaacccttgacgggccgaaagtggtggatgggcgcggaggaaccctggcagacgctggcctgctgtatggaggtggcgaacactgtgcgcgcctccgaccctgccgcctatgtctcccacctccccgtccatcaggacggctcttgcaacggcctgcagcattatgctgctctgggccgcgacagcgtgggcgccgcctccgtcaacctggagccctcggatgtgccgcaggacgtgtacagcggcgtggctgggcaggtggaggtgttccgtaggcaagacgcccagcggggcacgcgggtggcacaggtgctggaaggtttcatcacccgcgaggtggtgaagcagacggtgatgaccatggtgtacggggtcacccgctatggcgggcgcctgcagattgagaagcgcctccgggagctgaacgactttccccaggagttcgtgtgggaggcctcccactatctcgtacgccaggtcttcaagagtctacaggagatgttctcggggacccgggccatccagcactggctgaccgagagcgcccgcctcatctcccacacgggctccgtggtggagtgggtcacacccctgggcgtccccgtcatccagccgtatcgcctggactccaaggtcaagcaaataggaggtggaattcagagcatcacctacacccacaacggagacatcagccgaaagcccaacacacgaaagcagaagaacggcttcccgcccaacttcatccactcgctggactcctcacacatgatgctcaccgccctgcactgctacaggaagggcctgaccttcgtctctgtgcacgactgttactggacgcacgcagctgatgtctcttgtcatgaaccaggtgtgccgggagcagtttgtccgcttgcacagcgagcccatcctgcaggacctgtccaggttcctggtcaagcggttctgctctgagccccagaagatcttttaggccagc

SEQ ID NO: 31742 - DNA, 1345 bp, Artificial sequence
  DNA replication origin
tgtggcagtggaggtggtagcctccagccacccaggaaggtccagatgggggtcaaggatgccaccccggtgccctgtggccgctgggcaaagagactggagaaggataagcggacccagcagatgcgtatgcagcggttgaaggcgaagctgcagatgccattccagagcggggagttcaaggcgctgaccaggcgcctgcaggtggagccccggctcctgagcaagcagatggccgggtgcctggagcactgcacgcgccaggccccccgagagcccctgggaggagcagctggcccggctgctgcaggaggcccctgggaagctgagcctcgatgtggagcaggccccgtcggcgcagcactcgcaggcccagctctcaggtcagcagcagaggctcctggccttcttcaagtgctgcctgctcactgaccaactgcccctcgcccaccacctgctggtggtccaccacggccagcggcagaagcggaagctgctcacgctggacatgtacaacgccgtgatgcttggctgggcgcggcagggtgccttcaaggagctggtgtatgtgttattcatggtgaaggatgccggcttgaccccggacctgctgtcctatgcggctgccctccagtgcatggggaggcaggaccaggacgccgggaccatcgaaaggtgtctggaacagatgagccaggaggggctgaagctgcaggcactcttcaccgccgtgcccctgtctgaggaggatcgggccactgttctgaaggccgtgcacaaggtgaagcccaccttcagcctcccgctgcagctgccgcccccggtcaacacctccaagctgctcagggacgtgtatgccaaggatgggcgtgtgtcctacccgaagctgcacctgcccctgaagaccctgcagtgcctctttgagaagcagctccacgtggagctggccagcaggatgtgcgtggtgtccgtggagaagcccacgttgccaagcaaggaggtcacgcacgcgcggaagaccctgaagaccctgcgggaccaatgggagaaagcactgtgccgggagctacgggagaccaagaaccgcctagagcgccaggtgtacgagggccggttctcactgtaccccttcctgtgcctgctggacgagtgcgaggtggtgcggatgctcctgcaggtcctgcaggcgctgcccgcccaaggtgagtccttcaccaccctggcccgggagctgagtgcgcgcactttcagccggcacgtggtgcagaggcagcgggtcagtgcccaggtgcaggcgctgcagaaccactacaggaagtacctatgcctgctggcctccgacgcc

SEQ ID NO: 31743 - DNA, 1021 bp, Artificial sequence
  DNA replication origin
gtcgcatttgggtctcaccaaaggaatcagggtagatatgatagatttttttttttttttttttttttttttttttttgagacggagtctcgctctgtcgcccaggccggactgcggactgcagtggcgcaatctcggctcactgcaacctccgcctccccggttcaagcgactctcctgcctcagcctcccaagtagctgggattacaggtgtgtgccaccacgcccggctagttttttgtattttttaatagagatggggtttcactgtgttagccaggatggtctcgatctcctgaccttgtgatccacccgcctcagcctcccaaagtgctgggattacaggcgtgagccaccgcgactggccagagatgatagatttttgagtcatttgtttctaaagagtaaagaaagccataaaatgagatgtctgcaaggctcttgtatcgttcgaaccgcgagagcagagcgcgccaacagacaacgtgaggcggtgtggaacaacacgctgtctcaataagcgcctgggtgctggtggactgaggcctaaaatggcgtcagctccaagtgagtccggggcaggggttttatagtcctctgtaaacaggcagtgtcccagtctgacgtgtctgctatgtagtacccgtacggcctccctctcaatcttccggcgtatgtgtcctccagccagctgtcttcctgcttctgctatcttgctgacgcacgctgctggtacaagtggccttgagccttggcactgggcctgagtaaggaggagttattcattcccttaagttttcaggccccggggagaatctttcaatgtccatggttgagggtgaaggtgagaagagtagagacttaggaccatctctaagagctcgaacatataagggtcaggcaaaggaaaaaaagcccaagaggaaactaagaaggagcaagcagaaagaggagactatggttccacgcagccaagagaagcaagcatctcagaaagaggaagcaatcagagtatagaaaa

SEQ ID NO: 31744 - DNA, 1328 bp, Artificial sequence
  DNA replication origin
tttgtgtcgccggcccccgccccgctggactggcccgggccggggcggttgggccggcgctgaaggggcttggccgcccgggtccacccgttcccggatccgcctcgccggcccccgcgcccgcccaacccctgcccagcccctcggctccgcgagtttgggtgagaagtgcggcggcttttcccagggatggagtttagaggacgctaatcctatgtgtgagcggcggaccccgcccggacttcccggaggcgcccggttagtgaggcgacggcgcccacccgcgttcgcgggctcccggccgccactccccggagccgccggcccgccccagccccgcgcgtcgcccgggagggcgggctgcactccctccacgtacctggctggcagagcgtctccagggacaaaaggtgccctgggatcaaagccgagcccccgcccccgcggggatgctgccctccggaaggaggggcgctgcccccaaggtactctccccgggcacccagggggaggttccatttcaacctccgatgaaaaacacggccctcccgggtacttaggagggtctgagggtaagtgccaagatggagaaaacacgccggcccctcacagagtatctcctgaggaatgagaactatctagcgggcaaggagggcttcctgcatagcagagggcaccccctctgatcccccaaggccaagggaaaaaaatcactcttcaccggcgcccctgagccaggacaggctccagtgcagccacccaccttataattttccgcggatgctgccttgatcagatgtctgaagatgactttaaggactacaagcaaatctcaagggaaaaattcagaccttgaacaacagccttgaactttttcagggttagacaagtactccccagtggagtttctgcccttatttcttcgttcttctcttaattcttccatattttaacagaacacagacctgccgaaacgacacaggatggctctttgctttttgttagttctccaaccttccaaacccttggggcacatgcaagcactgtggaaaaacttcattaaaccaagagtcatcttactccagatcccagactgcttgggaagttggacatgcatattcccaaagagaacagtgttggaagaagacaggagagcagctcgcgggttgggggtagagggtaggaaaagagggcaagatggaggactaccactcgaggccagcctccactgcctgttagggcggtagaacctaagagccggtccaaggcaacacaaaagacagtgaggctaggtctttaattgcagccaacgatcaagaaagcaactc

SEQ ID NO: 31745 - DNA, 1271 bp, Artificial sequence
  DNA replication origin
gagcggtccgcagccgggtcgggtcggggcccctcccgggaggagcgtggagcggcggcggcggcggcggcaggtgagaggctgagccccgggcgggggaggactccaggcctggggcattaaccgtcctggggacccctttggcctgaggagcctgcgacctgggcccagctcggggccggctccggaccgcagctcctgggcgctgaggcgggaggggctccctgagggctgcgggtcgctgaggggccgggcagaagatgggggaggcccaggcggccccggcctgggattggggccggcggccggaggagagacgggggcccccaggcagctggaggcctcggcagcctcccgggcgcccccgagagccggccctcccttcctccgtgacaggtgggcctggagttggggaaagtttggagccggcgaggggcgccgggaccaggccccatcgctcctgcttcccggctgtgggctgcagggaggatcccagtccaaggccccgctggaattagacggagtggctatttccttaacatgagttgacattaaacggaataaccgccggggcgtcattttccgggccgggcctggggatggaggtttgggaagtgttgcgagagaccttggggtttgggagagactgcaacctttgccattccgacctcgattagggcagggcaagacgcgaggaaggccacgggggaaactcattctcccagtctcttttttttccttctttttctttttgtaaagatgcatttcaacctttctgagaatttcctaattctctctctaacctgcacttgcatgtgtgggtgaaactttaatttgtcaccttttcattcccctttgccccaggctctcaatccaggaagggaaatgaaactgaaggacttgtaagggggttgttactggagattgtagagttgttggattgcagaggagaatgttcgattcatcttttcagtaactttaaaatcacaccaaccattccaactacttaataatgtgttcgaaggggttctatgtaatatgtttcttttccactgttaatattaaagagaggttttaaatgggtcgtgtaggagttggtctcttgcaaaggatgaacatatttgctgaaagtagcctgtgcattaattggttatggaagtttaaaaatggtgtcctcctgcccctccctgcttggaagaagggctaaaagcagatgtccagaatcaagagaaaactactgcagggagtggtcagaaaaagattttttaaag

SEQ ID NO: 31746 - DNA, 1084 bp, Artificial sequence
  DNA replication origin
ctcccggggaggaggagggaggaggcagcccgggcggagggagggcggagggaggagcgcagaaccggggaggagggttcgaggggtagaggggaagggaagtgggcagcgtgggaggggaaggggaggaggcgcgggtctggggctagagcgtcgggagggagagaaaggggtggcggagaggaggacacgccgggtccaggaggaccccagcgtgcgccctttctcttgctgctctgtttcccagtctctccccgcctcgccttccctctcttctgtcccggccaggatccccagacgctgcgtcacaactcccccgctggcgcgggcggggaagcaactgcaaaactttccgcaaacttcacggcgtggtgggacctgggctacgaggtccggccagcccggggcgggggcgtgcagctgacccaggtggccagacccgggccgccagcatccgccccgccatcccgcctctttctgcgggcgtctccagcagcctagcatcccctacctccatgccgaggaggacccctcccccggtctggtggggaaggggcggagcccagggcctggccaccagggcgaagattgggggagggggaggcagagcccttgttacgtgtgcggagcgcaacaattcttgcacgtcttgttttagcattttcgtgacccctgtgtcagtgttcccggtgcaggagtgtagcacttttgcttgttggggctgcatccagaaacctggggaaaatctgtccactggacgtctcagaagaccggcatcatcactcccaccaactggactgctggccggtagcaaaagaccagctggaaatttcataaaaggttagacaatccacagttactcagtgttacgcaacaggtctctgcagcacagagcacgaactggggagtcaggatgctggagtccagccctgcctctctgcggattccctgcctgaccttgggaaagcctcttggggtctcggggcatagggcaggactgagacgttgagaccccaagtgcaaagaagacacatttctcctaccacgagtaatcaaaaacactatgaaactgtaatatgggccg

SEQ ID NO: 31747 - DNA, 914 bp, Artificial sequence
  DNA replication origin
tcctcctaggctgctggagtcccccgggctcccctcccccgccgcccgccacatctggttccactcaggtcctcccccacctctaggcgcgctcctcctcccctctcctcccccgctttcagaaaagcggagacgagttttaaaaacccagtcacacacacacgcacacacgcttctggagaaaagaggggggaaaaggagggaaaagtcgagagcggcccgcgcctcggcgctccccccgcccgggccctgaagttggccaagttggcagcgccttacccgggagggcggcgtccccaggggcgccgggacggccgaggtgcaggcacccgaggagcaggacgcagcgcagcaggtgacgaggccagggcgcgggggccggccggccgggccccatccccgagcgcggcgctcagtggacgcggggaccgagggcgcacaggcgcaacgcgctgtggcagccccgaggctgggctgtgatgaccgcccgcaaggggctcgcgtcctcctccgggtcgggacgaagtgatgcctcccggggaggaggagggaggaggcagcccgggcggagggagggcggagggaggagcgcagaaccggggaggagggttcgaggggtagaggggaagggaagtgggcagcgtgggaggggaaggggaggaggcgcgggtctggggctagagcgtcgggagggagagaaaggggtggcggagaggaggacacgccgggtccaggaggaccccagcgtgcgccctttctcttgctgctctgtttcccagtctctccccgcctcgccttccctctcttctgtcccggccaggatccccagacgctgcgtcacaactcccccgctggcgcgggcggggaagcaactgcaaaactttccgcaaacttcacggcgtggtgggacctgg

SEQ ID NO: 31748 - DNA, 2818 bp, Artificial sequence
  DNA replication origin
tctccgcttttctgaaagcgggggaggagaggggaggaggagcgcgcctagaggtgggggaggacctgagtggaaccagatgtggcgggcggcgggggaggggagcccgggggactccagcagcctaggaggaagcgggtgggctcttgaggacccccgcgcaccgcgctcccggaccacccggcgccggcccgtcctcggcaggggacctgcagggcgcgcccggggagccagggctctctgtccgggagttcccgggcccagtctcctcgctctgccccaggactgatgcgttaggacggctttccaactatccgcgagggttcgtttcccccaccttccccccgccccctgcatctcgtgggcgttgatattttcttttccacacttagtcttcaaggaggcttgtggcgcgcggcatccgccccgcgtgagctcggcagccctgtgaggaggctcctgccactgggacgcagcaacaggctgggcgccgccgtgctgtgatgttgcgtagcgtgggcagctctgggcacactagtggccctccagaggggacagaccttgagcggcaaaagagctgctaaagattttaaaacccaacgaacaggaaacaaaacaaaaatcagaaaaccccaaaactgtgccattctcttcctgctccttattcaggggtaacagtgaagtgtggggacagacagatccctcgccaagaatctaagagttgaaaggaaagatccacttcctgggggagtgggggtgggggtgtctggagtgaccgggggaatcgcccggcccagcttggtcctgctggctgtttaattgggggatggggacagtccgtgcagtgtctgcagttttgtgcaaggaccagacagccccctggagagtctggggcctccagcctggcccgtgcttgctgggttggcctggcgtgacgtaggcacaagacacatatctgccagatgggaaaggtgggggccacggtgacccacattcacaccaaccggagacccccggggcaattctgggcccacctggcattgaatgtgggacagacacaaaccaggccgggtaaccccctaacccactgcagggcggcctcacaggcagttcccctacctcctcgcactcctgccttcctctgctcctctgcgcagggcctcaggaggcaggcggtgggaaggggtggggaggatggccattcccagagctccagagcacactttaaagccaggccctgggagagagttgtggccagagtgctgactcggcctttccccctggagcttttcatagagggggctggaagtgcctggtgagaggcccggtcagggaggacaaggacgcctggagtgtccctcctcctcctggtctctgtgcctggccctccctggggctgtgtccagggatgaatagcctcagagggtccccttcccgttggcactgcattgaccacaccctgaggaggcttggatctgggtggcaggcagtgtgaggtcttccagcagcagctgagcaggaggaggatggagctgctgcaggttccttccctcggaaccgtgccctctgcacagagtgcgcttgcccctgccctgccaaattccactgggccctaccctgggaagcctgttcagagcctctgggccgaattccttgcccgaagagctggcagcccctagtacctggtgaattacgttgttgttgggaggaattcaccagcaccagagaccaaatagcccaggaaatgcatgtgggaggtagggtgtggcaggccagtgctgctgggggcgaggcttatgccaggcagggcaggggctgcgtgtgggcagtttcctgaccaccatgggggagccctgtgtgcccagagcacggggcaggggcagcgaggcggcagtgccttcttggtgcgtgatggtggaatccatcttttctccaccttggtggagtggcccgcggagactgtcactggaaggagtcctctttgttagttgccatattaccgcatttctggagcatgcagtttgctcagccttgagccaagttcttggggaggagggaaggtagagaagagtgtaagatgcatcctctggaaaaagaaaatcgtgtgggagaatgaaacgtggaacagtgaactgcgtagggggcagaatgccattggtgggatgcctgcctgcccagacccacgctcaacccttcatgtgcaagttcccatttcattttgataacaacccaaggagatggttattgttggaccatttttgcagttcaggaaatgaaggctaagaggggtctgatcatttacattggtcacacccctagtaagtgaaaggctggagtgtggatgcttcccgtctggagattggaggcaggagagaccgtatgggccaaagggtggccaaggctgtctggagagaggcaggaaggggccaccaggctgggctcttctggggatgatgtggaagcttgctggctgggccggggagaaggttgagtgaaagaggtgcctgggaggccagaatggggatgggacctgcaagctggctgtggggaaccccaggggacccttggaggtttccgagcagaggaatgaggggatagttgctgggaaaggggcttctgggagctccagggatcaagtctcaaggccatggggtgaggagacctcaggaaatcttcctgtggggaaggtcggtgctgcctaaaggacagggagggtggcatcgggtacttggggctctgaccagagtcagccagaccagctccctacacttctggcccagcttctgctgagtcgtggggttcggaaacttcttactgt

SEQ ID NO: 31749 - DNA, 794 bp, Artificial sequence
  DNA replication origin
aggcgagagcgattgctgcttgctgtagcgcggccgctctccagttcctccggcaaggggggcctgggggaggactggccgaaaatactgtgatgctttggtctaagacaaaagccagcaggggatgagatcaaacaccatgacactgcgaaggggaaggccagcgcgggtgaggatttgccttcccagagaaccccaggggcggggctagcttccactcagcccgcattacccccacccccgcccccacccccggggcggggtctggaggatcagcaaaaccgcgggaaaggtgacagtcgccttccccaccaccgcctgcatttagtaggtggagggacagtcccacctctccacccattccctgccagagtgtgatttaatgtcttcctagaacacaggatatcacagtctgcagcacagagatttgaagtggggagaaaagcatctctggaaatgactggtgggggaagcccgccactgctctacaaagggtggcctgtgacagcaacagcgcaacactgggactgtgtgtgtaggttttaggcacaagcactttaagctgtgggaggaaagcagtttggcctggctgggatggaggggctgttggggaggagggaggagggtgtgaaaaggggaaggtggccggtagagggaaacccaccatggttcaggatgtcggtggggatgttgcacagttgggcggggtattgggcttcgatatcatgtaacccccgtcctccatggaagcaatgcccccctcgtccagcccaggatctaatgtgcatgcatgt

SEQ ID NO: 31750 - DNA, 2404 bp, Artificial sequence
  DNA replication origin
ggacttacccacgttaagctgtggctctgctgggattagagcccagatctccctgctggtcaggggatggggctcaggggccctctccagaaggtgactgtgccagctcccctccccagacctctgcagatgaacaggattgtccttagctagccttagccccctgtccagtaaggctccaggcccctcctctgccatggtgggaaaggcagtaggtgccccctgaggggtgggccagtggggacagcttagacagctggactctgcccctgcaggtgttcagctcagagcggctgcaggacaagaagagctgggtccaggcccagggggcctgccaggagctgggggcccagctgctgagcctggccagctacgaggaggagcactttgtggccaacatgctcaacaagatcttcgggtactgagccgggctgaggcgtgttaggagggcacccgcacacgtgtaggagcaggcatggccgacagacccttggttttgttgggcgagcagggggatggcagaatgtgggtgaccccagggaggcctgcatctgctgctggtgccaggaccatcttgtcctcactcaagtagccatggtgccctggcatcttgggagaacaggctggtgtgatccatgcactcataggagactgtgttttgctcaccatcatccccccagcaatgctccaacagacccacaaacttacatatgtaccccccaccccattgcaaaatctcccacatgctggtcctggcaagtgtttcccctcaccttacaccatcctacaatgacccacactcctcaatccacagtttttcctgagagataggaggagaaaggccgcagctatgaggatttgcccatgggcctccctctgagacaccacctctgtcctgggctctgagcattagcacgtggaatcccctagcactgggaaaatcgagatggatctgggcttcctgatagcttaattgaagggatctctcctctcagcaaacattgaaattacattatttgtctcataattacaatagctcatggtcatcacttctcaccacgtaccaggcactgtgctaaacatatagtcctcactcaagcctcccgacaaccctatggagcagacgttaacccctgacccttgtgggttgatagagaggttatttgcccaagttcatgggtgaacggatacttgaatccaggtttatttaactccagagccgtagatccctgccacctcctcatctgaacttcctaaactccgtaaagtaaaagcctgcagaatcttgctggacagggcacccccacccaaaaggaacccaaacaaaggggaggggccactgccccttgagtggatggcttggtccagctctccccagctctgtcttgtggggagaactttaccgaagtgacctcaacgctgtatcgatgggtcaatgtgaagcccagatggagaggccccaggccctgggggctgccccggtcacagctgcaagggacagggggcacgtttgggttcctgcccctctcacttcccatctcttccgtccccactcctgggttgtgctgaagtgaatcagaacccgagatccacgagcagcactggttctggatcggcctgaaccgtcgggatcccagagggggtcagagttggcgctggagcgacggcgtaggggtgagggggcctggggtacttgggactgcgaggccgggagcttggtgggcggggcctgtttggggcggggcctggaggtgggcgggttttcttgagggccgggcccccagtcggagccggcttcaggaaagcaggtccgagaggggtcacccggcccccggtgagaattcgcagctcaggccaggcctcttgttcacctgttccgggcatgggggcggcctgcaccttgcgcctcacgttcctcttccctccacccgcctcctccagttctcttaccacaatttcgaccggagccggcacgacgacgacgacatccgaggctgtgcggtgctggacctggcctccctgcagtgggtggccatgcagtgcgacacacagctggactggatctgcaagatccccagaggttggccggagtggcgctgggggacgcgggatggagcgaagggtggcggggccaggaattccagggagggtctcctttcctcacaacgtctttgtccttgttcccctaggtacggacgtgcgggagcccgacgacagccctcaaggtgagcaccccccagcccatcccgctacccatcgcgtgggagagggcgtcaactctggggtaagtcccgagaggcctgaatgaaatggaggggatgaggagttccggtcgagagaagggggacggggttggctcggacggaggcagccacagccctgtttgcttccgtgtgggaggcga

SEQ ID NO: 31751 - DNA, 1973 bp, Artificial sequence
  DNA replication origin
caaaaattagccaggggtggtggcaggtgcctgtaatcccagctactcgggaggctgaggcaagagaattggttgaacccaggaagcagaggttgcagtgagccgagatcgcgccactgcactccagcctgggtgacaagagtgaaactccttctcaaaaaaaaaaaaaaaaaatctttggcaatcactgatctagaacactcaccaaattatttggacaaccttgcttcccggaggattggaaggtgctactacagtgagtcattttccaaggagtctggccctggtactggagccaggtgaaagagaagttggtgggtacaggcaagaggccatgagtttggtgctgccaaaaggccaggactcctgaggctcagcctttccctgttcacgtcctctcccctgactcccttgggtgccccattgccacctcctaccttgttgaggaactggatccagtcagaggggcagccccccagggctgtagttggcaggtctgggggctgcgtttctttggtgacgttgctgcgcttgcagatgtagggcaaggctgtcaggcacctctggtccccccagtcctctgcggaaaggggaggggagggcagtcacccccagggcagagcagggcagggcatggctggcagcacactcagcctcatgccctgagaggagtctgggcagaggctcagggcctgtgtccagctccgaattcaagtcttctggaccatggagacaggtccacccctcgctgagtctagcctttattgggttgtgggaacaaagagaatgagaacagactgatgacttctgcccaggctcgcccagcattaaccctttgcacagctgactgcgcactctgcccccaccttgccctcacctcggctggctgtcatgtacacgcacttcttgtccttgccgacaggccgaggtttgcctggtgcccaggagatgaagtttataatggaaccatctgtccatctgcaatggcatggagcagaggtaactccagcaccggcccccagctgggcctccaccggatgcagcaatgaaggccgcaggaatgggggcagggaagggcccaggttctggggtttagtggctgtaggctgaggggtggagctactgagctcagggcagtcaaagacccaaggacctggtgcctctagataaggccccagctgtccctggacacttgctgctccagaaaagaagcctgaggactccagggcaggaagcccaagggcaaaaagacaagctcaaattctgagtcccaggtgctcctggtccttcctgcctcaagccccccagtacatggtaagtaggcaccaaatacaaagaggcccccggatcatcatatgttctgcccacttccccgagagggccttagtcatgatgaatgacaccagacgtaacaggagctgccattatttagtaactaatgtgctggatgctgcgtaagcacttcgcatatgttatttctaatcttcacaaaaatcttaccaggcaggcctcatattcccattttcagatgagaaaaccaaggcccagaaaggttaagtatcttgctcaaggccacacagccagcaaggaaggggcagggctggattcaaatgcaagtctgcctctgtgctccgtgtgtggacagccagcccccttccacatctgctgcctgcctgggttcctacctgaagcgcccatcgctctcagaggtgtgcaggccgatccaccagtgctgctcctgggcccgggagaactggagaagccaggcgggcaggtgtgggtaggcagccccctgccctcatcccgggcctgccctcccccagcctgcagccccctgctcaatccaatgcccaccttctgcaagttgtggctcaggaagtctagctccgcctggctgtgcaccgaggtcagctcggcctggaaccacgtgcagatgcgctgcgcctgcgcccacgtggagtggtgctcaaaga

SEQ ID NO: 31752 - DNA, 1870 bp, Artificial sequence
  DNA replication origin
cgcccccccgggcctccagcctccgcagccgggaagggcgctgcgaggtctttaaaagacctttgtgtcgcgggcgcacgccgcacctccggggaaaacgccctgcgcctcggccccgcggctccccgccgccgcccgccccgcgcgtcccagcctccgcctcggcgagggcctcccgctccggaaggggcgcgacggggagcccggcctggttgctgcggccccgcgctccgtccagccgcggccgggaggacagggcagcagggtcccggcgccgcgcccaggcgccccctccccagccccgccccggagacgcctcgcttttcccggtccggggaaacctgcggcgaccgggcgcgcccgcgtggcttccgctgggcaggggcgacccctagtgcccagggcgagccgcgccgagcaggaccgagcctttccccgcacaccctggagcctgggcttggggcaccctggccttgagccccggccccagggaagaccgacgtctccggagggcagaagaacatccctagggtggtgctccgaaaagagtcgccacgggaggcagggaacctgccgcccttccctgctgctccgaggcaaatggtcccacagagggagcgacccacactcatttgtcatccttcctccgggaactgggacccgctggaggatccaccccatcaccaaccctcccctgccgctctcggccccaaggtggagacagccagttctcccctggaggcccaggccatctccacctgcccccagctcagcacacaccccagacacgggtgggcacagccgaggccgaggagaacccagcacagagggaccatcctggggtgctgaccagtcgcagccttggcctggcttcccgccagagccgttctcaagacaagagccagggtagccattggcagagccatgggcacccagcctcccccataggccacactcccttggtcccctggcatcctggcatgactcgcctggttggcagcactttgttaatatgggttgccggaggtgagtcacagctgtgacctgctgccctagctcggttgaggtacacaggaggaaaagaggcaaaacatcagggcacaccaggtagcacagagaggtgccagcctctttgtgactctgtggtgcccatgccagcctgctgaccaggcccccctcccttgcacgtgagaaccaaagcctcacacaaatgccacaagtgaaaccgaggttagggcagctggggagagtccctgggtgtgcccaggaaccagcaccaggacagctgcttcccagtggcacaaataacttcccagtgtcaccaagacaaggggtggtgggtcggtagtgggggcaatacctcctgcagatatgcaaacagatgaggacaggggcaggaacaggggcgggtgtgagggcccttggccaaaggctgggccagagcacctccccaaacacccagtcaaggctactggcttttggagaaagcgcaggatggacgaggggatgggggcagctcaggggcttgggcttccttgggtagaactgagagggtgagagggtccaggtaggattgaggggatgtcagttgctcctgctccgtgcaacagtttcttccacaacaggcagaaactttctttcttttcttttttctttttttatttttctttttgagatggagtctcgctctgtcacccaggctgaagtgcagtggcacgatctcggctcactgcagcctctgcctcccaagttcaagcgattctcctgcctcaacctcctaagcagctgggattacagacacccgccaccacccctggctaattttttgtattttaagtagagatggggttttgctatgttggccaggctg

SEQ ID NO: 31753 - DNA, 1438 bp, Artificial sequence
  DNA replication origin
ggtgtgcggggaaaggctcggtcctgctcggcgcggctcgccctgggcactaggggtcgcccctgcccagcggaagccacgcgggcgcgcccggtcgccgcaggtttccccggaccgggaaaagcgaggcgtctccggggcggggctggggagggggcgcctgggcgcggcgccgggaccctgctgccctgtcctcccggccgcggctggacggagcgcggggccgcagcaaccaggccgggctccccgtcgcgccccttccggagcgggaggccctcgccgaggcggaggctgggacgcgcggggcgggcggcggcggggagccgcggggccgaggcgcagggcgttttccccggaggtgcggcgtgcgcccgcgacacaaaggtcttttaaagacctcgcagcgcccttcccggctgcggaggctggaggcccgggggggcgaggccggggtcgggggtggccgcgcgagggggcgctgggatcggccagaccccgcggttgcgcccgggctggggctcccgggctccttttgtggaaaagagcggaaagcagggccctctccgggtctctgaaaatggtcagttcggcttcgcagggctgcgtgcccggaataataaattggcttctctagggtcgtaatctgggccccaccccgagcagctttgagctggttcgcgccttccaggcaggactactgggagttctcaaaagcacccccgcagtcggctgtgtcaggatcacctgggtccggtgtgaacacgattccagggccccaccccatcgcctgaagcggaatctctgggcggggcccaggaaaccgagtttttggtgagttcccgggtgattctgatggcaaagcccatgtgggagccactgttctaagggcttttggacaggcagttgtgaaattttcccccagaagaatctctggggacccagttgtcacacaccgctggattcactgcggtgttgattctgcctcctgatgaagttcttcccgagtctgacttcgagcccgcctgctttattaagcacgtttttctccagtcgtttttttttttttttaatggaaaaaggaacagggagaaggcttttctcgaacctgtttgcagagagccgtcttgcccgctttgagggccctttcttgggagacctgtttgctttgttcaacctctgaattcagcagaccccaaatccaccaaggccactagcttgtgagtgaatgtggtcccttcaggtaagggccagacagcccctgccagggcttggggagggttttcctagaggaatcctggcagtaaaaaaaccaacccccaaactctccaagtgctggacgctggagaatcccagcaaggaaaaggaacaaatcttatctcatgccggaagataacctcttccctttgttggcgcctttccttgcgttcaggatgaatta

SEQ ID NO: 31754 - DNA, 916 bp, Artificial sequence
  DNA replication origin
atggagtcagtcagtgtaaataattcttttgagaactttggctgtgaaggggaagaaataagtggagggggatgtgggataaggaagggctgttctgttcttttttgctgagagatctcagatcacaattaaatgcggatgggaaggctctggcacagagcaggggatccagatgggaaagggatgagacccaggctcacgggatcccaggcacaggtggagagggcggtgatggtgggagacagcggctggagtaacagtaagctcaggaaatttctagctgagggacactatggcgtgaggtggaagagaggagggcgtgaagattagggagaaggaagacggtttgaggaggaagacagcgttgaccaaagaagcggggcagcactgaggaattccagaggctgtggcctttcagcggcatcacttttgaaagttgagtgacttttctccagcagtggtcagtggcctggatatgaggcagaagatgatggatgggtgggatttcaccagacaggtgtaaaagaagacaaaaggacaagagaattattaagagggtcaagcacaggacctaggctgtgtagggaggacacgtcagtgtggagcggacaatcacagggcaaggaaagaggaatccacgggcgagaggttccccagaggtggaggaagtgtcactgggaaatggttaaacagcagagccggaaggtctggagacctgtgatgatccagcgattttggagatgaaattcttttgggcgatgacaccacctgggatgtgctattggggatgggggtggcagagtgggacggaggagggcacttgaggaactcgggatctgagatgccaggatgtggctggcttagcctggaggatgctggagtcaaggattgtggtggcagatcaggagatgtggtg

SEQ ID NO: 31755 - DNA, 2831 bp, Artificial sequence
  DNA replication origin
caaatgatttatgtaactggaggcagaatttagccattaatgtccactggaaagctgaaggcaaagattacacttggcatttcagagtgattttctatactctattaaatgtgttcaaactggtttcatttcatgtcacttattcatcttgattctttaaagtgcaaatcaactaaatatctcaatatacatgtgttcaaggacacgataggcgactttatagcgggtggcaagggtttggagttgtccactcagggagctggaatggggataaatcaacttttcttcccatagggacggaggtgagggattctcctcctggctcacctttgaggtatgtgttgctctactcttcacagccaaaacaggaaaaaaaactagctggaggggaatactatctcaaactgtttttatgcctttgatttcttgacctcttaaaattaatgaactttaataatgtcaccgaggacaattaaaatgccagactctggggtatgcaagtcagatcgcaagaacaacaacaaaaagaaaccaactgaaggaagtggcaactcccacttctcaaagtgcatcctgagatagaggaacagatgccattctggctggagatgtaaagtcgggtcgtggttctgatggctttataccagaattatgaggctgggaagtgttcctggggcacatggcttctgaagtcacatgatgactggagggatcagattgataatgaaagaaacaaaaggaactttgagcacaactatggactcagagagctgtaatgtcgaagagaagcggcttcattgtgaccctgaatgactgagagcaggagctgctcagttggctggctggggtataggaaacagacctctacttacagggcagaaaaacaaggatgaacctcaggactagacagaaagattctctcttcttctgcaaccaacatcagagtcatatgctttggcaaaggctgactttagaaatatagaagtaaaccaggaaatgggattgagaacagcagttaaaaggctgtgacagctgctggtggtgatgggagtggcagtggtggtggaggcagcagtggtaatggtggggaggtgagatgggtggtggggtttggtggtgatgtggtggtggtggaggtggtagtggtggtggtggtgatggttgtgatggtgtttgtggtggtggtggtgatggaggtggtggtggtgactgttttggtggtggtgatggaggtggtggtggtggttgatgggggtggtggcgatggttgtggtggtggtggtgatggaggtggtgatggtggttatggagatgtgatggaaatggtagtgatggtggtgatggtggtcatgatggaggtggtggtggtggtgatggaagtggtggtggtggttgatggatgtagtggtggttgtggttgatagaggtggtggtggtggtgatgatggaggtggtggttgatggatgtggtggtggtggtggttgatggacgtggtagtggtggtgatggaggtgttggtggtgatggaggtgttggtggtggtcgatggaggtggtggtaatggttgtggtgctgatggaggtggtggtggtgatggaggtggtggtggttgatggaggcggtggtggtgatggagatgatggtggtggtggtaatggttgtggtggtggtgatggaggtggtggtggttgatggaggtgtgatggtggtggttgatggggttgtggtggtggaggtggtggtggtgatagaggtggtggtgggtggtgatggttgtggtggtggtggaggtggtggtggcagtggaggtggtggtggtggtgatggaggtggtggtggtggtgatggaggtggtggtggtgatggaggtggtggtgatggtggtggtgatggtggtggtgatggtggtgatggttgtggtggtagtgatggaggtgatggtggtggtgatggaggtcgtggtggtaatggaggtggtggtggttgatggaggtgtgatggtggtggttgatggtgtttgtggtggtggtggaggtggtggtggtgatggaggtggtggtggtgggtggtgatggttgtggtggtggtgggtggtgatagttgtggtggtggtggaggtggtggtggcagtggaggtggtggtggtggtggtggtgatggaggtggtggtggtagtgatggaggtggtggtggtgatggtggtggtgatggtggtgatggttgtggtgatagtgatggaggtgatggtggtggtggtaatggaggtggtggtggtgatggaggtgttggtagtgatggaggcgttggtggtagttgatggaggtggtggtgatggttgtggtggtggtgatggaggtggtggtagtgatggaggtggtggtggttgatggaggcagcagtggtgagggagatgatggtggtggtggtaatggttgtggtggtggtgatggaggtggtggtggttgatggaggggatggtgatgggtggtgatggttgtggtggtggtggaggtggtggtggcagtggaggtggtggtggtggtgatggaggtggtggtggtgatggaggtggtggtggtagtgatggaggtggtggtggtgatggaggtggtggtggtgatggtggtggtggtggtgatggttgtagtgatggaggtgatggtggtgatggaggtggtggtggtggtggttgatggttgtgttggtgatggttgtggtggtggtgatggaggcgttggtggttgatggaggtggtggtggtgggtggtgatggttgtggtggtgatggaggtggtggtggtggtgcaggtggtggtggtgatggagatgg

SEQ ID NO: 31756 - DNA, 1443 bp, Artificial sequence
  DNA replication origin
ggcctcgcagccggcgagcgcagcccgcggcggtgctcctgtcagcggcggctcgggggccagctctcgcccctcggctcggctcggcggcggcgggcgcctcgctccgcctagcgcgcggcacagccgggaggtgagcgcgagggggatgggaatgggggcggggccgcccgaaggaggcgcggagggcggtggcggcgggagggcagcgccagcggccctaggccgggcgctcggagcgctcgcagcttcccccgccgggcgggcggctcgcgcgaggcggctgtgccagcgggccccgccggagcagcgcgcccagcaacccgcgccccgccggccgctcgctagcgccgccgccgcgctgggggcgtcgcaccctctgaggccgcccgcagccccgccccctccgggctggggtggggaggggcgcgagcgcggagggagcgcgcgtgcgtgggggcgcgtgcgtggtggagcgcgcgcgcccccgccccttccacagtttgggggtggggaacggctggaagagggagtggggacgcagccctcctccgcgcggagagacggggccctggctctggcgctctgggatgtcctggcatttctcgtatccccggggggctcggacttgtgggtggcatttggaggggcagcagggaggacgctcggtaactgacaaggccctacatagttgggctccgccctcaggggtgatgtcactctcgaggtggctgctgctgtcacgtgcgcccatttcagggcctgtcctcctgctttgatgaccggaatgctctcctagatctcccccacttcggtcacctcaggcacatatcactctgagagtcctcgaagcctacaagtgtcagttattctttcccggattctcagtggtagtttgtagacgacttcaaaaggccacggttggctgtggggagaatcagaatgagaaagaaaaacaaaacaacagtggggtttgtggggagaccgagactgttatttagaataatggctgaaaattcaccaaccacagcttgcaaacctgaggtaaagtcgtggcgctgcttctgtcactgccaggttgactaagaagtagcgtggttttaagagctggtcgacaagggcgggaaagccaccacattaatacctcgtcgaacgatgttaggtcatatttcaccctccacctagatcttcttcccctctactgtttccctcctatcataaaacagcaagtcggctgtgggaggtatttgggacataaacatcatcgcgtgctgcaagatgatgcgaagcaatcaccgttaccaactctgcccggctcgccttcccttccataaactgagatgacctttcgtggtcatccaacttcttaatcagatgacatgattggaaatagatgcgccaaattacatcaatcaaggaagctctgtctgtggcgcttccaag

SEQ ID NO: 31757 - DNA, 1289 bp, Artificial sequence
  DNA replication origin
ccggcggggcgcgggttgctgggcgcgctgctccggcggggcccgctggcacagccgcctcgcgcgagccgcccgcccggcgggggaagctgcgagcgctccgagcgcccggcctagggccgctggcgctgccctcccgccgccaccgccctccgcgcctccttcgggcggccccgcccccattcccatccccctcgcgctcacctcccggctgtgccgcgcgctaggcggagcgaggcgcccgccgccgccgagccgagccgaggggcgagagctggcccccgagccgccgctgacaggagcaccgccgcgggctgcgctcgccggctgcgaggccccgccgcgccgttccggggtgcagactcgccgcggggcgttggaggactgcgaggtgctccgggaatcgcgggcggcgccggcgggcggcgcggtcctcacaggagaccccggggactggggcttgacccggaggtgcagagagcccctcagagcggcaggtaaggggcccggggagcagggcgaggaaaggtcgcttcagtgacagggtcgttcgcctccacagcctcggctccggggagaggggcgggggcgagcggggagacggcgaaatgggcagcgaagtgcctcggtgtccaaggcgtggggaaggctggctccgaatatgacaccaaggcgggcttcagaggcgtgtggggtcgccacttggctgtcaccgaagatgtcatggaatttggtacctagagcgtctctggatgacggggaccaaggataagatgcgaggcggattgctaaacgtggcagggaatgtggtgcagaacgagttgcaaaatgtgcccccagaatgcagcataaaagtagttgcgaaatgtgccaggtaaggcacaggatgggctggcctctgtggcgttgaaattcatggtcgaagtgttattagcgatattaataattcctctgggaaaggaggtgtagcataataaaagattaataaggctcattgctagatattttgccataggaaatcgggaggagctatgataagctattttttttgaggtagagaaagtaaccacgtgaaagaaaaaaagcaaattgtgtctggctgtgagattggaaagaaaaaatagggctaaaataattccaggttttgccatcagcgtgtagagcattggtacaattgtatccagtcttcatttccaggtgtggaatgtttagaatggtcttcacaaaacataaacaatgataattaacattaggaagaagatttggtgtttcgggtgtctttcactctc

SEQ ID NO: 31758 - DNA, 781 bp, Artificial sequence
  DNA replication origin
tgcgcatccgtgggggggacatgcgcatctcaggggggctgctcgcatctgggggtgctgtgtgcatctcgggggggctgtgcccatctagcggggtggctgtgcgcatctggagggggctgtgcgcaacccggggggggtgttgcgcgcatctagcaggggcggctgtgcgcatttcggggggggctgtgcatatctggggggaccgtgcttatctccgggggcggctgtgcgcatcttgaggggtgtgtacatctcggggggcctgtgcgcatcttggggggctgtgtgcatccgcgggggctgtgcgcatctcggggtgctgtgcgctgctcctctgagctctgctctttcttgcagcgtttgcctcagcatggagggcggggccgcggcagccacccccacagcactgccttactacgtggccttctcccagctgctgggcctgaccttggtggccatgaccggcgcgtggctcgggctgtaccgaggcggcattgcctgggagagcgacctgcagttcaacgcgcaccccctctgcatggtcataggcctgatcttcctgcagggaaatggtgagtcccatgggccgctcctcttttcccgggcttgtgggggtccctgagaggcagtttgcaggggtcttgtcacccctgcggtctcttctggttggacaaatctaagattctagaaaagacagagacagaagctggttcagagcctggggagatggaatccaaacccaggctctgaggttggtgagtggcagctcctctccagc

SEQ ID NO: 31759 - DNA, 803 bp, Artificial sequence
  DNA replication origin
tgtgggccatggcagcacttttccgtggcgcacaggccgctgccgggtgaggggagagccccgcttgttctcctcctgccgcctctcctcccatccccagctgctgggtgctctccggccggcatgaagctgtgcaggcactgggcactcccttgggctcttagcggggccttctcattgctgcttcgctaggaaccacccgctctcctttcctcctggagggccacgtggggccgagcacctgggacagccgtgctgagctctacccggccccttcgcaggcctcgtttctgggggccttcagttttggaaacctccctgagggcccctctagagtgcgggtccgccccgcccctggtgtggaggggaagtgccctgtccctgtgtgctgacaggtccctgtgtgcagcatggtcggggcacttctactctgcaggcgcggccgggcggggagcggggtggggggcgggcgggggcgtggggggagcggggctggctctcctgggtgtggggtggggaggcctcctcatcgccagcatggagttaaaaaccaggatgggggagggagacttcccatttctcccgagatgtacttcatgacgcgtctggagaaaaggtgtgaccagccccttccttcccgtcaaggagcgcgcttgcctgtgtaactcacctgtaaagcccacccagggaaggccagggcctcatgaaacagaaaacaaagccgggcactgggcccttgagctcactagaatttggggtatctttccttgcaccctcaccgcatatggaactcctggcgtcgt

SEQ ID NO: 31760 - DNA, 1027 bp, Artificial sequence
  DNA replication origin
tgtgtgctacgccctcagttaaaaagcaggttagaaaatggaataaatgatcctgcttctataaaaggatgcatatgtgttttaggaagaaggtgtgtgaggatatagatcaaattctgatggcctgtcattttaccttttttgctgatccatattctactgcagtgcgtgtggattattagcacacacacacacccttttttttttaattaaaaaaaattttttttgagacagagtctcattctgtcacccaggctggaatgcagtggtgcgatcttggcccactgcaaactctgcctcctgagctcaagggattctagtgcctcagcctcccaagtagctgggattacaggtgtgagccaccatgcccggctaatttttatatttttagtagagatagggtttcaccatgttgtggctggtcttgaactcctggcctcaggtgatccactcgccttggcctccccaggtgctgggattataggtgtgagccatcgcacccggcccacacacacaccccccctttaatggtggagttgccaacagttgtccgatgtggcagagagaactggggagcagagaaggagcccatcactgggagggactgaaaaccagctcctgggcactgcagggcagagcgtgtgccgggtgtgaagggggtcagtgcccctgtgctggccactgtccccctagttctgatacagttgctgccaggagaggctggaccgtggcaaggggccagtggggaaccggggcgggatggggggcagcagcagtgctctggggtctgcttgtggtggccatggtggtggcagttgcagtggcaactgtgggccatggcagcacttttccgtggcgcacaggccgctgccgggtgaggggagagccccgcttgttctcctcctgccgcctctcctcccatccccagctgctgggtgctctccggccggcatgaagctgtgcaggcactgggcactcccttgggctcttagcggggccttctcattgctgcttcgctaggaaccac

SEQ ID NO: 31761 - DNA, 1323 bp, Artificial sequence
  DNA replication origin
agtgggcagcggcccctcgctctgcgggcctctcctgccctttgtactccacgaggtgtgaggaagttgccgggtcacccagcagagggagaggtgatgtcccctctgttcttcctaatttgtagctaatcagattctgcctgcagccaggctctctggggatgaatctaataaaggaggcggcgacctggagaggaggacagacaacaagtgaccaggggggacagcacttctttcagtacattttcctgttagactcggggtattagagacccaaagatacccaaggaggagtgagagcgtccctgccttcgaggagcagacagggcaccgcgagggtaaggaggctccgggagagcctggggacagagtgatctgcgcaccgcggtgcctgaggagtggaggcaggggtgtgggcccacagcagggagccaggctgggccatgtccttggattctgtgagcccaggcgtctcctctagagggcctagcaggaacagtgggggctgcagatggaaacgggcaggatcatgccatgcagttggcatttcactggcactcgggggcacttacgcaggggacagcatgatgttgggagctggctttgtccctggcatgtctgtcacgttgaagagggagaagctgcaggccctgacttgggtggggcagtgaggatgctcaggagggaagtgaggggaggggtgccagcatgcggcggcctgggcagccttctgtggaggagctgaggtgtcacctgggcccggaagaagggcagccctgctagctagtggggagggcatgagagaacttggcgacgatgggagagaaggtgacttgggacgagctgggtttgaagcgtctgtgggatgtccaggtagagatgagtagtgaaccgtcagaaatggggcttgaatttggggtggcggggacagaactgatacccgtgtaggtgacagataaggacagaggcaggagttccaaaaataggatttattgttggctggggcttctggaatcccgtattcccgtccaccctgggaatgtggattggagctatgtttctgggagatgatttgatggaatgtgtcagaagtctaaaacagaacctagcccttgtttcaggattccctgcagagaagtttgcagatgaccacatcctgttgtttatttggtggaaaactgaaatcgaaagctagctaaatgctgaacaatgggaactagttggctaaaaaatggccgtgcaatgcaagagtgtgaggttacgaaaatgatgatgtgggcgcgtatccattgacacaaacatccatgtgtgctacgccctcag

SEQ ID NO: 31762 - DNA, 1690 bp, Artificial sequence
  DNA replication origin
ggctgctactcgggagccccgcgctgtccctccctgcgcagtcagggctcacctgggccgcccccgccccgcacccctgcgcgctccgctcccacccccagcccggcctcctaccttgcctacccgagcgtcccttcagcctccccgcgccgcgcccgggtcgcttggccggttctgcgggccgtggcgcgacggcgtcgccatggcaaccgggcggcgggctgggcggtgtctccgggaccggaagtggcgtacgcggcccccggggctgccccgcacgtgccaggtccccgcggttgcggccacgctcgggaccgggccctgccagctccgggcccgcacgtgggcgaaccgcggccaccgtgagcccggcctcgcgacctccctccggggcccccatgatcgggggtgcgtgggatctgcggcctgcgggggtggagggccgggagctcccccgggcctgcctcgagggccgcgggattcgtccttgcgagccccgactgcgcacggaaggacctggggtcggccaggcctgggggatgggacgggccccgaggagagcgggtgccaggggcgagacccgccgcccttccccggcttggtcccgcgcttcctgattttctcgctccacgcctcccattctgccctccaccttcttccctgccccgccctcgccctgcccgggcccaggaggccactagatgtcagacccggttcgggccttggccacgccgccgctccgggagccctgggggcacctccccagcccccacgggggagacgatactgccgggaaggcccggactagcccccgcccccgcagagtagccttcggggaacaccgattccaccaggctctcacgaaagccgagagcttgccgtccgcagcttcccctgcccaaagcgcagagaaacgagggcgccgaggccaagaccaagaccgggagccagccccttcggagcccggtccaggcccccggtccaggaagtgctgtgggtagataaggggcccagctcagacttcctacaagctgggaagaaagggttctttcctgtctgatgccgggccagatgtagcaagcgcctaggggtaggagggaaatggggtttcctccccgcagagggaaaccggcctccattcaggaacgccctcccccacctgccctccaggcaccgaggttctgggaggccggggggcagggagacctgcttacttgaatgcgctttgtgtattgcctgtgtattgccacaggcagtgggcaagataggccctggggatccagtactcgcttagtacacagagagcagtctccagcgccaggcgagacgcacaggcgtgtcagctgcatatggcacacggtggcacatggcacaccttccacgagcagacacaaggggccgacacagcagggcccaccccctcagagggaccaagcttaaaccctccaacaacagaaaatttgtagagtatctttcagttggaggaaattaatggataatttaaagtaagaaacagtttccttagcgtgctaacaggcagaatccctgtggattgaaggtggaactgagccatgtcctttgtttggtctgtggatttagacgtggaggaggagtcctgaccggctgagcagggctgagttccctcgtgagagccccgggccttcagccccttccaaagccaggagagact

SEQ ID NO: 31763 - DNA, 1124 bp, Artificial sequence
  DNA replication origin
ggggcggccgggcagaggcgcccctcacctcccggacagggcggctggccgggcagggggctgatccccccacctccctcccggacggggaggctggccgggcggggggctgacccccccacctccctcccggacggggcggctggctgggcggggggctgacccccacacctccctcccggacggggcagctggccgggcggggggctgacccccccacctccctcctggacggagcggctggccgggcagaggggctcctcacttcccagtaggggcggccgggcagaggcgcccctcacctcccggacggggcggctggccgggcagggggctgatcgccccacctccctcccggacggggaggctggccgggcggggggctgacccccccacctccctgccggacgaggtggctgccgggcagagacgctcctcacttcccagacggggtggcttctggacggatgggctcctcacttctcagacggggcggttgccgggcggagggtctcctcacttctcagagggggcggccgggcagagacgctcctcacatcccggacggggcggcagggcagaggtgctccccacatctcagacgatgggcggccgggcagagacgctcctcacttcccagatgggatggctgcagggaagaggcgctcctcacttcctagatgggatggcggccaggcagagacgctcctcacgtcccagacgatgggcggctgggcagagacgctcctcacttcccagacggggtggcggccgggcagaggctgcaatctcggcactttgggaggccaaggcaggctgctgggaggtgaaggttgtagcgagccgagatcacgccactgcactccagcctgggcaccattgagcacggagtgaacgagactccgtctgcaatcccggcacctcaggatgccgaggctggcggatcactcgcggttaggagctggagaccagcccggccaacacagcaaaaccccgtctccaccaaaaaaatacgaaaaccagtcaggtgtggcggcgcgcacctgcaatcgcaggcagtcggcaggctgaggcaggagaatcaggcagcagtaccgtccagcttcagctcggcatcagaggga

SEQ ID NO: 31764 - DNA, 944 bp, Artificial sequence
  DNA replication origin
cccggccgcccctactgggaagtgaggagcccctctgcccggccagccgctccgtccaggagggaggtgggggggtcagccccccgcccggccagctgccccgtccgggagggaggtgtgggggtcagccccccgcccagccagccgccccgtccgggagggaggtgggggggtcagccccccgcccggccagcctccccgtccgggagggaggtggggggatcagccccctgcccggccagccgccctgtccgggaggtgaggggcgcctctgcccggccgcccctactgggaagtgaggagcccctctgcctggccggccgccccgtccgggagggaggtgggggggtcagccccccgcccggccagccgccccgtccgggaggtgaggggcgcctctgcccggccgcccctactgggaagtgaggagcccctctgcccggccaccacccggtctgggaggtgtacccaacagctcattgagaacgggccatgatgacaatggcggttttgtggaatagaaaggggggaagggtggggaaaagattgagaaatcggatggttgccgtgtctgtgtagaaagaggtagacgtgggagacttttcattttgttctgtactaagaaaaattcttctgccttgggatcctgttgatctgtgaccttacccccaaccctgtgctctctgaaacatgtgctgtatccactcagggttgaatggattaagggcggtgcaagatgtgctttgttaaacagatgcttgaaggcagcatgctccttaagagtcatcaccactccctaatctcaagtacccagggacacaaacactgcggaaggccacagggtcctctgcctaggaaaaccagagacctttgttcacttgtttatctgctgaccttccctccactattgtcctgtgaccctgccaaatccccctctgcgagaa

SEQ ID NO: 31765 - DNA, 743 bp, Artificial sequence
  DNA replication origin
aagctgagccctgaaaggaggagtaggagttcagcaggcaagttgttagaagactcgcatttcaagcagaaggtctggaaagacgtgctgactgatcggcaggaggctgtgagctgtggatgatacggagactgcagaagctgaggccatggagctaaggcgggctcagacttcctcctgagggcaacaggtttttagctggggaggaccatgaccaaatctgcctttcccagtcacctctctgatctctttgatgcagtgtagatctgtgcttagcaaactcagaaggccctgtcaccaccaggaaggaagagaccccacgactgagggcagtggtaggtttaggggctggctgcaggtgggaccgaaagggatagctgtggactggctggctttggggggggggtgaagagtggagggggtgatgatgccttctatggggagggggacatgctagaaacagttttgggggaggtgggaaggagggtaagcagatgaaggatttgggtcttggacatgctgctagtttggctttgacggtgcaggtcctctgctatgatgtgagtggctgtgcccgccagttcctcttctcactcccttctagggctatgagatttgtgaccctttcctctgcctgcctctgcccctgcccattgggaccctgctggaccaggcatccatcctatggaaatctccatgaagcgtcgacctccctgccccccaggcattgggtgagtggcaag

SEQ ID NO: 31766 - DNA, 2368 bp, Artificial sequence
  DNA replication origin
ggctctgccccttctcctgcgccgcggccgccctgcgggttataaaacccgacacacccccgcccccgccccgccgcgcttcctcctccgctccagagtccccagcggcgcgggccgaggttcctggcccgccccgggcaggggcgcgggccggggaggggccgaggtgcagcccgggggtggcgggatggggctgggtcgggctcccgcagaggaagctggagaaagggcctcctctctttagaagatggggacccggcagtttgccggaacacccgagcctgcccaccgtgcggccgcgcagcctcggccggggcctgggagcctagcggcctccggctcgatcttcccagcccgaccccccggagcctcccgcctccggagtgacaaggccggggccccaggagctgtccgcaggcgccgctcgtgcggcggggatggggctgatcgggcctggccggcttcttcaccaggccatggtcgaggggcggggacgtcgcctgccgggggtaggggtgtggcgggggggagaggagggaggcggggaccttaggtgtcttgcaggcgcctccgggaggtgctggaggggctcagggcggccggcacacctggggcttggggctgcgagggagggggagccacagagcgcaggagctttggagcgcctgccctctttccccccgaggacacaggctgccagtcgctcagcagaaaacatcacacacgatcccaacagagtcctagaacccgaggctagcaggctttgagagcgacacaaagcctcagagatgagaacaaccccctcattttacagatgaagaaattgccgctcaggttgagaggcttgctccaagtcacctcaggtctccacactcccctgtgttttcctgtctcatccacgtgtccctcaaagtgacaagtgtgggggagggaggacagtcttgtcctattggcgcacagggcggttgtggaggccacctcggcaccatggcgtctgctgccagaggggggaagccccttgaccctggcagaggcccggcggcgcagtgggaggtggggcaatggaggaaccgtggggtgaggctgggcggtgggatcagggaaggagccagggacagctgctcccaagaccccaacccattaggctgctgggggctgttgggaatcacttgggcttctgggtgagtgggggatggtgtctggggctctgagggacacgtgcaccttgctgtgcagcatggagtgtgtgcaggaggctgtgaccccgcgttcctgtgagatgcacctccagtgagatcgcactgacttgtcagatgacgtgttgcaggggagagggggcggtggggagaggaagaaggtggctgtccctagcactagagggagaaggcagggccttgttaaacactggccggcagtggggccgggagaggagagctggggtcaggcctggccctggcccgctttgccagcctccctcctgacctgcagttttccctcacaactcctccctgcccagtttggcttggagagccagtggataccagaggacatgggtgcacttctgggccggctacgttggtggacgtttgtgatcagagcagccccatcgaaggccaggggccagggagggcaaggtggtggcctgggctctcctcccaggagccaccctgctctcaggggtcctaacagcttggccttccaggctttgagggctgtgggtgtctgtgtgcaaatgagctgctgtctcctgggaggaagcagtctttctgtggaaagaggcttgggtggggaagagatgagagtggggctctgtcagcctctgaaggaggggccaagggaggagagatgagtagagaggagaagagcctgaggcctaacctgtatccagaggccctcagccagaggctggcctcgcctccaaagagttcctgagaaccctcttcaggagggtggagggcgggcattgcttctgctggttcattctcccgtctgactccaaggcatttccacaatgtctatagaccctgggttagggactgtgtcagcaataaacagcctccgcctccacttccgacagggttggaagataatggaagtcttcccctggacctggagcagctgacaccagggctgctggaggcatcaccctgcacctccctcactgtaacgctttattagaatggcttgttaaatcccccagcttcatcactaaattgtatgttactggagggcagggatggcgtctgccttgttctctgtggttttctcagagtttagcatggtgcctagcacagggcaaaacctcatcgaaggaagggtgcagaggaaagaggaaatgacccacactcgtattcacactccggggggt

SEQ ID NO: 31767 - DNA, 2392 bp, Artificial sequence
  DNA replication origin
gggagacagctgagagaggacacctggcgtggttcctggacagggagaggcctgctcaccgtcctgcttgtaggcttcattgctgagggcagtgaaatcctcgtacagcggtttcagcgggatgcccgcagcgttgtgccagccctcccaggcaaacaggagcatggcgtagcttcgcgaggaagccaggatgttggtgagatctgagacacaggcaggcagggtcggtgaggaggcctccacgttgaagtcttcaacggccttcaccagagcctgcaccagtccttactgctcccaccagcttcctgaacatcacggtgcccccagagacaggggccacctacaggcctggtgggagggggctgggagctacagaaacacccaggcagggcccctgccccagagacatgaccacctaaggtggctgacaccaaggggacacccaaaggccaaaacccagacagacacttagcggcctattggatggagtgccttcctcgaagctgctcataaagggggctggagcggggtttaaggggaagccacgaggggtccctggcctgagggctcttggggaacatgagaggacccacgaaaggggaaaccaggcagccaggaggaaggcctaggggtgatgggagaggccgaggtacacacagaagtgggggctgcagctggagattccggaagtccacttgccaagagaagcagggcgtgggggtatctgcaccgtccagccccagttggagggcaacacctttgggtttacctgctgtctccacagaccctacacaactgcatggtctggagtgcagcagggcaatgtgggaacactagggcaccgccgagaggggagctgcaagggccgtacctgggtccagggaccagcaggtggcagtcttgttggggaggcagaccttggcggtggagtagatcctgctcatgttgcttagcagggcgttgtactggggagtcagaggggaggaatgctccagtgaccagcccctgggacatctgccctcccctcgctgctagaaggaggagcccacagagtggatgtagcttggacaaggccactcagtggcaccggggcacttctgatcactaagtgtcacttagtgtgaccggatcacttctgagtcccctgccagtggaggcagcctgtggagtgggggacaggagtcctgaaagtcagggtcagggtcaagtcccagcttggcaccaccctgcagtgagggcagatccctcccattctctggctttggtgacttcccagtctttctcaaccttttctctctctcttttttttggggggaggtctcactctgtcacgcaggctggggtgcagtagtgcaatcacagctcactgtagccttgacctcctgggctcaggtgatccttccccctcagtttcaagagtagctgggactgtaggtgcacgcaccaccaagcccagctattttttttttgtagagacgaggttttgccatgttggccaggctggtcttgaactcctgggctcaagcgatgcgcccacctcagcctcccaaagtgctgggattacaggcttgagccaccacgcccagcccttctcaactcttccaaagaagctcataaaccagcctagggagaagtgtatttgaatttggcttcctactccagaatgcttcctttaacagaaagtaactccccaccccatctccaagaaaaatcaatgctcagaaagccattctgtgcttacctgggctttcccttctgtcagggcccatgtggatcccagggttcctccctccctgatgggctgctctcccccgacccccacgatggggcactaggaggccgcccccgagctctgcctcagccctcagcccacctgctgccgcttagccaggggcaggttggcagagcccagggtgcgcacagctccgatgatcctgcgcagctgcgggtccgtgaagttctgccagatcggttcatacagctccttggccttctggccccaggcctccgcaaactcctggctgagcagggctgcttcctcctattgggcaccaggagggcagggagggtgtaggaccctgcttagatgcaggccataaaggagaagccacggtgctgggggaggggaggaaggccaagggcttccagagcccgggccctggggagatccctgcgggagaccttagtttgcggaagccgcgcttcctccttctggagggaatctgcctcatgggaatggtggagcagaaattgggaccagaaaagaggccgggcgagtggagggtggatggacagtgcagtgcggtgacggtgacagcgacagcgtccggaggtgagaaggcagctgcccgagagcgcgggggccccagagccaagcccagcaccttcggcg

SEQ ID NO: 31768 - DNA, 1356 bp, Artificial sequence
  DNA replication origin
cccacttcccccggcttcccaccacacaccggagcttggcccctgccttggtggaccggtagatgtcacactggtgcagtgggccctcatagcctgcctccttgcacagggcttcatggaactggaactgcaggacaaaactcacaaagtacctgcaggcacagggtgggagtcagggaagatcatggggggccaggaacaggggttccttacccaggcaccatccagcttcctgcagggcagaggctggaccagaagctatcttgggggagaagggagacccaagacaggctcaggagagtgggccactctaactccaggcctttgaggtctggaggagcatggggacaagccctggggatgaggcagctaggatcacaggaggagaagtggattgagggtgtgacagtactgggggtgggtggggtgggggcgctaatacctgatgtatggtgtcacatttggaacatgaaacttagctccagcatcaaagtgggtttcgtttcgggtaacaggaggacagatcccctgatacttggttctggaaaaggatggttaaattgtcttagggcctagaggttgcaaacagatggatttaacttttgtagaaaaggcatttccacccggcaacccttccccatcctgaggaactggggaagacttcctggaagagggagtttcaggcaggaaaggagaaggcggtgggtcacagcgggggacatcattagagaggagaggctagaactggctggggcaggaggcgcctggctgtccaggaggctggggagggctagctggggcgaaggcttttctatccctcctctcaccgaagataccaccagtcgaagttgtagcgggaagggggggtacgcccactaaagaccccccagcgccactggtccaccaagtagccaaagggcaggaaggcaattttttccagtgccatttttagcaagtaattgatgtcactttctgttgggagatgagatgaaaggagagggaagaggtcagagggagaagagggtcccctaagagtgtgggctggcggggcagcagaaagtgaggccagggagatgcagagaaggtatggctggccctcgagaccctgggccctgcttggaagaggacccccaggtgtgctgagctgggcgcagtgtgcaccgtgaggctctaggaggatcccgaaccctgcctgacctggggccgggaggcagaaagaagggcagagctgagtggggcaagtgaggtcctgctgtggggtggagcggggtttaggtgaggctgggtgggggcctctcagccctcccatacccgtgtcattggtgacacggtccagcaggccgattttgtgcagat

SEQ ID NO: 31769 - DNA, 1733 bp, Artificial sequence
  DNA replication origin
gtgtgctgggagaaggggctggggcggctggtggtctggaggactgggaggggagggggacagggacagggcaggaggagcagggtgggctggggtgtggggtgtgtcctcagctgcccaccagtgttcccatcccagtctctggtgggaggcccttgggcagggccgacccagccgggtcacctcaggagtgtctcagctccacctcggagccgaactggggcccgtgggagtgccggtggaggctgcggtggcggatgctgaagagccgctggctgaggcccagggtggctaccagcagggcgatgcccaggaagagcagcagccactggcccacgcgggcctgctgcgcatccaggtccaggcccaggaagctgacgcggccgctgtctgggaggggcccttctgagcgagctgagcgggaagcaaggagacagcatgggcagggcagggcagggcagggcaagggtgcggggcagggccaggctccgaggtcagccgcatggctgcccagcctggggagggggttaagacccaaggctggaggtggggtgggtggcggtaccggagttcggcgtccagttgtactgcggccagcccagcttctccccatgcagctcgttctccgtgcggagccagtccagcagcggcttgaagtagctcaacatggccgaggcgctcatgttgggctggcccgtgatcagctgcatggcttccggccacggcctactgaagcccagcttcatggcggtcctggggaggcatgagacagggaggcagagtcagaaggacatggcccctcttgcccccacctgacatccactctccatacccactcccagctgaaacttgtcccagggccccagggctccaggtgcctaaggagatggcaatcaggcctggcccacgctgcaggtgggagttcccggctcaaaatggcaagtgttcccacaaaagctccagtggacagacccctcaaggcccaggggcgcaggccagagcatggaaacaaaggagggctggaggacactcacgccaggcgctgcccggcctccttggactggtagatgtcacacttgtgcagggggcccgtgtggccagctgcctggcacagtgcctcgtggaactggaactggatgatgaagctgacaaagtacctggagcagagcgaggccgtggcccggggcggagttggttgagggccttgtgccactgggccccaggcccttctgcacatcacatgtgatgtgtgctaagtcacatgcgcacagcagagccaaggccccccaactctgcccacagctatcagggtgagctcccccaccccagctcttagcattgtctgagcctcttcctagccgtgcctgtgtagatgcctcccacccacagagctgcctccacaactcaggagggcctgctccatggggtcagggcagagccttcagagatctggcaggtggctttggaggcagtgaggtctccatccctggggtatatgcaagtagaggcaaggtgtggccaaatgggccgtgtggatctactagggtggtctgggcagggaagccagtcctacatgatcttatccaaagcatcacgaattccctggtagaaatctgccagtcaaggctggaggattctccccagcttaaagtctgaagaggttttaaatgtcctgagccagtggcacaggcctctcactttgaatgctgggtgcaagcatgtaccacctagtt

SEQ ID NO: 31770 - DNA, 1673 bp, Artificial sequence
  DNA replication origin
tgggggcaccttgtcacacacagaaaaatgaaactgttctggagatggacagtggtgatggctgcacaacaattaacaatgtgaatgtacttagtgccactgaattgtacacttaaaaatggttaagatggtgagtttacattatgtatattttgccacaattaaaaaaaccaggtctttaaagtgattcagagaacagaatctgtgaggcaaaaacaggcgtttatgaaaacccaggaggtttgaaagaagcagggatgctaaaatgaaaaatatagggattaaattggaacgacaaaactctcgacagccagattaaacagtaggctaaaaatcagaagcaccgggcctggaggacacaggtggggaatcgccaggcacacaggacaggaaatggggtgagcactatgagcaagagttaggagacagagggcaagatagaaatccccaggcagggtcttatggggatcctcgaaggtgaggggagatgatgagggagaggagacatggggagagaggatgaggcagaagcgacacagggagggaggatgagggagaggatgagggagaggatgaagaagaggcaacacggggagggagcatgagggagagatgacattgggagagaggatgagggagaggtgacatagggagagaggatgagggagaggatgagggagaggtgacacagggagagaggatgagggagagatgacatagggagagaggatgagggagaggatgagggagaggtgacatagggagagaggatgagggagaggtgacatagggagagaggatgagggagaggatgagggagaggtgacacagggagagaggatgagggagagatgacatagggagagaggatgagggagaggatgagggagaggtgacatagggagagaggatgaggaagaggcgacatggggagggaggatgagagagaggagagatggggagagaggatgagagagaggataaggcagaggtgacatggggaggggagatgaggcggaagcgacacagggagggaggatgagggagacgatgagggagaagtgacatggggagggaggatgagggagaggagagatggggagagaggaagagggagaggatgagggagaggatgaggaagaggcgacacgggcagggaggatgagagagaggatgagggagaggcaacatggggagggaggatgagggagaggtaacacggagaggctgagggagatgtgacatggggagggatgatgagggagaggcgacacagggagatggctgagtactcccggaactgaggcaagctgtgggcccccagtggacgagctctgtgtgctcccagtaagaagacagttgactggctgtgcaaggacgtgtggtggggaagttcctggaaggcagctgggagatgggagttttcagtccagctccggcacccagttgccccgagtcctcttcctgtctcaagtgagagggctgatctggacttggctgatctggggttgttatgaaactagctttctcaggagacgatgcattcattataaagagaagacactctactaggactttgtacatcatctcatttcatcttcatggcaacgctgagagggttgataagaaccgtaagaaagaaaatgcaggctgggcgcggtggctcacgcctg

SEQ ID NO: 31771 - DNA, 2373 bp, Artificial sequence
  DNA replication origin
cgtccccccgccccaacatacacacactcactttggccctcgaacttgcggatgatggtgtccaggtaagtgttttggggagcgacgtggcccctgcggaccggcatctttcggccgcggcccctgcccggagccacaggcgccactggctcccggcgtctccgtctgtcctcgggctcagcagcgtccggctccggtgggcgccgcccccggggagggccgccgggctccgcgccccgcccgccagcctgcgtctgccctcccctccccacccctgccccacctctcctttcctttcctgcgctcccctgccctcccctcgcctccctggcccgcgccctcctggcctcctctcctctgcgccggcccgggagctgtccacgccttggtgctgaaagaagccgcgcgccggcggcggggagggggccgctgggcggggcagtttctctgggacccgacggggctggggcggggccttgcatcctacggggcggggcggggcggggcggggcggggctggggtcctggccctggaatagggcaggtgttctctgaggagctgcttctgttcctgtcctaagggccaatggcctcagcacctctccgattccctcccagtaccaaagggcagtctcccctcccagtgcagggagtttcccaggcaggaggggggctacagatggggttgttaggggcctcaggtggtctttggctgaaagctttcttccgggtctgaccactgggcccgaccctggcaatgataccattaggcctctggcctgctcttatagcaagtgatctccagctcagctgagacctaggtcccatgcagagctcctgccgccaagtccagccagggcctggtcctgagaggagggggtaggagtacacatgaagacgtgcaagaaatatgcaataagggccaggcgcggtggctcacgcctgtaatcccagcactttgggaggcagaggtgggcagattacctgaggtcaggagtttgagaccagcctggccaacatggcgaagccctgtctctactgaaaaaacaaaaattagctgagtggtggcgcaaacctataatcccagctacttgggaggctgaagtgggagaatcgcttgtacccgggaggcggaggttgcagtgagccgagattgcgccactgtactccagcctggtagacagagcgagacgcgagactccatctgaaaataaaaagaaagaaagaaagaagtatgcaataagatgccttcttcagaggcctgagagctcttagcatacaggtacatcttggaaggagaacagatttaaaaccacctattagcaagtgaccactgataaaagtgtctgagtactgagtactgactgaaaatgaacacactagaaaaagcaaatgggggtgggaataggtttattgaaagaggcttcctggagaggaaggggagaaggggactactgttcactgagcatctgggtgggcttgtagtgctgcagagggtttggtgagcaattttgagcctgatcttggagggcaagcattcaaatggggcatgcaccttaggcaaaggccaaaggtgatgtcagtgcagaggggctggggtggggggaacaagggggtgtgggagaggtgagtttggaggaaggaggtaattaataaagaccctcagatgccattttgaacatctagatttaattgatgaacaaccaagttcttaagcaattagacatgaaagaaatattctggtgacataaactttacaatggtgggtgggggaggaaggatagacaaggaggctcagcaaggtttttactggagtccaggtgagaggcttagagtcctgggctggatgtgtgtttgtcatgcagagccacagtgcctagtgggggcctctttggccactgtggctgggggatgagaagagggcagagatgtcctggctgcccctctgttggacaggctggctgtggaggaaaagaaggggctatttctcatgagctcagtacatggggtgctgagctctgaggagggacttgggcagtgggacattcattcattcattcattcacttactcattccatcattttccaagtcccttttgtgcaccatggcctgtgctgactagagttgttacagaggggcacactcctgatgtgcatccagctcttatagagctgatagctagtaatagggacaaataaggacattatggcacagaaaagtaagagcagggacagagtcatcaaacaagggtgctgtggagcctggggctggagcaagtgcttgggctcagccagatctcagaaagaccttttgaaacctggacaggggcagggtccatggagatctcagcctagtatctctgtcccctgaac

SEQ ID NO: 31772 - DNA, 1321 bp, Artificial sequence
  DNA replication origin
cttgcctggccacagaggtcttcaggaggtgactcctcctctaatccttggagcagacggagaggagggaaggttaatttccatcccagctgcctgaccgctggggctgacagtaagatagtggagagccaggagaccagggacacagcagagggatggcagagcaggaggccctgccccaggccagaaccagtgggtggcccagcctgatccctagctcctgcaaaggacctcagaaggcatcatatccaatgcctgtggaggaaccaaggcccctagaagaaacagggtttgttcaggccctttggaccctgggtcagtgccttccccaaggccaccctggctggacaagacagagggccaagcctgccctgcaaagcctctggcctgagtatgcctcaccatccttgcggtagtagaggatgtccaccttgcactcctcagcccccagcagggcctgcgctaggcgggacacggcgctgcttggtgtgttggggcctgtgaggaagtcgcaggtgcagggttgctgcatcacctccactcgggagtagccgaagagttcgcagaagccgtcgttgcagtaaatgatggcgcagttctccatctgagcattggcaatcaggaacttccgacctggggtgggaggtgggaggcaaaaagtccatgggagccaggatccagcggctgggagggaaagatcataaggactcttggtggcagtaaggggaatttaggcagaggagcagggcagtgaccggaatgagggagggagtcaggcctggggattgtgggaagactagggcagtgagggtcttgaggtggaaggaaggcccaaggcctcctggaaacaggaaaagtgtggggaagggaggcagggatgtgaccagatgggggtcaggcctgggaaagctcctgggaagaccagaaccaggatatgaaaaggaaggaaaagaaggactcagagaagcctctggaggacgcggatgagggggcaggcagtggctggaaggggaggttcgaacttggggcaccaaggaaacagctggcagtagggagggaaggcctgcacgctgctccttgtgttccagaaaagaggacagcatttaaggcaagcgggtccccctggaggagaaggtgttggggacatcaaaagaaggatttttcattcagcacccggcactcaccaccttgcccggttagaagttagtaaaggggtccagccccccctttcacggaaccaggactccagatcgtccccccgccccaacatacacacactcactttggccctcgaacttgcggatgatggtgtccaggtaag

SEQ ID NO: 31773 - DNA, 879 bp, Artificial sequence
  DNA replication origin
gaggccagcgtgcagaggacagccatggctgctggcctggagggggtctgctcacctcatcggagccagtgcggaagatcaggaggtcgaaagggatggcggccaccatgtcaatgaggaaccagcccttgaagtagtggacggcgatgcggcgggggtggctgaccacctcatcattggtgttgacataggtggtgcggaagttgatgacgatgtccacgacgaacatgatgtccacgatgagatccaccacagtgaggggactgcaggtatagctgcaggccccacgccgtgattcgtcctgatcgctgagcaggaaggcggctgagtagggcgtgaagacagccgtgtagatgaccagcagcaggatgagccagtcccacacggccttgaaggggctgtagtgcaggatggtccagcggtggatgcgcggcgcctgcagcttgtactccggcagcacatccgcgcccagggacaggacctgggggtgggggccgagggaggtcaggcacggggcagccactgctggtgagactggcctagagggctgaggcctggggaaggtgtagtgggagagggtgggtgaccacggctctggtgggcagaggggatgagggagagatggggtggggggtgtctgagaaggcaagttcctaaggggacagatgcctcgagaggaagtgcagagaaaggagttgggatgcaagaggaggggtatggctccgccccatagcgacaccaggtttgatgctcacaagctcccttggaaacatcctggagtgggtggagccaggcaggggagggccaggcccatggacatctatagacccattccacacaagagcccacagaaggggtagctgatgggctgatcctctc

SEQ ID NO: 31774 - DNA, 1709 bp, Artificial sequence
  DNA replication origin
gcccaatcagggttgtggtctggaggggtagggaaatggtcacagggctggggtcagcccttggaagggtgcagtcaggcctgcttttgttcactcatgcatacaaccacatactcattcaacaaacatttatggagaacttcctccgggccacgcacttggcagtgtggcacagtatgggacattgaggatctcagcctaaagctcagaatagtgttctggttgctaggacagaagtccagtgggagaacagaggaaggggaggtcaggggaggcttcatggatgaggtgacgcatgagctgagcctggagagaggaggctagggctccagacagacaggagagagagggaaagggcactcctggctcagggagcagcatgagcagcggcactgaggtgtgaagtgcgtggccgatgtgggaaaccgagtgtggcactgcagcccgatgcgcacatgggagatggaggagcagtgagagccgtgcctgggaagggcagggcgggcaggggctgctgcctgtgggcttcagggtccatcatgaacttggcttctagtctgtaggccttgggaagccactgaaaattctgaggaccctgtacaccccagagggtggaacacagggtcaggtaggcgatctgaaagtcgctgtggcagctgtgtggaggggcgggagactggcaagtttggtgatgggacacaagtgagtacgaaggccactcagtgtccaggtgggggcagcaaggtaggagggtggatttgttgaggggtggtcttagggggctttggagcagaggagccctgctggacaccccctgctggacaggctggggtgataagggggcactggaacacagaaggcagagttgatttcagtgaaaagctgatcgtgaggagagggggcaagaggagaccgtgggactggaagctatgagaaaggcatgtagatgccttcacgtcacctatgggcagccaggtggacatagtggagggctagggagcaaggtgggagccagggtgcactgggggagtggcctggggatccctttcttcctccagggtgagtgcagtttggaagtcagcatgaggggccgggaccacacgagtgcccatcctggaaggggcagcctgctcctcttaccagggcctgctcagagagggggcagagggacagaggcctgggggtgcagccttggcaggtccttctccagggctgggaggtgacagatgtttggggcctcctctccacctccacgtgcttcagcaaaggtgcccagtgccagatactctccgcacccagtgctgtgcagcagggagggcttgaggccagcgtgcagaggacagccatggctgctggcctggagggggtctgctcacctcatcggagccagtgcggaagatcaggaggtcgaaagggatggcggccaccatgtcaatgaggaaccagcccttgaagtagtggacggcgatgcggcgggggtggctgaccacctcatcattggtgttgacataggtggtgcggaagttgatgacgatgtccacgacgaacatgatgtccacgatgagatccaccacagtgaggggactgcaggtatagctgcaggccccacgccgtgattcgtcctgatcgctgagcaggaaggcggctgagtagggcgtgaagacagccgtgtagatgaccagcagcaggatgagccagtcccacacggc

SEQ ID NO: 31775 - DNA, 1241 bp, Artificial sequence
  DNA replication origin
taaaagtaaaatcctcatcaggaagagggtggcctgggcagggcatctccaatcccgccctcttccatccaatccccaacacaggcctggtccactccgccggacccacctaggatggccacgaccacgtcgtcgcgcaggatctcgatggagcctcgggagatgaagtagagggtggagagcacgtcgccgaggtgcaccagcgtgtccccaggcggcgcgtgggtggtcttgaacttgacggctagcgcgcgcaggcagcccttgccggcgccgctgaaagctgggcagtgctgcagcagtgcgcggtgcaggtgcaggcagatgtcagcctgcaggcactcggggaagcccttcagcacctgcaaggcgggcggccaagtccagcgggacgcggccggggtggggctgggggagagggtggtgagggctctggggacgccccgcccccgcaggatcttggctcccccccacgcccggggcattagccggagcggcggggctcaccgcgttcatgtcaatgccattggtgtaggaccaggcgtgctggaaatactcctccaggcgctggcgcagtgggttggggatctggtggaagcggatgaactccttgacacgcagcatctgcgtgtggtagcgcgcggtgcccgagtacaggcgctggatgatcgcggacacgttcccgaagatgctggcgtacatcagggctgggggcggggcggagagtgagctcctccgcggccccactgggccacaccaccaagggcttacccaggtcttcctccttccagcagccccctggtgaaggacccctctgtccagggagaagtcaggagtgaccaggacagcgccagggcacatgcgggacaaaggcccctgggctttctgccctcctccctctgtcctgtgcctcttggcatcttactgggcctagcggtcaaactcccgagaagaaagaaggaaggcaatggatttttaaagttcagatctgttttctcctttaagttgtaaaaatacaataaagataaaactctccgccgggtgtggtggctcaggcctgtaatcccagcactttgggaggccgaggtgggcagatcacctgaggtcaggagttcgagaccaacccagacaacatggtgaaaccccgtctgtaccaaaaaaatagaaaaattagccgggcatggtgatgcccgtctgtaatcccagctactcgggaggctgaggcatgagaatcgcttgaa

SEQ ID NO: 31776 - DNA, 1876 bp, Artificial sequence
  DNA replication origin
ctgatctagtgtctttttctactcaggacaaaatgagaggtttcatgtctctaactgaaacttaaattggattaacttcttaattattaataataataatcatccctcccatgtgatggcactttttttttttaaagacagagtctcgctctgccacccaggctggagtacagtggcgtgatcttggtttactgcaatttccacctcctgggttcaagcaattctctgcctcagcctcccaagtagctgggattacaggcacccgccaccatgccgggctaattttttgtatttctagtagggatggggtttcatcatcttggccaggttggtcttgaactcctgaccttgtgatcacccacctcggcctcccaaagtgctgggattacaggcatgagccaccgtgcctggccatggatggcacgtctaaggtaggctgggagtgagggaaggtctcatacagaaacctgtgcctaagcccagccttggaggacaactgggatctgccggactggcacagggtagggcgctccaggcagaatggcagcacatgcaagggcacagatttagagaactctaagtagtttggctggagcatgaagtaccagggggagggtggtaggacagggtggtcggattgggataactggggatgccatgcatggaccatggggaactgtggagggatcttgagcagaagaggcagatgtacagatgtctatttcaggtcactggcagaaggtggaagacaggcatgggagtaaaccagacgcagggccatgggaaaggagttcccaacacctttccaggaaggacccaaagagggctggatccaggcagggacagggagacaggtgtgagatggagaggtatggacaagtctggctggtggacagtgggcaggaatgaagtaggatgcccccttggcagactgtggcgtgggcaataggcagatgcttcacagtgatggggatgctgaagcagctggttttgaggaaaggtgatttcaggttgggatacattgagtttgatctgttcatagaatactagggcggccatgcccaggaagaaatggaatattctggtctaaggagacagtggggtgaggacagggctccttgtggcacaggtgaaggctgaagccgtgggagcgaggagcaggcccaggggagggtgtcaggtgaggaggggcgaggagagcagatcaccagcagtccagaggaagcagagggggagggctgcccgaggggaacctgtccagaggggctggaggatagccaggtcatgggtaccaaaggagggcgaggctgaagttggggtggagatgaagtcatggggcaggcaaggaagatgagaatcaagaggaccctgtgatgctcagagaggcaaagtgacttgcccaaggtcacacagcaggtatgtgacagaggctgcttgtgacctgtctgtcccccctgcccagtgctcatgtccttcctccaaagtgtctagctatccctgtgtctgcactgaatgagactggggtccccagccagggcatccacctccacccagaaagacccttggcctttctccctaaactccccaagagtgcaagaaggtaggaagacctgcctgggcttctgagtcacactggcagccctggaatccctgcctggccacagactagcatgatctccctcagcctcaacttccctctcaggaaaatgggacctccggcagagggttgttttaaggattcagccagctgggtctaaagctctcccgggcacatgctgtgcaagtggctgccagtaaaagtaaaatcctcatcaggaagagggtggcctgggcagggcatctccaatcccgccctcttccatccaatccccaacac

SEQ ID NO: 31777 - DNA, 1031 bp, Artificial sequence
  DNA replication origin
tcaattttcctacaaaaagctcgtgttgcttttataagaaaaaagttattttctgaaagaacctctggcggaactcagatttccagggacccacatgccagcactatcccagcctcgggtgtctgaggtacctagaccagagggtgtggccctggaggtgtgagacagggaaagctgggctgggccggccgcccctgcccggggcaagagcagcgtcgggaccggaggaccagtcgggggatggggccgcagaggtggccgcgcgccgggaagtgctcaggccagaccctccccactcgttacacgccctgtgctgggcacggggaggagcaggacgccaccctctggaaccacccagatcgctggggcctccgagaacccggagggcggaaggcctgagggccccctgcagccgcctactcctcaccccagccctaaagtagccggcggggaactgcgccagcccgcgcgcccgccgagccttcggtgactgacgggaggtgggaatgtgggcggagcctcacgccggagctgtgattggaacaaccaacacctcccaatctctcccaagagagggagacagcaccagagagggatgcgcagaggcgggggcttagaggcctctacgtgattggctaacagcgcagggagccgggcgctgtcccgatgattggcaggcgctagacagccctcggaaaccgccttggcttcgcccattggcatcctgtgagagtaggcgggattggttcatcgtgtggtgctgatgattagctggccgctgagagttagggtgttgggagagagttggagggggacggcgggggctgccgacttccttcttgttattggctggtgaggtgggtgggggtggtgcgacggcccagcggctgcctgggattggtgggggccggcgtgagtgacagacaggggggcgagctgcgcgaccagcggtttgtttttcggagcgttcctgaggtggagaacggtggccggacggagagactgcgggtctgagggactggcgggcgggc

SEQ ID NO: 31778 - DNA, 2446 bp, Artificial sequence
  DNA replication origin
gccggggtcaggtcggggcagcggcttctcatcgcggccccgccggccccgacctcccctcaccccaagcggtcccagcccgcgggacgcacacggcggctgcgcgggagcccccggcccctccgctcccgctaactttgttcttccgagggacggtgccactcgggaccccggcccctggggagcaggggtgggggaggtgggtgaggggcggaagtggcaagaccaagagcaacaggaaatgacttagggaaagtcccaaccgcaatccccccagcccctgcctgtcaacaccccccaccctgcaggctggggccgggctggcggggccctcccgactgacttccccttgcagaacccagcgggtgccgcttctccacccgaggcttccacctccaacgagccatgttccaggctgcaggagccgcccaggccaccccctctcatgtaagtgcccggctgggtgggagggccccccggacaggagcctggcctggggtgaaggggagaggcatcagagtttgccggccccctttgtgccctgcggcgcgcccctgggccttgggctgatggctgcagccctgatccagggcctcccggagctgcccctgccctgaccgcccctctccctcaggacgccaaaggcggcggcagcagcacggtgcagcgctccaaggtaggggcctggggccgggtgtgcgggaggaggggtgtgagggagcgggatgagcactggggcagcacctggctgagcttcccgcacagtccttcagcctgcgggcccaggtgaaggagacctgcgccgcctgccagaagaccgtgtaccccatggagcggctggtggccgacaagctcattttccacaactcttgcttctgctgcaagcactgtcacaccaagctcaggtgcgcccctgccctgcccgcccccgcctcgcctgccaacccagccccgacctgacctgacctgacgccgttgtttggcttctgcagcctgggcagctacgccgcgctgcacggggagttctactgcaaaccccacttccagcagctgtttaagagcaaaggcaactacgacgaggggtttggccgcaagcagcacaaggagctctgggcccacaaggaggtggaccccggcaccaagacggcctgaggcctctgtaaccttccaccccctctgcggaaggcctggagccggcagggggaaggtgggaaggaggtcgagctgggcttgcgtgggggccaggtgggaaggggatgaggcttgctcaggcgtaggggaccagggcagggctctgctccaggactccttccttcttccttctcccgcagccggtgagggtttggaaaccaggattggggtctgcccaccaccctgcttcctgcttcgttcagcctccctccccacctcaccccaggaccccctgggaggcccccaagcccagctcccctatctaggtgccttttctccagcaaggagtcagcatgcccccctcagggtcccaagctccctcactgccaccggagactgtgtggcccccacgtctccccatctacctctacccttaacctgtttctgagccacggagacagggaggaaggagcgcgacagtgccacctgttgggcatcataaatgcccctgcagcccatgggggaggagatggggaagtggagccaccctgcctctgcagggcaaggcagggcctgccccagtggggcttgggaccatctcgaaccaccagcgtggagaagcagaagcaaaagcactcgccaggctgcagcctcaggcactggcaggggctggtgcggccccactcccctcccccgctcccatttgtgcccatcctgttgtgaccaaccccgttttaaacatgtttcaatagatccagattctctattgtgtggcctgctgggggatctgtcacaggaagggtgcagactcaccatggggcgggcatggggggacagggccagccccgactacctcggccctgatgggggcagggagctagaagtgggtgtcagttccctgacacaccattgagaaatgggagggctcctcttcacagcgagggcttcatgctgtcacacccacagtggttttggaactgaaactccacctcacccctcagttctgggttggttcagacccaccaacttaccatatgcaccccattgtgaagaggcctgagagcgggagggccaggctgccagtgggtgatggcgcctgtcctcgctgcacttcagtgcctggggtgcaagctgccgcgttccctggctggttccagctgtctagctccctcccttcttcccagccctttgacctggaagtaagttagcgaagaatggcggtaaccagcagacccagcaagtgctgcccaaggttttagtgacccctggattgtcccccctcatcattacccctcgctgctgtcatcatcccctt

SEQ ID NO: 31779 - DNA, 840 bp, Artificial sequence
  DNA replication origin
cccccggagaccgatcccgccccgcggcccaggccgggcctggtgagagccgcggggggaggggccgcgtccggctccggaaccgggagaggcgccgaggggtgtggggtgagggccgcccgtggggtcccggcgagtctgcgagccgctctcgcccggggcgcacaggctcgagtcctcgtttcagggccggcccccggctgggcggagccgagacccgctggcggggctcgcggcgtcggggtctggggtccggtcctcgcggggccaggtcgggggccgaggggcggggcgggcggggacctcgggcgctgtccaggggctgcgcagcctaggcctggacgcccgggcgcggcgcagggcagcgagggccggggtcaggtcggggcagcggcttctcatcgcggccccgccggccccgacctcccctcaccccaagcggtcccagcccgcgggacgcacacggcggctgcgcgggagcccccggcccctccgctcccgctaactttgttcttccgagggacggtgccactcgggaccccggcccctggggagcaggggtgggggaggtgggtgaggggcggaagtggcaagaccaagagcaacaggaaatgacttagggaaagtcccaaccgcaatccccccagcccctgcctgtcaacaccccccaccctgcaggctggggccgggctggcggggccctcccgactgacttccccttgcagaacccagcgggtgccgcttctccacccgaggcttccacctccaacgagccatgttccaggctgcaggagccgcccaggccaccccctctcatgtaagtgcccggctgggtgggag

SEQ ID NO: 31780 - DNA, 1893 bp, Artificial sequence
  DNA replication origin
agacccagccggggcgaccccggagcctggcccggggtccctcgggcggccgagtcctcccgccgccaggggccgcccccgcccctttgcggcccacgaggctggcggcggcgtccgggcacgcggtctccaggcccggccgcgaggctgcggggaggagcctgcacgagggcccggcagccccggcagcccccccagccctcggcgcctctgcaaccctgcgacgggctggggaggccggtatgcgtggttcccggagcacccgtcccccgaggctccacgtactcaagcgtttctggggcggaattctgtgggcagcaacgggggccccctctccaacaagcgcacctcatttctcacgtgggagccgcggcccagagagctgaggtgacagagcttgggccgcagagctgctccctccctgcagccgcacagcaggccggaggcacagccggcgagagacggccactcgctttggagcggcggcgaggccggcgccttcccgggcaccagggactgcgtggcttggccggaaatcaggctagaagcagctccgggaagcacagcccttagcccagcgccttcccacactgtggcaggaatagcactggcggcccacgcgcttgtcagggaacagaacagctctcgcccgacgcctggcaggggagcagggaggctgcagcttccccagcgaccagctgtttcccaggctggcggactccacggaccggctccgcgtctcctctccagccttctgttctctctagaggaagatctgcgttttgtctgcactgtgggccgactctctagtggggagcgtcagaccctctaaagtggctgcctctcgggaaagcttccacacctgtcatcagattctccaaaggggctgtttgatgcaagaaacgggaagccccgggggtactaggagcagggcttgctgccattgggcatggtgaggccccggcaccctgcccaggacgggcctgtgggctgagctgcagatgggcattgaggatgccccaacagcaaggtgcagaaggcatccagaagcaaaggaaactgatgaccagcgtcaaaaacaaacaaaaaaagggaacttggctcggcggtggctcacgcctgtagtcccagcactttgggaggcagagacaggtggatcacgaggtcagaagtccaagaccagcctggccaacatggtgaaatcccgtctctactaaaaatacaaaaattatccaggcgtggtggtgtgtgcctgtaatcctagctactcgggaggctgaggcagaagaatcgcttgaacccgggaggtggagcctacagtgagtcaacatgaagccagtgcacgccagcctgggcgacagactctgtgtttgtgtgtgtgtgggggggggagggcggggcgaggcgaagggaacttgaggtttaaagcagggggaggagggccggaaatgctccccgccgcccccgacactcactcgccccaggccccatcctagcccagggtcagtgtcattcccttcaccttagcctctcactgcccaaagaggcttacttttcttctttaaactgctgttaaaatttgggaggaaacggaaagcaagggcacctgatggttcagtgcagcttcaggttagaggggcatttgaggtgcctgagctgggggagggccttccccctgagggactgggagaagggtaagccatgtgccctggaagcactgcagggagcctcagatttgcaccccctggctcacactcgctggcgccagccagcatggcagggatgggcggggctggttcttaggtttcctgctctttgggtgctagcacccagggtaaggagacacccatgtccggttgcaagacaaacccttctacctcctttcctgccaaa

SEQ ID NO: 31781 - DNA, 1340 bp, Artificial sequence
  DNA replication origin
gtgcagagacccagagtctagaaaaaacagatctggagaacagcaaggaggtgtaaatggtataaatggccaaggtgcagtgcttcttggggactgccaggtgacaggcacagaaggaagcaagggtacattgtgaagggctttgatgccactttagagcactggttcctgtcctaaagcctgtggagcagtgctgaggattctaagcacaggagtgacagcataagatggctcatttacaaagaccaccccggcagatggattagatccagtagctcagttaggtgggtatggaagtctatgtgaggaatctaggagatctcagtaaaataattcagtgacagaggatgctcaggaaagaaaaggtgactgaggaggaacaagaagtccaggcctagaagcagcaccatccactagaatttgctgcagcgaaggagggcttctgtggctgcactgtctagcgtgggagccatgagactgtgtggctgtcgagcatttagaaggtgaccagtgagactgtgggactgaattttaaacctcatttaaatcgaaatagccacaagtggctagtggctatcacgttagtgcagctctagagcaatttccaggtttctggcttggacagcttatgcggtcatgaggacttccacgaggacagcagtcccaggtggggctggttttatatgtgttgagttggggtactttggaacagccacccagcctggcctccccttgggcatcttgctcccgtgtggcctgctgcagcgacagcccaggctgtggcactgcagggactgcctctcagacctcatcggatccacctgagcatggcagacggctgggcttcaaagcaggttcatctgactgctccttccctctagggtgaagactctacggtaaaaggaatttgatgccttggaaagggagagcggaaactgtgagccctgctttccagccatggcgaaagcgggtacttttgtgcaacccctctcctttcacgttggcctggctagggcggagctgccacgccagtgaccagcgtttctttgggaaaattggacttactccacttccaccttttccactcttcaaatgatcacatttgcatattgggaacagtgtatttgtgaagagactctcaggccttccagggaccaccccccccccccacccgctacagcccaggtcctggttctgtcctccccagatgctgctagagaaactgaacggcacagtgccctgcctgttggataccagcaccatccccgctgaggagctgaccatgagcccttcgcgctcagtggccaactctggcctgagtgacagcctgaccaccagca

SEQ ID NO: 31782 - DNA, 808 bp, Artificial sequence
  DNA replication origin
agggcgctgggccgggtttcggcttcggccacaggtaaggagcgggccaggacgcgctcgtcggcgtggccgggccaggccgagcggtgactccgagttgcttggcctgtagcccggtccggttgagataattgtaatggtttgggggaactttcccacggagctgtgagcaaatgatagccaaaagggcagagttagaggaaatgtacagtgtgtgccggaggatgacattaggatgtattgattctcttgggtggggagaaactaggcaaaggggtttaatagaagcaaaaacctctgtggccagtctcttctggaggtttctaaaatgaaacgtgtttgtatccaacacatataaagagacagaggaaagtctgcatgatttccagaatactcgttttggccgttgtcaggaagacctaatctaaaatgacaacaaggaatgatggcctcactcagtcctctttcctcaagtctagactcagtcgctgaggaactattggatgagcttgcagaaaataatcaaaccagacttgttagcgcttgtgtgaattttccttggtcctgtgttgcttgcttcaggagtcatagaggctgggtggtctggcaaggacttgtgcatttgagaactgacaggtgcagcggagacttctaagagggaaaaccaaggtaaaaatggcttggatgattgtaacctaaataaccttgaaggatctccattatagtgctgagttatctcagaagtgtttctatggtgtgaatattctaattggaaattcaatttgaaatgatcggatcttttggcagg

SEQ ID NO: 31783 - DNA, 1615 bp, Artificial sequence
  DNA replication origin
tctgtgaggaactcgcgaacttggattaggaaatcccggagcccggatcgacaaatcccggaacccggaattaagatcgccaagtcccggatcgcggagcacagagcacggagtggactcgacgcggagcccggagtccggatcgcggcaccgcgggacgggacggagcgatgtcgggccgaggcgcgggcgggttcccgctgcccccgctaagccctggcggcggcgccgtggctgcggccctgggagcgccgcctccccccgcgggacccggcatgctgcccggaccggcgctccggggaccgggtccggcaggaggcgtggggggccccggggccgccgccttccgccccatgggccccgcgggccccgcggcgcagtaccaggtgagcaaggaggacgcgagcggacgggggcgagaggcgctgcgagggcgcccgggccggcggctgaaggggcctcgagtgagggccctggggaatgcatgaggaactccgggagacggtggagggcgggccgggaccctcgggctgcggcgggtcgcggtggagaagtgggaaggggaagcaggttctgcagcggagggctggaagcagctgggaggcctgggggcttccgcggcacagggattccgagtgactgggagatggaggagtttggggagccagtgaattgtggcgggtgggttgagaagtctagggtaggagggctggaaagtgatgagaaagtttgggaaagggccctcgctgagaaaccggggttaccctgcatcggccttggtcccagtccaagtctgccctgttttttctgattgggaactggcggagctctagcgtgtctgagatggctcccggctgctaataaggaggaaggagcctggcttcccacgggcacgggacgctgaggctagggccaggggattccagcttgtgcacgggcggactttactcctgaggcagggccaggcgccttcgctgggaggactccagcttagaccagagacggtggtggcctggcctgaggggaggcccagcccagtcacaggccggctctcttctgggctttctgcctcctgtcatcgtgtccgggagttgattagtctggacgtgcagagtggagccctgctggtctggggccggaggagtctgcgagagttgcttcaaagagtgctgtcctgacccctttggggttttgagagctgctcagattgcagcttcaaaagcccttgcaaagcagcgacttctgctcagtgtgtgaggacctcagcctgaccctgccagtgctctagtctgctgttcaggttgccccagagggcttggaaactgtgcccatctgccttgtcaccctctctgcatttttatttggccttcaggttctaactccaccacgtccgaagccatgtgcccaagcatttgacactggcttcttgctcatctacgggtttgctgtgggcttcctctgttttcgactcatgtctccaggcagaggtccttagggatcctcgtggagtatacacagcctacctgccccactgggccctcacttctaaggagatggcttaactagggacagtgactggatttttttttccttcttactcctcattcttcctcct

SEQ ID NO: 31784 - DNA, 1129 bp, Artificial sequence
  DNA replication origin
cccgcccgcgcctcggcccgacatcgctccgtcccgtcccgcggtgccgcgatccggactccgggctccgcgtcgagtccactccgtgctctgtgctccgcgatccgggacttggcgatcttaattccgggttccgggatttgtcgatccgggctccgggatttcctaatccaagttcgcgagttcctcacagacccggttcgggacagattccgctcctgcccgggagattccggatccaggatctgctgcgggcccgccttccgtccccggcctccggaggtttggccgcccgagtcgagttacccagaggcggctacgaactccctgccccgcccaacccagcccagcactaggccccgcctctacctggtgcccaatgctcgagtgcctcctcgaatcctgcccctcgcgagacccgcccccagcgggcaccgcccctaactgccgacctcagagccccacccccccacctttggcccagcctttcgtcggaggggcgggagcggaagctgcgcgcggaagcgccgagtgaggcgcggggtcagaggtctaaggtcacttaggggcttcacagtgaatgagccgttgctactactctctcccggtatagcaccctcaccgaattccgcggccacactccccgaaaatagttttgtcaagtctcctttctgcatcttcggcgttaaagactcaactcagagtcggtagctgtggctcacgcctgtaatcccagcgctttgggaggctgaggcgggcggatcccctgaggtcagaagttcgagaccagcctggccaacatggtgaaaaccccgtctctactaaaaatacaaaaattagccgagtgtggtgacgggcgcctgtaatccaagctactcggcaggctgaggcaggagaatcgcttgaaccttggaggcagaggttgcaatgagccgagatcgccccactgcactccagcctgggcggcaagagtgaaactcatcaaaaaaaaaaaaaaaaaaaaaaaagactcagctgctctgtggggcagaacagcagccaactcaacttcctgtaaaagctcatgctggtagctcggaactgccaagggacctaggaggctccagacttgacccagctggtgaacggt

SEQ ID NO: 31785 - DNA, 1301 bp, Artificial sequence
  DNA replication origin
tcgcgcgcaactctctgagacgcgggccggctcacgtgtccgggccgcaccacgaaaacaacagccacaggggagaacaacctcttgttttcctcatacagccgagctttgctgcaaacgatccctttccttttgtttccacattgcgttattcagaagtggttatgcggcgccaaacacgcgctttctgccccacaggtttcagccttccccaccctcatcttccccgcgctcccctcccgtcgttgtagcttcctgctcgcccctctcatctcagccaaccctgctgagctttcgcgtgggcgtcacgagtttctaggcagatcaggaaaaccgctctccggccgcaccctcgcgcgcccccgcctggcggtgtagaacaaacggtctgagcgcttggcgggcgactgagagcggagcgggcgaggccgaggagcggaggctgaagccgtgaggagcggcccggcgagggcgaggggcgtgcgagcgggcggccgcggctcggtgaggatttcggtcgtgttttccttggccgtcgccggaagcccggagaagccgggtggaactgccttttgaacgcgttctcacgtgtgttagggatcgtcctcctggaagagccttgatggccacgcggtgtcctcgcccctctctccgctggacccgaggccccttgccagcaagagctggcctggtgtccggtatccacgtggggggcagtggccctcacacaaggattggtacccatctatctagtgcgttggttcgtgcattcacttgttcctttgtggtcgttgaacgcctgtaacgttccaggtgcttgggatccatgagtgaataaaaccaagggccctgccttccttgggacttacagtccaggggagacagagccgctgatttcaggtctcatcagtaagtgacagggtgttagagggcgatagtgctgcggaagggaaagcggtaggcatgcggggggtgctgcggtgaggggcgtgggcagggagggctgggaagcccgaggtcagcgcaggccacattacaaagagactgaactggatagaggagtgtttggggagaaggaagataattccaggctgatggacgagagagtgcagaggcccagtgtgacttgtatttataaggaacagcggccgggcatggtggttcacgcctgtaatcccagcattttgggaggtcaaggtgggcggatcacttgaggtcaggggttcgagaccagcctggccaacacggtgaaaccctatctctaccaaaactacaaaaattagccaggcaaggtggtgcgt

SEQ ID NO: 31786 - DNA, 1184 bp, Artificial sequence
  DNA replication origin
agcgcggggctttggggtgaagccatgtggggcggaggttacaggggaggtgacagtaagggtgacgcaagaggcggtggaacttggaataggccttgctagagggttgagatgtggagtgctaaggggcggggcttggaaggtggaacaaaagctctagctggagccgggggcacgtgaggggataatcctcaccagatacctgctaccacccctctcccagaactggaagaggcccaccaaaagtgcccaccatggtggtacaagtgcgcccacaaagtgctcatatggaactgctgcgccccgtggctgaagttcaagaacatcatccacctgatcgtcatggacccgttcgtggacctgggcatcaccatctgcatcgtgctcaacaccctcttcatggccatggaacattaccccatgacggagcactttgacaacgtgctcactgtgggcaacctggtagggaggggcgggggaggggatcattcatgggcaggatgggagggggtagggcccagtggagctgtctggctgtatgtaaatatagggcacggtgggggacacatgcggacagctggggttattttcccagcatatgggaggcatgagttgatgtgggggggggtacttggggtgatctgtggcacacagaactggggtttcaggacatttaggggcagggagatggggttgaggcgctgggcttcctaaggtccagattcttggggatctgggatccagaccatgccctggaagcaggggtgaggaaatgggggtgtggagataggggtgaaggggctagctgacaagtctgtccacttccagaagttgtcatgggcctgaaaggagccaagggatctggcagtgtgacctatagccctggctacccaggaccagtgggctgcaggggttactcccccaaccctcacctatttctccagcgtggccaggcttctcctctctccagccctttcctgctccactattgttgacaccactgatccgcccgcttatccaggcccattaggagcattatcacctcattgccggccccagaggagcctgacaaagggaaaagccgcctcctcctccagccctgccccacccttcccaattccctttgcaatttttccaggacggcaaatgggcgagatgctccccaaccctgaaggttaggggaa

SEQ ID NO: 31787 - DNA, 1383 bp, Artificial sequence
  DNA replication origin
actccagtcccttttctttgtctttgaaatgggagccactgattgtatttaccgggaggcactgattgtatttacctgctgtgatgagtaagtgagatcgtgcctgggccaaggacactccgaatgtgtccccaccgtgccccatatttccacacagccaaacagcccaccaaggccaggaggaggaggaacagctttgtcccacggtccttacaaagcactcgtggctttggggtggcaagaacaggggatgtttcttgaaggccactgtggtgggaaaggatggaccggctggggacactttggaggggccggtattaccgacagtgcatccccgagggatctgtctgtgcagagttgcactagccagcagctcatggggctggaacccaagcccctgcagtggcctcccgcctctccctgggaactcggacccagacagattagggcatctcacaggccaggctcgcagccctgggcctctggcagggggtgggcgtcctgtccagctccctgaggggtggggctttgtggggtgagtcaagagggcggggcttgaggcagggcattgaaaggcggggcttggggaaaagtttgctgaggaggtggtcctgtgagttactgcactaaggggcggagcttcgggaggaggcggggcttcctcaggagttgggaatgtgggcggggtttagaggggacggacatgaggatgcgctctgtgaggcggaggagcttggagccgggggtggggctttgaggaggtggggctttgaggggcggggttgtgggcggggtttagagaggtgtgtccggagggtgatgcggtgagtggtggtggaacttgaagtagagggcggagcgctgaggacgcgggggttccaggggtggggctgtaggcgggggttagagggcgggatctggagggtgctcactgaggcggtggagcttggagccggccgcgctcagagcgcggggctttggggtgaagccatgtggggcggaggttacaggggaggtgacagtaagggtgacgcaagaggcggtggaacttggaataggccttgctagagggttgagatgtggagtgctaaggggcggggcttggaaggtggaacaaaagctctagctggagccgggggcacgtgaggggataatcctcaccagatacctgctaccacccctctcccagaactggaagaggcccaccaaaagtgcccaccatggtggtacaagtgcgcccacaaagtgctcatatggaactgctgcgccccgtggctgaagttcaagaacatcatccacctgatcgtcatggacccgttcgtggacctgggcatcaccatctgcatcgtgctcaacaccctcttcatggccatggaacattac

SEQ ID NO: 31788 - DNA, 788 bp, Artificial sequence
  DNA replication origin
caggcagggcaaccgagcaaagatgagctgggtaagggcctgcccagccccctggccacatgtgccctgcccccgggctcctcagcagccctccccctctccatccctggcatctctcaaggaattgtgctgggattttagggggcttggggaaggcaacggagggtccttcctaggtggctcccatcccagcctggccctgctcatcatttctggttggaaacctgcatggggtgcgagctcagcctcaggggtcttctcctcagctccaggctggcctgagtgttggtcgagacctgctctgctgacttacgtcgccagggtctctgccatgaccccaggccaggcccagggaagccccgagtttgatgctgaagacatagaactccttgtcaagtgttggggtggttctgaaaaggtgtctgccttttgggggcaactctggccatcagaaaggaggacagatctgatggtggtgggggtggggacagtgcatcttcagggcaggggcggggttctgagaaggctcctggaggaggcttaaccagagaggcaggaaggattggaaccttcagggaggggtggaaaggctctcttcaaacggaaaatctggccctgaggcctcagagagcagcttgggagaagggaggggacgctggaggagggtgtcaaggaccagggaacaggttatagaaacagtcaggcccttgactcctgtcacttccccggggcgcacagctcacgagtggacagggctctgtccacagaagccaaggcccccgctccct

SEQ ID NO: 31789 - DNA, 832 bp, Artificial sequence
  DNA replication origin
ctggcgagctgtccttgccctcagcaaggttccttgttctggtcacaaacagcccaagggctaaggctcggctccggaggggcatgggtgacccaagggacacagaacggggctgcagtttcttcaggagaggagagcaaggagccgaaacagtgactttgcttggcctgtttgcatggctcagaggcagggctgtggggggaggagtgcggcaggaggccggggtggggggtgctggcggctcctttgctctgctgagaacaggaatctgcgagatgccagcagaggacacatcccaggctttgcccacgtccctgcccctcccccagcccacccggcacggctgggctcttttcctagagaagtcaagagcgctgagccctgccgggaaggcgagggggacatggggacgggagccagaaagcccagcttgaggggaaaaatatgtgaccacagcaaaaagggtactctgggggaccagaaggggtctgggggcggggggtcttaggaggagacacagggccggagagtggggtccgggggtcggggctggcacagaacacagccccctcccttcctccctgctggggtgggccgtggctggtggagaaggcagagtggcctgagtggagttggggggatgtagtttggaggcagggagggctggttctaccaggaccctccggattcttctgggccatccccaagtcccctgcctgtggccagtggcctcactctgtgtggcagtggtatggacagctatggtcactgtgctagcatttggagccacatcacctgtgcgggaccacgtaaatagacccaagggccttgg

SEQ ID NO: 31790 - DNA, 1506 bp, Artificial sequence
  DNA replication origin
actccgtggggaccacaggccacagacagaggagggctgggcagagatgggcatcgggcctggcaggaacttcttgaaccacgggcaggcctggcccccaggaggggctcggcaaggactgaggctgtgtccacagggtctgggcggagctgctgtggggacggggggtgggcagcgcctccccaggcctccctatgcttctgtcgaaggctgctctgacctgggctcagctcactcggggcccagggcagctgccggagctctgggctgccaggaaagatggtggcacgggactgccaaggctgacggatttgggagaacaacggttgggcgacagaactccccaggggtttctccagctggcagccagggggcacttcatagcggctccaccaggggtcaccagagccccagagtggagggaggaggtggggtccatcaacctggcccccagcacagccctccctcagcccgggacggatgtccagccaggggggtgggcgtgggggtggagaagggacctggatatgtctgtgtggtccagctaaacagctgggggcgggggtgtgcatgcacttgtgtgtgtctggtgtgcgatgtgagggtacggctgtgggtgtatagatgggcatacgcttggcgcacatctagtgaccatgctagtggtacttctccacatgaatgggagcatgtcacatgcatgaaatccataaacacaggggcatggctgtgtgtgcgcgtgtgtgtgtgtgtggagtgggtgtgggtgtgtgtggctgtaggagtgggtgtggctgtggctgtagttgtgggtgtgagtgtgtgtgcttgtgctgtggtgtgtgtacacacaggcaggcactcagtaagagtcttgtgtctgtgcaatatggcatttgtgttgctcagggcacaatgtgactgtgggcacaactagaagccatgtgtatgtgcacaagcctgctgcgcgggtgtgagtgtgtttgtgcgtgtgagctggcggcatgtgtgtgaacgggtgtaacagcagaggaagcatctgcgtgaacgtatgaagggtgatttgcacatgactgagcctgtgggagcacagcttttgtgtgggtgcgtccgtgagtgtgcactcgagtgactgtgagagtgagccagcgactgtgtgagtgtaagccagcgcgtacctcaggagtgcttctgggaataagtgtggagattcgagtatgagatgagcctgtgtaaactgtcgaggttgggagaagaaccacctatgtgggctaatacatgtgtcccagtgagtgagtgtttgtgtgcccttgtgaatgggtgcgtgtgcccgggagtctgtcactcctggagcagtgaggctggagcccaagtggtcgcaggctgagcccagagtacacccggcgagggaactgtggctgaggctcccacctgaagattggcccagtcctcaggtttcactcatgaccctgtgacatcagcggcagcagctgtcctcgccggccc

SEQ ID NO: 31791 - DNA, 1185 bp, Artificial sequence
  DNA replication origin
ggaggaaggaaggaaggggaaggaaggtggggaacgaaggaaagaaggaaggagggaaggaaggagggaggaaagaaaggaaagaaggaaagagggagggaatgagggaggaaggtgggaaggagggagggaaggagggaggggagggaaggagggaaggaaggagggagggaagggggagggagggagggtaagggagggaaggaaggaaagaagggaggagggaaggaaggagggaggagggaaggaaggagggagggagggaagaaaggaaagaaggaaggagggagggagggaagggaaggagggagggagggaagaaaggaaagaaggaaggagggagggagggaagggaaggagggagggagggagggaagggaaggtgggagggagggaagggaaggagggagggaagggaaggtgggagggagggaaggggaggagggagggagagaaggagggaaggaaggagggagggagggaagggaaggagggagggagggaaggaggaaaggaaggagggagggagggaaggaaggaggagagagggacctgaagacactgagtctctgaaccagttaaactatagaccaacttcattactgtcctgtcacatgagccaaaaaagcccacccttttctcttaacctagtttaaattgagtttcagttacccacaaacaaaataattctgcaaaacagaaccacatctcagaacctgacacacaggaattggcctggtcacaccccactccaccccaaccccagcctgctcagtcagcttcctccatgagtggtttggttggggtgatttcctgggagctgcatcaggatgctcccccatgggtggtggcaccctgactccgggggctgggaggggaggctctggtactccaccccacagtgcagttccaatggagtgggacctcaaagccaggtccccatcacggggcatcccacctatgcaatgcgctcacttgtaagtcctcagagtacctgcaggtgtctgttggacaaaagcacacccgagtatctcaccaggataaccataatttgcagaaacagtgcagctagagcctctaggcagaaagttgaggtttcttcactgttgaattttcaagattctctctctcctgcatatccagtcaataacataattctgcagagcaatacttagttcctttcct

SEQ ID NO: 31792 - DNA, 1112 bp, Artificial sequence
  DNA replication origin
gccggcccggcggctgctgctgctgctgacgctgctgctgcccggcctcggggtgagtgaccggggagcgtggggtggaggacagctcgcgacggccgggtcggggccggggcagcgtcgcggcgccggggctggagtccgagctgggagcgcgacggcggcggccagatgccccgtgagcccagccgtgggaggctcgggccgggcgtaggaggcggcaccgggccgggagagcttccctgacgggagtcgcggccccaccgaggcgtcggccgcccgaagagcctcccaagccagcgcggctgtcacgggcagcggctccccggaccccgcgggctcgggcgcaacttcgtggcgtcctgcacggcacttgggggtcccagaaggccccggcctgaggaggccgcccacctgcgggaccctcctcctcgcgggcgggcgccggcgctgcctggcgggggccgcggaggagccgaaagggcgttgggatccaggggaagggtctgtcctgcgcttcgaatccttgtttgaactttttaaaaattcgaaaactttggggaacgaatgcaacagggagtaaggactctcacccgagagctggcttctgccacttgccctgccggtttcttggtactgggaggctgcaggcttccttctgtgcaccgagacttccttgagcaagtggagctgtgggaattgcactcttggaagatcccgcatgggttcgaggtgaggccgcttcagaacctcaaatgaaagactgtctcctcgtgggagagcacctggggccatcagaaatgtcttttcatctttttctggaggagacgaatgatagggcctggtttacattcatttaactctttatgaccttcactcagctgtggatttgggggcactttgtgggagacttggcttttttttttcttctggttggaagaacctaaattagcgaatgtttttcacaaaatgtattgttcaggatgtgagcgtggcaaatttgtccgtgttctgtttaatgacctctttaaaggtactgtgtactctttaatagggatatcatgtaccaggtgtcccagtagagcactgacatgtgtgtgcctgagtgccagcca

SEQ ID NO: 31793 - DNA, 1764 bp, Artificial sequence
  DNA replication origin
ggtgccgcctcctacgcccggcccgagcctcccacggctgggctcacggggcatctggccgccgccgtcgcgctcccagctcggactccagccccggcgccgcgacgctgccccggccccgacccggccgtcgcgagctgtcctccaccccacgctccccggtcactcaccccgaggccgggcagcagcagcgtcagcagcagcagcagccgccgggccggcatggcgaggactcggccctggctccgggggcggtacggacagaggacggggcgggggcgccgcgacgacagcgaggcggtgaccgagcctcagcggacgcagaactgactaggcagcggcggcacccccattcccggccctataagcgctgggtgccgcggcttcttccggtcggggcggagttgcgggcggggacggggcggggccaatctaggggcgtgttcggggcggagatgggggcgggccgagggcgtgccccgggcggggatgtgggaggggctggctcggggcggggccgaaggcggtgctggcatctggctggcttcgctcatgaggcgtcggcggctgtaaaggaccaggcctcggcatccagcgtctgggggcgctgggggatcgaggcgcgaagcttgtctgtggctgggaaagaccggcaatgccccaccaggccgtcccattaaccctgccgagggacctgccgcgtcagacttcatcggggaaaagggcgggacacgggcggtcccgggtgcctagaagcctccttttcgtctttccgccgtggtggaatcatccgcaaggtttaccgaggcgacctccggagcgaaggtttcagcagctaccggaggcttccagcaaacacggcgcagctgccccgcgcggcagtcgcagtgttcacagccctagggttctccagctgtgcctcgtcttctctggggcccctttcttccttttccttgccctcaggaattcccctcaagtcatatccaccagccatcacttccgcttggaatgaaccacggccaagtcactcaccaaaaattataaggaggaaaccatttcggccacttgtgtcacgtgcgttgatgtgacacgtgtggatgtgaagtttgagatggtctgcgtcacaactcgttggagggagtgggtgggttgaggcctcctgcaaggtctatgtgagggtgtggagtactaattagagttaaagagctcggcagctgtttggtcactggcactggcctccactgagagggacatgggtagggaggacacgtcttttgcaaggaaagacagtaaactgagatttggagcccagggaaaggtatctaacttatcctaggagaaaaagaaaacggctatgaaattctctaatttttcctgacttgcttatatgagagcctaagatttttcaggtttgaaggaaaagaataagcactcctagacaaaacaacaaagtagtagtgggggactggccaaatgtccagtctgtgtgcattgtggtcaatcttatccaactaaaacagaccaaaatgacagtaagcccaaatcctgcaaatagagctccccattcctaaccccctaggcctggattacagtgaagggactaagtcctaccgcatgctggagactccaacacatctctgtaagagtgggaagaatcttggcaactgtgaaaacagtagagacattttgaaaagtgttacctgaatgtctaaatgcaaacagaggtttgggattggcagagagatgtactgagaggcccagcac

SEQ ID NO: 31794 - DNA, 1048 bp, Artificial sequence
  DNA replication origin
cgagcccgagccatccggcggggccccgaaggaagggattgcccgggggtgtcgcgggtgggcgtccccttcaatacctgaaccatgacagcggggtggggggccgagccccgccacgccaagggccgccggacccgaccggtactttgaagcccgcggggtcgatccgcgcccagcccgggccttatccgcggggcgctccctccaccgcccccgcctggccctgagactgctcacccaagatccgctggctgcctcattgtactatgccggcgcccgtgctcccggccgcgcgactccggcttcggctggggcaccggccgcggtcctgctgccctgccgcccgcccgcccccgggcacacgccgccccgccccgccggcggacccgccccgcgcccgcggccgccgccgccaaccagagggcgcgggggcggagcaaacggcacgccaggcccaaccaatccagttctaccgcgcgccgaggtgaggccgcggaaatgggggagcgatttgtcaggtctgttaaaggggccaccgcccttggagctagggagaggagtggtggggagggttacctggaagagccccaggtgagggggacaaaagcttcactctcccaacggggctgcacactgtccccagctctttgcacttcttaatttcctcttcctgcagtctagcagcaacaagtgcccttgagacgagggctgggggttgaggtggggtgactgaggcgcggagaaccaggggtatccccctgggcaaattcactcgatttgcattttagagggccatcagacgtatctatccccatccaactgcagacattgatttaaaaaggcaaattcccagtttcccgcattatgtacttcccccacctgactaccacactaccacatcctatcctgaactaactctgttactagtttttttgtttgagacggagtctcgctctgtcgccaggctggagtgcagtgccgtcatctgggctcactgcaacctccgcctcctgggttaaagcgattctcctgcctcagccttccgagt

SEQ ID NO: 31795 - DNA, 1240 bp, Artificial sequence
  DNA replication origin
atttgtattttaccacaatttaaaaaaagactttgtttgattggatatggggttgaaagaatggaagataaacttcctggattagattcccaggaggatgtgtgtgccaccaaactaaaatagaaaatgccacacgcagctgggtgtggtggctcatatctgttatcccagcactttcggaggccgaggcaggaggatggcttcagcccaggagtttgagaccagcctgggcaacaaaatgagaccccagtctctacaaaaacaaacaaacaaacagaaaaagataaggaaggaagacaaagtgatggtggtgcagctgcgtgtgaggggccagtaggaggactgggaggagacatcaaaggtcagcctgtgttaactggaggctcagggcagaggccagggctggactgtgaaggtgggaggagtgtgaacttaggggaggaggggggaatgtggaggtgttgagaggggagctggtctccagggaggataagaccaggagcccgcagagaccaggacagggttcagactccaggagaagacaaagtaagtccaaagtcagccatgggggagaaggaagagggtttgttagagagtgaggagacaaagcagggaagaggatggaaaaggtcaaggagcgaggctttggggcacgatcaaaagtcaaaggcaggaaaggggtacagggagccgagggctggaagtgtccgttgcatttggcatcaggtggtccttggtgacccctcagcaagaggagacccaacagccggagaagtggggcctgaggccaggctgctgggaggcgaggcgtgtctgagaggtgaggtgggtaggcacagattataaactaactttcagagaggttcgactgagaaaggaaactagaaaggccagatagggggacaccagataaacggtgggggtgggtgtctgcttgtgatttttctttttcctaaaaaaagagttcccattcactgagagaacagagccagaagcagaaatagagattctagaagtggtggtaggggagagggacttgaatgcacgtaggcgtggggtcctgggggtgaggaagggtctcagcctaagtgcctggctggcccccatcagctgaggagcagggtgcatgtgtcctccgaggccgggagggaaaccgagaggatgggtggagaggctgataagcctgcagccaggcccaggcgggaagttgagggagttccctccagatgactgttttcta

SEQ ID NO: 31796 - DNA, 1426 bp, Artificial sequence
  DNA replication origin
gagcttcctttgttgtctctggaatccccccttgccctgtgtccttgagtctaggacctggcacaggtacatgtgatgccatgcccagggtgctgtaatccaggcactggcctctaaggaatggttacggagggccagaccaagtccagcagagccagctctcaccaggcctgtgcagtgggtgagcatatgtgatgggaggacatatgcagtgggtgggcatatgtagtgagtgggtatacgtagtgagtgggtatatgtagtgagtgggtatatgtagtggatgggcatatgcagtgagtgggtatatgcggtgggtgggcatatgcagtggatgggtatatgcagtggataggcatgtgtaatgggcaagcatatgcaatgggtgggcatatgcaggggttgggtatatgcagtggataggcacacgcactaggtgggaatgtcatgggtgggcatatgtcatgggtgggcacatgaaatggacaggcatatgtcatgagtgggcatatgcagtgagtgggcacatgcagtggatgggcatgtgcagtgggtgggcatatgcagtgggtgggcatgtgcagtgggtgggcatgtgcagtgggtgggcatatgctgtgggtgggcatacgcagtggatgggcatgtgcagtggatgggcatgtgcagtgggtgggcatacgcagtgggtgggcatacacagtgggtgggcatgtgcagtgggtgggcatgtgcagggggtgggcatacgcagtgggtgggcatacgcagtgggtgggcatatgcagtgggtgggcatatgcagtgggtgggcatatgtgatgggtaggcatatgcagtgagtgggcaaatgcagtgggtgggcatatgtcatgggtgggcatatgcagggctgggcacctgcagcaagtgggttgtcgcgggagactttgcccacactaagagactctgagtttcagttttctgccgcctaacatgatatacttgcgactgcctgtaaatccatttttaacccccaactagggaagctgaaggaagaggaacagcagggccaccagctcagcccggtggctgcattgttctcccctgacattgttctcaggccggctctgcttacccagaaggcccccgtaacccctggggaatccgatgagattgtttttcccaagactgggctcttcaggtgtgagctgcagttcttgggccacgtaggttactgtggcatttctgcagcaggaaagaggaaggaacttctgatctgtggggcaacggcatcaacaatgtgcacccccaccagccggcagcgcgaagaggaaaggagctcagtttccatagtgataaatcacgaggaagggagcctggagggagccggcagtaagacttctcccttcccctggctccctgcaaacgcattcccaatgccaga

SEQ ID NO: 31797 - DNA, 870 bp, Artificial sequence
  DNA replication origin
aatggtgggtgggccctgacctgagagagtggcgcggggaggggtgaaagcgcggcgatcctggaacgccagcgggcgttgcggcctatgcgcgaggggcggggcgattaggtcatagagcggctcccagcgttccctgcggcgtaggaggcggtccagactataaaagcggctgccggaaagcggccggcacctcattcatttctaccggtctctagtagtgcagcttcggctggtgtcatcggtgtccttcctccgctgccgcccccgcaaggcttcgccgtcatcgaggccatttccagcgacttgtcgcacgcttttctatatacttcgttccccgccaaccgcaaccattgacgccatgtcgggttattcgagtgaccgagaccgcggccgggaccgagggtgagtttgggagccgagctgtcaggcctggcgggtggggggatgggagggcgggtcagggtggcggccggcgggggctttgcggcttggacttggcctttccgggctatcttgggacttcctttcccgaaggcttgcgccattttgatattcacgtcacagtgattggaagagatttgacggtgtagtgtcttcaagcttgctttttgtgtggggattggggagctgtcggggcggctgccatttggtagctgttgagggagttgagagggagcgtattgtgcggatgaaagcgggacgcttcgaggcagacgaaggaacatctgttaggtgcggcgtttcgggaggtgtttttggggtggccgggcattctgtgggagcgaggggaccacttccaaagccctggtgctgttggggtaggagggcggccggcatcagccatgtggctgagtcgcgagtacaaaa

SEQ ID NO: 31798 - DNA, 1235 bp, Artificial sequence
  DNA replication origin
gttctgctccggcgcccccgagcaccgcccgcttcagccgaccagccccgtcggctactgggcctcgccgagacgagaggagggaaaggcctcggcggccgcgaggaggcggcgggggcgcgggcggaggcggcgcgggcggccgcggctgccgctttgttgtgcggcccgggccgaggaaggagaagtgggaggaggggggagctcggcgtcccgctccctccgcggctcatggcgacgactctcggcacatccgggaccctccggccgtggcggccgaggcgccggctgctcgggccccagccccggccgctgtggtgactccgccgcgcctcgccgtcgcccccgtgccgcccgccgcccccgccgcccccgccgccggggacatgtctaaccccggaggccggaggaacgggcccgtcaagctgcgcctgacaggtgagggggggcggcgggccgggctgggcagccgcggggtgggcgagctggcggggggtgcctgtggccttgggaagggccagggtcgcgatcaatgatgagttgggggtcggaggaatgggaaggcctagttcagggagagtaattggaaaaccacttgctctggtttggacattgtttaaaaagccgaggatgactcggggcggggggtggtgttttgtggaggggagaatacaccggttcgcatcgcaggcggatttcaggtcggaaagtcttggtcaaggagccagacgctgcctcccggggctcggggaacagcccctgggctaccgcccaggtgagatcgtgaaggggatgaagagctcccgtggcgaggattattgaatccggttgctgactgcgcgcagtaaacactccttaaagatggagcgcttaacgggagggtgtgcgtgtgtgttcccgggttgttaccttgcacacacccagttatgcccgcatgaaaaacctttactccccgccgccggccaccgctgcccgggccacacaccttaaactcatgtctctgaggtgaggagacaggttgacttttccggtgtgcctgtctgatccgacggcttgggctcattgtacactgtgttttggaagtgtctgattgtagggtggcatgtttggggttgttccttttaggccgcagaacttgtgtctaacttctaacgccagacctgctttaaaaacacacttttttggggggggtgcattgctaagtatgtgctcatacaaactttcgagcaaacttt

SEQ ID NO: 31799 - DNA, 1012 bp, Artificial sequence
  DNA replication origin
ggcgcctcggccgccacggccggagggtcccggatgtgccgagagtcgtcgccatgagccgcggagggagcgggacgccgagctcccccctcctcccacttctccttcctcggcccgggccgcacaacaaagcggcagccgcggccgcccgcgccgcctccgcccgcgcccccgccgcctcctcgcggccgccgaggcctttccctcctctcgtctcggcgaggcccagtagccgacggggctggtcggctgaagcgggcggtgctcgggggcgccggagcagaactctgggctcggccgcttcctcctccacccgccctcttgtctgagggacccgggacctggggccgccgccgccactcgtcggctccggggggcggggaggagacgggaggcggggccggcggggcggggcggggccggggcggggccggcgggcgcgcgcagggtgccctggcgggcaccggcagtcagggagggtgtgagctgccgccgagggtcccacgcggaacgctgggagggagcaggcagggagcaaagcggcggcgggcgcggcagctctgtggcacctggaggggtttactgtccgggccacttaagggagaacttttgtccaagcagggccaactgcattttattagacgcccactgcgtgcagggcgctccgagaggctggggcgaggaaggttagaaccgagtccgctgcctgccgggaacttggcgtctttcgggcgagggaagagaaagcattcccacgccgatggttccagcaaaaccccaggaatgctctgctcctggtcttgtagttgacacctccatccgggactcacctggtggaggagatcaggttacctgccgactcccgctcttttcaggtgcagccaaggatggggagatgatacgtcttaaaggattaacaagataaaccttggagagtaatgtatgaagagttgttcatacgctactgtatttcgttatctcaggaggagaaagagaaaagtttttaaaaaat

SEQ ID NO: 31800 - DNA, 1145 bp, Artificial sequence
  DNA replication origin
gccttccgcagtgtttgtgtccctgggaacttgagattagggagtggtgatgattcttaacaagcatgctgccttcaagcatctgtttaacaaagcacatcttgcaccgcccttaatccatttaaccctgagtggacacagcacatgtttcagagagcacagggttgtgggtaaggtcaccgatcaacaggatcccaaggcagaagaatttatcttagtacagaacaaaatgaaaagtctcccatgtctacttctttctacacagacacggcaaccatccgatttcccaatcttttccccacctttcccccctttctattccacaaaaccgccattgtcatcccggcccgttctcaatgagctgttgggtacacctcccagacggggtggtggccgggcagaggggctcctcacttcccagtaggggcggccgggcagaggggctcctcacttcccagacggggtggctgccgggcagaggggctcctcacttctcagatggggcggctgccgggcggaggggctcctcacttctcagacggggcggatgctgggcagagggtctcctcacttctcagacggggcggctgggcagagacgctcctcacctcccagatggggtcgcggctgggcagaggcgctcctcacatcccagacggggcggcggggcagaggcgctccccacatctcagacgatgggcagccgggaagaggcgctcctcacttcctagatgggatggcggccgggcagagacgctcctcactttccagacggggtggcggccgggcagaggctgcaatctcggcactttgggaggccaaggcaggcggctgggagatggaggttgtagcgagctgagatcacgccactgcactccagcctgggcaccattgagcactgagtgaaccagactccgtctgcaatcccggcacctcgggaggccgaggctggcggatcactcgcggttaggagctggagaccagcccggccaacacagcgaaaccccgtctccaccaaaaaagtacgaaaaccagtcaggcgtggtggcgcgcgcctgcaatggcaggcactcggcaggctgaggcaggagaatcaggcagggaggttgcagtgagccgagatggcagcagtacagtccagcttc

SEQ ID NO: 31801 - DNA, 1197 bp, Artificial sequence
  DNA replication origin
gcacagatccagctctgaatctccctaacattcaggcatggagccccgaccgcatttctggtcagcagctaccccctggtcacgatcatggactttcccattccccagggcctggcactgaccacccatccaggctggcattcagaagtactgatgcccacccttccctgtactggacatagtcatctctaagaagggcagagaaaataggtccatgggagctaagctatgaggaggcaaaggcctaagaatgatataatggactttggggacttgggagtgggggaagggtgggaggggggtgagggacaagagactacacattgggtacagtgcacaccactcgggtgatggctgcaccaaaatctcagaaatcgccactaaagaacaaacaccacgtgctccccacaactattaaaataaaataaacattaaaaaataggtctagagtgaggtcaactactgaggcctgggaaggaagtgagggggcaggtggggcccatctcaggcctctgggggccgaagggagccagggactaaagaggtgagaaccaggcgcaggctccagggagacccccagagaccatgtggcctgcaggggagttgggggggtgtgcagggagatctctggggggacagcaatgtggggtgagggtgggaggggtacccaagaagctgctctctcctaagtcaggtcctaggcaggcagaggggctcttgggacagcctggggctgcaggtgagtccctgggagggagacagctgaggcggctgccccagctggagggtgggggtgagggttgttggaggagggagtacaggcaaggggctagctggagtcccctcaatttggacttagcttcctgctattaccaacgccccttgccaaaggctccctggctggccctgagtggggacaggtgggtctgtcccgaggccagtttctttctctcaatcacagcggcctcgggctgccctcggagtttgtcctaggaagtgggtgctgggcctggatccagagaggaggggcccccaggtgggttttaggatttgggaaagggaggggagagagtggagaaactgctgtggccgccctctagtccctcaggggcaagggctcactcacagttcccagcggaggaggagaaatgagggcccccgctccttccagtcggggctgcctgctcaggtgcggcg

SEQ ID NO: 31802 - DNA, 1069 bp, Artificial sequence
  DNA replication origin
ggcccattcactcgttcattaggcatgaactagccaaatagctgcagagccctggtgagcctttggatctagagaggactcaggcacagccacggtcctgggggactcaccctcttggataggaggccagcaacagaagacatggggccggggctcagagtggagcatggggttgagagtgggtgcccaccggggcagggcctcatgagcccttgccaggaatgtgcacgttatcctgcagctgctgtgaggcttttagcagagacaggaatgggattgagaaaaaaatccctgtggccagggcctcaagaatggccgaagctcttggtggtctcgtgggcatgtggtggtaacagaggtttgggagatggatgggcagggtctgggggccgagggaggtgggagggaaatcgggttgagttcagattcccagctggcacttgtgggcagacagtggtgctgcttactgagttggggggtgggggggacttggggaggagcagggtggagaaaggtggggcctgcctggatttaggtgccagacaaagggaagagaagcatgagagtgctggctcagaggacaagaagtgtccagaagaaagatgcacaggaaggtgacgtgagagaaaggccatataacacttatccgaagtggccactagaagctcagctggtcaggggggtgctgaaggcagagggcagtggtcaggagtgaagtgagggtgcgaattgagtgtgtagacaacagacagaaggagagagagagacacagcgtggccagagggggtgtaggtcatagatggaaacatccccaggttcaggtgggtgggcaggagatggggaggctgaagatggggaggagattgttgctgagaagggatctcggaagaaagtgggtgcagaacagagggggcaggatgtggggatggcatggcacgggggcactggggagtgtatagggacccccgtctgtcaggcggcagctcagggcttagggcaggctactgggcaaggccagggacccccagaacagaggagttcctgccatggatggtgtttcacagccttg

SEQ ID NO: 31803 - DNA, 823 bp, Artificial sequence
  DNA replication origin
aggccattcccccacctccaggggctccgctcagacgggcaggcaccgtcccaccgtcactaggacagagaatgtggagaggccgggaagtgcgccaccgggagcctgcgcaggaaacggaggggcgctgcgggggaagagcgctggcatccagccacccatcccagagaagctgcctggctggctggcaggggcgcgaaacaggaaccagccgcggtctccagccccgcccgccgggtgccgttttccaccctggccacaaggcggcgggctgccgctgcaggagccagagtgaaggcggcgcagacccagggaagccaaacgaggatgacccagtctgggtggaccccctgctgctgccaagcgcttcgaagccttaattcatttaaggctcacaaccctaatccttaggtattgtgcttacaccagaggacgctgggcctggggggggagggggtggtcctcgcttgtaagttaagtggctgtcagcagctggcagctgccccagcaaaatccagttcccctttccctagtctcaaaacctgagctctgcattgtaacgagacaggcggagggaacacccagcagcgggcctacggaggcgtgtctccttcgtctgggcatcccggactcagtcctggcacatggtgggcatcagtgttcatggtaatgacatcaggcacagcgaaataaatcagaggctcccaaggttcagaggtcatctgtccatcccctccctttgtgctaaagaacaaaccgagaccctgagagaggaagagagctgcctctagatcatcacacggccggtggcagatggcagaac

SEQ ID NO: 31804 - DNA, 942 bp, Artificial sequence
  DNA replication origin
gccccttctacctgcccgcgcagtacgtgcgcgagctgcctgcgctgggcaaccctgccgctgacgcgccgccaggtccccccatcgggacccgcagcccctgagccgctcgcctacgactaccggttcgtgagcgcggctgtggcagcggcccccaacggccccccagcggagccccgaggcggggccagctccctgtgcggccctgcgcagcgcggcgccgcgagccagcgcagcagcctggcgcccggcctgcccgcctgcctgtacctgcggcccacggcgcccgtgcggcccgcgcagtccctggacgacctgacgcgcgccgtcgtctcgcctcccgccggcaacctcggaagcagcggcagcttcaaggcctgcagcgtagcgggctcctgggtgtgcctgctgcccctgtcgcgcagcgactcagagaacgtctaagaggccatccaggaggtacgcggcccgccgcggtaggagatcgtgaagcaggtacgaccccgggcgcggaggcggggaggctcgctgaggacagcgcccgcagggagcctgggctcgaggagacccactccgctcagcgtcgggcatgacgcccacctctgtcggaagacttcggatgagctccctctccccagccgcgaaacagtgcaggcccccatccctcatctgcaatttccaggctccaaagctccctggaagcccgaaagatttttcgtaatcaaattggtggcaaaattgcgcttgaactgatatgaggctgttgatggtctttatttatcgcacttgtgtgaatattcatgttttgctgcagaaatgcaaataagctcgatggccggctgctgccccaagccctgctgggaggttatgtaacctacagcaggtgggtgccacatattatctttccaagtcccagctgttctatattccgaagtgcatctg

SEQ ID NO: 31805 - DNA, 1034 bp, Artificial sequence
  DNA replication origin
gagaagaccaccgactcatggctttggtggaggggcgccggcagatttagttaagctctcccccatccctgacacacccagccggggcgggagcggggcttgtgaccactccggagagctttgagggcccctgctttgggactccgcacggacagtcactgtctcagagtgcattctccaggggccactctcttggggacactgtaggggtcacagggcaggtgggcagcctctctcggggggcggcgtgagagccggagagcagggggcgggggcgggcccggctcgggctcacgtctgcgttgaagccgctggggaaggggagagaaaccgagagaaccggttcccccgccttgacagcggaggcccccacaccaaggcccttggactaagcggggcagggacagcctccaggtagagctgttcgccggggcgcctgcagagcccgcatcccaaccctgaccccggggccggggcgcaggctcctggagggaggcgtccaggcgggacagggcccggggagcggcaggaaatgggctgctcttcccacttgactgacgggaaaactaaggcacggtcaactatcaagcaagcgtggtgtcgaccttagagcaggtaatcacccctcgttttaaagccaaagtttccctcgcagtcgatttggaccaagactacccacaatctccccaccgcaggactgaagcgaggctgaaatcttagaatcaaccccacggaatgaagaggttgtcctaattccagcactgagtgtaagaatggaagccttgcatgtgattttattcaagtcctcattttagaaatgggaaaactgaggcccgaaggcgaacggcaagtgcagcatcgggactcgaacccaagtctctcctcgagtgctgggctattccgggctcagtggtcttgacttccgcggccctcttccttgttgcctgcaggaaaatgccgcggccgcaatggcggcggatgtggagggggacgtgtacgtactggtggagcaccccttcgagtacaccggcaag

SEQ ID NO: 31806 - DNA, 1022 bp, Artificial sequence
  DNA replication origin
ggaacgcccgcactagacaaccagccccagaccggcattcccagagccgcaggcgggagggacgcagggactccgggacagcaaatccccgggggagaagggaagggggaaggcgggacaggggaggcccaccctccttgggctccgctagcgaccagccagcgccccttcagacgcagccttcctggctccggaccccggctttctgctccggtcctcgtcccaatgccccccaaggtccccagcagaggcattcaggttcctcctcgccccgcccagacgcagcttctttgggtatgggtgacagcactcctgagcgtcgctgtccctattcgctgccgttgccagctccgattccgcgaaacctctccggcaccacctcggaagccccgcccagggcgatggtccgggcctaacctgccggccccgcccacccggcccttgggctccctgaggcccgcccagcagacgtgagtgcgctgcggggtccggggggaaggggcgccggggcagtgtccaccttggggtttgttggctctgggcagctcgatgaccccgcctccggggcccagtgtgcttagtgactcaagtgtataccctttcctagtcgaggaacgcttgacaaagtggcgaaggagccctacgggagtcccggattggaccctgctccttcggtccctcagcctcggcaagccgcggtctcctggcccttggcctgggtcaccttaggaggcaggaggagatgtggtcagtgtgggagcttggaggggccatgcacttccggagaagaccaccgactcatggctttggtggaggggcgccggcagatttagttaagctctcccccatccctgacacacccagccggggcgggagcggggcttgtgaccactccggagagctttgagggcccctgctttgggactccgcacggacagtcactgtctcagagtgcattctccaggggccactctcttggggacactgtaggggtcacagggcaggtgggcagcctctctcgg

SEQ ID NO: 31807 - DNA, 1283 bp, Artificial sequence
  DNA replication origin
ggagtggtcacaagccccgctcccgccccggctgggtgtgtcagggatgggggagagcttaactaaatctgccggcgcccctccaccaaagccatgagtcggtggtcttctccggaagtgcatggcccctccaagctcccacactgaccacatctcctcctgcctcctaaggtgacccaggccaagggccaggagaccgcggcttgccgaggctgagggaccgaaggagcagggtccaatccgggactcccgtagggctccttcgccactttgtcaagcgttcctcgactaggaaagggtatacacttgagtcactaagcacactgggccccggaggcggggtcatcgagctgcccagagccaacaaaccccaaggtggacactgccccggcgccccttccccccggaccccgcagcgcactcacgtctgctgggcgggcctcagggagcccaagggccgggtgggcggggccggcaggttaggcccggaccatcgccctgggcggggcttccgaggtggtgccggagaggtttcgcggaatcggagctggcaacggcagcgaatagggacagcgacgctcaggagtgctgtcacccatacccaaagaagctgcgtctgggcggggcgaggaggaacctgaatgcctctgctggggaccttggggggcattgggacgaggaccggagcagaaagccggggtccggagccaggaaggctgcgtctgaaggggcgctggctggtcgctagcggagcccaaggagggtgggcctcccctgtcccgccttcccccttcccttctcccccggggatttgctgtcccggagtccctgcgtccctcccgcctgcggctctgggaatgccggtctggggctggttgtctagtgcgggcgttcccgttcgcggggaggtcattggcaccctgaatcacccactgcgagcccttccaaccggattgtagacctgccagctccgggcccacctcccccaacagggcctttcccggagcaacccggccgggcctggaaaaactccgagagggattcccagcgcagggacgcccaccggagcgcagtgtctcgggctggataagaaggggacccggccacagctccttcgccaacctgcgggaacacagagaaggggagggattggtgggggccgagaggatccctggagcgcgagagcgcacccgtcgccaggaggtcccctgcgtccactgcccaggcgacgcaagctacagcggcgtcaacgcctgggtcggcgctaggggcctgggcctgct

SEQ ID NO: 31808 - DNA, 1365 bp, Artificial sequence
  DNA replication origin
cgtctctgcagaaatacaaaaattagctgggcatgatggtgggtgcctgtaatcacacctactcaggaagctgaggcaggagaatcacttcaacccagagacagaggttgcagtgagccgagattgtgccactgcactccagcctgggcgacagagccagactccatctcaaaaaaaaaaaaaaaaaaaaaaatagctgatatatggtgtacgctgggcatgtggtaagcactgcttagtggatctcatttaatcttcccaataatccagtgaagtgggtgttactattgataggaaagaaagctgagctgcagagataaggcagaactcccaaggcctaccagccgccaagcagcagagtggggcatcatacctgcctgaccccacgcaaagaccatcaccactgccagccgctgcctggctgtgctgcaggtggggagagacctaaaaggtagggagggagagaagattcctccagtcactattttctaagcatgtcgggcaccaaagaccaatgctgagttctgctgtgtgcccaccctggagggtcccaaagtgccaccaggcctcagacacactgagattctcagaggaagtgtagactcacgggtgggcaacgcctagcaggggcaaagatacagaggtaagggagttccagaacgagtgtggccagattcagcttcccatccaaccctgggcccccaggaggtggagtcaagaggggccatggcctggggtgtgggcttctcttcgtcccagaacactggcctgaatcagccagctctccgcacacacagccacgtccataggcacaactgtttctgggggcccctgagggcagggggtctgctagggctgtggtttgtgacgtgtggagtgagcgcaggctcagatcagggcgaggcagcttgtccagagaggcagataattcccaaacagaagacccccaaggcggagggccctggggctggactcctggcccccaggaggttgttctgagcttaccctgtggacggattggagggtggacctctttccccgcaagggtcaagagggagtgggggatggtgggaaggcaatctggccaggagaagctgcgcgggagactcccgccatccccagtcccaccatctcagccccgcggcctcttcctccctggagacagccaggatcccgggagtggcccaggatcccgggaaatgcaggggagggggtggcatctttcctcttcaggcgcgggcctggcccagaggcgacaggaagccaggacgccggggattgtctctcgcaaccgcagcccagccccagtccgggaggaagttctgccgggcgctctccgccggtgcctcactggttatagtgcta

SEQ ID NO: 31809 - DNA, 1758 bp, Artificial sequence
  DNA replication origin
atgggtttcctcttcaaaacaaacaaaaaaagtacgctctagaattggtctctttctctcctcattttctgtttgcagtgacccagcagagaatcctgcccagctcagggggccttgctgtgggtagccctggcatgggttgtgtgggtagagcccagtctccgggctggcttctgttaggtttgtctgtcggcccgtgtgatggctgtggtctctaacctgccagcgaagctgtgcttcaggtctaggccatcaggtttcttgaggggtagggaacccccatagaatagtgtgaaatctccaaggctattccaggctggcggagagagaattgtgtgtcctttggacactctggttgttgtcacaccccaggcagcagggagctttgggcaacatgtgatacataggcactcacctgctcattcattcagcaaatattattgaggctctgtgatgtgccaggcactgttctaagtgctggggacatagcaggcagcaaagcagtggccctgtcttcatgggatttagattctagtagaggagacgggaaataaaattaacaagtaagcatagtgtgtggtcaggtggtaataagtgctatggaggacagtaaatctctacctgtctacagaggtagagagtggaccactgcatataggatggccagaaaagccctcaccaataaggggatgtttgaggagatgcgaggggagagagggaaggagtcatgaggcaatgtacgtgtttcaagcaaggagaacaaatgcaaagaccctgcgctggggctgcgcttgacacatccagggacagtggagaccagagtggcaggagagaggagatgggggtgtggcagtgagcgacgaggtcaatctgacgaggcctgtgggccactggaagcactttggcttcagctaagggagatggcagccactgtggagttttggggcagggggacatgctctgacttccctttaaatgggtcatgatggctcctacgttgagggactacggggagaaggggagaaagaccagttaggaggttgtcatcacaagccaggccagagatgacagtgggtggggtgcggctggggagaggcggggattccggatgtgtggaaggcagagccaatgggatttgctgatgtaggctgcgaaagaaagaaaacctggggtaacaccaagatttttagcccaagcatctggaaggatgaattttgctatttggtgagatgaggaccattcaggaggaagcaggctggcagcaggaattcatcctggacatgtcagctgagatcctagtggacatgtatggcacaggtggatatatgaatgtggatttcaagaacaaggtccaggctggcgataaaaattgggagctaaagcctgagagcaggtagagtggtgagaaagtggcatctacagagaggagacaaggacccaggactgacatctgggcactctaacgtgagaggccacagggaggaccgagccagagagatagaagggtgggggcgagggctgaggagtggccttgggggttggcaacgaggagggcattgaccatctcagaagcagtgtcagtagaatgaggggagagaagcctacttggagcaggtttgagaaggaatgggagcagggaaactagagaccaagaggttttttgttttgtttgagacggagtctcactcctctgtcacccaggctgaagtgcagtggagtgacctcagctcactgcaatcccctgcctccccggttcaa

SEQ ID NO: 31810 - DNA, 1175 bp, Artificial sequence
  DNA replication origin
acaggtaacgttgcctctggcacccatcatatcccctgaattcagcatcaggactgatctgccatcagctctggcagggagagtcccttacaagtgccaagaaaaggaacatgaacaatattctgtgaccacagccaacaccacacagaacttcccagaagctctccagggcgagaacaccaaccagaaggaagtgacagcttccatcattctgtgctaagtgagctgagtgagtggccatctctcaccttccagatatttgaatgatacctaccattccagcagccagcacaagtcatttaatatgaatgccagaaacacaatccctgaggacaggtacaggagaccagatgccaggaaaaaccccggccccacccaagagttggggagagcccactgctcctccacccttatttaccacctgagcccctgcacccgccaatcatgctgctcagtctgtaactgcgggtctgagtgagcacctacatttggctgttgaggggcagctggtggagttggcaggcgactctgcactaagttctcaggttgaatgggagttgggtcgagggaaggaatggacgcagagttagggtgaagagttgcggtgggtcagcgggggtgaaaggacatggagatgtcatttttaacaagattgggtgagggtggtaggaaaggaggcagcaagagttcgggacagtttggcaaagacttagggatggggtgtcctcagtacggcaggagacgcaaaggaaggtatacagtgggctaggagactaaggacgagaagacacagttacgacttggaataaggctgagatcggagttatccagaagaaagcggtgagctcaacagggcacctactttgggggtgggtcttagatgagagggcggaggtagaatgtttaggatgagcagatcttggggagctggacaggggatgggggtgactgggataagaaagctgagccagaaaaggggaaacctgaatggtgggtctcggggaggtgagcgcggagcatcgggattaccagaggggtggggagagaggatgaggtgtgtcagggcggggcgaagggacgtggccgagatcggggttggaactggggtaaaatggggtcacgagtgaagctgcatttaagcaagaccgctggtgaggggatgcgggcgcgggctg

SEQ ID NO: 31811 - DNA, 1870 bp, Artificial sequence
  DNA replication origin
cctgggcaacacggtgaaactccatctctactaaaaaatacaaaaaattagctgggtgtggcagcgagcacctgtagtgactacaccactttgttgacggccgtccggacctgcagctgtccgggccaggtggctgcccccgcctccccccggccggggcgctggtgctggggtggggctggcggcggcggcggctttctccggctactgctgccccccctgggcgagctcagccgcgtcttgggcgccacctcagcctgggcggcggcccacctgccccggctgctgccgcggtgccgcgagcggaaccccggatgggtccggacgtgggcggcggcggcggcggcggggccggggcgcagcgctccgcagagggagccgcgggctgcttggtcggcctgccccgccggcccctcatgttggaaccgaggcggagggagaagggaaagcggccgggaaggggcgggcgcaatgggcgcagtgggggcggccggggccgggtggggaggccagaggggcagggcaggaggggcccggcctgcggaagcggttggagggagaaggctcaatccgaatggctggggcctcactgcggatcgccttcagccgccatcttgtttcttccgttaccggagcgcggtcacgtgagctgagcagcctacgagcctgggacggggcgaggtggcgcggcggccgctagggggagcgcgggagcattgagtcgggggcggagagcctggggcgccggggctgggcgcagcgcggcgcggctggactccgggcgcggtggcgccgttgagagagacgcgcagctcgcgaaatgccccgcggctaaggccttcggagaccatagtctccgcggacccctggctggagcccaaagccggccggacctcctccctgcgtctccccttccgcggctcggagaggaaggcaggagagcccccaaatattcccctcccgccccctagggaaactgaagctgaaagagccagcgaaagaaaaaaaaagtctcggagtggggcggcccgagcgacctaagggacggggcagcgccagcgaccgagggaaattagtcggggtgggggaacagggagacaagcccccagaatttaggaaactcctaaattctactaaaaatacaaaaattacctgggcatggtggcgggtgcctgtaatcctagctactgaggaggctgaggcagaagaatcgcttgaacccctgaggtggaggttgcagtgagccaagattgcgccattgtactccagcctgggctgcaagagtgagactccttctcaaaaaataaaataaaataaatcaagaaaagtctggaaaccatgccaactggtgaaatgaataaagaaataaatgttgtctggactgagtggctcacacctctaatcccagtactttggaggccgaggcgggcagatcacttgaggccaggagttcaaaccagtctgggcaacatggtgaaaccctgtcttttctacaattgcaaacaaattagccggacgtggtggtgcatgcctgtaatcccagctactcgggatgctgaggcccgagaatcgcttgaacctgggaggcagaggttgcaatgaactaagataacgccactgcactccagcctgggtgacagaatgagactaggtctcaaaaaaaaaattataattcagtaacatagtcagttacaagataaacattgagcctgcctcctaggttcaagcgattctcatgactcagcctcccgagttgctgagattacaggcgtgtgccaccatgcctggataattttttgtacttttagtgcagacggtgtttcaccatgttggtcaggctggcctccaactcctgacctcaagtaatcca

SEQ ID NO: 31812 - DNA, 1338 bp, Artificial sequence
  DNA replication origin
aggacacgccccacacttgcgcgtctgggttccagtccccgccgcccccaacaaataaagaagggaaagtcctttgggtgactgccccagggagcgccgcggctgtacgacaacctgcggcggccgccgactcatttgggggctacgctggttgcattcgtcacgccgggacgcctctcaaacccgcggcctgccgagcacgttcccacacgggcgaccctggtgacgcgggcgcgtctgtggctctggagaaccaggccgcggagccccggcgagggcagacggggaactggcgactgcgggggcggacggctggggcttgtagtcccctcgtgaccctctactcaggaaaaggcgagccgcggccgccgaactccagctctggcgcgctcaggggcgtggcgcgggcgggtcgtgagtggggcggggcccagagagcgtgtgcgatggagcggcgcgtcgcgcggcgcgaaggggcgtggcgccagtgggcgtggcgtagtgcgaagagacgcggtgcgcacgcgcgtgagggatgtcgcgggtgagtggtgtcgaggcctgttgggtcagggcggttcgcaggtgctgtcagagctgggcggggcagccgggtcgtagaggcgggcgccagtcgcggtcggtggagagggatgaggatgtaggagggacggacgtggcggaagccgcggggactgcgggggcggagtgcctctggggagccagggaggcctttccagaggctcctgggggaagaagaggcgaagcgagagtccccggggaagccctactccacccccagccggagcctgggttgtgcctgcacggaccagagcccacagtgcgagttgctgtaggcaaccagctagggtggccaacttctcccggttggcccgagatgttctggttttgggaccacagcgtcccaggcctccagcccaccacagtgaccatattgtgcgccccctgcccatcttctcccgcagcttccctagattaggcttgggaggcaaggggaggcctcctgacttttctcactgccttcgttaatataaagatgaaggcacactccacaacttccttctggccaggcccagacatgtctgtccttgtgagataaaagcttccatgggagccttccttcctaatcaaggtaggtagaccactggaaggtacatctggttttatattttgtcctgtagaagtcagatttcagcccagttgtgtaggagtgaggatgagcttatgctcttatcagagctttgagtacagagacatttgatctggaatttcagccagcctcttcaaccccagaattcagaggttcaatcagaacag

SEQ ID NO: 31813 - DNA, 1044 bp, Artificial sequence
  DNA replication origin
tacacacaaggcaatgaacaggcagaagagaagttttgtcatgaggcaggatgaggctatagaagaggtgacaactaagctaaagaagccactcaggatgtcagaagacagccgttcagtcaaaaacaggcacagtatccaaaggaactcatttgatccctaaaattctgctaagatgtgctgtaggcggggcgcggtggctcatgcctgtaatccctgcactttcggaggccgagatagatggatcacctgaggtcaggagtttgagaccagcctggccagcatggtgaaaccccgtctctactaaaaatacaaaaattagccgggcgtggtggtgcgtgcctgtaatcccagctactcgggagactgaggcacgagaatcgcttgaacccaggaggcagaggttgcagtgagccaagatcacgccactgcactccagcatgggtgacagagtgagacttcgtgtcaaataataacaataaaagatgtgctgtaattgtgtccgttttacaaactagtgaagaaatgaaaaagaggtcaagtaactggcacaggtcccacgctagtgagggttttgggattcaagcacagaccaccttcgcccctatgctacaccacctcaggctgtcgggagataggcgcccagtcaaaaggcacatagaagaaagcctacgacttctcaagcattgaagcaggagtggcgcatcggtatgctcaacttcaaactttgagaacagtcatggtaggaatgcattttattcaagaatgggttcaggtgagggtggatatgggcactgggttcaaaagacaaatttggagatttcatgatccagaagggtgaacaaataaggatgggctgaggagatcctcgaagttgaaaggttcaaacacacagagttaatgtcctctaaggagagccaacaaggggttacaagtgctgaagtcatcaagaaaatgtgcctgtctttcctggagactgggaaggagaattaggatgaggaaaatccagaggatggtaaaatgacttcaaaagaactgaggccg

SEQ ID NO: 31814 - DNA, 1302 bp, Artificial sequence
  DNA replication origin
gccgtcgcggtccgtgctgtccgtgtgcttccccggctgcctgctgacgagtggcgaggccgagcagcaacgcaagtccaaggagatcgacaaatgcctgtctcgggaaaagacctatgtgaagcggctggtgaagatcctgctgctgggcgcgggcgagagcggcaagtccaccttcctgaagcagatgcggatcatccacgggcaggacttcgaccagcgcgcgcgcgaggagttccgccccaccatctacagcaacgtgatcaaaggtgccgggccgggaatgggggccgggggttaagggcaggggggctggggcggcggcgggtgcggggcggggcaccgccctggtccgctgtgtcgctggcgaaggaacgggcccggcgggcgggctggcgggaagggggcgcgccccggcaactggccctgcccgcccggggtgccctcgcgccccagggcgagaggatgctcggggtcgccctgctctcccgcttgtctccccggtgggcgtcacggccattcccccaccccccaccgcgtcctggtctctccccctgcgagagggaagtggggcgagctgggtgctgcctcggggtgtgggcagacctctcctgtcctccccgctgcggatgaggcaggaacaccaatagcagccctagccgcttcacccccatcccctgctcgggcgatgtgggccgaacctcgctaccctggctgggtgacccgagtcacatggggtcgcatgcgctcccaactccctgcttccttggccgtctcctaagcaagcgagttctggaaccgtcgcaataagggaactttttgcccgagacttcttgtcaagggcgtagggtgacagcctccttttgggcgagaatatgaaacttgaggagtgtcaggttgactgtactggaatcaggagagagtggacccatacagttagcatgaaaatgtagcatctgtgctttttcgccccagtgtcacggtcaggtaggatgtttgcgtgtgatttctgtgcaacacgttccactctccttttcgctaagtaactgggggctggcaggaagggagtaccactgcttctatttagatgaaatgtagtagtaagaagactggcctaaaagtcatgtggatcctgtacagatggagacaatgaatgagtgttgagttagataattggctcggctctttattgacagtagttttaaaattaaactttgttcttaagtgaaaaataaacaagttgtttatttctgggcattcaaagaaatcgaaaagatggtttttattttgtcatttgaaaga

SEQ ID NO: 31815 - DNA, 844 bp, Artificial sequence
  DNA replication origin
gtctccggcctcccggccttggggaaggagcccttctgcccacaagtgggctcaggccatgaaagggaaacagaaagtcgggctccccagcctggcccacgtgaccgcggttcctcagccctccccgcgcgcccggccgcggctgcgggcgcgggcacccgagcgacacatcgagctcgtgactcgccgcccagggcgggaggcggagaagcggccgcggcgtgcgagcgcgcctccgggaggcagcgggagcgcgcacgctccggggccaccgcccctccggggccgggcccgccctccttccctccctccctcccccgctgtcctggcccgccctgcccggcccgccctgcgagtcagttcgctggttccctccctccctgggcgcgctcgggccgccgccgcgctccccgccctcgagcctcggtgccggagccgcccgccgccggaggaggaggtggagggagccggaggggcccgccgaggcggcggcggcggcggcaagatggcggacttcctgccgtcgcggtccgtgctgtccgtgtgcttccccggctgcctgctgacgagtggcgaggccgagcagcaacgcaagtccaaggagatcgacaaatgcctgtctcgggaaaagacctatgtgaagcggctggtgaagatcctgctgctgggcgcgggcgagagcggcaagtccaccttcctgaagcagatgcggatcatccacgggcaggacttcgaccagcgcgcgcgcgaggagttccgccccaccatctacagcaacgtgatcaaaggtgccgggccgggaatgggggccgggggttaagggcaggggggctggggcggcggc

SEQ ID NO: 31816 - DNA, 1819 bp, Artificial sequence
  DNA replication origin
gacttgcgttgctgctcggcctcgccactcgtcagcaggcagccggggaagcacacggacagcacggaccgcgacggcaggaagtccgccatcttgccgccgccgccgccgcctcggcgggcccctccggctccctccacctcctcctccggcggcgggcggctccggcaccgaggctcgagggcggggagcgcggcggcggcccgagcgcgcccagggagggagggaaccagcgaactgactcgcagggcgggccgggcagggcgggccaggacagcgggggagggagggagggaaggagggcgggcccggccccggaggggcggtggccccggagcgtgcgcgctcccgctgcctcccggaggcgcgctcgcacgccgcggccgcttctccgcctcccgccctgggcggcgagtcacgagctcgatgtgtcgctcgggtgcccgcgcccgcagccgcggccgggcgcgcggggagggctgaggaaccgcggtcacgtgggccaggctggggagcccgactttctgtttccctttcatggcctgagcccacttgtgggcagaagggctccttccccaaggccgggaggccggagaccaggtcccggacgcggttctttgggctcccacttagcctccctttctcccgcgttgcgcgcccgctgcccgctgtcaccgcccacccgacccatttcgaggccacggactcgaaagttattcgaacagaacagccggcgtgagcctggcaggcctttggtgcattttctttatttcattttattttttctcttttgagacggagtctcaccctgtcgcccaggctggagtgcattggctcgatctcgactcactgcaacctccgcctcccaggttcaagccatccttccgcctcagcctcccgagtagctgggagtacaggcgtgtgccatcatacccggctaaattttttgtatttatttttagatacaggggctcccccctatgttgcccaggctggtctcgaactcctgagctcaagcgatcctctagcctcggcctcccacagtgcggggattccagacagagccaccaggcccaggcctggtgtgttttcttaaagtgactcccttgaccttctagtctccgaatcccagaacggtaaccagacgtcgtccacccccacttccagctctttctggcattttcagacccctaccagggctctctgtgaggggaaagaactggagttgatgttcacttgagacgtgctaccaggggcatttaatggctcactcgtgcattccacctgggctgtgatgtgacttcagggacgcttggccgcgccggaattagcgagtggcagcaggagggtgaggtcatggtgaaaatcccctacaccggacactgtgatgtaggctcttcccaacaaggaagcagatacacaaacacaacgaggaatgggagcacgcaaattttagctttcctgccagattacagaggatatgacccgtccagggactttttttctgtcctaacagcagattcaggccaggacacctgaaaggaggccaggagacaagccacaagtgacagctgtgggttggcagagaaactgcttaaccgggacccccgagagccgacctcttcattcttagtatttagtttcaagtggaaaaagccactttggtctgtccctgttttgggcaatgcaacgtagctttgggctcctgtggctcagaaacttcgtatgtataagggagcggaggtaagaggtcagcattccaagaaactcccgaacaggtttaaattttaaaatcggtactaatcagttactccctggg

SEQ ID NO: 31817 - DNA, 1116 bp, Artificial sequence
  DNA replication origin
ggcactccagggcccaggtaaggggccagggttaccttttggagaaatgccatcctcagcctgtactgccggccttggtaccggattgtcatctcctggcgcctggatggattcacggccagagcaccagtgggagacaagaggagaagcccccaagttcgaaaggcagcctggctcgccccagccctgggtggtcgacggggaggcggctgggcggggagggcgcgggccgggcctccctgaccctcactaggcgcctccaacttggaaagcagctggaatccgcgccagccaatccgcgagcgacgacgcgggctcattagcatgcgctgcgcgggcgtccacctgccgccaggtggcgctgtccggcccccgccgggaccccgccgagcggcaggtgagacccgcagggcagggccccggggggcggaggggtacggggggaaaaggaggagggagaggaggaggtggagggagagggggtggaggaggaggtggaggtggacgaggaggaggaggagctgccgggaggagggagaggaggatgtgtggcagagggcgagccttagaccgcaccactaaggcctggggaagtgaaaacagatgcaacacgctttggctccctggctagccagccccaagtcattgaatggcactaagcaaattattcgggttttgccattaaaatggcaaagccacaattacttttgctccaacctaatatttaaactttatcagcgtcagttaccccatctaacccgagaaaagcaagtgggtaggaaatgactcctgtcgatcatgtgctgtgaggactgaatgaataactgggttaaagactggcagtggggtgtgcttggtggtgaagaatgctgctcacgggccaaatgggctggctctgagccctggatttgccacctagctgtaggatctcaagcaagttatggaacctctctgggcttcctttgtctcatctgatgagtgagaatcactgcactctccccagggggtgggcggcggtttgtttggttctggttttggttttaagattactgagctgattcatgtacaagcgcttagaactatgactgacacttggtgaatgtccagtaaccaata

SEQ ID NO: 31818 - DNA, 770 bp, Artificial sequence
  DNA replication origin
agcgtccgaggacaagaggggcaggagtggagagcacccctttgggtcgatttgtgctgctcgattttattaagtgacttctttgctgtgtgtgtcgatattgatggctataataattaggttttcgtgtgccctgcctgtagtggagaatctgaagccagcgctgatggtctgcgggaggtgaaaacaacctgttactcgggagaggcaggttcagttcaggctgtggcagatttgagacagcctgctgatattgttgtaagacgaccagatgtgacattgccatttttgccttttttttctgatcccaaactgcactattttaaagtgtgtgtgtgtgtacacatagaccatgaaaacggggtgatttgtaggataaagggccaccccatttacaatgccctgagagccctcatttgagtgtgtctatctgtgcatctcctgctgtctgcgctggcggcagaagtcccaaccttttcgcttcccttgcgaatgctttcccagacaaagtgaccgggcacagggtgtgcacacaggatggacatgtgggaggtggaatgcacctgtggggtgatgtgtttggggacaaagtggttcatttagttctgagcttctggtataatcactgtccgatgagatctacagaggattaggtcccgggtcacatctttgtccttcctcccacccgtagccacttttcacagcgtagtgtccatcttcttaggcttatcttgttgagtagaattagttgaatgttttgtgacaagctg

SEQ ID NO: 31819 - DNA, 1311 bp, Artificial sequence
  DNA replication origin
ccataacctccagctaatgaaatagatgagataatgcacataatgcccacccctccacaccatcatggacaccgtgtacttcatcacatgcatggaacgagtgatgagtgacagttgcacccaggtccacatttttttgttccaggcccttctccagaaagctgaacatcgaatgtagctggttcttcattaaggatcgcctggcatgggctcttgagacctgttctgcagacctttattctgtctgctgctccaaggagctctgtgacatgaccaatacatacatagatatagaggatacatagacagggcccttgccagcacaaggtctagggaaagagcaatgctggaggtgtggcaaggtctgtagtgcacagagaagggagctgtcctgcccaggggcattaggagaaccagccttcacagccgaggggtgactgagctgggcatgggaagagaagtggagcttggcaagcgagagggggagaaaggactttcccagcagacggaccctgaggcatgaaagggcaccgggttcctaaaaaggaaggaagtgtttgaggcaggagcccaggggtgcctgtggctgctttgttgtttcccagagggcaggtgtggaaggcaggcaggaggcaaagccaggaagatggtgggagcggaatcctgggtaaccaggctgctcaggggaaggttggactttatgctgggaatgtgggaagccagtggagcgtttcaggtcaaggaggtcaccattgatttgggggaaaaaaacagtgtgtgtaggaaagctgtcatggaggaggggagaccggggtggaagatggggagctgggatgcaggagggggaggttagggtagaggagaggtaagttaggatggaggaggagaaggctggggaggaggaggaggatggggtagaggaaggggaagacagggtggaggaagaggacctggggtggaggagggaaaggtggggtggaggggggagagctggggtggaggaggggagctggaatggaggagggagaggttagggtggaggaagggagactaaggtggaggagggagagtttgggtggaggaggggatgctggggtggaggaggggatgctggggtggaggaggggtggctggggaggaggagggaagcctggggtggaggagagaaactagagaccaagacactagtcagaagaccaaggtaaggagaggagaatctaccagagaagagtcatgatggaaaagaatgccagagattcaataaacaaactgaatttatctcttgacaattaccctctgagcccccaagcc

SEQ ID NO: 31820 - DNA, 1246 bp, Artificial sequence
  DNA replication origin
cctggtttaccttgacttcattcggattggtcactcggtccaggccgtagtccagcacattgtccattccaggctaaatggaataaaaacaacataaggtcattacagggagagtctccagtttctggttaactgtgggtcttggttaatctgccaattgtgagattgagctgagaagagcttgtggcctagcccatgggaagctttgagtgggtgtaaaccctccaggtgagctgttgagcttcatgagggctgttatgcctcccagtatccccagcacctaacatagtgagatggaaggatggagggagagaaggatgggtagatgcgtgggtgggtggatggatggaaaaatggacaggtggttggcatccccagcaccatagtgggatgcatggataagtggatggatgaataggtaaatgggtggcgggtagatggttgatgggtgggtgagtggatggatggatggatggatggccagacagatgaatggcattcccagcaccagagttggatgggtggcaggaaagagggaaggagagggggatgggtggatggatgaatgaataggtaaatgggtggtaggtggatggtgggtgggtgaataaacggatggatggatgggtggatggatggatggatggatggacggacagataaatggcatccccagcaccatagtgagatggatgaatggagggatggaaggatggatggatggatggatggatggatggatggatggacaaacaaatgaatggcatccccagcaccatagtgagatggatggatgaaggaatggaatggtgtacgaatggatggaggaagggaaggagggatggatggatgaatgggtggtaggtggatggtgagtggatgggtgaagagatggatggatggatggatggatggatggacagatgaatggcaaactcagcaccatagtgggatgtatagatggagggatggatgcatggatgaatgggtaaatttgtggtagatggatggtgaatggataggtgaagagatagacggatgggtggatgggtggatggatggatggatggatggatggatggatggatggatggttgagtgagtagatggatggatgagtgagtgggcatatggatgggtaacattcaggctccaaaagagttcactgagactaatacatgggcttcctgactcttcccacagtgctccttccccacactctgtggtttcatcttgggcttggcgg

SEQ ID NO: 31821 - DNA, 930 bp, Artificial sequence
  DNA replication origin
gggaacatcacacaatggggcctgtcagagggttgggggcaaagggagggagagcattaggacaaacgcctaatgcatacagggcttaaaacctagatgacgggttgacaggtgcagcaaaccaccatggcacatgtatacctatgtaacaaacctgcacattctgcacatgtatccaagaacttaagataaaatttaaaaaaaaactgtaaaccttcctaaaatggaacaaggaaacaacagcctttatttctttgtttggttggcctgtctactggatgccaggctctgggccaagccctgggattacccagacgcaatgagtccctgtcctccaggaatacacgttcttgggaagtggaagagaaggactcttgacaaagccatgtgatgaaggcaatggttaagaagtgcccaggcagctcagggagctgggaggaatatacctgctcagactgggaaggctgcaggaagagggagaaggtgggagtctgtcaggtagcagggttggacatgggaaagaaggtccgtgtgaactgaagtgaagagtaggaacaggggtcagggagatgaggctggtgattctggcaaagcttaaatgggcacaaaggagatggcctgactgacccttgaaggccatcggcagctccaaagaggacagaggcttttattgttttgggttccttccagatgcagtgcagtaggtgggttggacatgggcacgtgtgcaggtggagagagctgttaggaagctgtcaaagttatccaggtgagaactaatggccaccgaagctaagcagtgctggggccatggggagaaatactcaggttggagaaggattccagggcaagttcagacaaggccaggagggctgctatgggggagcaggagagtggagattcagatgtggcaaccagggtcccagcaca

SEQ ID NO: 31822 - DNA, 821 bp, Artificial sequence
  DNA replication origin
agactccatctgcaatcccggcaccttgggaggccgaagctggcggatcactcgtgattaggagctggagaccagcccggccaacacagcgaaaccccgtctccaccaaaaaaaatacgaaaaccagtcaggtgtggcagcgcgcgcctgcaatcgcaggcactcggcaggctgaggcaggagaatcaggcagggaggttgcagtgagccgagatggcagcagcacagtccagcttcggctcggcatcagagggagaccgtgaagagagggagagggagaccgtggaaaaaagagggatagggagaccgtggggagagggagagggagagggagagggaggtggagagggagagggagagggagagggagagggagagggagaggcgggtttatttcaagtgattcctaaaggggcttgtggagtgtgtgactagtcttgcatttgagatcaatgaagtgcagagtggacggggacacggcgttttcatggcagtccaggtgaacggcaataaagacataaagcaggaatgagagaggaggggaataacagaaatgggaataatcacacagggatttgtgtgagttttaggatcggtggtggcggaagtgagtgagcatgagctattgagactgacctgcaagtttttagcgtgagtagttcctgaacatgtggttgctctatttggaacacagggaatgtaggagaagggggacctctaaagaaggaagatggagagttcagaagatggattgaagagagaatattctgggggaactagaagcagcagattctgcttatagaaagcttgccttctcctta

SEQ ID NO: 31823 - DNA, 1079 bp, Artificial sequence
  DNA replication origin
gagtggacacagcacatgtttcagagagcacagcgttgggggtaaggtcatagatcaacaggatcccaaggcagaagaatttttcttagtacagaacaaaatgaaaggtctcccatgtctacttctttctacacagacacagcaaccatccgatttcccaatcttttccccacctttcccccttttctatcccacaaaaccgccattgtcatcttggccccttctcaatgagctgttgggtacaccccccagacggggtggtggccgggcagaggggctcctcacttcccagtaggggcggccgggcagaggtgcccctcacctcccggaccgggcggctggccgggcagggggctgagccccccacctccctcccggacggggcggctgccaggtggagatgctcctcacttcccagacggggtggctgccgggcggaggggctcctcacttctcagacggggcagctgccaggcggaggggctcctcacttctcagacggggcggccgggcagagacgctcctcacatcccagacggggcggcagggcagaggcgctccccacatctcagacgatgggcggccgggcagagacgctcctcacttcctagatgggatggcggcagggcagagacgctcctcactttccagactgggcagccaggcagaggggctcctcacatcccagacgatgggcggccaggtagagacgctcctcacttcccagatggggtggcggccgggcagaggctgcaatctcggcacttcgggaggccaaggcaggcggctgggaggtgtaggttgtagcgagctgagatcatgccactgcactccagcctgggcaccgttgagcactgagtgaacgagactccatctgcaatcccggcaccttgggaggccgaagctggcggatcactcgtgattaggagctggagaccagcccggccaacacagcgaaaccccgtctccaccaaaaaaaatacgaaaaccagtcaggtgtggcagcgcgcgcctgcaatcgcaggcactcggcaggctgaggcaggagaatcaggcagggaggttgcagtgagccgaga

SEQ ID NO: 31824 - DNA, 843 bp, Artificial sequence
  DNA replication origin
agtgaggagcgtctctacctggccgcccatcgtctgggatgtgaggagcccctctgcctggctgcccagtctggaaagtgaggagcgtctctgccctgccgccatcccatctaggaagtgaggagcgtctctgcccggccgcccatcgtctgagatgtggggagcgcctctgccctgccgccccgtctgggatgtgaggagcgtctctgcccggccgccccgtctgagaagtgaggagcccctccgcctggcagctgccccgtctgagaagtgaggagcccctccgcccggcagccaccccgtctgggaagtgaggagcatctccacctggcagccgccccgtccgggagggaggtggggggctcagccccctgcccggccagccgcccggtccgggaggtgaggggcacctctgcccggccgcccctactgggaagtgaggagcccctctgcccggccaccaccccgtctggggggtgtacccaacagctcattgagaaggggccaagatgacaatggcggttttgtgggatagaaaagggggaaaggtggggaaaagattgggaaatcggatggttgctgtgtctgtgtagaaagaagtagacatgggagacctttcattttgttctgtactaagaaaaattcttctgccttgggatcctgttgatctatgaccttacccccaacgctgtgctctctgaaacatgtgctgtgtccactcagggttaaatggattaagggcagtgcaagatgtgctttgttaaacagatgcttgaaggcagcatgctcgttaagagtcatcaccactccctaatctcaagtacccagggacacaaacactgc

SEQ ID NO: 31825 - DNA, 1221 bp, Artificial sequence
  DNA replication origin
cctccaaaggcagtatctcacctcctgcccaccctcctcccaaccctcaggagggtgcttgcagtgagatgagatgccgcagggaataaaaaccaccagcaccccctcagcgtccctccactgtgtcaggatcacagacagtgagccccagcccccagcccagccctctctcccctggagggaaaccagcttaaatttgactggttagtaggaatccctcatctggtcagtgccaagatatccccagcctcctgctccctaacccggctcctccgggagtgctcttccaagcaggtggaaacatagcttgcctgaagtggtgatgaatctcctcatagtaggggttgggaggataggtggcacttggactagaattgggaatatgggagtgggaagggcagtggaagggggattttgttccattttttttttttttttttttttttttttgctttctccagtctcagaggtaggagatgttgggcagcagtcaagaaaaagttcacctctccaagctttaccataggcaactggccaccacccctcctcactccagcggtttgaatggtttgctcctaactgtgccctctgcatttgccttcatccatctccattcttctttacggtcaacatgccaggaccctacatcttctcccacatcagttgttcacaggggctccttcccatggagttctgtctaatggcttcccaaacctgagtctcatggacatgtccactcttcttgtccaatatctcaggagccttgaatactgctgaccactatggttgtagggtggtggtagggtggtggtaggatggtgtagggtggtggtaaggtggttgtagggtggtgtacagtggtggtcaggtggtggtaagatggtatagggtggtgtagagtggtagggtggtggaaggatagtgtgatagggtggtggaagggtggttgtagggtgatgtagggtggtggtagggtggtggaagggtggttgtagggtggtatgggggtggtagggtagttttagagtggtagggtggtgttatggtggtggtatggtggtgtagggtggtggtactgtggtgtagggtggttgtagggtggtagggtggtggtaaggtagttttagggtggcagggtggtggtacagtggtggtagagtggtggtaaggtggtgtagggtgacggtagggtggtgtagggtggtggaaagatagtggtag

SEQ ID NO: 31826 - DNA, 1472 bp, Artificial sequence
  DNA replication origin
ggactcctagaatcagacaattcagcaagtcggggggctggtgacacgaaagacccatgcacctgctccccgcaccctcacccggccgtgcactctgccgccctcttagaaactaaatgcctgtaatgcggctcccacctcacacctgcccatggacctggctgggagacaagccccacacgggacactgcggtccgcccggcacttacccaaactgctcgctgggcatggtttccggagccttggagtggcttttgcatttcgagtagcagtaatactcgctgcccccagggcagaagcagtgcacccgctgcgtggcctccgcctcgatctcctccttggtcttggggacggcatggtggtggatgtagtggtggtggacatgcttcgtcgtctgcttggtcacaaagcctttgcccccgaggagggggcaggcgcccggcgaggcggccgcgggaggcagcttgccaccgggcgggagcagggagtggtactgcgaatggtggtggtggtggtggtccggggagcgggagcgggggctatagcggcctacgcctggagactggcagccaggggtcttgaggaccctggacaggtgatcgtccagtatcgtctgcgggtcttcctcgtagctgccggagggcagtagggagagggggtgctgcgtgggcgccccctcccgcgaattgagtgtgagctcggagccctctctctcttcatcctgaaagggaagacgtcagaaggagaagtgacccaggaagcagaagggccagaggccctggggttgcaacattcggctccctacgcaggagcacgcacacccgtgtgcacgcccacagccacgcccatgcgcacacgcacaggcccgcctacacaagcacatatccacacgcatatgcacacccacacgcaacccatgcacatgcgcacacagcccacgcccaggcacacacccacacgcagcccacgcgcatgcgcatgcaacccacgcacatgcgcacaccctaacgcaccccatgcacatgcgcatacacatacgagcgctcacgccgtggacggaagcaggaagaaggcctaggccgcattacctctcggatctgctgcaggcgctcctccaggctgtggcggctctccaactccagcttcagcttttccagcctcgagatcagctcagctgcaaaggtggcgggttccacgggggtcatctccttgggcaggcggtgggttctctacaggacgtggaaaggaaagggaggaggcacgttcagcaggctaggtgggcggtggcttggccggagcttcccgcaccaggcgctgtgcaccgcaaacccatgttcgggtgtagagtggatggcaaggcggcctgggctgctcgggacttttatgcgctagcgccatggcctcatggagagccatggtccccaccagcgtttgccttgggcaggagcagttggtcgcactccgagaggccc

SEQ ID NO: 31827 - DNA, 1181 bp, Artificial sequence
  DNA replication origin
tctgcgggcgcctctgcaaacggcggcgccggggaccgaccccccgcccgggctcggggcgctgctggcgtgtcccggggttccggcctcgaggtgtgcccgccagggctctggaggcgttcagttgcatttgggccgggggaccgggccggaggggctcggaggacatgagagcctggcttcggcggccttcgtcttccaggtaacggggccgctccacctcccaccgcccgggtagcgcggtgccaacggcagccccacttctccgtgggccgcgccgcccagccccgcggctcgaggctctggtcgggttcagcgtgcacccatcccagatccggggtccctggcttctcgcccggggttgcaccccgttcagcccctacccttcttagtttgatcttttccgtgctagggaaagcagcttgtttattggttagataagacttttttctttggaaaaaagacaggcttgaaatcagtagagtttgggattcttggcacaggcagtagtggcgtgagacggctggtgatccagttttgtaggtttcgcggatccgggaggtgggttgggggcacgggggcgacggttccgaggcttctcagctctctctcaaagtttgaagatgaaagtctcccctgagtgagttggtttctggtttggggggaggtcagggaagacagaggtgttgactgagctggattcttggtgggggtagggggcgcgtagcgaacactcaaatctgagttggggagggggtgtttgcgtgctgaatctgggagtccgggagcccaatccgcctatgctgggcgggcttctcttgggccaggatcttctgaatttttaaggagtgggaagagggagcgcagagggagggggtgggtggggagaatgggaaccagatgccggggaagggcacgtttggagctcgagttatctgtgcagggccgagtggggaaatataccgaaattggtttcacctgcacacagcctagcggctgggagtgcgcctttttggagttgatggtatcgggggaggggaagggagggaaggcgaggcgcgggctgagctgccctgcgtgcgccctggccgagtgggtttttggaaggttgtgtcttacacctccagtgtccccctgccgtccccagctcttgccttcctctcaccttccccgcctctttc

SEQ ID NO: 31828 - DNA, 1267 bp, Artificial sequence
  DNA replication origin
tctgcctttcacttcttggatctctttggttcacacctttatgtgtgtgtgtgtgtgtgttttttttttttttttttgagggagtctcgctttgtcacccagcctggcgtgcagtggtgccatcttggctcactgcaacccccccacccccgtctcctaggttcaagcgattctcctgcctcagcctcccgagtagctgggactacaggcacgtgccaccacacccggctgatttttgtatttttagtagagacggggtttcgccatattaggcaggctggtctcgaactcctgacctcagatgatcctccagcatgggcctcccaaaatgctgggattacaggcatgagccaccgtccccggccctttgttttttaaaaggaagaaaagttaattattcgctcataacataaggaatcattctatagcagcagcagaataaatacacaatgctctgggtttgtgacatattttctcattttaacggagaagagaaggttgtgtgtgccttataaacgtttttgggcaaatgtgggagaaattcaaaggtgacaatggggtgaggagttttcgatacattaaaacggcatgcatgccttgtcgtttggagtgggaaaaaagatattcctatcggtttaatatgtaacatatggcagaagaggggactttggaagagtaacgggtatgcagttgtttgggagagatggccaatgtgtgccgctacgagggtcttatggccagcaggttaggaagctggacctaggtcttcagggcactgaggtatgcctcctaactggtgttagcactcaggcctatactggcggattcacaccccactttcacacatgcacaaacgcaattcatccaccaactgcagtcctatatttacccgaactcagatgcacgtgcacaagcgcgcacaggcatgcacacgcctccagcggctgggcccgagtccgccctatgacagcgggccagccaaccccagggccggaactccctttataaagtcctccaagcccaaattcccagggaaacttgaatagaggtagaaaagcgtttgatgatagaaaaaaaaaaatctgcttgcttgcagttcttgcgatggccataatgctaccagaaactgttgcattccagagccggggagagcgagggcaggcagggggaggaggcgggagcaaagaggccggagaacttaaaagaagaaatcagaactcgggctgagaatgccctcggggccgcggggggctggcagggggcggag

SEQ ID NO: 31829 - DNA, 971 bp, Artificial sequence
  DNA replication origin
cggggttgggggtaaggttatagattaacagcatcccaaggcagaataatttttcttagtacagaacaaaatggagtctcctatgtctacttctttctacacagacacagtaacaatctgatctgtctttcttttccccacatttcccccttttctattcgacaaaactgccatcgtcatcatggcccgttctcaatgagctgttgggtacacctcccagacggggcggcagccgggcagaggggctcctcacttctcggacagggtggctggtcagagacgctcctcacctcccagacggggtggcagcggggcagagacactcctcagttcccagacggggtagcggctgggcagaggtgctcttcacatttcagatggggcggcggggcagaggcgctccccacatctcagacgatgggtggcccagcagagacgctcctcacttcctagacgggatgacggccaggaagaggcgctcctcactttccagactgggcggccgggcagaggggctcctcacatcccagacgatgggcggccaggcagagacgctcctcacttcctagacggggtggcggccgggcagaggctgcaatcttggcactttgggaggccaaggcaggcggctgggatgtggaggttgtagcgagccgagatcacgccactgcactccagcctgggcaacattgagcactgagtgagcgagactccgtctgcaatcccggcaccttgggaggccgaggctggcagatcactcgcatttaggagctggagaccagcccggccaacacggcgaaaccccgtctccaccaaaaaaatacgaaaaccagtcaggcgtggcggcgcgcacctgcaatcccaggcactgggcaggctgaggcaggagaatcaggcagggaggttgcagtgagccgagatggcggcagtacagtccagcctcggctgggcatcagagggggagggggagg

SEQ ID NO: 31830 - DNA, 995 bp, Artificial sequence
  DNA replication origin
tttcaggaacatgatgatgttgaatatttgaaacagcaagtttcagaaaaatacatgtaatattccatttacatagaaattagaaacaagtaaaactaaacaatatgttgtttaaagatccaaaagtatggtaaaatgttccaggtggtatttgcctctgagctaggaaggaatgacatgggaatatggaatgaaggaagtagaggagggagggagggagggaatgagggagggaaggaaggaaggaaggaaagggagggagggagggaaggaaggaaagggagggaaggaaggaagggagggagggagggagagggaagggagggagggaaggaaggaagggaagggaggaggggaggggaagggaaggagggagggagggaaggaaagggaaggaaagggaagggaagggaagggaagggaggaggggaagggaaggagggagggagggaaggaaagggaacggaaggaaggaaggaagggagagggaaagagggagggaaggaaggaagggagagggaaagagggagggaaggaaggaaagaaggaaggatggagtgcaatctaagctttctattccatatgttcatatttcatttattggccttttgcccattggttcttcttttgtgacttccctattgatatcttctgcccatttttccatttttaaaaacaaggttattgccgacatggaggcccaggttcacaagttgagagaagaattgatcaatgtgaactcacagcggaaacagcagctggtagagcttggtcttcttcgtgaagaggaaaagcaaagggctacaagggaacatgagattgtcgtcaataaactgaaggctgaatcagaaaagatgaaaatagagctgaaaaagactcatgctgctgagacagagatgacactggaaaaggtaagatatttaactagttttttaataggcagttgaaatccatgtttaaaatccattgccaccacccttatatttaatctccaa

SEQ ID NO: 31831 - DNA, 943 bp, Artificial sequence
  DNA replication origin
ccaaggcaggcagctgggaggtagaggttgcagcgagccgagatcatgccactgcactccagcctgggcaccattgagcactgagtgaacgagactctgtctgcaatcctggcacctcgggaggccgaggctggcggatcactcgcggtgaggagctggagaccagcccggccaacacagcgaaaccccatctccaccaaaaaaatacgaaaaccagtcaggcgtggtgacgtgcgcctgcaatcgcaggcactcggcaggctgaggcaggagaatcaggcagggaggttgcagtgagccgagacggtggcagtacagtacagcttcggctcggcatcagagggagaccgtggaaagagagggagagggagaccgtggggagagggggagggggagggggagaggtagacggagagactttttttctatacttaatttgttaagagtttttattatgaaatgatgttgaattttggcaagtgatttttctgcatctattgagataatcatgtggtttttattcttcattttattaatgcgttgtctaacatttattgatttgcatatgttgaaacacttttgcatcccagggataaattcctcttgatcgtggttagctgatcattttaatgtgttgttgaattctgggttttgtttttttattgctagtattttattgaagatttttgcatctatgttcattagggatattggcctgtaatgttctttccttgtgtccttgtgtgtttttggtatcagggtaacattggccttatgatatgagtttggaaatattccctctacttcagttttttgggaagagtttgagcaggattgatattagttcttctaatgtttggtagaattcagcagtgagctgaagcttctctttgttgagaagcttctctttttcatcatgtcctgagcttctctttgttgagaa

SEQ ID NO: 31832 - DNA, 1123 bp, Artificial sequence
  DNA replication origin
ttctacacagacacggcaaccatccgatttctcaatcttttccccacctttcccccctttctattccacaaaactgccactgtcatcatggcccgttctcaatgagccgctgggcacacctcccagatggggtggtggccgggcagaggggctcctcacttcccagtaggggcggccgggcagaggcgcccctcacctcccggacggggcggctggccgggcggggggctgaccccccccacccccctcccagacggggcggctggctgggctggggggctgacgcccccacccccctcccagactgggcggctggccgggcggggggctcctcacttcccagtaggggcggccgggcagaggcgcccctcacctcccggacagggcggctggccgggcggggggctgacccccccacctccctcccggacggggcggctggccgggtggggggctgaccccccccacctccctcccggacggggcggctggccgggcagaggggctcctcacttctcagacggggcggttgccaggcagagggtctcctcacttctcagacggggcggccgggcagagacgctcctcacctcccagacggggcggtggggcagaggcgctccccacatctcagacgatgggcagccgggcagagacgctcctcacttcctagatgggatggcggccgggaagaggcgctcctcacttcctagatgggatggcggccgggcagagatgctcctcactttccagactgggcagccaggcagagacgctcctcacttcccagacggggtggcggccgggcagaggctgcaatctcggcactttgggaggccaaggcaggcagctgggaggtagaggttgcagcgagccgagatcatgccactgcactccagcctgggcaccattgagcactgagtgaacgagactctgtctgcaatcctggcacctcgggaggccgaggctggcggatcactcgcggtgaggagctggagaccagcccggccaacacagcgaaaccccatctccaccaaaaaaatacgaaaaccagtcaggcgtggtgacgtgcgcctgcaatcgcaggcactcggcaggctgaggcaggagaatcaggcaggga

SEQ ID NO: 31833 - DNA, 892 bp, Artificial sequence
  DNA replication origin
gtctgggaggtgaggagcgtctctgcccggccgccccgtctgagaagtgaggagaccctctgcctggcaaccgccccgtctgagaagtgaggagcccctctgcccggccagccgccccgtccgggagggaggtggggggggtcagccccccacccggccagccgccccgtccgggagggaggtgggggggtcagccccccgcccggccagccgccctgtccgggaggtgaggggcgcctctgcccggccgcccctactgggaagtgaggagccccccgcccggccagccgcccagtctgggaggggggtgggggcgtcagccccccagcccagccagccgccccgtctgggaggggggtggggggggtcagccccccgcccggccagccgccccgtccgggaggtgaggggcgcctctgcccggccgcccctactgggaagtgaggagcccctctgcccggccaccaccccatctgggaggtgtgcccagcggctcattgagaacgggccatgatgacagtggcagttttgtggaatagaaaggggggaaaggtggggaaaagattgagaaatcggatggttgccgtgtctgtgtagaaagaagtagacatgggagacttttcattttgttctgtactaagaaaaattattctgccttgggatcctgttgatctgtgaccttacccccaaccctgtgctctctgaaacatgtgctgtgtccactcagggttaaatggattaagggcggggcaagatgtgctttgttaaacagatgcttgaaggcagcatgctccctaagagtcatcaccactccctaatctcaagtacccagggacacaaacactgcgaaagcccgcagggtcctctgcctaggaaaaccagagacctttgt

SEQ ID NO: 31834 - DNA, 993 bp, Artificial sequence
  DNA replication origin
atgttttaagtggggagcgcctctgccccgccgccccatctgggatgtgaggagcgcctctgcccggccgagaccccgtctgggaggtgaggagcgtctctgcccggccgccccgtctgagaagtgaggagaccctctgcctggcaaccaccccgtctgagaagtgaggagcccctccgcccggcagctgccccgtctgagaagtgaggagcctctccgcccggcagccaccccatctgggaagtgaggagcgtctccgcccggcagccaccccgtccgggagggaggtgggggggggtcggccccccgccaggccagccgccccgtccgggaggtgaggggcgcctctgcccggccgcccctactgggaagtgaggggcccctctgcccggccagccgccccgtccgggagggagatgggggggtcagccccccgcccggccagccgccccgtccgggaggtgaggggcgcctctgcccggccgcccctactgagaagtgaggagcccctctgcccggccaccaccccgtctgggaggtgtgcccaacagctcattgagaacgggtcaggatgacaatggcggctttgtggaatagaaaggcgggaaaggtggggaaaagattgagaaatcggatggttgccgtgtctgtgtagaaggaagtagacatgggagacttttcattttgttctgcactaagaaaaattcctctgccttgggatcctgttgatctgtgaccttacccccaacccggtgctctctgaaacatgtgctgtgtccactcagggttaaatggattaagggcggtgcaagatgtgctttgttaaacagatgcttgaaggcagcatgctccttaagagtcatcaccactccctaatctcaagtaatcagggacacaaacactgcggaaggccgcagggtcctctgcctaggaaaaccagagacctttgttcacttgtttatctgctgaccttccctccactattgtcccatg

SEQ ID NO: 31835 - DNA, 1127 bp, Artificial sequence
  DNA replication origin
gcgcgcgggccgggcgcgcgcgggggtgcggcgagggtgcggcggcggcggcgctgagcggaccggaccgagtgcggaggaggcagcgagtgccttgcggtgctgggaacactgggcaaggggaggcggcggcggcggcggcggcggcggcggcggcggcggcggcggccgggggagggccggcccgagtggggatgcgggggaggaggccgggagtggcgggtccgcgctcctccgccgcctttttctttcctccccttcctgcgcccggctctcctccctctcgccctcctccgcctcagttctcctcctcttcttccgctcttgccgcccggcctcctcctctcccggtcttccttctcccactcccgctctctctcttgtcgacgggctcggagtcctgcgccacccgtgccgggccgagaggagcccgcgtccgggagtgggctccacgcgcagcccctgccccggagcctcccgcccggtgctcacctcctaacccctcagcacccgcagcagggagccccttccccatcctcaggacccccggtgtctccagggcacgacgcccgtgttttagctgcctgtaccagcttgaggtttcacctggccaaaatgtcactttcatcacgtgtgcactaaaagacctagcccctagaccttcctacaggaggaagagagcgatttttaaataattaagcattgaccctttcccctaccttctcttcttgacctataccttatttcacctgcgtgtggtagagacttttaatttgtacgtcgggcatttatcaccacgtgggatggttaaaggacttgtcttaggtatttatcccgttattcaatggccaccagagcgacgatgttgattatcaggctttcttgattttacaagtccaggaccttaatttagaaatcattttgcatcccaagctaattactgcaatactgtcaggtgcagagtgcagccagtacgtttgtaacttaccaagtaaaactgcctgtgaaagagtagcgggcatggctatgcaaaggacgcaggtggggatgcaccagctaatcactcgctgaatatttatcaggtctgcctggaggccgctaaaatacataagggaaataatcatttc

SEQ ID NO: 31836 - DNA, 744 bp, Artificial sequence
  DNA replication origin
ctccgccggggagctgcggccgcggagggccgggtgggcgggggcggcgggggagaggtgcgggctcggggcgaccccgggcgcggggcgcgggccggtggccgaggtcgcggcgagggggcgcggcgggggccggggagagtcgggctggtgctgcgcggagcgggagcgggagccggagccgctggctcgcccgctggccccaggctcactgacagcccggtgcccggcgctcgcgcttcctactcgcggcggcagaggcggcccggagcggcaccgcccaccgcgcatgccccgagcgcgaggccgcgaggacgagcggcgggggcgcgcgggccgggcgcgcgcgggggtgcggcgagggtgcggcggcggcggcgctgagcggaccggaccgagtgcggaggaggcagcgagtgccttgcggtgctgggaacactgggcaaggggaggcggcggcggcggcggcggcggcggcggcggcggcggcggcggccgggggagggccggcccgagtggggatgcgggggaggaggccgggagtggcgggtccgcgctcctccgccgcctttttctttcctccccttcctgcgcccggctctcctccctctcgccctcctccgcctcagttctcctcctcttcttccgctcttgccgcccggcctcctcctctcccggtcttccttctcccactcccgctctctctcttgtcgacgggctcggagtcctgcgccacccgtgccg

SEQ ID NO: 31837 - DNA, 900 bp, Artificial sequence
  DNA replication origin
ccgcaaaggggcgctgaggcagaagaacgtgcacgaggtgaaggaccacaaattcatcgcgcgcttcttcaagcagcccaccttctgcagccactgcaccgacttcatctggtaggtgccgggccgggcactcctgccccgctcctccccgcctccgggtcccggcacccggcgctccggcgcgtccgccccggggctggctcactccgataacttggaaccggcgggagtccgaactcttcgcccggagtgacacgcgcgcccggccctgacaccggcgggcaggactcccgggacgtcgccgtcccgccacacacaccccctggcgcgagagggaggctggccccgtacggtggcgaaggggatccctctccgggccgggcccctcacctccccgggcgcgcccacccgcacgcacccagcggagcggccgcttgccggggtgtgagcccaggggacaggggaggaggagaggccctaagggggcaaaggttcccggagaaacgcgccccggagtaacgggggagcggcggcgattgcactgcgcgcggtccaagttgctggcgagccaggctgggcgcgttcggggtgggggggttgtgtttgtgcttcccatcgggctggactgcgctggcatcttgggcccctgcctactgtaggctgcatctactgggcacggagagactgacttttctgagtgagcagagagagagagagcaaactgttgaaagcttgcagtgggggagggggagttctagcaggcaaatggcacaagggcagagggactcatttaaaatagaccctgtcggccaggcgcggtggctcacgcctgtaatcccagcactttgggaggccgaggcaggcggatcacctaaggtcagtagttcgagaccagcctgg

SEQ ID NO: 31838 - DNA, 1029 bp, Artificial sequence
  DNA replication origin
gagaggccctaagggggcaaaggttcccggagaaacgcgccccggagtaacgggggagcggcggcgattgcactgcgcgcggtccaagttgctggcgagccaggctgggcgcgttcggggtgggggggttgtgtttgtgcttcccatcgggctggactgcgctggcatcttgggcccctgcctactgtaggctgcatctactgggcacggagagactgacttttctgagtgagcagagagagagagagcaaactgttgaaagcttgcagtgggggagggggagttctagcaggcaaatggcacaagggcagagggactcatttaaaatagaccctgtcggccaggcgcggtggctcacgcctgtaatcccagcactttgggaggccgaggcaggcggatcacctaaggtcagtagttcgagaccagcctggcaaacatggtgaaaccccgtctactaaaaatacaaaattagccgggcgtggtggcacacgcctgtaatcccagctactcgggaggctgagacgggagactcgcttgaacccgggaggcggaggctgcagtgagccgagatcgggccactgcactccagcctgggtgagacagagcgagattccgtctcaaaaaaaatgaaacagaccctgtcaactcgagattagacctgtaaccctgttgatgagggcagaggccttatttaagaaaaataatataagggccagaggtcagagatcaggtaatcgccaatgaattcaggcattcttaactcggagggtccctgggggcttatggagaatcgatacatagaagggcttcaggggtctctgaaccctgtaaaactgagggaaattgtgtttgtgaatctttttcctggtgagagaattacagctttcatctgatcctcaaaaggtgtgtgacccttcttcccagatccccgtcaccacacaaaagttttgaaagctggaactaaaggagctctaggtcctctagttagagcagcagtagtttggtttttcttttaagttgcccgacgtc

SEQ ID NO: 31839 - DNA, 1216 bp, Artificial sequence
  DNA replication origin
gatccatctaagatggttcctaaggagcagtttattctatttccagtatttccaataaactggagatgttgccatatcccatcatcacccaggtccacccttgttgatggagttattcttatctgttgaacaaatggttatcacacacctgctctgcaccaggcactggggttgcgaaaggaacgaggtgctccctttccagagggagtttacactccaccctggaggtggagaagtcacctaacaattaatagtgcgttgctgtaactttagagacttgcgcaggataccaggataacacgtaagcccctaaaaatcggggagagggaagtgcaaccccacgaaatgaccggctcagaggtgggggaagagccttccaggaagagatgtgaacagaggcagaagcaagtccagggaagcagccttgcagctcagcaggtgtgggagatgctgtgagattatttgaggggcgggggaaggggggaacgtggtaggtggggctctgggtgaagagcctggtaaggagcctggctgtggaggagggaagagggaaggcactgcagtggggcttgcaccatcagattcagtttttgcagagctctctgggggaagaaggaagcatgaaaggaaatggtagaggctggtgcaggcgctggtgagaccctttatagataagaaggaatggagctgtagttagggctagaccttggagccaaagaggaataagtgtctttgaaaaacaccctggaggaagaaaagcagaacttattgactatggaggagagaagagataaacctcttccagtgagaccccatttcaggcttgggtcggggcagccaccaaggaggaggtggtttgaggggggagattcatgagctcagttaagaacgttttattggaacgcacctgcatgatgggatgcgggagtcggcagcacaggaggaagacgtgggctccaggtgaagatgagagattcatctgaggggtgtggggagctggaactttggtgctggaaaacatcatctcacctctcaggggccaggaagtctcaggaaacaccagtggagcaagcctaaacaaagggcgagtttagttccgcagtgaggaaacctcgggggcatgtaccctgatgaatgaagtcagcacctgttaataggattctggctgctgtgccatctaagagacacattggaagaatttttggcctgcgaggga

SEQ ID NO: 31840 - DNA, 2319 bp, Artificial sequence
  DNA replication origin
acccatcgtgtggtacgtcacatcccagagggcaaaagcctcagtcggcaaaaggcgcgggtgacctttggaggtggagacagtgcgcacccagcccagttttgctcacaaggtataaatgttacttttagtggccatgtgctgttgggtggcctacagctctgaggccatggacagccacacctgcccgctgtcacagactgctgtagaggctgcccttccaatggaggtggtgatccacctgcctgcctcatccctgaggagtggcgggaggctgcctgcagtcatcttttactcattcacttggcgttcatgcagtcatgctaggtgccccctcagccctttagcctctttgcttcttcttgctccctgctcagctccaagatggcacccgaggccattgcccatcaagctcatggtgatgagtaaggttagatcattgatagtaggaagaatctcttccacattaggaatgcagtaccttcttgaatctactgcttttcctttctccaaggatccaaaaatctctggttttccttatctttttcagtaggcggtggtggtggtggtggtggtggtggtgatggtgatggtggtggtggtggtggtgacggtggtggtggtggtgacggtggtggtggtggtggtggtggtggtggtggtgacggtggtggtggtggtggtgacggtggtgacggtggtggtgatggtggtgacggtggtggtggtgatggtggtggtggtggtggtggtgatggtggtggtggtggtggtggtggtggtggtggtggtggtggtggtgatggtggtggtggtggtggtggtggtggtggtggtggtggtggtggtgatggtggtggtggtggtgatggtgatggtggtggtgatggtggtggtggtggtggtggtgatggtggtggtggtggtggtggtggtggtggtggtggtggtgatggtggtggtggtggtgatggtggtggtggtggtggtggtgatggtggtggtggtgatggtggtggtggtggtggtggtggtggtggtggtggtggtggtgatggtggtggtggtggtggtggtggtggtggtggtggtggtgatggtggtggtggtggtggtggtggtggtggtggtggtggtggtggtgatggtggtggtggtggtggtggtggtggtggtggtggtggtggtggtggtggtggtggtggtggtggtggtggtggtgatggtgatggtggtggtggtggtggtggtggtggtggtggtggtggtggtggtggtggtgatggtgacggtggtggtggtggtggtggtggtggtggtgacggtggtggtggtggtggtggtggtggtggtgatggtggtggtggtggtggtgatggtggtggtggtgatggtggtggtggtggtggtggtggtggtgatggtggtggtggtggtggtggtggtggtggtggtggtgatggtggtggtggtggtggtgatggtggtggtggtgatggtggtggtggtgatggtggtggtggtggtggtggtggtggtgatggtggtggtggtggtggtgatggtggtggtggtggtgatggtggtggtggtggtggtgatggtggtggtggtgatggtggtggtggtgatggtggtggtggtgatggtggtggtggtgatggtggtggtggtggtggtggtggtgatggtaatggtggtggtgatggtggtggtagtgacggtggtggtggtggtggtggtgatggtggtggtggtgatggtggtggtggtgatggtggtggtggtggtggtggtggtgatggtaatggtggtggtgatggtggtggtagtgacggtggtggtggtggtggtggtaatggtggtggtggtggtgatgagggtagttttccacattaacatcttgcaaaacaagtagttcaagatcttctccagtttgacttatagtagattgtctatttccagggctacttttgctaagagctgtggaaggctcatttataatgcattggcagaccttctatggtggaaaaggagacgatgtttctcaccaggccgaatctggagtagaaatagctgtgctgccccctgcctcttggtgggggaaggggacttctctgtggtttgatctccctcagaataaaaagttctcctgagtctcgtagctgatctaaccctcaggtcatcctgcagcccttccaggctttcttccggtttcttgctaagacacacccatggctcatttctgtcccgtggttgatgtggctgaacttcagtggttcagtttctactgttcgccctcggcctgtgcctgcctct

SEQ ID NO: 31841 - DNA, 1072 bp, Artificial sequence
  DNA replication origin
tcccacgccggcccccaactcttcacctgccacccccacaagggtgctcaccccagaggtgctcacctcccgggctgggagaccgcatctgaccggtcccaaaccccgcctgcagctggcagcgccggggtggggaggccccgccctcggccccgccccctgcccgcccctccctctcggggtccggggcgcgagctgcggcggcggcggccacggtcattggcgccgagcggttccggctgactggacggggcgggcgtcccgggcagcctagcgcggtacctcccgccccgcgcgcccagccggcgagggacattggaccagggtcgggggtcgcggccgctccagcgaggtaagagccgggaagaccgggagagaccacctcttccatcctgggggggtccctgggggacggtctcccaccggtgctgggccgcggcgccgggctgcgcccccatgacagcccagccaggggcaggggctggagagccctagcgatcgcgcaccctggaaggggcagtgtggtggggagcgcgggcgtgtgtatgcgcgtgtgcgtgtgtctgtctgtccatctgtctgtcccaaggatgtatcgggggagatgatgacgccccctctttgcagtcgcttctaggcaatttacccatgccaaagctgagggcagacttttccacgacggacttgaatggggctggcagattattatccggataatgcaggaagggataagcccaccaccacctgttgagctgggctgtcggcctatgcgggtccaactccccgcttatcacagcctgcagggtggcctcatttctccagctcgtgggacccggggcttccttctcccgcctgtgagaagggttgataggaggaggtgtccctgccaggagccactgagcagagatggactcgcgggggtgatcagggtggtgctatggggaccccaccgcaggtgctgggcgtgaggtgtcaaccacccaggcacaccccaaatttggatttccccaatcactccaaaacctctcattgtgattccccgatctttgctctcatcctaatttggcagttg

SEQ ID NO: 31842 - DNA, 1401 bp, Artificial sequence
  DNA replication origin
ccctgccaggagccactgagcagagatggactcgcgggggtgatcagggtggtgctatggggaccccaccgcaggtgctgggcgtgaggtgtcaaccacccaggcacaccccaaatttggatttccccaatcactccaaaacctctcattgtgattccccgatctttgctctcatcctaatttggcagttgatgaagatgcagctcgttaaaaatgttaaagtgaaatcaaattatcacttcctaggactgaaaatgatttgagaaataattccgggagcctggctggggaggaaagaagctcatattctgactagcttctccagggctgccccggggctgcctccggtacctgccaggcacgccggtggttaaggaagcccttgttcccagaaaggaagggattcacccactttgcactggattatcagtgactgggttagagcaggacccaggacaggatccccaagtgggagctgtctcagtttgacagatgtcacatacaagctgtcaccgaggctggcttctgctccacatccatcctggggaacacaagatggggcttcccctcccagccacctcacacccattcccctcatttccacaaacctgaagtcttgatcaattaacagccaggattgcctgggtgtgggtgtgggaccttgattggctctgatgtcctggattcagagtatctcaggaccacaggcatctcagtggcaggttggtggcacctctttgcagaccctgtagccagcccctcatgccgaagtctcctgcctgcctgagaagccctagatctgcctcacttctctgctaacgcagcccctggaggtagctgggggacacctcatctcagggccaggtccccagggtgcctaacagggtgaaatctgtgcttgtgcctgagacctccccacccccaaacctcctctctcttgtcatgtggaaggcagtggatgtgctgaggggctgggtagtccagttcaacggaagatagaggtggccctgctgtggctggggctgttggtgatgtgagaaccccagcatcctggctggctgcaccccaggccccacaagccaacagcacacttgagggagctcagccattctcaggcttgtcagctggggctctgtgacttggtgcagggggagattggctgaattgttcacgcttgtttggaagagactggccttaggttgttgtggaaaacgtcggctccaaaccctgctaggttcctgactgtgtgacactggccaacttacagaatgcttggaggctcagcctcctcacctgtaagatgggtctggcagggggttttgagaatcaagtaaggtcatgaatgaatgacagtgtccattttactggaggtggttctgggctggtgttgtggcctctgct

SEQ ID NO: 31843 - DNA, 935 bp, Artificial sequence
  DNA replication origin
ctttggaataatgggtcctttaccccccatcccccagctgtcctcaggagactcctgctgtctccttccctctccagtcacaccccacaccataaaccctcctagaccccttcaacatggacttgtcttcctggactgatgccaggttgtacttcattctttcttctttttattcattgatgatatcttccaggccttattctggctgctggcatcactgcctacaaaaagggcagtgcaatgggagatagaaacagtagacagaagataggaacccagtgtgaataggactatgaatggtggccagcaaggactgcaagggggccaagaccagtgactgaaactcagggcaaatgttggtcatggaagactaccaggaggaggcaaactaaaggatgagtaagaattaggcaaagaagtgaggttgggggtgggggtggaaaatgggcctggaggaaagtgggaggatgaagcactgggggaactgagtgtaatcattgctcatcatggcaggtgcaaggaaaaatgtagtgagaagagagactggggaaggcatctgaggtcgtcttatggattcgggactttaggagaagacttagatggattttgagccaagggatgacacgattgggtttggattttcgaatgaccatgctggggaatggagggagggagggaagtaagacaggaggcagggagactaggcaagaggctattccagtagtagaggcgatggcccaaacagggggttgatggtggaaaagagagaaatgagagggttcaagtgacatttgagaggtaaactcaacagaactaggatgaggcttccagggaagagtcaaggtaagtgccaatttcttgcttgagcactgggtggatggcatatcacatcattgattcagggatcacaggaggagcagatttgggcagctcat

SEQ ID NO: 31844 - DNA, 1216 bp, Artificial sequence
  DNA replication origin
gggcagaaggggccaacaatcactgtcacagccagcctggtcctcaggctctgtcaccttgtgatgtttgttttttccctttatgtatatgatctattcctcccaatcagactataattttccaagtggcaagaaacaactctcactcagcaaacatttgctaagcccttaccatgtatgccagtcacaggaaaggctcacaatcttgtgggacagagaacagtgatttcaacacggggagtggggaccagggaaggtgccacaaagaaagttaagcttcgtcttgcaagaatagcagcactccctatacctttttccatatcctggggtccagtgcagccagggatgccaacaacaggaccacctggacatgtcaaagggtgctgcacctcctgatgctgggctctgagaacctcctggagggaggggtttggagctgggtctggaaggaggagtccggaccggctccctggagaagggagtgtgtccaggttgggatcacggccagcagcaaaggcaattaagtgaagccagcaggggttggggtcagaggctgacaataaaggccaggggagggaaagccggttaagctcgagcagagcaaaaggcaaaacgaaataaaggcattgcgaaaggttgggagagaaagggaaaaggctggcgggtggagtgttggaatctaacacaactggagtgtccctggactctagcagtaatagaccctcagaaatgtgagcacagaggaacgccccatcttcaatctcagccttgccaccactctagaaagcagagaccctgtgttctccccaaaggacttctcgctgtcatcgcccttctccctcaaccccaagtcagggtccttccaggccctgcaaggggatctggaggagcaggaaccacctgggttggggtggggcctggcccgggcctggcgtggcttgcagggtctggcagctgtgtcccacatctggggtttcaggaattctgacctgaacacgcactcccacactcaccttcatcaccaggtgaacaggcacagaggggaaaggagggacacacccacccacgccctcctccacaaattaaagaatccgcagggccgtcggaggggaggctggatgtcctgggcgggtaagagaggtggctggagacgcgctttcccttcggtcctcctggggaacacttccctcggcttccttcactccaataatgtgaa

SEQ ID NO: 31845 - DNA, 1727 bp, Artificial sequence
  DNA replication origin
ctccgcgcgagacacaaaggagccggagctggcgggcgggtcccttcgcggccagctgtacatcagctctggtccctctcggctggggacctccccagcacaccgatcccacaaactctccacgcgcacaccccctcgcccacagacacaatgaaacacaccgaaactcaagcacgcgcgcgtagcccgggacccgagcgatccccaggggccgcgccggcacccccgggggaggtggaggctggcgagggggcgggaggaggctggggttggggggagcggacgggagggggggaggggttgcttggcaaccggtgtctgtgctattgctatgggaactggccatcctggggcggggccggccgggggcggggcgcgtcggtgccgctgggcgctttctacaggctcgggctgaggggtgggggcagaagtaggggcagaagtaggggcgggggcgcggtcggagccggggtaggggctgagttcctagcggatctagggtagctgggtaggcccagcccgacgcccgcctcgtctcccacggagtcaccggcccgctcctcgctgtgcggtggggtggtaaggggagcgacaccgagtctcccccaacggagacagcgacctcggtcgcggcccctcagcagggaggctgcggagacctcagtaggaaactagggtgtgcaggaccgatctgcggaccgggaacagactgggaggggcgtggtcatctcgtcggagctgggcgctgcgacccccaaatgcgactggaggctgagtagtaggtgtcatgaggctggaatgctaggggaccaggatttcagccccgggaccgtggggacagctccctactggggaggggcctggatgcctccaacgccaaaatgcgctcggcttcggcgccttccgggcgcccttctgcccggctgcggaacttgaactaacaggtggctggggaggggccacctggtcccagcaaggttgggcacaggtttgctgcttaagcgtggcgctcagatcggggaccgggtggagggagttggtgggggctttcctttgatttttcaaaaacccttggacagaattccttctttttcggtaacctttccccgcgtgttaactccgcccctcggttgttcgggaagttctcccacacacctagccttccttactgcagttccaacccctgcacagagttcagccgcggttgtttcttggtggaggttggcaaggagctcttaaaaccatagcccttttctggccgcatttgaagtcatctgaaaagaggctttgtgaagctggatctgcttagtgaagtcaacttggcccccttttcccctccagaccatgcttgttctcatctcatcggggatcctgcccacctctgtctcccacccccactcccaaaagaggctgctttgccctttgcaatttggagcctaatggcagggctgagtggagtctgcaggtaacagaaatgtgcaatcagtagttcgagaaacacagccacacaaaagagccagtgggctcatgatcacaccctcctcttttcttttgaaaaacatcatttttagtgtgcaattgctcagatcacgaacacctactcctctcctctggagaatgtacccacgtcactacctgccacagcacctgagctggatacagagcaggggctgcaatgccccatattccacctcacaagcaagttccatcaggtgccaactgcctgg

SEQ ID NO: 31846 - DNA, 1000 bp, Artificial sequence
  DNA replication origin
agggacttctgtctctgctaggcacagagcaggctcttggcagcatttgctggatggatgaactggtgactgagtgggctggagacggagggggcggtgctgtccaagcgagaccacactggcgggaagcacagccgacgtgtgaggttaccaccagcaggctcctccttgccaaggtgtcagagggaaaagaggccacagccaacagtgtttccaagaaaaggagcctgaagtcactgtgtcctgtgtggtgcctctgtgggagcacggccgctgtgcttctcacagcactttcacaaacatccttggcttggatgttcacagaaccctgggggtggggcggggcagggaggactcagggatagaaagaagatgaaggcagggaggagggacgatggggaggagaaaggaggaatggaagatgcagggagggagggaccaggaagaaagaataaagagaggaaggagggagggaggatggagggagggaaagagggaggatggagaggatagaggaaagctggaaggagggagggaagttggagggaggagggtggaagttagagagagggatggaggtgggaaggatggagggatggaaagaagttggagggaggggaggatggagggagaagggaggggaggacgacaggaggaaagaggaaagacagagggaggagggaggggaggacaggttttatttgccaatttgacagccgagcaaaccgaggctctaggaggttgagtgacaagccaaagactgtccagatggtgagtggcggagtcaggaccaggccacaggtcccctgactccaatcctgatggttttcactccggtgccttgtcctcctctaccctggccctggccctgagacactgggaggtcacctgacgcggcagggctctcggcaggtgtcggtaagtgacagggagatgcgagggtcagtcacaacccccacgagcgctgtctctgttcctgagtatcaatctgggcactcag

SEQ ID NO: 31847 - DNA, 1415 bp, Artificial sequence
  DNA replication origin
ggccaggtaaagacagggcgagggcccggaatgggcatgagtggccgtcttgcagaggaagcagaagtccagggtgccctgggaagagtgagcggggaagctcggcagagcaggcggcccccgcccatcccgactgccccaaccctcctggctacaagaaggcagcagcacctcagagccatgcccgatgtccccggaaagtgccatcggggaatagccacagagctgtgggtgacagtgacatgccaccttggctgaagatgggcaggcctggcgtggtgccgcacacgtgggcctcccagagcacccttgtcctgtcctgcattccctcgccctttctcctggagagggtagatgacttccgttcacatcctgggacccgcagccactgcagccttagaggggctggctccagctctgcagccgccattggggagccaaggtgccgggccccggttctacaccattccagcatctgtttccttccagcgcaataaatagacgtgtgtgtggagtgcgtgcatctgcgagtgatctgtggggcctgtacatgtgtcaggagtgtggtgtgtgtatgtgtttgagaactgtgattgtgtgtgtggtgtatgtgtgtgtttgaggactgtggtgtgtttgtgtgtgtgaagagtgtgggatgtgtgtgtgtatttgaggactgtggtgtgtttgtgtgtgtgaggagtgtggtgtgtttgtgtgtgaggagtgtggtgtgtgtgtttgaggactgtggtgtgtttgtgtgtgtgaagagtgtggtgtgtatatttggggactatggtgtttgtgtgtgcgaggagtgtggtgtgtttgtgcgtgttaagagtgtggtgtgtgtgtgtatttgaggactggtgggtttgtgtgtgtgagcatggtgtgtgtgtatttgaggaatgtggtgtgtgtgtgtatttgaggactggtgggtttgtgtgtgtgagcatggtgtgtgtgtatttgaggaatgtggtgtatgtgtgtgtatttgaggactgtggggtgtgtctgtatttgaggaatgtggtgtatgtgtgtgtatttgaggactgtggggtgtgtatgtatttgaggactgtggtgtgtgtgtgaggactatggtgtgtgtgtgtgtctgaggagtgtggtgtgtgtatttgaggactgtggtgtgtgtgtgtctgagacgtgtagtgtgcgtgtgtgtatttgaggactgtggtgtgtgtgtgtgaggactatggtatatgtgtgtctgaggagtgtgtgttgaggactgtggtgtgtttgtgtgtgtgaggactatggtgtgtgtgaggagtgtggtgtgtgtgtgcacatgtgtgtgtgttgggaagaggagcctgtgttgagggtctcctgggagaagcatgaacctccctcctggacag

SEQ ID NO: 31848 - DNA, 779 bp, Artificial sequence
  DNA replication origin
tgcagggctttgggcagaggagtggtgtgatctaatttaacagaaattgtttgacttttgtgctgagaataaactgtaaagggataagcgttgatgcaaggagactagattggagactattagaataatccaggccagagtggctcagatcaaaatggtagcagtggagatagtgagaagtaactaggttttggtttatacattgaaaatagaagcaatcaggtttcctaatgtattgaatgcagggaatgagggggagcagtcgcagttacttacctcgatactttttgtctgagcaattggaagaatgatgtttccttcaactgaggttagaaggctacagctggggaggaggttttgtgggggaaggtgggagttcagttttggacgtactgagtttgagatgtcattcagatacccagctgaagatgctgagtaagcagtcagatatgcacgtatggaatttgggagagagattcattgaagactgtgggatagaagtgctatatgatgtcttgagccagcgtagaatcaccaagggaaaatgagcatcatagagaagaggcgaggactgagggccgagtcttgggctgctgcagtgtcaagaggttggggagcagagcaacaaccagcaaagcaacctaaagagcaaccctgaggaaaggggaaagtgtgagaggaaggagtcctggtagccgcgtgaaggaaggaagtgtgtccaagtgaggaaatgaggagtagtgtcagcagctgccaagaaagccatgagaatgtgtctg

SEQ ID NO: 31849 - DNA, 1154 bp, Artificial sequence
  DNA replication origin
acctggcgacccccctcctccggcgggtctgcccgatgctaatgtcaccaggaacacattgcagccggagccggagatgctgactttccagacaaaggctcgatcggcttctctccgcgggcggtaaacaagatttcctgctctttttagggccggtccccgcgccgctccggggctcggctcggggagaaaagggaagccgccgccgccgccgccgctcggctctgcccggctggggccccgggcgcctccaacctcggctcgcggctgccaggggcgggcgggaggaagctggcgccttccgcgcgcgtcccctcccccgagtccctcggctccccgggcgccgtgcgtgcccgcgagtttgcagccacctcgccggggccggagcgtccgcgccgatgcagtgtgcctggggccgggaggtgggtgcgggaggagcgagcgcgagcgaggctgacatcagcagcggccgcggcggggagggtagccccatccggccaatggggaaatggcaaagaatgtggaggatttaaacaaaacagcatgtctctgccagacggcggggctgctccggagcggagcccggccggcgctggggaggctcgggcagaggggctttcctcggctcctttgccctttgaatccgctctccattgtgccctgagtgctgccgtgctccatccagcccctctgggaagtttctggtcccctgaccctagggacaagtcaccaatgcccaccacctatgtgtggtccagtaagcaagtctggggctggagaggcaatgggtgggatttgggaacaaacccttgcctggtttcagaggagagatcctggaaaactgggaagtgcagccgtgtgaatggaaatgaagtacaaacggggagggaacaaccagagagaacatgaaccccacgtagcctgttacctcgcctggcccggctctgcaatctttctgcagattgtgcaggctccgcgcagcagaaagaaagagtaggttttcgtatccgcactcctaagttcaaaaagtcacagtgaaatgtcaatgaaaatgcctggagtgttgctatttgatccatattaaacagatctctcattttaaccacaagaagcacattcttcagttactcaggaagcagcatggaactgctgaa

SEQ ID NO: 31850 - DNA, 1447 bp, Artificial sequence
  DNA replication origin
gggagtgggtgcgccccctccctccaaataagaaaatgaataaaccaaacccaagagcccccggcgcgcgctgtagctggggtttggggggcatcccgtcctggccgtgggcccagcctcccctccccgccctctgcggtcaggtaggggtgcgaggaggagccctgcgccctcgggatctgcacgccccgagccccgcgggaggaacctctgagcccttaggggaggtccctgcggggcccgacttctcgccgtcgccgcgggcttgggcgcagctcccggcacgtccgcccttcgaggctcgggacccggctgtgtcctttcgcaaaccgcctggctcggaaactttctgcgtctcttgtttcttccgccgcggggagcggcgcgcgagccgggagcggcgggggctgcgacgcggccacaggagggcgctccagcacgtggtgccggggccgcggctgccggctgggggcgccgggcgcggggcgggggctcgtcctccaagcgcggctctgctgtccttctcccgatcctgcgaagccgcgagctccagtattcaggaagtggtgactcagataggattattccggccccggcttccctttcttccccttcttcctccccacctttgtggtgattccacgactgctgagcgtctctgtccagggacagcgagggagcccaaagccaagcaaggcaacgtgaaactcactagtgtggtttggtgtggcaacacacatgaaatcagccacccagaccgtctttatatttaaatctggtgcctcgaaactatcagatatgtttttgagccactacttggtgagaggggcgatgtgctttgggagagaaaaagatgcataactgagaacatggctgagctcacaggggctgtccgtatttgccatctggaccaagggttaaggtaagacccaagtacaatccaagacaagatcaaagtagctgcaagtttacaaaacgcatcacggggacacaggctgccaaggagggagagatcagcttccaccagaatgaacaaccgagttttggagttcgttggcatttgaggaggtagcatttaagcagggtctggaagggtggatgccaggtgggtagacagagattcgagttgcatatgaccttgtaagtggagaagcaggacatagctttgtggagaaagagaagggcaaatgaatgggactggttaataggagtctttccagaaaaggtggagattgtcccaccttgtgggcagttgagctagagtaattcagctgggaggcatggatccctctactccatatcctaatgaccttgttttttgatatgagtttggattctaggagcaatgttgggactgcatgaaatacacagaaaattgcaggtgataatcaagaaaagaaccagttctagaatcttctctactaactacaaaatctctttatcctag

SEQ ID NO: 31851 - DNA, 1348 bp, Artificial sequence
  DNA replication origin
cggtggcggcggggccggggcgcagcgctccgcagcgggagccgcgggctgcttgggcggcctgccccgccggcccctcatgtcggagccgaggcggggggagaaggaaagcgaagggggaggggcgggcgcagggggggcggtggggagcgccggggccgggtggggaggcccgcggggccgggcgggaggggcccggccgacggaagcgggtggagggagaaggctcaatccgaattgctggggccccactccggatcgccttcagccgccatcttgtttcttccctctcgctcggtgactgggggaaccgacagcggccgcaggcccagagcgcggtcacgtgagctgcgccgccgacgagcctgggacggagcgaagcggcgcggcggccgctagggggagcgcgggagcgtcgagtcgggggcggggagccctgggcgcctgggctcggcacagcgcggtgcggctggactccgggcgcgggtggcgcggcaaaactccgggcgcaggtggcgcggctgagaggggcgcgcagctcgcgaaatgcccggcgtcaaaggccttcggagaccaaagtctccgcggaccgctggctggagcccaaagccggccggacctcctccccgcgtctcccctttcgcggctcggagaggaaggcaagggagcccccaaatatcattcccttccctccccctatggaaactgatgctgaaagagccagcgagagaaagaaaaaaaaaagtcgcggagaggggcggcccaagcgaccgagggcaccgggcagcgccagcgacagagggaaattagtcgaggggacagagagacaagccccctgaacttaggaaactctgaagcatggagctggagtccagaaaatgactccaatgacaactgctccggatctgtgccaggagccacgccccgggctgccacgcccggagggaggggcgccctaagacctgtagcgtggaatccgcactgggaaagcctcagtaaactccagaacgcaactactgcacgttccaatgtcccgccaccttcccagtgccccagctaggacttcgatcacctcagcaagaacttacctctcctttgcagtggaaaagagggaatcctgcctaaaacctacttcacggtgttaaatgtttgtattatcgggaaataaccttaatttattgacctgacaagtcactaggtttcagcttagcccaaaggacgaatcatgatgacatttcaggcaccctcaaaccttatcacagcgactcaaccctgagtggttgaggtcagctctttagataagagaaaggtgttataaacatatgaatatttattgagagaagtgaca

SEQ ID NO: 31852 - DNA, 962 bp, Artificial sequence
  DNA replication origin
gcgggcctccccacccggccccggcgctccccaccgccccccctgcgcccgcccctcccccttcgctttccttctccccccgcctcggctccgacatgaggggccggcggggcaggccgcccaagcagcccgcggctcccgctgcggagcgctgcgccccggccccgccgccaccgccgccgccgcccacgtccggacccatcggggggctccgctcgcggcaccgcggcagcagccggggcaggtgggccgccgcccaggctgaggtggcgcccaagacgcggctgagctcgcccagggggggcagcagtagccggaggaagccgccgccgccgccgccggccccccccagcaccagcgccccgggccggggggggcgaggaggcgggggcggcaggacggggggcgggggcggcggcggccacctggcccggaccaccgcggcccggagggccgtcaacaaagtggtgtacgatgaccacgagagcgaggaggaggaggaagaggaggacatggtctccgaggaggaggaggaggaggacggcgacgccgaggagacccaggattctgaggacgacgaggaggatgagatggaagaggacgacgatgactccgattatccggaggagatggaagacgacgacgacgacgccagttactgcacggaaagcagcttcaggagccatagtacctacagcagcactccaggtacccacccagcccagttgctgcagactccttccccacctcctctgccctccccccttgctcactcgtgtgctgtgcatcctgctccgatctccccccaaccccgcctcccccccaaacagaggggaaatgcgacggcacatcaagtggcaaaaaactagatttacaagaggaaagaggcgcattgttcaaaatggagattgcattgttgcagtttgcaggccacactcgctcgctctctctcccccccccaa

SEQ ID NO: 31853 - DNA, 1068 bp, Artificial sequence
  DNA replication origin
ctctcgcagaacgcctcgcgttcgtccagatcggaccggcaggcgcgcgcgcagggctcagcgccgggctccgcgtccctctgcggcgggctgaggccgaagctgaggctgaagcgcggcggcggcgcgggcgcgggtcccggggccagcgcggcggcgcgcggccggttggggtgggcgtggccggcggagccctcggtggcgagcgcgggcggccgggcggcggggaagcgcagggcccgtgagcgcgcgcgtcgcggggcgtcctccgacgcgggctcgcggcgcggcgacgcgcggttctcggcttgcgccaggcgcgggcccggcgggccagcgggcgcgcgtgcggcctcccggaagctggcctggttgtcggccggcggtgggggcttccggcggcgcgggtcaggccaggcgcgggcggcgggagcgacctcggccgcgcgcggccgctgcggggcctcaaggagtggctgcgcgcggggccccggtgtctcctccgcgctcgggcagccgcgggagtccggctttctgctgtgcggcggcgaggctgtggggagagaagaggagaggcgggaaggcggtgggggaggagaagcagtgaggggaggccgtcggggaaagccgaggaagccgagaaggaagaagagggaaggggaggctgagacgggaggccgagaggggaagggaagccaggaggggaggaggccgctagtggggcaggggcgctgcagaagaagggctctgggagggggagaggagatagaggacaagggaggcttcgcaggcacctgcaagaggagagatgggagggaggcccggaggcctggaagtgaagcagggagaacccggacgcagcgtcgcggccaagcggggcacgcgcttcccaggccccaaaggaagaaggatacgagggtcttgacctctaagattatagcttttaaaattacaaccccctatttactctaagactaaacatgtcttacaacactggttagataacaaacttttttgcccttcctttaatatatacgtatatgtgtgtatgtgtgcgtgtgcgtgtgt

SEQ ID NO: 31854 - DNA, 870 bp, Artificial sequence
  DNA replication origin
ccgaggaagccgagaaggaagaagagggaaggggaggctgagacgggaggccgagaggggaagggaagccaggaggggaggaggccgctagtggggcaggggcgctgcagaagaagggctctgggagggggagaggagatagaggacaagggaggcttcgcaggcacctgcaagaggagagatgggagggaggcccggaggcctggaagtgaagcagggagaacccggacgcagcgtcgcggccaagcggggcacgcgcttcccaggccccaaaggaagaaggatacgagggtcttgacctctaagattatagcttttaaaattacaaccccctatttactctaagactaaacatgtcttacaacactggttagataacaaacttttttgcccttcctttaatatatacgtatatgtgtgtatgtgtgcgtgtgcgtgtgtgtgtgtgtgtgtgtgtgtatatatatatatatatataaaacatatataaacatccgcctctttgctatttacagtttgttgagaaagtaccaagagcaaaccccagggggaaaggtctcatattacaggttctcctaattctttaagcgcccctgacaacagaactatttggttttcccatccatgtttacactgtcatcccggtctctgcagaatcgagcatttgtaagtggatttttatctggcttcttggacaccacttactggtaaaccacagctaaggaaggttttaaaagcttggctgggaggcagagaggcccctggttaagtataaaagcacacgtcgcttacatttttttccccattagatgatggaggaaagactcctaaatggtatggcatgaaaacaaatttttaaaattattaatg

SEQ ID NO: 31855 - DNA, 983 bp, Artificial sequence
  DNA replication origin
cagtggatcccacagcggggtcacaggtggagctgcctgccagtgctgtgccatgcgctagcactcctcagcccttgggcggtcgatgggactgggcgccgtggagcaaggggcggcattcgttggggaggctcgggctgcacagaaacccacggaggcggaggaaggctcaggcatggcgggctgcagtcccgaggcctgccccgtgggaaggcagctacaacccggcgagaaatcgagcgcagcaccggtgggctggcactgctgggggacccagtacaccctccgcagccgctggtccgggtgctaagcccctcactgccctgggccggcagggccggccggccgctccgagtgcgggcccgccaagcccacgcccacccggaactccagctggcccgcaagcgctgcgcacagccccggttcccgctcgcgcctctctctccacacctccctgccagctgaaggagccggctctggccttggccagcccagaaaggtgctaccacagtgcaatggtgggctgaagggctcctcaagtgacgccaaagtgggagcccaggcagaggcggtgccgagagcaagcgagagctctgaggactgccagcacgctgtcacctctcaggcagatcacaaggtcaggagttctagaccagcctggtcaacatggtgaaaccccgtctctaaaaatataaaaattagctggacacagaggtgcatgcctgtaatcccagctactcaggaggctgaggcaggagaatcacttgaacctgggaagtggaggttccaatgagccgagatcgcgccattgcactccagcctggacaacaagaacaagactccgtcaaaaaaaaaaaaaaaaaaaaaaggccgggcgcggtggctcacgcctgtaaccctagcactttgagaggcctaggccggcggatcgcctgagctcaggagtttgagaccagcctggtcaacaacagtgaaaccccgtc

SEQ ID NO: 31856 - DNA, 1892 bp, Artificial sequence
  DNA replication origin
tctcctgcctcagcctcctgagtagctgggattacaggcatgcacctctgtgtccagctaatttttatatttttagagacggggtttcaccatgttgaccaggctggtctagaactcctgaccttgtgatctgcctgagaggtgacagcgtgctggcagtcctcagagctctcgcttgctctcggcaccgcctctgcctgggctcccactttggcgtcacttgaggagcccttcagcccaccattgcactgtggtagcacctttctgggctggccaaggccagagccggctccttcagctggcagggaggtgtggagagagaggcgcgagcgggaaccggggctgtgcgcagcgcttgcgggccagctggagttccgggtgggcgtgggcttggcgggcccgcactcggagcggccggccggccctgccggcccagggcagtgaggggcttagcacccggaccagcggctgcggagggtgtactgggtcccccagcagtgccagcccaccggtgctgcgctcgatttctcgccgggttgtagctgccttcccacggggcaggcctcgggactgcagcccgccatgcctgagccttcctccgcctccgtgggtttctgtgcagcccgagcctccccaacgaatgccgccccttgctccacggcgcccagtcccatcgaccgcccaagggctgaggagtgctagcgcatggcacagcactggcaggcagctccacctgtgaccccgctgtgggatccactgggtgaagccagctgggctcctgagtctggtggggacgtggagagtctttatgtctagctcagggattgtaaatacaccaatcagcaccctgtgtttagctcaaggtttgtgaatgcaccaatggacactctgtatctagctgctccggtggggccttggagaacctgtgtgtcgaatctctgtatctaactaatctgatggggatgtggagaacctttctatctagctcagggattgtaaacgcaccaatcagcgccctgacaaaacaggccactcggctctaccaatcagcgggatgtgggtggggccagataagagaataaaagcaggctgcccgagccagcattgccaacctgctgaggtcctcttacgcgccatggaagctttgttcttttgctttttgccataaatcttactactgcttagtttttgtgtctacggtgtttttaaaagctgtaacactcgccgagaaggtctgcaactttcactcctgagcccagcgagaccacaaggccgtcgggaggaatgaacaactccagatgcgctgccgtaagaactgttaacactcaccgtgaaggtctgtagcttcacttctgagccagcgtagaccatgaacccaccagaaggaagaaactcccaacacatctgaacatcagacaggacagactccagacacgcctctttaagagctgtaacactcacagcgagggtttgcagcttcgttcttgaagtcagtgagaccaggaacccaccagttctggacacgtgcccaccgtggcctcaaagtgctgggattacaggcatgagccactgcaccctgtcgcttttttttaaatgtcactccctgatcctaagtagtgtaagacctcagatgaacgaatgtaactgccattgactaaagaactctagttggacaggcgttttagctgttgtccttaaaagatggcctttggttgacattcgttccaaaagcatgatgaaacactgaaaacttgtgtggttcctttgtcccaggaaagggaagatggcaagggcttatatctcgtttggcaaggagttcacagtttccctgcaagccccagaaggtgggtggtaacaatgggatgtgtttggctcctcatcctcctgctgac

SEQ ID NO: 31857 - DNA, 993 bp, Artificial sequence
  DNA replication origin
acggcctccgaggttagacatgtccctggcggctggggcggcgggcgggacgggggcgacggcgaggcgcggcggagtcaccacagcggccggggctggggcccgagcagccggcgacgcgactgcagcggcctgagggtcccggatgtgccaagcgtcgtcgccatgagccgcggagggagcggacgccacggcctttccctcctctaggcgaggcctagtagcggacagggctggtcagctgaggtgggcggtgctcggcggcacgggagcaggactgtggacttggccgcttcctcctccacccgcccccttgtctgagtgacgccggacctgaggccgccgcggccatttgtcggctccgggggggcgagggggagatgggaggcggggccggtggggtcagcggggcggggccggcgggcgcgcgccagatgcccggagcgggcaccggcactgagggaaggtgtgagctgccgccgagggtcccaggcggaacgcgggaagggagcaggcaaggagcaaagtggcggcgggagcggcagctgtgacccctggaggggtttagtgtccggtccactcaagggagagttttagaccaagcagggccgactgcatttattagacgcccacagcatgcagggcgctccaagaggctggggcgaggaaaattagaaccaagtctgctacccgccgggaacttgtcgtatttctggcgagggaagagacagcattcccacgccgatggttccagcaaagccccaggagtgctgttcctggtcttgtagttgacgcctccatccgggactcacctggtggagaaaatcgggttacctgcagagtcccgctcttttcaggtgcagccaaggatagggagatgatacgtcttaaagaattaacaagataaaccttggagtaacgtatgaagagttgttcatacactactgtatttatctcaggagcagaaagataacaactttctaaagatgtacc

SEQ ID NO: 31858 - DNA, 1157 bp, Artificial sequence
  DNA replication origin
ccccgcctcccatctccccctcgcccccccggagccgacaaatggccgcggcggcctcaggtccggcgtcactcagacaagggggcgggtggaggaggaagcggccaagtccacagtcctgctcccgtgccgccgagcaccgcccacctcagctgaccagccctgtccgctactaggcctcgcctagaggagggaaaggccgtggcgtccgctccctccgcggctcatggcgacgacgcttggcacatccgggaccctcaggccgctgcagtcgcgtcgccggctgctcgggccccagccccggccgctgtggtgactccgccgcgcctcgccgtcgcccccgtcccgcccgccgccccagccgccagggacatgtctaacctcggaggccgtaggaacgggcctgtcgaagtgcgcctgacaggtgaagggggcgcggcgggccgggctgggcagccgcgaggtgggcgagctggcaggggtgcttgtggccttgggaagggccagggtcgcgatcagtggtgagttgggggtcggaggtgtgggaaggcctagttcagagagagcaattggaaaaccacttgttccggtttggacattgtttaaaaagccgaggatgactcggggcgggggggtggtgttttgtggaggggagggtacaccagttcgcatcgcaggcggatttcaggtcggaaagtcttggtcaaggagcccgacgctgcctcccggggctcggggaacagcccctgggctaccgcccaggtgagatcgtgaaggggatgaagagctcccgtggcgaggattattgaattcggttgctgactgcgcgcagtaaacactccttaaagatggagcgcttaacgggagggtgtgcgtctgtgttcccgggttgttaccttgcacacacccacttatgcccgcgtgaaaaacctttactccccgccgccggccaccgctgccagggtcacacaccttaaactcacgtctctctgaggaggggagacaggttgacttccggtgtgcctgtctgatccgacggcttgggctcattgtacactgtgttttggaagtgtctgattgtagggtggcatgtttgggggttgttccttataggccgcagaacttgtgtctcacttctagctccagacctgctttaa

SEQ ID NO: 31859 - DNA, 1084 bp, Artificial sequence
  DNA replication origin
gagagcgcagggttgggggtaaggttatagattaacagcatcccaaggcagaagaatttttcttagtacagaacaaaatggagtctcctatgtctacttctttctacacagacacagtaacaatctgatttctctttcttttccccacatttcccccttttctatttgacaaaaccgccatcctcatcatggcccgttctcaatgggctgttgggtacacctcccagacggggtggcagccgggcagaggggctcctcacttcccagacggggcggccgggcagaggcaccccccacctctcagatggggtggctggccgggcgggggctgccccccacctcccggacggggcggctgctgggcggagacgcccctcacttcccagactgggcggctgccgggcgaagggtctcctcacttcccagacggggcggctgccgggcggaggggctcctcacttctcagatggggcggctgggcagagacgctcctcacctcccagatggggcggcggggaagaggcgctccccacatctcagacgatgggtggccgggaagaggcgctcctcacttcccagactgggcggccgggcagaggggctcctcgcatcccagacgatgggcggccaggcagagacgctcctcacttcccagacggggtggccgccgggcagaggctgcaatctcggcactttgggaggccaaagcaggcggctgggaggtggaggttgtagcgagccgagatcaccccactgcactccagcctgggcaacattgagcactgagtgagcgagactccgtctgcaatcccggcacctccggaggccaaggctggcagatcactcgcggttaggagctggagaccagccaggccaacacagcgaaaccccgtctccaccaaaaaaatacgaaaaccagtcaggcgtggcggcgcgcacttgcaatcccaggcactcagcaggctgaggcaggagaatcaggcagggaggttgcagtgagccaagatggcggcagtacagtccagcttcggctcggcatcagagggagaccgtggagagggagggagagggagagggagagcta

SEQ ID NO: 31860 - DNA, 1290 bp, Artificial sequence
  DNA replication origin
ttcgctgggcctcagggggaggggaatgtgaatgtggcccggcccagaggaccctccatttcatcagttttggattgggcaacagaggaagcagatgtctgggctgcagacctgctggtctgggcaggggtttgggaaccccggggttgcctgccatggtctagaggagatggctgcggctacttcccacagggtggggtggccactaggggcttgaagatttgctcactggagcctttgtgcttggccctcagcagcacagctggggctgtggtcccgtgcaaggtgtgctgagggttgtgtaggtggctggtggtggcagcttgtgccagagtgacacaggcttctgtgggcctggctgggggcagttaaaaagccgaaaaggtacttggctttgtgagggcaaggcttgggaggcggggccctgcaggacgtcatgttctctgtcctggttaggaggggggaggtgttgggggggggaaggtggggcagatcccaactggcccctgtccctgggctgcaagctgacagcaggccagggaagcagtgaggccttctgccctggccttggggagaaggagtgcatgtgtgaggctgggatacagtggccctggagtggggctagggctcatcgccagcaccaggcgcggggaggatttaaaaccagagtcctgtctctgagccaccccacagggacgcttgatccaagcctgttaaggccgtggaactcgagggtaggcagtgggctgggccaccgtgggttcaggatggaggtgtgggggctgccctggaggaacgttagtgtttctgagagcaccttagtgttgctctgcctcagccagctgggcaaggagttggggagcggggaggaggccggcgccatggagtggggaagggagccgtcactgttggggatcagccgctagtgtaaacgagcatctccacccacccagataagccccccacccaagtgtggagccctgctcagggagtacctcaagggccccggcctgggtggcgccagcaggcttggacactgccctggcagcaggggccccgtggaaggcaggatacccagcagggggtgccacccagtgtggatggaggggcagggcgggggcgcccctgagtcactgggcagaggcacgagcacgtccacatagctgagcaggaagaagcccgactggccgtccagcatgccctcgtatcagttctcgttcatctggttgatcagcatgaagacatcgccctcatggaagcccagctccctatctttctccggctccaagt

SEQ ID NO: 31861 - DNA, 930 bp, Artificial sequence
  DNA replication origin
tcctcttcactgaccagctttctcacttagttctctaagatagtgaggatctgtctgcttttttcttgaccattagtgtataggaaaaatgctctcattgtctgtaaccatttgtcgccaaggccataaagacattgaactaattgccttattggagttcattattggaagtcttcaggagtttacacatttatatacaaagtaagtagaccagctcatttgtcttagctcatgtgtaatgatctttaatgcatattgaaaaattactattctcaagtaaagataatgtatacctcaggtcatttacagtctcaaaggtttgtcagtatgcttttaaacaatcctgggaacagatctagattgaaggagactaaagaatcatgaactcgaggcggcgccggggcgggcgccgagctggcaagcgggtggtggaggcggtgctgatgggggccgctgaggcgcgcagagggttggtggtgcccgggagcctgtcgctggcggggtctgggcaggggggtctgggcggaaggttccgcggcaggaggcagcatgtcggttgccgggctgaagaagcagttctacaaggcgagccaactggtcagtgagaaggtcggaggggctgaggggaccaagctggatgatgacttcgaagagatggagaaggtggatgtcatcagcaaggcggtgacgtaagtactgtccaggaccatcgagtacccgcagcccaacccagcctcgcaggctaaactgaccatgctcaacaccgcgtgcaagatccggggccaggtgaagaaccccggctacctgcagtcaggggggctcctgggcgagtgcctgatccgccatgggaaggagctgcgcgacgagtccaacttcagcgatgcactgctggatgccggcgagcccatgaagcacctggcagaggtgaag

SEQ ID NO: 31862 - DNA, 1422 bp, Artificial sequence
  DNA replication origin
tgcactgtgggagccccttcctgggatggctgaggccggagccggctccctcagcctgcggggaggtgtggagggagaggcacgggcgggaaccgaggctgcgcgccacgcttgcgggccagctagagttccaggtgggcgtgggcctggcgggccccgcactcagagcggctggccggccctgccggccccgggcagtgaggggcttagcacccaggccagcagctaccgagggtgcgccgggtcccccagcagtgctggcccacgggtgctgcgctcgatttctggccgggccttagctgcctccccacggggcagggctcaggacttccagcccgccatgcctgagtctgccccgccccgccgccgtgggctcctgcgccgcctgagcctccttgaggagcacggccccctgctccacggcgcccggtcccatccatcgcccaagggctgagaagtgcgggggcaggccgcgggactggcgggcagctccacctgtggcccccgtgcgagacccactgggtgaggccagctgggttcctgagtctggtggggacttggagaacctttatgtctagctaagggattgtaaatacaccactcagcactctgtatctagctcaaggtttgtaaacacaccaatcaacaccctgtgtctagctcagagtttgtgaatgcaccagtcagcaccctgtgtctagctcaaggtttgtaaatgcaccaatcgacactctgtagctaatctaatggggacgtggagaactttcgtgtctagctcagggattgtaaacacaccaatcagtgccctgtcaaaacggaccaatcagctctctgtaaaatagaccaatcggctctctgtaaaatggaccaatcagcaggatgtgggtggggccagataagaataaaagcaggctgctggagccacccgtaacaacccgctctgattctcttccaaataatgggaaggtttttccccccgtttttacagtaagttttgctgctaatcactttggattttcactgcatttatgagctgtgacattcactgtgaaggtttaaggttttgctgttgaagctggcaaaaccacaaaaccaccaagagaaactaacagttccacaggcactgtcttaagagctgtaacacccaccatgaaggtctgcagtttcactcctgagccagcgagaccatgaacccagcgcaaggaaaaaagtgcaagtacatccgaacttcagaacatcagaaagaagaaactctggacaggccccctttaagaactgtgacaccacctgcgagggtctgcggcttcattcttgaagtcagcccaagaacccaccgattttagacacactgggttcaagcgattttcctgcctcagccttccaagtagctgggattacaggtgtccaccaccacgccggggt

SEQ ID NO: 31863 - DNA, 1334 bp, Artificial sequence
  DNA replication origin
tttgttaaacttttaaaccatttttttaacttataaagcaaagaaatcatttaattttcaagtcaagtttccttgatttgagctcaaataatagctcaaatcaaatagctgatggcgggtgcctgtaatcccagctactcaggaagctgaggcaggagaatcacttgaacccagaggtggaggttgcagtgagctgagattgtgccaccgcactccagcctgggcaacagagcgagactccgtctcaaaaaaaaaaaaaaaaaaaaaaaaggctgatatatggtgtgcgctaggcatgtggtaagcactgcttagtggacctcatttaatcttcccaataatccagtgaggtgggtgttactatcccgttgataggaaagaaagctgagctgcagagataaggcagaactcccaaggcctaccaggcagcagagtggggcatcatacatgcctgaccccacgcaaagaccatcactactgccagccgctgcctggctgtgtgcaggtggggagagacctaaaaggtagggagggagagaagattcctccagtcactattttctaagcaggtcaatgcttagaccaatgctgagttctgctgtgtgcccaccctggagggtcccaaggtgccaccaggtctcagacacactgagattctcagagtaagtgtggattcaacgggtgggcaacgcctagcgggggcaaacatatagagataagggagttccagaacgagtgtggccagattcagcttcccacccaaccttggacccccaggaggtggtgtcaagaggggccatggcctggggtgcgggcgtctcttcctcccagaacactagcctgaatcagccagctctgcgcacacacagccaggtccacaggcacaacaatttcctggggcccctgagggcagggggtctgctggggctggggcttgtgatgtgtggagtgagcgcaggctcagatcagggcaaggcagcttgtccagagaggcagataattcccaaacagaagacctccaaggcagagggccctggggctggactcctggcctccaggaggttgttctgagcttaccctgtggacggattggagggtggccctctttccccacaaggatcaagagggactgggggatggtgggaaggcaatctggccaggagaagctgcgggggagactcccgccatccccagtcccaccatctcagccccgcggcctcttcctccctggagacagccaggtgtggcccaggatcccgggaagtgcagcaggggagggggtggcgtcttcgctcctcaggcgctggcccggcgccaggaagccagtgcgccgg

SEQ ID NO: 31864 - DNA, 1148 bp, Artificial sequence
  DNA replication origin
ggctccagtgtgtcagggatgggggagagcctaactaaatctgcctgcacccctccaccaaagccacgagtcggtggtcttctccggaagtgcatggcccctccaagctcccacactgaccacatctcctcctgcctcctaaggtgacccggaccaggggccaggagaccgccgcttgccgaggctgagggactgaaggagcagggtccaaccaggccccccgtagggctccttcgccactttctcaagcgttcctcgacgaggaaaaagtgtaaactgagtcactaagcacactgggtcccggaggcggggtcatcgagctgcccagagctggaccaacaaaccccaaggaggacactgccccggcgccccttccccatggaccccgcagcgcactcacgtcggctgggcgggcctcagggagcccaagggccggggggggccgagccggcaggttaggccccgaccatcgccctgggcgtggcttccaggggcgaagccggagaggctgcacggaaccggagctggcaacgggagctaagagggacagggacactcaggagtgctgtcaccgatacccaaagcagctgtgtctgggcggggcgaggaggggccagaaggcctctgctggggaccttgggggcatggggaagacaaggcccgaagcagaaggccggggcctggagccgggagggctgcgtctgaaggggtgctggctgatcgctagcagaacccaaggagggtggggccgcccctgcccggccttcccccttctcccctcacctggggatttgctgtccctgcgtccctgcgtccctcccgcacgcggctctgggaatgctgggctggggctggttgtcttgtccgggcgttcccgctcgcggggagatcatttgcaccctgaatcccccactgcgagcacttccaaccggactgcagaccgccagctccgggcccgcctccctcaccagggcctttccccgcacagcccggccgggcttggaaaaactccgagcgggattcccagcgcagggacgcccaccaggcgcggtgtctcgggctggataagaaggggacccggccacggctccttccccgacctgggggcacacagagaaggagagagattggtggggggggcggggtgc

SEQ ID NO: 31865 - DNA, 1242 bp, Artificial sequence
  DNA replication origin
cgagcgggaacgcccggacaagacaaccagccccagcccagcattcccagagccgcgtgcgggagggacgcagggacgcagggacagcaaatccccaggtgaggggagaagggggaaggccgggcaggggcggccccaccctccttgggttctgctagcgatcagccagcaccccttcagacgcagccctcccggctccaggccccggccttctgcttcgggccttgtcttccccatgcccccaaggtccccagcagaggccttctggcccctcctcgccccgcccagacacagctgctttgggtatcggtgacagcactcctgagtgtccctgtccctcttagctcccgttgccagctccggttccgtgcagcctctccggcttcgcccctggaagccacgcccagggcgatggtcggggcctaacctgccggctcggccccccccggcccttgggctccctgaggcccgcccagccgacgtgagtgcgctgcggggtccatggggaaggggcgccggggcagtgtcctccttggggtttgttggtccagctctgggcagctcgatgaccccgcctccgggacccagtgtgcttagtgactcagtttacactttttcctcgtcgaggaacgcttgagaaagtggcgaaggagccctacggggggcctggttggaccctgctccttcagtccctcagcctcggcaagcggcggtctcctggcccctggtccgggtcaccttaggaggcaggaggagatgtggtcagtgtgggagcttggaggggccatgcacttccggagaagaccaccgactcgtggctttggtggaggggtgcaggcagatttagttaggctctcccccatccctgacacactggagccggggcgggagcggggcttgtgaccactccggagagctttgggggcccctgctctgggactccgcacggatagtcactgtctcagagtgcattctccaggggccactctcgtggaggcatccggggggtcccagggcaggtgggcagcctttttcggggggggtgcggtgtgagagccggagagcagggggcggggcgggcccggctggggctcacgtctgcgttgaagcctctggggaaggagagagaaaccaagagaaccggttcccccgccttgacagcggaggccctcacaccgaggcccttggactaaaccgggcagggacagcccgcaggtaaagctgttctccggggcgtctgca

SEQ ID NO: 31866 - DNA, 1061 bp, Artificial sequence
  DNA replication origin
gactcgtggctttggtggaggggtgcaggcagatttagttaggctctcccccatccctgacacactggagccggggcgggagcggggcttgtgaccactccggagagctttgggggcccctgctctgggactccgcacggatagtcactgtctcagagtgcattctccaggggccactctcgtggaggcatccggggggtcccagggcaggtgggcagcctttttcggggggggtgcggtgtgagagccggagagcagggggcggggcgggcccggctggggctcacgtctgcgttgaagcctctggggaaggagagagaaaccaagagaaccggttcccccgccttgacagcggaggccctcacaccgaggcccttggactaaaccgggcagggacagcccgcaggtaaagctgttctccggggcgtctgcagagcccgcatcccaaccctgacccaggggccggggcgcaggctcctggagggaggcggtgctacgggactctgcggattctctgcgggcgggaggcgtccaggcgggacagggcccggggagcggctggcaatgggctgctcttcccacttgactgatggaaaactaaggctcagtcacctgagtaagcgtggtgtcgacctcagagcgggcaatcacccctcgttttaaaaccaaagtttccctcgcagtcgatttggaccaagactacccacaatctccccaccgcaggactgaagcgaggctgaaatcttagaatcaaccccacggaatgaagaggttgtcgtaattccagcactgagtgtaagaatggaagccttacatgtgattttattcaagtccccattttagaaatggaaaaactcaggcccgaaggcgaacggcgaatgcagcatcgggactcgaacccaagtctgtccccgagtgcggggctattccaggctcggtggtcttgacctccacggccctcctccttgttgcctgcagaaaaacgccgcggccacgatgccggcgtatgtggagggggatgtctacctggtggtggagcaccccttcgagtatacccgcaa

SEQ ID NO: 31867 - DNA, 1449 bp, Artificial sequence
  DNA replication origin
gggaagtgcgccaccgggagcctgggcaggaaacggaggggcgctgcgggggaagagcgctggcatccagccatccatcccagagaagctgcctgctggctggcaggggcgcgaaacaggaaacagccgtggtctcctgccctgtccgccgggtgccgttttccaccctggccacaaggcggcgggctgccgctgcaggagctcgagtgaaagcggcacagtcctaaggaagccaaaccaggacgacccggacagtctgggtggaccccctgctgctgccaagtgcttagaagccttacctcgtttagggctcacaaccctaatccttaggtattgtgcttacaccagaggacgctgggcctgggggagcgtcctcgcgtgtaagttaagtggctgtcagcaactggcaggtgacccagcagagtccagttgccctttccctagtctcgaaacctgagctctgcattgtaacgagtcgagcggagggaacatccagcagcgggcctacggaggcgtgtctcttcgtttgggcatcccggactcagtcctggcacatggtgggcatcagtgttcatggtaatgacatcaggcacagcgaaagaaatcagaggctcccaaggttcagcggtcatctgtccatcccctccctttgggctaaagaacaaaccgagaccctgagagaggaagggaactgcccctagatcatcacacagctggtggcagatgaaagaacggttctgagcatctctttttcccactcgggctgcccctccttgaaaagttcctaaagttcaaaatgtcagggtcgcccagagtgttctgaggatgtaagcgtgtttttaaaacgtgctttattttcgatttccctgattaacacaaccggattctgaagagagaaaaaaaacaacctcaccataaccggacgcctttctgaaacaaacccatcaatgttggaagcacccaaacaaacccatctgaaatgttggaagcaccctcaaagggaagcagacgcctgagtttcacatccaccctctcatctgaccccaggctcctgggagactggcaaggctgttgagccggcggcaagcccgcaatcccccgttccgtgcccagatgcgcttcggaatacagaacagctgggacttggaaagagactatggggcacacacctgctgtaggtcacataacctcccagcagggcttggggcagcagccggtcatcgagctcatttgcatttctgcagcaaaacatgaatattcacacaagtttgacaaataaagaccatcaacagcctcacatcagttcaagcgcaattttgccaccaattggattacgaaaaacttctgggcttccaggcagctttggagcttgggaatcgcagatgagggactaggggcttgcaccgctcccgtttcgcggttggggagagggagctcattccaagtctt

SEQ ID NO: 31868 - DNA, 1095 bp, Artificial sequence
  DNA replication origin
ggggccccactcaggatcggcttcagccgccctcttgtttcatccctctcccgcagcgcggtcacgtgagatgcgccacagaagagcctgagaccgagtgaggcggcgcggcagccgctagggggagcgcgggggcgtcgagtcgggagcgcggagcccggagcgcctgggctcggcgcagcgcggtgcgcctggactcggggcgcggatggcgcggctgagaggggcgcgtagctcgcgaaatgcccggcgtcaaaggccttcggagaccagtctccgcggacccctggctggagcccaaagccggccagacctcctccccgcgtctccccttccgcggctcggagaggaaggcaggggagcccccaaatatcattcccctcccgccccctagggaaactgatgctgaaagagccagcgagagaaagaaaaaaaaaagtcgctgaggggggcggcccgagcgaccgaaggcaccggacagcgccagcgacggagggaaacttggggcgggggggggacagggagacaagcccccagaattttggaaaccccaaagcttggagctggagtcctgaaattgactccgatgacagctgctccggatccttgccaggagccacgccccgggctgccacgcccggagggaggggcgccctaagacctgttgcgtggaatgcccacttggaaagcctcagtaaactccagaacgcaactactgcacgttccaatgtcccgccaccttcccagtgccccaggtgggactttgaccacctcagcaagaacttacctctcctttgcagtggaaaagagggaatcctgcctaaaacctacttcacggtgttaaatgtttgtattattgggaaataaccttaatttattgacctgacaagtcactaggtttcagcttagcccaaaggacgaatcatgatgacatttcaggcaccctcaaaccttatcacagcgactcaaccctgagtggttgaggtcagctcttcagataaaagaaaggtacatattaatatttattgagagaagtgacaaccgaaaagtaatttaaagaaaaatagttggctgggcgtggtagctcacacctgc

SEQ ID NO: 31869 - DNA, 687 bp, Artificial sequence
  DNA replication origin
tgtcctcagactcctgggtctcctcgacgtcgccgtcctcttcctcctagctcccgtggtcatcgtacaccactttgttcacggccctccgggccgcggtggtccgggccaggtggccgccgccgccgccgccgcccccgcctcctcgccccttccacccgggcgctggtgcttgggggaccagcggcggcttcctccggctactgctgctcccccctgggcgagctcagccacggcttggaggctgcctcaacctaggcggcggcggcggcccacctgcccctgctgctcgcggtgccgcgagctgagccccccgatgggtccggacttgggcggcggcggcggcggggccggggcaggggccggggcaggggccggggcgcagcgctccgcagcggaagccgcaggctgcttgggctgcctgccccgcctgcccctaatgtcggagccgaggacgggggagaagggaaagcggaggaggagggacgggcgcgggtggggaggcctgcgaggccgcgcgggagggccccggtcggcagaagcgggtggagggaaaaggctcattccgaattgctggggccccactcaggatcggcttcagccgccctcttgtttcatccctctcccgcagcgcggtcacgtgagatgcgccacagaagagcctgagaccgagtgaggcggcgcggc

SEQ ID NO: 31870 - DNA, 957 bp, Artificial sequence
  DNA replication origin
ctccacccgcttctgccgaccggggccctcccgcgcggcctcgcaggcctccccacccgcgcccgtccctcctcctccgctttcccttctcccccgtcctcggctccgacattaggggcaggcggggcaggcagcccaagcagcctgcggcttccgctgcggagcgctgcgccccggcccctgccccggcccctgccccggccccgccgccgccgccgcccaagtccggacccatcggggggctcagctcgcggcaccgcgagcagcaggggcaggtgggccgccgccgccgcctaggttgaggcagcctccaagccgtggctgagctcgcccaggggggagcagcagtagccggaggaagccgccgctggtcccccaagcaccagcgcccgggtggaaggggcgaggaggcgggggcggcggcggcggcggcggccacctggcccggaccaccgcggcccggagggccgtgaacaaagtggtgtacgatgaccacgggagctaggaggaagaggacggcgacgtcgaggagacccaggagtctgaggacaacgaggagcatgagatggaggaggacgaggctgattccgattatctggaggagctggaagacgacgacgacgccagttactgcacagaaagcagcttcaggagccatagtacctacagcagcactccaggtacccacccagcccagttgctgcagactccttccccacctcctctgccctccccccttgctcactcgtgtgctgtgcatcctgctccgatctccccccaaccccgcctcccccccaaacagaggggaaatgcgagggcacatcaagtggcaaaaaactagatttacaagaggaaagaggcgcattgttaaaaatggagattgcattgttgcagtttgcaggctacactcgctcgctctctctctcccccccaacctcctctttttcctcttcaaaa

SEQ ID NO: 31871 - DNA, 1310 bp, Artificial sequence
  DNA replication origin
cggccccggggagcgctgcggctctacgtcaacctgcggcggccgccgactcatttggggccacgctggttgcattcgtcacgccggcgatgcctctcaaacccgcggcctgccgaggacgttcccacacgggagaccccagcgacgcgggcgcatctgtggctctcgagaaccgggccgcggagccgccgcgagcgcaagcgaggaatcggcgactgcgggggtggacagctggggcttgtagtcccctcgctaccctctattctggaagaggcgggtcgcggccgctgaactccagctctgcgcctgcccaggcggccgcacgctcaggggcgtggcatgggtgggtcgtgagttgggcggggcccacagggcgtgcgcgacgcagcggcgcggcgcgtggcgtaaggggcgtggcgccagtgggcgtggcgtggcgcagtgcgaagggacgcggtgcgcatgcgcgtgagggctgccgcgggtgggtggtatcgaggcctgtcgggtcagggcggttcgcgggtgctgtcagagctgggccggggcccctaggcagggtagccgggtcgtagaggcgggggccggtcgcggtcggtggagcgggatgaggatgtaggaggggcggacgtggcggaagccgcggggtccgcggggtcggtgcctctagggagccagggaggcctttcccgaggctcctggggaagaagaggcgaagcgagagtccctggggaacccccactccactcccagctggagactgggttgtgtctgcatggaccagagcccacagtgcgagttgctataggcaaccagccagggtggccagctccttcccgtttgcccgtgatgttctggttttgggaccaaagcatcctaggcctccagcccactgcagtgaccgaattctgcgccccctgcccatcttctcccgcagcttccctagattaggcttgggaggcaagaggaggcctcctgacctttcacactgcctttttaatattaagatgaagtcacactccacaactttcttccagccaggcccagacatgtccgtccttgtaagttaaaagcttccatgggagccttccttcctaatcaaggtaggtagactacaggaaggtacatcttgttttatattttgtcctgtagaagtcagatttcagcccagttgtgtaggagtgaggatgagcctatgcttatatcagagctttgagtacagagacatttggtctggaattttagtcagcctcttcaaccccagaatttataggttcaatcagaacagacattagcttaagttttcccat

SEQ ID NO: 31872 - DNA, 1127 bp, Artificial sequence
  DNA replication origin
cgcgctcctactagcgttgcagcaaagctccggggtctgggcgggtcacgcgcgcagaggcgcacccgggttgggagatcggggcgttgtgccaaggaccccggcggcgctggcgggggcggcccggccccggaccgcgacgcggttacctttcgtgacccccagcccaggcggcaggctggcgggcgcgcgaccggcgcggctcaggtccacgtgggacggcgcgcgcgcgccaggcaggccccctccttggctgcgctcagcgctcgcagcacatggtcggcggcggcgcgcccccgaggccggcggagaccggctgcagccggtataggataagagctaggcagcgacgcggggccggggcgcgggcggcagcacgcacggcccgggtcgcaggcggccggggtggggggcggggggagggtgtggctcgggtgcccgagtcgcgggagtgggtggagggcccgggcgctcgggcctcaccagcccgagccaacttgcgctagagtcgggcccgccccctaaggggttaatccttttctcatgttaccgagcggcttataaggagggggaggccaagcctccgccttattgggagcctttgggggtttattctcttcccttctaacttggtgagttggtttattattttacatgtttaaaagtttgattgtgggatgtgggttgttttttaaaaaatatgtgttggggcctttttttgtgatgggaggcggaggagaccactgaacatcttcacattttggagaggttattcccaaaaatattcgctctgacagttaggaatgcccagggccaccgggatgacgcgctcgcgccggtgtgggtagctgagagttgaatgtccgtgaccctggtacagttgggtcccggaagatacctaaaggcacgcctggcctttgagtgccccctgccccgggttgggggctccgggacgtcggaagagtcgggggctccaggctcagcccctccgcggattttccgcatgaagttgcctgcgcgtcgcaggagcgaaatgtcagaggtaccttcctaccccaggctggcgcgcgcacgcaggccgggcactgaggcagcgcgagggaaagtggggctccctgcctcccccg

SEQ ID NO: 31873 - DNA, 1314 bp, Artificial sequence
  DNA replication origin
ctgtctcggagcacctcggccaggcgcgagcgcgcgggtccccgtccccacccccgggcgccttcccggcgcgcccaccgcccagtcccgcccgcgccctgaggatttagggatttagcggcgagggggaacacgcgcgcgccggggctgatcccgcgcggcgctcgcggctgcggcggcttcgcgcccgccccgggcagaacaggttccttccagtttgggtgtgagctgcgcgcgcggcgcctgagttcctcctgcagcgcccacttcccccagtttcgtcaactcgcgcacccccacagttccccttccggcagtggggagggagtgtcgcagtgggccccagggagcgagcggccgggccgctgcgggtgccttgcttcccccactttgctgcaccggcagcagcggcagcaacagcatccgcgttgcgcgaaaggaatgtgagcagccgggctgagtcagcatccccggcccggggcgcgcgcgcaccctccaggcagtggcggcgtcggcacaggtgcatggctcccatacccgcggggagccctctgtaagggacctggaggtttagacagtccgtgcccctcatcccgtagtccccgaccccaaggtcaccgtgaactaagcggatgatgcacgcgaaatctcaggagctcctcatggggacaaagcatgtgtcagatcctagacatttcagagcctgcgggggcgcaaacttagcttcttggtctctacctcacatcccgagggcaaatttggaaactgctcggaagcaaaggccatgttatttgcattcgtatgcagactttggcgccggctgctgccttcattggggttcggagaatgtggttctgatgtcagaaactcaagagagcctagtttgggagtgcatgcacggagggtcgccaccgggaggagtcggcgatctgaattttaataaaaatccttccttgctcgctgagttctctcaccattttgggataggctctcctgagttaaatgccatcctttgccgttgacaagttctggttgtgtaagtggggagaagattcgttggtacagggtgccttgtatggccagtagtgtacagccaaggggccgctgagcagctttgcaaccttgtaggcgtaatttaacctcgtagagcgttaatttctccagatctgtaaaatggggatggaggtggtattcccagaattggagggtttaatttatggtacttgtaaagtgcggatcgcagtgactggcatttggtaaggcctcagtacccattagctcttgctgctgttacgatttatgctttaccaaggc

SEQ ID NO: 31874 - DNA, 853 bp, Artificial sequence
  DNA replication origin
cagctggaggggcgagaaggggcggggcgaagccggggacgcggcggggacggggcggggtaggggcggggtggggacggggcggggtaggggcggggtggggacggggcggggtaggggcggggcaggaccggcgacccggcccgtggagccggcgcgggcgggctgctgaggtggctgtcgccggctccgagctgcggcttcccgggccgagcccccgatggaggccgaggccgcggacgctcccccgggcggggttgagtcggcgctcagctgcttctctttcaaccaggactgcacgtaagctgcgactcggcccctgccagggaggtgggggacagagtgtcaggacccaggggtgtcgtcctgagagcagcttgtggcttccgcctcgaggcggcctcggcgggagggccggtgtctgcttcggacgcattgggatcttgttatccccgtaccccttcagtggggtttgccgcaccccccaccccaccccactcccagtgtcctcccagagcgacaaggttgggccaagggtgaaagcagggagttcgcaaagggagtggtggggctgcgggggccacggaatatggggggagcagggcggtgggaaagccagtgaccaaagtgggtgtctggggaagagagacagtggccaaaagaaagagatgagaaaggagaggaagttgcaagttgacccaggactctgtagttggggcccaggaagatgagagtacaggaaaaactttcccatttgtccttgagcatctcaacgtggcatctgggcagggcctcggacaaagaggcagcctatccctgcggccaggccagcccctgtcccatccccgacgca

SEQ ID NO: 31875 - DNA, 1004 bp, Artificial sequence
  DNA replication origin
cacagggcatttttgacaatctgcacgctctgcacttctccctctgtgaggtcaggagtgatgggggggcacttcaggttctagaaggactcaggcctcctcttggaccctgacaaagtcctttcccgtgcctggtttccacagggacggtgttgcctgcacagacgacagcacccccggcgggggagagcggccccagcggagactcggcagggctcaggtttcctggaccggatgactgacctgagcccggggcccgggcggcgctggccgggcacaggatgcgcggcccggagagcgcatcccggccatccgcccgcgctcggccccgcagcgcagctgctgcagatccgcgggggccgccacctcctccgggggctggcagcgacaggactctccccgccccggcccggggccctcccttgcaggggctgcggggaggagtcgcccacctgtcatctgagacgccccacgtgggtcggccagggagggggtggaaaggagggagaaaaggcagaggcgtcaagggaggccggagggagagtggggtggacagaggagcggagggacgagagggaagcgcacgatagctgcgcggagagagagcgaagagcaggcggaggaacaaaggcgacccaagacacccagagagggacaggtaaggaggggcaggtgagcaggaaggaggagagaaccgggctagggagactgcggaaaggagaagtggcgggcgtgaggaaactgctgtggataagggacgagtaagatggaaagaatggcggaagacgaacgaccgcagagtgagggtccttccaagagcgaccaggggggaggaactggggctgttgcgcccttaaggttgctaaggcgacggttctggccagagcgaggcgcattgacgtcagtagccgaacgctgattggctgcggccaggccgtttccggtggagctgtcgcctagccgctatcgcagagtggagcggggctgggagcaaagcgctgagg

SEQ ID NO: 31876 - DNA, 1404 bp, Artificial sequence
  DNA replication origin
attgacgtcagtagccgaacgctgattggctgcggccaggccgtttccggtggagctgtcgcctagccgctatcgcagagtggagcggggctgggagcaaagcgctgagggagctcggtacgccgccgcctcgcacccgcagcctcgcgcccgccgccgcccgtccccaggtgagtggggtcggccgggggctcaggcgaggtgagcttcgtcgcttcgcagccggtttgcgggagctggaccgatccaagatggcgtcacggggagcgacctgcagggggacggccgcaccccctgcccctccccggcccggcgggcgcctccccgcaggcctcacgcccccggctccgagtctgcatcctcaaggccgtctgggcgttggctttggtgcggggctccccagccgccccgctcgcgctcgctgcccccaccccacggctcctggggccctgggccctccgcggccctccccggccgccttcgcccccgcgcgccgcggcctcttcgctcaccctcccccatttcctgaaggacaacggctctattttactggggtccgccatcgtctcgtccgccggtcctggctcttcttgtaagccggtagttttcctctccacttttgacgactcgtcattgctagcagtagcctttcctcttcatagcggagtgatctttcccccaacacgacggtcttagtcgggctcctgaatttcctcttgtcccctttcacctctctccctttcccaattttgcccccctgaggcctcctcgccaccactgtggccttccgactggcgtagcttgaagtctcggcttcccttcattttgtggtcatgaccgtggcctacgtgaagtgaagggcattttcctgcccttcttctagaaaatacacggtacctattaacctcttcagctcagagcctgtggtgacgaccgtcctactccttgagagattcccaagagatccgtctttttagcagagcgaggaaagcaaacacttactcaagatgaccctaggggagccgtaacttggctggtctaagggggtgcggtctgaatcaggaacagtttctcaaagtgtttttatttatttcccagaatgtaatcctttcgaaacaattttgtcacaactgaattttcaaaagaatgaatctgagtgttttgttttacatagagacaatgcagcgaaagttttaaagcagttaaataattgtgtgtggggagggaaggctaggttgttgggctttacaaataagtacacatagagaatccgggtaactcgattaaaaatattaagactgtgaagtctggttattcagggatttacatggtgactgcattaattttggtacatttctgttcgtatactgtcctattaccggtggctatctttttggttttcgt

SEQ ID NO: 31877 - DNA, 810 bp, Artificial sequence
  DNA replication origin
tcttcccggctaccatcccgtctaggaagtgaggagcgtctctgccccgccgcccatcgtctgagatgtggggagcgcctctgccccgccgcccatcatctgggatgtgaggagcgcccctgcccggccgcgaccccgtctgggaactgaggagtgtctctgcccgaccgccaccctgtctgggagatgaggagcgtctctgcccggccgccccgtctgagaagtgaggagcccctctgcccggcagccaccccgtctgggaagtgaggagcatctccgcccggcagccgccccctccaggaggtggggggcagcccctgcccggccagccgcccagtccgggagggaggtggggggcagcccccgcccggcagccgccccgtctgggaggtggggggcccctctgcccagccgccacccgctctgggaggtgtacccagcagctcattgagaacgggccatgatgatgatggcggttttgtccagtggaagagggggaagtgtggggaaaggaaagagaaatcagattgttgctgtgtctgtgtagaaagaagtagacatgggagactccattttgttctgtactaagaaaaattcttctgccttgggatgcggttaatctatggccttacccccaaccccttgctctctgaaacatgtgctgtgtccactcagggttaaatggattaagggcggtgcaagatgtgctttgttaaacagatgcttgaaggcagcatgctccttaagagtcatcaccactccctaatctcaagtacccagggacacaaacactgcggaagaccgcagggt

SEQ ID NO: 31878 - DNA, 1159 bp, Artificial sequence
  DNA replication origin
aagcacatcttgcaccgcccttaatccatttaaccctgagtggacacagcacatgtttcagagagcaaggggttgggggtaaggccatagattaaccgcatcccaaggcagaagaatttttcttagtacagaacaaaatggagtctcccatgtctacttctttctacacagacacagcaacaatctgatttctctttcctttccccacacttccccctcttccactggacaaaaccgccatcatcatcatggcccgttctcaatgagctgctgggtacacctcccagagcgggtggcggctgggcagaggggccccccacctcccagacggggcggctgccgggcgggggctgccccccacctccctcccggactgggcggctggccgggcaggggctgccccccacctcctggagggggcggctgccgggcggagatgctcctcacttcccagacggggtggctgccgggcagaggggctcctcacttctcagacggggcggccgggcagagacgctcctcatctcccagacagggtggcggtcgggcagagacactcctcagttcccagacggggtcgcggccgggcaggggcgctcctcacatcccagatgatgggcggcggggcagaggcgctccccacatctcagacgatgggcggcggggcagagacgctcctcacttcctagacgggatggtagccgggaagaggcgctcctcacttcccagactgggaggccgggcagaggggctcctcacatcccagacgatgggcagccaggcagagacgctcctcgcttcccagatggggtggcggccgggcagaggctgcaatctcggcactttgggaggccaaggcaggcggctgggaggtggaggttgtagcgagccaagatcacgccactgcactccagcctgggcaacactgagcactgagtgagcgagactccgtctgcaatcccagcacctcgcgaggctgaggctagcagatcactcgcggttaggagctggagaccagcccggccaacacggcaaaaccccgtctccaccaaaaaaatacgaaaaccagtcaggcgtggcagcacgcgcctgcaatcccaggcactcggcaggcactcggcaggagaatcaggcagggaggttgcagtgagccgagatg

SEQ ID NO: 31879 - DNA, 1210 bp, Artificial sequence
  DNA replication origin
ggggcgcgacttcggcgccgccagctctgcctgcgccaggagcgcgcgggtgcgcgcggccgcgccctcgcacagatcccagctgggtcacccgcactgagtcaacagactgagcgcgtccaggcctgacagctctgcggctcgggccctgaggtgaggcgggcgtcgcgggcggcggcggcgcttgaggctagcctgggacagccgtccctgggggagttgaggggacgaggaggggctggccagcgagggacggcggggagagaaggggagttcggcgtctgaggtgtggggtgaagcgggctcggaagcgggcagaggcggcgagctgagggaaacagacctccctcagctcccgggaagcgcgggttgccagcctcggggatgcggtgggagcgcccaggatgcggacgtgagggggtcggggccctgcggcgggggctccgcgaggctcccctgggaccgggtccggccgtgggacttcgggacactgcctttgcctggacgctgtcgttccaccctcagcaacctcagggaaagaaggaaaacaaatattgatgtaaatttccgtctgaacagctgggtaatgagcgcttgctcttccctgcgaggttacgcgcggatcattaccttgcgtgttaaaaggagtttcagtgagaagaaaatgcgcagatctcatgacacagtttgggagggaaattccctgatcctaaaacacgaataggagctccaggcatggaaatacttaattggatcggaaagctgggcaggctggagctattaagctgaaggaggttttcccctgggctcctcaggcttcgatttacgttttaaataaataagtccgaaaataatgaagataataaccacgtttactttctacaagggcgttctgaaggaatctaagggaagaggagtatttgctggactacagctttaagccaggctcggtattagctcttttcattctgacagcaaccctgtaggattggagggggttattccagttgggcaggtgtggagaatgggcctcaaagaggttaagtaacttattaaggtctcagctagtaaaaggatggagttgagattccaacccgggctgccagaccctaattctggtgctttatttagtatattttgtgtttgccgggagagcaatattgtatgtgttttagggaagactccatagtagggaacattattagggcag

SEQ ID NO: 31880 - DNA, 899 bp, Artificial sequence
  DNA replication origin
gagtagaagggaggggaggggagaaggtagaagggaggggaggatagaggggaaagggaagggaagaaggggaggggagaggagtggggaggggaggggagagaggagaggggagggaagagaagagggggaggggagagaggagaggggagtgaagaaggggatggaagagaagagggggagggaagagggggaagggagagaggaagggaggggaggggaggaaagaagggggaagtaagaggagaggggagggaagaagggggaaggaagaggaaagggggaggggaagggaatggaggggaggagagcagaaaggaacggggaggggaggaggaggaggaggagagggggaaggggagggaagaagagagggaggggagggaagaagggggaggggagcacagaggaaggaggggaagggagggaagggggagggaagggaaggaagagggagggcaggggaggggagcgactgggggaggggagggggaagggagtagagaagaggagaggagagaagaatgcctggccagctttaccttttccagccattgcaattcaagttccagacacatgagttaaaaagctattgtggacatttcagcacagcagatgtgttatagagaagaagtaaggaaggcaaccaccatcccataccaatatcctagtctagccatcccagccaactccagccattaaagccatagccatatgccacctgaggtcccaatcagtatcgagcacagatcagcaatcccagatgtatcctgcaattcctgacacacaaagtgatgaatatgataaaaatgatcgttgttttgtaccacagtgttagagtcatttgttacacagtaataggtaaccagagcaacaactgtcagctgaagtcaatattg

SEQ ID NO: 31881 - DNA, 1146 bp, Artificial sequence
  DNA replication origin
gcgccgggaccgacgaacaatcctgcccctgcggcaaaggtctctacccggcgctggcacctcgcaggcccctcgaggagcacgcagggcaagcggcccaagagcgggggaaccgggaagtgtgtggggctccagacggagtaggaagctttgcccaaggccaggctgcaatcaggcagccgcaacagccgggcgcggagcttcccacctgctgctgtcccagctgggccgcaacttcctcctccccggcccgggcccgactccccggccgggctccgagggtggagggggacgaggcggcggcaggttccctccgctggcaacgcctcgcagcatcctcccctccccgccgcggttcccggggccggccgcgcggccaggcgcgctgcgattggccggcagcggccgggggcggggccaggagagccggtgtcgcacggaccgcctcaaaagagcccaggatattgcagagcgcactggagccctggccagcgcgcagccttcccggcgccggcgggctgggtcttgggaattctggtttgctttggctcactcgctttttacaaaccactggatcttacatgcctctgtaccccccacttccactccatgtccccatgctcctgcgccagcaacaggtaagggctgctgtgttttcttccttttcgctcgctgccggtgtgtcctggggaatggactctggccgccgtcccctaccctaccctgccccgctgctccagaggtgcccagctgtcacactgctgtagcgctcacccacactccggagtcccagatcatgcctatatagtttgtgtgcgcaccagaacatccccagagctaaaaatactgagacatgcttggaacagttgagcaatagaaacagatttctctgcagcatctgtttgtgctcataacttccaatgcaccagctgtagcgagatactgggtttggaggcaagggcgagagcgtctgtgttcggttctcactctaagtggggaaaaaaagaaagaaaacgtggttgcgggtttgggggtgcgtcttgagccctggtcttaaaccttggcaaagcttgggactcagcactattcttgatccttggctttttttttttttcgtcattgcttcaagtatagctgtgagtttca

SEQ ID NO: 31882 - DNA, 2117 bp, Artificial sequence
  DNA replication origin
ccgtcttgatgtgcgttcgctgggactggcccggctcgctgctcagcgtggtcagcgtgtgcgcctgtggctgctgcgggggtgccgccggctgctgtgggggcgccgcctgcggctgcgggggcgcctgcggggccggcggggcctgtgggggctgctgcgggggtggcggcggcgcctgctgcttggacatccacacgtggcccgcgctcgccggggtggccgcggtgctgctgatgccgtagctgcccgtgtaggtgacctggccgtgcgtggccggcacccccgggtggccgttgggcggcaggtactggtcaaactcgttgacatcgaaggtctcgatgttggagatgacgtcgctgctcagctcgccgatgtccacgtcgcggaagtcgatagggggctgtctgcccccctctggcaaggggcgcccctctcgcttcaggtcagccttgcccggctgcacgtcggttttgggggtggtgggtggggtcggtgggccctgggattgccctgtggacaataaaagaacaagcacgagaaaatcaacaagggctgtgcagacgccctagtcttaggcaccctccggggaccctccctcgctgctaaagtgtaataagggcccgcacccgcgcaagaggcgcgctgcaccggagataagtcgcccaatgattaacccgccggtacacactggacagcccccttttatcaggggagggtctggggcccggagggtccggaagacctaattgctacttgtgtaagagccctgtgtgtgcttttggggtgggggagcagagaagaagggagaggtcttgtaaggctgttaagggcattttacctcccaataaaaaagttaatctcttcggatgctgggattgagttggggtgtgtgtgtttgtgtgtgtgttgtttggatgcctcttaggctctgggtagagaggggagcgggacgggcgcaaagggcagtgtgtccctcccgggaagcataaagtccccacgaagaatctcccaggcggagggcagggggtgtgccaggcgggacggagatagcttgtccggtggggtcgaggggcgactcacccgagtgctcgccgggggagtgcacctcgctcatgccggaggaggagtgtggcgagtcggcctgcagcgccttgaagatggcgttgggggagatgtgcgtctgctccgtggcctcctctgcctccgcctgcccgttcttcaccgacttcctccgccgcggctggtacttgtaatccgggtggtccttcttgtgctgcacgcgcagccgctccgcctcctccacgaagggccgcttctcgctctcgttcagaagtctgctcggggcggggcggggggcacagagaaaaagagggagaggggtcagtgaaatccgccaaactgtcaggtcggcggggaggaggcggcgacccagaccactcggcttcctctgcacacaactccatcttccctcctgcctgcaaccacagctcataacttttcttaaaaataaataaataaataagttattgcagtctgacctgagcggtcactccccgccccctccctcccctccccttctatttctattttggaaacgctggagatgaaaacgactcccggtgctgccccctaaacgcctttgctgctcgacttaccgcccccaaccccaaccccctttgaaaactttcccccaaattacttaagctgcaagaaggtccccaattctcaccccccaccatacactcccacctatttccagtagcctccctcctcccgcctcccagttcctgccaagggtctcctccaacctcggtttctcccttgccccatctccgtggacagtggggctgcacgagagagtgcagttttaagaggccgggtaggagggaggcaagtttcacttccccgccccgattgagcttccaggcgactggagagcaggctggcagccccctccttccgtctcccaccagtcttcgtccatcctccagctacctccctcacctcttccacttaccacccccctcctccgcgtccccgcgagcagcccaagaactttgtcaaactctgagccacagttacaccccattcccactcccaaccccatcccgccg

SEQ ID NO: 31883 - DNA, 799 bp, Artificial sequence
  DNA replication origin
atactaaaaatatttaaaatagagaatattcctcacagaggacttttttctttaattactgctaaaaaaataattacaaagtccaaacaggcagagagatttagcacactgatcacacgattctccatcatcctccacgcttgctctgaagagggtttaaaaagtccagtttctcgttgatttcgctgctccatttagccaaggttggcctggccactgattggccacaagtgggtaatgcgcttggataggtcatgtttgtgtcttggaaatttgggtacgagttgcctttagcttaaatgtctttaaggaagaagaagaagaagaaaaaacaaaacaaaataaaaaaacaaaaaaacacaaatgtccaaagggaattctggttggtcctctctttcttcggttatttttaggatcatctcggccatcttcgcccttcgtgggaggcctcctcaaggtcgagtgagctgtgtgtagacgggttgttcccagtgctgggggctgtgggtctgcgggatggaagggaccccagaggtgtcggcgatgggggtgtacatggggcgctgagcggggttcatgtaggtgaaggtggagtagaggccggtgccctggcctgccgcgtggctgtagtaggagctggagttctggtggtcggtgtagtcgtactgtgagcgggtgatgggcgggtaggaggggctgtagtgtgggaggttgaaggggctgtaggcgatctgttggggcgagtgctgctgctgctcgctgtagtggctggggctcagctgctccgtcttgatgtgcg

SEQ ID NO: 31884 - DNA, 1283 bp, Artificial sequence
  DNA replication origin
caggagtttgagaccagttggggcaacattgggagactccatctccacacacacagacaaaaacatttttttaaagttagccaggcatgtcactgcactgaagcctggggaaggaaggaaggaagggagggagggaggcaggacgggacggaggcaggacgggagggagggaggcgggggggggggggcagggagggaggcaggcagggagggagggaggcaggcagggagggagggagggagggaggcaggcagggagggagggaggcaggcagggagggagggagggagggaggcaggcagggagggagggagggaggcaggcagggagggagggagggagggaggcaggcagggagggagggagggagggagggaggcaggcagggagggagggagggaggcaggcagggagggaggaagagagggagagcaacatgaaaaaaaagaaatatcctattttcttggagcaggattttacctgtaatcgaaaaaacgtaaaagaagacagccctcaccttcagaccactgaagcactctcagaattctggcggccccagatgaccagggaatgtgtgagtgatagtctagactcctcttggtctggaaaagcggcctctgctccccactggtggtcctatttgcacacccacattggagaatcttccctctgcgcttggctgcagaggaaatgtgaccctgggtggccgagtctctgccaagctttatctggaaggggagatgtgaccacttcataaatccacacggaacaagcatgttttctgctggagcaggagatcttcactggcctttttttctgtcatcaatcttgtttcctctttgaaggagagggcccattactcatgtcctgacagaatcaaaagagagaaggaggggccccggagaagaagagagacctaatgcggcaggtgcagcctctgagaatccggggcggagatggagagggggcacaggtgtgggaaggggagactgacacagccggctctctggaggagctcaccctgctggctcagctgagtttaagggggaagctgctcctggggagagggaataggaagcagaaggggattcatcaccagcacagacacacagctgcgtctgcagctccttcagaccgtcagaacctctggttcaggagcaggaacacaggtgtcagacccacgtctccatcttgccctggcttctgactctgggcacccactcccccatataggctcacattgttcgtttgttaagtgaagggcctgacccaaatgcttcct

SEQ ID NO: 31885 - DNA, 1143 bp, Artificial sequence
  DNA replication origin
tgactgggtggggagaagggaagcgcacttatatagactcatgtataaatagatacttgtaatatacgagcatctgctctgtggaagatgtttttttccaggcccagaagtgtaagatccggtgcctatcttcaggcgggtggcaaacaaacatcacataaaggagagtgtctggcttgtgtcttctgggtacgtgatccccctgacttcagtgtgagaatgtggccagagcgtctggggaagacagggagagttgtcagagaggagttttgaggaggccctgaaggctcgccggctgttaaggcctgagctgtagtgggcaagaagagatggccagttcaggtagaggaagcctgctttgagctgaagaccggaggtgaatctggacagggcttcccaggaccagtaagtagctgggtgggactggagccatgggggtcacggaggagatggggttgaaatggtgggtggggccaagaagggacagggtttctacagctggcctgtgagtgtgggaggcttgggaagcttgtgagttaggaattggcctggcctggtcctctcggagcaggttagggagggacagatggcggtgagggctggctggtggactggaggagcagcaataagggcccaggcctcagcagtggcagagacaaagcggggatgaaagcaggtgccactgggaaggtagaattgacagcatggggtcagaatgcttgtggggaaagagagggtgcacccgagatgatgtcggaagtgtaaacctgagctagacaaatggttattctttccctaattatttagcacacacttcttgactgtctcccctgtgctaagatctgggtgcagtgaataagctgagatggaggacacaggaggggttctggtgagttcctggaatcgcctgagtcttttgcttgggaaaacgtctacttgacctctagagatggggatttgaggtgaggcggagaggccaggggtggtgctttgtttatttaaacagtggtgaccgggttcctactgcacatcacataataccaggttgtggggataaatgcaggcatggagtcttgctgatcagacatgtgtgagataagcatatgaagaaattacaggacagtgtcagcagtgctgcaagac

SEQ ID NO: 31886 - DNA, 1078 bp, Artificial sequence
  DNA replication origin
aagcaaagaaagaaagaaacatgttttaagaagaataaagtcattaggtggcaaggggcctctgcaggaccatccaggccagggagaaaaacaccaccaaggacccaaacttctttcactggggagctgcaagcaggaggcgctggctctgagcagtggctttgtgcttcgggcagaaccggccgcgagggctgcgccccaccagccgcgcgccgggagggcggacgcgccgggcacagccaggcgccgggggtgaccgcggcagcaccggcccggcggctggaagcagacgcgccgctccgcccgcgcccgcgcccggtggagccacagcgccatcaagtggccactcggcgaacggccgcacggggaagcggctcaggcccagggaagaggtccagggttcccagccgcaactgtccctggggaagggtctggacctgccaagctgccactccagggcctgaggcaggagcctgcagacggacaccagctgtccaggcgcactccaccacccagggctgccccagaggatgttcgggaatcctgtctcctccttcgggagagaggttacttttgcagtcccaggcccattctcttctccagcaacttgctcacagtttaaaaggtttggttctcagagagtggcgccagagcaaagggggcatctcgctgctctggggcatcctgcaggggatggcgcagatctggggtccatgtctgtgagcggacaccattggaacatgtgtctagagaatctgggcgggatcactgcccacagcccttcaaggcccacaaacctacaacacatctctcctggaaacagcacgtgatcccatatgccccctggtctttgggtacaaattatggggtgactcaagaagagagcacgtgatatggtttggctgtttgttccctccaaatctcatactgaaatgtgatctccggtgttggaggtgggcctagtgggaggtgttcggatcatgggggtggattcctcatgaatggtttggtgctatcttcacagtaacgagtgagttctcactagaacagttcatgtgagcttggcatggtggctcac

SEQ ID NO: 31887 - DNA, 1234 bp, Artificial sequence
  DNA replication origin
gcccaggctctctgatgacagatggctctggaggagcacaggaggggtgcacccatcagatgttgatgtctctttccagccgcccttcttcaagggggtactgccaggagcctctggctgaggcacctgcgtcctggtttcaaggcatccagggggtcacttgatgatctgggctgttgcctgctgagcgtgggattcgagattagaggaggtggctctagtctctgagtgtcagcgtcttcctcctggatggagctgactgcacactgccctggtttgctcttggaatctggggcgagtgtgagggtgtgtgtgtgtgcatgtgtgcccaggtgtttgagcatgtggatgggtgcacgtgtggggtatgtgcatggggtgtgtgcaggtgtgtgtgtgcatgtgtgcccaggtgtttgagcatgtagatgggtgcacgtgtggggtatgtgcatggggtgtgtgcacgtgtgtgtgtgcgcccaggtgtatgagcgtgtggatgggtgcacgtatagaatgtgtaaatgaaatgtgtgcatatgtgtgtgtgtatgtgtgcccaggtgtatgtgtggatgggtgtgtgtgggatgtgtgcatgggtgtgtgtgtgtgtgcatgtgtgaccaggtatatgagtggatgggtgtgtgtggggtgtgtgcatggggtgtgtgcacgtgtgtgtgtgtgtgtgcccaggtgtatgagtggataggtacacgtgtgggatgtgtgcacatgtgtgaatgtgtgcccaggtgtatgaatgtgttgatgggtgtatgggaatgtgtacatgaaatgtgtgcgtatgtgtgtgcatgtgtgcccaggtgtatgactgtgtggataaatgtgtgggatgtgtccatggggtgtatgcgcgcgtgtgtgtgcgtgtgtgcccaggtatgagtgtgtggatgggtgcacgtgtggggcgtgtgcacatgtgtgagtgtgtgtgcccaggtggatgagtgtgtggataggtgcatgtgtgggataggtgcatgtgtgggataggtgcatgtgtgggatgtgtgcatggagtgtctgcacgtgtgagtgtgtgtgtgcccaggtggatgagtgtgtggatgggtgtgtggggggtgtgcatggggtgcgtgcacatgtgtgagcgtatgtgtgcccaggtgtatgagtgtgtggataggtgcatgtgtgggatgtgtgcatggagtgtctgcacatgtgtgagtgt

SEQ ID NO: 31888 - DNA, 1164 bp, Artificial sequence
  DNA replication origin
atgttggccaggctggtctcaaactcctgacctcaggtgatctgcctgcctctgcctaccaaagtgccagaattacaggcacgagccacggtgactggccgttctattttctcagttgtatggactcaagagggaagagggtatttcagaactgtcataggaagcccttggtttggtttaagtctcttccttcagctggtaacttcgggacttgagcttgccagtgtctttttttaagctgtgtggcatggcttaacaggactgcctggccggcgcatctgtaatcccagcacgttgggaggccgaggcgggcggatcacgatgtcagtggatcgagaccatcctggccaacatggtgaaaccccgtctctactaaaaatacaaaaattagccggcgtggtggcgtgcatctgtaatcccagctactcgggaggctgaggcaggagaatcactttaacccgggaggtggaggttgcagtgagccgagatcacgccactgtactccagcctggcgacagagtgagactctgtcacaaaaaaaacaggactgcctattgggcctcatatgcttgactgtttgatggcagaaacaactcattggctacaggctttgctttgaatggacccttcttccaggtgaccggtatgatgagaagtagagaggtaggggcaggtgtcagcgtctggatcttctctgggatcccaacagaagacattttcgtcctgctgtgctgaagacgggaccggaaggccattgctcaggtattcactctaccagacggggctttacgctcccaccacttcctcgaatcccccgtgaggtagatattattatcctgactttacctgtgaggacaggaacgcagtggcggggtgggttctcactgtgcgtggaggcagcaggacgcagaaatcgacctcccccacgcgcctcgccagcagctttcagtttcgtggcccaacgccctgcactgcacgcctctcctctgggataattgatagttgaatctgtgtaagctggaagcaaatgagagcccagcggctgttctttcccattccttttagattgaggcaaagggacaaatctgcgatgtgaataatacagctccaggaatttttatcagcgcgccccacgcccggccctgcctgagggtctttctaagc

SEQ ID NO: 31889 - DNA, 1196 bp, Artificial sequence
  DNA replication origin
gtgttcaccctactagtcccattcactttccttgccctcactgtcttctgattcagtatcaccagttgatccccccgtggaagaactctcgccttcggtgtcacactctccaaatcctgaccctaagtgcagcatcagcagcaggttctcgtgaagcatagtcctatggtttgttaagccaggtcatgggaaggagcaagatgctgggcttgtgttcttactttttcattcatttcatgcagttaccaaattcttaagtgtttcctggcacattctaggcactgcacattactgtagtagccagcctatcaaccaaccaaccgaacaaacaaatgcaagaataagaacaagaaatgaaagtcccctctcatagagagccgacattccagtggaggagacagagaatgagttctaaatgagcaaaatacatagtgcgttagatggtgttgactgctaaggagaaagaaacagcagataagggggtaagacgtatgcatgtgtgtatggggtgtagatgttgtagagggggtgggaagtgtgcatgtttgtatggggtgtagttatagatagggtgggaagtgtgcatgtgtgtatggggtgtaggtgttgtagagggggtgggaagtatgcgtgtgtgtatggggtgtagttgtagagggggtgggaagtgtgtgtatggggtgtaggtgttgtaagggggtgagaagtgtgtttgtgtatagggtgtacatggtgtaagggggtaggaggtgtgtgtgtgtgtatggggtgtagttgtagagggggtgggaagagggtgtgtgtgtatggggtttaagtgttgtaaatttagggagcatggttagggaacatctgagaaggtggcatttctataaggacctgaagcaggtgaaggaccaaaccaggcagatatttggggagaagagcattccaggtggaaggcccagcaggtgtcactgcctggaggtggggcagagctggcatgttcaagaagagtcagaaagaggggttgcccaagcagagaatggtagaagaggaagggggaaataaaatggtagccagcttgcacaagccttcagaagtcctagtaagatcctggcttttgtgctgaggcttcccgtttgaacgtgacctgacttcagtttaaagaggatcaccctggctgttgtgttgggatagattgcagcagggaggac

SEQ ID NO: 31890 - DNA, 1189 bp, Artificial sequence
  DNA replication origin
tcacacacacacacccacacacacacacacacacacacagagacggagagagagagatggagagagagacgggggagagagagagagagacggggagagagagagacggggagagagagagagacggggagagagagagacggggagagagagagagatgggggggagagagagagacggggagagagagagagacggggagagagagagacggggagagagagagagacggggggagagagagagatggggggagagagagagacggggagagagagagagacggggagagagagagacggggagagagagagagacggggggagagagagatgggggggagagagagagacggggagagagagagagacggggagagagagagagacggggagagagagagagacggggagagagagagagacggggagagagagagagacggggagagagagagagagacggggggagagagagagatggggggggagagagagagagagagaaagaaagtagcagggaggaaagcctgcttggcaagaggagagagggtctcataggtaggggcatgaagaaagtaaggttatggaagaggagaactgaaaagtgaatgttagattgaacatccaggaagtcactggggcctggcaaagtggcgtgggtagaaggcggatggcagcatgttgaggaggaaggcggcttggatgagaggtggtagagatggcaagtggagtcagttctttccaggagcttagctgagaaaaggagggaaacagcaatggttagttagaggaaagcatacggctgaaagcagtttttaaaaggtggtaaatgttatatatatatataaaaacacacgcgcatgcacgcgcgcgcgcgcgcacacacacacacacacacactgtgacagaaagacagcaagtggggcttcccttgcattgtgtttggagacactcatacaacagggagtgactgcaggcattggcagtaggtgggtatggcggtggatgtgggtgtgtacagggtgcatatggaaggagcaggaaggatctgagagctctttttgtctcaggaccatccatacaacaaattctttctgggcatttactcagttcgagaccctgtatttcttgctgggaatagggaatgaaaaacgcaaccccaaccttgggaaagcaggcttctcagg

SEQ ID NO: 31891 - DNA, 994 bp, Artificial sequence
  DNA replication origin
tttggtgactggatgggagtggtactattcaccaagaggaataaagaggaggagcacacaccccatgggaagagagggtgagttctgtttgggttctgctgaggttaggatgcccataggatggctagaaaatagtttgatctatgagttgagacacttgggagaaaaaagctgagctagacatttaatagatgtttaggtttgggacattaagtttgttgttgttgttgttttgaaacaggattttccccaggctggagtgtagtggtgtgatcacagctcactcaagcctcaaccttcccaggctcaggtgatcctcccacttcagcctcctgagcagctggactacaggtacgcaccaccacccctggctagtttttgtattttttgcagagctagggttttgctctgttgcccaggctggtctcaaactcctgggcttgagcaatccttcctcctcagcctcccaaaatattgggattacaagcatgagccactgcacctggccaaatctgggagttattatctatgggtgataggtggaagtgagagagtaaatgagatcacccagaaggaatgtaagggggagaagaagagaggatggggaatgctgacttttaaaagatgccaggatgccaaggctggtggatgatgaggtcaggagttcgaggctaacatggcgaaaccccgtctctacgaaaaatacaaaaattagtctggcatgttgggtgggggggtgcctgtaatcccaactactcgggaggctaaggcaggagaatcgcttgaacccaggaggcagaagttgcggtgagccgagatagcgccattgcactccaacctggtcaacagagcaagaatctgtctcagaaaaaaaaaaaaaaaaagtcacacacacacacccacacacacacacacacacacacagagacggagagagagagatggagagagagacgggggagagagagagagagacggggagagagagagacgg

SEQ ID NO: 31892 - DNA, 1136 bp, Artificial sequence
  DNA replication origin
ttagtcccgccccctccgccatcttcgttgggggcggaagcgcttccgccccgccgggggccatgtttgttacccgagggggcgggcgcgagggggcgggcgcgagggggcgggcgcgagggggcgggcgcgagggggcgggcgcgagggggcgggcgcgagggggcgggcgcgagggggcgggggcgggcgcgggcgcgggggcgggcgcggtcctgcgcggggttttcttaaacggagccggctgggaagtgaggtcgccagagaggtgaggtcgccaggttggctgcgaaactgtggctgaagtcttccctttcccttaggagcagagcttctctgtggagttaggtgtcgggatcgggccccgcggactgacggcgttggcgcaggcgcagccgccgctctccgcgcgcctggcgcccgcgagcagactcgggcgcgctcgccgccgctgggtctcggatcgcaccccgcgtgcagttttaggaagagggacatccgcgcccctcgctgttccccgggaagagctaccacgccgcccctgaaggggttctgagcgcttgtttggcgtctgcttttcctctgctgttgattcgtgttggaggttttccatttcgtttaaaaccgatgtttagcccctgaagacgttttccctgcgagagcctgaccttggtggccatgggggaggagggcggcgggctgggcgggagaggctgggacgccccggggaacgcagcgccagacgggtgggcgctcctcacgtggcccaggaatagtagaatctggagattgtggcttgtttctgctaagtcccagacccttctttttttttttttctgttttaatttcttttggaagatttcacccacaccagtgtcgacaaaatgatgcaatgtgcgcagcggccatgctgagcccccagcaactcagggcctaccctgcatccctgctcattccctctcccacccgccacctccggacgcacagaatttcaatctgcaaataaatggtgcatttataatattccagtttaacccgcaagagccttgcggcgtagggagtatcattctcactttacagactcattttacagatggggaaacgggggcccggagaggcaaagggttttttactca

SEQ ID NO: 31893 - DNA, 871 bp, Artificial sequence
  DNA replication origin
aatatcatacaagtatttgagttgaatccgtgtaacatattttaaaacaggcggacctatccggcagtggtgcagacggcctgacgaggttccttggccgggggttgggcaggggcctggggggcttccctggggggcttgtcgccggggccgcctgggctttcaggtcttccgaggtgaggacggtgctctgtggggagcttgcaagggcgggtttgttttccgcggcccacgttctaagtctgggggagactctcctgagcggagagggtagggaatcgggtgccggggccggcggagggtcttcctggaaccgcaggaggaaatcctcggtggggctgcgggaacggctgtccctgacccaggagctgccgggccgaccccatccactccgcagaatcagaacagctggcagaatcagaacagctttcagggaaaggaagggtgcggggaggtgggcaggctggtaacgcagcgggaggagggaaaggcggctggagagcgccggaggtgagggtgaggattagtggaactattgaggtcctccttgagcccggaggctggggaggtcttaactctctgctttccggaacctgtgtttctatttggttcagtatcgtgccgcgtttactcactgtgcatgctgccaagtcacctgtctgatcgtgtcctacacaggctgacattcacgtttcattctgccacactcgggaacggtgatcggggaagcatggggatccgggagaagcacccacaaaactagcatcctcctggaggagctcgggtaagaaaacagacacccacgtatagacgttatcgtgggaatgtaccgggatctttcaagtagggttgagtgtgaggtggagtggag

SEQ ID NO: 31894 - DNA, 810 bp, Artificial sequence
  DNA replication origin
tgacagatctgcctgtcgtgcccaaggccacgtacgggctgaagcatgcggagtccatcatgtccttccacatcgacctggggccctccatgctgggtgacgtcctcagcatcatggacaaggaggagtgggaccccgaggagggggagggtggttaccatggcgatgagggcgccgctggcaccatcacccaggctcccccgtacgccgtggcggcccctcccctggcaaggcaggaaggcaaggctggcccagacttgccctccctcccctcccatgctctggaggatgaggggtgggcagcagcggcccccagccccggctcagcccgcagcatgggcagccacaccacacgggacagcagctccctctccagctgcacctcaggcatcctggaggagcgcagccctgccttccgggggccggacagggcccgggctgctgtctcaagacagccagacaaggagttctccttcatggatgaggaggaggaggatgaaatccgtgtgtgaggcggacagtgggtggccaccgggagctcttggctgcatcttctccctgcccccaccccactatgacctttgaccctacggcgcaggggcagccaggacccttgattcagaccatggaccctggaccttgtagatgagggacactggcctggccctcgggtcttcggaggacgtagggggctggcatgggtgccgactggctgcctgacttcatcatgctccctgcacttaggctgcgtgggacaagggctgtgttgtcacagcaggaataggttttcctctgttggcctccctttcc

SEQ ID NO: 31895 - DNA, 1209 bp, Artificial sequence
  DNA replication origin
gctactgcagaggctgaggcaggagaattgcttgaacccgggaggtggaggatgcagtgagccaagattgtgccactgcactccagcctgggcaacagagcaaagctctgtctccaaaaaaaaaaaaaaaaaaaagggttggccaggtgcagtggctcatacctgtatgcccagcactttgagaggccgaggtgggggaagatcccttgagctcaggagttcaagaccagcctgggcaacatggtgaaaccccacctctacaaaaaatacaaaaaatggctgggcgtggtggtgggcgccagtagtcccagctactcaggaggctgaagtgggaggatagcttgagcccaggaggtccagcctgcagtgagccttgactatgacgctgcaccacaacctgggtgacagagcaagacctggtctcaaaaaattaataaataaaataaaaattatttttaaaatcaaaagactggtgtaagattcctctcccaggtcaacactcactcccctgacctttatacatgagacctccctttgcttctgactccttggtctctggttctgtgaggtgctgtcgggttccagaggcagcagcacagtggaggcagggtacagaggatggggacaagcacggtgggtgggcaagggaaagagagaaacgaggggaaaagagaagaggaatccaaaaagagagaggcagaaaccccagaaaatggagaatcattcacagcacaggcctaggctgtacagcagagcaggagcaagctgccctctgtgtgcagggaccctaggacttcagggagatttcagaggggaggcgctgagactcaccccagaaccaccgcccatatgatcacagcgggcccctcctagtccctgcaggggtccaccaggatgcctgggaatccacttgggatctccccaaattcactgaacaccccttgtgggaaggagcagctgtcttcaaggagtggagaggcaaagtccaagttcagaggagataagccaccccactaatcagtcagtcacatgtgcagctcacacagggcagttgatgagagcaggaaccggcagggcacccccgcattcagtaggcactggcttctcagcagagatagagcctcaggagatcctggtggatgccctgttattgccccaggagcccctggggctgccaggggctctcttagggcctggctcagtcccagc

SEQ ID NO: 31896 - DNA, 1144 bp, Artificial sequence
  DNA replication origin
cgctctcgtacacacactgcagcacacgccacccaatgtcacccggccgggaagccagagggaaggagctgtctggaagggaatggccgaaggaacaaatggtcctcctttcccctactcccgccccgcgaacccttccctcccccgccaggctcccgccccgcccgctccctcggaagcccgggaggccgaggcgcctcctggcggggtgcggggggagggcagtcgagccacccgcccccttggagccggggagacggccgctcctgggctagtgcgccccgagctcagcgcgctcagcgggatcgcaggcgggagcggtcggttaatgatttaatcgcccgcttggggcgggtgcgcgcggatcggccgtccctggccccgccccctctccggagcgcccccagccggggttacaaaactgccccctgcccccggcgcgtcccccaggagccatcctgcccgcggggatcccgtcagccggtgagtgccccggccgggagggctggagagctgggcgggagccggggctgaggctgagccagcttcctgggagaggactgaagtgcgtgtgtgtgtgtgtgtgtgtgtgtgtgtgtgtgtgtgtgtgtgtgtgtgtgactgggggaggggtgctcgctgctaactcaaaccaggttccctgtgttttcccagtgactgcggcctcggctttggaagttttctttttctccctgggagaatggaggggaaatacaatgccttttcttttctcgttgcctctggaacttctctctctccacgactcccaccccttgcaatctgaccggctcccacatcccttactgtgtgcccggtgcccactgtttgcccagatagctgagcagctggatccgggtggagtccttgggagcccccgtcgctgcgaagccccctgccctcccctgagggtccagggtgctggagggaaaatctctctctcgtccgaaccccagcagccatctgtaccagagaaatgtcccatccagcgagtgtaaataatgaggggccggtgacaggggcctcctgcaaggcgacttctttggcagtctgggtttccaataactccctcagcccccgcccgcttctgaggctagggtggaggagggaccaccagcagggtgga

SEQ ID NO: 31897 - DNA, 978 bp, Artificial sequence
  DNA replication origin
acagggaacctggtttgagttagcagcgagcacccctcccccagtcacacacacacacacacacacacacacacacacacacacacacacacacacgcacttcagtcctctcccaggaagctggctcagcctcagccccggctcccgcccagctctccagccctcccggccggggcactcaccggctgacgggatccccgcgggcaggatggctcctgggggacgcgccgggggcagggggcagttttgtaaccccggctgggggcgctccggagagggggcggggccagggacggccgatccgcgcgcacccgccccaagcgggcgattaaatcattaaccgaccgctcccgcctgcgatcccgctgagcgcgctgagctcggggcgcactagcccaggagcggccgtctccccggctccaagggggcgggtggctcgactgccctccccccgcaccccgccaggaggcgcctcggcctcccgggcttccgagggagcgggcggggcgggagcctggcgggggagggaagggttcgcggggcgggagtaggggaaaggaggaccatttgttccttcggccattcccttccagacagctccttccctctggcttcccggccgggtgacattgggtggcgtgtgctgcagtgtgtgtacgagagcgagatgtgtacacgcctctgcccgtacaggcggagaattcggttcttattcatggagaactccgggcgcacacacgcccccctcgcggagatcgcgggccgcgcgccgccgattgctgcgctcctgcccacaccgacacacaccccattcctgggaagggggaggccctttaaaaccggcccccaaccccctcagcggcacccttggccagggccgggagttccagcgtggagagaggaaatggagtcccggcaacgctgcgcccggctccctgccacctcctcctccacacatcccgctctgccaggacacta

SEQ ID NO: 31898 - DNA, 946 bp, Artificial sequence
  DNA replication origin
caggcgtgaacccccacacccggctggttctttctttctcagagtgccctccactaccttctctgaaccctctgccctttatctcctcccacctccccacctctcagcctgggacacttcaagcctcaggatagaacagcctgtcctccgcacagccctctcctgtccccaggccactgccaacgcttggtcctcagttgcttgccagctctctctcctacttttgtttcccaggaagctggctcaggtgagaggcagcgcggggcggggctggaggcagatgaaaggacagcggctgggtggctcctgggctgcctcctgcaggctttgtcctgagtttgccctagagctacagggcttctttgcagaaccagactgtggggaatagaaagtgactggccagaaagaaaaagtgaagcgcagccagactaagccattaggggaagactctcttcctgagtcaggctaattgggactgctggggaggggaggcctgcgccattcttggctgaagggggtgggcagaggaggagatgggattttaggggaagtccaggatgggctgtaccccttcttagggagggaggcagcagagtggtctgggaggtgacttttgtgttcaggacaggacattctacactgaccagtaacagggactttggagggctaaaccttgaccatggcaaatgcctggggggatgaggggtgggaggggaagggaggtgaagaggacatttaaaggaggcgattgggcacagtggctcatgcctgtaatcccagcactttgggagactgcagcaggtggatcacttgaggtcaggagttggagaccagcctggccaaaccctgtctctactaaaaatacaaaaattagctggtcgtggtagaaatcacctgtaatcccagctacttgggaggctgaagcttgagaattgcttgaacccgg

SEQ ID NO: 31899 - DNA, 880 bp, Artificial sequence
  DNA replication origin
ggacaggacattctacactgaccagtaacagggactttggagggctaaaccttgaccatggcaaatgcctggggggatgaggggtgggaggggaagggaggtgaagaggacatttaaaggaggcgattgggcacagtggctcatgcctgtaatcccagcactttgggagactgcagcaggtggatcacttgaggtcaggagttggagaccagcctggccaaaccctgtctctactaaaaatacaaaaattagctggtcgtggtagaaatcacctgtaatcccagctacttgggaggctgaagcttgagaattgcttgaacccgggaggtggaggttgcagtgaactgagattgcaccactgcactccagcctggatgacagagcgagactctgtctccagaaaaaaaaaaaaaaagcccaaacaacaacaacagaaacaatacaggagattaaggaagacttcctggggtgaggggcgggcagttacacacaaaagggcgttctgcggagggggtgggtggtgaggtgggggaggcagggccctggctgtgaataggtgacctgctccatcaggtgtttctcaaggtgccactttgtcacggcctccaggggcttttgtctaagtgcagactgccaggtcccacctcagccccaggaaatcaacccctcggagcatccaccctgggaacgtgcattttagtgcgccctgctctgagaaccgctgcctggagggtaggggtggttcaggggcgtgggaagatggctctggctgggcgaaaggcaggggcacctgccaggctgcatccttccaggacggaagtaaaggaggccatgcaattagcagggagagaaagaacgaagcaggcgcagtggccaggcc

SEQ ID NO: 31900 - DNA, 791 bp, Artificial sequence
  DNA replication origin
gctactcgggaggctgaggcaggagaatcgcttgaacccgggaggcagaggctgcagtgagccaagatcatgccactgtactccagcctgggcaacagatcgagactgtctcaaaaaaaaaagaggtagaaactgatacccagaaaggggactgaagggagacaggacttccagaagttgatgtcaccaggtgacctgtggcctttgagtccatcaatcctgaacagatttaggattagggttaaggcatggactctggaatggccctgcatttctaaattcattagcattcatttgtcatttacttattcattcaccgacattcactaatccatgctgagaacatttcttcagtgtctggatgtacatcatgcagaaataaccacacacagccatggaggctgtgacctgggaaagggcagaattccaaggggatacctggaagccccttgcccagtcttggggtaggggccagggaagcttcctttgggtggcctcggcgtctgggcatgaacgtgctgtctctgggtctggttgacagcatcagcaccgtgtttagcattctctgcaaactaaacgtggcgggatgtaggcagtaagaggttggggagggggtggcaggaggggccctgggaggctggggactgggagatatggtcgggcttcccccttagggtttccactcccactccctggaggttcagagccccttaggcccctgtcagaggaatccttttcctcttcccagagccatcacgctggagaacacccttgtcatcctgtcaacggtg

SEQ ID NO: 31901 - DNA, 818 bp, Artificial sequence
  DNA replication origin
gagagcggaggtctagaaaaggtgctgggatgagagggcgggttttcacaggcccatgcatggcacatgggaggcccacgacacatgtttattgaatgaatgaaggaatggaaggccatagctgtgagcatgcttgtgggcaggggtggttgagagagctgacctcgcactgagcaaagaaggtgaagggctgtagaggggaagggagaggcctctggggaggggagaagcttcccgcagagaggaggggagagggctccaggggaggggaggggcctcctgcagagaggaggggagagggctcccgcagaggggaggggagaggcctcctgcagaggggaggtgagagggctccaggggaggggagaggcctcctgcagaggggaggggagaggcctcctgcggaggggaggggagagggcttcagggggttcttaggaggcaaagagtcaatgcttctctttctaggatggtttgaatgcagttttgctctaaggcaaggaaatgaacccagagacccccaggggcccttctggctcctggctctgatttttaacttcagccaaggtggggaggagggtgacaggcaacaaggcccttagagctgtcctctggctgcagagatctctccctgtccagcatacctagtcgacaggctccaggggagcttacgaagggggcgtcccagctatttgcgttctcctgagtgatttaccaaccccctgccaatacaactccatctcctggagaattaactggctctcctgaactcataaataattagtgagtctgtccctgatgccacttaacaatttgtg

SEQ ID NO: 31902 - DNA, 1159 bp, Artificial sequence
  DNA replication origin
gcgacagcccgcgtcgcgaagcccagcaccctcccccgccgccccgcggctggcgcggacatgggcgctcagggctgcgcgcccggctccgggacccgcaaagtttgctagccggctgggcgcggagccgagggcgcgcccggccccagcgcccccggaggagacccggcgtctcccgattcggcgcgagggcggtggagcccagagggggtggttcggccccgccagatgctgcctgcaaagttagagagaagaaaacttcagctccagggagattcggaccgctatgctcaccgcgtcccccgaaaccggcgcccctaaaagaacccccgcacccgcgtctgccactgcgctcggctctggccgggtcccgggggcccggcgcctggaacggcggtgactgcgtcggccgggagaacccaaccagggggcggggagggggcgggcaacgtggccacgggaggaagtttcctgaagttgtccatttattccggagctcggccggcgacccggccggatcgcagaggccgccctgtttgggagaagtcggagttggggtgctaagggagagaggcgccctagtccgagagggcggcctggcctctttctccctgctcgcccctcgccttccgggcgcgctgccgggctcggactagtacagaagaggaggaagggttggggtagccaagcgctgcccctcccgggcatattacaccccggggcacggagccgcgtagactgactgtttcctgggactaagccacggggtatcggaccccaccaggattataaaacagggcggagggaagggagaccccgaggacccctctccaggctggtcaccatgtgggggcttttgatctggacactgctagctctgcatcagatccgcgcggccagagcccaaggtaaggagggacccccacgtggggacagggagggggctgggagagtgggcgggggaggggcggcgggagctggccggcctcacggtgacctcctggacacccggcttagccgtggcagagccctctccagggagtttcaagacaccccatctcccaagttttggggctcttttgggggtggggcagtctctccgagacttgtggcttccgaatgggggaaggtggggacgacctggggaggcagagaagag

SEQ ID NO: 31903 - DNA, 976 bp, Artificial sequence
  DNA replication origin
tgccctccgccgcgccccggccggagctctcgggaagacgcacggagagcccggcgggcagccccggctccggggacgcggcgccccttcggacgcccggcgatcgccgacctcccgggccggaggagcaacggccgccccagcgcctcggccgccgctgccgctcgccgagcccgccgccctccgcttcccgggctcggcgtccagagagccgctcctgcctgcgccgagccggagctgcgggggcagcgtgagccggggacgagcgcggcggaggcggagacgcggagaggggggccgagcgctaccccgtggccgcgactggagagcagcctgcgcgccgggaggggcggcggcggcggcggcggccccgagccaggcccgggagcgagccccgcagaaatacaatccgactgcgcggccgcgggcgcccagcggctctgggacccgcaggggggcagcagtgccaaccttctgccgcgccgggagagatgcgcgcgagcccctccgctctctgcccagcctttccttccagcctcgctcgcgcccctgtctcaaaggcctcataggactcccagagtctcctatagtcgggagcccccagcccccttccggacatggagtgattggtggggaggcggcggttgggaaaagggggtcggtcaaccgattgattccagtttccccttcccaagtcaggctctccaaggtctggaaatgctcagggcggagggggagacatcgggaggcctgggacctgcagaagcctgagaaagtgaagttggtgccaaggagcgtgcgttctttgtttcttcttttttccttcggagcccagcttgtaaagagtagaagaaccggacattggtggaggaattcaaacaagagagcccggaggcgtcctctgctgtggcccagagctagcgcctactccacgaagctcagctggggttaacaggcttctgttaaaatttcccgg

SEQ ID NO: 31904 - DNA, 799 bp, Artificial sequence
  DNA replication origin
cagagaccaaacaggaggtgaaaggggcagaacagaatggagatgactaggaagaaaaacagaatgggaagcaaagagagagagagaggagagaaaggagagagagaaagaagagagagaggagacagagaagagagaggagagagaggagaagaaagaaagaagaggaggggaagggaagggaggggaggggagagaaggggaagggaggggagagaaggggaagggaggggtgagaaagggaagagaggggaggggatggaaggggagaggaggggaaggggaagggaggggaagggaggggaggggaggggaagggaagggaggggaggggaagaggaagagagggaaggggaggggaggggaaggtaggggaaggggaggagagggaagaggaggagaggcccgtgggtggtggggtgggaggctggtggagggagagctgcttagtttgtttccttctgctcagctgtgccaacaaaaaagaaaaggaatctgtgaagcccagacaaggtggccgagtcgcagtgccgaagcgcagctcagtggaggaggcggcaggcacagggcccagagaaaattatctttctaaccactacgttggtaccataatcaccttcacgcagcagctctggttcctgggggaggggccactggagagccacttggtttgattcctttaatcttttgacaccgcctgtcacggaggagtgtgtaattaggccgcactgtaccttcccagcagcccaagccgcatgcacctcacaagatgagagcaggtgctactggagccgccggg

SEQ ID NO: 31905 - DNA, 1027 bp, Artificial sequence
  DNA replication origin
agccagaggcagaagaacacagcttcaggagggaccacatggaaaaggagctcacatctgtgccagctctggtgggccttataaagggaaatggtaaaggggccgcctccaggtttttccatttgcaaaatgggattgtgacactggccctgcctgttccacagagctgtgggaggacaggatgccatcagtggttaaaaaaacgaaaagaaaagaaaaatccagggctggcccaggtgttcagaatacctccagggtagcctgagtgttctggtgtctacacaccccctgaagacccaggcggcactaggctgtgggcctccctggctgagagaggagaggctcctggagcagcccccctgcggtgctgagccaggacagggcctgctgggcacgggggcggctccagccaccgagatgggtggattgttcctgtggactcaggagttgctctggaggtcggtctctccctctgcccttcacccccggccgtccctctcctcccctggggcacaggggcaggggatctactgagagcaaggcattgggaggaattggggcaatgttgcccatgtgccaggcatttggaaatggggcaggggtaagttgtcgcagtgcagagggggtgctgctggcatttggagcatggagacaaaggatgaccagggagataagtctgttcttccacctggagccctgggagtggcttgtgggggttaattggctcctggtcagtgccccaagggtttccccaacatagcccgggcagctcagcctggggtctgaacccgaactcacctggcatcttgaggggcttccttcctgtctggggatagcatctactcggggacaatgggccgggctggagtgaggcacacagggagagtgagagtcagggtgggtgtgatggccagaagatggcacagatcctgcttgggatgcatggtggacactcgtgtattggaagctacatttggagcaaggctgggtcagcttccagagctggagttggagctggagggtctgg

SEQ ID NO: 31906 - DNA, 1267 bp, Artificial sequence
  DNA replication origin
tttcaaatatcagtaagtggcatcaaaacagtgggattatgggttatttttgtttcttctccacaagttcttgaattttatgaaataaaagcaaacaaaattttataaagccaatatttatcaaatattattatatgtcagtttttttttgagacttccctttttattcattcaacaaatattttttgagcaactgctgtgccctgggcattgtgcaggcatggggatagaaacggaggccaacattctgccgcgacggagcatctgtgctcatggcgggagtgagaccaacaaagtccaagagcaaaatacatctcagtgtctgcctgggaaggggagtgagccatcccaggtgggactggtcagggaaagcctgagaaggtggcggctgggaaggggagtgaggcatgccaggtggggctggttagggaaagcttgagaaggtggcagctgggcacagacttggggagaggaggcggtgggggtggggggatgaagaggtaggtaggggtgggaggctcatgagagcaggaaccccaagcgccgaggtgctgagcaagagcaggaaaggacgcagggtttagtgagagaaggaggagaggacagggaggagtggggaggagcctcgtgggctgccaggaggattttggcttttacaccgagtgacatgggagcccatgggcagggcaatgggaattctgacattctgaaagggccactgggctgcttgctgagaacagctggtgagaggggcagggcaaggagagaagggagctggcaggagaacctgctagaaaccaggtgggagcggatgggagcctgagctggagcagcgagggtgggatatggtcagatgctgaatggcctctgaactgagcgtcggcgggatctgctgctgggccagataagggatgagagaggaggcttgaggatgacctgagtgatgaaaagacagcactgccacttatgaggccagggaaggctaggggagaagccagcgtttctaggggaaggagctgctggttaattcagtgttgggcatgtgaaatttcagatgccattgtgtcgctttggatgtcccaaggagcagatgccaagacaggattggacatgggacaggcttactgggggcaaagtctgtgaaggacaaaggggaggcagcaggtgctggcagactgccatgcaggcctggcacctgtgaaaggagagggggatggaaggaggcctgagaggaagagcttccgtccacagcacagctccaagagtg

SEQ ID NO: 31907 - DNA, 2662 bp, Artificial sequence
  DNA replication origin
aacagcccgatctgctcagggggaattacagactaatgggagaagaggtgatggcgataggttcacacatactcacacatctaggaaagtgaaatggctaacctcccacaggaatggggctcaggttgaattcattactcaccaaaacgatgcccaataaagagggagatccgagtggagtggaacgattccagaaagtgccttagaagtgaggtttttagtttttgcttttcggatctcccctccccttcccgtcccttccttcttttctgtcttttcttcttttcttcctttctttttttttttttttttttttttgacaacatcttgttctatcatggctcactgcaaccttgactggaggggctcaattattctcccacctcagcctcccaaagtgctcggattacaggcatgagccactgtgccgggctaagtagtgagctgaggcagaactcccatcttttaaaggccacacccacccactaccctcccatcttgactgatgccttgattgtacccagacctgtgccaaggtgcagggaaaactgcttgctgatttagtcatttatttattcatgccacaacccaaagttgaaagtctacttgccaaacacacagtgcctgcggtgatgcagggagattttcttggaacggggattttgtcaatcaaggctctaagtcaggaagtacatggaatacaggcagacaattaaggacgttgacattctccattctcttttttggagaatggcccagtggttttatccaaggctgctttgaagctccaagttcaacctgtaaaatggcggccactatgcattcttacgtacattgaagcttgggtagctcctgtctgctcattgaagaaacacttatgatgaacctgtgtgccctgcactgtgctgcatgatttgggcggggagggggaagatgcagagaaacaataggtgatgtccttgccaccaaggtgcccttgggctcatgatgcctctgctcagatcccacctgcctgacctgaatacgcctgtacctctcaccactccactgtccacaatgtctgtgtagctggtagacactgcctgggcttcagtacgagattgtgtgtgtgtgtgtgtgtgtgtgtgactgtgtgaatgtgtgtaagcatgtctgttgtgagaatgtgcataatagggtgtgtgtgaatgtgcctgtgtgaatgtgagtgtgcctgtgtgagtttgtctctgtcatgtatgtgaatgtgagtctgtgttgctgagtgggtatgcaaatgagtatgtctgagtatgggtgggtctgtgtgtttataggtctgtgtatgagtgtgccagtatgtgtattggtgtgtaagtgggtgtgtggtgtgcaaatgagtgtacctgtgtgcattggtgtgtgcatctgtgaggggtctatgtgtgtatttgtgtctgcgtgtgtctgtgtatttgtaaggtatcttgcatgagtgtgtgaatggtgtgtgcgtatatgtgtgtaagttttgtgagtctgtgaatgaatgtgggtgttggtgttgtgtgtgaatgagcatgcgtgtggtgtgatcttgtgtgagggggtgtgtctgtgtgtgaatgaatctgtgtgaatgtgtgcatgaatgtgtgcctgtgcgtctctgtgtgtatatgtatatgtgattctgtgtgtgtgtatatgtgattgtgtgtgtctgtgtttatgtgattctgtgtgtctctgtgtgtatgtgattctgtgtgtctgtatgtatatatgtgattctgtgtgttctgtatgtgtatatgtgtgtgtctctgtgtatatgtgtatgtgattctgtgtgtctctgcgtgtgtatgattgtgtctgtgtgtatgtgattgtgtgtgtatatgtgattctgtgtgtgtctgtgtgtgtatatgtgattctgcgtgcatatgtgattatgtgtctctgtgattgtgtatctctgtgtatatgtgattgtgtgtctgtgtgtatatgtgattccgtgtatatgtgattgtgtgtctgtgtatatgtgattctgtgtgtgtatgtgtgtgtatatgtgattctgtgtgtctctgtgtgtatgtttatgattctgtgtgtgtctgtgtgtatgtgtatatgtgattgtgtgtttgtgtgtgtgtgtctgtgattgtgtgttagggtgtgtgaatgtgagtgtgtgggcatgggcatgtgggaatgtgtgtgtgagggtgtaaatacgtgagggtgtggggggggtgtgtgaatgtgtgtaagagagtgtatatgaatgtgtctacgtgtaagtgtgtgtgtgagcgcgtgtgagggtgtgtgagcgtgagtacctgtgagtggaggggggggggtctgcgtttctgtgtgcgtgtgagggtgtgtgaatgtgtgtgagggtgtatgtgtgtgagggtgtttgaatgtgtgagggtgtgtgtgtaagggtgagtgtagggggtgtctgcatttgcgtgtgtgagggcgtgtgtgtaaatgtgtgagggcgtgtgtgtaaatgtgtgcgtgcgtgtagggtgtgtgcgtggaggggacttccttcgggaagtgcaggctgggatttgcctgagccagggcggtcgggccgggggaggccgatggactggagcgtgtgaactcccgtggtgggtga

SEQ ID NO: 31908 - DNA, 1238 bp, Artificial sequence
  DNA replication origin
tagtcattgacactagaccaagggatttattgacattatctcttttttaattctcacaacaatcttatgaagctggtattcttattcccatttatagaaacagtaacttagatttagagagtttcaataatgttcctgaggctacacagctagcatggagtaggttctcctgacctcaacgtccatgatcatgatacgtctggtgtggagcacaggtaagagtgtgaaactgagagtgaacgtaatagaaattctaggcctaattaactcaggcagaccttaactattcatgacaccagcctgacctcttttctggatgcctcacttcaagattttatctggagtacatgttgctctttattctcctgctgaggactacagaaaagcctattttttgacataagaacaaggaacctaagagagaagcctccctcctgtgctgtcttttgttctggaaaggcaatgaccaaaatgggaagagctgttttgctggtattgttgttgtcatgatggtgatggtgatggtgatggtggagatggccatgatgatggtgaatggtagtgagtggtggtggaaatcgtagtagtgatagtaatgatggcgataatggtgatggtggtgatcatagtgatggtggtggtggtgatggtagtggtgatggctatggtggtgatggtggtgtagcagtggtggtggtggtggtaatagtggtggcggtggtggatatggtagtgatgatggtgttaatgattttggtcatgatggtggtgatgataatggtggtagtggtgatggtgatagtagtgatggtggtggtgatggtagtgatgttggtggcggtaataatgatggtgatggtaatgattttggtcatgttgatggtgatggtaatggtggtggtggtgatggtgatactagtaatagtggtagtgctggtggtgatagtagtgatggaggtagtggtggtgatgatagtgctggtggtggtgatgatggtagctgtggtaataatggtggtggcaatgatggtgatagtagtaatggtggtgatggtggtagtggtgttagtggtgatgatggaggcaacagtggtggtgattgtagatgtggtcatggtgatggtggtagtggtgttagcagtgatggtgatagtggtgatgatggtggtggtaatgatggtggtggtggtggaaatgatggtggtgttggtggtaggcatggtagtgttgatagtggt

SEQ ID NO: 31909 - DNA, 695 bp, Artificial sequence
  DNA replication origin
ccacaatgtgctctcagtaaggcctgtgtggaggcagtggggggtaccatctggaccttcaaagagactacgtgacggaggagtgtgtgtgtgagagtatgtaagagcatatgtgagaaagcgtgtgaacgtgagcacgtgtgtgtgtgcaaatgtgtgtgagcgtatgtgtgagtgggaccatatgtgagtgcgtgtgtgtgtgtgagcaagtgtgtgaatgtgtgtgaatgtgagacaacatctgagtatgtgtgagactgagtcagagtgtgggtgagagcatacgtgactgaatgtgtgtgtgtgaatgtgcatgtgtgagtgaatgtgtgaaagtgaatgaaagtggtctgagtgagtgcgtgtgagaatgaatgtgtctgagtgttagtatgtgtgggtgaattgtgaaagtgttgcatgtgtaagtgtgcatctgcatgaatgtgtctgtaaattgtgtgtgtcagtgtgagtgcatctgtttgaataggcgcccatgtgtctgtatctgaaggaataagcacgtgtatgagtgtgtctggtgagcatgagagtgtgtgagtgcgtctgtgtatgtcagtgtgttgattgtgtgcaaatatgtctacaagtgtgagtgcgtttgtgagggtatggtgtgtcagtgtgtgtgtgtatgcatttctgtgtgtgtcagggtatgtctggtg

SEQ ID NO: 31910 - DNA, 1295 bp, Artificial sequence
  DNA replication origin
ctctgcctggggctgtccccggagcaggaaggagtgtccctgcaggtgcagttggaaaagcaggagaatcaaacctcagcccatgggcaggggcccgtgggaaaatgccttagtctgcggtcttccagaggaaccattacaaggcaccccatgcctggctttgcagaggggtcccagtggggttgagtcccattgtccacagtagtgacaagcccaagaatgcacccctccttgcttttctcccttccgagtctcactcttcctgcccctcactcctgcttcctggggtcatctcccaaataaaacacttgcacccaagtcttcgcttcaggaccagcatctccagtttgtctggggtgtggagaggactctacatatgctgcaggatgaggagaccaagcactgtcccctccagcatccacttcctcctcaccgccccccaccccaaatagagcgacagcatagctggaccacagatctgcctgagacaggcctgctagtgacggcccaaggaggatgcgcagaccagctccactggctccccagcttcccagttcggagccagctttgctccgctgtccagctttgcagagaagtgatggattgtgtggggaggtggcggtgatggtggggaaggctaggaacagagccctctactgtggtgagcaggccctttcatggtgcagcatggggtctccaggagcctgaggggcactgcacaaactccgggttggcccgggggaggctgagcaccagcctgaagactcaccaccctggtcaggagcagctggcagcaagaccacaccctgatgggcaggccaggcaaagcttgaggctggagaacccaaggttgggagcttgactgaaattgggggtgtctttgatcacctgttgaactgctacaccatcggaagtggcttatccactgggggattccctccttgcctactcagcgccttgcaggtgacaggtgctgaaatcagtgcaaacagaaatgagaggatccccaaatcaaaaccaggaaatattcctgccactcagcagctctccttcccgctccccggagacaggtggcagaactccctattattgtctttgggggcaaattgagcctggggcagaggagggagagagaaagacagctcaacttggggtggcaggtcacagattatgtcctgattgtaaatgtctgacccctggcccaccagctctccgtgtaaccctcttccccaaacaaccatctcctgattttcctgtatccccgtcccgtctccacctcccgcctgcccctgccc

SEQ ID NO: 31911 - DNA, 1350 bp, Artificial sequence
  DNA replication origin
tctactaaaaatgcaaaaattagctgggcattgtgggaggcacctgtaatctcagctactctggaggctgagacacgagaattgcttgaacctgggaggcggaggttgcagtgagccaagattgtgccactgaactccagcctgagtgacagagcaagactccatctcaaaaaaaaaaaaaaaagtatgtgttggttagctggatgtggtggtgtgagcttgtaggcctagctacttgggaggcaggattgcttgagctcaggaggttgaggttgcagtgaaccaagattgtgccaccgcactgcagcctgggcaacagagcaagaccctgtctcaaaaaaaaaaaaagatgtatgttggaagggggtaagtcgaatgcatcttcggctgaggtaacaacagcatgtgcaaaggccctgtggcaggagggagcacagagagtttggcgagctgaaagaagcccgtgtggctgaaacacagacagcagtgcagggagtgggaggtggttacagaggaggtggagtgggtgggtttcacaggggctgggccttgcaggacccactgtagatagtgacaggacatgggcctttaacctaagtgcaccaggaaatcagtggaaagttttaagcagagagatgatttggtattttacaaagcttgctgttgctgtgagggcaggtgagaggggagaggcgatgggggtgggggaggctattaaggaggccattgcaatggctatgcaggagatggtggtgggggacggctgtgggatggaaagcagtggaccagtttgaatggtatttaggaagcaaaaccatcaggactcagtgacatttaggatatggggaggggggcgaggaggaggaggcagggtggctagctgatgacttgtggccgtggacaagctactgtctgacctgggcagagcagaacaaagtcaacttgatgttgggaggtgggggtgggcacaaggttggatctggacttattgagggtgagggtctttgatgcacccaggaggtgatgttggatatacaggtgggggactcataggaaagactatcttgggacatacacaaaaattaagatgtggctggcagagatgagaaccctagggagagagaagagagggaggaaatgggccaggactgagcagtgtgggatttccccgccgtctgcttcccacagttctgtacttccttctactccttccctgggcacacggtaggagctccagccctcatttctaagtgaatgcacgcttattccaccgtctttcagtttcacatctgtgttgtcctccagccgtactggaggcacggctgtgttttggcttagtacctgcctgcc

SEQ ID NO: 31912 - DNA, 826 bp, Artificial sequence
  DNA replication origin
atgcctgtagtcccagctactcaggaggctaaggcaggaggattgcttgagcccaggagttcgaggctgcagtgagctatgattgtgctactgtactccagcctgagcaacaaggtgagacactgtctcaaaataaataaatacataaatatttttaaaaaaaagtaaaaattaaatgttttggaaagggcaaaaataattgtggggcagatgctgagaggcgagatggttagtactcgctagaaaacctgggcagcattttatgaggtgggtgggacttgaggtgaccttaaaggaggggtagatttttgtgttgatggaggcatttggaaggacattctgggtgggtggaacagaccagaataaaccaagaggtgagtataacgtgtgtgtgtgtgtgtgtgtgtgtgtgtgtgtgtgtgtgtgtgtgtgtgtgtgttttggatgacaggaggagatgggccagactagcagagatgcaggttgggaaaaggtgggacatcaggtcagccagcaagggtagatgatcaagggtcttgaaggcaggtggaggagtcggcatgtgaaaggcatgggagatttcagagcagagtggtgatcccaggcaggcattcagcagggcagcgagtagcaaagcctcgcggcagagcgggtgggacacaggagtgtggatggctggaggcagagaggaggctggtcagcatccaggcatgcaccaccgaggaccaggagggagggcagagaggacagagagggcaaggtggataaggaggcattaaggaaagagccatcccccaactgggtggctgttgtctgcagaggacca

SEQ ID NO: 31913 - DNA, 1416 bp, Artificial sequence
  DNA replication origin
ttggccagcggagggaggagcccaggctgcaggacaagcaggagtcaggggtaggtgcggtggagtgatggggtcgcggcagattgggcgtggaaaccgcgctgggcagccagcctgaggggtgcgtatccaccgcggcagggacgcgggtgagaaaggagccccgggaggacggggcggggctcctagggttctggctgaagggaccgggtggatgcggaccgactgaaaacgctcgcaaacacatatggctgctggggagtggggccccagtcacccggtgctcaaaggccctgtgtccattagaggaagtcctggcctcggggcctctcctcgtggccgtgatcccacggttctggggccctgcaggagcccaaagctgaggggcccggaaggctggaaacagccattcttctctcattggggtgtctttcaacaaattttcttgagcacgttctctgttctagaggatacagtaatggataaaacacacgttcccgcctgcatggcgtctacagcctagtaggcgaggtgaggtggacttgtatcctgcaaacagcgattgcaggccttgtgaaatgtcagagtccctgctgtagggagaggggatggaaggtgggcgtcagggttgtttcccaaaggacagtgacatgagctgaaggatgatcgggagtcaaagaggggggtgctgggggaggcctctgtgcagaaggaacaggaccctgtgagatcagggactaaggccagtggaaggggaagcaagcaagttccagaacaggacagggagccggagaactgcaggagccaggcgatcagcttggagactgcggcaggggagggaacttctttgggtgaaaacctccttttaaaaggtcttggtctctgactcagtccctgcagttgctggggaaagtggactcttctggtagctgcttttacagcccctgccctcagaggccccccaggtgggaagggcctgcctcctaggcagtgggtggtcaccgaggactgactttgaacccggggcaagggagccccagaaggctggaggcctgcacacggcactggaagaaacaaactgcaaaggctgtccctcagggctatctccacagccaccggaatgcggcctggaatatccaaacctgtcagcccacctgcacccagccagacagcgaccattctagctgcttccccggaggcctgctgacccagagaggtgtcaaaaagctgaagcacaacagacagacctcccacagactcagcagggagttggaggacagtcggcacaccagcagctgtagcccatcacctcccccctccccattcacctggtatgcagcacttaagggcttgctgaagccccagcaaagcagaggcccacctgagagcttggaaacacacctatgccccagacca

SEQ ID NO: 31914 - DNA, 1538 bp, Artificial sequence
  DNA replication origin
gggacgcgggccacgggcctgggagggtgggggaaaaggggagaggggagacgggaaagggctgcgcggggagagaaggggtctgagaggcacgtgggaaagtgcaggctctcgaggggagagggggtagtgcggggacttggggcgcgcgtggctgcggtctggggcggcgtaaacttacctcctggtaactctcgtcgccggggctgaaggtgctgttcacgggctgcaggcgcaggccgacgtgcgggacgctgtgcagccacacgacccaccagggagcgatgtagtccacgcgcgccgcctgcatggctcggcccgagtgctacccacaagctgaacgacagctgcgctcacctcccggccggggccccgtgcccgccccgcccccggccccgcctctccctgggcccgcgcccgccccgccccgccgcgatcccagtcccagttctgggcgcgcagcccgctgcagtcaacagcccctttctgggcggggatctgtcctggccggatgggaggagggaagtgaaaaaagctcccagaagtctctaaatcagtttcagtctcgaggtccccgggctgcttcttatttatgatcagatcaagggtataaggtgtcagtgggggcagccagcagtcataggccagagaggggcgactgcccgtcccaagggcttgtcacagggtaagtaaccgacagactgggaaaggaaggaggcaatcttcagccactcggtcactcattctaaattcactctcattttttgggcatctattgtgcaagccctgtggacttaaaaagagaaataagacgccgtccctgccctcgggagctcccggcgcatctgccccaacaactcgctgaagccgcctgcaggacgcctgagtgaggacaaggtgtctcactcagaaaatttgcttgattcttcctggcaagtgggacagggtgagcttcccggaggaggggaccttcgagctgtgtagcggggaaggtaggagagcgatgagagcgcccggaagggacaagcattcggggagactgaagcgcattcaacaacatatttattgagcacctactacgtccaggcactgttacatcggtgatgtaacaaaagccgacaaaaaccctcaccccgagcgcaggcaccgcagagggcgatgacgacccgagaagatgccgaacgcaggccaggagggggctctggggaaaagcaaaggcaggggaggttgcccatcggggagcctcgcgtccctgggccctccgtactctgcacatatgcagaggcccccacccgtcctgtaaccgcaaactgcttggcgtgacttggccagcggagggaggagcccaggctgcaggacaagcaggagtcaggggtaggtgcggtggagtgatggggtcgcggcagattgggcgtggaaaccgcgctgggcagccagcctgaggggtgcgtatccaccgcggcagggacgcgggtgagaaaggagccccgggaggacggggcggggctcctagggttctggctgaagggaccgggtgg

SEQ ID NO: 31915 - DNA, 1098 bp, Artificial sequence
  DNA replication origin
cgttcagcttgtgggtagcactcgggccgagccatgcaggcggcgcgcgtggactacatcgctccctggtgggtcgtgtggctgcacagcgtcccgcacgtcggcctgcgcctgcagcccgtgaacagcaccttcagccccggcgacgagagttaccaggaggtaagtttacgccgccccagaccgcagccacgcgcgccccaagtccccgcactaccccctctcccctcgagagcctgcactttcccacgtgcctctcagaccccttctctccccgcgcagccctttcccgtctcccctctccccttttcccccaccctcccaggcccgtggcccgcgtcccctcctgtctgggaacctgggggccgggaaaactgaagagatcagagtgaagcgagcgtggggaaggggaggaagggcgcaagaccgcctgcggggtgaggggctgaacgctgagcgggcagggcggcgcgggggaggggtaaggacaggggcattcgtctcggggtaatcctggcgcgcgaggtgcggggatgctgaggggtgccccgaagttttcgaccgtctgagattccaagatggggcgctctctttccggggctgagtggcctaggaaagtttggcagaaactgagtagagtctcccgagtcggtcttcgcagcacccctcctccccagccccggcctgcagggtgggagtctcagctggaaggctgcagggcttggggaagcggtgtgggtcacttcccctctagcgcagagaacccacagctgcttgcgcttgttccagggaaggaaggtggcctccgtcagcccatctcacactgttgtcctgaggacccccttgcattgacagtcagcttctctgtgtcccctggtcctagactggcccattcctgttcccccacgcccctctctctacctcacacctttaagccctgaatttctggcctagggcagtcactcccggcttccccgccctttccctactctgctgacccttggcaggattctgcaccccacaaacagggccagggctccccagacctccctgcccagacaaacaaagctgcagaatctcccagcccgtctcaggtct

SEQ ID NO: 31916 - DNA, 653 bp, Artificial sequence
  DNA replication origin
tctgaaggaaaggagcaggcatagaagtggatggcccacctgagtccaggcgttcctgggtgacatgggcacccaaacccataggatgagaaggcgttaacttggcaaaggtgggggcaggggaggcggagacacctccaggcagagggaagaggaacgtgcaaaggcccagaggcaggagcgagcatggggctaaaggaagccaatgtggccagagcagagggagcagatgagggggttgggggcactgtcgagggtcggggtgagcaatgagtggcagtgggatggggaaagtgtcacggggtcagaagacacagggggcagatgggattcaaaccatgaagcaactcataggctttgtgaggggtcggggtctttattctaagagccaggggagccactgcaggggctctgcaaagaggtagcgtgacccgataactcaagttgaatgtaacccaggccggcgggagtattcggaacagtgggacttgaatgtgaagaagtggccaccgggtgaccgaagagctcagaggcctaatgagggcagtgagcgaccttgggattagcaatagcaggagccaccaccacctgcaggccagagggacacagggagaggctatgtcaccagggaagctggagccacacagcctgcc

SEQ ID NO: 31917 - DNA, 778 bp, Artificial sequence
  DNA replication origin
aggccggcgggagtattcggaacagtgggacttgaatgtgaagaagtggccaccgggtgaccgaagagctcagaggcctaatgagggcagtgagcgaccttgggattagcaatagcaggagccaccaccacctgcaggccagagggacacagggagaggctatgtcaccagggaagctggagccacacagcctgcctatcagcggctgcagaacgaggggagcagggccctggctgccttaccaccacctccagtctcctaccagcacctccatcggcagaagccagctggcaggggagcccgagacattccgtgtgagggatcaacccctgtaatggagaacagggcaggggacagaggagggacaggtccaggcagagggtcgcatagatgcgggcaagagtaaaatcaggccatcagggaggcccagctggagagcagcgggcttacacctgggcgtgggcagtgaccagaggggagtgcccagaggaagagtcagctagggaggtttggggaggagctgctgaagttcatctgcaggtttctggcttaagcccccggatggggtggcagtgctatcctccaaggcaagggacattggcagggaaccgggaagagaagcagacagtcagtttggttgtacacagattgagtttaaggtgcctttgaaccatccaagtgcagttggagttataaagccagggtcatgagggtggccagtgtggaagtcacacacatgggtgacctgccataggaagcacagagtgagaagagaagg

SEQ ID NO: 31918 - DNA, 892 bp, Artificial sequence
  DNA replication origin
acaggtccaggcagagggtcgcatagatgcgggcaagagtaaaatcaggccatcagggaggcccagctggagagcagcgggcttacacctgggcgtgggcagtgaccagaggggagtgcccagaggaagagtcagctagggaggtttggggaggagctgctgaagttcatctgcaggtttctggcttaagcccccggatggggtggcagtgctatcctccaaggcaagggacattggcagggaaccgggaagagaagcagacagtcagtttggttgtacacagattgagtttaaggtgcctttgaaccatccaagtgcagttggagttataaagccagggtcatgagggtggccagtgtggaagtcacacacatgggtgacctgccataggaagcacagagtgagaagagaagggggctggggccaagcctggaggaagcacagtgtttaacagctaggacgcaaaaggtgcctgtgaaggagaccaggaaagagtgtcccacaaggaagggctgggaatgccacaagggcacaggagtcactgggcagcgtgttccaggaagaggaaccaagctgaccactgcacgtgggaggggggttgggaaaaacccttgggttaagtgggaggtcattggtcgccttccttggagctgcgtccactgggacacaggaacagccagattggtgtgagttatgggaggggcaggaaggagagtcgggacagcagcaggagaagggatggaggtaaaggttggggcactgaggtgggaggacacatgagctctgctgatgtgattccacctgaaagcgggggattgaatccgcagaagaaaagaccaacaaggggttcctgaaaaagcaaaagggataggaggatatacctctttgttct

SEQ ID NO: 31919 - DNA, 1027 bp, Artificial sequence
  DNA replication origin
ccagctgctagctgcccgccgcctcgcgcgctgcctgacaacccgaaaccaacaacgcgccagcggctaaggacgccgacccgaggcggggcagggggagggcccggacggcgccgccccgcccccggcgcccgcccctccccgcgctgagggtgagagttggccgcctccgccgaggaggcccccgagcctgaaccgctgcgcgacgatgtgtgcccggctgtgcggccctgcggccctcggtgcgtccgtgcgtccgcctggcgcctccgtgtcagttcgctaactcctgcgcgcccacccgcgcccctctgctcgcggcgcgaccccgtgccactgccctttagggagcgccccagcagccacgctgccccttgaagcacacgcatctgccgctgtctctggggtctccagggcggcggctggcagcctcgggtttccgtgggcgccgcgtgcatcgcagcaggtgcctgtgctgtgagtgtctgcacccactgcccactggcatgggtggcaaaaagttgtccctttgctcaggccgcccagcacctctgttacctggggtgtgctacagaagagcctgactcagtgcgacccactagcaaacaagtctctacccctgaacccagaatctaggtcacgatggctgggtccgtgtgccctgctggctccccgcctgctgctggaagagccacaatactgtgcaagaaagtctaggtctgacgctaccgcctccattcttggcgacaataacaacggttgcactcccagggaacacaggggaaaggttcctgtcctcaggaggccctgggaaaacttggattctggtcccagttccgcctccaactcggccagccacctggagctggtttttcctgcctccctggggcctcagtttcctgggggatgttggagcctctcccaattctgatgtccatcctctgtgtcctctgcccccaccgaagctgagcccggcagccccaagactgggagaggaagccacgatgggtttcactttccagggaag

SEQ ID NO: 31920 - DNA, 1364 bp, Artificial sequence
  DNA replication origin
agcacaggcacctgctgcgatgcacgcggcgcccacggaaacccgaggctgccagccgccgccctggagaccccagagacagcggcagatgcgtgtgcttcaaggggcagcgtggctgctggggcgctccctaaagggcagtggcacggggtcgcgccgcgagcagaggggcgcgggtgggcgcgcaggagttagcgaactgacacggaggcgccaggcggacgcacggacgcaccgagggccgcagggccgcacagccgggcacacatcgtcgcgcagcggttcaggctcgggggcctcctcggcggaggcggccaactctcaccctcagcgcggggaggggcgggcgccgggggcggggcggcgccgtccgggccctccccctgccccgcctcgggtcggcgtccttagccgctggcgcgttgttggtttcgggttgtcaggcagcgcgcgaggcggcgggcagctagcagctggcggacgcgacccggaggcggtgggggtgcggctgagccatgcccggtggcgcggcctgagcccctccacctgctgcaatcatgaaggacagcggggactccaaggaccagcaactcatggtgagacccttttagaccctcctccccaccccgctccgtggtctacttcagtcggcctccagcgacagagtcctgtcccctcgccgccaccccactgagaggacaggcaacgaccagggccgggactcttcagagcaactttccccaagtcctgcaggatgggtgtcaagaagggaccatggcctttttagactttcctgagcctgaaaattaccccaacttcaaccccacccccacctttccaccctcccattgggagatcccgcccccaaagcgtgcgcagatgaatctcggctctctcatccagaaacgccaggggcagggagggcttgacctaactgcccccagaaggagggtggcggtttcccagttaatcagaggctgctccagccctggtgaggtcaggagtttaaagggatgtgggggtcaccagtaggaagacaagggcccctggtgtcaggatggggcccggagtgcctggttcttgggctgcaacacggatgctgcccaagtccggattcgaagtagttcagagaagtgctagatgcagctaccatggccccacagagccctggggcctgggacagatggggaggtgagagtgggggctgtggaggggaaggtggaattcctgatcatcagtggtgcctgggccagagcaacaagggagatgactcagtgacctcgaggccaccactaggctgtgggtgggtgggtgtctctctcagcaagccccttcctcatcccctaatttttgaggtctgggga

SEQ ID NO: 31921 - DNA, 1288 bp, Artificial sequence
  DNA replication origin
aggggccctttctgccctcaccaggtgagctgagccatctgagcagacctctgccctgcagctcctgctgcagagccctgcatacctgctcatccactttatgggcgatgagggtagctccttcctccagctctgccacgctgatgggccggacccgaagcgccacctgggagggaaaaccaagcccctgggattagagggagaggaccatgctgggcctcagagagacctcaagcaagcccctggcttctctagcattcagccatctcaggcctcccttgtcctaagtaaaactctacctaggtcagagggcagcaggtccacagagtgttggactgtgtctgagttgatgagtctccccaggagccctggcctccgggagagccccaggggagagagctgtctgctcctccagcctgcctcagcctcacgcccaaataaaacactcgcagctcccctgggcttgaacttggggccctggcactggagcagcctctctgtgtttccgcgaatgacgtgctgcagaggaaggtgcaggcacggctctgggatgaggcctggtaggtgggatggagcagggaatgtcccccatcatcccaacagcctgtgaccacattcctacaccgaggagagtgtcacctagagcgcccacccccatctgcctgtcctccagccagtgtgaaatgggtctcatcctgtgcgtggatctccctaaagaacagggtggagtggggagcacgtcttgtgctgatcaaagggcaacagctgctgggtgtggggatagaatgaacggccctctggccgagtgaagactccttcaggcctggcgtggtggctcacgcctgtaatcccagcactttaggaggccgaggtgggcggatcctgaggtcaggagttcgagaccagcctggccaacacggcgaaacaccgtctctactaaaaatacaaaaattagctgggcgtggtggtgcatgcctgttatcccagctactcgggaggctgaagcaggagaatcgcttgaacttgaggggcagtgagctgagatcgcaccacttcactccagcctgggtgagaaagtgaaactccgtctcaaaaaagaaaaacaaaacaaaacaaaacaaaaggcactttcagagggaactacactacctgacgggtcacctttagtggcatcttcagccaaattccactggcgggaggggaggacccttcatccctgctccccggggcacacaatacatgccaaggccagtgattttcaaagagacacattctaaaaagccagaga

SEQ ID NO: 31922 - DNA, 882 bp, Artificial sequence
  DNA replication origin
ctccagcctgccctttcccaactgctcagacataggaccctccctgctagccccctcaggggctcctctctgccggagcacctacggcagtcgctaagagctgcctctcctccctcccacccagatcatgcagctgctgatgaaggggaaccggcagaggacccaggagcccacggccgccaaccagacgtcctcccgctcccacgcggtactgcaggtgaccgtgcgccagcgcagccgggtcaagaacatcttgcaggaggtgcggcagggccgcctgttcatgatcgacctggctggctcagagcgcgcctcgcaggtgaggctgggacctgggctgggcagaggagggagggttgacccaggcaacagcggagggcaggaatggtgactcccatgcaaggccagcaccacaggaacaggggagacaggttgggaggtggggacagggacgctggcatctcagcttcgtaggagttggagcggggaggatgtcgcagcgaggtggaggggatgagtggagacccccgggttaaggaagtgaggaacgttccagaggagcagggttggggggaatggggtagggcatcccgggaagagccaaggagctctggtgggaaggggaaggaggatgggggtttctccagggaaggagactgtggctgccctaggggagggatccaggaagacaatgaatgggcccaaaggagtagttggaggcagggagagacaagcatcccctgactgggaggacttgacacatcctgggagaggacccagccagtcacatcacaaagaggagaaggtccccgtcacccatttctggcagcatctttgtcccctctcatgaagcttggctttgtggcagcacctttgtcccct

SEQ ID NO: 31923 - DNA, 724 bp, Artificial sequence
  DNA replication origin
aggatggaaatgagatctgccccgtttccaagtccgtgtcctcacctgtctgtaagcatgtcggaacccttgccatccgcttagaaatccatttccacctgttcgtgtgtggaggagtgggaatggattcatgtatgatagcatgtagggaacattctcccaacacctaacacttgccagctgctgccctgagggctgtaagttttattccaacccctcaatgggggacgggagacacattcttgaaacagctcattgatggttcagaatattcctaatagcaggtaaatgatgccaatggtaggtgctggggcaagacaggaacaggaggtgggggtggcctggtggggtccagtggaactctctggagactgtgagtgggaccctgaaggctgggaggacattccagaaaggtgggagcagggagagcacaggttccaaaggcaggaaggggatggcgtctgtggtgggtatggggagagcaggacaggtcttcaactggagtgggatgttcatgcaggagcggtgagcccagagaaaatcagagagatgggggtggcccttcaacaacgggtggaggaatgaggacgttccccgcaggcattaggaagccactgaaggttgatgagatctagcagtgagtgtgacaggaggttgtggaagtggaggaaaggaggccattactgtcacccagaaagactgggggaggcagggggaagaaagg

SEQ ID NO: 31924 - DNA, 1288 bp, Artificial sequence
  DNA replication origin
ggctaatttttgtatttttagtagagacgaggtttcaccatgttggccaggctggtctcgaactcccgacctcaggtgatctgcctgcctaggcctcccaaagtgctgggattacaggtgtaagctactgtgcctggccacagacggtagtttctaggggcacctttttatagttggcacagaggtgctgtaagggttagcaggagcccagttcataccaaggagctgggaattgcttttgggcaacagcttgaagactcaatgtgggagtggggtctgggaggatgtagtaatctagggggtcttcctggaggaagcagttggacaggaagtgggagcactgagttgggaagaaaaggaggggaggggcccaggtgggcccaggctttgctagctgaacttgccgcctcctctaccttgcccaccctcacccatcggcagctgaggtccagctgcacagcgggcagggtgagaaggctggcatgggacagcttcgggagcagctcgccagcgccttccaggagcagatggatgtgcggaggcgcctgctggagctggagaaccgcgccatggaggtccagattgacacctcccgacacctgctcaccatcgccgggtaagcccccctcccaggaccctccaggccccacccctgtgcctgggacagaggagcacgacctgtggctgtacagtgtgccctgcccccatggcctgaatgccctgtctctctgggtggggctgcggcagctggaagcatgagaagtcccgccgggccctcaaatggcgggaggagcagcgaaaggagtgctacgctaaggacgacagcgagaaggactcagacacaggtgatgaccaaccagacatcctggagccacccgaggtggccgcagcccgggagagcattgcagccctggtggacgagcagaagcaactgcgcaagcagaaggtgtccagggtttggggggacaaggagagtgggtttaggggacagggtgagcaggtttgagaggcaaggcggaggggccagggtgggggtagccgtgagacttgggaactcaggccacaaatcctgtgtgactttgctaagctctttaacttctctatgcgtcacattccccacctgtaaaatgggagcagtccatggtgcagccctcatggggttgctgggaagattacataaatgcctggcacataccaaggactcaaaaaatggtaactaatgttataattagggtttttcaggctgggcacagtgactcacacctgtaatctcagcacgttgggaagt

SEQ ID NO: 31925 - DNA, 2467 bp, Artificial sequence
  DNA replication origin
ggggacagagactgtggagggtggtgcctccaggtatggggtaggctagaggtgccctggagcctttggagaaatccagccctcaggcctccagctgctatgggagtgcctagacacccacccctgcgcctcgcctcaccccttgcccggtgacctcgaaggatcgggacctccgcttccttctctttgcctccagcgactcctcccttttcttgcccaggcttttcttctggccacgcagccagggcctggggccgtccccatgatgtccgactgcccgggacggggcctcgcccgtgctgctggacaggttgtcctcactggcagcatgctgtagtgtggggctgggcggccgcttgcaggccagtgggcctggtggccgcgcatcgtcgccctcgctcagtgagtgcagggacaggctgctgcgctctgtcgcgggtgccagcaggtgtcgcccctcggttcccagggcccgcgagcgccgccgggcggccttcacccagatgcacttggtgccagtcaggatctccttcctctctgcagcgggacacggggaacatacaacccgagatcaaggccacctctcaacaccctcctctgacatggcagacgtgggtaggagccagacctcctgggtttcaatcctagcacttccaggggtttgctatgtaagaaacttgggcccatttccgagcctcactttcatctgcaaatgggggatggtaaaactaatgccatcggttatttccaggattaattgaggaaatgggctcaacctacattatccagggggcagacattgaatcgatatttgctattacagtgattactgagcggaggcggcgggggaggggggacataagtctccatgccacatgtctcttttctaatttccgattctgcccccatctctctaaatgtccttgacttagagaagactcttaagtgtccttgactgactaatcctcaggggcaatggtgcctctacagaatgtgtagcacccaatgcttggttgcacttggcagtgcagagggcaggaaagggctttgagctgggtgatctgaacagtttagacaaggccaggtgaggtggccgggcagcagagggcacacatacctttgtgggacaaggggatctccgacaggttctcactgctgtcaggggaagagttgatccagctgcccaggctgtcctgagccggggcctgtggggtggagtggttgggaggaggaaacccttaaacacagcagggaccccatgccccactcagcagagacagcggggcctcaagctggtgccgtttgggaaagggtccatcccaactgctgctgtccacccccatgtcccgcacccgctgcagtggagctcgtggggccatcgggtactgagagctcacctcctgcgtcaccaggctgccgagctggatgggaggtggggtgggcacagaggagctttttgcctgccaggccccagtaccagccttgaacacgtggtggccttcactgaagttggcagaggaagatgagtggctgtagaccaggctatctcaccgaggtcccacccccaccccaggggagaagctgttggtgtgaaaggagagagaacccaggagtcctggctccagacctgggccacctgctccctctcattgctgctctgtgttccccatttagccttagtctgggttggcctctctgggacagggcacagggtgggggctggggcaggtggcccccatctcacctctctgtgctgaggggagggagggcgctgttctgcaggtgctgggcatcagagctcaatgtcttcacactctccaggtcagaatctggggtcagtgaggttcctgctggggtaattttgggcaaggagctgtcctggggaggagggagccagggtggacagttagaagatttggtcctggaccaaatcagcacagagtcacaaaggcttacagggtgacaagggctgtaagatggcctgggagccccagaagggcagtgggcttgtgtttgggtcctcggggttaagctgtggtctgctaggcttccccagtggcactgcctgatgcttggtctcctgggagggcagctggagccatttgtgatatctcagatggccagccctgaccctcagaccctgggtgggagcaagtgatgcccaggagtgcccaaggaggagggtcttactcaggcttgacaaggctttgggtggggtaagaaggaaagggagtcaactccctggggtgccagccagcctggtcctgtcccctccagctgcctgaaggcattgccttggtcatcagcccctccctgggcacatgtgcccatgttcaggccgcccaggcgcccacccacctgcagggccctggaggccacttggtccatgatggtggcctgctccaggctgccctcctccagctcccgcaggtacacttcgtagagctcttccaggcgctgcgggacg

SEQ ID NO: 31926 - DNA, 2390 bp, Artificial sequence
  DNA replication origin
ggacaacctgtccagcagcacgggcgaggccccgtcccgggcagtcggacatcatggggacggccccaggccctggctgcgtggccagaagaaaagcctgggcaagaaaagggaggagtcgctggaggcaaagagaaggaagcggaggtcccgatccttcgaggtcaccgggcaaggggtgaggcgaggcgcaggggtgggtgtctaggcactcccatagcagctggaggcctgagggctggatttctccaaaggctccagggcacctctagcctaccccatacctggaggcaccaccctccacagtctctgtccccagcctagcatagtagctgggacagatcctggtagcagatccctgtgccgctctcggcctcaccccactgttcaaccatcacagctctcccaccccaagacacacctcctggggccccatcaggcggagcgcatctcggaccacaggatgccagtgtgcaggcacccagcccctggtatccggcatctgggaaaggtcacgctacctttggccaaagtcaaactccctccaagccagaacacgggtcagtatgggcaaggaggggatggggaggggaggcctccaccaggcaggggagcagagaagacacattgcatttcctgcgcctctggctgccccttgctggaagcatggttctagcagaatactcatgggactggcatcctggggtggtgcccctagagagttcaaggccactgggtgatgggagaggagttggggaggcattccgaaaccactgatcctgcccctttccctgttgcaggcccgggggactcctcacccctggctgttccccccaacccaggtggtggttctcgacgggctacccgtgggccccgcctgccccacggcacaagcacccatggcaaagatggatgctcccggcataactgaggggccctgcctggaactggctctctcacctcccaagactgaatggggtctagcagggcatgggaggtggaggctgggcagatggagatgaccaggaagtaagctcaggatctcagcaggccagggctcctgagacccaggaactggggtctctgcccaaccctcccatgctttcagtgccactggggaaaagaggtgaggccaggggacatggccaggacggctgggctccctggcttcccagccctggacagaatgctgttgccaaaacctgcacagccctgaggccagcctcggccttggtaacggaggaaagcagctgacagtgagacggggctcctggcccacgtgtggggcacgggcatcctggatggttggggaggcgccgacaggcacttcacgtattacaattggggatgtgggtgagggagggaatctggttttgttacttggcagtggttttttctcacccttcctttttaacaataaaatcccatttgggtcttgatggttgtgttggaaatttgaccttgtctggaatgtggggtggccatgactaagattcaaccaactcccgctccccctagtccccatctacccctggctcgctatatagcaccaacctacaaatacctgggggagaggggtttttctctagatcctgaggcctctccccatggtggggctagcaagatccgttatgtccctatcccactggccttcacacctgcccaggcaccctcccaggagaggtcagggacctgaggcggcccagatgccagaaagtctcacaacccagatgaggcggttgcccctcgaggtcagggctcagaaactgcccagctaagcccctcagcctcaaagtgaggaaactcctgcaaggggaatggggtgctccctgactcccccgcaaggggaatggggcgctccctgtctcccaggcaggtgggttgctgtgaccatgtggatgcttttacctgccctagttctgtgtctgggtggggggaaagctcaacaaaggggagtgaaacccctaaaccccctggcttgtgggaccctccctgggttgtttttacccagaaactgagtggttcaatcatccctttaccactctgagcatcggtttattcaggaccaagaacgttccttcaagtcagctgtgaaatcagctcttgaaaccaggcatcttgtctaccacgcctcacctggactccaccccagccctagggtggccggcgcctggccatccaggggaccaggcttgttgccacctccaggctcgccttgcccttcccagacccacagggaccacctaggccaggcctttattcccagaccccgaggctacttgggggtccggataagggtgtggtatacgggcttgacgatgaggtgcaggtgcagggcgttctcaaccaggtactcggagttgcgccgctgcaggtcggcgtgcgccagg

SEQ ID NO: 31927 - DNA, 1965 bp, Artificial sequence
  DNA replication origin
gcgaggtagttgcggggcaggaaggcgctgccgttgacgtcgaagaacttggcgtagtgcagcggcgacgcggcgtggaactggtaggcctgcagcaggaggtcggccaccgcggggccgtggcgcgccagggctgccgagcgcgcctgcagctggaacagctgtgccggtgggatcatggggtagcgtatggcgcgcagcgcccgctcggccacggcagggggcggccgcgcgcgacccagccaggcctccagcgcgtggaacagctccagttcatcctgcagcaccaggtccgagcgttgcaggagctgccagagcagctcggggctcacggcgccccactcggtgctggccgccacggccgacaggttccaggccaggaactgcaggcagctctcgcgcagggcctcgtccccggtgcccaccgcgtagtggtaccagcccaccgccgggcccgcgcctcccgccaggtgcgcgcgcatgtagtcggccacgccgcgctgcagggaggacacgccgtacttggtggccagtctgtgcagggggatggcctgggtcagcagcacggtcagctccccgcagtacaggtacctgcgggagagaccgagaggtggggcggggtcagggcggtacccacctcccaggatagattttttagagtccacaggggacccggcctggagttggagcttcactgtccgggtgcaaacacagtggaagccccaccctgaggcttcccatgttttcctttcaaggacccttccaggccattcttacttcacaggctcttctttccgtttccgcggtgatgtagaaattgcctgcattgactgtgcctctactaggcgtgcagccctaggctggaacaaaacagacgtggctcctgcctttggggtttccagtctggttgggatccatggcctgccttctccttgccatgagtctgggcaagtcacttaacttcagtgaaccttaggctaatcaatcacctaggaaagggggagtggcacacacccctcagggttactgtgacaaccagaggagaataaagaatcttgctacaggccaggtgggtgctagtggctcacacctggaatctcagcactttggaaggccaagatgggaggattgcttgaggccaggagttcaagaccagcttgggcaacatagcaagaccctatctctacaaaaaataaaaaatgttaaaacattagtcatgtgtggtggtgcacgcttgtagtcccagctgcctgggagtctgaggtgggaagatagcttcagcctaggagttcaaggctgcagtgagctatgatcatcatgccacgacactccagctttttttttttttttttttttttttgagatggggtctttctgtattgctcaggttggtctcaaactcctggacttgagcagtcctcccaccttggcctctcaaagtgctgggattacaggtgtgagcccccatttcttttttgcagcctcacctttctttttcctctcctactgttggtgatcacttctgctgagtatctcttcgtcttacttctgccactgtcccatggctcacctttcctgccagtccccaccggcacacggcaccgcacttgcctctataggagtgtggcagccactgccagccatcttccccaacgtccatttctcccctttcccctgcgtgattgcctctgggaataaaagaccacatttcccaggctccctcattctggccttggccatgtgactaactgctggtcaatgggcgcagtttgggatttgcaggaaggctgattaaatgcaactgattccgggttaacaggaagaccctttttgcccttctgtcttatcccctttcctgttgcctggaacttggaagcaatgtatggaattctgcaggcatctcgtctgagccgttagaacagagttactttcttagacactagtgtgaatggcaccccctgagca

SEQ ID NO: 31928 - DNA, 950 bp, Artificial sequence
  DNA replication origin
tggggaaactcagtccacaggggtaaggtggctggtctaggataagcaccgtccactctggcccctgttcccctgaagccacactgcgcgtctctttcaggctgaactccagcttttcgtttcctgctgaggccggggggctcactgctcactcactctcagctttggcccctactccaccctctaggtccctaacctgcctcctgttccctcctgcctttccaccttattgcccccagcacaccccacttcaagatgccttacctgtctctcgtccctcaagccccatgctctggggccctgagtcctgggtcacctgtggctttttctgagggtccccgcagctccctgtcagcatcgccagctgtacctctcaccccttggctctccaagtggttgtttgccccaggatccttacgcagacactgagcctgttagtgcagggggcggggcgggggaaggaggaggaaggaactggtgggcggaggcaccggggaaagagctagagtagatgctggtggagcaaaccagggtgctctaaggcgcacaggcaggggaaggggtcgggctgggcaggggcttcagcttcaggagagacgagctgagggtggcatggggttcacaggtatgtctatgcctgggggagcaggaagtgaggagaagaggcaggatggcaggatgggggttctggggggctgcctcgtgccccggggcactctgtgagctggcctgtgttcagctggggtcaaacctggggctgaggactttggggacaggcagaaggactcagggtgctgactctatgagcatccagactgaaagggaagagagtagggcacctctgtgaggagttggggaagtcgtgccaggtaggagtggtaaggctgccacagacagggctatgatcccaagaggctcaggggaccaggtgcacagggtcagtcctgcag

SEQ ID NO: 31929 - DNA, 1305 bp, Artificial sequence
  DNA replication origin
cgctccgggacacgttggctctgactccgagtccgtcctttccaggaggtcaggttcccaccagccccaccccccactccctgttccggggtggatctgtgggttgccaccctttcccctccggccccaggaatctgctgaagctggaccgcagaaattgggaagcgaatccaggctggtacttatccagcccgataaacaagagattttccggccgccttcccccggggctgctggcctcgcggggggtggggtgcgcagtcctgggggcccgcagcgaggcctagttagcccgcgccagaggcccgtaggggctgaggcgcacagaggagggagaggttgttgggcctggccagggccctggagacgcggagggagggcagggcgccgagtctcggggtgccggttctcatgacgccgaattgcctgggggatcgccagcggtgcgccggtcggagccagctggtggcggggcgggcggcccggagtgtttgctcaaccctgagcgcccgcgagggggaggggaggcagctggtcacgggctagggggtagcaaggtggaggagcgggggctgggaaaggggagggtatctcccgggctgcttgtttgcgtgcctgccgcggtctacgacaaccgggagtctaaactctatgaatcacccggagttgctggagcgataaacctcaggctggttcctcccctcgcacaccggcttctcggactcctggagggaatgtttgcttagcggccggagctggcggtgaggccctggttctctagaaccctgtatcccttcctggccttgccctcacgggctggtctggggtggcgaagactgaattgtttcaagtctcttcaatattaagaagaggggcgcagtgctgctgctgatctgttgctcactcctgggctcccttccgtagctccacctcccaccctaagattcagaggcccccatgccagggaggcaaacgcttgtagggtccaagcagttgagtgccaacgctagaaaggcaaacggcgggtcagacctaggcgaggggcatccgtgactgtgggctgggactagttctcgtgaagcaggcaactggtgctgaacacagtgtgctgggaggggccgctcattagcatatgtgaaaagccagctaagagctagaggaaggtggaatggaaatagtccccgagactgcttgtgaccttaagaagccaaagatgaattgtggatctggcagatctgtttcaatttattttcaagctttgggaatctcttttccctacctagattctccaaaaaggcaactctt

SEQ ID NO: 31930 - DNA, 1167 bp, Artificial sequence
  DNA replication origin
gcaggcacgcaaacaagcagcccgggagataccctcccctttcccagcccccgctcctccaccttgctaccccctagcccgtgaccagctgcctcccctccccctcgcgggcgctcagggttgagcaaacactccgggccgcccgccccgccaccagctggctccgaccggcgcaccgctggcgatcccccaggcaattcggcgtcatgagaaccggcaccccgagactcggcgccctgccctccctccgcgtctccagggccctggccaggcccaacaacctctccctcctctgtgcgcctcagcccctacgggcctctggcgcgggctaactaggcctcgctgcgggcccccaggactgcgcaccccaccccccgcgaggccagcagccccgggggaaggcggccggaaaatctcttgtttatcgggctggataagtaccagcctggattcgcttcccaatttctgcggtccagcttcagcagattcctggggccggaggggaaagggtggcaacccacagatccaccccggaacagggagtggggggtggggctggtgggaacctgacctcctggaaaggacggactcggagtcagagccaacgtgtcccggagcgcagaggcccagggggtcgcgctaaacactgtacctcggggaacaaaaccgtgaaggctaattaggacaagtcggagcagggaacggggacgccgggaggggagagcgcgctccgagttgggcagaacctggaacggtcacaggaaacccgggcgcggggtagtcgggccgagggggacctttgcccacggtccagagtggtctggactcggcccacgcgtgagaggagcgcttggtgacgatcccacgtacgcttggtgactggtggaggtcccagagaaggaccgtgcgtgcaaaaggcgaacctcggtgtgcggtgtgtccacgtgtgcaagctggggaggggagggggcgcagaaggcgtgacaaagacggactctgtcttgagtgtgcgcctcgctccggcccgctcccagcgaactgtgcctgaagtgtgtctcacgggagggccaggacgaaggtgacaaaggctaggtgtcccccacggagacgcgccaaggtagccccgcgcgtgtccgtaggcgcgctctctggaagacgcggtggggg

SEQ ID NO: 31931 - DNA, 1123 bp, Artificial sequence
  DNA replication origin
cccgattagcgccctgaatggaggtgatgtaacggtgatgcaggctccagcccaccctcgccgaaagcaaggagccctgcctggggacaggcccgcgcgagagcgagcaacccagcgcgcctggctcagcctcggtcccagggagaggcaggccctgcgtcccggcccgggccccgccatcccagccaggaccgggcctggcccagcgccccgcgccgcgtccctcccacccccgcccgccccccgcctggggctggagttggccccaaacgctgcgctggagcggggccggcggcgagtcccaggtaagggctgctgccttcccgctccgccgcccggaagagtcgggtcgggacggcggggagtgggcgagggcagaggcggggggactggacatcctgcgggctggggacgccgcgccaactccgctcggtcgctgaaagttttcaaacccgagccggctggggactgggggggtgggggagcccggcgctgcggctcgggctggagggaggggaaaccactccataatcggggtctccaagaggagcccctccaccgcctgcctctcggtgggagtccgcggtcactctctctcgtgggtggcgtcctctctgccgcctgctactgtggatgtggagggcaggtttctgtggccctaaaaatgggagagagtgactggttcccttgctccccattccagccacccagggagcgcaggtgtagaccccagtaccgtcgacccaagtagggacgagagggttcagaatccccctgagggaagtttggaaattcagactatcaaagcgcctccccttctggtagcctggcccctagatcccgaacccccactcccggctggcttttccagcgtcctttgcacctccatccccaggcccgcagtgttacacgctggaagacccaatcacttacaaactccacgatcaagatcctaaagcccgggagaggagactgttggaagtagggttttgtgctcctggagcttcctctccccgccggccccccacccctgtgccttcaactggactgggggagggagtgcattggggggtggggcgcattccagagtgacattccagagcagacccttgaagatttccaa

SEQ ID NO: 31932 - DNA, 994 bp, Artificial sequence
  DNA replication origin
ggaagtttggaaattcagactatcaaagcgcctccccttctggtagcctggcccctagatcccgaacccccactcccggctggcttttccagcgtcctttgcacctccatccccaggcccgcagtgttacacgctggaagacccaatcacttacaaactccacgatcaagatcctaaagcccgggagaggagactgttggaagtagggttttgtgctcctggagcttcctctccccgccggccccccacccctgtgccttcaactggactgggggagggagtgcattggggggtggggcgcattccagagtgacattccagagcagacccttgaagatttccaagtctcagagagctcagggcattttggcccaaatgcctggtcttggtgcggggcaggggcagggggataggggtggggtgtctaggctgaggttcgaggaaccccaacccaccccccaccaacctacacactgaggccgctccttccaggcacaggcgtctcctgtgcgccttcttatcgatggggtaaacgcctgagcgccctgcacagaggggtgagacagtgggacctaaccagggactgggagagaccgataggagtggaggcaggaaggctgtcagtcgggccatcgtctttccctataggctcttgagtgtgtgggatgggaggaaggcaagtgctctgtggtatccctgggggaacctccctgaagagtgccctggtcacagcacccttgaagacagccattggccatgggtcagtgttgagtttggttggccctgtgacgcgctggagctctctttccagtgcggtatccttggccctggtgggtggagggggtctcaggcttgtgtgtggatgatgctggagcgaggaagggagttttgctctggagaagtgagaaggcctggctgtctccccggttgctggatgaagccacttgttgctgggggaaaccagtcagggctgcttgggcctctgggcctctga

SEQ ID NO: 31933 - DNA, 1757 bp, Artificial sequence
  DNA replication origin
caccccacccccgtctctgcggggcctgagagacacagggataaatgcggcccccgcaatccctagcggctgcgaggcccagctctgagggcggggatgggcggagcgcggcggcccggcccccaggctacagcaggagctgggacagctggcttcggccgccgccccgcggcgaggatcgggttgcaggggccggggcggggcttggggtggggcacgagaggcggcctcgggttggctggagctggggtggccgggccctcgcgggagaggcacgtgggcgcgccggctgctcgggcccacccccacctccccccaccttcactgccccccaccgccccccacctcccccaacccaggtgcgtgcgggggagtgggctgtctgcgggtggggttccggggccccgccccctctcccagccgggtcaggttaggacgctgggttaaggacggagcgtaaaaccttccctgggcccgggcccccgcggaccctctcctgccgtcggtggagttgggggtgaggcaagccaccgttgcctttaggtgaatcagaaggagccacttccaggcccctggcttggaggagtctgcggaggtgaggggtcggcggatggggcggacaaccggtctgggaccggccccattcacccccacgggacccaacttctctctccaaagcacagccaggcggtcaccctgtgtctgcccagttctgctccagactttgagtcggaacccctgggggtgcatctgcggcagagccctggggctttaggtcccctctccactgctggggacaccaactccagggcttagacagagctggagacatcggggtgtattttacagatgaggaaacccttgcgggggcgaggggtcaagggagctgtccaaggccacagagctagctggagccaggccctggtccgagatgccctgcctgccacgaaggtgccgcttgggaaggggatacccggggaagcttgctgaaggcacctgcgtgcttaatcccaaaacgcatttgctgggactcacatggccactcccacttcagccctcaggcctgacctggcaaaggagggcagagaccagatcgctctcatctccactccctcccgtccacccagtagacagtggacatttgctggcagaaagcagctccgtcccagatcttcagcctagcttcttaggcttcctgtgcacctggcgaccctcctaacgcctctgctagcccttctcccctgccagtcagggcgcgggcactgccaagggtctctctccttagcatcctcttccaatcgtggcaacctgccaagccacccactctggggacccagggcatgaggcagcatagagggaagggaagatgtggcaccaggaggtgccaaactgaaatctggccagaagacctgcttgtctgggcaggaaacactgggcagatggtgcctggacgctctgccttgactgtgactttcgtgggggttatctggaggggacagaacaccaaacacaaactcagggggctggtacccccatttttcagatgagaagactgaggaaggaccaagggagctgctgaaggtcacagaactactaacagccaggatgtgaacccgcagcctctgattccaaagtcatattttctgcgtgctgcagaattgcctcctgcgacaagggcatgggtcgctgctccccacctccttctctgagggtactggtgtctcccttttaatcacccgcaccccagagggacgcac

SEQ ID NO: 31934 - DNA, 884 bp, Artificial sequence
  DNA replication origin
tccaccgacggcaggagagggtccgcgggggcccgggcccagggaaggttttacgctccgtccttaacccagcgtcctaacctgacccggctgggagagggggcggggccccggaaccccacccgcagacagcccactcccccgcacgcacctgggttgggggaggtggggggcggtggggggcagtgaaggtggggggaggtgggggtgggcccgagcagccggcgcgcccacgtgcctctcccgcgagggcccggccaccccagctccagccaacccgaggccgcctctcgtgccccaccccaagccccgccccggcccctgcaacccgatcctcgccgcggggcggcggccgaagccagctgtcccagctcctgctgtagcctgggggccgggccgccgcgctccgcccatccccgccctcagagctgggcctcgcagccgctagggattgcgggggccgcatttatccctgtgtctctcaggccccgcagagacgggggtggggtgggtgacgccagggaagcaggccccttttcccaagggaagaatccccttccggaggcccgccgggccatggagtttccgcgggtggaggtagtgaggccaagggcacggggagccctgtcgctgccttacgtctggctctaggccggggttcctcggctccaccagcgacatttgtggccggatcgctgtgtagtggagctggcccgggaactgcaggatattgagcggcatccctgaccccctccactggatgccaggagcacagccagccccctaaccctacaaccacaaatgtctctggacacggccaaacgtcccctgggggcaaactctccgggtggaaacccactccccgagggtttttcggtgggcat

SEQ ID NO: 31935 - DNA, 977 bp, Artificial sequence
  DNA replication origin
ctgtcgctgccttacgtctggctctaggccggggttcctcggctccaccagcgacatttgtggccggatcgctgtgtagtggagctggcccgggaactgcaggatattgagcggcatccctgaccccctccactggatgccaggagcacagccagccccctaaccctacaaccacaaatgtctctggacacggccaaacgtcccctgggggcaaactctccgggtggaaacccactccccgagggtttttcggtgggcatttgaggcagccacacgggctgggggcctggagctcgaggtccctgcagccaggaagctggtgctggcctccccttctccccggcgctgccagctgcttcaggctggcctgggaactgtgacccttggcctgacagtatttcggcagcatgtgacctgccaggctttctcaccgtagggtgcccccaccctgatgtgggtgctggcacaggggatgctggggacaagcccatcactagcagtcaggccagctggggcaccggaaagagactcaggcactgggtgtccatgggcagcctgaggttcccaagagaagctgggctgaggccgccgtgtgagcccaggggctgtccgggctgaaggtcagggggcatcctggcccacagggtccaccccttacgcgcacacacacacacacacacacacacacacgcacacactgggtggggcgtgggaaagacaaaaggagtcggtcccagctggggaggatcccgccctgtcccttcaccaggcccatttgggagcggtcatcagagccaggaaggtggtgagagggctggggcagggcactgttggccccaacccccactgcgtgccaccctgccatgcaaagcagaattttcagaagaatccaattgcagacttaacgggggaggttttagtagctccccctccccctgtgtattcacaattgactgtatttgcataggaaatctgga

SEQ ID NO: 31936 - DNA, 1101 bp, Artificial sequence
  DNA replication origin
gtctgcggcagggagggagggtgcgaggggcagggccgcagggcaggtatcacacgagacgccccgagtctggactccgtgcagaacgcagaatgcggtgcgctctgtctaccacataagatggacagatgaaggtccacacccctgggagaggaaggagccagggcctctcccggctctgcacccacgtaccttggctgaaccacagcggggcaagtgataaggggtgggtgcagaaaagggaccttttaggttttcagttgaattcttacaggaagggggacgagaggcaggatgtgtcagggtgggtggagagtggcagccactgactgcgaggggcatgtggtgagggtgggggagatgccgggctcactgggtgcagggtatggaggaggggggtgtggggagggtgggggagatgccggcctcactaggtgcagggtacggaggagggggtggggcggtgagggagatagggtcggggtggggagcagatcgatagtctctggaatgcggagatttaaccagggcagcccagcggctggggcctgagcagggggaagtcccgaggcagccttggctggggttagcccctgcatgggcctgagaaccaggggtcagtcctctccaagaaggggatatgggacagaggggacagaaaaggtggtggggagggcgaggagggaaaagatcgggcagagaagcgctgagatcttctttagggagaagcgtggagttgagtcttccctgtccaagcgcagggattcctcccgcagagtcacctgctgtgccttcagtcacgtccaccgctctcctcagacagctcctgtgcagactcctcaggcctagtcctagggtattgtacgtctttgtggttgctttccttacagatcggaggttttctgcaattatatttgctaactacttgtctgtgggaaggttattacttttggtgtcttgacttggaaacgggtcatcctcccataacaggtgctcctgcgattctcttgggtgttcttctgtttcatagggtcggtgtgcatgggaaggtttcagttcctgtctaatatctgtttctctttctcccattgactcattggc

SEQ ID NO: 31937 - DNA, 1015 bp, Artificial sequence
  DNA replication origin
ctgtgggaagttgctggggcctctgctcccatccccgtgcctgaggtctgccctcccagacagcccacctgcctgctgccccaggccgtagggaaggaggcctgtcagccccagggacgccagctcaggctcacacagcccttggctgctggcacctgctctataagggtgctgcctatgagcacagccctgtacaccctaaccctttcaccccaggagcccggaccacgtgggcagcgggtgacacacacgctgctgatgcccttggttaggtccacagccaggcaaccccagagcccactgcactggatgctgtggggatctgtgggctcctcccccagaattaaaggggaggagcccacggttgggagacacaagaccacgtatagtgacgggcttgctgagccacagctgacctaatggagtgcgcagccgggtactctggggtgcgaagtgccctgcttccaagtgctgtgcgcaggcaccacactgccctccctgtccccacctgggacaagtgttctgatgggaaggagaaaaagagctggtggggaagagacaggagttcaacgcccgggaaggagggtggtagtgagaaggtttgggggagccagcggtaggggaagctcactgaaggtaagacccagtctaccccagtcacaatgttgtccccagggcccagcacaggcctggcacacagtaggtgctcaggacagctttgttgtacgaatgaatgaacgacaaatgtgggctgggggaaagagtggggagtaggtgtgatgaggcaggtgtcaggctccaggcagggcaaggggaagtcagccccagccacacagtcaggggatggggcacggacttgcaaagcaggggacagagagtcaaaaatgtttgaatagaaagcctttatcttgttactgaggatgggttacaggaagcttaagacaccagtaaactctgcgtctgtgatttttagaacatttactagctgggaacatggtaccatatgttaagtgca

SEQ ID NO: 31938 - DNA, 1154 bp, Artificial sequence
  DNA replication origin
taactcgggggaacctggccagaagtgtgcctgatatacacagaatggctgtggaggatttataaatgcaagcacagcttcagaaggcctcactcagggacttagatttctggaactaggagactccaaattcctggcattctgttatcaaatgtctcctccttggtgtttcagtaaatgtgtttcctgcttgttcattttttgctgcatgtggagtcctcatatttctgtgtgtgttcacatgtgtgtatatgggtgtggtatgagggatatatgtgtagtgtgtgtggtgtgggtagtgtgtgtagtatgtgtggtatgtgtgtatgtaggtacatgtgatgtatgtgcatggtgtgtgggatggtgtgtgtgtagtgtgtgtgtatgtgtggtgtgagtggtgtgtgtgagatgtgtgtagtgtgtgtgtatgtgtgtggtgtttggggtcgtgtgtgtggtgtgagtggtgtgtgtggtgtgggtgggatgtgtgtagtgtgtgtatgtgtgtacatgtggtgtatgtgtgtgatgtgtggggtggggtgcatgtagtgtgtgtgtttgcatgtgtgtgtggtgtgtgtgcacaggtggtgtgtgtgtagtgtgtatgtgtgtgcacgtgtgtggtgtgagatgtgtgtacatgtggtgtatatgtacagtatgtggggtagggtgtgtgtaatgtgtgtgtggtgtgtgtgatgtgagtggtgtgtatgagatgagatgtgtgtagtgtgtatgtgtgtacgtgtgtgtggtgtgttgggtggtgtgtgtagtgtgtatatgtgtgcatgtgtgggagtgtatgtggtgtgtgcgtgtccatgtgtggtgtacgtgtgtggtatgtggggtggtgtgtggtgtatgtgtgtggtatgtggggtgatgtgtgtagtgtatgtatgtgtgtgcatgtgtgggcgtggagggtgtgggtggtgtgtgtgtacatgtggtgtatgtgtgtggtgtgtgtatgtgtgtgcatgtgtggggggtgtgggtggtgtgtgtctacatgtggcgtatgtgtgtggtgtgtggggtggtgtgtgcatgtgtgggcgtggggaggtgtatgggtgtgtgtgtgtgtacatgtggtgtatatgtgtggtgtgtgggttggt

SEQ ID NO: 31939 - DNA, 1167 bp, Artificial sequence
  DNA replication origin
cctctgaacatccaactccctgttttgatgtcagataaatctgctggattagtatatttgaagacacaatgatacataaaaatgtgacttaacttgtctgtttttggaagttgtaggctcttgagaaactgggtgggtgccctgtgatgctaattattatgagaattaaagccacaaagtttctgttgtgattagtagttttcctgtctccagcttctgctttttctgaacagctctacgtataaacattgatgcaatgggaaaacaacaaaactgaggtgtagaaaagagagacgcaagggagtagtaagaaacatgaaagccagtttcagtccagctgacagaagctccccaaatgttggcagatgaggcagagagagcaaagagacacagtgacacatctgcccctcctggacatcctgggtccggggagtggggtgggggaggctggtgggagcatgaggaacagcaggcctagtggctggggaaggggaggtgggtggggctggggtgcactggggagaggatgagggaatcagagggatgactagagtttcaggctccagcctcagatgggtgggctctgctgataacaaacagaggcccaaggaaagcgactaagccaggcctggtagtccagagggcacagaggcaacccagggtgtagtggggagcccctccagggccaggcgaagtcttgctcagcatgaggtctgcagctgcaaacacaaagtaggactcacacttagcagggcctccatatgcggcagcagaatgcacaaatggatttgagttgttctgaacattagagaagcccagtggggaaaggaatgcagggtctgggtcaggtgcggtggctcacgcctgtaatcccagagctttgggaggctgaggtgggtggaccacctgaggtcaggagaggagcgccgtgtaccatcaagacagccctggcaaatgctttttcacagtggtcacaaagaaccccagcaaggaagatgtggctgtgtgctggtgtgcaaagagagatgtttttatgcacccaggggacatgggatgattgctgttttgtcacatgggagtgtcctgtaacccccaccctccttcccaaagagcacagactgtgtctgacagctggtatgtgtgtgcacgtgcgcacatgtgtgcttg

SEQ ID NO: 31940 - DNA, 1712 bp, Artificial sequence
  DNA replication origin
ctcactctgctcatcccccacctgaacattcacggttcactattaccttccaaataaagtctgaatctctcatctgttggtcaagctgttgcacagtttagaccagtggttttcgaacactccttcagcgcacataaaagcctccagggggaagctcatctgaaatgcaaattctaagctccctcatacacatgctgcttcagtaaaaccacgtggggggcccagaatctgggggttctgacccagggggtccatgcgccacattttgcaaaacatgagttgaggccttgtccctccagtctctgcccgggtctccttcccacatcccgaccctgtgctctttgggctgtgctgttccccagctctgaagttttctgccatcgacctggatagcagggagtcccctgcccccatctctgcaggtgtgatttgaggtgtgtgtggtgaggtgatttgaggggtgtggcaggtgtgtggtgtgatttgaggtgcgtggtgaggtgtgtggtgtgatttgaggggttaggtgtgtgtggtgtgagtgtgtgtgtatggtgaggtgtgtgtgtctggggtgtgatttgaagtgtgtgtggtgtgaggtgtatgtggtgtgatttgatgtgtgtgtatgtggcgtgagatgtgtatggtgtgatttgaggggtgtgtggtgtgacgtgtgtggtgtgatttgaggtgtgtgtgatgaggtgtgtggtgtgatttgaggggtgaggtgtgtgtggtgtgaggtgtgtgtggcgtgatttgaggtgtgtgtgtgtggtttcaggtgtacacaagagcccccccatctttcaacacgcatgagggtctgtctcactgacacttggtacctccactatcagcagggctgcatgacaatgacagtgtgatctgtgatcaggagggtaggggtgtctatttgggggtattgtgggggtgtgcgtctcagatctggaggcaataagaggtgttgggggtcatttatagggtgatatacacatttggtgatggtgtgaggcatggggtccattggagaggcaggtgtttgcacagtgatgtggcacaggtgttgatggtgtgaaataaactgtgcctggagctgcactgtggtgacaggagtgtgtgtttggagtgaaatgaggtatgtgtgtttgagggtcatgtaagatgtgtatgtatgtggtatgatggtaggtgtgtttgtttatagtatgaggtgcacatttgtggcataatacaaagttgtgtgtgggacatgttatgaagtgtgtgtttgtggtataatgtagggtgtgaggcatgtgtatttatggtatgatgtgaggcagatgtgtgtggtatgatgtagggtgtgtgtgtatatttgtggtgtgatttgagagtgtatgtgtgtgatgtgaggtgtgtgtgatttgagggatgtgtgtggtgtgaggtgtgtggtgtgatttgaggtgtgtgtggtgaggtgtgtggtgtgatttgaggggtgaggtgtgtatggtctgaggtgtgtgtgtgtggtgaggtgtgtgtgtctgtggtgtgttgtgggtgggtgcacacgtgtgagtgtctgtggtgtgtgtctggggagagacacaggctaccacagcgcatacacagcctcagagtgaacgttaggaggcccaggtttcctccccagagaccacacggatcccttagtgagtccctattctgca

SEQ ID NO: 31941 - DNA, 1212 bp, Artificial sequence
  DNA replication origin
tcgggggcctcgccatcccgggtggcaacggcgcctggcgtgcccgtcatgtccctggacgagaggtgagcagtgccggcccgcaggcgaaggagagcgcaggaacggccccacccccgccccgcccactcctcccctccctcgaccgggacccctcaggctcctccctccgtcccgtcgccccctcgacgacaccggctcggaccttgctgttccctgagggcacgcagagccgcagggtctgcgtgaaggggcgggcagcctccctgagcaacaccggctcggctccgtgcgcttcggacatgagccacatccagccccgggaccggtcccctgtggtcgcttgcttgcccctgggggagcgggccgcggggaccccgtctgctgcggaagagttcccgtagtcgctgcgcaccgcgacagcaggcggcgcccgagccccgggccgtgggctgtccccaggtggcgaggcggggagctggggacccctgggctgcgcctccgccgatggccccgagacacttcctcatctgttaagtcacccggcccgagctcatctgaatatagttttgtttaccaacccgtactcgccttgcagcacatgtacgctgcggtgttttggggcctctgcctggtgcggggactttgaccctttagtatggatcacctctcatttcccccggcctgttggttgtgcccagaatgtcccaccaggggagagctttcgcaagagggctgcgcagcacacatctcccagtggaccgctcctgaaggcggggccggccttattaacccatgacactcaccctggccccgaggaggagccaaataaattcatgaagtcgtagatcattttgagcagagctgccaggatatcccaggcacccggcagctcctggtgacagagagtggggagtgcagctggggttgccggtagcagagctcaggggctctgtggcctgggccgacctttcaattacccccatctccacattctataagcagcttcaagttaccaaggaacagggcgggtgcattacagcgggacggtttgagggatgtgtagggaggggagagctggagaggggtacctgcactttttttttttttcagacagagtctcactctgtcgcccagcctggagtgcagtggtgcgatctcgcctcactgcaacctttgcttcccgggttcaagctatactcccgcctcagt

SEQ ID NO: 31942 - DNA, 1446 bp, Artificial sequence
  DNA replication origin
acttggggttccgatggggacgggacgggacggcccagcccttcttcccgtccagcgaaccgggagcgcagcagagaagccctgagccgccggacgggccaagcaagcaggtgtcccaggaaccgtcggccgccgcgagccgcgaggagccgagagaggaccacagaccaatccccgccccgcgcggcgtctgagcgtcccagagtccgccccggctccttaccccgggggcggggccgcgctgagggtggggacctccgcgggccaatagggggctgcaggcctgggcgctccggccgggtgaacggcgccggccattgggaacgcgcggggcggggcctgcgctcggcgcggcgccccgcggcgggcgaagactagcgctcaggaagtggaagtgtttgttaccgagcggccggcgctggggtggcaggggcggggctcgccgaattcccggttctgggcgggtgggcccgccggctccggcctggtttcccctacctgtggcggggagtgaggaaagccggccctcgggtaaaggaccctaacttttttttttttttttgagacggagtctcgctctgtcgcccaggctggactgccgtggcgcgatctcggatcactgcaacctccgcctcccgggttcaagcgattcccctgcctcagcctcccgagcagctggggttacaggcgcgcaccaccacgccccgctaatttttgtatttttagtagagacgaaatttcgccatgttggccaggatggtttcaaactcctgacctcaggtgatccgccctgggattacagacgtgagccaccgcacctggccaacgttttaacagcctttagccaaagcctgggtgcagctccagttgagagggagcggctgttgccggggcaactgctcccgctcggggcagcgagggccggtcagtctcgagaattaagacggagggcctcctcggaccctacagagttgtttgaataacatttttccgtttgtgggaaccctaaccctaatccactttgtgctgtcccaggactcgcatagaggagtgcaggttctgatccctgctgggaaggtgagggctccgcggagagcctgggacctcgaggggcagcccgctgaagacaggccatctagggcaatagcgtgggctttggcagcagcgtttggctagggaggtggggtggggagaggcaggacagactcaggtaatcaacctctgggtacacgccacagggaaaggagccttggttttttttttttttttccaacagaaaaatgattaggactgtaaagccttctagctccctcttgccaaagagaggctggtcacagaggcgggagacagtctgttgagcggggagctgaccatctgaggacagacactgaggaaggaggatggaatgattttggcagtgaatgacaattccttcaacaagacccc

SEQ ID NO: 31943 - DNA, 2020 bp, Artificial sequence
  DNA replication origin
ggcttctctgctgcgctcccggttcgctggacgggaagaagggctgggccgtcccgtcccgtccccatcggaaccccaagtcgcgccgctgacccgtcgcagggcgagatgagcgcggacgcagcggccggggcgcccctgccccggctctgctgcctggagaagggtccgaacggctacggcttccacctgcacggggagaagggcaagttgggccagtacatccggctggtggagcccggctcgccggccgagaaggcggggctgctggcgggggaccggctggtggaggtgaacggcgaaaacgtggagaaggagacccaccagcaggtggtgagccgcatccgcgccgcactcaacgccgtgcgcctgctggtggtcgaccccgagacggacgagcagctgcagaagctcggcgtccaggtccgagaggagctgctgcgcgcccaggaagcgccggggcaggccgagccgccggccgccgccgaggtgcagggggctggcaacgaaaatgagcctcgcgaggccgacaagagccacccggagcaggtaagcggggcccaagccgcgcaggctggcatggagtgggaggaggatccggagagacccaggtgccccggccgtccagccccgcgcccgccgtcgtttttctgaaactcgagctgcgagggggagaccgcttccgcccgccgaccaggcgccctgacacatcctaggcaggcctggggctgcgtcccgcgacctcctctccttcccaggctgtgctgggagcttgagcgcctttgccgcctgcacctcttgttccctggcctttgggagggcggcgcaggggaacccagcccccttccctcgggtctgtgggtgtctgctcccgttcctcggaatcccccaatcctgctccttccctggtgccctctcctcgttcaccccagtccgcagatgggccggggagaaagggctctccgccccagaggtgccagcttcgcccgccactcctacttcaaaagctagaggaatagcattactcctcctgtgtggagccccggcgcgaggaggccctctccgcagcccgccggtgtgtgtcctgaacttcagtcctgctggacttcatcctcccggagtcctgtgtgacttctaagggagaggaagccccaccatctcagggcggtgtgggggttgcctggcagggaggaggagccaaggcatctcggagtggtggttctgccacctcagaggatttacgattctcaggaatgtgaagagtaagcgcctagaactgtatctgggagggaaggggaaagaccttggaagaagaaaaagatggccatggggaggagagagagctcctggggctcacggccctgtgtgcgccagcggagctcacggtgagccggtggtcttgccctggccttgccatggtcactctggtgcccacacagccagcaggccggttgctttttgcccatgtttggtgtttgcccatgggatcccagtttggatcagctgcaagaggggcagctggcaaaataggagttgtgctgagcctcctgtccccagagagtggagtggtgcattgtgtagggcagggcgtgagcctcccaggaccccttcagcttgcaccaccagctctccctggtggcagtgtctgatgggagtgtccgtggggctacgaggagcctcctggacagagaaagggcacagttcggcattaaggtagaaggcaaagccctagaggatcaactggtttggtggaagtgaggtcaccagaagccctgtccagccagagctgggtgctgggaatgccagggccaccaggctcccacttcctgcccctgccaagctggcattggcaaggggagggggaagggatctgagcacccggagcaaggaggttgatgccagggagttggggccgatgatctccagtcccaggcagaaatccagtgtgaactttgtgctgagtccatcgatcgatttgacattcttttttttttttttttttggactttggcacccacac

SEQ ID NO: 31944 - DNA, 1700 bp, Artificial sequence
  DNA replication origin
ctgggggctttcctacattgcccttccaactccactcttggcactaaggcctcctttttttaatggggcctccactccctggccccacctactctcttagggttccccaccctcaaagctccctcttttctcaagaaccccactcccagcctctccctctctctccctcctggaggagtcccgagtctagtgccgccccgccccgccccaacctatcccgacccgtctcgtcctctcccgcccgtcccgacccgacccgacccaacacctgcagcacagccagctcccaagccgccgtctcccgccggtccgctgctgccggcgccagctgtccagcaccagcttccgcagcgcgcatgcgccggccccacagcccacctttttcgcgcgcgctgattgggcgcctcgcgggggcgggaccgggattggggcctggcggctgccgtcagcatggcggaagtgggcggggcgcgttctcacgcgcatgcggaaggggcggtagccggccgggcctgggaacgtggctggttggaggaggtagatcaccctttctgcgggggacgatttcgtcggtggtaggtgggtgtgagcttggcagtacccgggtccgcgtggttggagggtcgaagagagtggtctagaacgccactcaaaggggagggcctaagactaagcccgccttgccctgaagtggtcgggggcggggagggagtggctagagccccgtggggtggtcgccggggtaagaggttggaagtaggtttaaggcagggctgaaagttgattctgggttggaatccctggactggggcaagtaatgggagctctggggatactttggtacttggtacttggtgcttgggtttgaggaatcgaagttctggggagtggacggaaggaaccggcagaaacggagcccaggcttggcctcttggagtgggagtcaaggattgtttaattatccttaaccagcctggttctctttcttgcaagaattttggagtctgtattctttgaagtgtctagacggaactaatgacggaagtcaacttagccccagcaggaaagctggagcgcctacccaaagttggaggaaattcagggtcctgaagtctttgctctccccatctgcatgcaggctgctaccatgaggttgaatcagaacaccttgctgctggggaagaaggtggtccttgtaccctacacctcggagcatgtgcccaggtatctttcccgcttgacatggggtgcgtatcagcacccagagctgtgtaaggtacagccccagtctcagggctatttcccctaagaagaaacattggttgtgagaaataattatatatgaggggggaaaaaaggctgggtgccgtggctcacgcctgtaattccaggactttgggaggctgtggcaggaggattgcttgagcccagcagttcgagaccagcttgggtaacgtagcgagaccttgtctctacaaaaaaatacaaaaattagccaggcatggtggtgcacagctgcagtcccagctactagggaggctgaggtgggaggattgcctgagcccaggagatgaagactgctgtgagctgtgattgtaccactgtactccagcctgggtgacagagcaagaacctgtctcaaaaaaaaacaaaaaaaacaaaaaaacaaaaacaaacaaaaacaaaaaaacggccgggtg

SEQ ID NO: 31945 - DNA, 1485 bp, Artificial sequence
  DNA replication origin
cctccccgcccccgaccacttcagggcaaggcgggcttagtcttaggccctcccctttgagtggcgttctagaccactctcttcgaccctccaaccacgcggacccgggtactgccaagctcacacccacctaccaccgacgaaatcgtcccccgcagaaagggtgatctacctcctccaaccagccacgttcccaggcccggccggctaccgccccttccgcatgcgcgtgagaacgcgccccgcccacttccgccatgctgacggcagccgccaggccccaatcccggtcccgcccccgcgaggcgcccaatcagcgcgcgcgaaaaaggtgggctgtggggccggcgcatgcgcgctgcggaagctggtgctggacagctggcgccggcagcagcggaccggcgggagacggcggcttgggagctggctgtgctgcaggtgttgggtcgggtcgggtcgggacgggcgggagaggacgagacgggtcgggataggttggggcggggcggggcggcactagactcgggactcctccaggagggagagagagggagaggctgggagtggggttcttgagaaaagagggagctttgagggtggggaaccctaagagagtaggtggggccagggagtggaggccccattaaaaaaaggaggccttagtgccaagagtggagttggaagggcaatgtaggaaagcccccagctccctgccctaggcagaggcggcagacagttccttgggctcccatgtgtggtagtgagctcctggttcctggaactaaacgaggataaccaccccagagcgtggaaagggggctcttgtggtgggtgagacttagtggttttagaggccccttaaatcacttgcaccccgagcagcattgaaaacatccgtgctgggcacagagcagtgccctgcacagcaagggaaatgttagaagaaaccgtccagatttctgtcatccagggtgacccctccctcgggggtgagtcttgtgacagatactgaggccctaagtgtctgtgataaaagaaccagaggtggcaggggaagtctgcaagcctcctcccacccctgtctcagtccatcagataggtgaagcctgctcttttgttttaaggagctgcggcagccgccgtccttgcacctaaggaacctctgctgccagcccttcctcacttttggaaatggcgggtgaaattacagagaccggggaactctactcttcctacgtgagtgtgacttatagaaccttttgctcacttaagtgttcctggcttctagaaaagcacattgcttgctggagatgggactagtgagtgctgctgcttgagcagaccatagtggaagcaggatgggggagttccatggggcagcgactacagtgctgctgtggtggctcagaatgtaagtcagatttattctctttttaaggtgtttgtcagagtggtcaagccaaacaaaatcgccatgctgtt

SEQ ID NO: 31946 - DNA, 1855 bp, Artificial sequence
  DNA replication origin
tcgcccgcgcgctgtcactacagctcctttcctcgagccgaccgatccggccgccccttcctcccgctcttcccggagctggaggacctgccgctgctcggtccggagcagctggcccggcgggaggccctgctgcacgcggcctgggcccggggctcgcgcccgcgtcacgcttccctgcccagctccgtggccgaggccttcgctcggcccagctcgctgcccgctgggtgcaccggccccgcctgcgcccgccccgacggccactcggcctgcaggcgcttggcgcaggcgcagtcgatgtgcttgccgatctaccgggaggcctgccaggagggcgagcaggcaggggcccccgcctggcagcacagacagcacgtctgcctgcacgcccacgcccacctgccattttgctggggggctgtctgtcctcaccttccaccctgtgccagccacggctcctggctctccggggcctgggggcctctggggcacaggggcaggactctggggctgggcacaggctacagagacagtgggggactggacgagatcagcagggtagcccgtgggacgcaaggcttcccgggaccctgcacctggagacggatctccagtctggagtcagaagtgtgagttatcagccactcaggctccgagccagctggattctctgcctgccactgtcagggttaagcggcaggcaggattgggcttttctggcttctgccatgaaatcctggccatgggaccccagtgacagatgatgtcttccatggtcatcagtgacctcagtagcctcaaatcatggtgagggctgggcttttgctgtcctcttctcacgcagagttctgccaggagggtgtgctgtgggggtcagactcctgaggctctcccttccctggggctagccagttactggtcatggctgctgtgggcatggaggctggaacttgtggttgaggcagggccatcccgatccttgctctacctggctagagtttcttctcatcagagcactgggacattaaaccaaccttttacaacacactggtcctggctgcttcattctgcattctggaaggggcacagcacaggccatagacaacagggcatcatgagagtatcccaggtgggatgtttgcctaaagcaggtaggcaggtccctcttggggaggcggagccttgggagtgtctgggagggatgtgggaaggaggtgaggctgagagggggctctgggcagcagaagccacttggtattcagggccagctcccacccatcctggcactggatgtaacacgtgtgctcagcacgggggctctggtgatgatggatggcgttcatccctcagtctccttgaaaagggaggcttgtgccaggggtagtggctgtcctgtcctgccctgccagggacgccctggggagcctgacagtgccatggtggcagaggcagaggcagagaaaggtgtggagcttgtaggcttgctaaaccctggctggccgcattctctccgtggctgacacacgaggctcggaactgcctgggctctggaatcctggggcaggtggctgccagggtcaggcacagcttggcctcgctggtgccaggactcctgtggtgggagaatctgcctgcggtctcatcctcttctccctctggggcttctagcccacttcctttttctatcacacatctttgcctctggcccatctgaaaagatggcttgtgcttaccattttcaatgttttcacatctgcaatcacacttatcccccctacaatgactgtggagcaagcaggcattccttctatccgttccacaaacagtgagcactattgattctgtcagaccc

SEQ ID NO: 31947 - DNA, 1918 bp, Artificial sequence
  DNA replication origin
gtgcagcagggcctcccgccgggccagctgctccggaccgagcagcggcaggtcctccagctccgggaagagcgggaggaaggggcggccggatcggtcggctcgaggaaaggagctgtagtgacagcgcgcgggcgacaggggccgctcggaggccgagaggtgcctcccgcagtgcccggtccgcaccggccaccgcgcctcccaggctgggcggcgcgacactcgggagacgtcggacaggggcggccccggcgtcggggggcggcccgggggctgcggagccctgcgcacaagcgccgcgcgacccccgtctggcggtccccagcccgtggggctcggctctgggggcgggtcgggggtgggcaggcatgggctggggccagaccgcggggtcgggcagggggacggtgggggcgcacggcggccgccaccccaattctcgatggtgcgagtggcgcggtccagggagctgcttacgcccgccgtggtcaccatgtcgcgggctgcctgcagcatcttgagcacgctggcctgggccgagctggccgtgaggtccgggctggcctgccgcggtgggctggcgaggctctgcaccccgctgaagcagctgtagatgccctgggcagtagggagacgacaggccgtaagcagcgccctccgctcagggacccgccacgattgtccctgcctggtcccaaggcatcatcagtcttctataagtctcaggaagtagctaactgtgaagcatctcccatgcgccaggcactgtgctttgcagatgaatgagtggtctgagcgcccaggttgactcattctcctaatcactctagctagcacctggcacatgaaggttccaacctgggcacacctgtgggggggactctgaccctcttcaaccctgccaccctggtgagccatgccacttctcaggacgttggcttttttttttttttttagaaacaggatctcactctgctgcccaggctggagtgcagtggtgccatctcggctcactgcaacctctgccttcttggctcaagcgatcctcccaattcagcctcctgagtagctgggactgcaggcgcgcaccaccacgcccagctaattcttttattttctgtagagatgggttttcgccatgttgcccaggctggtctcaaacttctggactcaagggatccactggcctaagcctctcaaagtgttgagattacaggtgtgagccatgagccgggccagaaccttggttttacctctggaaatgggccatggccagcccggacttatctgggtaggtgcccttaaaactttggcctgtgtggggaggggtgggcacccaccctgctgaaagccagcaggaagtccagctgggatgagttgggcaccgagtggcgcagcttccagtagaccaggtgctcccaggcgaagaccagcagggccagccccatggccaccagcagcatgtagaagacgcctgccatgttgtcgatgtccagcttgctgctcatcacctcgttcttctcattctggcagatccctgagagccacactgtctccagtttctgtgtctctcctggagttggggggtgtacacatctggctcaggaaacccccctataagcaaccccctcacaaagctcaccacaaacctggagtaagaagggatctggggcagggtgccacccacttcttcctcaagcagaccacatggggatccagcctggctggagcaggatggtggggcggggagtggagggtcagtgagcaaggaaataggaaagcagggtggaggctggagtgggcaatgctggcctttgggtcctccccctgtgcacccccagtaaaggcttgtgattgggtaaatgttagcattcattcattcactcctcttcatatacttattaaccatctacat

SEQ ID NO: 31948 - DNA, 2074 bp, Artificial sequence
  DNA replication origin
atggcacatgctgggggccagtcagatgacacacacacacagaaacacacacgtgagctcacttcacctggcgagggaatggccaggacgcgtcccccccaaggccaggctgagaccggagctgtgcagtcgggtgggctgagccctgagccctttcatggtgggcaggaggagctccagcatccccccgcctcttgcccccagagtccgggggcccagctttcactatcggcaagtccgtgtggctgctgtgggcgctggtcttcaacaactcagtgcccatcgagaacccgcggggcaccaccagcaagatcatggttctggtctgggccttctttgctgtcatcttcctcgccagctacacggccaacctggccgccttcatgatccaagagcaatacatcgacactgtgtcgggcctcagtgacaagaaggttgtggggccatagctgctgggggtgggggggggcactgagggtggggacaggccgtgagtgggcaggccctggacagtcgagtctggggaatttgacctggaggctggggcaggaagaagcttcagggcctgctgagaaggggttgggggctggggcaagagatggctcagggccaccggctgagaggccttgggtaagtctctccctgtcttgggcctcagagtctccatttggaaaacacaggagtggcctggacagcctttaagaccttctgctctgactatgcaagtccacactggggctgggctctggggtgggtttggggctttggtgcctggaaggctggaggaagggttgtgactggctgctgccctccgcctgcagtttcagcggcctcaagatcagtacccacctttccgcttcggcacggtgcccaacggcagcacggagcggaacatccgcagtaactaccgtgacatgcacacccacatggtcaagttcaaccagcgctcggtggaggacgcgctcaccagcctcaagatggggtgggtccccagccctgcacccgctgtcttcatccgtgtgtctccccagtgaccagccttagctctcaatgtggggacagtgggactgggctgtcctgcaggactcctgtggggtggagggaagaggtcttggggcagagtggagcttgaggcaaaaatggaaggccaccatgtgtctcagaacacagctgtggtgccaatcaaagttcagcctcagcctgaggtggtggttgggaccttctctgagtcttaggagcacggagagggtgggcagaaagggtggtgtgtcttctgggaacagacagtcccctggccactctgcagaggagggtgggaggggtcctcaccccatccaggacccaagagaaccagacaagtctctgcccattggtccctcccgggggtgcccagcaggctcatgtggtttagacccctgtcacgccccagtttcggtgtcccctcccctcccatatggtccctagctctgaggctcagcctgtccccaggaagctggatgccttcatctatgatgctgctgtcctcaactacatggcaggcaaggacgagggctgcaagctggtcaccattgggtctggcaaggtctttgctaccactggctacggcatcgccatgcagaaggactcccactggaagcgggccatagacctggcgctcttgcagttcctgggggacggtgggtactgccattgctgggatgcccagggtgggctgtggagcccaaggttgtcagcatttccaccaccactcaagttcccaaggcctgtgagcagggagaggtctctggggggtgagaggttggggcagctgaggtgggcaggtactaggagcaactggagagagacttgaggaagggataggtgtgcagggcgggagcaggaactgggctagagagtccctgaagggcaggaagacaggaaggggctcaggcctcatggtgggggtggggatgggtggagtggctgaactcctttcttcttccctaagacccctcccaagatctctcccagatgagcacctcctttgctcagtatagtatctccatggccatcttgagattacggatctgcccag

SEQ ID NO: 31949 - DNA, 1091 bp, Artificial sequence
  DNA replication origin
atggaacggcatgattggggaggtaggccccaccccactccctcctcacctgccctgcctgcccacctgctgcccaggccccatgtggctctcagatgccctctagaggggggcatgggctgtcaccaatgatgactcctggggtggtcagtactgaaagctgagctctgagggccccagagggaatgattgactcagctggtgggtgctagaaggggtgtctggaggtgcctgtgcagcgtgtccaccccacgggagcccctttttcaaacctccgtggcgtccggcccccaggtgtactacaagcgggcagacatggccatcggctccctcaccatcaatgaggaacgctccgagatcgtagacttctctgtaccctttgtggagacgggcatcagtgtgatggtggctcgcagcaatggcaccgtctccccctcggccttcttgggtgaggcccagggtgggcagagacggctccgggggcagaggggcccacgaggagggtgtgtacagcttgggtggggatggggagttgggtgggctctcacaggccaagcacagcagccttgggtcttggaggttggctggaggtgagtggaaaggagacaggagaagtgaagtcagtgttcggttctaggtatggctgccaggtgagggtggggttgggggtgtgggatgggtcgtggtgccactgtgagtggcaggaaaatccagcaggcaggctcgcctcaggatgggccatggcccaggactgtggaacgagtgggggaggcccgtggggagttgaggagcgagtgtagtgtgcgaagaggtgtgttgcttcctgggtgaggagtccggcattggttgggcagccaggtcccatgctgggtgctggggctacagcgtagtctttgccttcccaaagttccctgtcagaggccacgtgggacatgaagtgtgaggtggcagagagctgtgaagacaggcgaggggcaggggaagagctgaggctggccagacaggagtggaaaccccggctctgccctgtcctgctgtgtggcctcgggcaagtcacagaacctctctgagcaggctcctcagccacggaa

SEQ ID NO: 31950 - DNA, 2301 bp, Artificial sequence
  DNA replication origin
tcgccgacgccagccacgtgagttggcggctgctggacgtggtcacgctggagctgggcccgggagggccgcgcgcgcgcacgcagcgcctgctgcgccagctcgacgcgcccgtgtttgtggcctactgctcgcgcgaggaggccgaggtgctcttcgccgaggcggcgcaggccggtctggtggggcccggccacgtgtggctggtgcccaacctggcgctgggcagcaccgatgcgccccccgccaccttccccgtgggcctcatcagcgtcgtcaccgagagctggcgcctcagcctgcgccagaaggtgcgcgacggcgtggccattctggccctgggcgcccacagctactggcgccagcatggaaccctgccagccccggccggggactgccgtgttcaccctgggcccgtcagccctgcccgggaggccttctacaggtgggcacctgcccggggcataggggtagggaggtggggagcgcttcgggggagctggctggcagtgagtttgggctggccagccacacctcccactagctgcgtgcctggggccacattaccccacctgtctgggccttagtgtcctcatctgaacaaacagcaggtgtcagggtgtggcaaggatcgtggggccaatatagggaagcactttgaacaataaacacaatcaatgccacctgctgtcggtggcggcggtgaggcagaggcagggggtgcctggtccttggcagggctgcaggcatctctcccctctggcaggcacctactgaatgtcacctgggagggccgagacttctccttcagccctggtgggtacctggtccagcccaccatggtggtgatcgccctcaaccggcaccgcctctgggagatggtgagaagggggtgagcccaggggccctcagtgtcctcttattttgtccccgcctcctcttgtgcccacagctgagcagagagtccctctgtcccttatccaacccctcatcttccaggtctcagctgaaacaaacatctcctccactgggaagcctccaggtgccccggggtgggtgaggtgccctgctctgggctcccataacaccccggcttccctctactatagaacatttcaagcgctcctatctcctggtcctgcccctgcaggagtaacccatgaccatgctggccagacaggcttgtaaacaatatgcagggacaagtgcttgagtagacgtgtgcaaaagattgtgggattggagatgaggaacaggaattagttctgccttcaaaggaggaaactgggaaagaggtcccagaagatgggatatttgagctgggctgtggaggtttgagtaggagcccaccaggaagaggtgctagcctggaagagacagaggggcagaagggtttggagcatgaagggccttgagtgctcagctaaggacgttctgtcaaagtcaggggggaccagtacagtgagtgagacagggtcaggtctgggctttaggaagatgctgtgggtcagtgtggagctgtatgaacacagggacccgaggctgggggaggctgttgggagcagccctactctgacctgccccagcatccctaggtgagagagggagattcttggccctggcaggctccacctagagggtgggggctgtagggctggaggccccaggctgaggctgtcaccctccacaggtggggcgctgggagcatggcgtcctatacatgaagtaccccgtgtggcctcgctacagtgcctctctgcagcctgtggtggacagtcggcacctgacggtggccacgctggaagagcggccctttgtcatcgtggagagccctgaccctggcacaggaggctgtgtccccaacaccgtgccctgccgcaggcagagcaaccacaccttcaggtctgtggagggccctgggaggctagtgtgagctgggtgctgccgtgtgatggtcaggtgtcgtgtatgtcccatgcttgggtgtggggcaggggtccacgtgccaggctggaggagtggctggggcggggctgggccacgacatactctgactcccggtggtctcatggcggcatggctgcagcagcggggacgtggccccctacaccaagctctgctgtaagggattctgcatcgacatcctcaagaagctggccagagtggtcaaattctcctacgacctgtacctggtgaccaacggcaagcatggcaagcgggtgcgcggcgtatggaacggcatgattggggaggtaggccccaccccactccctcctcacctgccctgcctgcccacctgct

SEQ ID NO: 31951 - DNA, 1774 bp, Artificial sequence
  DNA replication origin
cacacgtggccgggccccaccagaccggcctgcgccgcctcggcgaagagcacctcggcctcctcgcgcgagcagtaggccacaaacacgggcgcgtcgagctggcgcagcaggcgctgcgtgcgcgcgcgcggccctcccgggcccagctccagcgtgaccacgtccagcagccgccaactcacgtggctggcgtcggcgacggcgcgcacgccctccaggaagagcgcgtggcccgggtgcaggctggtgatgacggcgaaggcgctccagtcgtactcttccagcaccttgaacagcacctgcagctgctgctccagggacacgcccagctgcaggaaggcggagcccggctcctgggggcgggcggggcctgagcggggcgggagggccgagcccctcctcccgccccttccccgacctcggcccctccatcagctcccaggcgcccttgcgccggcggatgctccgcattccgggagccctctggcctgcgcctccctcccgccccaatgtggttccccgctgcctagtagcatggtcatgcccggcccccagcccaccacgctggcccgcagacccgcagcatcagcaccactggggagtttgtcagaaatgcagattctcaggtcgcaccccacaccgactggatcggagtcgctgggtatgccgcctggcatctgtattctcacaagctcttcagccgatccttgagcccgctagactgagaagcgctgccccagaccaactgaatctgaattccagaggtgcaaagccaggcgtctgtatttcctaagagcacgatgagggttgagagccaatgtcctgagatcttatgccggggccccaagaggacggggaaacgccaccctggttgaagccctgagggtgggaaagctcctcctctccacccctctgccaccacaaaaacccaaggcactgccggctggcaccggggccagcgcagtcccctcgtaactggtctcactgctgccactgtcccaatcttttaaaaaagcaaataagggaaaattcagaggccaagcaacgcagtttcttcaataaacaaattgcaaggaaaaaagagagacagacagaggaggggcccagaggttgagagaaactcagaagccacaccaaccaaccggcacgtgtggacccgatttggctcttaattcgagcaaacaggctgcaaaataaacacttatgacagttatgaaacaatggggaaatttgaacactgcctggatatttgaaggagtttttattattttttagacgtgataatgtatggtggttttacgttcttaagcccttatctgccagggatacatactgaaatatttatggatggaataagaggatgcctgggctttgattcaaattaacacagaagaaggggaagggggtgctggtgaggctggggtggatggccagggcgaatgggggatatatgagtcttccttatactttttaatgtatactcaaaattcttcatataaaaattaatgaaacaaaggcgaatcagatcagtctcttccctcaactctcctccgctcttccctgagtggctagatcaacaggggcagggccaggaagctcacagggctaaggcaggcacagaccacggccactgtcacagccggcttgcgctgccctgtctgctcacttgcttagggaaaagcccaaatgtcttcccaggtggccaggcccccgcctccttctccaggcttttccctctattcctccaaagctctgagctccttcctcgcct

SEQ ID NO: 31952 - DNA, 1282 bp, Artificial sequence
  DNA replication origin
tcagcccccacctccctgcccatcccgtctaatcccagcttcccagaaccaaagcacccccgaccccagcctggttccaggcctgaggcacgaggggacatgagtttggacatgcaccttgggggtgaggaccacagcagagcctccgctgatgctgaggatgggcacatgggtctgggaggagatgaagtcaaggatctgggccaccgcctcggtgtccacgttgtcctcaaagacaatgccgtggacgtgggcagcacccaggaggccgcagatctgggtgaggaggctgctggggttggtggtgttgaccccaactgtgagcggctggatctccaggggtaggtccaggaagctctggggggtgaggcgggcacggaactgggcctggggcggccctgagctgctaaacaccacggccaccgtcatgccctgctcgccctgccccggacccagccctgcccaggcaccgaagagcgaggtgagcaacagggccggccccagggccccacccatgtccaccggagggtcctgcggagagaccagaacaagcacagggagagagacagaggtttggagagaggcagatggacagacaggagggacagagggacacacatacggaagatgaaagagaagaggggaaaacctccctccccgaagagaggcggagagagagggagacagacagacacggacaaagagaaagagacagaggttagttgagcatcccaagggcatcccagaagagcaagggctggggaagaacaggagccatgaccgggacccagccctccagtctactgatgccttccaaaactcagccagtgggttctgccctaggaagtcatactgaaaatgctagtctggggttcaagtgcatggatttgagtcagacagatctgagttcgtgtcccagttctgccactaactggctgtgtgatcttagggaagtcacttagcctctctgagccatgttttcttgcctgaaataatcacagcagtgtgaggacttagatgagctaacaggctatttgctgggattagtgacctcatcccgcaggtgacaggcccccagccaggtgaaggaagacagctcttgcatcacccccaacccccacccccaccggccagtcctcctcatagtctaaaccggatcttccatctgtctctcaccagggcctgtgctactggtcagtgtgccctgcttgccatggggccagccccaagggccctcctctgcatggttctgcctggcacagagccccctcctcctgggcac

SEQ ID NO: 31953 - DNA, 1791 bp, Artificial sequence
  DNA replication origin
ctgtttctaaactcccgaagaataagagcgtgccaggggcaggtaggcaggtccgggacacctgggttcgcccagggcccccgggcgggcctgggatggtactggggccgcctgccaggctggcttggtccccccactgcgggactcggggtcacgacccagcttgggggagtgggggtgggggccccggagccgcggacgccggcggggggcagcgtggggcggggggcgccgggtgcgtggtgctcagcttggccgccaggaggcgtggcgcgggtccccgcccggagccgccgccgccgccgccgccgccgcatcgcgagtgtccttgagccgcgggtgacggtggctctcgctgctcgcgccccctcctcccgcggggggagcctgatgccacgttccctatgaattatttatcgccggcctaaaaataccccgaacttcacagcccgagtgtaagagattgctgcggaggggagggggcggggcgtcccggtggccagggggagtccgggcggggtccgcggagacgggggccgtagccttggaggagcaagaactccgtgcccccagcagtggggcaagctagaacggcggtcctctcccctggcgcctgggttcgggttttggctgggcaaaagggagggagggaaacccgacggcaaaggaggggcggctcaccggaagggcagggggtccgggggttctgctggtgggtggggaggactcctgcgacagagtttcctagcctgggagagggagagccatcggtatctcagatgtgagcgggtatgagtgcgggagtgtgcatgtgtgtgcaggtccgtgccagggggtctggctgagctgtgaggacccgggaaggagaaggcccccagcctgggaaggtgctcagacccttctagatgctgctgtgtcctgcaggactgaccactgccatcctctctggggctctttggggatctctgtgtttgtcaaacattagtttaagggctgtttgtggaaggggtgagaccctgagtgggtgggtgggcagaggtctctgagacaatgtgtctgccctcaaggagcccgcagtccagtgtggggcagggtgttaatgagtgcacacacacctgccgcagggcagaatggaggggtggaggggaccactacacagagctccccacccaggaggggaagccagggcagggggaagaagggcaggtgccccagcctggccgcagtccctgcgcctagagcctgaggcatcaaggcaggtgcctgtgggagagggatttcagctgggccctgaaggagagtagacttctgttgggatgaggacattccagcctgggggatgctggaacgaggcctggagatgagggcagaatggggctgtttggccagcagactggcagagctgtgggttccagggatgggaggacggttggttgcggtcagggtgcagagggctctgtctatgggactaagctgtctggacttcatttgtgggcaccagggtgtagctgtcctgtgtgaggagggagcagtggctggaggaaggcttcagcagtgcagtggggctggcgggggtgggtaggtgggaggtggggagggggaggcaagggaggagattgtggcgggggaaagtggagtttgtccctcctacctctgtagggtggctgggttagacggggtgatgagacagaattcggaagctccttgagtctgccccttgctatttggagcccagggacttacctagttttggcccctggctctggaggtattctgggatccctcccccat

SEQ ID NO: 31954 - DNA, 870 bp, Artificial sequence
  DNA replication origin
ggagtgggggccggggctgggatccaccagagcgaggggttggaaaggagtcgagaaggtgaaagggggctgtgcggctccccagcccagtgccccagtttccctaggtctgctgggcacctgctgcgcactcgcctcggcgcccagaccccttcccccgccgcgagtcccgcttcttccccttccagctctgccccatctcctttgccccagcctagctctctccttcctgcgacctgggagaatcggagtgggcttccagagtagtggcatcttgcagatgctggcccgtgcccggctcccgggcttccagagcgcaaagggaagggtaggcagagagggcactgggcgagcaagacctggcgctgggccctggctgcgcaccagccgcctgcgccggtctctgggggcttcgcccaggatccccgacggcggggaggggaagccccgagtctcctgtttcctgcctacgcgggcagggcggggacacgcggagcaaaggcacccggcaacctgaacccccaggtgcgtcccgcgaccctgcaaggagctgctgggtgagcaagacgggaattcccgccaggccctgatgcccaccccattcgtccactcggtttcccagccctggtcgtccaaggggacttctggctcggtcccccagccctcggatggtggcgttatcttagttcagtccctgaccccgggccacaggaaaatcgaggaaagacacttatttggggagggtaccattccgctggctgtatttcagagcccgtccaggtcttggcggtgctagtgactttgagcctgtttctaaactcccgaagaataagagcgtgccaggggcaggtaggcaggtccgggacacct

SEQ ID NO: 31955 - DNA, 891 bp, Artificial sequence
  DNA replication origin
ggcgcccgcggagctgagactgagcgcgccagccctccggggccgaggctctgggacagacaccgcgagggaggcggccggcgcgggctctcgtcgcgggcgcagcgccccttcccctcggtaagtggcgagcggcgggcgaggggcaccaacttcgccgccaacttggggctgggttcccgcggcgcgcgagcaaggacggcggagacagaggcgggacacccggggggttggacccacgcaggactctcggggctcaaggagggggcggctggaggacccggaccctcaagaacctggccttgggttttgacccgggcggccggagagaaggcgaagaagaggccgagcagacaggcgcgcggcggacgcgagagaaggacgcgggcgaagcgtccaagacgttcgtccccagggtcgccgagccctcctcctccttcgcttggcgcggcagcaccgcgggaccaggggagtctgggctgccgcggacccaaactgttgctgctggaagccgccggggcggagagcggggaacagggccgggagtgggggccggggctgggatccaccagagcgaggggttggaaaggagtcgagaaggtgaaagggggctgtgcggctccccagcccagtgccccagtttccctaggtctgctgggcacctgctgcgcactcgcctcggcgcccagaccccttcccccgccgcgagtcccgcttcttccccttccagctctgccccatctcctttgccccagcctagctctctccttcctgcgacctgggagaatcggagtgggcttccagagtagtggcatcttgcagatgctggcccgtgcccggctcccgggcttccagagcgcaaagggaagggtaggcagagagggcactggg

SEQ ID NO: 31956 - DNA, 1578 bp, Artificial sequence
  DNA replication origin
gcaggggagcaagcctcagctcctaagcttagggatcccctcatctacagggaaactgaggtgtaagggggtcggcctggtaaaaacagggagagaagaatccagggcagtggaccagcggccacagcaggctcagccgacagtctgccaagaggcgtggggtgtctgtgtgcgtgcacgtgggtgtagattgtgggcacaggatggccagggtggtatccagccacctccctcccttccccttttgttaccccctctcaggcctctactgcagcggctgggtgaagagaggacctacaggtgtcatagccacaaccatgactgacagcttcctcaccggccagatgctgctgcaggacctgaaggctgggttgctcccctctggccccaggcctggctacgcagccatccaggccctgctcagcagccgaggtctgggccccgatgctgaggtcctgggaggtggggtgggtggtccttctctgggcctcactctttgggagggggctgttctgggaggggtgaaggaggaggtgttgacaatctcccctctgcttcaggggtccggccagtctctttctcagactgggagaagctggatgccgaggaggtggcccggggccagggcacggggaagcccagggagaagctggtggatcctcaggagatgctgcgcctcctgggccactgagcccagccccagccccggcccccagcagggaagggatgagtgttgggaggggaagggctgggtccgtctgagtgggactttgcacctctgctgatcccggccggccctggcttggaggcttggctgctcttccagcgtctctcctccctcctggggaaggtcgcccttgcgcgcaaggttttagctttcagcaactgaggtaaccttagggacaggtggaggtgtgggccgatctaaccccttacccatctctctactgctggactgtggagggtcaccaggttgggaacatgctggaaataaaacagctgcaaccaagagccatggttgatgggggactttttttggaagggttggggtcgggggtcaccttctggccgtagctcccctaccatcaccaggtggcgctgcagagacggctccctgctcaggggcctcattgggggcttgatggggctcggcagccaggcctggcatagccacccttcctttctccgctcggccctgctgtggctgcgggttgcctgtcttctgtccacactagggctgcccgggaccgggaccgggaccacccctccctggggagccctcagtacaatcaaaacagaaaagaaatgggagcgggggactgagaagcagcttgtcccctgtacctctgggtgccccaggcgagtctagcctggggcccattctttggctctcaaagccttcctgcttccgtttccagtcagacacactggcctttaaaaatagtgcctcagtctccctagggctttgcagtgtccagagagtggtcactcccttttatggcagccctcaagatgctgcctcgctgtataacctgaggggtcctcgaaattggcccaaggtcacacactcgtgagctg

SEQ ID NO: 31957 - DNA, 980 bp, Artificial sequence
  DNA replication origin
ctaggccgagcagtttgaactttatgctgtggcactgggccccagcgaagatttttgagcaaggcagtgacatacaacaacagaatagtaatgatagctctcttcttgattgaacactcagagtaggttgcaccccgggctgcctgattactcatttaaccttgagcaggacaccacagggctcttcttttggacagagaagaaactttccccagtgcacagagccagctagtgctagagctgggactggcatccaaggctacctgtttgactccaagcccagagcgctttgtgggtacaacatcgtggggcttgagggaggtggtttgggtagccccctgtggctggcctgggatggagagaggcaggaggtgggggagggtggacttgggtgcaggcaggggagtggaggggaaggggggatttgggcaaaggcgaagaggtgggtgggagcctttgttgggggtagggagactgatgggcaggggcttctttgccttgagtcccagtgaagctggaggtgtcatagcggggacctaagataggatggggggctgggcgtgtcagctgtgggacccctgactgctttactgctaaccggcctgtggcccagagtctcaccatcctgacctcctggtgctttccagcagccatgagagagagctgtcatccatcctagtgtgcagagggggagactgagacttggggaggccctgggacttgctgggatcatgtggctggttggtggcagagccataccagacttgcctgctggacccccgaccctgtgcctttcacacggcctctcaaggtgccctgggaaggcggtcatgcagaaccagtgcctgagactgtctttctaagagtgggagcaggcccatttccacctctctttcccgtgaattcccagccgtgccccctccctgtcctgctgctcccctttccccagagcatggtcctgggcactagagctaaggcac

SEQ ID NO: 31958 - DNA, 1219 bp, Artificial sequence
  DNA replication origin
ataagcacagagactggggtgcggggagggggtccatgcccagtctggagggagagatgtcccaattgcagtctgaaggacagtagatgtcaggttgggggacaatagcaggagtgtcccaggcacagagaactgcgtgaacaaagaggaagagaatggctctctggggaaagggcaagttctggaaggtgcctgtgtgcagtaaggcgtgaggaggtgagagccgaggctgagaggtaggtaggacccagatcctggggggcttggaagccattgaccaggctctggaggcaggtttcgctgggaggtgtccacagctgcctcctcttccctgatcagagtctcccggggcatcttatcaaaatgcacattcctgggcctaacttggacctaatcaaactctgtggctgggcccaagagtcagcaatgttaaacaccccgaaggattcttgtgcccacagctgtagatggttggcttcactggagagttttcgggctgctgttttccttcaggatgccccctctgcctgcagcgtaggtccaggcagggctggtggccagatagcagtggggagctgctggggttgtagtgaggaagaggactgggaggatgggggattgatgggatcaggtcgggggtcagggaggagccccaggttccagcttgggctctgagtggatggggtcgagggaacaggagcagaagtggggagcggtttggggcaaggggacttggcttgaaactggatggatttgagatgtctggggtgggacatccaagggtctcaggtttggagcttggggagatgtctgggcaggagagagagagtagaaagtcatcagcaagttcaggggaatttggggtcgcaggagggagtgggttaaatcctcagggaggagggaggggggccaatcggaagaacctcagagaatgtccttgttagcggggagcagctagagggacaggagggagggaaggaaggaaggaggaaacctggaagatgaggtcagccacgagagataaggggtaagaacatccggcagacttagcgttccggaggtggccctggagaggacatcgtgacccagagtgaaggatctgtcgcaggaaagaatggaagataaggacagagaggttggttgggtgaggtgttgacctctaggccgagcagtttgaactttatgctgtggcactgggccccagcgaagatttttgagc

SEQ ID NO: 31959 - DNA, 1215 bp, Artificial sequence
  DNA replication origin
agggtctcactctgtcgcccaggctggagtacagtgatttgatcttggctcagtgctacctccacctcctgggttcaagcgatcctcccgactcagcctcccaagtacctgggactacagacctgtgccaccacacgtggctgatttttctatttttagtagagatggggtttcaccacgttggccaggctggtctcaaactcctgacttcaagtgatccacctgccttggcctcccaaagtgctgggattacagacatgagccacctgggcttccggcccaggaaacagtttctgattgaccccacctgcctcggctcacgctgcccacattattgtaattagctctttcacccgtgttgcctgggaagcatgcacgggtcacttttcagcagagtgatcaactcatcccagtttcccaagaacttccagcttagcgctgaagccccttgtcctgggcagtccaggccagttggtcaccctacatttcaagcatctgtgtgtgtgtgtataattaagatattcatcctttctcttgtctctccacggacactccaagcctctccaaagctaggcaactgtctcacgtctcagttaacctgggtatcccctctctactctgtcccaaagtctgatgtggagtctcaagtagaacctgtagccttggcttggggcccttcctgccgaggcagacactgaaagccttgagatcctggccttcacaggggaagggggaggggcagagggcaggctgaaagaacagaatggcacggaggactggagctatgggtgaggagggcatggcaaggcaggtaaagttacagaaagcggaggaggtgggtagcctcgagatgtaggatgtttgggatagagtgaagatagacgagagaggagggaagatgaaggaggacaaagtcattttgcaggtctacataagccccctggagtgcttggccagggaggcaaagctgaccacctgccactgaccactcaccaccaatgtgcgttttacacccctgtcacactgaggacgggaggggaggggagcctcaggtgtaggtgaggaagcaagtgggaagtgtccaggccagatggctgggagccccttccccataaggcaaccaggagtgctcttaaaacccaaagcgggtgaggcttgcccttaggactggagcagcaggtgaatgatggactatgagtaagtggcttaccttta

SEQ ID NO: 31960 - DNA, 1150 bp, Artificial sequence
  DNA replication origin
tcctttcttagtggctgtttccttggggagggactgaaacagcgatggggattcgctctcttccaaccctaggcttccgggatttggagggaaggtgaggcctggggagaaatgtattaaatcgcgtataccccggatgctccgaggggcggggcttcgacggtggggcgtagttaagggcgggtctctcttttgggggcgggattctctcgggagtcggggtggagccgcaaggctccgctttcccggagcgcagggggcggggtttggggcggggcctcgcttgtgggcgggcccgggcaggagcgggcttgccctgcggagcagtagctaggaacagatccacttgcaggttgctgctcccagccatggcttcgcgctgctggcgctggtggggctggtcggcgtggcctcggacccggctgcctcccgccgggagcaccccgagtaggagcagggcgcctttggggctggatgggagcgcggggaggcctgcgagcgctgagtaggggtcggagcagagctggggcagggctggagaagggtgagactgaaggggtgtcttcctgctggcgagatcccggtggtgtacgggggtgggcggagatctgtgcgtgagatgtgaggcttctagggttagagacggaggtcaacaaaggtgaaaaggagagactttgagatctacaggtgtgagacggggtgaatggaggatgatacggaggtctgtggggcgagaggaaagtctgagtcgaaacagggatctgtaggaataagacgggtctatatgggcaatatagcgttttgtggagagagagaggggttagaggagggacaccgtggggagacccacgggggcgagattgggatgatatggaggccgttggaaggatgtgggattctagccgattggatagggaatgaagtgttgttgggcaggccattggcagtggtgtagtaggttcatgggtgagatgtgggctctggatgaacccacagcctttgggggttcagatgaagtaagagaccctgcaaatgccaaagccttgaggaacaagagaaggaggatgcaggtgagggtgaagcttgggaagttccagcttctgttggatattcaggttggtttgggactggggagagaagttaattttga

SEQ ID NO: 31961 - DNA, 771 bp, Artificial sequence
  DNA replication origin
gagaccaccctggccaacatggtgaaaccccgtctctactaaaaatacaaaaaattagctggatgtggtggcatacacttgtagtcccagctacttggcaggctgaggcagaagaatcacctgaacccgggaggtggaggttgcagtgagccaagattgcaccattgcattccagcctgggtgacagagcgagactccatctcaaaaaaataaaaaaataaaaaataagactcccgttcaaaaaaaaaaaaaagaataaataactttgaatgtgaccttggctagttcaaacagtttgttctgtgatgtttagaagtgaacctggggatcatctactgggagagagaagaatttgtaggagggggctggggctggagggggtactgggaacagggtccggaggacggatgacctcagagaggaatgggaggagggtggggtgcagatagaagagcctgaagtcagggctgggcagggctgtggaaggatggtctgcagcctgggagtgaggtgggaatataagggaactaccaatgccaggcagaggaagagaccaaggtgctgggggacaccactgagattcagcccacagtgggtagtattgagagagggctgggagctgccccagctgggggctggactgggagggtgctaggaagtgcccaggtggaggctgagggagagacagagaaggaggccagacccattagttgaaaacagggtctctcaccttggcactattgacttttttttttatggagatggagtctc

SEQ ID NO: 31962 - DNA, 1822 bp, Artificial sequence
  DNA replication origin
cccgcagcagaggagccagggtgtctcgcaccttgaccccgggggcgggtgtccccaggcggcgcgtgactccgccccggcccgccccgcctcgcctgcaccgcagacacacgccccagtcctccagtcctccgtgcgcgtcgggcccgagcccacagagtccatggaacccacggagccgatggaacctacggagcccatggaacctacggagcccatggaacctacggagcccatggaacctacggagcccatggaaccggcgcggagcgcgcaccgtgggggcgaggcgctgctgcgggagctggaggtgctggtgcaggacgtggtgaggacgagctcctggtgggagcgccacggcgtggactgcgccatcctcgcgctcagcctcttcgccttgccggcaggtgaggaacgcggggacccggcgtcccggccgggctgcgggtgggggcggggtgcggcggaggtggcggcgcggggtctgcaacagcagccgtgggagtgcagcctgcggagtggactggcggcggcagggaggcggaggtggtcggggccccgcacccaaggatggagggtcacaccccgaacctgagagtctggactggggtgttctgccctgtgtaccctaggagggggcgcaggagggtggtggaagggaaagttgagaggagcgggggagtggccgggagtgatgaggtgcccccccacccccgggaagggagacggtgttctttggggacctaggtgagtggggagggggtgggagtttcccctggacccttcctggtctggaacacccatggtacctgaggccccaacattgctttggctgggggcccaggaccacgcactggagagtcaggaccaggcacgggagagtcaggaccgctggaggggcagtcctggttcccctcaggccacagtgggacctgcctcactccggccagtggcagcccccagagcctagcccactttagcctgggctcccagggtaagggttgaggtatttgggcccagatcacccagagctagagaaagacccgtcttcttcctcctctccacgcaggcttcctgtgcctgcgctgggagaatgccctggtctttgcatccggcatcaccatcttgggtgtgtgccactacacactcactgtcaagggcagccacctggccactcatggggccctcaccgagtccaaacgctggagcaagatctggctgcttttctttgtggaggtgagcctgggagaaggaggatgcaggcagctgctgggaccgtgtggcagcctcattcttctgttcgagcatgcgggtgtgtccagctgtgcatgtgcccacgggggcaggccgctgcagctgatggtatgccggtccactggtgcagtatgcactacagcgtgtctgaggacttctccaagcccttgagcgggtctttgcaccccatgggtagagagttgtaggatgagtatgccgctgtcttggcccacagttacaaccagtggggcctccagattttgcagtcagggtttaaaatgtgacccacagacagaaagggagggggaggaggggcccagtgtccacaaggggcagcgtccttactccggatgatgctcctctgatgcctggccatggcctagccttcctgagaagccccctgctccccggggtcagctccaggaagtacccacctcacctgacccttgccctcccttcttccaccccttcccagttcgaccttggccttcttaccttcgggcacgcccaggaaggcaaaagtttcgaccagcttgtctttctctcttgactggtctccaggcctccc

SEQ ID NO: 31963 - DNA, 1570 bp, Artificial sequence
  DNA replication origin
acccgcagcccggccgggacgccgggtccccgcgttcctcacctgccggcaaggcgaagaggctgagcgcgaggatggcgcagtccacgccgtggcgctcccaccaggagctcgtcctcaccacgtcctgcaccagcacctccagctcccgcagcagcgcctcgcccccacggtgcgcgctccgcgccggttccatgggctccgtaggttccatgggctccgtaggttccatgggctccgtaggttccatgggctccgtaggttccatcggctccgtgggttccatggactctgtgggctcgggcccgacgcgcacggaggactggaggactggggcgtgtgtctgcggtgcaggcgaggcggggcgggccggggcggagtcacgcgccgcctggggacacccgcccccggggtcaaggtgcgagacaccctggctcctctgctgcgggcgctggcgacccaggcccggctcaggcgcgcgaccctggcaggcggcatcagaaccgccgcggagggaggagccaggccgatgagctgagagtggctaggcggggaggcgaccctgcggtgagacccagcccaggtagtagggacggaggcgtcaggggcacggagaccccagtggagacaccccccacccccgccccgccccgagggccttccctgacctccgacctcaaataactccctgagttccctcggtccctgagatctgtccgagcattctcttccctcgaccctgactattcgtagtggcactgagcagctcccctcgtacgtgacacacatgacacatgctgtcgtctgtctctgccaacagacggaccctcagtgccgtagagacgtcctcgttttgcccaagctctgtcttcagtacctagggcaatgcttggcacagaaacatctgggaattcctagggcagaaagttcaaggactccccactccccctccccgtgggtcaaggagtgagaggtcccctctgagtatggcttcagcagaggtgacccaggggagctggctcttcagcccaataatgttttgggtgagacgggtagctacagggaatacacatccggaggtcatcattctgggtgggcaggcagaccagccgggtcccgctgccattccactccctcaagagcgcccaggcctgaacccagggccagggcctcagccaagccctctgagatgtgggagccacacctgtcacatccccttcccatcagcccaggcccccaccccgcactgctggagatggccttggtcctcaggggataagcctctgtcctctacaaactcctcttccctgcttctgaataccctttctcttttcttttttgttttacttactcccagtttcatgacttaagggatctggtatggtgaggacagtggcatctttagcaggagacccctaggaaagagaagttgggtgggtggggtaagggagagacagtcagggatcctaatgacattgattccttttgactccttcctggtgttttccttcaggaattcttttttttctctctttgtttagaaacagggtctcgctctatcactcaggct

SEQ ID NO: 31964 - DNA, 898 bp, Artificial sequence
  DNA replication origin
aagccaccacgcctggacttttttttttttttttttttttttgagacatggtctcactctgtcacccagattggagtgcaatggtgtgatcatagctcactgcagccttgacatccccagctcaagcaatcctcccacctcagcctcttgagtagctggtgtcttcggaattggtgggttcttggtctcactgacttcaagaatgaagccgcggaccctcacggtgagcgttacagttcttaaaggcggcgtgtccagagtttgttccttctgatgctcggatgtgtttggagtttcttctttctggtgggtttgtggtctcattggcttcaggagtgaagctgcagaccttcgcagtgagtgttacagctcttaaggtggcatgtccggaattgttcattcctcccggtgggttcatggtctcactggcctcaggagagaagctacagacctttgcggtgagtgttacagctcataaaggcagtgcggacccaaagagtgagaagcagcaagatttattgcaaagggcaaaagaagaaagcttccacagtgtggaaggggacccgaatgggttgacactgctggcttggcagcctgcttttattcctttatctggccccacccacatcctgctgcttgttccattttacagaaagctgattggtctgttttacagagagctgattggtccgttttgacagggtgctgatgggtgcatttacaatccctgagctagacacaaaagttctccaagtccccactagattagctagacacagagcactgattggtgcatttacaaacctcgagctagacacagggtgctgattggtgtatttacaaaccttgagctagacacagagtgctgattggtatatttacaatcccttagctagac

SEQ ID NO: 31965 - DNA, 1092 bp, Artificial sequence
  DNA replication origin
cacgactccctgtttacccgccccggcctgggcaccatggtgttccgcagaaattacttgagcagtgggctgcacggactgggccgcgaggatgggggtctggatggggtgggagcgccgcggggtcggctgcagagctcccccagcctggacgatgacagcctgggcagtgccaacagcctgcaggaccgcagctgtggggaggagctgccctgggatgagctcgatttaggcttggacgaggacctggagcccgagactagcccgctggagaccttcctggcctctctgcacatggaggactttgccgccctcctgcggcaggagaagatcgacctcgaggctttgatgctgtgctctgacctcgacctccgcagcatcagcgtcccactggggccccgaaagaagatcttgggggccgtgaggaggcggcggcaggcgatggagcgcccgccggccctggaggacacagagctgtgagtgtccagcctggcgggggggatggaggagcaggagttggaaggcccctggggagggggtacagatctgcctattcaggagtagggggtgggggatactgtatttcataaaatcgaaatgaggccatcgatgataaaaggcacccttattttatttaccaccagctcagaaaaagaagtggccaatttaatgatgacccgaggcattcttatcacagtgaaagtgcacctcgattctggggacatcgacaagtggggaaatgggcctcttaatgtcaatgaatttcaacagtcacaggaatcacagctggggtgtttttgagccctcccacctcctaggtgctgggttgtgcccttgaacaagtcctcttgcttaatccctctaaaagcctgtgtgcgctggactatattggtggattatatcgttcccattttacagccaatgagcaagtggaggctcagacagttagaatagctcacctcaaggtcctgctgctgctcagcatggagctaggcttgatccctggtctgcatggctttagagcctggggtcaaggtggctgccatgggatgcagggcgtgcagtcagcagggcctctcaattgcccaagac

SEQ ID NO: 31966 - DNA, 1162 bp, Artificial sequence
  DNA replication origin
gtcactcgtccctcctgaatgctttccctgcaggggtgacccggacaagtgtgacatctggggcaacacacccctgcatctggcagcttccaatggccacttgcactgcctgtccttcctggtgtccttcggagccaacatctggtgcctagacaacgactaccacacgccgctggacatggctgccatgaagggccacatggaatgcgtgcgctacctggactccatcgcggccaagcagagcagcctcaaccccaagctggtgggtaagctgaaggacaaggccttccgcgaggcggagcggcgcatccgcgagtgcgccaagctgcagcggaggcaccacgaacgcatggagcggcgataccggcgcgagctggccgagcgttccgacaccctcagcttctccagcctcacgtccagcaccctgagccgccggctgcagcatctggcgctgggcagccacctgccgtactctcaggccacgctgcacggcacggccaggggcaagaccaagatgcagaagaagctggagcggcgcaagcagggcggcgaaggcaccttcaaggtctccgaggatgggcgcaagagcgcccgctcgctctcgggcctgcagctgggcagcgacgtgatgttcgtgcgccagggcacctacgccaatcccaaggagtggggccgagccccgctccgggacatgttcctctcggacgaggacagcgtctcccgtgccacgctggcggccgagcctgcccactcggaggtcagcaccgactcaggccacgactccctgtttacccgccccggcctgggcaccatggtgttccgcagaaattacttgagcagtgggctgcacggactgggccgcgaggatgggggtctggatggggtgggagcgccgcggggtcggctgcagagctcccccagcctggacgatgacagcctgggcagtgccaacagcctgcaggaccgcagctgtggggaggagctgccctgggatgagctcgatttaggcttggacgaggacctggagcccgagactagcccgctggagaccttcctggcctctctgcacatggaggactttgccgccctcctgcggcaggagaagatcgacctcgaggctttgatgctgtgctctgacctcgacctccgcagcatcagcgtc

SEQ ID NO: 31967 - DNA, 1774 bp, Artificial sequence
  DNA replication origin
agtcggtgctgacctccgagtgggcaggctcggccgccagcgtggcacgggagacgctgtcctcgtccgagaggaacatgtcccggagcggggctcggccccactccttgggattggcgtaggtgccctggcgcacgaacatcacgtcgctgcccagctgcaggcccgagagcgagcgggcgctcttgcgcccatcctcggagaccttgaaggtgccttcgccgccctgcttgcgccgctccagcttcttctgcatcttggtcttgcccctggccgtgccgtgcagcgtggcctgagagtacggcaggtggctgcccagcgccagatgctgcagccggcggctcagggtgctggacgtgaggctggagaagctgagggtgtcggaacgctcggccagctcgcgccggtatcgccgctccatgcgttcgtggtgcctccgctgcagcttggcgcactcgcggatgcgccgctccgcctcgcggaaggccttgtccttcagcttacccaccagcttggggttgaggctgctctgcttggccgcgatggagtccaggtagcgcacgcattccatgtggcccttcatggcagccatgtccagcggcgtgtggtagtcgttgtctaggcaccagatgttggctccgaaggacaccaggaaggacaggcagtgcaagtggccattggaagctgccagatgcaggggtgtgttgccccagatgtcacacttgtccgggtcacccctgcagggaaagcattcaggagggacgagtgacgagtcctggctggggatggaggtggagggagtggaggggggaggggagcttccccactgtcacagcaacccccaaagggaccgtgggcctgagatctctcccactccaggagacctgcaggcctgagccacccaacaggtgagcccaggggtgagcccaggggaaaatggcctcaggcatgcagggggtggggtgacagagaaggcgggactggggcggggccttccccaagctaactgagggctgggaatctcaggggatgaatatttgatgccctgagagaagggagtaaattattgatggggcccagcacagagctggcccagagcgctggtgggccagggccgcgtctgggtctctaggcaggcgtggtggtgagtgtggctgcgtgtgccgagtgaccgtaaaagagaacagaccagtgggtggtgtgtgccgggccccagccccgggtgagcgtgtgtgaagtgtgggcttgcatgtcagcaggcagggccctgtctgcagggagcagggccagccctggcaagcccgagtgtgagaggaggtgtcgggccttggcctgggcggggaggggagtgtgggggcagccaggactggaggggaggaggagggaaatcagctgcccgtgctccgaagccctcccttccctaggttgccccctctttggtatccctgcaaggctggctcacttgagcctgtccagggacccccgacagcccccacaagcacccttcacaccagacgggtgtcccccagggcaagctcccaagactcctccggagctctccctcccttgggggcccagcacagcacccctgccctgcactaatgaggccacaaggccaacccccagggctgggggaagaatcactcccttgtctcaacagctccccacacaccccttcctgggcctcccctcctggccgccaagtcctgcaggccagtgtgggaaggacctgccagcacccaacccacaacccatcaaacaccaatcctggtct

SEQ ID NO: 31968 - DNA, 1597 bp, Artificial sequence
  DNA replication origin
cccaggctctagtgaggacagatctctgactgtccccggactgggcgtcacagtgcgcggccccggggtgggcacttttgaagaggaggacagggccttgcgtgggtcaccctcgtgtattgaggtgcatgcagggtgtttaggacccaggggaagaccgggggcggctccctggacagcgggagatttcgtcccccgccccctccgcccccgcccccgggtgagcgtttcagatgtcttggtagtcgcggctctggcgctccgcaccctccgtctgcggcagcgggggctggcggccccggcccctgcccggccccgtcctccaacctcatgcctcagccctaataccgccgccctcccctgcggggggcctttctccgtgtcccccgcccgccccgtccacttcgggcgccatgaacgaccagtaccaccgggcagcccgggatggctacctggagctcctcaaggaggccacccgaaaggagctgaatgcccccgacgaggatggcatgacccccactctctgggctgcctaccatggcaacctcgagtcgctgcgtctcattgtgagccgcgggtgagtacgccccacccagtgcccttgaggcccctgagaccaccccaaacttcctcgtccaccactcctctgagctgcctccttcccctgcagacaggcggacccttagaccctggcgtttgtgggagagacacatgttgaggggacccaagcggaggcatctgacacttgttaacacttgtgacctggatctggggctaggaggggagaaaccgggatttgggggttcctgattatggggggttgctgcagagtgaggggaaggtgggagagatcccctggctggggtccccctggaagcaagagtgaggggatagtgagactcggagagaaggttaggaagtctcgaggggccagcagtgggggctagaaagggaggggtctccactgcccactctccagccttgatccaaagggctctgccagccagcacccacgttctccggcaggctggtgtcacacagcgcttgccctcaacctgctcattttggggatttatggacactgtccagggcgccaaatgtcactgattcagccactccattaactctctccaagtccctcccccacagccgggcacagctaagcaatggtggaggctgtgatgtggtcaccctgaaggggcttctcttccctccccctccctttggagttgtcctgggtgggggggtgggcatacagtgcaggtgtcagtgccagggaaggggcctggaggtggcagttgagccacctccaggaccagagccactgatatgggttccttggggctaaagtcaaatgactgtgaccaactccctcagccccagtggctttataaagagaagtcaggttggtctgggcatcagggcagcctggacaggacaccccaggaaggttgatatgaagtctcaggtcatgggagagagggccaggggcttagctggccccggtaccaggtactggccagtgcctgaacatgtagtaggtgctggagacccctccttcttgccctctccttgggctgctccttgggcccagcat

SEQ ID NO: 31969 - DNA, 1038 bp, Artificial sequence
  DNA replication origin
ccaggacagtggacctaagaaggggcaccgtgaccgaccgcggttcggtcagcgagtgggacgggccaggccgccgccgcctgaacggagtccctcgaccgcactccagcagggggcgctggaggactggcagcggctccgcgtgccgcgtggaacttcgcacccaagccccggagtccaacggagcgcgggccggcggcgggggcgggcagggcggtgggatagaggaaaggggagcttggatcactgcgaggaccgtgggggagaggggaactggggttgccatcccaggcaggagcacaggagcacaggattcagggtgcgccgcggctggagggcgtcagggtgcccgcaggctttttggacgtctcttgagcttagctctcggggctctgggcgcctggaatgctgcgcgccagggcgcggtgggcaccaggggcggggtgccctctaggtgccgcagtgcggggccgcgcccgagcctggccgcaccggggtgacggagtggggtcgcctctcaaagggtaaatatgaatcttgccttatctggctccagcgggctcttccctaaattcaccttggagaaagatggatcatgtgagcgggactgagagctttatggagccaaactcccgcagctgtaaatcaccctgtcctcctgggtataaagcgcctgtccatctcggcgtgggagagaggagacgctcgccgtcccctgacccccagctcagcgccggctccaagcccagccaggtgggtgccccgggccggagggcagtcggacttggggagtggggaccttggaggggtccaaccgggtgctgccgcttctcctttcttcccatccagcgagaggggcaggttccgcattttctcttcccctttcccagcgcttcctccagcacccgaagccccaaccctgcgggtcaggaactccctagtccccaagtctagggatgagatgggggaaggagagccgtcagggttgacctggagttttgtccgctcctcccctacagtgatccctctagccttctc

SEQ ID NO: 31970 - DNA, 1017 bp, Artificial sequence
  DNA replication origin
tccgctcctcccctacagtgatccctctagccttctccagtcgcctccgccatgtccgaggagctggcccagggccccaaggagagccccccggcgccgcgtgcgggccccagggaggtgtggaagaagggtggccgcctgctgtcggtgctgctggcggtgaacgtgctgctcctcgcctgcacgctcatcagcggcggagccttcaacaaggtggccgtgtacgacaccgacgtgttcgcgctgctcactgcgatgatgctgctggcaacgctctggatcctcttctacctcctccgaaccgtgcgctgcccctgcgcggtaccctaccgggacgcgcacgctggccccatctggctccgaggtgccaggggaggtgggggcgaggtagggtgggcacaacagggagctgcaggctagggctctcgcaggagttgcagagtgcagattgacatacgagggcgagaggctccctagggaggaccaggaggaccggagggtgaagtgggctgcagttagggaaaaagaggaaggtaaggggtcctgggggagggatgaatagagggatggaaggggacctctttgcccccggtctgaagattagagaaggctggctgagggagggcctttgatggagagcaggaaccagaagatggcagccactgaaagagctcagccagggccctttgcggtatccacacagccccaaagagaggggggcttggtagcaggtccatccatccacccactcagtcatacactcacccttccatccacccattcacctttcagtctgtctatccacctatccacctgtcctcccaccctccccattgatccatccaacagtgcactcactcacccatccacccacccatctagcctcccatcctcagggcctgtcctcagctcggcaggccttctctcctgcctctttgatccaccaccaccacccacccacccctggtttccaggtgggctggtgctgtttggaatctgcaccctcatcatggatgt

SEQ ID NO: 31971 - DNA, 1115 bp, Artificial sequence
  DNA replication origin
aagaaggaagctgaggcccagagaggtaaagtgacttgcccaaggtcacacacctgcaaaaaatccagagcctttctgctaagaacaataattttcaaactttgttttcaagcagaacatttttcccttcaaataaaatattacaggaacacaagtttataacatagatataggctgtgtgcagtgcctcacgcttgtaatcccagcactttgggaggccgaggcaggcagatcacttgaggtcaggagttcgagaccagcctggccaacatggcgaaactctgtttctactaaaaaatacaaaaagtagccgggcatggtggcgtgcgcctgtaatcccagctactcaggaggctgaggcaggagaatcacttgaacccaggaggcaaaggttgcagtgagccgagatcatgccactgcactccagcctgtctaaaacaaaaacaaaaacaaacaaacaaaaaagatataaacaaggcagttctaatttaaaaggagttgggagtctcagatcctcaccacttgacttccccctgccccaggaggtccccgaggagtttcccctaagccctagggtttctactctacaaagggtatagagatgcttaggagggaagacagcagagagatgggaaggaggctccacagttagaagagtgaaaggtggtggtgagcatgcagaggcagagggaggggaagggctgggagagggagggctgggcgggacccatggagcagatggcatttgggggagatcatgggaacagcagcactgggagctcaggggactttgaggaaagtgtgcctggaccctgtcagcagaaggaggtgagtagttctcagaggccgcaggtggagctgaggaggcctcctcccctgtcagaatggggctgtgctccaactctccccaccaagttcaggtttgacttaagggaaacacagggtcctgctaggcggcctccaggcctggggctaggtagggtacaggaaaaagcgactccaggcctggagggagggcgtccattcccagcttgatcaccaaaggaaaacgaggcctgaattccgcaagctctttactgcggacctaagaacactgcacccctctccaccccatc

SEQ ID NO: 31972 - DNA, 1708 bp, Artificial sequence
  DNA replication origin
attccatagttgtatatcagttttgcagatgacaacactcaggcacagagtctaagtagctctctgtagtagtctcagtagtctaagatgacagaggtaataagtgctggaatctgagcacttgatcattaatctaccctgcttgggggctggaggagagggtgcaggttttggggaaggtgaagtagagcagttacagttgggatatatggagcagggagacatcccggtgagccccagccttgctcaatttgggtgggggagcttaggagggaaagataaagatcatcgggagtctcctccccagccagcccggaaagagtttaatgggaagggtctctgtccacagctctggtgctgaaaatttcccaaaagatgccagagtcagtgggcaatcactgggtgaatgtcacatctgcactaggtttggggggtccaagttaagcaggacccggtctctgtcctggaggagtttcaggacttaatgggagccagccacacccacagcacaccaaacagggcacacctctcaatagaggggagtggccccagcaaagtagcaccagaaggcttaggcagagaggaaggctttccaggtgggtggggaggatgggcgagtggtgggggaggcagaaagaagagcagtgtccaggagggatggcaggaggcaggagaccatgggagaaacgcagaactttctacctgggcctgggttggtgtgggaggcaggtgccttgagtacggcaggggtggtgggacagggaggagacagaacttaggcaaggatgacagagtggagtgggaaaggggagaaaatcatttatagaatcttgaaaagaggcttaagttttagtgctccatctgccccagaagagaacagcagaaggtataaatatggagcaggtggagaatgggagaatatgacaaggggagaatgggagcccggagaggttgcattttcaagccagatatggtgagagtcttctggtgttgcatagagggcacgtctgaagctcctgaagcctggggtctcaagggagagacagagcaaagcacagctaatggaagcagaggacgatgggtggtcagcgtggggtgaggtgggaatgctgacgagggaaggccgcagagaggaggcagggtctctgccgagtcctgaaggacaagctagagttacccaaggggcaaaaggggtaggcattaaaggcaaagaatagggtgtgggcaaagactgggggcgttccaggaagtgcagcaagatggtatagcccaaggagaggggagtagggtcaaagacaatgctagaggggtaagttgaagccagaccaggaagcagcagcagctactctgccttgggcagagaacctggaaccttgtccaggcccatactaatcatacacctctcattttgagaggccatgcaggctgtgtcagtaatttggactttatactgagggcaattagttgcctttgcaggactttaagtaggggagaggcactctgggcaagaagaccagtccaagagagcaaggaagggggcccagactaggtagtggttgaggtcaagaaaaatcagggccaggcatggtggcttacacctgtaatcccagcactttgggaacctgagacaggaggatcactcgaggcgaggagttcaagaccagcttaggcaacataacgtgaccctgtctctgcaaaaaaaaaaaaa

SEQ ID NO: 31973 - DNA, 797 bp, Artificial sequence
  DNA replication origin
tttattgtaaagaggccgattgtacagagcaaagattgttctgacacggggggctgggtggtgggacccagaggccagagctgggtgaaggatgaggggtggcatcgccccatccaggcagtgggcagggcagggaggactaaacggctgcctcccagttcccttccctgcccctcattactgggtaagagggagccaggctatttccatggatccaggagaatatagcaggagaccctcaccaccccacaccatgccccaaggatacgggaggtgccccagtctggcttttgcagtcggccagctcccagcctcctcgaggagcagcctggccacacctttttcccctggagcctggaacagctggctttgggttaggaggctggaagcacccccttaccctgtccaggcacctcaagggacagcccgtggttccctggtcaaaccccttagggcacagtgacccattggcttctgcctctggggctgggtagcacaggagtgggtgggcactgaggggccagcactgagccaggtcttaaagagggagtccgagtgttgggggcagtggtctctggtgggggcatagccccagagatggggctcctgtgagtccagcctaggggttgagggggatctgagccagttcacattgtcctggccacaggggtctctagggcatgacactcagggccactctgcctgttccaggccctgatcgtggtaatttaaagctcagaatggtggatgggggaagcctcagggaccaaggccctgccttcccctagactgagccc

SEQ ID NO: 31974 - DNA, 1049 bp, Artificial sequence
  DNA replication origin
gaaccacatggcagtgcccgagttggcctggtacttgcggatgaggatggggtggggcacgggcagcagccccaccagggtgccatgctgcaggaaccgcaggatctcagactcatccgtcaggcccctgcggggagaggggtatctccagcacactcacgtggtccaggggagcacggggctcaccctggccacccaagacccatgtttcccatcacacgcctacctaagcctaggctggccccgcccagagcccacctgcccacaccaccggccccgcccacaaccccggccccgcccacaacccccggccctgccggcgcccgactcacttgtcaatgcagatcttctccacctgcggaaccagcacctgcagcagcctcatgatggtctgcagcggcagcttcgacttccaggagaggacctggcgagggacggggttcctggggctgagaaagcagcccccggaggctgcggggcaagcctgaccctgacccagaaccacaggctccccaaggcagaaagtacccctgctccttgcagcatgagcctggcaccaagcaggacccgggaagagttaatccttattgatggcaagcgccatggccccgcgttaagccagagctgtgccacgtgcctctcgggagactgtggcctttagccctcacaacagcgtggtcaggcagggacggtaattatccctgtcccagcgcaactggcgtgatctcaggagacacagggcgtggggatgagattcaggggaggaagtcggaaagagtgatttattaaggaagagagcactgtgggcacctggagcttaatcctgctggggactctggcaacagtgtagacagaggaagcaaccgagccagagaggctgaacacatgggatgtcaccagccggaaggaccgacccagagtcaggcttctatgctagggtcctttgattcggacatcttgccatcttcactgagcttccctgggccaaggagccccaacccagctcccgcctcagtaccatctgcccaaaccccagcccccgctcgcct

SEQ ID NO: 31975 - DNA, 1009 bp, Artificial sequence
  DNA replication origin
gtgctcaggcctgacattctgggatagccatagtgggcacacacagccagtgccagccctgccccagcaccctctcttgggctccctgtaccatctccaaccccttgggcagacaccctcctgtcctccaaactcccccttccaggaagcccacccagattggacggggggagctggagggggcctccctgaggcgaggcatgctccctgcccacaggcaactccaacctggtctacgccatcatccgcaagcgcagcatcttccaccagctggccaacctgcccacggacccgcccaccattcacaaggccctgcagcggcgccggcggacacctgagcccttgtctcgcaccggctcccaggagggcacctccatggagggctcccgccccgctgcccctgcagagccaggcaccctcaagaccagtctggtggctactccaggtctggtgctagtggatgggacaggagtgtggatactggtgtggctgggggagggacatggtctcggggtgtcacccccatctctggcaaagagcatggcttatgtatggaagccgaggggatggggctgggcaacagggatggggggagggtactggatgggcttagcatatgtagcttggtgttgggggcaaagcctcagggcgagtgtagactctggagggatgggcacagggatgggggagggtactggatgggcttagcatgtgtagcttggtgttgggggcagagcctcagggcgagtgtagactctggagggatgggcgcaggagagggcgttacagtgatcagacactgcctctagagccggtggaggttccagagggaagcaggagtaaaacaaataaaaataaaaaagtgggtggaggaagggctagaagggtcactgtggcagggagtcctcactcccacctgtgccctgcccaggcattgacaagctgaccgagaagtcccaggtgtcagaggatggcaccttgcggtccctggaacctgagccccagcaga

SEQ ID NO: 31976 - DNA, 984 bp, Artificial sequence
  DNA replication origin
acactcgccctgaggctctgcccccaacaccaagctacacatgctaagcccatccagtaccctcccccatccctgtgcccatccctccagagtctacactcgccctgaggctttgcccccaacaccaagctacatatgctaagcccatccagtaccctccccccatccctgttgcccagccccatcccctcggcttccatacataagccatgctctttgccagagatgggggtgacaccccgagaccatgtccctcccccagccacaccagtatccacactcctgtcccatccactagcaccagacctggagtagccaccagactggtcttgagggtgcctggctctgcaggggcagcggggcgggagccctccatggaggtgccctcctgggagccggtgcgagacaagggctcaggtgtccgccggcgccgctgcagggccttgtgaatggtgggcgggtccgtgggcaggttggccagctggtggaagatgctgcgcttgcggatgatggcgtagaccaggttggagttgcctgtgggcagggagcatgcctcgcctcagggaggccccctccagctccccccgtccaatctgggtgggcttcctggaagggggagtttggaggacaggagggtgtctgcccaaggggttggagatggtacagggagcccaagagagggtgctggggcagggctggcactggctgtgtgtgcccactatggctatcccagaatgtcaggcctgagcacctcacaacacccccgccccagtgcctttgagttcccgccacaacccagcactaaacagctaacacctggcaaaaagtacaggccccagcatggcagcatccacgtcaggccagctgttaaatattctgactctcttcccacctcccctcgagcaaggtggccaggagaagtcacagaggatccgtccatcccccaacgctgacttctcctggctctcaggccccagtccccat

SEQ ID NO: 31977 - DNA, 1378 bp, Artificial sequence
  DNA replication origin
tgtgaactacctgtcccgcatccatcgtgaggaggcaagtccagtccccacagtggctttgcagggtgcagggggatgcaagtgagacagggatatgggggatcctgacccctccatgaaggaaccatgctctctgtgggctggggccaccctaggtgaaatagtggcaggactgtgagggtttcaagatgcaggaagggctgatggcctcacctgggtagaggtaactgggaaggcctctaggaggaggtggctgatgtcatttcagaggtggtggggacaaaaggggaatgacagtggacaagggcttcaggccaagcagtcccagttcatgtgtcttgtgatcttggtgggaaggtgcttgaactcccagagttctaacttctgcagctaaaacacaggaccctagctgccttctcaccccagctagtggcaggcctcagtaaatgacagaacagtggaatgctcctcgagttgtgatggggtgatgggggagtattttggggaggggtagaaggatggaacctgccaaccatgagtccaaggtgggcagggacaaggttgagggtgtgcatgtgtgggagttcactgagagcagcagccttgctcaaggggcgcacagcccaaggacagagagtctgcagtctagtggaggggccagggctgtccacagctatgagggactccgcttcctgaggcatcgccccaggacagctatgggtgatagcatctgggccctctggctctggaggtgggatctggctctgggggatggagggggggatttgttgggggcctgggctgggaaactggagctgcagggattgggctggacaggccccctgctctgccctcgcccccaggacttccagttcatcctcaagggtatagcccggctgctgtccaaccccctgctccagacctacctgcctaactccaccaagaagatccagttccaccaggagctgctagttctcttctggaagctctgcgacttcaacaaggtgggccagcctcgaggggccctgcagggagatggagagcagctgccccaataacccgggggcagggacagtgtcagactgaggggggtggggcagagctgcccctcccttgaactcagcccacttggcccctccccgcacccctagaaattcctcttcttcgtgctgaagagcagcgacgtcctagacatccttgtccccatcctcttcttcctcaacgatgcccgggccgatcagtgtaagaccagggtgggggtgggatgctgggggctttcctggcggcgaggtggagggctggctatctgccctgactcccaggagctcaggcctggcactctgacctcctaggagggaggcctccaaaatggtcactg

SEQ ID NO: 31978 - DNA, 1990 bp, Artificial sequence
  DNA replication origin
ctgcctcagcctcccgagtagctgggaatacaggcatgttccaccacgcctggctaatttttgtatttttagtagagacgaggtttctccatgtcgctcaggctggtctcgaactcctgacctcaggtgatcctcccacctcagcctcccaaagtgctgggattacaggcatgagccaccacacccggcccaaaatcagatattcttaacccagcttttccaggcccctgctcggactagacccccactcagacctgggggagcagttgtatcttttgactctcagggtgtgcagggggaaggtcccctagtcctcaagcctgctaagcctgctctagaggactgtgtcaccatgcattcccatgcacatacatgtatacacatgtaaatatgcacccgccaggttcatctggcctgcagcagagaattccaaacaggcaggatctgggagagggttccaggtctgggactgtctccctccagagccccacctactatgaggaagcaccaggaaacacagccaaagcggctggctcttaggaccagggtcaggcctgacccaggactggaccatggggcaggaagaaaacaggatgcagggcaggaaggcgaggaaggtggagcagcagggatacaggcccaggccacaggaaaaggggctagttctgcctgtctactgcccaagccacaccctgtaagagcctggaaccacatatcatcctatggacaactggcctgaatctccttggggactccaagtggtaaggtcagtgatgatcatctgggttctgatcctcacacccaagctacccaagtcaggtcacttacacagagtccaaggcttcagcctctgaaggcctctccccccgggcagcccaggcccccgtccgcctacaggacccagtgctctccagaaggctggtctgatctccagcctatccaggttctattccaagcctactcagctgggaaacagaacagcaccatctcaagtggcccatcatagggctgtagccagggaaagacagagggacacagtattttggggaaaaggcctgagcaggtaggaatctaggccactccagagcctttggtactctgctgagctggccccactggcctggcaaaggaccccagctgccgagcccacagtgcaatcctccaacaaggagtttcttccccaggcaggtaaacatgggagcctcccttcctccctgcctccccactcctctccctgcagccctacactgaggggctagcccacttgccaccttccctgccacccacagaacgaaaaccccatcctaaaaaagccaagctccagaacgacccaggagccgtagggaatggagagaagtgcggtctggtttctatcaagagcctttcagccggggttggactctccagaggccctgggcatttgctgcacatttgacccttccagggtggggaaaggggtgagggagcaaggtctggcccctggagctgtgaccagctggctgtgggagctggcttcctccatcccactctaacctccagcagcaagagagagccctggagagcaggaggtgggggggccaggaaagaggaagatcccagatggcagcaggtcctgtgtcccctgaaaatgggggacatggggagtcagggccgagcatctctgtggccacggtggcctgattcaaaaagccaggagagaaggggtgggcagagaagcagtcttgctggggccaggtggtataaggaggtggctattgggccacttgtggactcacaggagagttatgagcatggactaggctggagggtccttaggcccctcaccagctgactgagggccatcctgcgggtccccatccctgagccagagaacagagcacacaggctaacagcctttcccttgcagggcctcggggaaggcccctggagaggtccccagctgggaggctgtgctcagtaggcctggggacagggccccccaccaggctgc

SEQ ID NO: 31979 - DNA, 1175 bp, Artificial sequence
  DNA replication origin
acagagcgaaactccatctcaaaaaataaaaaataaaaaagcatccaagatttccagaagcttccagacatagcttgcaaaatgatgttgtggaaaaagcgcagcctcatttggatgagctccttactacctgtgtggctttgggcaagtaattgctttaagcctcattttccccaagtgtaaaatggggataaaataatacctcagaggtagctattagagatatcgtcattgtcgtcttgttttgattccccccccccccccgagatggagtcttgctctgtcgcccaggctggagtgcagtggcgtgatctcggctcactgcaacctttgcctcccaggtttaagcaattctgctacttcagcctccagagtagctgggattacaggcgtgcgccactaagcccagctaatttttgtatttttagtagagacggggtttcaccatgttggccaggctggtctcgaactcctgacctcgtgatccgcctgcctcggcctcccaaagtgttgggattacaggcgttagccaccgcacccggccttgttttgatgattaatctgcctctattacaggcttatttggctgtaccctggccgcttctttccttatccctctccctagctgctcgccataaagagcaggctgtactacttatgtccgctgtgtccgtccatgacacagagttggcaaataccagaccctcagcacatttgttgaaatggatgaatctcaaaggattctctgggaatctggtggctagagaggggtcgggaccgcgagggactctcgcgctcagcaaggcgaggagctgctttcctggagtatggaaactgagtcagcgcctccctccctcataaccaagggcctgcgggactgtctgaacacgtgggtttgacaggtcagaaaaagggagaaccaagagagtggatgctcagaaaacatgaatgggaaagacagactgagaaggaggaaagtgggatggagagggccagctgagacgtgggccaggagccggagcggagatgaagggtgaggaccggggcgggggacgagctgcgaggagggttttgggccctggggactgcgtggtagcagcggaggcgggtacaatgctccgacgcagaaggaagagcgtcgaggctccgggtgggacctgagaaggcacccggcg

SEQ ID NO: 31980 - DNA, 1112 bp, Artificial sequence
  DNA replication origin
tgttggcccggctgatctcgaactcctgacctcgtgatccaccttccttggcctctccaaatgttgggaatacaggcgtgagccaccgcgcctggcagattcatctttgattagttttaggagtttttcaggcagggcaggtggatctgacctggggcaaagggataaggaacgctgtgaattgtggagttagggggtcattgggaagaaggccgaagaaggaaggccaagaaaaatggcttagaacatttcttcattcattgggagacctgccatgtgccagccagagtccctgccctcaaggagttctcagtctgccgggaagcagaagggtcccacgcagagagcctccatgctgtgacgcggctgtgctagaggcgggggagcccaggcagccctcagcgggcaaatgcacctggggcttctccccaggtctcttctcccaaggctgagccttgactgcaggctccacctgcctccccagccagaaaggtaaagtccctgcactggcatccccagcctgccttaggagccctgccagagatggggtagtgaggggcaaggaatagttcctccaggtgaaaaccgataataaggccctaatagtcactgaccgtgctcggcagaccccagcgctgatctaagcgctggcgtgtatgaactcatcgcaccctcccaaccagcccaggaggtatcagaggagtaaggttggatatcatcagcacaagtctcctaaaggtcaccccactgatgacaggcctggagggttcacactgcagagatttgaggtagacatatggaggcatttcccgaccgcaagaaccttgagaatctgaaataatgtacccttcagagcacacgattgtctggaacaaactcagacggtgcatgggggagagggggatgggcagcagatgacctcactccaatgtcctgagcgccttaccccgccaggcgctgacctcagactggtggaggggacagatggggcgagatcattcagtacagtgtgcgcccagcgctggagcgaacatgtccggggacagggagggaggcgccgcttgcaggggtgtggggactcgaggaaggtttccagatgtcgccctatcctt

SEQ ID NO: 31981 - DNA, 1985 bp, Artificial sequence
  DNA replication origin
tagcgccccagacccgcctgcgggcccggatcctccttgccactgtcccacccgccgtccctgccactccaccctttgtgtcgccgcagcccggtgcccccggctctgcgggaccccggccgggccggaccctggcaaagcgccaggccccgcgtgggctcccggcgagcggttgatggcgagggggcgcggcgcgggctctgtagcccgagttcccgacgctggaggcccggcccgcctcagccgcattgtcccgggccgcgcgcaccggccctgagctgcgccgccgcagcacccgcccgccgcccgcggggccatgcggagagccgccgggatggaggacttctccgcggaggaagaggagtcctggtacgaccagcaggacctggagcagggtgagcgcgggggcgaccgggacaggaaggcggggagcgcccggtgacccctgtccgcttctccattgttgggcgctatcaccccgggaggggctgggctggaccgggcgcgcccgactcggaggagggacgcgtctggagaaccgggacgtggagagagggggcgctgccggagaagacgcggaccggacgggcggagacctgcaaaagtggggggcggggggcggtcttcctattttcccagacgaccgggcatccgtcatccagctcgcccaccccgtcctggaggcagcaactgctcggccgcccctggtattgttacggggcctgagcgctagctaggagtcttctgaggccgggaggcggctccttcgtcatgttttgctgggagggtggcttgtgtgtagagggaagttatctcacgccaaatccagcagcacccgtccctgacaggaattatgagctctaagactcctagaaagtttccctaactcgcttcctactcagggagaagtggtaccgcgtctttgctggtgaagaagcagaaagtcaagtctcccatctgccttcgagagtcaggagtcgcttagccctcccctgcccggtccccttgcaaatggctcatggtttggagggggtcaggttcgggaatcccggccagtgtgccaggcgagagaccgaataaagagggatacatctccgctgcccccagttgccatctgaggacagaaagggcgactggaagggggttagaagctggtgatgaggtggccgaaatgacatcactgggagtggggggtggggctgttgggacagaaaggaagaggaggcctgctggagtggagtcagttctatcctctcctcccctaagatgcctccttcttggatggtgagagctggaaggggcgaggaaacatgtccagggagaagtgaccttcccatggcctccagcaagctggggggtgtggacataagtctgctgcagtttgtgccattgtggcctgctgtggtgtgcccacaccctggtctccatccacaaggctccagagggctggctttgccctgatgtgcagcagctatccggattctgaagcccctgacctacttccccacatggccaagactggctggcagatgaggctctgtccttgtgctgaggacaagggttaatcatagcctcagggggaccagggtgggactggggatgctggactaggccctgccatggtctgtgccctggactctggcctcagcctccttggctgaaatgagatacagctcctctcaaacacacacacacacacacacacacacacacacacacatccacacattgtgacaaccccctctcccatcctgggcagtaaatttttccatgaacacctattaggctccccttaagtaccagacaccatcctgggagctaggaatagtcacagccctgaccctgaaggtataccctggcaggtgaaggaggcaggcttgtaactaagtgtaggtggcacagtatttttttcttttttctttttatttatttatttatttattttcagacagagtctccctctgtcacccaggttggagtgtaat

SEQ ID NO: 31982 - DNA, 1043 bp, Artificial sequence
  DNA replication origin
gaggttgcccgcgtgccggctggctgggtctttggccacgatggcgttgagcgcagtgtcgctgcagctcttgcgcaccacgtggcctggagaggctgccggtgaggagaccccgtcctgggcgcccaagtcgtccccgcggccgggctggggatcgtcggcctcaggggcctgcgtgaggggtgcgagcagggcctcggccaggtggtcgtccggacccagtaggtaggtcttggcctgcttcatctgctgcagctccagcagctcggcctccagctcctgcacacgcaggcgacaggcctccatctcgcacagctggcgctccagctccgagtactcctgcagcaccgcggtgtactcgcgctccgcccgctccttgcgctgccgctcctggctcacctgggagcgcagcgcccccaccagggtctgcagccgctcgttctcctgctccaggggccgcgggcccagctccagggaggaactgtgtaggcggaaagcatccttgcacctggcgggtagtgagagtcgcagcggggtgggggcggaggagagggcagtggtcacgggcacggccaaggccgagcagcccagccagggcgcttacatctctcttgttctctgggctgaaattgtttgcccctctccgttggctctccaccctcctccacccttctccccctgctctctgcccccggaggctgaccactacggaccgcctctgtcaggttgcctggttctctcctgagcttggcccatgagaggcactggctagaggtccgaggggggagcagaggccgtggggtgtgtcttctttgggctctccatggttaatggtgaccaggcagccttctccataccttccaggtgccggtaacctcccttcccccttgcgctttgaggcctagggctggtggcagctcctctctgctgcaaccctggggcactatagtgtccctgtggtttccctaccccctgcccacacctcttcttcatttaacttctccattactctgtgtaagagactgtttcctgccaggaccctt

SEQ ID NO: 31983 - DNA, 1000 bp, Artificial sequence
  DNA replication origin
ctgtgcgagatggaggcctgtcgcctgcgtgtgcaggagctggaggccgagctgctggagctgcagcagatgaagcaggccaagacctacctactgggtccggacgaccacctggccgaggccctgctcgcacccctcacgcaggcccctgaggccgacgatccccagcccggccgcggggacgacttgggcgcccaggacggggtctcctcaccggcagcctctccaggccacgtggtgcgcaagagctgcagcgacactgcgctcaacgccatcgtggccaaagacccagccagccggcacgcgggcaacctcacactgcacgccaacagcgtgcgcaagcggggcatgtccatcctgcgggaggtggacgagcagtaccacgcgctgctggagaagtacgaggagctgctgagcaagtgccggcagcacggggccggagtgcggcacgccggcgtgcagacctcgcgccccatctcccgggacagctcgtggagggacctgcgcgggggtgaggagggccagggtgaggtcaaggcaggagagaagagcctgagccagcacgtggaggccgtggacaagcggctggaacagagccagcccgagtacaaggcgctcttcaaagagatcttctccaggatccagaagaccaaggctgacatcaacgccaccaaagtcaagacgcacagcagcaagtgacccttctccggcctgcagcctcccccagggtggaagccgtggggtccctcaggcctgggcggtgcagcttccagagagcgagcgccctttagcggcctgccaccacagcacgcggcctcctgatccggaagcacgcagcatgttccctgctgagcggaggcagcccacctgtcctgcctcccaggagcccttggccacctcgcgccagcccaaaggcgcagctctgagttcaaagccaaatgtccccactaccccagggatcccccagctcccccagcccctggcttcctgaccctgcgcc

SEQ ID NO: 31984 - DNA, 1130 bp, Artificial sequence
  DNA replication origin
cggagggcagggagctgcctagcctcaaaggacaaaagtttcccagttgcacgtacagaaggactcagtcgccaccagctcccatcacagtgccgcccggaaagcaggtggtgtctccaggaggtcagggatgcttggtaagaaaacccctttacccattagaaataaataaggcatgaaggttcccactgggatcccggtgcagaggccagggcccccccgccttccactgactgtatggctcttctggtttctaaggtctcaggaagggcggcagaaggaaccagaagccctgaagggctgctcagggcaagctggggacctgggtgtctcttagctgaacttgactttctgacatcttgaagcaaaactcctgacgcagctgggtcctcaaaagccccccacaaaggtgggaggtgaagagcaggcattttatgggagggagggagggagcatgttcctcagccccatcccaatacaacacgatgcagcatggggcgaaaaccccagtccccagtgaaggggaggcaggggtggacattgggaccaccggctggtggtgcatgtccagaacattctgggggctgcagacatgacctgtgccagggttggcctgtggggagcgtggagtgactgagacatcatggtccctgagatgggggcaagcacagagacgggagtcagaggccaagcttggttagttggtggcggtgtgaagggatgggggctccccactgccccggcccctggaaagcttaaggcccagcaggcatttctggggttggaagccaaggagacaagctctgagcgaaactgcaccactctgctgaggggctccttctcctcctcctctgactggctacagatctgcggtgggccaagagtatccagggagaaacctgtccctggcagggctggagcagggacactccaggcccagctgaggcttcctgctctgcatggcaggggacatctctgacctggtcaggaccctggaggtgggacagctggtgctaagggaatgtcagcgcatcagggttggggagaagcagtgggtggtccaggaaacccctgaaacagctggccctggggtcccctttcaagtgtttccagttgtggcaaggggtcaa

SEQ ID NO: 31985 - DNA, 1759 bp, Artificial sequence
  DNA replication origin
gaaatgacttgggctcccggcctaaggtctgtctggtggtcacgaagtaggtgcctcccacgttcagcctgacccagcgggccgcgccgccgccccctgcccgctcgggtggtccgggacccggctccagcggctgcgcgacggcggcagccgggcggccgtgcccgcggggcgtggggccagccgggcgtgggctggggggcccgcggactgggccacccccgtcgcccaccccactcccgccgccccctcccagccccgccatcgccgggtccagctgcagttccgccatcttggaccgccgccgccaccgctgctgcccgcgcgcagccgggccggcccatttctcggcagggagagccgggccggcccatcggcgggggtggggcagaggggagagggacgggagcgcccccaaccagcgcccggggacccgcgcgggggaggcgctgtgcccgcccccgggaagatacttccggaaccagccctcatctctattggctgatctgcgaagcaaggcccacccccttggctttggggttggctgaggaaagatcttcccgtgacccacttccgttacttgctgcggaggaccgtgggcagccagggtcggtgaaggtgagtggggcttggggcattggatccgatccctggagggctcctctgctctgccctctccaaacctcacgccgacccttgtcacgcccccgtcaaggacgctgggccctcggcttgccccgctggcagagtgtcccttgtgtagctgccgctcctcgccccgcgatcccttcctcagccctccttggcgcgcggggtcaggggggcccggctgtgtcccaggcgccgctgatgtaggcgctgccacaagccgtgtctcgtgcagtccgctcccagcgcggcagacttcaatagtttggtggggggactggggaaacattacgcagacagtgttaacctgccgagggacgctcagctggctgcggggctgcgcccttccccttcggcagcttccaggattcgaacgtatagagcgttcagggctcctcgggtgcagagttcggttactcattcaagaaagattcattgagcacctcctatgcgcatgatctgttctaggcgctggggattaagcaatagatttttaagaattaaaaaaaatttcgccgggcgcggtggctcacgcctgtaatcccagaattttaggaggccaaggcgggcgaatcgcgaggtcaggagttcgagaccagcctggccaacgtagtgaaaccccgcctctactaaaaatacaaaaaattagctgggcgtggtggaaggcccctataatcccagctgctcgggaggctgaggcaggagaatcgcttgaacccgggaggcggaggttgcagtgagccgagaccacgccactacactccagcccaggcgacagtgcgagactccgtctcactcacacacacacacaaagttatttgtgacttccattttccactgatgttgcgggaaatcagggaccccaaacagagagaccggctgaaaccatggcagaagaacgtggattgtgaagattttatggacatttattagttccccaaattaatacttttgtaatttcttatgcctgtctttactgcaatctctaaacataaattgtagagatttcatggacacttatcacttccccagtcaatactcttctgatttcctatgcctgtcttgtctttaatctcttaatcctgtcagttgaggatgtatatcgttccag

SEQ ID NO: 31986 - DNA, 1190 bp, Artificial sequence
  DNA replication origin
cttcaccgaccctggctgcccacggtcctccgcagcaagtaacggaagtgggtcacgggaagatctttcctcagccaaccccaaagccaagggggtgggccttgcttcgcagatcagccaatagagatgagggctggttccggaagtatcttcccgggggcgggcacagcgcctcccccgcgcgggtccccgggcgctggttgggggcgctcccgtccctctcccctctgccccacccccgccgatgggccggcccggctctccctgccgagaaatgggccggcccggctgcgcgcgggcagcagcggtggcggcggcggtccaagatggcggaactgcagctggacccggcgatggcggggctgggagggggcggcgggagtggggtgggcgacgggggtggcccagtccgcgggccccccagcccacgcccggctggccccacgccccgcgggcacggccgcccggctgccgccgtcgcgcagccgctggagccgggtcccggaccacccgagcgggcagggggcggcggcgcggcccgctgggtcaggctgaacgtgggaggcacctacttcgtgaccaccagacagaccttaggccgggagcccaagtcatttctctgccgcctctgctgccaggaggacccggagctggactcagacaaggtgtgccccgccctcgggcgcgcccccgggccttcgaaccccctggtttctcgtagatcggtccccagagtcctgagacacgctcctcacaggcagccccctcaggccgggaccccatcctccccctccctcccacactactcgcaggggcctcagagggacctcccactccccttcttccatgctgaggcatactctggctttctccccgaccccgcccttcgttctctgagactccttcccacactgcgcccacctgcacccacgagaacgcactccacaccccttctccatattctctgcccctgacatcccactgagatctgcatgagttttccctggctcctcttcagtccccccactgccggtgccagatgcatccagaactgggtcagggttagctcaggcatccttgtagctttctcagactccctctcggacccctctgccaagttgggcttccacagctgcaggaagcgctccttgtgatatcacactgcttttctatagtcctggtcgcagaac

SEQ ID NO: 31987 - DNA, 1733 bp, Artificial sequence
  DNA replication origin
ggctccgggcgccgcttgagcgtggccgaggcgccgctgctgaccatgaccgcggggtagagcggctcgaggaaggctgccaggaagcggtagaagaggctggcgccacccgccaggccgtagaaggacaagccgccggcgtcgcagtcgagcgccacgcccagcgtgcggtggtaggcgccgtgcagcacggtctgcgcgttgtcgtcccactccaggcaccacgagaaggggttgcggcccagcaggtagaccacgctgcggctcgggcggccgccgagcggggagctgcgggggtaggtgacgcccaggcacacccacgagttggacacctccacctcccgtcctagtggcggccctcggacaggccgcgcgagcacagcatctgcggtcactgcttgaagcccgggaaggggccgccccctgtcaggggctccaggaggatccccaggttcagcacccagcgggtctcctagagctggaacagctcgtcgccggcggtggcggggtcaaagttcaggttgcagtaacctggcgggtggaggtggggaagcagggtcagcagcctccagggcaggacgctggcttgcaaggcatttgcatacaagtcaggggatgcttccacccacgctcctgtccccaaactcagcccgctgctcagacacagcctggagggtgagtgggtgctgccccaggtcgccctcctcccccgccatcagaccctaacatcgtctccctttgtatttgttcaggcacacaagactgagtgggggcccagcgaggtggctcacgcctgtaatcccagcactttgggaggccaaggcggacggatcacttgaggtcatgaattcaagaccagcctgaccaacatggtgaaactccatctctaataaaaatacaaaaaaattggcaagacatggtggcaggcacctgtagtcccagctactcgggaggctgaggcaggagaatcacttgtacccaggagggggaggttgcagtgagccgagatggcgccattccactccagcctgggagacagagcgagagtctgtctcaaaaaaaaaaaaaaaaaaaaaaggccaggcgcggtggctcacgcctgtaatcctgtaatcccagaactttgagagctggttaaagaagctgaggcccatgtccagcagccgcatccagagctcagccagggtctctggcagctgggggaagctctgcgtttcctcacagttgatgcccatcaggggttccatgcaggctgagaactgcttcagtcggaggaacccctggatgcagggaggggccagaggtaccacctgttagccaggacctaggccgatgccacaggcccagaggcctccagaaccatgggccggtggagcagaagcttcccctttccaaacctgggcatctcctttccctcctcctagctatttggacatcagaggtcagggctttgccaagggcttggccactgtggcctagtgtgcattaggcaaaggggattttcagaaaatgatgggaggatttttgttgtgccttgaactgcttagtaaaagccattgccaaatgcttcccattgtgcacaggggacaaagtgagcagttgccctagatgtctgcccagggtgtgatggcagcttaaaggaagctggagttcccaagcacagggtttgggcaactccaggcaccgtccagaaaaggctgctgcttggccccacccgctacttacagcagcat

SEQ ID NO: 31988 - DNA, 2342 bp, Artificial sequence
  DNA replication origin
ccttcccgggcttcaagcagtgaccgcagatgctgtgctcgcgcggcctgtccgagggccgccactaggacgggaggtggaggtgtccaactcgtgggtgtgcctgggcgtcacctacccccgcagctccccgctcggcggccgcccgagccgcagcgtggtctacctgctgggccgcaaccccttctcgtggtgcctggagtgggacgacaacgcgcagaccgtgctgcacggcgcctaccaccgcacgctgggcgtggcgctcgactgcgacgccggcggcttgtccttctacggcctggcgggtggcgccagcctcttctaccgcttcctggcagccttcctcgagccgctctaccccgcggtcatggtcagcagcggcgcctcggccacgctcaagcggcgcccggagcccgcgccgcccgtgacagcaccccataaataaacctggacttatctaagcgctggctggcgcgccaggacggttcccggccctgcgccatcccacctcccaaaacgcaggcgaccctttctcgccacagccacaggagggctctaatccggctagagttcccccaggcactggggacagtcccgtggccttgtgggtgggggattcctgactgcggtgcacagcccactcccaaaccccatcccagcagcgtcctctggccttggttctccaggctggtcttggccgcttggcactggggcctgtgccaaaggccttgtcgtctgagagggggcaaggtttgggccaggtggtcagactgagaggtggcgccagctggattggggtacgggtgggctgtctgagtggcttcattgtcgcctgagaggttaaactggaggagcccaggcctacctcagatccaaaaatgttgggctggggacccaagcccaggcaggggtggggctgctgcccagagcagagctgctcactcagctggtgttttacagcccagagggggtgtgacactatcgcgggtgagtaaaccttaaaccccctccaccctgctgagtgctgctgaaagctgctcccccatccccagccatcaccaacccactcagctcccagaaggtagcactgctcacagcagaggggctacgtccatatccaggcctctgccatgcgaccagaggctgaatccaggccgagaccctgccaggggaccctggccaggccatgactgagaactcagctcctctgtctggggaagcggaagatttgggtgcaccatggagccacctccacatttccagcctcaaccagccacttgttcctgtggcttctcaagcaagggttctcagcgaggttaatgattggctctgaagaggaactgatacaaatcactgaagaaaaaaatcccaagggcaacgaattccagaaccagcccacgcggtgccccaggggtgttcctgaattccgtctccacctggcctgttccgggaaaaattagtgacccggtttttccttcaaggtggtcattttggagccaggagggcacagggggagcagagtgttctctgaaggttggtgggggcgggggggctcctctgaggaagccctggctacagcctcgtggtagcctttctccctggagccttcgctcagctctgagcccagtgactcattccccacaggctgctgcccctgtgaagtaaggaatgagctcgaattctttgccccttattaaaagaccttttacccaaaatccacatcttgcctccccaccccacagtcttcctcctggcaccagtggccacaggcttctgcagaggagcgctcaggtcaggaaatgctgaaaaggtgagtgcatgacccaagtgggtagcagcagccgcatacatctcagagtcttcccacatcacggggctggcaaggacaggggcttcctcgccaagtcctccccgctctgaaagacacttggtggcaggatggtgcgtgacaccctcaggcacacatccaaatgtcccggggatgatacttgctctcaaacagctgttccttatttgggggagtcctgggcccccataggtccgcaatggtggtcctgagggtcctgaaactcttttcagtatttccacgagccagatggcaagcaggcctgtgctttcaaggaggcaggttagcaaaccgaatgtcagggtgtctggtctctgcctggcctgttcctggagaaattagtgacccaggtttcagcctgtgcttcatgggggaaaacatcacagggcgggcaggcgtggtggcgcatgcctctaatctcagcattttgggaagctgaagcaagaggatcacttgagcctaggagttccagaccagcctgggcaattagctgggt

SEQ ID NO: 31989 - DNA, 1105 bp, Artificial sequence
  DNA replication origin
cggccctgctgctggactgtccccggccacgcccgccgcccctcccgcatcctggccccttccccacccgacggaatcccggggaggctggaaggtgggtccccgcccacaccgccctgggcccgccctgcctggccgcggcgcttggcccagtcccgcggtcctcgtcgcgaccggcccgggccgcaggacgccgcgctcgggggagctgagccacctctccgccaggcccgtgcgagcgggtgagcgggccccccgggccccactgcctcggacgcgtcccctcctcgcccagtcccctctagcgctgtcgcagacctcctgccagggccccaggtctcctcccgcctgggcgggctcagtggcggtgaggatctagaaaagtcttcctgtcctggttctgggctgccccggggcctggggtgatgacccgcaagcccaagggcgctcggactcctggcccgaaattccagggcggacacagcccgggatcccagcagccccaactcggaggagctctgccccggggagggagggacagcggagtggaaaccagattccggggcagcactgcggggatgggcagggcgagagtacggcatgaggtcccagttgcctgtcccaaacccttgctggttttgcagtgaatatggggggataaggggaagggagagagtgatttgccccagccaccccacctctggggctgcctccctcctccctaggccaaccacagggttgagggttcctcagccccaagctcaagcctgcccttgctgctctctgctggacgggagcccttctgctgcctgcctgggtccagggctccagcccaggagcctacttgatatgggaaggagggaggggtccccagggcctgcctcatttccagcccggggctctcccaccatgggagaagagctgggaagaagaagaggaggccccctcgactctggacaccaggcccctaacacgagacccctggatgagagcatccgctctcccgtgaccaggcgttcgagctccaggggcagggaaaggattcccagggcctagtgaggcccctgttatcagatgaggcgccctgaaaacataggctgggctt

SEQ ID NO: 31990 - DNA, 1048 bp, Artificial sequence
  DNA replication origin
caccccacctctggggctgcctccctcctccctaggccaaccacagggttgagggttcctcagccccaagctcaagcctgcccttgctgctctctgctggacgggagcccttctgctgcctgcctgggtccagggctccagcccaggagcctacttgatatgggaaggagggaggggtccccagggcctgcctcatttccagcccggggctctcccaccatgggagaagagctgggaagaagaagaggaggccccctcgactctggacaccaggcccctaacacgagacccctggatgagagcatccgctctcccgtgaccaggcgttcgagctccaggggcagggaaaggattcccagggcctagtgaggcccctgttatcagatgaggcgccctgaaaacataggctgggcttgtgtgagatgggagaaagaccagaagtatcgtctaaacttctccctgcccacacatccagcttcatggcactgtgctacaaagctggtctcattgggcctaggggtctttgagagctgagcttggcagcccctggggcccaacctcacccctagtcccagcaagtgagagcgaagcatcttgccctgtctacctccttgcccaaagcacacaccaggcagtgaccatgactcatggttcccagtacaaagaaaagagcacttccctgctggggcagaggccaagccagagccctggccccatcacctctctgccctgcttgagtctggaatggacctccctgcctggaagctgcattgcccttggtcctgggcctgcctgccccctggggaacacaggtgggtcacattcatctcctcttttgtgctcagccagaggctgggtgagggttcatgaacaggttcttgcttatagtgtggaaggggtagcagggtggggggtgacaataaagaagggggtgatccactccagtgtggtgtgaggaccactattaaggtgagaaaacaggccaggtgcggtgtctcacacctgtaatcccagcactttgggaggctgaggcaggcggatcacttga

SEQ ID NO: 31991 - DNA, 1129 bp, Artificial sequence
  DNA replication origin
gcgagccccaccacgcccggctaattattgtatttttagtagagacggggtttcactatgttggccaggctggtctcgaactcctgacctcgtgatccgcctgcctcagtctcccaaagtgctgggattacaggtgtgagccaccgcacccggcctggcagcagagcttctagtgtgcaaaggtgcataagggttcctgggctcggattggcctggggcctggagagaggagatggtcaggaacagccagctccactgaaaggttccggagggaaggtgggattcagagtgaaggtcacaggagcctgggcaaagtccccaaaaacactgccccaaaaagtggatgctgagaagagctcttctcatagaaagagacttctccatagacttcttcctggcagagcaagaagggaccagagccaggcagtggggagagggagcagggctggggtccagcctccaggcctcccaaatgctaccagggcctcggggcctgggagtgccagggctaggtggcagggaacaggcaaaggcaggaggaagccaggaaggctgtggcctttccgggaggaagaggtgagagtatcaagtgggagagcggaagagctggggaggagaggcgagctatggagcagggctggaaccttgacatcggggcaacacagaggatcaggtggcgcctgtggcctttccgtttgctgagggaacagaaatcttgggagaggccagggctagtttgctggagaagccccatctgcgatattgcctggcctggagctgggccaggaggagggccaggctgggaggatctctagccagaggtcgcatgcagagggcaggagggcaagcagtgctccgccttgcacatgggtcacacaccctcacaccctgaggctgcgatgaatgggacggtcaccttggtggggctcccagggtcctctgggagggcggaggattggagacagcaaaggaggcagttcagagtggagccggcttaggtgctgctttaaaactcctaggcctggagggaagcagtggggtgctgggcttggcaggaagagggggtttcatatttctggtagatgtccgagtttccccagagcttcccaggacctggggtgaaagggag

SEQ ID NO: 31992 - DNA, 1007 bp, Artificial sequence
  DNA replication origin
ttgctggagaagccccatctgcgatattgcctggcctggagctgggccaggaggagggccaggctgggaggatctctagccagaggtcgcatgcagagggcaggagggcaagcagtgctccgccttgcacatgggtcacacaccctcacaccctgaggctgcgatgaatgggacggtcaccttggtggggctcccagggtcctctgggagggcggaggattggagacagcaaaggaggcagttcagagtggagccggcttaggtgctgctttaaaactcctaggcctggagggaagcagtggggtgctgggcttggcaggaagagggggtttcatatttctggtagatgtccgagtttccccagagcttcccaggacctggggtgaaagggagggaggctgtgggaacagcagctccgggatgcgtgggcttcactgaggtggaggctgctccctcgcagtgcctgctgcagcctagagcccccaggcggtgaggtctgagggggttggggggccagggcgcaggaggcaggataggagggggttgaaaaaggggtccaaacttggtgaggggaccttgggactttggaggcctggttatggcagcttctgtgatgaggggagtggcctgggtggtgttgaactaagataggactggctgcaccttgctaagccaaagatgtgaggggggtgtgtgtgtgtgtgtgtgtgtgcacgcatgcgcagatgtgcatgtctgcactgtgtgtgtccgtatgtctgtgtagcatgtgtgactctgagcatgtatgcatgtgtgtacatatgcgtgtgtctctctgtgtttgtgtgtaactgtgtgtgtgtctgctagtgtgtcttgtgtacctgcttgtatgcctctgtgtgtgagttcgtatgtttgcattgtgtgtgacggtacatatctctgtgttcgtgtgagtgtctacgcatctgtgtagtatgtgtctgtcagtgtctcttcgtgtctctggacttttttgagtg

SEQ ID NO: 31993 - DNA, 1278 bp, Artificial sequence
  DNA replication origin
tgtgtccgtatgtctgtgtagcatgtgtgactctgagcatgtatgcatgtgtgtacatatgcgtgtgtctctctgtgtttgtgtgtaactgtgtgtgtgtctgctagtgtgtcttgtgtacctgcttgtatgcctctgtgtgtgagttcgtatgtttgcattgtgtgtgacggtacatatctctgtgttcgtgtgagtgtctacgcatctgtgtagtatgtgtctgtcagtgtctcttcgtgtctctggacttttttgagtgtctaagtgtgtgtctttttttttttttttgagacagagtcttgctatgtcactaggctggagtgcagtggcacgatctcagctcactgcaacctccgcctcctgggttcaagcgattctcctgcctcagcctcccgagtagctgggatttttgtatgtttagtagagacggggtttcaccacgttggccaggatggtctcgatcttctgacctcatgatctgcctgcctcggcctcccaaagtgctgggattacaggcttgagccatcgtgcccggccaagtgtgtgtctttatatgagtttgtgtgcccgtgtggtctttgtgtgggtcagtggatctctgtgtgtgtgactatccaagtgtgtgtctctgtgtgtgtgcgtgtgtctgtatgtttctgtgcttgtctgtgtgagtgtgcgctgtgactgtgtttgtgtgtgactgggtatgtgtctgtgtctgtgtgccactgcgtgtgtgtgtgtgtgtgtgtgtgtgtgtgtgtgtgtgtttattattcagtgtgattgcggaacttgagtcttggccttgagctctgtttgaaaggagtgttgcagggtaactgcaaaggggccgatgggaaaggcctgggggtgtgggggtggatgaggcccatgctttctccaaagctgctggttgggtgcttgttaaactcctttgtgtatgctctgtggctgctcctagcaccggcctgctcactcaggccttcacaacagcaccaatagtaactttgctgcttctgaggcattgcgaaagtctgtgtttgtatgcaggaaccctgggcaggagggtgtatccttgggtgcatttggggggcgttgggactacactgaccccagaggtctgctgcattctacaagtagtgactgagtgggctaggaggtccccctgttgacttctaagtgatgtaacaattagagacaattgtaccccattgcctggtgccacctgccctgccccgtcctgtccctcctatccctcctgtccctcct

SEQ ID NO: 31994 - DNA, 1531 bp, Artificial sequence
  DNA replication origin
atcctggtgggacgcttcggctgccgagtgaccgtgatgctggggggcgtgctggccagcctgggcatggtggccagctccttctctcacaacctcagccagctctacttcacagcaggattcatcacaggtgactatcacttcatctccagaatttataggcacctgctagaaagtgccaggcacaagtggacagggcaggcaggcctcttaatcttctggaactgctggctgggtgcggtggctcacacctgttatcccagcactttgggaggctgaggcgggcagatcacctgaggtcaggggttcgagactagcccggccaacatggtgaaaccctgtctatactaaaaaaaatacaaaaattagccaggcttggtggcgggcccctgtagtcccagctactcgaggctgaggcaggagaatcgcccgggaagtggaggttgcagtgagccaagatcgcaccactgtactccagcctgggcaacagagcaagaccccatctcaaaaacacaaaaaacaaagtgctgggattacaggtgtgagcccatcatgcccagccctttcacggcattttgttttaaggggactggaggaacagactatacccagaagtggttatgaggtcaagacaggctttttttgtttgtttgtttgtttgtttttaatgggagaaataacgaaggagaaggatctaggaaagaagagaaaaaggatgatgcaggagagaggggacttgctagaggggtgcctctgagtggagaggatgcagggcagaagggagggacagccactgggggaatgggcaagccattgtcactggctagcaggcatgtgggcagctgagcataaggatagggaggaggtgttggggggcacagaggaagacaccggtagtcacctagcagggcaggcaaggcatgattgagggagctgtagtggcgtcacaggcagcctgagggcccgcctgaggccacggtcacacatgattgagaactttttctccagcatgctcaggtgtgcaggtgcagacactgagtgggtggggagcggggaaggcccctctggagaggtggcgtctgaactgagaggagagtggaaagtctggaggaagcagattccaagaaggaacagcagctacaaataacccgaggtaggggcagcttcatgtccagaggcagagaaagaagttcctgtgtcttgatcctaatgagtgacagggagcagcctgagatggcatctgagaggcgggctggagccggaccacagagagccttccagggcattgtggagactgtggattttttgtcaagtgtgatgggaagtctttggaaggtgttaagccaagagagacttaatccaatttggggtttgtttgtttttgagacagagtctcactctgttgcccaggctggagtgcagtggcacaatctcagctcactgcaacctccacaacctcagctcactgcaacctccacttcccgggttcaagtgattctcctgactcagcctcctaggtagctattacaga

SEQ ID NO: 31995 - DNA, 974 bp, Artificial sequence
  DNA replication origin
ccttttaccacactatctggctgccctccctcccagctcctcaccggccagtggtggggagatgaggaaagcaaggccgtccaggacagtgaagagtcccagggctctggggaactgatccatggggacgatgtccatgagaacctggaagatgagggcgccgatgccactcatggacacgctgtacgccaggcagtagcccacgagcacccagaagtcacctgatgccgcacacaccaggttagtgagcccattgagcaggagtgccaggctgaacaggtacttgcggtggctagcaaaggccggccgtcctgccatcagcccggctaggggcctcaggaagatgttgctgaagccgatgatggagatgaggagggctgcctgctgctcgtccacgctgtgccacatggcatatggcaccaggaagacttgtggcagtgggaagcccaggacggaccacatcacacccagtatgtacacgcagtagcctgtgttgtgccgcaggatgtcgaaggccaggtggcgctggatggtccggccgcatgcagccaggcagccaagtgcaggtgtctcgggaggtggcgggggacattctttggtctcaggggccacactggtggccacaggccttatgatggccccgcagatgcagcagtggagaaagatcccgccgaagacaaggaaggtacccctccagcccaggttctccagaaggtagcgggagagcagcggccagagggtgatgcccagggagacgcccatcgaggccagcgcgttggccagcacccgccggcggacaaagtagaagcccagcaccgtgatgcttgactggaagctgaagcacatgcccaggcctgcggggcaagaggggaaaccagcctggaggcgcactggggccttccacctgcacccaggggtggggtcagtggtcatttcacacacctgccctcctctggttctagtccatacccagc

SEQ ID NO: 31996 - DNA, 1085 bp, Artificial sequence
  DNA replication origin
cgctggttccagcacaggctaaagagcttcggcatccagaaaaccagaagcgcgccgcgcacgcgcgccaaggagttcggcgacggccccgccccttcgggggtagggacagcgcggcttccgccgggagcccggaaccgagcccaggagccggggacggtgcgccagtgccccctccgcgagccccaaccagtagacggttccctgtctcccgcgccccaatttcgattttcaaacgcaactcctacaggattctgagaccccgtcccatctcccatatcccatttccagctgcaaattactgcagaatctgaacccaggaaagaaacccatttgccgaccccctcttccctctccagacaggtggagagcgggtgagggtctcgctcggctttccccctgcacctttcccaccctcccgcccgtccctgggggtcctccgtcaccgcggccatggcccagaagccgaaggtggacccccacgtcgggcggctgggatacctgcaggcgctggtcacggaattccaggagacccaaagccaaggtgagagccacggtgggatcaggtggcagggtccgctgtgaccgccgcccggacctggcttcagtgccgctttcccgttgcagacgccaaggagcaagtcctcgccaacctcgccaacttcgcttatgaccccagcaactacgagtatctgcggcagctgcaggtcctggatttatttctcgattcgctgtcggaggagaatgagaccctggtggagtttgctattggtaagggcggggcccgttccctagatgcctaaatgggccagggtgagataagtgaattagaagtgagtccttggggccgggcgtggtggctcacacctgtaatcccagcagtttgggaagctaaggcgggcggatcacctgaggtcatgagttcgagaccagcctggcccacatggcgaaaccccgtctcgtacaaaaattagctagacgtggtggagagtgcctgtaatcccagctactagtgagcctgaggcaggagaagcttgaacccaggaggcaaatgttgcagtgagctgagatcgtgccactgcacc

SEQ ID NO: 31997 - DNA, 2491 bp, Artificial sequence
  DNA replication origin
gccgggccgcagctttctcccagagctgaccgccacgcccgtggtgcagtgcatgcttcgcttctccctctcggccagcgccaggctccggaacctggcacagatcttcctggaggacttctgctccccccgccaggtggccgaggcccgcagccggcaggcgcactctgccctgggtatcccactgccgaggagcgtggccccacggcagcgctgatccatggagactgcgagaccgtggcacccctactgctggagaccacagtcctgatgtggacgcagggaacggggagcacatactgccccattggtgccttttcagccatctgaaaggcgggttctttcagcaggacaggcatttacactgatgaaacgccactgggagtgaggaagccagactccagagacacggagaagatcaaactggagctgcgttcataggctggcactctcaatcctacatcaggtgccaccaccaccagactcaggccctggtgtaagaagcggccaagtgcctggacccagaggctttgcaggacagtgttctcaggagctgggcctgaggcttaggagagctgccttcgctgcaggaaatcagggattatcccttaacagaagtgtctggagtagttttcaggtataggaatgagatgcctcgtggtgaaaggatctcaccctgggaagatgtggtgccccctccagggctctggaggatggatgcctcccccaggggctctccaagctgggcatttgggcctggtggatgccaacctggataacctgtggcccagcattgactgtccacccagccttgctgttaggcaccatgactccaagatgaagatgtggtccctgcccttgagtgacagcccagggacttaatgtggccatcgggcatcaagcacaaggccatgcaggtgatgatacgtcggaatagaggcaccagccctggtaactgcatcttctccccttgccaccccatggccccggctgaaagcttcggccctcctctgctgtcactcaatgatggggagccctaccccagaagtgtatcccacgagggcatcagggacgcagtgagtgttgctcaagggagtcaggaagagacggcaacgtaaaggatgtggctccatgtccatggtgccccctggtcaacataaggagcgtgggatccgatggaaaggtggagctcagggaaaatgggggtccttgcctctcgtgtaccccctcaaggctgaccccttagatggcccaggaatggcaggtgctacaaaaatggtacccacgtgggcatggaaatggggcagattaggggaccactggactcagaggggagggaagggctcatcagcacccgctcagggagcctgtccctttatgttcccaaataaagggtcctagaagactagaaagccaaggtcttttattaaaggtcccgactggttttcccactgtatttccatgccagccagggtccagggacagcctctcgggaggtaccgggtggctgggcctggggcccggtagcacagcgcttaacggtatctgcctgctccactccacggggccagaggcaccagcacgatgccgccccgactcggctctgcggtggcccctgtgggcctgcccttcctttagctccagctgctgcccgcggcatccccgctcattcccgctgcgcagctccgcgcttgctatctaagatctccctccagttgtcactccaggagagcagccgtctccttgtcgggggcaggaccaggtgccgattgtggcagcaggtgaacaagatgtgctcccagcttggggtctcctcctggcctaggacagtgaaagacagcgcgctgccatctgtcatgggtattattactccctctccctaatccgggcaggccagaggcctggaggctgccaaggataacgggtccaacctcgaactgtgtccttgtcatcaatgagcaggtcccccaagaccaccgtcttgtcccttgtcaggataattcgttctacgaactggggccccaggtgctgctccacccagcggtactgtgtagaaaacacagtctgtgagtagggcctgatggaagccggaattcagggatagggacttggctctaagcccttgagagccccccacccccaccttctgggtttctggtggtttctttttaaaatcaggatttaggcagctccacgtgcggagtaggggcggggcagccacaccttctcacccacacagtggtggtacttcagcagggggctggtgcagatgaagacctgcgtgctgcggagaaggacgcggttaccgccgggagccaggagcccgcccaggactccgcccgcccccctctctccttactccggtaggtcgttcatctcccgcacagcgtccaaggctcccgggatgggctccaggtccaggaaaaagcccggggcttcgtacacactggccactttatcctgaaagacaagagttctgggtcccggcttc

SEQ ID NO: 31998 - DNA, 1142 bp, Artificial sequence
  DNA replication origin
cggtgggggtcatggcgcgggccggggtccggccagagcccgccgctggctcccagcgctttcccgggccccccacggggccggccgcggctcaggcccgggcgctccgcgccattttcctccctccctctcttcctccctcccgcgccgaaggaggccccgccgctctctcccgcccccggcggcctccgagtgcgcgccgggcgcgagttgggcgggcagaaagcggacgcccgcggacccaccagccccgaacggggattcttggcccagccggccggcgcgcgtgaggaggggcgttagggcgcgcggggtctccaccttctgtcgaccccgcgtcgggtgttgcagtctccgaggcggcgaggagtcctctgggctcgggcttcacctctcgggtaggaaccgcgggcatctggggacccctgcctggggccgcggcggcggggcgagggttcggggcgaatcaatgggctgcggacgggcaggaacctggatgcccgcgggccgccgtcctgggcctgggggtagggggattcccgtggagtatttcccactttaatagcctcaggggcccgaagggggaggggcagcggcttttccctgggtgccaacgaacccctaatccgcgaacaccatgtggtttcatgaagttggaggcacaggtacgagcagagagactttgtgcggcttaacttttgaacgcggcttttgaggcacccggagacttcccgggaggacttggggacacccatcatcggggcacacgggacttgctgcttttagtttggtggcaccccccgcctcccgcgcctttactttctggagcgttttagggctacagaattgcttctgcactcgattttggacaactttaggttgggtcgaaatctacaagaaacaaatcaggataaaactgtgtatttgacccatgacaacaaagggggggaggggagaataagtgctcttaaccgaaaataaaaatgaagctgctaatagaggagaacgttaactgtggtcctgactgagtattaccgctgttccggggggaatcgggatattcttcgattgttttttttgtttgtgtgtttcctttaatggagattggatttaggttattaaactgagtttggtaacttttt

SEQ ID NO: 31999 - DNA, 875 bp, Artificial sequence
  DNA replication origin
gcctgagccgcggccggccccgtggggggcccgggaaagcgctgggagccagcggcgggctctggccggaccccggcccgcgccatgacccccaccgcgcggcgaggcgaaggggccggcggcgagctcaccttgggcttttcgtcggccatggcgagcgccggagtctcctcagctgccgcttcacaaaagaggtaccaggtccgcaccaaacgagcacacaagcagcaccaggagcggcagaagaaggaggcggcagcggtggacgaggggagagggtgcgcgcacgtcgtgcgctccctccccccaccctgcgtgcgcgagcacgagtagccgaagcctcccattggctggcgcctcgcgggagcgcgcaacgcttacataaccacccccaccccccgtcccacgccaccgcgtcctgggccaggcgcccgcccggccggcgggaagaggcgcggacacgcgcacccggcccgccgcgggggcgcgcctggctctgggcggggctgtattgtcctccttcgtggtggagcataatcaaaatggcttccagctggtcctcggtgggaacgatgaggctcgaggctttagacgtaagccataggccagggaaggcagacttactagaggaggaaggggattcctaaatcaaagccccagcatgaggttctggaaaaatctctctcattcagtggaccagcagccctcccatggttacttcctctcagtcaatctcaacctgcttcccaccggactcttgcctaaaatgcagtgtcttcttcttcttcttcttcttcttttttttgagacggagtctcgctcagtcgcccaggctggagtgcagtggcacgatctcggctcacagcaacctctgc

SEQ ID NO: 32000 - DNA, 1349 bp, Artificial sequence
  DNA replication origin
ggctcgagggcaggcagaaacggccgcggctactcactgagccaggactccaggctttccccttccgcctccgccatattgcagccgcccggccccgcggcttcaaaactcgcgagagtctgcacgagctgagacggggcggggcctgcatggggtcctgagaggagtgagtgccgtcaccgagggccgcgccagactgcgacggatacagggagggcaagggtttccttttggcgctcccctttggaccccggagtgaaaaactctaacgtccagatcagtggagagaaacgcagatttaggaccctgaggagtctttttcacccgtttcccgtcactcgctcaggcgcgccgagggcagtccttgtggggtcctcgtggccagccaagatggctgcccccgcagtgaaggttgcccgaggatggtcgggcctggcgttgggcgtgcggcgggctgtcttgcagcttccagggtgagagggtggcgagcagcggcgggggggcgctgcgaggaaggaagggggccacaggcaggccgcgtgggcccctagagagagcattgccctgggggccggagtatctggattcaagcttctaagttagctgcgtgaccctgcgccaatccgaaggtttagtgactacctctcgcctaaggagtctggctgatctagggttctaacgcggagctgaaagtgcggttcagctaaagagctcagatctgggatcgcctgtgaattgggatgggtgtgtaggcgccaagcccatccttaccgttagcacttgaccaggaggagactttacccgcctgcttggggaatgtcctcctacttgggacaagggcctgaattgttgtggctcaggtttagctcgcggtctccgcgccgctccccctcgtcggcgcgttggcagtcatgcctattgttaagtcaaacctactcgcttgtggagtcagcttttgcctgcctcctcctttccccccctcccaggctaactcaggtgagatggagccgctatagtcctgaattcaaggatcccttgattgacaaggaatattatcgcaagccagtggaggagctaactgaggaggagaaatatgttcgggagctcaagaagactcagctcatcaaagctgctccagcagggaaaacaagttctgtgtttgaagacccagtcatcaggttagatggaaacaaacacttgttacatggactgggactatcccagggagggtttctggtgaggattctgtgatacagccttggagagctaaacgtgttgcttttctctttgaagtaaattcaccaacatgatgatgataggaggaaacaaagtactggccagatccctca

SEQ ID NO: 32001 - DNA, 1095 bp, Artificial sequence
  DNA replication origin
gagagggttggggagaggggctcggagacctgctggggacagagtcgcaccgcttggagttcccagcctggccctcacccggcatcttcctgggccagcaacgtcaggccggtttatttaagcaactgtaacgtccgcccgcacacaccctgccccagtctactcctgcctcctgctgggactggagggtgggcgctttcctgcttcagcttctcgctcttgtgtaatcccacaagcgagggatttctaaactgagcagcaggtgcctggctgatgcccagtccccaccagaagccaagcctggtgggccttcagccaaccaccgcacgccacggaccgcccaggagtccctgtcccgagcgcgccgtcagccccgtccagggcctgcaggacggaacccgccctgcgctccacacctgaggccgctcccttcgcctcttctcctcaggtgctgtccttattcccagcccagtcaagagctaccggggctggctagtcatgggggagcccagtagagaggagtataaaatccagtcctttgatgcagagacccagcagctgctgaagacagcactcaaaggtgagcacgggacccctcctgagctggggtcaggagctacagagaagggcccctgtgggcagcaccagaggctgagcctggtgaatgcctccacccctcccctcattctctgacgataggagtcggcaacgtaattcttgaactggaagacaagctacattgaggccattattttggagtatgaatcacagtcacctctcagactgtaaagactgttttaaaagtttaaccatagggctaggcgcagtggctcatgtctgtagttccagcactttggaaagccaaggtgggcagattgcttgagtccaggagttcaagaccagtcccggaaacatggtgtaaaccccatctctacaaaaaaaaaaaaaaaaagaaagaaaagaaaaattagccgggcatagtggcaggcacctgtggtcccagctacttaagatgctgaggtgggaggattgattgagcctgggagggtgagggtgccatgagccatgatcctgccactgcactccagcctggct

SEQ ID NO: 32002 - DNA, 1115 bp, Artificial sequence
  DNA replication origin
gcgcaagatcgaggtgccggcgggtccggcgtgggcccggacacggcccaggcgcaccgggtgaaggggtgacgagccaagcgagttccgcttgcggctgggtggcagcgtcgcagggtcccacgcaggcggcgcggcttccggggcggcctggaggccagggcagtgccccgggggcccggcaggtggcgcgggcgagccgacccttccccggcgccgcgcgaggagatgagctcacggcgggccccgcagcgccggacgctggttgcgcgctcccaggcgccgagcggccccgggcacgcgcgcgcgccaccggcccggcaggtgggtcccggctcccacgccgcctctcccgcccgcgggaccctgggccgtgggctccgcagcccgccctgtgcctccgggaggggcgttccgggcgcggggggaacggccgagggctggagaccctaaaggcgcctcctacggccagaggggagcctccggcgggagccacctctccggggcgcatcatcctgccccccagtaagaggaaggctccagaatggagctcaggaattaggagtctcgagtgcgtagggccgggttactgccactcgggagccgatccgaccagcctgtcccagggagaagctggcacgggtctggggagttcaggctgctcccggcaggggcggcggacagggcgcctgcgtccccacccacgcaggccggccccatccgggggatgcagcggcgggtgttgagaccgaaggactcggcgaaagccagaaagagagggttggggagaggggctcggagacctgctggggacagagtcgcaccgcttggagttcccagcctggccctcacccggcatcttcctgggccagcaacgtcaggccggtttatttaagcaactgtaacgtccgcccgcacacaccctgccccagtctactcctgcctcctgctgggactggagggtgggcgctttcctgcttcagcttctcgctcttgtgtaatcccacaagcgagggatttctaaactgagcagcaggtgcctggctgatgcccagtccccaccagaagccaagcctggtgggccttcagccaaccaccgcacgccacggaccgcc

SEQ ID NO: 32003 - DNA, 1935 bp, Artificial sequence
  DNA replication origin
aagcggaactcgcttggctcgtcaccccttcacccggtgcgcctgggccgtgtccgggcccacgccggacccgccggcacctcgatcttgcgcgtggccccgcacccagccctccccggagctcaggtgcactgggccgggagacaccgctgggctgcgcggcgtgggaagagcctgcagagcgcgtggtggggacctggtggcaggaggaacagcatcagccctggtcgcaccactttccccgctcccccaacccaggtagagaaggcaggggctgcagggccggggccagccacaaccctctcccgctccaaggaggacatgggcgaagcgagtttcaggtcataggggcagccccgagaaaggggccccattggcaactcgcggccgtcggttgttgcgaatgcccctgaagtggcgcggaccccaccgcccggcgtctgccctgggtgacaggagggcacctagaagtgggggaagaactgccgccgctcctgccgcgcgaccgggaggagcgctgccggcgctgcccgcgttctcgcctccttttaaaagaaccgccaaagtggtcaccgaaaacggaggaggaagagaacgctcagctgcagcaaaagaaaccaatgggcaggaaagatgaagagaagaaactttaacggaatttcataaaaaatgcattcaggcagctgcatcctcgtggcccccgccgcagcctggaccttgggaaccagcagcccagagccaggaagccccagcattcagggcccagacagaccccaaaatcccagaccagaggcagggaaggatggtgcgaggaggagcccaggacccacacgccagggccagggccagcgccggctcccagtgggtgcctctttccaaggctggagagggaggcagaatggagggcttcccaggtcggagcaaccctacaggccgggcagatggagggaagggtggaggtcatgttctggagacctcccctcagcctggaactggtttctcctctgcctctccgcctgtgggtgtccctctgctctggtaacaccccaggcaccagctgtgccctcaccaggctacgtgcccgccccttccttctgccatccccatcagtgggctgcttcagagccacggcccttctggggctacaggggaggatgcacccgcagcatgctctgcactgaggagcaggcagtgggcgctgatgccacctgtcctgctgatagctcctcacccagcaaggctgacccagctctgggtgaaagaggagtcagtgaggtagactggggagaggctgcaccttcacccacgcctgcccacagcatggcccatccacttcctgcacgggcgctgggatctgctttccatggagccccacggccatgaccagcccggtcctgggagaggacagcctgggtggtggtgtgtctgcagacacgaaggtctgggcacggggcccagaaagtgactggctcagcctggagtctcccccagcactagaagcagagctgccaagggctgccgctatggagaacatgggatttgaggaaggcaggagtcctttccctcatactttgtgagtaggcagatgtgccaggggagatggagtaagataaggaatgtgtgtttagctttaatgtctattaaataggttggaaaaacaggccaagtgtagggacctgactcctgcaaagggcctaccgcagccctctgcactcaagcagcagccccatccagaccaggagtgtgttctgttctcctggcaggcagggctgataggtgtaggatggcgtctgtttcctttggagtgtgggctggtcagaggagaaacagcaacttcctgctccttctcactgtgtcgttggctcaccatagaccacgtcctgcattccctctgattctctcatggggagagccctggaccttctggtggtgtcc

SEQ ID NO: 32004 - DNA, 960 bp, Artificial sequence
  DNA replication origin
ccctgcgggtagggaaccagctaggtgtcagggcgcatgcgccagacctccccgcagcaggtggcctccgcacggctccgcccccgggtcgccgtaaccctctcggtgccagagcgggtaaatgacagcttagccctgaaggactcttcccccgtctaatcactttattttcctcttctaccaaacctaggcagttggatgggtaggggcttgggggaggaagagatcttccagaatgaagcactccaaatagaggaccaggtcttaaaatatttgagaatccggtccgtacaaactctgctgtgttgaatgattggtgagtttgtttgctcattgattgaatcactgcagagtttgtacggaccggattctccaatataggccgaacactgtgctggggatagaacagaaatcttggcccttaaggaattcacggtctaggaagtagaagaaaaataaacaaataatgccataagtactgttataattatttggagtttgctgaggaagctaaaaaaatggagggggtactgctacactgcccattgcagaagagccttcacagatgtgatgcggcgatgtctgatctgagtcttggaggatgagtaggaatttgccaggcagagaagccagagtaagggcatttcagggaaagggaatggcacgtaagtacagaggctaagtacagaggaacggaggcgtgagagagaaagtcgtgttctgtgcagtgctaagtagttcaattcctgtatgaggccggtgagtacgggggagtggcagaagatgaggcttggagaaataattcttatttttcagttcccaaagctcttccaattaaaggatagaacacaacacacctagcgttactgtgccttctggaagccaacaaaatagcgctgaggtgagaataaccaagcatctgattctatagagaaaagaagcccattgaaacacagaaaa

SEQ ID NO: 32005 - DNA, 1426 bp, Artificial sequence
  DNA replication origin
gagcctgcttgctgcaggagcccaacaggctggagcccagccgaggtcaaagagaggggaccaaggcggccatgggggctgggaagggtgccgggggaggcagccagattggagtgggacaggcctctcattgtcccctccctgtccgaacttcccaggaggtgtggagaagcagcttcctccaccacagtaaccgctgctcctgcttccactggccgggggcctcactcatgctactggccgtgctgctgctgctgggctgctgcgggggacagccagccgggaggtgtgcgcccaggggctgctccccaacctctccagctgtgctgtccatcctgccgcggcacctgggacagaccagggctcttgggggctgtcacccccaagctgctcctgggatgtaagggaacctcctcagtcccttgaatggggtcagaggcctagctggtgtcagggcaccagaacgggacagtctttccacaagggactggggtgggaaggggagctgtggcctgggggctgctgggtgggcgagccctcactccctgtgggtgcggcctctctttcctcccaccagccgtggggtggggctggtgaatgcctcggccttgttcctgttactgcttctcaaccttgtgctcatcgggcggcaagaccggctgaagcgtcgggaggtagagcggaggctgcgagggatcattgaccaaatccaaggtgaggtcaagggcaggcatattggtgggaaaagatgaccggacatatcagagccctgagggctcccctcctgcaccccagcacagacgggttgcctgtggccagcattgcaggggctcttgtcatctggggagttagaaggatgcccactctcttttgagcagggcagtgagagctgtgggatggtggtgggtgcccaggcagagggctgggcaggcaggaaggccaacagtggcaggtgggcttgcaggctggctcacgttgggaaaccaacagggaagtcctctcacatggcaggaggatgattgaagttttctcgttcaagtccatcttgtctggtgtactgtgctgggagacatgggaaggtgggcagacatacctgcaggaattggggtggggtaggggccgggagcctgagatggagcagcccagctccaaaagggaggggagtggcttggatttctgcttggcctttcattcaggcggtgtttatgaagcttggctgcggattgagggttgttgaggctcttttgagggacggtggctcctgctgtccaggggcatgtggtgctgtgggagaagcagcacccactcatgagacctttctccaacagacctgggcagtggacgtttagatgctaagtgagtttgtcctttcgttctgagatggttaattgccaccatgtgccaggcactgggagtgcaatggtga

SEQ ID NO: 32006 - DNA, 781 bp, Artificial sequence
  DNA replication origin
cccatgatccctgggcagaggatgcagggagcactgtttctctgcagccttctctccctccccatccggcccccctcacccctcttgctccttggtgccaatgctcttctctgcggctctcagtgcagctgccagggacgagctggtctgctccagtctctgctgggcctggcctgggcccacagtcccagtgctctcaggccgtggaggaggcactgggcgggggccgagccggggcgctagcttagggccagaaaatgccagctgggtgcaggccaccgacacaggcttgggggctgttcctgcagagacaaaaaggttggcttgggacttggctgggtcagacacaaccctgccagcagtgactctcccacaggcctcccctcttacctgctccgggcaccttgaggagggcagcaggggcggccgggggttctgtctccccattccaccgactagctgctgagctttccagacctggccctgggcagggcggcactggaggctgcatggcggggctgggagcaaggggggttggaactccttgggctggaaggctgctgggctcgggctggggaaggctagaagctggaggagactcgccaggagttggggaaggcagtggggcagcggggccaggcgtggcactggccactccgaaggccagcagtgcggtctgcagtggctctctctcccggcacttgggcctccgcttaacagtgtctgattccgtgaggttgaaatcgaggccggggggcacgggtgtctctcggggcggggg

SEQ ID NO: 32007 - DNA, 851 bp, Artificial sequence
  DNA replication origin
gcaggtgggccagggggctctgaggggccagcaggttcactcagtgttcgccttcggggccctgtggccccttccttgggccctgggctctcatctagtggaggtggctccgggctggggccagagacggagctgaggcgcttggggggcgggggcggggggcctttgcgccgggcccgcagggcaaaggactggctgcgaggagtcccccgagctggggttggggtcacactaggactggtccggacaagggcactgcgtcctggccgccgggtaagggtagcataactgcctagggtgctgcccactggcccttcggcctccccctcagcatccccctctgtggggccagggcggcttaggctgtgggaccggcgcttaggtcgaggcgggtctgggggagtggcagggggcccggccaagtaggagaaggcccagggtgcgccaggaggtggccctggggccgggctagagggtgagccctgggggtacataaaaacatagggtgggggtccttggccaggaagtgaagaacaaagcttagggggccgctctgtgccctctgggaggttcctctcctggggggggctgggatctccaccgctgggctgtggggcaggctgttcctgtgagtggccagacccccgtgagcgtgccccgatgctctcctggctgggagagcgggcaggtgggagggggagtggttcagggccaccccctgccatggccgcctgtagctctgggcttagttcgctgccctggaaggtgaggagccgtgggccagctgtagctgggccttctccgttctccagtccctcgatggccatcagctccggacccttggccagccg

SEQ ID NO: 32008 - DNA, 1054 bp, Artificial sequence
  DNA replication origin
cctctggccaactgccgctctggggagcagatcttcacccaggacgtgcggccagaacagctgctggaggggaaggtgtgacctccacggggtgcaccgtgggcctcgggggggaaggtgtgacctccacggggtgcaccgtgggcctcgggggggaaggtgtgacctccacggggtgcactgtgggcctcggggtgggtagggcagggtagaggcaagagcctctgtatggactgaagccccgctcaggcaggtcctgagcccctggtgggggctagggccttggtccagctcctgctaattctgcccccttcccccaccccgcaggacgcgcaggccattcataactggctaagcgagttccagctggagggctacactgcccactttctgcaggccggctatgatgtgcctaccatcagccgcatgacacctgaggtgggtgctgcagccgggaagcagcacccagcgggcgggggagggcccagcaggcgggggaggggcctgatggccagactttgtgtggcaggacctgacggccatcggggtgaccaagcctgggcacaggaagaagatcgcctcagagatcgctcagctcagcatcgccgagtggctgcccagctacatcccagtgagccatcaagggtggctggggagtggggcacgtgctgtcaccctcagctgtggctttgcggtgccttttctcctctggctgggggcggaggctggctgggagttgttctgaggacggtgctcttccagacggacctgctggagtggctgtgtgcactggggctgccacagtaccacaagcagctggtgagcagcggctacgactccatggggctggtggccgacctcacctgggaggagctgcaggagattggggtcaacaagctcggtaaggactgtcctgaggcctggctgggcccccacctgcctccggggtctccaagagaagacagtatggggcccagcggtgaccaggacaaccccagccccagctaaccttgccacttccgtcccccatctcagggcatcagaagaagctcat

SEQ ID NO: 32009 - DNA, 1085 bp, Artificial sequence
  DNA replication origin
gggccccaggcctgcgcggatctcatgccacaagactctggcagtaaattcgctgccaccgagaaactgacgtaagcttctctgcggtggagtccagggtctgggcttcaggttcaggcttggggggcttgggagccccgtttgtcagcagtgccccagctctctctgttctctgcccagctgctcctccacccgacacaaggggcgagggcgggtcagcaacaggtgctgtgcagcttccctctctagcaggcagagcccccagaaatggggggccagaagcacttcatgctctccgttcacaaagagtcctaggactagggcatccagccattaaagcgaagccttgaagcctccgtagggaggaatctgggggctggtgcctttgacagggagtgacccctgcccgcctgcctgtgcctgaccctcccggccccacctcctggcccgccagttgtctgtgggtgtcggagcctcgggctgtggagaacaggctgctggcccggcctgccccagtatgtcatgctgccagggcccctcctgcccaaggttgaggtactgccaggtgccctggggccccagtgactcagcctccccctcccagaatgccacctcccccccaccaatactcctctcatgcatagcagcttcctccccactttcagtggctcagcatcaccatcgactccgaggggagccagggtggcttgggggctccctggaggtcttgtcctgctcatcctctgcactccacttctgggacccttgcaggctgtggcccagcattcgacagaggccccgtgctttttccagagccctgagaccagtgcaccgctgctgcctgaggcccaagggaatgctggctgctctctgggtgggcactggtgttccacagccaagccgggaagattggtgtgcccagtcccagcccatcctggagctgtcggaagccacaagctgatatccatccagatttccatgtagccttcaccccctcaaagattagctttccttcgtgtggtggcagttcacggagcacctttgggagtatccctcagtacctgacgaggagcccactgcctggg

SEQ ID NO: 32010 - DNA, 1032 bp, Artificial sequence
  DNA replication origin
ggcgggagggaggggggaggggcgggatttcctgcgggaggcgccgagccggccttggaaaaggagaaggagaaaggggggcaggggggagtgggagccaccgtcctgagtgccagggaccgagcagggccagccggaccccggcgggcggccgggagaggtgaggctgcggggcccgcgctgggggtcagcgcccctgggggcgggcgcaaactaacttttcttgcggggtcggcgggcacctccatctccccgctccttccgtcctcctcgcgcccctttttccatcctccgcgtttatacctcgggcgcttggcccgcccggcttctcccgccgctttgttccccggtgggcctgggctgggctgggctgggctggggggttgcgaggcgctggagggacattccggggggcgggggagccagcccgaccccaggcactgccaagggcgccctccgcccgtgtcggccgcgggctccgcgtgggagtgcccctgggttgggcttgggacgtttggggagtgaggggttcccggccagggccccaggcctgcgcggatctcatgccacaagactctggcagtaaattcgctgccaccgagaaactgacgtaagcttctctgcggtggagtccagggtctgggcttcaggttcaggcttggggggcttgggagccccgtttgtcagcagtgccccagctctctctgttctctgcccagctgctcctccacccgacacaaggggcgagggcgggtcagcaacaggtgctgtgcagcttccctctctagcaggcagagcccccagaaatggggggccagaagcacttcatgctctccgttcacaaagagtcctaggactagggcatccagccattaaagcgaagccttgaagcctccgtagggaggaatctgggggctggtgcctttgacagggagtgacccctgcccgcctgcctgtgcctgaccctcccggccccacctcctggcccgccagttgtctgtgggtgtcggagcctcgggctgtggagaacag

SEQ ID NO: 32011 - DNA, 685 bp, Artificial sequence
  DNA replication origin
gacgccgggtctgggagctcagcccgcaggttgctggagatgcagaaggcccctcttttgcccctagccctcctcggggcttctctccagtaaagcctgaggagccggcgtctggagtgcagtgcgaatggtcacacttgtgaccgcccctctgcagcctcgcgctgcttagtccccaccgcccgggctgggcaaggagggcagaagggctcagggaaggacgagcggagggtgtgcaaattccgactttgcaggccgaaggccacccgggaactgtcaggagcggtccggggaggttcgccattccttcggtgtcttccgtccggtccctacggctgggctccgaagccaggtttcgagggccgggggcgggaggcgctgtccggcccacgacggtgctgaagcgccacctccgcccggcacgagcgcctcctcgaggctggggtccccgcactggtgccgtccgctaggtggtgccattgcccggccggcggctgcgggtgggcgacgccggccgcagacggggggtactgcaagtggggtcccgcgtcttggttgccaacccccttcacattacgtcttctctcccaccagtcagacccggggtgtctagcccttgggtctaagtccagagccccaggtcacctctgcccccgcgccccccgcccctccgtttcacctgggc

SEQ ID NO: 32012 - DNA, 886 bp, Artificial sequence
  DNA replication origin
cccctcccccctccctcccgccggatcgggaacggagggaccgtcccggccgcgcagtcaggctgtcagtcagcaccggcggctccgcccccatccgcgccagatcccgccccaactcgtgcccgcccggaccgggggcgctgaccggatcagcgcatgcgcccaggtgaaacggaggggcggggggcgcgggggcagaggtgacctggggctctggacttagacccaagggctagacaccccgggtctgactggtgggagagaagacgtaatgtgaagggggttggcaaccaagacgcgggaccccacttgcagtaccccccgtctgcggccggcgtcgcccacccgcagccgccggccgggcaatggcaccacctagcggacggcaccagtgcggggaccccagcctcgaggaggcgctcgtgccgggcggaggtggcgcttcagcaccgtcgtgggccggacagcgcctcccgcccccggccctcgaaacctggcttcggagcccagccgtagggaccggacggaagacaccgaaggaatggcgaacctccccggaccgctcctgacagttcccgggtggccttcggcctgcaaagtcggaatttgcacaccctccgctcgtccttccctgagcccttctgccctccttgcccagcccgggcggtggggactaagcagcgcgaggctgcagaggggcggtcacaagtgtgaccattcgcactgcactccagacgccggctcctcaggctttactggagagaagccccgaggagggctaggggcaaaagaggggccttctgcatctccagcaacctgcgggctgagctcccagacccggcgtcggggtgcgcttccgggcgggcgctaggaccggggacaatca

SEQ ID NO: 32013 - DNA, 1811 bp, Artificial sequence
  DNA replication origin
gggggcgcggggccagcgcgggtagggaaaccggcgcccgggacccggccaggcggcccccgatgcgcggcgctgaccccgcgtccccttctcccccagcgcccgggagctcttcgccgcccgctcgcggtcgcagaagctgccccagcgctcgcatggccccaaggactttctgcccgacggctcggcagctcaggccgagcggctgcgccggtgccgggaagagctctggcagctgctggcagagcagcgcgtggagcgcctgtgagaggggcgggcccaggggtaagggaagcgggggcgaggcgggccgcggggtctccggaatggactgacgcagacccctccccactcctcgccaggggcagcttggtggctgccgagtggaggccagaagagggcttcgtggagttgaagtctcccgcggtgagcggcgggctcggggaccggggaccgccctccctgccctccctgccctccctcccttgtgacacttgctctgggccccacacagggcaaattctggcagaccatgggcttctcagagcagggccggcagcgccttcacccggaagaggccttgtatcttctggagtgtgtaagtggggcccgggaggtggggaaggagttgggaccaaagaacgggaaggacacgttttatcggagaaaaagcacacacaacccggtctttagagaactgataaccaaacttctaaagcaggaggtggtacgttgcagggagcagggattccagtccacattagtgatgctgccccactttcctggttggccacattcttgatgcgctgctgagagggggagggggaggtatcagagctgggaagttgccccattcctctgtggcactgtagtgagggctcataagctgagctgttggccccacttccagggctccatccacctcttccaccaagacctgccactgtctatccaggaagcttaccagctgctgctgaccgaccacactgtgaccttcctgcagtaccaggtatctgccaccaccccgcctccgggagccacccatccactgaatcaatgagtattgacaagtacccataaggtgccaggcacagtgtcacatgctggggctgcagggcagacgagggctatgctgtcacgaggcttacattgtggtggtggcctgttggcttcacatagaccccagtgctgtcagaagataaggtgggggaagagaatccaaagagactgggctgttcattcaggtgagagaagctaggggcttgtcgcaggttgggggtgggtagagttgcagtgagtgaaaaatagatgaatctcagaaatattttggagaaagaatggataggactgccaatggattggatgtcaggattaaggagagagaagaacccaggattaccgcccatgatttgggcatgcaccagtggatgaaggtgctgtcattttctgagtgggaagaatgaagaggagcagatttgggaggacaagaccagtcgaaagaactgtgtcagataagttaattttgaggagcttcttggacatccaagtgagtgtaaagcagacagacaattggaatccaagtctggagtgtgaggagaggtcaaggctagatgtaaatatgggtgccatgagcacatggatggtatttaaactactgggctgtatgggagtgccatcagagtagagggctgggtctgagccctggggctctctgtgtaggttagggggcagataagaagcagaaacagaccgaggagtgtctggtgatgcaggagaaaaaccaaagtcgcatcacagaagccaaaagaagg

SEQ ID NO: 32014 - DNA, 2063 bp, Artificial sequence
  DNA replication origin
cctggacgcagaacggcgcgccgcgcccagtgtcccgccgcctcccgcaagcggaaatagttcccggaacgcctgcggtcccgggccgcctcccagactccaggggagccgtccctccaactcccgggagctgccgagggaggggcggatccgggccagctcctctgccagagcccagcccagagagggtgaccgggggacgcagggccgggtttccagccccacgagagggatggtgtagggaccggggcgtcgcggcgagacgcctttcctcgggggggggtgcgggggggcgcccacctcctccgtgtcggccggagggtctgcaacagcgggtggaatttttagcacaagcgagggaggaggttggagcgacgagaggcgggagcggaaagggcgcggaggccggggctgcagcgcgctccaccgcccagctgcaggtggcgcctctcgccacccgcaccccgctgcgcccagggaagggccgatggcgcgccgtcctccctcctcccttcgggaagcctgcgacgtcccatcccctccgacgcaggcccgggaaaggctcaaaaggttcgaggtcgcgttcctgctatcccgcgggcttctctcactcttagatcccgcaccagaggaagcggatctccttgagtgggcaaagcaggggtgaggggctgggggcagttccactgacaacgggacgggggcgagaggggtttacccagtacatacagaaacagcagaaaagaaatctatttttaatggctttggctttatagcacgaagcaggcaccctctcgttaaaggcacacagtcctctcttctgccccacctcctgggtccttaaaatcgagtcctgagttccagaggggtcactgcaaggcagcagggaagggagagggtcacagtttcactctgtgagtatcagacacccagggccaaggcccagactggcctctgaagctacaggttagagtctgggtacaggaggcagccgagatggtccctgagaacagacagtcccggtcccccggagcaagctccatcctctgcagagctgtgaggtcagtgccccacatcctggggcaacgtgaagtccctgaagctgtagaaggagatgtcaccatgatccaccagggcaaagatcagagggacatccccactctggtaagacaaccgcttgaggctgcagaggtctgggacaggctcatcaaatctgcagggacaaagggttagagtgagacccagccatagcccactcctaagctctagggctcccagagaagagattctacggaaggagttggggtgcaagaattctgacccatgagttctgtctccaaaacacagggctctgatgaagagcgccccagagcactggttggggaggtgctaggaagagcaaggtgctcaccactcttagcctgtaaatccccacaatccacatcccttctgctgggtgagtcctagactaaaatggcattggagaaagactaccctaaaatgccagcaacgaggagctcagagtagggcagcacaaactggctgtgtggccttgtgtaggtcacttagcctctctggacctcctgttcctctcagagattggcacgctggccaggggagtacagaggagtcccacttggttcacaggagaactggcagcagctgggggaggggcagtgctggctcactgcgtacccactaatgcacatccgggcatagggtttgccagggttattctttcggaatgtggccacagcgtcggcctggtaaacatcaaagatgatttccaagcccccagacttctccaacagcctgacaatacaatgagaaacgttatgacatgaactcttctccccaacctttcttttccatcccaccctttccctccaccagttccaggaagcagcctcacagaggtgccacttgagggttgggggctctgaacccttgggctaacccactggttattctccctcttccctagacacacacgaacactagttattgctcagagctaggcgtaggggtaggagtccctggaacagtcctctagtttacaccct

SEQ ID NO: 32015 - DNA, 1612 bp, Artificial sequence
  DNA replication origin
ccgaggcctcgggcgggggctggcccggggttccaggtgagatgcgtgccggactcgcccagccgggcccgccccctcggggcttccacctggggcggggaggccagggaggcccaggacccctgggctgtcgggccagggcgggagggctgcgcccaggtccgcgcgcctcgcccctgtccgcgtcgctgtgctggcctggaagagagacacctgtagaaagttctgcgggaaacttctctgcctgatctgcgcgatgactgaaacttgggcttgggtttgcacaataatgttggcttaggagagcaggagaacaggtgccccggccggctgggtgcggggggcaccgcgggcagagacggagtccccgggcccacgtgcaggcgccaggccagcggggttggcgacgcgcgtctgcggtgaccccctccccacgggcggcggccggagcgcggtgccccggcggcttagcccctgcccctgccatctgggctgtgtccctgccggccctttgtgcctcctaatccccggacgcaggaagcccgcgggagggacttcggtctccggcctttctccagctggggcggctttggacaccttcacatgacagtgcggagacccagtctgccctccatgctgacgggcggggtttgcgctgtgggatttggcgagaagtggaaaattctatcttgccaaagaaagtgtgtcttagtttgttccggctggacgattggtggacacgctgggccttggctgtggggagaactgacctaaccaggggagctgtagagtggcgctttgaggctctcacctgaacaggtgagctttgagtgaggagggcgccccttcccctggggatccgtatgcgactgccggcagccttaacctgggctccagggaccccctgctggagtttgtagttcaagagaaccttgagttctcttgaaggggctacagagaggattctgagcagggagcgggcagggagggaatgggtgtgtcaaggtgacaaggaaacgctggtaggaagagcagagctgccacagaagagctgtggcccagcccgggggaagccaaggtcagaagtggcagttgaggctgggtgcattggctcacagctgtaatcccagcactttgggaagccaaggcaggaggatcgcctgagcccaggagtttgagaccagcctgggcaacatagtgagacctcgtctctgcaaataataaaaaaagttagccaggcatggtggcgtgcacctgtagtcccagctactcaggagcctgaggtgggaggattgcctgagcccaggaggtggaggttgcagtgagtcatgatggcgccaccacactccagcctggggacagagtgagaccctgtctcaaaaaaaaaaaaaaaaagtggcatttgaggaaaactgtctgggtctgtgtgagcagaggcacaaggagaactgtgcgagagatgtctcagctttattttatgaactgggatttggggtttagttttcttaggcgatcttcccacagtgctagctgtggcagacagaactcaaactcagctcttaagcttctaatcagagttcactcctttcctctgaagttagactgggcccat

SEQ ID NO: 32016 - DNA, 1093 bp, Artificial sequence
  DNA replication origin
agctggggcaaggagttgtcccttcttctttcccctatcccccaggggtgatccccaaacttgattgtcccactcccaggcctgggggtggcagagggaggctcctgggtctcctgctctgccttcttctttccattcatatgcaagaagcatgcattgagcacttactggatccacagcccaaggctcagggctatgggaatctgattaggcctctgccctccacttttacagtctgcaggagggaggaggctgatggcctgaaatttcaggccttggaagtggagaggaggaaggggagagcccaggggattcaggagcggggtagactcatccggctcggggagtgtggtggggccagcagggtgggattggaggatgaggccagatcccagaggatttgggatcccgtctgccctgcccctccccagcccaggctgtgaagcagggaggctgctggtatctgggcctgatctgaccctgcggctccaggggttgtgagcaagggagtgaatagtggtcccatttacaatgtaggaaagataaacctggagatgtttttaccctttgggcaaggcaggtaagctcagagcagttaggagacattgccccgactaagataggtgacagcccagaaggaagggactggaagcccagccagtggggatgggaacgaggcatgaattgagcagggtttctcaacttcagcactcacagatgatatttgaggctggctgtgctgcggaggctgtcctgtgcgttgtagattatttagcagtgtccctagtcctacccactagatgccagtagcacatacatacacacacagcctgtcaagatgtgacaaccaagaatgtttcctgaggggtaaaatcgctcctggtttgagacccatggaatagagaactattcagggctgagatctgctgatggggcagtaaagagggaggggatggggaggggaggcgggtgtgcaggatgaccgtgaagtctctgacctgggtaggtggtggtgccaggccttgggagggggagcccaggccaggagtggcgaagaacagatttgaggaaaagtaatgtattttgatcgttt

SEQ ID NO: 32017 - DNA, 1215 bp, Artificial sequence
  DNA replication origin
ggggctctcgggcagctatggcctccaggaccttcgaggacagctcgcgggctcctcgggacactgggccggccaaggacgcgagcgacaaccgggcgcagcggggcgccgagccagaaacaatgcaggcctcgacggcccgggctccgcgccaccaggtcggaaaggcggtggggcaggtgccagcggcggcaggcgagggcgaagcgggagccgcagcaggagcggggccggaggacccagccccgctggcggccctcctggtggtccgcaggctcctcgcgaggcccccgccaggcgccgcttcccaggccgtgggcccccgccgcgctggcctcaaggagcggctcctgagtgtagcgcgagccctgggcctcctgcgctggctgcggcggcggctgcggctgcggcggcggccgccagagggcgaggggcagggtaccgggccacgggcgagcgaggggtggggccgccggaaaccggacgaggggcggggtcatgggagaggaagcaaggggcggggccgcgggaaagcggatgaagggcggggccacgagcgaggggacgagggtcggggccgcgggaaagcggacgaagggcggggccacgagcgagggtacgaggggcggggctgcgggaaagcggacgaggggcggggtcacgagagaggtgacgagggccgggaccaccagagagggtacgaggggtggggccgtgagcccgggctgcggcaccgtctagcgttgcgcctggctggcttagcagggctggggggtatgccgagggcttcccctggtggccgctccccgcaggtcccgacaagcccagtccccggcgacccttttgatcaggaggacgagactccagatcccaagttcgcggtcgtgttccccaggatccacagggcagggcgggcgtcgagcagccgcagctctgaagaagcgtccgcagatgcccccacgggggaaggccgaggttggcctcgtgcaggggtgggggggcacagtgaggggtgcaggacgagtggggaaggggtgtccgggcttcgtcgcggctccctccttgccccgactgcacccgacgggccttccctcgacgagagcggctccagcagtgaggcggagttggagaccctcaatgacgagcccccggtgcgctgggcgcagggctcaggcccccacgagggtcctaggcttggcgccgccgtgctgctac

SEQ ID NO: 32018 - DNA, 1616 bp, Artificial sequence
  DNA replication origin
gcctggctggcttagcagggctggggggtatgccgagggcttcccctggtggccgctccccgcaggtcccgacaagcccagtccccggcgacccttttgatcaggaggacgagactccagatcccaagttcgcggtcgtgttccccaggatccacagggcagggcgggcgtcgagcagccgcagctctgaagaagcgtccgcagatgcccccacgggggaaggccgaggttggcctcgtgcaggggtgggggggcacagtgaggggtgcaggacgagtggggaaggggtgtccgggcttcgtcgcggctccctccttgccccgactgcacccgacgggccttccctcgacgagagcggctccagcagtgaggcggagttggagaccctcaatgacgagcccccggtgcgctgggcgcagggctcaggcccccacgagggtcctaggcttggcgccgccgtgctgctaccccgactctccttggagacccgcctgcagcaggagggagacccgggcctccgtgggtccctgagggagctgtgggaacccgaggatgaggacgaggcggtgctggagagggacctggagctgagcctccggccgggcctggaggcgccacccttccccggtgccaagggcaggagcctcggagacggcctggaagacatggaggacctggcgcggttgcggttagcgggcgcggtgccaaagctgccatccccggctcacagctcctcatatccaccctgccctcatctttatgaattgcgtgtagacccttattgaatccttagaaggatgggcttgaaccctcctggcaggaaggggcaggtaaggggcaacaggtgctacgtccccaggaccgcctttctaattagtacaaagcttccttctgggtcagagccagccctccttgtagcctgcgcattacttgacagctcagcccccattttatggatcaggctctgggaagttgaatgacttgccagggtccctgcagtgggtggcagaactaacccacaacctcctgcagccacaacttgtcatgcctccaccctgttgtccctacaggctggtgtgtgacagctctgtgctgctgtgcctcaagaagagatttcacctgggccgtatctatgtatggggagccacggggacggacagtgggcggggatccccttttctctggggacagagggctccctggcacccctggagattctccttcctcttcctccccgggctaggcggtgaaccctctctggagccctgcagagtgggactgaggggctgggctctgtttgcattccccctgctccctccacactctgatgagagcttgttttcctccccagacctttggggggcctgtcttgcttgttctgaacccccaccggtccttgcctcttttttcacctgaggtccaggcaagctaccaccccaggaaggccctcagcaccactccgtatgtgactctgccccactgaccctctgctcacctcccaggcagcccagtccctgcatgtccccttgactgaggtcccggggcctgtgagcacctctgctacacctcggagggtcccaggtccccatgtctggcaaccttctcatctccctcag

SEQ ID NO: 32019 - DNA, 1894 bp, Artificial sequence
  DNA replication origin
gacttacctggcatggcagggactgtgcccattgctggcatcatgggcatgggtgcagggaccatgcctggctggtatgcaggcatctgaatcattcctgggtacactgagggaacacgccctccctgtcagtccctgcctgggcccacatgccacctccctccagccccaggcacagagaagagcatcgggcaccggggtgctggccagggcatcgatcgccactgccagaggggtcccaggccatgcctgccatgctgccgggcccggaggccctgggtgaggaatcagcccctcactcacccatggggtagccctgctgtgtgggcccaatggcgccccctcccttcatgcggctgctcagagcccagctttgttccagatcctaaagggacaatggtcacaggtcagagtgagagccctgagaaaaatggaaggggcagcagaggccccggggggttggggcaggggcatttgggggctgtgcccgactcacgctgaggccggaggatatcactggctggaagatctggtccaggaagccgtccaggctccctgacctctggacctcccctgtggggcagggagagggttggagccatggcccggggcgtggggcttcccatgctctgccaacctccatgtgcccactccagccttacctgtgtggtccctgctgggcagcgttggggctggacctggagggggtcctgggggcagtgagggggcctgaatgccaggggcaaggggaatggcctcggctctgcaggaaacgggatccagctaagggggtggccaaggctgagggtcacccaggctggggcaagaggtagaagctgctgcgggggtcaccccatggttgggaggaggctgggtgggagggctgggcctgtggcagctcctataaacccctgagtgtggcagggtggctgtggggttccccggcaggagcaggccagggagaggggtgctgggtggcacctacgagccaagaggagtgatggggtagctgcgggggcgagctgggtcccccaggtcctcagtctggctgatcaggtccagcacaaagtcgcagccagccaagtcctgccatgcgtccctggagtgcagtgacacagaccagccccggggaggcgcctccaggcctctgggtgggaggggaccagtcagtgaggcaggcggccatccagaagggggcaaggaccacagggtgggccaagggggcagggggctgaggaagggagggtggccctggatccgcctggtccgggacccaggtttgctcagcagtgggggctgctcccctcctcacctcacggccctccacttccacaagggctccagcatgggcatttcttttctgacctgctgagttagaatctgccgtgggagctcccaagcccctcattcctaatctgcccccggctccccatcgccatctgcagtctggcccctgcccaccccggggcacctctcctcccggcccctgagactgggcttggagaaggaggagggtataggacaagggtcactttggccacactgtcccccatccccggtccccatacctgctctgcaggatccacccagccagctgctccccggtggtccaagactccacctcggccgagtagcactcctctgcaggggcatggggggcgggggcaagagtgagggacagcagagtccaccctgacaggaaggggctgctgtccccatgagagtttcaaaagcaggacagaggggagggggatcagggtcactgaggacagggcagcaggaagactggggcaggaaggggttccagggagggcaaaggggtagggctggccccacttcaggcctgggaggcctcagccagaggcagccctcaccgctgaaggtgaacacatcc

SEQ ID NO: 32020 - DNA, 1426 bp, Artificial sequence
  DNA replication origin
gccagcaatgggcacagtccctgccatgccaggtaagtctgggctgggggcaccagagtcccttctcaggagagcagccaccagctctgggactggaggagggagggtcctgctaggagtcccgagtgcacagtgggcagcgagcttcaaggctggccatggtgcccaccactctggccgcctgccgccctcacagccatggtggtgccgccgcagccaccgcttcccagcctggatgcagggcagctggccgtccagcagcagaactttatccagcagcaggcgctaatcctggtgagcgctggcagggccctggggccacctggtggaggagaggtctgtggctcggggatgagggtctgaactggctgctcctcctgcttcaggcccagcagatgacagcccaggccatgtccctgtccctggagcagcagatgcagcagcggcagcagcaggctcgggcctccgaggctgcgtcccaggcctcaccctcagccgtcacctccaagcccaggaagccccccacacccccggagaagccacagcgtgacctgggatcagagggtggctgcctgagggtgaggaggtgaccatattctcaggaagggatgtgagggtggggactgcaggggcaggggacatgggcagggtgagtaggcagacacagggaagaggctgctggcccaggactggggacccgaggggtgtggcgagtgtggcacccaggctggctgagctgccactcatttctgcttctgccaggagacctccgaggaggctgaagacaggccctatcagcccaagagcttccagcagaaacggaactatttccagaggatgggtgagggcacttggggtggcaggaccgtgcagaaacatggccagtgcccctggcccgggccagggagggtggggtgtgctctgctccccggagttggtgcggcccatccaggagcccagctgggccagtatgggtaactttgaaggccatctggacacttgcagggcagccacagatcacagtgaggacgatgaagcccccggccaaggtccacatcccccagggggaagcgcaggaggaggaggaggaggaggaggaggaggaggagcaggaggagcaagaagtggaaacaagagcaggttgtggggagctgggcagggcctggggctccggtggctctgcacgcggttaacagtctttcctgtttcctggtcagtgccgtcccctcctcctccccccatcgtgaagaagccattgaagcaaggtggggccaaagctccaaaagaggctgaggctgagccagccaaggagacagcggccaagggccatggccaagggccagcccaaggcagggggactgtggtgcgcagctcagactccaagcccaagcggccacaacccagcagggaaattggcaacatcatc

SEQ ID NO: 32021 - DNA, 935 bp, Artificial sequence
  DNA replication origin
tcctgtctgggcctgaaggagatccccttctcttggtcactgtccttcaaatcattccaaagtatttactgagcacccattgcgtgcaggggggtgtggctgtgaagccaacaggctaagtctctgcagtgcttacaatgagataacttatgtgtctgggagtgagaggtcactggagagtaagaatgcagggaaggggctgctgcagtggagaaggctttgtggcagaagccttcctacagggagggaaggagtgagcacggggtgacagagaagggcaggcaacagttcagatgtggggggaagcctcggcaccatcacgcaccgggaccagcgtggctgagcctagtgagctgcagggagaacggaggatgaggatggggagcggatggtgggtccaggccaccacaggccttgtagccatcattggcctctgatttttggagagatgggaaaccaccagaggattctggagagagactcggcttacatttcacagggtcactcggctgttgtttgagattctgggtgtctaagtttaaaagcaaaaggaagttattgcagtggtcccaggtgagggatggtgctggcagcaagggagaagcagaagattgagccagcagagtgtgctgaccaattgcatgtgggctacgggaaggaggacaactactgtcttcaaggagcaggtcttggctggtggaggaaatctgttttggacacgtgaggtctgaaatcccagacttcccagtggaggagtctggggttcaagggagaaggctggaggcaggcaccaggagtcatcaaatgggaccagctgaggacacggggagaagggcagacagagagaggttcaagggcacagcaccgctcagaggtcagggagttaaggtggagccagcagagatgagtaagagatcagagaagcaggggccggg

SEQ ID NO: 32022 - DNA, 2214 bp, Artificial sequence
  DNA replication origin
ctttccggggggcggacccggctccggcggcggcacccagctcctgccccgacaggtgcgcgccgcgcgaaggaatgcagccggtctgactcaccagcgcctccttcctacctgcgcgcccgccccataaagcgctgcccgcctcgtccccacccccccaacccccgcgcccgccctcggacagtccctgctcgcccgcgcgctgcagccccatctcctagcggcagcccaggcgcggagggagcgagtccgccccgaggtaggtccaggacgggcgcacagcagcagccgaggctggccgggagagggtgagtgcccgccccagctgggcagccgcgcaggggagctggtcgggcagggccggtggcttttgtctccccttcccctccctgaaggctgacaggccccggtccctctgtccacgctgcgcaggacaggtgcccagcctccccggggtgcgccgggggcagctggcagccaaggggcagggcagctagagaagggtggtgcccatcagacctccaggccagaggagcgccttgggtgcgcctgcgggagaagtgggcagaggccagtggctggtagccctctggggctgggcccctccagggtttgcaaagaaggtggagtagacaccagcctgagtgctgggcccagcccatcatggcgcatctaatgataaaccaacattcctgacttttatgtgaaatttcgttctttctaacattggctcctacttttaaaagccaccctgagaggcagacgccatcccggctccaggcagggcttgctctatgcggtgccacagtccatctggggctggggagtccctgattttccttttctcttggccaagcacaggcctgccttcctcccaaagtcagccccaggcgccttccttcaggaagctctacaggcctcacccaccagccccagggctgtgcccaacactgccacctcctgcagcatccgccctctttcccatggctcagcctctggggtggccctctggctgggactggggctctggggctcctggtgactcccaggagcagggacagggcttctcctctgcccccatggccttgccacaccctgaggacaaggaccaggcacaggtggcatggttgttgctgtccgaaacagagctggcagtgaaggcttggagtctccatcctgggggctgagggaaggacagcaggagggacaggaggggaggtatgtctgtctactcgaccctgatttctcagggagacagaacagccaagggcctggggtccccagacttctggccagctgcctctctggggcgaggaagggcctgggtccctgaggggaggagatgtgacagcgggagaggatagtggacaggagcaggtgtgcccagaggggtccccaggggttgggatgggggccaggggagctctgagcctgtgggtgggtgggcatggcctgtgtgtgtgtgtgtgtgtgtgtgtgtgtgtgtgtccctgtgggggggaaactgcctgtgctgcagtgtgatggcattcagggtggcagtcacacactccagggacctgctggtacataaagtcggggcagcctggtggggtccgggccgcctggagagtaggtgtcctgagcgctgggcccagcccatcgtgatacatctaatgataaacacaaattcctaacttttatgggaaatctcgttgtttctaacattggctcctacttttaaaactttctaaacaaatgaagccaaacactcttgggtgcctcgccaaccctctaactgccattttgtagcttctgcgtggaggctgccatggaggttaaaggcagggcctgcagagcagggccctgtcctggccctcccagtgctgtccgcgggatggggaagttccacagccttctgtgcctggtctctcatctgggaaacgggcagaatgaaatcatctcccgccgggctcctgtgctgagcaatctcctccgtgaagccctgggctcatatggcagtcacagtgtgggaatcagcactgcctgaggggctgtggccagggacagtgggaggaagagctgggctcagctctccaggcctgtacctgcctgtgtaatgatgcctgggaggcctgagcctgcagcctgtattgtgtagcatgtgggtgtggcggctacaccccgaggctgcaaggaagtcatttccctctaggaaccctgctgtccccaccc

SEQ ID NO: 32023 - DNA, 787 bp, Artificial sequence
  DNA replication origin
cgcccacctgtccccctcctgccctgctgtcctccactctggccctgccgtacccaggttctgccccatcttcttgaggttgtccagatcatcggacatggagttggagaagtccatgaggatgtacaggtccacggggctctccagtggctcaaacacctccagctcaaaatgccgctcctcaccgggccgcagacggacccgcaggccttggggggacatctggctgcgccgcagggtggtgtcaatctgggtctcctgcagccagtggaaggggacagctggctagagggtcactccggaggcccgatgggggcccagcccggccaaggggcactatacacccccataaatagccaggctgagcatggggagcccccaccccagtccccacaccaggcacctctgtgatttggaagctgctctccatgaccacgatgctctcccgctggcagcccgcggccagcagctccgcctgggtgttgcagcgccggtccctgaacatctggccagaaggacagggggtcactgggggcagcacccattccctggctgccccaaccctagattcatttccaccagctattcccgacccttgcctgttccacaccaacccgggccaggtcctcacctcgtctgtgcagtaggcgcagtccttatccacacggacacactccgtgcagctcttcactggggccttcttgcagcggtttgctggggggacagatgtgggcacatgaatggggaggcgctcagcaaaggcaagcactttcccacctgcaccttc

SEQ ID NO: 32024 - DNA, 997 bp, Artificial sequence
  DNA replication origin
actcgggctaagagctcatgggtgtcatcatcattactgtcactccggaagctggatggggttggtgtgggtcttgccaaggtgggggtgggggcgatggtgcatgctatgggtcagtcccttctgaacttcactaatttaagcttcagctccactttctgaggtcaattctatgatcttcattttacagatgagggaactgaggcatggagagattaagtaatttgcccaaggtcacagagctgggaccagaatccagacagctggactctacgggctgaagcctctggctagaaagctgcaggagtggggatggtgggtggagaggctggggaccctggtgggggttggggaccctgaggaggaccctgatggagggtggagaccctgtcagagaggggaccctggtgaggtggggacccaggagggggttgaggacactggggaggtggggaccgtggtggaggatggggaccctgttgggatggggaccctggggaggtggggacccaggaaggggttggggaccctggggagatgagaactcaggcggggactggggaccctggtggagggtgggggccctgttggggtggggaccctgggatgtggggccttgggaggcaccctgggtgctcaccttgcagcaggcacagtacttccagcatagcagcagtagcagggccaggagcggcaggaggaggaggagcagggggatgagccaccagaaggagcccggagggcagtctggagaggaggaggcagggggaggtggtgcctgtcctccccaccgagctctggccacacgccccctccctgcgcccggccccaccagctcacccttcttcttgtgcaccaggacagtgctgttgggcccaggggcgccgtcaccttccatggtgtagctgtaggtgcagtcgtcatcctcgtcccggaaggagcagcgcaccaccacctcctcggctgtacccacagccagtcagcagggcaccccagc

SEQ ID NO: 32025 - DNA, 1419 bp, Artificial sequence
  DNA replication origin
ggaagggccaggcagaggagggaggccagtcacgggcaggaccagagatggagccttcagccccagggctggaggagagcaggaacaggcctgaggcctgtggcttccggcacaggtgggaggaggggtcagatgtccacggtgtgatgccttggccaaccctttttctagatagagaggagcaaggggctggcccttatgaggatgcaacagaagcttccatttactgagcgctcaccaccaggcaggcactgtggcgaggtgaacagccacgcattccgtaaaagagcccttacccattttacagatggagaaaccaaggcttgcagaggttaagtgactagcccaggccacgtggccaggtcgcaattccacttaagcaggaggaaccagtgcccccgagcccccgtctgccttccccactctccccacccagacccaccttgctccttgatgatggtgatgtttaccaggcggcggccgagggtggcagtgcctgcgggcacgtcgatggcctccaccagcagctgcttctcgtcgtcatcctcaggccggataaagaggggcacccgtacgtccaccagctccacgccctcctggaactccaccatgccccgggcgtctgggtgggggttcggaggtggtcagaggtgggtcacagggccacacaggcgggaggtgcgaggcagtggcacagcggacccgccctcctaccctggtctgcagtgagggtgtagtagccgggggccaccttgaggtcgtggaaggccctctgttccacctgcttctctgtaagcttcagcagggccggcttggccgagcggggcgccatcagcactgtgtccacaatggtgtggtcttgcctgggtcgagggtggaaggttcaggcagcggaggggtcaggctggcacctgctgccctgtccctcctgcctgtcttctccccttcaggggccaggatgtaagacagcaagaagtgcagggtcttcagaggcaggcagtgctccaggcctatgccagccccataccctttaccctgcagcctcagcccagccatggcgcctccctgtcctcagcgtcctcctctgtgaaatgggcttctctgcccacctcatcaagggctggacagcaaagatgctaagggtgtgtgtgctcaggccaggctgccgcggccctagccctggttctagttctcgatagctgggtaaccttgggcaagtcacttaacccttttgagcctcagcttcctcatctgcaaaatgggaacagcagtgatctctacctcacaggcttgacgagagggttggataagatgaccacacacggaaagcccttaggacaatgcttggcccgtagcaggataagaaatgctggtcagccattcttttttttttttttcaagacggattctcactcagtc

SEQ ID NO: 32026 - DNA, 841 bp, Artificial sequence
  DNA replication origin
agaaaccccgtctctactaaaaacacaaaattagacatgcgtggtggcacatgcctgtaatcccagctactagggaggctgaggcagcagaatcgcttgaacccgagaggtggaggttgcggtgagctgagattgtgccattgcactccagcctgggcaacaagagcgaaactctgtctcaaaaaaaaaaaaaaaaaaaaaagagcgagccctcttggcctgagtccctggcagcaatggagcctcatccagcgtgtcactggcaccctgggcaggtgagactcccctgccacagggtggcaggagcaggtggacgtgtccttgggaggccagccaggggcacggccagtatccagggactcaagcagctgccatgtgctgctttgtcttgggaacccaatgcggtgcccacgcagccccccgggctgcaccctcgaccctgtggcgcagcctcacccggttgccctgcgcggtgccatcctgtgtgcggtaggagacctgggacttcccgccgtccaggacacgccggatgacagggatgcgggccacctggtccccgcggctgaccgagaactcaggctgctcaaaggacaccacgtctctggctgcaaggagcccgggcatttgtcagagtgtgctgggcccagtcccttcccacctcctgctctcctgtgaccctgcccagcccagcccagaatccaggagtccgcttggttccctctatgcattgccctctgggaagggcacaggagcgaaacggaaaatccttccagaaaaagatgaggggccgggcgcagtggcttgtgcctgtaatcccagcactttgggaggctgaggcagg

SEQ ID NO: 32027 - DNA, 877 bp, Artificial sequence
  DNA replication origin
gctgacgctcagggctccgcaggcggcaattcagcagtggctggctttgccttgcttccccagcccctgggtgccatccaggggatgcacggccgtcctgctgtgtcaggggtggtgttgggaccaggctgggacctgggtgaccctctgaagcactctctctgccccaggacctattgggcccatgaagaaagtgctggttgacaaccctaagaaccggatgctgcttattgagaaccttcgggagtcccagccctaccgctacacggtgaaggcgcgcaacggggccggctgggggcctgagcgggaggccatcatcaacctggccacccagcccaagaggcccatgtccagtgagtggtgggcagggaggtgaggggcagaccgggcaggggggcagggggcagcagccagggccctggctcactcccctgccctgcagtccccatcatccctgacatccctatcgtggacgcccagagcggggaggactacgacagcttccttatgtacagcgatgacgttctacgctctccatcgggcagccagaggcccagcgtctccgatgacactggtgagtggagacctgggacccacaagaggacagtgggggtcttgggtacagagtgagtccactgggtccagagagggcaaaggggccagcaactagaggacatggaggttaaggcagccttggacaaatgcaatggagtgcacatctgtgcatggggcacaggaaccagtgcctgggggacagacacacacagccttgtgcaagcgcacatgagttcatgcccacgggaccacgaagaaacacagcttcacaagttgaaggttcaccagctgtgccatgcacacaggacactcaggccacccc

SEQ ID NO: 32028 - DNA, 1184 bp, Artificial sequence
  DNA replication origin
gcactgggccctgcctctgagcagctgtgctcccagccgccaaggcccgggcctggctgaaactggggcccccgaggcagcgcagacgcccaccccaggccctcaggcgcgagtgaggctgggtgggcgcggatcggggggcggcgggtgagcctgtcacctccggggggcccgggtgtcgcactgcggggcaggctgccgcccttcccgcccgcgccgccgtcgtccgggggcccgtggggcgcctcggcgtcggaggagcgcccgctgctggccgacaggcgcgggatgagctccgggggcagccgccacgtgacgcgccgcaggtccagctcctcccccagcaggggctcgaacttccagccgcagccttgggaacaacgaagggccgcgttggcaccgccggggggcgccgggccgagcagggccaggcgggggaaggccgtaggctctgcgaggggagcccgtctccagctcccgggatcccggggtgtgtgttgggggcgggggtagatgcgcacggccggagcgggaaggccgcggcaggtgaaacccttgcgcggctgaagcctttccagatgagcgagtgcagcctcggcacagctggggaggagagacccccggacccgccagaaacctgggggaagtctgggctctgtcaccagctgtgaggtctcccttgctttacttaacctctccgagactcagtttcccgtttgtacaatggagagaggaatcttgcccctgcccgcctcccagggaccgttccgcaagccaccgagcgcttcgcaggtagtgttagaagcagctgagctggggttccagagtcacaccagctgcgctccacctgaacccctcaaaatggctccttaagcccaagctgagccccgtgggggccagtatgtgttcaccgggggcagcttgaggcatcggcagggacagaagaaaatacaaaagatatacgtgccccagaggtttttccactcatggtactgtgtgattggtatcccattatacagagcagaaaagtgaggcatggaaaggatgagtgattcatctgatgtcccacaggtggagccacagctgacactgagcactcaggaggcccagctaagggctccgcagcactttgtgctgggaatcaaggaggaaggacagagctgttgggggtgttcttgtctcct

SEQ ID NO: 32029 - DNA, 985 bp, Artificial sequence
  DNA replication origin
gcacatcctccagcagggtgcaggccctgcttgtgccaaaagagagtgagccccgtgagtctgccagccccaccccctcaactgctcagctggcctggcccctctcctgccccagccccagccccgccccctgggagggcagaggcagagttaggcatcagcactgatggtagggcaggtggttagcgcctgtgggcaggcgggggtcctgtggatggaatggaggggaagcagtgggcacagctggcggctgctatggtggctggatgacagatggagcaggacagctgtggagacaggatggccacccctgtactacctgggccccaggagggcgctgctggcctcccagccaggattatagagtctcgtgggcccctggaaggggggaaccctttcatctgagcccgactccgggaccccagggcccaggacagcggaagcctgctcctcccgtgttcccagatgggagggaggcctagggcaggacaaaacaagagtgagaggagcagggagtgtgcatgcatgtgtgtacgtgtgcgcatgcatgtctgtgtacatgtgtgcatgcgtgtgcacgtgtgtgcgtgcatgtgtgcatgcgtgtgtgtatgttggagaatgggcggtggggacagcagacagaagcccgaggctccaggagctggaagagaggaagggttagtgggagaggcagggttggctgaggtcactcaccgtgggaggagacggaggtgagggtggagtagtccctgggcagtgtggtcgagtgtgagtgttctgagcgggtcagtgagttgtagtcccgtgtgagggtggaggatgtgcttagcacgcggtggggcacgtgtgggctcaggtgggtgccataggcagcagcactggtcgtggtcatcctgtgcagggagttggtgctgcccgggaaggcaaagtccatccggccattcaccaggtgctctgcagggggagagcagggtcccttggt

SEQ ID NO: 32030 - DNA, 1122 bp, Artificial sequence
  DNA replication origin
gttcagattgtgtactatacaagagtggagcctgtaatcccactcatgtttaggcaacatcctgcatcctggtcatgctgctttgaatgtgcctgcccagggaagtgccacttccttgttcccccaaaggcatctcaggccagcagaggccctaggatcccagcccaaaggggccttgttaggcaaaacctagcagagaatgaccaggagagaggcccagggaggtgggtgagacctcagaagaggggaggcaaagaagtggggtggagaatggggtgggagaccctctcaggctggatgggggctttagcgctcaagggacttgggtgggttcctgacacagctgaggtaccctatgtgtcacactggggccaggccttgcagggctgcaccccgcagcctggcagccaccatgcctcaccgccgttcagcagctggtactccacactgtagccctgcagcggccgctcgcaccgcggctcctgccagctcactctgagagatgtgggccccagggcagagaacaccaggcgggtgggcgtgtcgggcacaccagcagtcaggcgagagtctggggacaggaggccgcagtcagccagagatgcaggggctagggtctcagtgggagtcacagtgctgccccctgacctccctccctcagctggcatgtctacactgaccgctggctggacaactcactcaccctgcaacaccctgtccaggctgcccagcacctaccgcacatcctccagcagggtgcaggccctgcttgtgccaaaagagagtgagccccgtgagtctgccagccccaccccctcaactgctcagctggcctggcccctctcctgccccagccccagccccgccccctgggagggcagaggcagagttaggcatcagcactgatggtagggcaggtggttagcgcctgtgggcaggcgggggtcctgtggatggaatggaggggaagcagtgggcacagctggcggctgctatggtggctggatgacagatggagcaggacagctgtggagacaggatggccacccctgtactacctgggccccaggagggcgctgctggcctcccagccaggattatagagtctcgtgggcccctgga

SEQ ID NO: 32031 - DNA, 2647 bp, Artificial sequence
  DNA replication origin
gcctttggccgcctcatggtggagagccaccgctcactcaggtgaggccctctgggcgccccgctcctgccgggcacaggccggcccaggcccaccccttcaatatcctctctgcagagacgactatgaggtgagctgcccagagctggaccagctggtggaggctgcgcttgctgtgcctggggtttatggcagccgcatgacgggcggtggcttcggtggctgcacggtgacactgctggaggcctccgctgctccccacgccatgcggcacatccaggtgggcgggcaccagggcctgggcgggcaggagcggcagcttcccggggccctgccactcacccccagcccgcctcttacaggagcactacggcgggactgccaccttctacctctctcaagcagccgatggagccaaggtgctgtgcttgtgaggcacccccaggacagcacacggtgagggtgcggggcctgcaggccagtcccacggctctgtgcccggtgccatcttccatatccgggtgctcaataaacttgtgcctccaatgtggtacctgcctcctctagaggtgggtgtatgcttgggtgtcagagaatgggggatgtcagaaccgctcccctaccctaggggagcacctctcaggccccagaagaatgggcaaggcagggcctagcagtagcaaaaccatttattaagtgcagaacaaaggctgggtccttgtgctgctcccagctctttggttacaaataggtttgggcccacagaggacggaccttgcccccttcatgcctcccaggagacacctagcccctgctctgtgcatgcgggtgggctgggcccccaggggtgcaaggatggagtagctgaggaggctccgggagaggagtcgggaggacgcctagtgggacgtggcgggggtggggcagggtgcggtcaagtttggaagaactgttggtccatgtgggtgctaagggttccgctggtggtcagtgtccggctcacaaactcctgggtcacatgccgggtgagggagccgcctgcctccaggtgctgggcccccagggtcagcccatctgtggaggaggaggcattagatgacctggcttggggtctgcccttctccctctgctagctccctgtcccaggagagccgggatcccctagccctcagtgctcacccactaggaagggctcggtggcgctggtgtgggtggtggtgatgctgctgtactcgctttgcagcgggtgctggaagagcccggcacggctgcccagctgcgggaagggtcctggggtgggcagataggccagtcagagggtggtgccagaaggaggcacggcccgaggaggggtgggggtgaaggaaaggacaggtgcctacctccatcctgggactctatggtgatgatgccctcgcgctctggcccgaagccctcagtggtcctggcctgcaccttgaacttgtagggcacgttctcgctgaggcccggcacggtcagccggctctcggggctgtctccatccacccggaatgcggtggctggccctgagcagggaagatgccttcagcgtctgcggccccctctttacccctcccctggccactcctgcccccggggtgggcagcacctcctccttgggccatctcacaggtcaccaggtagccgacgatatccccattgggcctccgtggccgctcccagctcagctgcagcgagtctgggctcagggcagtgaacaccagcgggcctggggcactgggagtgctcaaagtgaaggcggagcctgggggcagtagaggaagagcatcagcctgtgggtgggtggtgggcatgatgggggcagctctggggctgggggaggcaactcacctggcaggggacacagtgggctctgcgggtgcacctgggattcaatggtgatgacaccctcacgctctcggccccagccttcctggctctgggcccgcacgcggaacacgtaggagtggttgggcaggaggtcttccaccaccaccgaggtctgggcagggttggggatgttgagccgatgcagctcacctggggggatcaggtgggggcacacagtagtgcagtgttactcccacccctggcctgatcctcctcgtccctaagctgccatcgagacctagttatcacccacccaggactagctgtggtttgggtacaggttgggtacagtatggtatggctggttgttcagattgtgtactatacaagagtggagcctgtaatcccactcatgtttaggcaacatcctgcatcctggtcatgctgctttgaatgtgcctgcccagggaagtgccacttccttgttcccccaaaggcatctcaggccagcagaggccctaggatcccagcccaaaggggccttgttaggcaaaacctagcagagaatgaccaggagagaggcccagggaggtgggtgagacctcagaagaggggaggcaaagaagtggggtggagaatggggtgggagaccctctcaggctggatgggggctttagcgctcaagggacttgggtgggttcctgacacagctgaggtaccctatgtgtcacactggggccaggccttgcagggctgcaccccgcagcctggcagccaccatgcctcaccgccgttc

SEQ ID NO: 32032 - DNA, 2253 bp, Artificial sequence
  DNA replication origin
cctgcccgcccaggccctggtgcccgcccacctggatgtgccgcatggcgtggggagcagcggaggcctccagcagtgtcaccgtgcagccaccgaagccaccgcccgtcatgcggctgccataaaccccaggcacagcaagcgcagcctccaccagctggtccagctctgggcagctcacctcatagtcgtctctgcagagaggatattgaaggggtgggcctgggccggcctgtgcccggcaggagcggggcgcccagagggcctcacctgagtgagcggtggctctccaccatgaggcggccaaaggctctgtagtcgccacgtctcagggcggccgctgcctgggccgtgcgccgaatctcccccaccacgtgccgggcccgccggaagccctctttgctcaccaggtccctggcagctggggaggaaagaggagtcagcagccgccttctcactgcctggggccccgacgcctgtgaggaccagcaggcggtgatggcagtggccctggctggacggtgaagggtggaaggccgcgggggcagggcagcctggctctctcagacgtgggtctgaagagcccctttatcacagtgcctcctcccccgactgtaaaatgggacaccttggtccttcagggagcagtgagggttgaaacactccatgctttccaaggtgagtgctgccctcaagaggccaccacagagcaggaggagaagaagttctgctgagccacatggagcctccagggctggggctccagaagagggggcagaagcagccagggaccagcaggctgtcccatctgactggagctgaggctggaggggtacctgggtcagtaccagtactgactcagtgtactgcgcccggccaaacccgcaggtttaagggggaaggttgttagggtaggtggcatggcgggatggaggggcaagtagattcaaaggactgagaaatgaatgggtgggcgcggtggctcacacctgtaatcccagcactttgggaagctgaggcaggcagattgcctgaggtcaggagctcgagaccagcctggccaacatggcgaaaccccgtctctactaaaaatacaaaagttagccgggcatcgtggcaggcgcctgtaatcgcagctactcaggaggctgaggcaggagaattgcttgaacctgggaggcggaggttgcagtgagtggagatcatgccactgcacttcagcctgggtgacagagtgaggctccctctcaaaaaaaaagaaagaaagaaagaaagaaatgaatggaaatgagacagtgggtggtgttttaggagggaagaaaactgagcatgtcttggaggctgagggaaggagccaggcagccaggcaggggatggaaggagagggattgcgcttctagggcaggactctggaggaggcagggtgagctgctcctatgcagaaggagacctggaggaggggcaaggacaggctggggtggggaggagggaccaacttgttccagtgtgaaaaccttggccaagggcatctgcacagagcaggcagggcaggtctgagcactgctctggagaacgtgacacagttcacaaaggaaaaggacagggaggtccctcggagctgtctagtgtccctgagataggcacacctacactgccaggaaggaacaactcagtgtgggcagcacggccagccagtcaagagcatgggccctggagctaatctgtccagatggggttcagatcccagcactgcctctcactgtagattcccccatcaaaaatatgacaactatggtagcagaatgtgctttacagagttttggagggaattaaatgagctaatattgataatgaccttaaaactgtccaatagactaccttcctggccatgtgtagcaggagccttaaggatacttgtatcttttttgttttggagacaggatctcactttgaggcccaggctggagtgccatggtgcaatcacagctcactgcagtctcaacctcctgggctcaattgatcctcccaccccagcctcctaagtagctaggactacaggcacacaccaccacacctggctaatttttgtatttctttagagatggggttttgccatgttgcccaggctggtctcgaattcctgagctcaatgaatctgcccaccttggcctcctaaagtgctgggattacaggcacagacgtgagccaccgcacccagcctacaatacttgtgtctcttgactctgtaatcct

SEQ ID NO: 32033 - DNA, 2419 bp, Artificial sequence
  DNA replication origin
agcttattattttctactttgtacttttctacattttccacaatggaaacatgatttttctgattagataagaccattttaggatttcaagcagccctgctgagattggaaccctgggtgcgcagtgtttgaagggactggggagagcatggcagaaggccctggagatcggggtcccaggcagggtcaaggccacactgaggcgccagcagggagcacagccgcctccaggatagagcaccctggcagttctcaccctctagctcttccagttgtacctcccggaggctttccttgcccagcgcccgggccacttcttcacattggcgccgccgcacagggtactcgctggaggccagggagtggcggacattagagttggtgatgagcacggccagcttggggtccgagagtggcaccaggctggtctccaaggacctggggtggagttacaatgggggagatgacgaggccaagcgtgtgcttgctgcgccaggcagtgggcacactcccacccaggagctgctgagtgcagggcgggaggggacgaggggagcgagcccaacctgcagtcaatgagcagcgcgtggcctttctgtcccataagtgagatgaactggtccatgatgccacagggcatccctgcgaagctgtgctcggcctgctgacacacctgggcgcgggcagctattgtgcccgagtctgcagtacagggtgaggtggggaggctagggctggtggaagcagcagtggcttcaatgacactccagggagagtccctgccaccccctccataaggcatagtagaagctgggaccacctggagacctcagggaaggagggctgggtcagggctggggcctagctggtacctggacagagctgctggaggaaggtgtacgtggccacttccaaggatgctgagctggacaggccaccccccaggggcactgagctgaccaccactgcactgaagccagggaggggggcagctgcaggggaaagaacaggtgatggtaagaggggctgcctgggaggatggcacaggaagggcaggtgtcctggcgggaagggcagcaacggcctagcagctgtttctagggtgtgtgtctcaattgtcagaagccaccaacctgctgggccaagggacccactgccctccattttcccaccctctgaggttgctgggacacttctaattgtcctcctggtttagggctctggagggaaaaaaggctggggttcaaatcctggctcctccaatcaggtcacgggaaacccagggcaagttcccgaccttctgggggcatcagtttcctcatctgtacaatgggatgctccactctacaagccttccccacagtgtatcagacaaatgaatgggctctgtggctgtgaggtggcactcctagtatcagtgaggacttggctcaggcctgggccccatacctgggtagtactgaatcactcccttgacatagttggcccaccgaggagtcccaggctccagcgagcgctgggctgtgggcagtggaaactgcagccgctggggctcatcggcaccctcagaggtggtgaggagagacaccagcccatccttgcgggggctgcccaccagcaccgtcatgagctccagagcctggcaggagagacaagcagtacgtgaggcttccgccagctggagtaagcctctccaatgacactgcctccagccgaggttctgatgcctccacagtcatcaggttctgaacctccaggttcagcgtcgcagggaagatcctgagggccagctgaccttgggggcttgagccctgcccccttaggtcttcaggggcggggcggctgcagctggagcacagacctggactctgccctgagctgtggggcaagggggagagctagcccaaagggaaaacagatcactggagctccaaagcctttacattttggggtggctctggacatcctgtacctgtgcactccccaagctgcagatggggcggaaagcgccccccgctgaaagctgggagtcctcactcccaagtcgcagccccgccaagaacctgctgtgtgacctccagcagttcactgggcctctctaggcctcagtttcctcctctgtaaattgaacgggctgggccagaaggctacgttcgcccaggtctgcggttggggccccacggtggccggaggcgcggagtgtccccttctgcgtggcacacagggcctcacagtttaaggggaacatgctcccaggttgaaggcgaggagccccagcccccagagggcgggcttgagccaagaggcggccgcgcaccctctcccggccacttcctcgcttcctcccttccaacgtggggaacagcctgtcccggggactcttccgtgcaccggtgctccaggcgcagctgcccgcccc

SEQ ID NO: 32034 - DNA, 1868 bp, Artificial sequence
  DNA replication origin
cggccgcgcaccctctcccggccacttcctcgcttcctcccttccaacgtggggaacagcctgtcccggggactcttccgtgcaccggtgctccaggcgcagctgcccgccccacatctcccgcgggaagaactcgcccccagcgtccccgaggcccgccctcctcggcggccgggacaggcggcggcgggctaggggctccccgtgcagcccctcaccataggcagcaccaggccctggttgtagtccgtgtgttccccgatgaggttgacgcggcccggcgctgacacggccagctcgggctcggccccgaactcctcccggaaggctcgccgggcctcggccagcagctccgcgacctggggctgtctcaaagcagccatgacgcgcgcctgcagctctgcacagctgctccggcacagccccgtcggcgcgggatgctcgggcggggccccgcgcgggggtgcgcacattcccgccagccccgccccgcgcccggacgccccgcccccagacctcagccggttccgcccccacccgcaactcccgtgggaatccagctgctgggtggtgggtggcaggggctaatggtgccgggtgggatacagcgcccccgatggtgtccttccctctggacttcgggaagaaccaatgagcactcactagagtgagaatagccctgagtggcacttggcatgaccaggatttctgagctgcccttccctggcgctggtgactttctatgtgcctcaccacccaccaccacccacacagccagagcaatggagctggcacccggttgacctgggattcccaaagggatcccctaggtccccagggccagcagctgtgagaggtcatcagcctctgatcaccggtctccaagagggtgacctgacactcactgtaagtagagataaagacagacaagtttgggccgggcgcagtggctcacgcctgtaatcccagcactttgggaggccgaggtgtgcagatcacctgaggtcgggagttggagaccagcctgaccaacatggagaaaccccatctctactaaaaaatacaaaattagctgggcatggtggctcatgcctgtaatcccagctactcgggaggctgaggcaggagaatcacttgaacctgggaggcggaggtttcggtgagctgagatcacaccattgcactccagcctgggcaacaagagcaaaactctgtctcaaaaaaaaaaaagacaagtttggtggtgaccagagagtcaattttacaagctccttttctaggtaatacgcaacagctcctagcaatggagaattggactagggtggcggtggccagcagtgggcccagcccctcccttaaggacctgccacagctgtccaggtaggttgtgctgttggccccagcaggcactacttcagcccagaagcccttgtctcagaggcgtggccttgttcccagtcaggcactcttctcttgctatcctgcatcctaaacctgctggccggccccaactgctgccttgatacctgtccacagctgcccaccctacatggaaccttgaaactgaaagactgaaatgtaagcagcttgcttggggttagggtgggagtagtgtggggagttatggccagggatttagcttggggcctgctcaggggtgtgcccaaagagtggggaactgcattccaagggcaattctgaaaactcttagaagaaaacataggggtacagttttgtgacattggttaggaaatgtttatttggtttctgtttttgagacggagtttcgctctcgttgtccaagctggagtgcaatggcgtgatctcagcttactgcaacctctgcctcccgggttcaagcgattctc

SEQ ID NO: 32035 - DNA, 1402 bp, Artificial sequence
  DNA replication origin
tatggtctgaggaacagttaggcctcgaaggcctggcctagggagagtgcactctgcatcccgagctcccgccttccccactcggcggccgggaccgagtttcccgccccacagcccgaccagaggttggtggcagttggaggcagttgggaccggccccagcaggttggaaccggtctgggccgggccggaggaggaagggggggaggaagaggccgcctcgcgctctccctgcgcgcgtgactcacgctggccgctgacgtcaggcgtgcgcgcgcggcgggggggggggggctctacgtacgtgtagtgctgcggtttctcgggctgtgcctgcagcacctgagcggtagcggccgggggcgccgaggaagctgcggagccgccgggcccggggcccttcgacatggtcttgtcttcctgcctcttcgccgctccccttttattattcagtctgcgcggtccgcgccgaggacccagtgcgcctgcgccgcgccacgagaacgtgaagaccccccacacggcagcaggggttgctgggagttgtggttctatgtccggctggaattttaccgtcggcagagggttgctggcaaagcacaggaccacaatacccagggatccttgctgctagtgtcccggatgctgagggcctgcgacggcttctgggaattgcagtccggtcgcatttctccttcttaccagcgcgttttcagtttcatagggaagcctttccatgaaactggagcgcctggaggagaaggggcccagagctagggaggccctagcgatttctgcgaaagagttccaagtataatttcactgccaacagtgtcataactactttgcctttatacttagtacagctaggttcggttctaatgccagctcagagcagtgctccaagcagggcttaagaatctgtgttgtcggttcttagttctgggccctgtgctgcaggcacctgcaatccgccagcaaccccttcatccctgcggcgggtctaacctaagaggcattgagaaagctttgctaaggaggaggtacaccgcacgctacagttcccgcgcctttgccgaggcgcttcatttacctttgccaaactcgacacctggaactccacgacttgtgtgctttctcagcctgacacctggcctgaccaacttgtttccagtacattaagggccaaggacgaatttaatctccgcctagaatagtctctgaggtacactgacaagttgccagtgttgagaagcatcacagggtccagaggaaaggcctgggtttgagtagggcgtgcccgtatttatccactctagttttcttgtctggacgtcagcctttttacttgggacattatctttcccctctctgcttcccaccagtcaagcaaagttcttca

SEQ ID NO: 32036 - DNA, 1159 bp, Artificial sequence
  DNA replication origin
tgccagcaaccctctgccgacggtaaaattccagccggacatagaaccacaactcccagcaacccctgctgccgtgtggggggtcttcacgttctcgtggcgcggcgcaggcgcactgggtcctcggcgcggaccgcgcagactgaataataaaaggggagcggcgaagaggcaggaagacaagaccatgtcgaagggccccgggcccggcggctccgcagcttcctcggcgcccccggccgctaccgctcaggtgctgcaggcacagcccgagaaaccgcagcactacacgtacgtagagcccccccccccccgccgcgcgcgcacgcctgacgtcagcggccagcgtgagtcacgcgcgcagggagagcgcgaggcggcctcttcctcccccccttcctcctccggcccggcccagaccggttccaacctgctggggccggtcccaactgcctccaactgccaccaacctctggtcgggctgtggggcgggaaactcggtcccggccgccgagtggggaaggcgggagctcgggatgcagagtgcactctccctaggccaggccttcgaggcctaactgttcctcagaccataaaaccacagtagtaggctcctttggggcagtgagaagtccaagacacaaccaagaggagttccgtggggtccagccccagaacccacctatgaatgatgattaacgtgaagtcctgtcaggagattccgtgcagtttgcgcaggaagccttttgtgtccctaaggctcgtaggttgtccacgagggccacacttgcttgaattcacagtcgacgtagataaacatgcaaagatggaaacgtgtccgtgcgtgcccatgaccgtttccctcgcgggctgtgcggagcctgagtctgggagcccgaaggtgatgggttccaagtatgtctgcaggctcagcagaaatgtagcattagagggagccccaaatactgacactacaggagtccagcaggatgggaaaacctcttcctggaagtcttgcatctgtgtgcttttaggtcgctgtcttcatttccttcaagccacgttaagcattccctagagttaggtgatgtgggagaaagatgaataaggggcggtttctcctgttaagcaaaatgttgctttccattttccctgatgc

SEQ ID NO: 32037 - DNA, 1145 bp, Artificial sequence
  DNA replication origin
gcacgaaggggtcagggttggaccttggcccaggtgctgctggagccaggtaggctgaagacgggatgggatggggtgactgtgcggtcggacaaggtacctgctcggccagggtgcggacgccagtgcggatctcatggcccagcccggccagcgcgctctgcagctgggcatgcagcgtgttctgcagctgcccctgctccagcacggcccctacccgctgctccagggcctcccatgccagctgggcgggcaacttgccgatcaccagccgcagctgctccatgtcattcaccaccacacacagctgggacagagatgcagagcttcctgaactgtgcccaggctggtccccacacccagctagactcccagccccagctctggccttaccatgttggctgcctggccttggtccttctggcctgaagagagctcgcgggcccgggcctttataaggctgcagtacaccagggccaggcgacaggtgtcctagggtggggttggacagagggaactgatccatgggtggggcatccaggaagggcaggtgggagggcatgggaatttcagcgacttgggggatttagaatacaggccttgggaggctgcctgggtgagagcacgggagaaacggtgggtggtagtgtggctgttctagaaagagggggaaggacacgtggaagatgccgcacctccacaaacttgacggtaatcatgaaggcctcctctgggtctggccagtccagctgccgggcagtgtggctgatctgggcaaagcaggtggatagatccaccgctgatgtgctgtgcttggtcagttcacccaggggcaccagctgggggaagaaaggaggactcaggatactgccaaatccacccccttccctccttccttcattcatagagcagctaccatcaccaggcacagagctgggcagggagcttcacaagagacaagcacggctccgcccagacccccaggctgcaggatctcaggcaaagtgaagccacagccccaaggatatccagaggcagcgttttgcacaaaactggactcaagtgcacccaaaagggatgttcagagcgggttactggcttttactacgctttggaggtccaggcagaacccaagcctcaccccc

SEQ ID NO: 32038 - DNA, 992 bp, Artificial sequence
  DNA replication origin
ggagtggggaagacgaggcagccagggagtcggctgggtccctgggagaggccctcatcacccccgcccggggctgagcctcctccgggggagagggaaggggaccagcagcatggggggccagcgctacagggcttcttggaagtgggtgctcccgccaagagtcctgggccaggctgtgatgggagaggaaggagccaggaagaagccccttggggaccccaccccatgctcaccactgacatctttgcccagaatgcccttggcctgtttcactgttgccttcagacaaaatattggcttctggagggacaggagggatggcctgagtccctgagggggctgggcttcccaggcccctccttgcccagggggaccctggccccaggttacctcaagctccctgacccgctgcagtgtctgctggtgctcctcgggctccacgtggaaggcctggtggggaggcaggcgggtgggtggctgggggcaccagacagggcagctgcaggaaggggggtggggtgggagccgggctcacctcctgcaggtatcgcagcagctcagaggcctccgtcacatggttgggctcaggatgacccaggcggtgcaagacagtgtagagtgcgtcctcgtagagcagggcccgctaagacacacggggtcaccttggggaccccaccagccacccctggcaccaacacctctcgccatgggcaggacaagggcggcttgtgcagcggagggagttgagacccaggagtcccctccccaccgcaagttgcttgctgccatcagcgtcggccggcaggaggacacacagccgccctccccacctctctgcaccccagcactctgactcttacctgctcgggggagaagtggtgggatggaggctggatctgcagagcaaggtggaaaggcagtgtcccgggaggcccagagcaggctcagatggacaggaatggctcctctgaggcctgatccaggccaag

SEQ ID NO: 32039 - DNA, 774 bp, Artificial sequence
  DNA replication origin
acagccctgctgggcccctggggtagtccaggggtcatccatcatctgcggctctcagcagtctctggccattctgaggctctctgtgcgacatcggggaggagagggctggtcccgaagggctgccagcacccaagggccctcacctgcaggagtggaggggacatcggggccgctgaccggaggttccatgggcccagggtagggcggtggtgggggctgcacgtatcccatggccccgtccatcatggggggtcctggatagaactctgctcggtgagagagtaacaaggacatggtgagcacccggctgcggccccctcccgggtgaggggggcctctccagctccttcgttggtcctgaagcagctcaaggaataaagtctccctggcctggggggagcctgggtaggtgggctcatgaggggagtgggggcagcaaaggacacactcaccaggtgggggcggtggataggggtagccaggagggcaggggtacattccattggcgactggcgggggatagacataggccccgctgggcatgtaagagtagccataggctccactggggacttcacctctggaggctacgagtacaaggggaaagagaaatgagcgtggcctgccttggggcggggagagggcagccccgctgcctgcagatgggagctactgggtctcaggaatgtgccccgcagacatcctctgtccatcccactccaccctccacccatactcggggggccaccttggtcagggatgagagaggac

SEQ ID NO: 32040 - DNA, 704 bp, Artificial sequence
  DNA replication origin
cttcgttggtcctgaagcagctcaaggaataaagtctccctggcctggggggagcctgggtaggtgggctcatgaggggagtgggggcagcaaaggacacactcaccaggtgggggcggtggataggggtagccaggagggcaggggtacattccattggcgactggcgggggatagacataggccccgctgggcatgtaagagtagccataggctccactggggacttcacctctggaggctacgagtacaaggggaaagagaaatgagcgtggcctgccttggggcggggagagggcagccccgctgcctgcagatgggagctactgggtctcaggaatgtgccccgcagacatcctctgtccatcccactccaccctccacccatactcggggggccaccttggtcagggatgagagaggacgggagaggtcagagccaggggaaggcaagggaggtcaagggcaaggctggagggtggacagaggccgggagggaggctcagggctggggtaggagtgagctggcggaggatgtctgctggcccatccctcggtcattttcaatggctgcggaaccgcagtcgaatggttggtttagtgtttgttttatgaggccatagtaaagtgtccttgagtccaaacagctttgtcaaaacgtcatccacctgccccaggcagggaaacgcagtctctgaggtaca

SEQ ID NO: 32041 - DNA, 1140 bp, Artificial sequence
  DNA replication origin
tgtgaggtgtctctgattacatgataaaaaggttcacacggttctgtttgtcttctgcctccccccatatatcacaactttctctgactggggaagggtaagtgggaaacaactggtataagcaaaggaaaatggctgggcgcggtggctcactcctgtaatcccaatactttgggaggccgaggagggtggatcacgaggtcaggagttcgagaccagcctgcccaacatggtgaaaccctatgtctactaaaaatacaaaaaattagctgggtgtagtggcgggtgcctgtaatgccaactactggggaggctgaggcaggataatcgcttgaacccaggaggcggaggttgcagtgagctgagatcgtgccactgcactccagcctgggcgacagagcaagcctccatctaaaaaaaaaaaaaaaaaaaaaaaaaaaagagaagagaagtactgctcagagaaaagaaggaattaccagcaacaggctgggcccatgaaactctgagcgggtaagatagagggaaagtgagcatgctgggtcactctaggcattttcctctgactcatcaaacattcccaagtcacagggcagctggatgctggccttagctgggtacagggctctgactccacgatgtctcctttggggactcaggtgcctcctaagctccttctgccttcaagaggcaattcagggtcggcatagttcaacccagggctggctggtctgattttcaatacccaaggaacaaaaggagacagaggccatttaaggcttctcttggcagagactggaggagagacaggatgcaatgagcaaggggtggggaggatggagtggaaagaaccttgaattaggagagctctgccttccgaggtgacccaaaccaacaggcattcaagagagaggcaagggaatgactacggacccacacagtgccaggaactgttagacacctgacaaacgtcatctgtttaatttcacctctgggacctcagttttttaccgggaacctgaacagttctggaacatactggaagcctgtatgctggtggttaatcctattaactttggagtcaagactcctttcctggaattaccacctctgttacttacacagttgcgatctcgggca

SEQ ID NO: 32042 - DNA, 703 bp, Artificial sequence
  DNA replication origin
agttccagaatgcatccttcctccagcatagggacaggccgaggctgcgggggcgttgcctgctgggaattgtagtcttcatcttgtttgttgcgcaggaggaactggaaggagggagtaaactattaccacgtgacgttcgggtcaggtgtttgggccagcctccgcactcgagctttgattggctgactctaataagaagacgccactaggggcggggcgaagaggggcgcaagctcattgcgttttgagtctcgggacccctgttggagagactatggcgctcaacaagaatcactcggagggcggcggagtgatcgtcaataacaccgagaggtgaaaacactgcggaaggatcctggaggaccaaagttcgggtgtcgaggaagtgggcggtgggtggtgggtggtggggaataagcccctgaagagggagcactgatggagtgaggttggtggggaacggctgggggcggggttggaggaaggtgggtgggccgtgggggagagcccgggaggttgtgatcagctgggaggcgggggtgggacgtctgcatggggacctggtatggggcccccggtggggcctaggggtgattcttgaaccccttcccagacttgtgatttcagtagctgggaggagccccaaacaaaaataattgtcacttattggatgtctacaacgttactacgtgtcaggctc

SEQ ID NO: 32043 - DNA, 1004 bp, Artificial sequence
  DNA replication origin
tgtaaatcctagttatcaggatgccggtttcgcgccgtgcccagtcccactcagccttcagtcttccggccgggaccccgctgggcgctaaggggggagcggcgccaccgcgaggccggagagggggctgcgaggggcgcccggccggcctgcgaacgtggtgggagccaggcggggcacacggcctccccttcccatgagggactctccccgccccccgggctcagcgctgggagtggtgagatggatggcggggtgatccgacgccgccagcccaccgcgtccccaagagccggggcctccggctcagctaaacgccccagagtcacgcatgcgccccataaacgtctgctgagtgaacgaaagctccccatccacaaggggacagctcggcgctcccacgccatgtccaggtcgcattcgaccagcaggacttcccttaacgcgctgccggagtccccaagatcgcgcccctgccaggagcggaactgtttatttccgtccggctgaagaggcggggtggggatggcacaagccgattggttacgcaaaatgtggaaccaattcaggcctatgatccaggagactacaagttccagaatgcatccttcctccagcatagggacaggccgaggctgcgggggcgttgcctgctgggaattgtagtcttcatcttgtttgttgcgcaggaggaactggaaggagggagtaaactattaccacgtgacgttcgggtcaggtgtttgggccagcctccgcactcgagctttgattggctgactctaataagaagacgccactaggggcggggcgaagaggggcgcaagctcattgcgttttgagtctcgggacccctgttggagagactatggcgctcaacaagaatcactcggagggcggcggagtgatcgtcaataacaccgagaggtgaaaacactgcggaaggatcctggaggaccaaagttcgggtgtcgaggaagtgggcggtgggtggtgggtggtgg

SEQ ID NO: 32044 - DNA, 1508 bp, Artificial sequence
  DNA replication origin
tgtccacaggctgagcagtccaaagtcctgagcgccgtggaggaccgcatggacgagctgggtgctggcattgcacagtccaggcgcacagtggccctcatcaaggtcaaacacccctccctcagcatggaacaatccactccaaacaaaccatgcccatacctactgagcacaagtgtcccctgacctggcccagatccaggacaggctcagtctggcccctctgtcccctcaagagggccggtgggaagccggggtcagggaaggaggggggtacagtccgggacggttctttgccctcattgccccctctactgtcgtcctgtgcagagtgcagccgtagcagagcgggagagggtgagccggctgtttgcagatgctgcggccgccctgcagggcttccagacccaggtgctgggcttcatcgaggagggggaagctgccatgctaggccgctcccagggtgacctgcggcgacaggaggaacagcgcagccgcctgagccgagcccgccagaatctcagccaggtccctgaagctgactcagtcagcttcctgcaggtgaaggccgctctgggggccacggaaggaacagaagctgggacaggtggggtggagggaggaggaggcagtgggtgcatgacttcctggcagagctgcctccacccccagcaaggaggagccatggccagcagcactttaatgggcatttgtctggcacaggagctgctggcactaaggctggccctggaggatgggtgtggccctgggcctggacccccgagggagctcagcttcaccaaatcatcccaagctgtccgtgcagtgagagacatgctggccgtggcctgcgtcaaccagtgggagcagctgagggggccgggtggcaacgaggatgggccacagaagctggactcggaaggtgggcaccgccccacgcccccccgatgactcaccctctgccagcctctcgcacaggcccccaggcctggcgcccatccagaagtggaggaggaaaattgtgcctggcacagggaggagcccaaatcctgccagtgactagagctgccaccctgtggggatcaatcagccccttggacctggggtagagggggcttctcctagcccaccctctagctccagagggctgtggcccgggaagcacatggggcaagaggcagaacacaggcaacgggcatgtgtgtgagcacagcgtgccacatctgggtggtgcttgctccctggtggctctggactctgggaggaagtgaagggggtagggattgtagtcacaggttcagaggggggcagtctgggggcgttctcaccactgtctcctcttctacagctgatgctgagccccaagacctcgagagtacgaacctcttggagagtgaagctcccagggactatttcctcaagtgtaagtggacgcccgtgccccctccactcacactgggccctcccagggctgctgggctggtcccagcagggccctggcacacaag

SEQ ID NO: 32045 - DNA, 1876 bp, Artificial sequence
  DNA replication origin
ctcccactggttgacgcaggccacggccagcatgtctctcactgcacggacagcttgggatgatttggtgaagctgagctccctcgggggtccaggcccagggccacacccatcctccagggccagccttagtgccagcagctcctgtgccagacaaatgcccattaaagtgctgctggccatggctcctccttgctgggggtggaggcagctctgccaggaagtcatgcacccactgcctcctcctccctccaccccacctgtcccagcttctgttccttccgtggcccccagagcggccttcacctgcaggaagctgactgagtcagcttcagggacctggctgagattctggcgggctcggctcaggcggctgcgctgttcctcctgtcgccgcaggtcaccctgggagcggcctagcatggcagcttccccctcctcgatgaagcccagcacctgggtctggaagccctgcagggcggccgcagcatctgcaaacagccggctcaccctctcccgctctgctacggctgcactctgcacaggacgacagtagagggggcaatgagggcaaagaaccgtcccggactgtacccccctccttccctgaccccggcttcccaccggccctcttgaggggacagaggggccagactgagcctgtcctggatctgggccaggtcaggggacacttgtgctcagtaggtatgggcatggtttgtttggagtggattgttccatgctgagggaggggtgtttgaccttgatgagggccactgtgcgcctggactgtgcaatgccagcacccagctcgtccatgcggtcctccacggcgctcaggactttggactgctcagcctgtggacaacaccctccatgagtgtgaggtctggcagaggccacagccctacactcgggtcccaggccttgccaggggagagaagggggtgactggggagtggtatctgtgcatcaggtgggactggagtggccacgatgtcccataatatgccagaggtgcctgcagcccaggctggtgcctttcctgaacgcctggggggcgtgcaggctgactgggtgtctgcctcgggtctctgacaggaggcctagtacagggccgtccgctggtctcagtgttgctcagatgaatttgagaacttcctccggcggggaagaggcagagagtaagccagttaggttgggaggtgggcggcggaggggtgactgcacaaggaggcattaagctgtcctgaggatcactgttcccaaagagcctgcatccacagtccaggcctggaaaaaaggggattccgggcaaatcccctaggtcttatgagtcactgctccaggcaggagaaacggaaaatcccttggccagaggcgccaagaccgggctggaggccaaaggaaactgggggcgggaggtagaggccgcggctcacatgctcccaccactggcccccggaacagctggacagagaatctgtgtgcccggtcgccctctgccgccctcctgccgcctgccacacccatcgaaagctgctgcctcagcccagggcaaatctgagctgagaccggcgtgaccctccgggcgggagcagcagccacgctaccggaaccccgcgggcctaacccggctccctcccgcctacacccccatagaccccggcccggcttcaggtcccctgcccgctcttcgcgtccttgtcctgttctcacgtccctccttcctcccttcccatctccatcaccgccagcagatgaccttgtcaaggctggaagggaccgcaaagatcctcaggttagaggaggagattaagacccaacccgggaagactggggggtccaaggtcctcggcccgctcgcgcgcggtcg

SEQ ID NO: 32046 - DNA, 1229 bp, Artificial sequence
  DNA replication origin
caaaccaggggacgggcctgtggcacctgggaccctggccccagccctgccgcgcgctgaccccgccccgggcagctgctggagctcttctgccagaccaagggctgttgtgtttgcagcttgtgcaccatgagtgagggtcacctcctcaagtgggtgctgccgccaggagcaggagggggccggaccccccgcagcctggccaccaccgggtgcagtggctcacgcctgtaatcccagcactttgggaggcggaggccggtggatcacgaggtcaggagattgagaccatcctggctaacatggtgaaaccctgtctctactaaaaatacaaaaaattagccaggcctggtggcgggcgcctgtagtcccagctcctctggtggctgaggctggagaatggcgtgaacccgggaggcggagcttgctgtgagctccaaagctcaggagcggggagctggaagtcgagagctgggaatcattagcgctaggaggaagagaaggttccaagctggagctcccagggagatggggaaggtcgggggaatggcagccctgtgtggcacctggagacaggggtgccaggaagagaacgggcaggatgcccatgctgatcagaggctcagtacgaggacagaaatgaccttcagcatcggtactgtggaggtggtccgtgcccttgacaaaacccatttcagcagcgaagacaggatgtggaatcattcggggacagaggaggcctggggctaaggcgtggatggaggatggcgcagggacgctggatgggacaggaagggaaggggtggccaggaggcctgatgggcagggagggatgggagagtgcacggctgggggtcggtgaggtgggaggactgagacagaggtggctggaacaggagagggcacgaaggcagtggtcagagaaggaagaatcgatgcctagaatggagattttagagctggtgacagggccagggtgagttcacaggagcggctgagatgaggtgaaggaaaagggctccagagtgttgcgggacattccttgtagctgctgaagccgccgaggaggatgagacgagatgtactgctcatgggcgggtgcagaagactgagctaggcacggaagtttgagttggaggccggtagatgagggccatgtggaggaagggagcgacaggggcagccagtagcaccaggggagccaggattttgcaagagagagggaaagg

SEQ ID NO: 32047 - DNA, 1672 bp, Artificial sequence
  DNA replication origin
gtgcgcgccgggcccgcccgggatcccggccccgatcccggccccggccccgaccctgccgcgcgctgcccccgccacgggcggccgctggagctcttctgccggaccgagggccgctgtgtgtgcagcgtgtgcaccgtgcgcgagtgtcgcctccacgagcgggcgctgctggatgccgagcgcctcaagcgcgaggtgacgcatccgccgggagcgggaggggtccggacccgccgcagcctggccaccgccgggtgactcctgcgggccgcgccctgctctctcgggcacccggcgggggcggggagcctcatctgtaaggggcttctcccaacctgggagctgattataaaagtcgtgggtctgccaggcgcagtggctcacgactgtaatcccagcactttgggaggccgaggcgggcggatcacgaggtcaggagatcgagaccatcctggctaacacggtgaaacccggtctctactaaaaatacaaaaagttagccgggcgtggtggcgggcgcctgtagtcccatctactcgggaggctgaggcaggagaatggcgtgaacccgggaagtggagcttgcagtaagccgagatcgtgccactgcactccagtctgggcgacagagcgagactccgtctcagaaaataaacaaacaaaaaatcgtgggtctgtgcatcagactgggatatgcagcccggccagtgacacagggtgggtctcagaagctgctcggtgccctctggatgaacaaagcctgggcgtgaggcagcagctccctgctccgtgcccaagcgctagagaaccgtcgtgtgtctcctgcgctccgagagcctcctttcattcgctgtgcggggttgtggagggcgagggggctatgggggctgttggtaaatggatcagacgagctccctgcccttaagagacttagaatccacttaagaagtcagtgttccagtaaggcgtgaatgtattattacaaaatgcagtgaggaaagcacatggcatgtgatagaggggttggggtgaccctgctaaacgggccaggaggaggaaggggaggccgccttcaggctggcatgtgaggattgaggaagcgcaagccaggagaaagacctggggaagagcattctaggcagaggaatcagcctggtcccgtctctgggatgggaaagaactgggcacgcggggtccctagtggcagatttgtgccactgagatctgtgggccaggccctgggggtcagcaggggcaggatcgggcagggtcctgggggagtctggctcttactgtagggtcatgggggccattataggcttggaagcaggttggcacatgatcagatttgggcttcatggagactgatcacctggctgggggctgaagggggcaggatgtaagacccgaatcgggtaggagtgcagggaggcaaagaaccagctggggatcagggaagggagaccaagatggaggaggagatgagaaacgctgaggggaagtggtaccttgtggaggcgaaagcaggccagaggggacacgggggacagcagagagggcggcaagggagacacctgggtttctgtcttgagcacgcaggtggctggggtgctatgtcctgagaggcgtaggtggagggcagagtttggccttggacatatagaggtca

SEQ ID NO: 32048 - DNA, 1623 bp, Artificial sequence
  DNA replication origin
ccggtacagggacagtcatgagcccacctatggcatctactaaggagccagagtgtgcgcatttcagagcatgggattgatcggcagcaagagtaaagacacagctccagaggcccacactgtggggtctgggccctgccttaggcagcccccctctttggccccctcccgtcaggcccagggcttggagtgaaagtgactctcaggtggtggggtggggaatgtgaataaacatgatttcttgccgggcttggtggctcacacctgtaattccaacactgggaggctgagaagggagggtcgcttgagcccaggagttcaagaccagctggcaatataatgagaccctgcctgtattttttaaaaaaagggatttctgccatagctggcctgggtcggtgctccagggccagaggaccccgatggagcttcatgggtgggaaacgggctgcctcccaccccactaagtgcgtcctcacctccgtcttctgagggtgtcaggggccctgggatccgaagcaaaagcaggcagtgggccaaaaacaggtgtggcccagggaagggagacatcccaatccagcaggttcctgaaacccagctccccgaaaaagtggagcagagcagctgggctcaggaaggagcatttattgagcactggctctgtgcctcaggggggtcccaccggcccctggagagagagtgcctgcccgagcactgaccctctgcacaggctccagcccccaccccatgcttgggaggagaagccacattaggtaggcaacagcgtgtctcaagagacctgctcagggtcagaaaacccatggagtcttgcggctggatggttaggtgttttgtttctcccttaccaaaagcagaagtctggctaactagtaggtggagggtagatccgtgcactttgtccagaaagaaacttcgtctatggccgcacagaggacgcagtgcttgctgcagcagtgagagctcgtgccgcctcaacatcagcccagcttggttagaaaggccgtactctcctggggttccccctggcctgatacacactgtcaggtaggtgggcgctaggccccagacccgccttgcctgctcagcttcaggggaaatgctggagtgcctgtaaatactgaggctgcagatcagcttggaccccaggcaaggaactctccccagcggagggcagcaggaagaggggatgctgattgcagatgaaagctggtttgtgtattcattcagggccatttgaaaaataccagttaactggtccctgtctcttggtgaccagacatttccatctcgctgtttactttaaaagaaccaaaattacgtgtagcccagagaagggagacaccccagtctggcaagtgtccgaaacccagctccaggaaaaagtgcagcagtgctcgggtctgcagggagcccgccagcccgtttcatcgccaagccccgggggattgttgggggtgggggtctatgctgttaggcgactggcagatgagtccagaagaggttccgcgcggcccgtggtcagaagcccggagtcctggcggggttttcgagcctctggtctccaggacctgggctgaaggcccaggggggtgggatggaccc

SEQ ID NO: 32049 - DNA, 1206 bp, Artificial sequence
  DNA replication origin
tgacgggagggggccaaagaggggggctgcctaaggcagggcccagaccccacagtgtgggcctctggagctgtgtctttactcttgctgccgatcaatcccatgctctgaaatgcgcacactctggctccttagtagatgccataggtgggctcatgactgtccctgtaccggtccaggtagcgcaggggctgccggtgggggaagcgcttctgcttggggtggtaagggggcggccgcacgaactcaaacaccggctcccgcatgtctgcaagaagagtgaggggtacggggtggtctgctggcctgcgccccctcaggctgaggcctgcccaccagggacctgccgcagccttcccctaacaaagcttctccctggcagggcaggcgaggcctgggagctcaggcccacccagtgccccagccccatggcccttacccagaagctggtggaagatgtaggtgacggagtcatcccagcggcactggaagaaggacaagccggctggagtcatggtttcttggtgtttcttgtagaaatcaaaagtgcggaaggtccgctgggccagctgatagctatgagaagatagagagcgtatgagagtgtggagtggggcaccagagcccctcaccccgccaccccaacaggtaaccctgagaggcccctgggagtctgctagcaccctatcctgctcttctgccagtctcaaggctgaggtcaagagagaactgagcaagagtgaccgttccaggggagctggcctgaggccgggttatgtgtgggtggtgtagattaccagggtgaggggcgtgcgtcctcagagaagtcaatcggctggtcctgcttgaagagcaggaaggcaagacggtggatgccggagcctcgggcagggaagggggggaggtagggacacgtcacctgtccttcagccacccggttacccgggatgttggttctgggaggaggaaagtcccggttaattaccactccagggaggcagcaggagtgtcccctcagctccatgcacaccctagaggctgacatgactccctgggaggacagctctaagcatctctctcctgggacagaggaggcagccaagctctgtgaacgccgggacatgctgcaaatacgggaagcgggctggaggagctccgagtgggggacagggctccagagagcatcagcttgacagcaaggccatg

SEQ ID NO: 32050 - DNA, 1350 bp, Artificial sequence
  DNA replication origin
gctcaggcaccgcgctggccacctgtgcccgggtcctagtggcggccgcagtgtcgcaggccggagggaagatggcggcgccctggtggcgagccgcgctgtgcgagtgtcggagatggcggggcttcagcacctcgggtgaggggtgggcagctctgcgggggggggggggggggctgtcgcccgagctgtggggcgccggccttacgtcttctctctgcccgcagccgtcctgggccgccggacacccccgctggggccgatgcccaacagtgacatcgacttgagcaacctggagcggctggagaagtaccggagcttcgaccgctaccggcgccgagcagagcaggaggcgcaggccccgcactggtggcggacctaccgagagtatttcggggagaagacaggtgcggggcgactggagcaggggctgcagccaccgcccggggaactcgggacccgccggcgttttccccgggcgctgggcgagccttgccggcgcccttgtggatgctggggacgctgggagggcctgcctgcagacctgtgtgcgctatcggcagcttaatcaccccaggatttttcacaccttctgcacctcattcttggaaaattcgctccccctactattagagttccagctcctaaaatatttgctcctaaaatcttgaccacctgactttccggattgggatgccgttctgtgcgcctcaaatactctgtaggtaactctggccacactgcattctgactgtgcgctgcctctccccagattgtaagcgccctgttgacagggatcctgcttgtcttgccctccattggatccttgcacccgaacagtgcaaggatgtacatgtgcaatactttgctgaatgaaattaaaggcctgggcagggtgactcaaaaaagaacccaacctggccgggcgcggtggctcacgcctgtaatcccagcactttgggaggcctaggcgggcggatcacctgaggtcgggagttcgagaccagcctgaccaacatggagaaaccccgtgtctgctaaaaatacaaaattaactgggcgtggtgtcgcatgcctgtaatcccagctactcgggaggcctctgaggcaggagaatcgcttgaacccaggaggcagaggttgcggtgagccgagatcgcgccattgcacaccagcctgggcaacaagagcgaaactccgtctcaaaaagaaaaaaaaaaaaagaccccaacctttaaggaacttacaatttatggagtatatgcttttcttttcttttcttttctttagcatttatagaggcagttttgtggtggttaaaggcacaagcgtggaatctaaatagcccga

SEQ ID NO: 32051 - DNA, 1634 bp, Artificial sequence
  DNA replication origin
ggaggctgaggcaggagaatcacttgaacctgggaggcggaagttgcagtgagtcgaggtcgtgcccctacactccagcctgggcgacagaaactccatctcaaaaaaaaaaaaaaaaaggacaaggtaaaacagccacgatgtaaacacacaatccagttatgctcctgtactgcataactgcagtatggaatgtcacaataagcaactccttacgagcaggactgggtgtgactgccccacgtattcccctccacacttagcatgtagcaggtgcacactgctgggtggattagaaatgactgtgaaaggtttagctgtttggctgctgtttatgaaaaccagtggaaggtgtggccacttcctgctggatggagagaccctcattccattctcattccatctcaaagtgattgtgagggtcaagcttctgctggtgccagagccactggcctggtcaccaccagccctggcctgggatgtcagagcaggcttcctggagagacccctctcctggggctgggtggtggccaggccaaggtggggcagtgaggaggtgagaggcagaagacacagcgtatacaaaggccccgtggcctggaggcaaagtgcgatggaaaagtcttgccttttagggcaggagggccagggctggggcaaaggagggtcccagattccccaggctaccaagttttgccatggtagaactggatcacaagggcaagcctgagtcctgccagaaacattcacatctgcacttaaccaggtcacttctgcctttgtgtggataatgagaagttggagatagttgagctaacacacaaaccactgcgagcgctttccagagggtaatcttttcatcctgacagctgtcaggtaagcactagtgttaacctgctttttcccaaatgaggaaaccacaaggaagacagtaaggtcacgatctggtttttttttggggggggggaggggcattttgagacggtgtctcactctggcaccgaggtggtggcgcaatctcgtctcactgcagcttctgcctcccgggttcaagttaattcttgtgccatagcctcctgagtagctgggattacaggcgcctgccaccacgcccggctaatttttgtatcattagtagagatacaaaaatttttgtatctttagggttttgccatgttcgtagggctggtctcaaactaattacctcagatgatccgcccacctcggcctcccaaagtgctgggattacaggtatgagccaccgcgcccagccacaatctgggtttttattactattattttattattattattattattgaaatagagttttcacttttgtcgcccatgctggagtgcagtggcgcgatctcggctcactgcagcctccgcctctgcctcccaggttcaagcgagtctcctccctcagcctcccgagtagctgggattacaggcgtatgccacgcccggctaatttttgtattttgagtagagacgggttttcaccgtgttggccaggatggtctcgatctcctgacttcgtgatccacccgccttggcctcccaaagtgctgggattcccggcgtgagccaccgcgcccagccctcaatctgggttttaaacccaagcagag

SEQ ID NO: 32052 - DNA, 879 bp, Artificial sequence
  DNA replication origin
tgaggtcacgggagtgccgctacacttgcgggtgccctggagaagaggccccgtggcaggaggggcaggagggccaggaggacgggcctcacctgctccagcagccggctctgctcattcagccgtgcctccatcttcccgatgacctcctgttgccggctccgctcctcctccatgtcccgctgctgctggcccagccgctcctgcagtgctgggggcaacccacagggtgctcagcagctgctcccccttcccaccaggagccggggtggctgagaggggagggcgtaccccgcagctgctcgtcacgctgccggatccccagctcccgctcctgggaggtggtgaggtgcgaggcctccacgcgggaggacaactcgtgcaggctgctggagaacttctccatctggtggatgatgctattcagggacctggaagaagactgggtcaccccctcctgacggtctcggggaccttccggcccccaacgtcaggcgggcatggttggggcagcgcacataccgcgtgtgggaggtggcactggtggccgcatcgacctctcggtccttcagcagctttagccgctgcagctgctcctcgtggtctctgcgcatgtctaggatggacgccctgaggggaggcgggaggggaaggcggtcactctgagctggatcaccctgatgcggtaactccttgtggaagggtgtgtttccgtgcagcccttgctcccaggcctctcctccgccgggcactgcctcagtttccccagctcctctgtcttatctgtcatggtgcctcaatgctacacgcactaagatgggcattcctcccattattcagcttttctttttttggagatggagttttgctctgtcaccc

SEQ ID NO: 32053 - DNA, 753 bp, Artificial sequence
  DNA replication origin
ctggttcccacgagctgtcccctacccaccatctcccagggacacactcctggggggggggggggcacacctcccaggcccaggtgtcacaggtgactgccacacatgggaaacagaggcagaggtgtggtgggaggatggcaagggtggaggaggctttcttgacagaacaggaccctgcggccctgctttctgactgcagcatcccagctccccggcctggctgcctccttaaactccccactgatgtaggcaaattaacacccagctctgcccaggagcagcgaggctagaaattcaggcaagttctagtggggggtgcccggggagctggctgacgtcacatttggtatgtttgacacatttttcctggcaggtcgtcaggtcaaactgtgggtattgcccctgggcatggagaattgctccctaggccctgagctagacctgtctgcccacacccctacctggacgggcacggaaggctctgtgggtttctgggtgctcgggaaacacgtggcaggctctgaaacatcaacaacagagaaatgaacaggaggcccagggcactgggcctgcgagtgtccaggaggggctggtgtaactcatgtcccagggaccccaaaggaagctcaaagcacctcttcctcacccagggttaaactcccaaatgaagcagcaaacaaaaaacaaaccagtggctgagaggtctccaggggctgttcccctctttggggaacctgtagggagtgctga

SEQ ID NO: 32054 - DNA, 1368 bp, Artificial sequence
  DNA replication origin
aagacaggactgtggctttaagaccctcctgacccctgacctctgcccccagtggccctggcccctgggcagcccttcctggccgccatgtgtacccagagcctgggactggctgggctgggcagtgacccaggtgggaaagggtggtcttgccctctaaggcccggcacaagtgagaggcctgggggtccatgttgggctgggctgggcgaggggtggtctctgacttcctgggggttctggctgggatgggcagggggctgggtgggagagtgtgggccctgccctccgaggccgggcatgggcgagaagcctgggggtcctggctgaactgggctgggtgaagggggccccctgacccccttggggtccgggctgggctgggtgaggggcggtttccgacccccagccaggttcccaggcaggatgagctggggttggggtggctaggccgtgggccttgggagctgggcagtctgggctgggctgggctgggcagggcgccacatggaagctggaggagcaacgggagcgctgggcgtggggtgcaaattgcccggtgccttctgtttcccaggcagctctgtggccatggatatgttccagaaggtagagaagatcggagagggcacctatggggtggtgtacaaggccaagaacagggagacagggcagctggtggccctgaagaagatcagactggatttgtgagtgctgggacggcccctgagttacccaccctgggccatcacaacctgggcgctccctgatccgttccctctttcctggagtccacgtttaactcctctgggtgctgcccagcagcccttacctgtcctctccccagttcactgccttctgaccagcctttgccggggccctgactgtggagtttggtggatgacgtgccaaggagcacaggtctccattgccggggccctggtcattctgtggggttaaggagaagccgatccccctggctggaagtgcccttcttggcccaagtctctgcccacggctgtgcccttgtttcttgcagggagatggagggggtcccaagcactgccatcagggagatctcgctgctcaaggaactgaagcaccccaacatcgtccggtgagttggggattgaggtggggaagctgggatggcgaaggtagcatcctgactgccatctccctgtcagactgctggacgtggtgcacaacgagaggaagctctatctggtgtttgagttcctcagccaggacctgaagaagtacatggactccaccccaggctcagagctccccctgcacctcatcaaggtagggaaggaagggcagggaaggagaggtgacaccccatccctgccatccctgtccacg

SEQ ID NO: 32055 - DNA, 1308 bp, Artificial sequence
  DNA replication origin
gagcccatcaccatgttagtaaaataataaaacagtggttggacagagggaagacccactgcctgggatgaggctgctctgaggcaagaggtgtacgtatcctacctggcccaacacacgcacttccccactggctccttggcccgtgtcagcgaagggagcgcgggacggtgggggaggcggagcggtagcagcggtacccctccagtgccgctggcaggagcagcaggccgctcagggggtctttgcggcagcggcccatggcctccttgtagctcagccgttccttggagatggggtctgtcaaatccttctcgtagctggactcgtcctgcaggagctgggccagctcttcactgatcatcccggagaggagggcctgctggatggggatgcggcctgtcctcttggggtcgatgagccccccggtcaggtgctgcacctgcaggtgtgggagcacgctctcccggggcatccagcccttctggacggcctcgcccaccgagagcctcttcttggtgacggggtcctcgatgccggtgaaggccttctgggcgttaagcagcctctgtgtggaggtgttctcgatcaggcccctctccatcgccttgtgcacagagtagcgctcacggctgagcaggtccacgatgccccctgtggccgcctgggcctccagtagcttctgcccagtgatggggtccagcatgttcttggccacggccgtcttgatgctgcacttgttgtctgtggttgtgtcatagatcccggcgatagggaagctgtcatcaccgagcccgagagagaagctgggagagaagaaactggtgctctggggggccggggaggcgagcggggacttggagatgatagagccgatggagagtgaggagcttggcttggtctccccagctacaagcagcgcaaactcggagatgggcaggtggccgtccttgtacagatggtactcctccttagagatgcgccggcagcggagggcggcctcgatggagtactgcttcccgctcttgcggtccaggagcacagactcctccccacagggccccgaggtggtgacctcctcccagtcacactcgagctcctgcagctgcaagtactggcccctgtcgatgatgcccctcttgtaggcctcgtatggggacatgtccttccccgtctcgggttccaggatggagatcttggtggaaaggttggtctctcgcgtctgggtctcctggctgagctcctcccggctcaccttggcgtggaggtcccggagcgtccgctccttctcgtagatctggtccttct

SEQ ID NO: 32056 - DNA, 1189 bp, Artificial sequence
  DNA replication origin
ccgtgctctacccttcttcctctctgcagaaggagctcagtgaggacatccgaaggacccatgatgcaaagcagggctccgagagccctgcccaagcagggagagagtcagaggccctgaaggcccagctggaagaggagaggaagcgggtggcccgggtgcagcatgagctggaggcgcagaggagccaactgctgcagctgaggacccagcggcccttggagaggctggaggagaaggaagtggtagagttctaccgggacccccagctggagggcagcctgtccagggtgaaggcccaggtggaggaggagggcaagcggcgggctggcctgcaggcagacctggaagtggcagcccagaaggtcgtgcagctggaaagcaagaggaagaccatgcagcctcatctgctgaccaaggaggtcacccaggtggagagggaccccggcctggacagccaggcggcccagctcaggatccagatccagcagctccgcggggaggatgccgtcatctcggcccggctggaagggctgaagaaggagctactggcccttgagaagagggaggtggacgtgaaggagaaggtcgtggtgaaagaggtagtcaaggtggagaagaatctggaaatggtcaaggcagcccaggctctgaggctgcagatggaggaggatgctgcgcggaggaagcaggcggaggaggctgtggccaagctacaggctcgcatcgaagacctggagcgggctatcagctcggtggagcccaaggtcatcgtgaaggaggtgaagaaggtggagcaggacccagggctcctccaggagtcctccaggctgaggagcctcctcgaggaggagaggaccaagaacgcgacgctggccagggagctgagcgacctgcacagcaagtacagcgtggtggagaagcagaggcccaaagtgcagctccaggagcgcgtccacgagatcttccaggtggatccggagacagagcaggagatcactcggctcaaggccaagctgcaggagatggcgggcaagaggagcggtgtggagaaggaggtggagaagctgctgcccgacctggaggtcctgcgggcccagaagcccacggtggagtacaaggaggtgacccaggaggtggtgaggcatgagaggagccccgaggtgctgcgtgagatcgaccgcctgaa

SEQ ID NO: 32057 - DNA, 1539 bp, Artificial sequence
  DNA replication origin
tcgtcctcctgcagggagaaggtggtgcaggatgccgccctcacctaccagcagttcaagaactgcaaggataacctgagctcctggctggagcacctgccccgcagccaggtgcggcccagcgacggccccagccagatcgcctacaagctgcaggcgcagaaggtgaggctggggcagggacagctgcctgtgcccatgtggccccctagtggccaaagctcagaagcgctctaaggggcttcaaagcccaggccacggaggccctgggccccttccctggcctccagctgaaatgctcctctttgcccacagacggggccagcccatctctgtctggcccgactggggcagtgggatttacaagctcaggccacagagccctgagggttccggccactttctcatgctcatcaagcccctgccatgtaccaggcaatgtgttcactggggtacaaccctgcaccctggcagctcccagcctggtgggggaggtctgtgatgccgacaagcattggtgggagaagctggagtgctgtgggtgcccccaggctggacacacttgcgggtcaggatcggtagtgtgggaggaagcaagtgtagccgggggagggatgaaatgtcccatgcagaaggcatggcagtcaggggaaaggagggggactcaggggcgagggcgaccagatgggcagaccacacaggcccttccggcacaggacccaggctgcactctctcctgcagcccccagaagctgctggggaggggatgcttccaggccagtgtttagaagctggctctggctgccatgtagagaatgactaagagggtgggaatgaagacacggaggcccacgaggagccagggtggaaatccagcggagagagagtggtggcctggccggggaagggaccatggcacagggcgaggtgggcagatctgagatggagatggcagaattaggtggacttggtgactgcttgaaggggacagtgagtgagatggacggggcccggtgatgcccagggttctgttggggacaactgggaagagggggcacctccacttgaggcgggaacacaggaaacagagcatatttggggagaggaatggggccggctgggtcatgctgaaatgaggtggccaggacagccgagggcagcggggaggtggacgtaggcatatgggagggaactggggctgggggttcccctaggagctcgtgagagcaaagatgggtctgggactgccggaaaatgagaatatctggggagagagtagggaggtgacattgggaagggggcctgggacagagattctcagccctggctgcaaactagaatctcccagagagcttttaaaacatccccaggccaggacccctccccagaccaaataagttggattattgtggtcagagcatcagtatattaagttcccaggtgaataaaagtgggcatcccgtattgagaactttccaattggagccatggttctggatgagctgtagcagcatcacctggggacttatcagaaatatg

SEQ ID NO: 32058 - DNA, 1571 bp, Artificial sequence
  DNA replication origin
cacaccctgtgccccgaggacccagtcgctcaccgcaggtccagctggtcccctacggcgtggtagcggtcggtgagggctcgcacctggcgctgctggcgaggcaggtcttggcagaactcctggaagttgttctgcagggcagcgcatgcgtgctccgaggccttcagcgcgcggtgtagccgcagcacgcaggtctgctgttccagcagctccctccgctggcgctgcaggaggaggggacgcagccgtgcaccctcgtggctggggagacgccgtgtccacccacccgcccctgaatgctgggttcccctgacaccaggaggccccggctggtcccttacctgcagctcgctgaccctctcctgcagagcccccggttcagcagggatgggggcctcctgcaccagggtggcctcgaagcctcggatgaccctgtccgcatcctggatctgccgctccagatccagggcagccttggctctgccgcagaggaggcaaggctcagacactccctgggccacacgctgctgccctgcgtggctgccctgtccccagagcactcacttctccccgtagaggctgcacagaacctgcacgtcactgaacttgttcttcacgctgttgagggctacgggcagctgcagggcagcggggcccacgggccgcgtggacagaaacgcctcgcactccttctgggctgtctccttctccgttcccaggctctgcaggcgctgggctgtgccctaaagaggggcggggtcagggatctctgggcaggtgggttccgcccgactcttctaccaggataccctaactctgcgcccatggaggcagtagagtgtggtgggtacatgcttgggctcaggccagagaactgcgttcagtcctggcgctactcgttcctctgtggatgacctggggcagagcaaactgtctgaccctcagtctcctcatctacaaaatgactgataggaggggccgggcgcagtggctcacacctgtaatcctagcactttgggaggccaaggcgggtgggttgcttgaggtcaggagatcgagaccagcctggccaacatggcgaaaccctgtctctactaaaaatacaaaaattagccggccgtagcagcgcgcacctgcaatcccagctacccaggaggctgaggcaggagaattgcttgaaccccaggaggtgggggttgcagcaagctgagatcacaccgctgcactccagcctggcagacaagagcaagactccatctcaaaaaaataaaataaataaaaaagaatgattgatgggaggatgacacaagagcctgtgtcctgagctcagcagtgagcgccaggcacagttacctacagtcatcttcatgtcactgtcctgctcacaagaccatcaggtcccctggccctgtcgctccagccaaagccctggctctgcccactagggactgttgccctcattctttcatcagttattcactcatctgcctggtccatcaccgagcagtgctgactctgcaccaggcaccacccaccgcccagtctaactgggcttctcctggacccca

SEQ ID NO: 32059 - DNA, 913 bp, Artificial sequence
  DNA replication origin
gaagtcggaatctactccttctagccccacagccacctctccccgggccaccctgggtaccctgctggctgggccgaagagactccacagcactggccttcaggcggctctggactgtggccaatttctgcttcagggcctgcagctctgaggccagcctagaatgaagaggagattgaagaaagaggtccccactctgcctctctccctccccagccccagtagacgcagcttcaggtgaaggccagcctttgagcaggggtctgttgggccatgggcttggacaccgcagggccggcctgctctgcccacagcctgcccctgagtatccctacacagacctaccgggaggccctggccacagcatcagggtctggtgctgggatgcagaagcaggcggcgggagcacgcttggtctccccgccagggccctgcacgacccaggcgtgcgggtcagtgttatctaccagcttataccgctcaccctgcagcagctgcacctgggggcacagaaagggagcagctcctgagggctcaggggcagggggccaaggccagggcagagtaggggctggggacagagacaaatggggacagcagctggaacagggacaagagtagggtgggaggtgctggggtagaaaagaggcaggacaggacttggagagaggagggtctgagtcaagggaaggagtagggcaaaagtgggcgcaggagacagctggggatggagcagggatgggcttgggcaggggcaggggatgggttgggcggggctggatggtggcaggggtgaggtgggggagttcgcacttctcctgagtcccagtcgcagatgctgtccacgtgcaggggctgctgaggggggtttcttcgctgtggcagaggggccacatcccggcttcgccgctgc

SEQ ID NO: 32060 - DNA, 1241 bp, Artificial sequence
  DNA replication origin
cttttgccccccactttctgtctccccaccctgctgctggcggcgggtcctgagcacagaaggcggcgtcgtggcgcgggcagagcctgggcagcctgtacacgcacctccagggctgcacgcggcagctgagcgccctggctgagcagcagcgccgcatcctgcagcaggactggagcgacctcatggccgaccctgcgggcgtgcggcgggagtacgaggtcggctggcagaggtcggggccaggtgggggcggccagggccatccgggtcctcaccgccgctccccacccgactcgcccccagcacttcaagcagcacgagctgctgagccaggagcagagcgtgaaccagctggaggacgacggcgagcgcatggtggagctgcggcaccccgcggtggggcccatccaggtgcgctggggcagggcgagagtgagaagggacgtggtgggcggggaaggggggaggtggggcggacgtggggggggcgtggtccgagggctccatgctgccgtacccaggcccaccaggaggccctgaagatggagtggcagaacttcctgaacctgtgtatctgccaggagacccagctgcagcacgtggaggactaccgccgggtgagccctcgggcaggcggcaggggcggcaggggcggcaggggcggcaggggcgggagcacagcacccctgcccacaggagaggcactgcacctcccaactagacagagctggcagggcgcggtggctcacacctgtaatcccagcactttgggaggccgaggctggtggatcacttgaggtcaggagttcgagatcagcctggccaacatggtgaaaccctgtctctactaaaaataccaaaattagccagatgtggtggcacgcgcctgtaatccgagctactcaggaggctgaggcaggagaatcgcttgaacccaggaggcggaggttgcagtgggccgagattggtccactgcactccagcctgggtgacagagagagactccacctcaaaaataaaataaaatagagctgtgtggttgccactcggtcccagagggaaagaaaggcatgggcacattctcaacagggtgaagcggttcccaggggggtgaaaattggttcttactggcagaaaaatatcttaactctttttatgcatgaagtccagatccacatacagcacctaagctgtatacagcatatctgtggtattaaaatttcgtgggggccaggtgt

SEQ ID NO: 32061 - DNA, 1370 bp, Artificial sequence
  DNA replication origin
gcgtggacaggctgggtggcatgggaggcccatcatcaggcctggcactccctgagtgccccttggtgatggtgaagatgggacagatgacctttgtcctgcaccgcccatcccctaacacacggtgggagagagggctcagcttccttcttttctgggctcccctgtgtccttgtcacctgccccacggacgccctggtcctgaccctgtgcctggcgtgggcctcaaggttggctagcatagctggggtcccaaagttggggctcaggcccacagtgatgggcagcaggggtgtgggggctctgggccctggccagtctgcccatctcctgcccacaggaccggctgaacagtgagcagagccaggccctgcagcaccagcaggagacgggccgcagcctgaaggaggctgaggtgctgctcaaggacctcttcctggacgtggacaaggcccggcggctcaagcacccgcaggctgaggagattgagaaggagtgagtggagctgcggcagggctgggggtccctggggaagacccaggtccagccctgacctgccggccaccttcttgacagcatcaagcagctgcacgagcgggtgacccaggagtgtgcggagtaccgtgccctgtacgagaagatggtgctgccccccgacgtgggacccagggtcgactgggcacgcgtgctggagcagaaacaggtcaggaactcaaagtcacaccccagtgtgatcagagggcgatacggaactgcatttaatccagggcctgactgcaggcttgaatagtcagggtgtaggggtggctcaggggtctgggcagagagacagcagagtagacagtgcagtcagggaagacttcctgcaggaggaggtacatgaagagacctcagaggggtgagagggctcagttgggccagggtgaagtagtgaggagaggacaattccagaaagaaggagcaaaggttcctgccaggaggaagcctgggcttcgacgggaagtggggatttctgggcaggtgggcagagccaggtcatgggacattctgatccctggttgaggagttgtgctttgatgccacacagaaggggtgtcatcatgacaatagagggacagtggggaagggcccggctggagcagggcattctgagggccctagagcttggctggtggtgtccaggcaggaagcactgaggctgggtcacagacaaggcaggatggagctggagacttcttagaggctgagcccagcgtctgggaaccagtgggactcaggggccactgcagaatggcctcgcccctgggggagctgcagggcatgcacccgggctgctcccaggctcgtccacgctctgcccaaatgaccaa

SEQ ID NO: 32062 - DNA, 1230 bp, Artificial sequence
  DNA replication origin
atgcagacaccccgaaatccagtatctttggtctcctgctttctgctgggcaggacgtgaaccagatccccagtccaggatgcaggacctggggtccacctccggttctccgcccttagtgggtgggaggtgggactgccccctgagatctcagcagccacggtctcactgcggcctcaagtccccacctagccagccacaattccggacccgggatgacaggatccctcgcgcaggcgcgctccagcacatggcgccctgctgcagcaagggccgacggcggcggagtccgccgctatcccatcagcccggccaggcaggtccagctctcacccgcccaggtcgtcccgcctcccctatcccgtcttgctctgcggcgcaggggcaagatggctgctgagaagcaggtcccaggcggcggcggcggcggcggcagtggcggcggcggtggcagtggcggcggcggtagcggcggtggacgtggtgccggaggggaagaaaataaagaaaacgaacgcccttcggccggatcgaaggcaaacaaagaatttggggatagcctgagtttggagagtatcctagagtaatcgggcctaactcgcaatgattacgtgtcgaactggagggctgggggcgggagaggcggcgggtcccgacaagtcctggcaggagaggccgagggttgcagtttctctcgcccttaccttttggtgctcagaattccggggggggtctgtctctcgactagtctttcctcgtgtccccctcgccgtcctggctaggtccgtttcttccagtggcactgggatatcaggcaggtttcccctggtgccccgcagttgtccagttggagggcttgtgaccaagtgacaccttgagcaccttgctttggcaccttgagccactgaactggggagaggaaactgcagtcttgacatttggcttaatactcttgtctgacagtcgtcatagactgagtagtaaaacctacagctcgatactttgaaagtggaggtaaagattgactcaggaaaagcttgttgcccattttgattgtaagttaccgtagttaatatcgattgtgtcatttttttctgatcggtctgtaggcattttatcttgctgacagtcattcatataagctggaggaatcggtttctagtttccatcagtgtgtatctcaaccaagtgcttgtggtactagtttgtgaccttttgaaatgaataaca

SEQ ID NO: 32063 - DNA, 1201 bp, Artificial sequence
  DNA replication origin
agggcgagagaaactgcaaccctcggcctctcctgccaggacttgtcgggacccgccgcctctcccgcccccagccctccagttcgacacgtaatcattgcgagttaggcccgattactctaggatactctccaaactcaggctatccccaaattctttgtttgccttcgatccggccgaagggcgttcgttttctttattttcttcccctccggcaccacgtccaccgccgctaccgccgccgccactgccaccgccgccgccactgccgccgccgccgccgccgcctgggacctgcttctcagcagccatcttgcccctgcgccgcagagcaagacgggataggggaggcgggacgacctgggcgggtgagagctggacctgcctggccgggctgatgggatagcggcggactccgccgccgtcggcccttgctgcagcagggcgccatgtgctggagcgcgcctgcgcgagggatcctgtcatcccgggtccggaattgtggctggctaggtggggacttgaggccgcagtgagaccgtggctgctgagatctcagggggcagtcccacctcccacccactaagggcggagaaccggaggtggaccccaggtcctgcatcctggactggggatctggttcacgtcctgcccagcagaaagcaggagaccaaagatactggatttcggggtgtctgcatccccagggactcaagagatggggtcctccctaccggaacgggacaccccgtccgtaagggacccgcctctgcctgccctttcctctgaggctggccgtaagaacgccaagccggaggaagcgctgcgcagtcagcagacggtgtcctaacggggtgactttctcagaccgcttggggccgtggaccactgcactttggggccgtcagtccaaagagggagaagtgttgagacatgggaaaatatgaatttttgctttgcaccttctagagtctgagacctgggattccaatccccgctccgtcattagcggcagggacatgttgggcacgtaacttaatctccctgtaaatctgttccttcatctatgaaatggggataaccaatttaagtggttgttaggaagattaaatgacggattttttttttttttttagatagagtttcgctcttgttgcccaggctggagtgcaatggtgtgatctcggctcactgcaacctc

SEQ ID NO: 32064 - DNA, 1297 bp, Artificial sequence
  DNA replication origin
gacgttcatggtgccgctgaccccgaggctgcccgggctcctgcagccgtctgggtctccgcgagcgggaagctcccggggctgcggccgctgcaactcctagtgcgactctgccgggctgaaggcggagggagccttgcctcatctggggcggggatgggggtgcgctggggtcaggaggaggagcaagagacaggagggcgaggttgtccccagcagcggccggcggcgctgggggaagggctgcggagtggtcccggcgcgcattccacggcgcaggcggagagtggcgcttgtacctgcttccgagctccagcccccgcagtcgggggttctgggctgaccaggcggactgacttccccggcagacgccggagcggtggaggggtcgaccccggaccctgcgtgtgcgccgcgccgcagggagcacggacctcgcactccgcgcgcctcggcgcttccctgcagcctggcaggggtgcaggatatcccgggaccgtcgaggggctggggtgccctcaaaagaggacccctgggagatcggggggaggaaacgcggggcggaggcggatgaggggccccggagtctggctctttcgcccaggctagagtgcagtggcgcgatctcggctcactgcaacctccgtctcccgggttcaaacggttctcctgcctcggccttctgaggggctgggactacaggcgtccgccacaacgtctggctagttttttgtatttgtatttgttgagacagagtctcactctgtcgcccaggctggagtgtagtggcatgatatcggctcactgcaacctccgcctcccgggttcaagcgatcctcctgcctcagcctcccgagtagctgggatgacgggcgcctgccaccacgcctggcttattttcgtatttttagtagaaatggggtttcaccatgttggccaagctggtctcaaactcctgacctcaagtgatccgcccacctcggcctcccaaagtgctgggattacaggcgtaagccaccgagcccggccacctttttcccttctcttacccattgaacgttttccctccaattcaatccaatatactgagcatctattgtgtcaggctctgtctttggctccatgcctcagtttcctcagctgtaacaaggaaatggtaacacttccttctaagagggatctgctgagaaaggaatgagatgtatgggagagttagttaaatctgaatgcatcagatccttattctttttctcctgaccttattccgtataccttgaggaaattcaaaatagagttc

SEQ ID NO: 32065 - DNA, 2038 bp, Artificial sequence
  DNA replication origin
cagggacgaagggcccccgccgcctcgctcatgtgcaacaggtcgctggactcgcgctccaacacgctgccactgtgggtgccccgcgcggcagcgcacacacggcccgaggctcggcctggggcacggcccagcaggcccgcgcagatcgtgcggaagcctttgcggaagtgcttggagaccagcgcgtaaacgatggggttgacgcaggagttggcgtaggagaccaggtgcgagaggatgcgaagcgcataagtggcgcgcgtgagcgggaactggccgaaccacacgcagaggatgagcgcgtggtggggcatccagcagaggcagaagagcgcggccacgatgaggatcatgcgtgtcaccttgcgcttggcgcgccgggcacccgagcccgcggccaccgggtcgacggcgcgccagaggtagcgcaaggtgcgcgcgtaggtcaggccgagaaccagcacaggaagcaggtagctgaagacgaaggtgcagatgtccatggcgcggcggcgaggggcgctccacgcgggatggcacacggtcaggttggccagctgcgactggcggtagtagctcaggtagggcccggagaagagcagcgacagcccccagatgagcccgatggctgccagcgcgtttcgaggcgtgcgcagctcgcgggagtgcagcgggtagcggatggccagatacctgcggtcagaccgggaagggagacgtcggctgagcgggcacattcatgctggagggccgcgacccctgcacctcggtcccaaggctgctctcgaggaaggtccttagcgcatggttacaccgcacacagaggaggtgggggtgaggctcggcgtgagggcggaggtgggggcctcccagcgtgtcccagacactcagcggagcctggaaatggggcgggcccggcagcaggaaaggtgtgccttcaagccattctcccgctgcccccggggactgcaaccacagtctccactgagagggcaccccaaagccactgaagactaaaggttggagaaccggctatgggctccgggaggctgtgactacccactggtgacggtgccgcgggagggagggcggaggcgcctgaggctctagcagacagcctggagaagacatgttgggcaagggacagttaatttctcaggggattcctgagagaatgcgagctttgtggatcccaccagcgcgctcggaaccaacgcacttcgcgctcagtggctacaggaggtgtgggggcagtctggcctcgcctctctgtttttccagaggatggagaggggaaatacccggatttcctccccaggaaccatcccagtgtcctttcaagctccacctgagtcccgcgctctcccgaatgtgcgtctctcgctctcctctggctggggaggaagaaccccagggcacgctcctctcccggccccgacttgttttggattttattttgttttgttttgtttggaggcgagaggcagagtgggctgggactgagctagggacctttaggcacgctcgctgggactccggagtggatccttgcaaaggacccaagatccacagcctggacctgagccagctgcaccaaccaaccaaaccgtggcttggaggcgagcgcagtggaggcgcctgaagttggctgcaggagacagacggtcacttcacgcacccgatccctggctggcgactctgagcgagttacttaggaactcaactcttctgtatattgggcactttgtcctatcccaccctcacggagggcattaagctcaagcgagatgaacgcgcacaaacgcgtcgtactgggaaacgctgcgcgttgtcaggcacgggcggcgctggagagccacattctccaggcttccaggccccaggacgcatctaaccgagggacaccacggtcccccattcttattcctctttttcctcctccgcgcccgcttgtcttccactgccttcttagtgtcctgtcccactctgcgcgtcccttcttggtccccagtcccgcctcccgctccatcccccg

SEQ ID NO: 32066 - DNA, 1594 bp, Artificial sequence
  DNA replication origin
aaaggaaggcacatgggtgctgacaggccagtggcgcagctggctgccccgggacaacgcaccctcttggaggcctgctctgagagtcccccagggccaggtcactgtggtgctgggccgggagggagggagaaaggggaggacagcagggaccttgatgttgtctgcgaagtcctccagcgctttggcaccgatggtctccatggatgtgatgaggccaggcagcttgttctttgtgctggcagccgtgccctgaggaagcacaggggagcccccagctcacctccagtcgctctgtgagcatctcactcacccagggcccttcctaagctgcttccatgcaccttcagagcagaagtgtgggacagagaatggggttctcccagggagggatggggcggccacacccggcagcacgatgcctcctggctgtgtttttgagggcccctcgcccacatacctggagcacctggtcaaactcaggcttggtctgcttgaggtgtcgcaggatggggaagacggtgagcaccgtggagaagtcgtgtcgcacaatggccttccgggcagcagacacgatgttctccccttcaagcatcagcccatccagggcatcctgagggggcagggagacagttcagggaagggtggggcggtgggagctagttctgggctagtgggggatccttgcagtatgtaggggggccagtgtgcaggaagaggggtgacggggaggtggtgagcgtccacccaggaccggtccccagggcacgaggtggtggtggtgggtggagttgagggctgcaagagtctgttgtgacagctcttgctggggctggctgcagagcccccggggcggggcgggacctgtatcagggagtcgaaggtcttcttctggtggtgctcggggatgatgtcggccagcagctggtactcgctctgcgccagcttgacgaaggcactgacgcagtggatgtaggcatcggtctccacgtccagcatgtcatctctccctgggggatggcacaactcttgagctgctggtctggggccagccacactcctggctgggggcggcgtgggtcccccagctcctggcctgtaccccacactggcagaggatggggaagaggctgactgttctggcagaaagctgcaagggagccagcaggccccgccaggttcgaggggaataaaaggagctgagcccagcctttgttctggcttcattctcggctctgcgcagacagtgggatcagacaccagaggcaggagagtgacggatggaaagataaggagggaagattcctgaatcagcgtcctggataaggtggtttgaccccaggactgagcattctgagttgtacctgaaagagggcagcccagggtgggcaggtggctgtgccacctcaaggaggctggcactggggtcatccatgtgggcaaatgcggggcctgtgaaggaagtgaccagcccagtcagggcttctggaacatctaagagggtggttggctgcagcttctgaggctggctggcatggggtcaaaatctaagaggctggtaagtcccagagaggaggggttgccagctgcccca

SEQ ID NO: 32067 - DNA, 1453 bp, Artificial sequence
  DNA replication origin
tgcttaagccctcccggagcgctcggggttcgacccccgagcacggcgggaggagggcgcccccctgcggcacagccacgtccacgaagcccctcccggggttctagaaagcggaggcctccggtaataggggctaaggctgggctagggggacaggggacaggccctcccagctcctcccctgtcgagccaggaggggtgagggagagggggagaagtgtgtgtgtgtgtgtgtgtgtgtgtgtgtgtgtgtgtgtgtgtgtgtgtgtgtgtgtgtgtgtgtgtgatgtgtgtggtgtgtgtgtgtgtagtgtgtgtgtgtgtgtgtgtgtgtggcgcagataaggggccatggcctaggacagccaggcagtgagtggcaagcgcctgatgggttgcttttccttcattttacaagccaggaagtcttcctgcggtggggtttgcagaaccagcagaatccctcctggggccaccatgttcccggcaccgttctgagcctttgtaacgctaatctcctgtagtgagtgcctggggagggttggggggctgtaatattgttgtccttgcagaaggaaagaccaagatgcagagagatgtctaaaaggtgccagaaggtgactatccagccctggtatcactgcctggtgatttcgtttctttgatcttcacgaatggcctcactgggtgagtccaggggccaggaggttcaagatgctgtcaatgactcaggactgtttgggggcagataagaggaggtgaggggttccacgggttctggataaattgatcagaactcagaacacatttctaagcagtgatcattagctgcagaagccgattttgttcctaacgtactccaactacagctggaaaggccagggaagaactggagtgggcaccggctaacatttcttgagcacctactaggtaccaggccttttatatgcgccatgtcacttaatttacctcaaatccaaggggcctttgtggtgtgttattcagaagtcacagggctaattaggggcagggctgggatcagacgggcctgtctggcctcacacctgggttctttttcctccactctgccattcagctgtgatttggacagaaatcagctgccacgtgcaacattctcccatgggaacatgtgtccgcagtacctatctcagagcccaaatccttcctgccccacagccttctcctggaacctgccttgggtaagctgagaaattggtatgggaggtgtgggggtgggacagagtgtgcaggtctctggccacaagagaagcaggaagggataaagattcctcccaatgtatctcctggcctgggtgtttctgctgcccacaagtatgttgctgtgattctcaggtcaaagaggctctcagttgcctcaaaagctgcaccctcggctgggcttggtggctcacgcttgtaattccggcgcttt

SEQ ID NO: 32068 - DNA, 1755 bp, Artificial sequence
  DNA replication origin
cgggggcaggagggggcgctgaagagggagggaacgtggagatggaggggaggcaaacaacgagggggcatccagagggtcccgggaacgcgacctgggggttggacaggaaaccaggggtcggggcagcctgctgggggcgtctcgtgccccccaccctccattcctctgaaccagtccggaaggggggttcggctggcaagccgcggtggcgtcagcctctggcacccgctgctgcccggcccgtggctccaggcaaccggggacgctgcgggggctgcgctgggcagcgggtgcgggtgcgggcgccccccatcgcgggcccaggcgttcccccagcaggcccaggagcccccacgggtccaggtgcgcccctgaggcctggctcccctggggccgcgtgcccggaacgtgactcagcgctttctccgtgccgggctgcggtggggagcgggacggaggcgagtggcgctgtccccaggaagggccccgcacaggcccccgccaggcgggatctttcccgggtcgggcaggttcgttcatttgttcacgaactcagcgtcagcgaggcaggaagcgggaagagagaggagaccccggataagaagatggtgctgttggaaacatttgggaatttggggtgcgctgcaggcctgggtcatccaggccacaggagaggcacagggctgcggcctgggttgggggaacagccacagctgtggggcgtttcaaggaggccgaggcacaggcgtatggactggattttgaaggatgggagaagggggcctcaggacaggaaccggccttatggaaggaaagctgggaagtagggagggggccgggggtgtcggagaggacagctgagtgtggcgggagcggaggcagagcggccctggggccccggcgtcagctgaggttgcactgtgtttggagaggagcctcggaggggtgggctgcctggcagcagtggcctgggggccgcaaatgaggagggtgcagtgccttgggcagtaaattagaagacacaggctgctggctgggggcgggagggcacagggaagccctgcccgggagcaggccgagagctaggtttccaccgttccccgccaaccccaaactgaggaccgatggatcctgcccctgcggtgggaaaccaggaggcctctttccctgactggatagctgccctgaggcaggggattgagtgagatgaccctgaagggagtccccagtgtgctcttgttctgtgggcttgcctgtcgttcacactcacggaagggtcctcctgtctgcctgaaatgaatgaatgaatgagcagagatatctcagcgtgtattccctggggggacaccacacacacttccttcttcaataagggctttttaatgaggccagggaggagactgggctggaggtgaggcctgggcccctgagggcagagggacaggcgggacaggcctgagttgccttgctttgcttgccttccttccttcctttctttctctctctctctccttccttccttccttctttccttccttccttctttgcttccttccttctttccttccttccttctctctctcttctttctctctcccttctctttctcgctttctttcgctctctccctccctccctccttccttccttctttttctttttcagagtttcactcttgtagcccagcctggagtgcagtgagctgagattgcgccactgcactcactgcaacctccacctctcgggttcaag

SEQ ID NO: 32069 - DNA, 1142 bp, Artificial sequence
  DNA replication origin
aagggtggaccatgggatgtgggctttctggaactctggccagctaggggcagagcgagtgtccggggacccccagccccaactctgctccagccaggcccgctcttctgtgagagaggtggcattgccagagctgatgttggttcaggtaccagcctggggatcccgatgtgtcttaccaaccgcctgctcaaacagaagagccaaaaaggctggcacaagttctgccaggatggcgatgcagggaggaccctccctctgcaggtgtcaccagccgcactgagagaaaaggctcgcgcctgagttttaagacctgggcttggatggcacggtgacacgcaccccgcgggctggtttattttcctccttcccacctcttcacatctccttcaggtgctagacacggagagggccaagagaaccacttgggaaggggactgacaacctcgctggccattgtatggtcatcaataccatgcgcctgctgtcccgggctctggcaggtggggtgtgttgaggatgctgtgggggcccagagcccacacctaacccaggtggagaccaggactggggactctggaactaagtcctgaagggcgttacccaggtgaagcgggagagcgggagggtgctcattcaaggcagaaggcagggattgggacaggaagagtggaaatagtgattctcagtggtgcattagtgtgactggtcacagaggggaggggaggggagaagatgagggatgagcaggagtcagatcttgatggagcttagggggcccgaagctcctcctgtaggcgaaggaactcattgcagttagctgaggagtggccagagcggcacttgaaaagggtcaccctggcccctcatcttccctagcactgagaggctagcagcccctgggcacactggtgggggtcccacctccatgcctttgctcactccccgccttctgcctgaaactcttttcctccctgcactcctgctggatacctgggccatctgtttgaagaatcaagtcaggggctgggtgcagtggctcgtgcctctaatcccagcacttcgggaggctgaggtgggcagaccacttgagatcaggagttcgagaccagcccaggcaacatggtgaaaccctatctcgt

SEQ ID NO: 32070 - DNA, 788 bp, Artificial sequence
  DNA replication origin
ggggaccttacaaatgctgatgcctgggtcccaccccggaaattctggtctaattggtccagggtgcagcccagcagtgggatttttcaggagcctccaggtgactgtcaagctggggcaaacctcgatctgcttctcaggcctggtgctcccccagtggggtgtcctgcctgccccagacattgccccccttccccccagcacaggcctggggcacacagctacacgcccagcctgtcagtccaaagctggaggctgatcctgtggggagaaggctggagcccagcttgttcccccattgctggggtccatggagaggaagggggcggacagtggggaaaaggagaggggagttgcttgcggggtgaagggaattggggcagccctcagcctgccttcctggaccctgcaggctgcgtgccctcctgcagtatttagaataattagcaagtgaaagcagccggttagcaggggaatgccaggttggcctagagccaaccccgaggacgaagaaagaaaggggctttgggagaaaggggtccgtggaggctgggcaggaatgcttgggacgttgcctgtttgtgcccctgtgtgtgtgcgcccgtgtgcgaggaagtggctttctggaggcgtcgtgcacccatgagggtgtatatgtggcggggactgagttggaaggtggctcccgggcaaagcaaggggggcgggggattgaaaggtgctggctgagtgtcacccagacacaaatttcccatgcctcagtttccccatcagaactccggtagtct

SEQ ID NO: 32071 - DNA, 1412 bp, Artificial sequence
  DNA replication origin
gaggccaccggggaggcgggctggggtgcaggcgagggcaggctggggcataagcgcaaacagccgctgcccaagcgggtggccaaggtcccgcggccccccagcaccctgctgcccaccccggaggagcagggtgagctggaacccctcaaaggcaactttgactgggaggccatcttcgacgccggcactctgggcggggagctgggtgcactggaggccctggagctgagcccgcctctgagccccgcctcacacgtggacgtggacctcaccatccacggccgccacatcgactgccctgccacctgggggccttcggtggagcaggctgccgacagcctggacttcgatgagaccttcctggccacatccttcctgcagcacccctgggacgagagcggcagtggctgcctgcccccggagcccctctttgaggctggggatgccaccctggcctccgacctgcaggactgggccagcgtgggggccttcttgtaagaggccaggccctgccccacctctggacagtgcccaagtcagggtccagaactgccccccaacacaggtccacagacaccccaccacctaggcaggggctgggccagggctccaaggcttgccccagaggccacatggccaccagccccagctgccatcagattcaagcccaggaggctgaaaacgagggcccaggaccagaatcgctgcctcctctccccagccccaccttgtacacacagtgtttcattgctccgcgtcttcccagccccagaaaccggctaaaggaccctgcaccatgagagccgaggcctggaggagcccgggtcaggctggggaggaacagaactgggccctcccagagcacctccgcttcccccctgcttccccaggtctctatccagagagagtccccaggtacaacaaatgctaattagatgacagcaaattaaccccctggaggcttctcctggcagagcctccctggggccggggcaggctgtggatggggcggagcagggcagaagatggactgggggagggggcagagagaggagaccaaaatgaggtggtggcacagggtggggcaaggagatcctctctaaggcctctggggtctttgcctggccccatccctagggggcggggaggggacgtaaatccctaatctttaagcccgacttgaggctgagagcagctggaagtttgggtttggtggtttgggggccggggcagccaagctgtatggggcaggacagacagactaatgtagtgagtgtagctgtagctgaggcttaactgggagggatgccgagcttgctggaactactgggaccaagaagcggggtaccccacgcccctgcctgcactcctcgggggcgtggggcgtgccttgctccacccggactccc

SEQ ID NO: 32072 - DNA, 2616 bp, Artificial sequence
  DNA replication origin
gggcaggcagccactgccgctctcgtcccaggggtgctgcaggaaggatgtggccaggaaggtctcatcgaagtccaggctgtcggcagcctgctccaccgaaggcccccaggtggcagggcagtcgatgtggcggccgtggatggtgaggtccacgtccacgtgtgaggcggggctcagaggcgggctcagctccagggcctccagtgcacccagctccccgcccagagtgccggcgtcgaagatggcctcccagtcaaagttgcctttgaggggttccagctcaccctgctcctccggggtgggcagcagggtgctggggggccgcgggaccttggccacccgcttgggcagcggctgtttgcgcttatgccccagcctgccctcgcctgcaccccagcccgcctccccggtggcctcctcgaactcccgcagcagctgctgggcctcggtattcaccgtcagcggcccggcccgggggacagcgctgggctcctgcgcggcctggcgggcaaaggctgggtggatgtggacagggggcagtcgccgcttcttgaaagcgccgctcagtagccgctccgcgtactgggggtcaatgcgccagaagccccccttgcctggttcgtccttctcccgaggcactttgatgaagcacttgttcagagacaggttgtggcggattgaattctgggtgcagggagagagcaagagagagaggaaccgctaggtcagtggggacggggagatgaaatggcacctggcgctgctgcgcaccccccatcttttctctggcaggggagaggagggggggacagacacactggtctgcccaggcggctgcagctctgggacaccagccacagggcactgggagcccggagtgctgtcggaggcttttgttccctgttgccgggatatctgcctgctcagtcatccgagctctgagccgcagggtggctctcggtgccacccccgtcgcctgccctccctccctcaccctgccgctgacagcctctggccaaagccctcggctcccccagggcctggaccaccgtctccctttgcctgggcctggctggccctctctgtgagtgagtgggtccagggagggggctgggcagccgagagtggagaggaagggggagagagagagagagcgcgcagggatgagaggtgggggatctgatgactttccttgtttgttgagccggctgctggcctgggccttcaccccccacggccccctccccccactccaggctcagttgattattacccagccaagagctaagagcatagcactcattcctggggcccgtttctcgaagcgcagctgcacaggcttagggtagggtggggctgagggtctctgctttttcggtgcagctgcaaatgaccctgctctagggtcaggggcattggaaatggcttgggactgcggtcctgtggcctgcccgctttgggtgcttcagggaagagtctgggcgtccttggggggcccctgactccaactagcccttgatggtgatggctgaagactcttagggcactgcctacccagcctcaaatccaccatcctcctgccttgtccattcttaggtgcttaatcttgtccaaagcctgctgggggacaggggtcctgggctgggacggcagggcaggtgggtggataatgcccggcagcaaggctgggatgtttacatggtggcctgggccccttggctgctcagtgcctggttccagagacgtggaacacgaagtgagtgtggtaggcagagccccagtggaaggcacctggctcaggtaattgtccccccagggaggttggctgacagcgggggttggaggcaggaaactgagcagaggttgaggtggggggctgggacagcagctttaggaaggccccttaccccctccaccctccattgggacacacctggccctcacatgctaaggcaccccttccattccaccctccccaagccaactgcaaaagggcaggacgtagagcctggcagggaggccacgttccagtttccgtttctgactcccggccccgacaaaccatcccggggcagggcagtgtctaggaattctaggacttgggacaagaatgcgccttcagttcatcgctctccccaaggagattctgtccacgcagagtctagccctggtctttggcctgggcctgctggatgaatggcaggttatttccccttgaatctcagcctctgcacccctaaagccctccacctctggacattctcccttctctctctctctctctctggaagtcaaaggaggggcagttgcaagaactgggctcctttgcagggctcccttctggggcgctggccgcaccgcagagcctacttggcctgcagatttgggatatgaatccagtgcagcgtggggagcgaggagggaatggggagggagcggccgccgcccgtgcctcctctacctgccaggtgggatctgcgtggcggaagtagcagaagttgtccgtgatccacttgtagatggccgacagggtgatcttggtggccttgctggcctgcatggccatgcagatgagcgtggcatacgagtagggaggcttcacgtgcggattgg

SEQ ID NO: 32073 - DNA, 1111 bp, Artificial sequence
  DNA replication origin
ctgagcccgctcccagccttagccccccaaccccaggctccgtcccaggagcagtcgacgcctcaaagcgtacgggacaggaagggggtgggggcgagagtcttggttccccagaacgaacggatccatagcggttcccggtgccgcaggccgcgcgcttctccgaccccagcgcggggccctcgggcgggaatgagccgagccgggacttagcggcgggtagggggttgggtggcgcgggagagggcggcagaaggagggagttcgaagagagttgccgccagggagagtggcaagtgcccgcggtctccttggagacgtgctggccaatggcagaggcggaagctgtttatgggggcggagcgtcgccatggcagcaggagaagcctttggagcggctacttaatgccggtcccggggccgcggtagctcagagaagcgccgtcgggcgggggggcggcaagaggcgctggcagggcccccgagctgggggcagagagccgcagggggtgggagcaacttcttccagaaccttcctctggcccgggctgcgctctgagccaggtaagggatggggagggctgcaggccagggggaagggtgggcaacggtaccaacccgctctctcattcgtccttaacggaagtggtgggcccagggactgacatcggagaagtctgggggaaactcgcctcctgccccccgttactgttccgtccccttccttcccaatgatcccctatcataatattccttttcaaggatcagaggacctccaccgcccccgccccgtcgtaccgccctcccaaacttctcgccccacttccatttgttgcgaggaggaagggggtcctgatttcctgctcttcgggagaaaaggatagcctcggatgcccctaccctcttcatttggctaataaaacctcgaagaggaaaggaagagggaggcagatctgatgggggtgggaccccagggccttgcttctgtttcccatacctcggcactaaaagatcctccccagctgcggggatgatgttagagagggcgtccccgtacacacactgtcccctcgggggtggggtagtgctcagctcccaccgtggtcctcgc

SEQ ID NO: 32074 - DNA, 1255 bp, Artificial sequence
  DNA replication origin
ggtgtgatcccggcttcctcacagagcccttttttccttctgcccagctccatcccaccagagtttctacccccgctgaggcatctcctgggcacagaccaccacactctaagccggctggcctgggagttagggtcctgcccacctcacctgggagttggggtcctgcccacctggagtttagcacgctggtcgctcactttgctttggtctgcacacctggtgtgtgcatgtgtatactgcttgtgccatctgtgtacccctctccctggagtacacttgtggtcacactacagtggggacatcaagaatgcaatatttatggattgctgcatgattcttaaaaatgaataaaactgtttacaagggaaggagagctaactgcaaagtgagcttatctgtgaaagtttctgtctgactttcgccagcactctttaatacttttactcaagaggatctggagttggaggagtgggagaggcaagggctagggaaaggcatgttggcgggggagtgatgcgccatagccgggccttcttcatggtctgggcaccagcctccccgaccccggctctccagctcctgggcagaggcggggtaatcaacccagcccccaccactgcctctgcagccgccttaaaccggagaacgtccaaccctgcagctcctcaataattaaagagcaggaaagctggtgacaggagggaggccaggggaagggaggaggaagggacacagtccccagagtccctctactcttaatccctgtgacttaaaggttggtgaaattaattgggcaaatgaccccgctaggagaatttgacaagtccatgacttcagagttttacccacgggctctgcttcatcagctgtctccagaggagtgagtgcgcttctgcagaagcctctggaatgtcagcttcctggaacctcgaggatacgggtggggaaggagctgcttactgggacacactggattaccctacccccttggtgtgtctgccgcctctgtggatgtaagcggcaggtggcatcggaaagtcagacctgcctgggacaccagagaaagaccctaagagtcgggggagagggaaaggctgcagaaacatgagaaagtgccactcgtagcggagaggaaagaaaacctcaaggatacggttcccgagcctgagcccgctcccagccttagccccccaaccccaggctccgtcccaggagcagtcgacgcctcaaagcgtacgggacaggaaggggg

SEQ ID NO: 32075 - DNA, 1359 bp, Artificial sequence
  DNA replication origin
aggaggtggacatcccgtctaattccgtgtaccgctacccgcccaagtccggtgagggcgggcgggcgccgcagccgcgaggagggagaggggcaggggcaggggtctgggtcgggacggcctgagggggccccgcgggtcttcggggactcagtggttgcggacgctccgaaacggtcttcgagcgcgggaggtcttcgagaaggccgaggtctcccccgccccgggcgaattagcccaaggggcgtcctgccgggtctagcagggtcaccgagggcaccgagcccctccacgggaggacgggagcggcctccattgtaatcggccccgtgacggggacgcgtgcccgcagggaccgaggctcctggggagcggggctgcggcgtcgtaggcgaggtcggcgccccgcacggacccggccggcccggcccaaagcctacctgcctcgcggggtccgagggccgcgagggaggcgacctcggcatccaaacaggcacttgcgccaggtgctatccctgcgctgccgtctcctggcctctggaaaggttagaattaggtttctcctggaaaagcttccattgcctgctgaaggatggaagccaaacaggcatttgcagtgctggtgcttttgcagaggctgtcagaagccggggggtggggggggtggtggtggtggaaagtaacagaaatgtttgggaatctgagtatcagagttactcggattgcccctttgctagcgtagtggcaagcctgggttttggagtgggaccagctctgggacagggcagaggtattggaaacgtatagaagtatgtttgttattagaatcatcccttcacttaaatgtctctagcctctggattgtggtatcagcattggaggtggaggaggattttgacagcaaagcagagaatcacaaggtagttcagttatgtgagcaccggccagtatgaattgcatgacctagccggtgtttacttttaattgcaagtagttttattttaattaattacttttaattttattctcaagacttctgaggatgaatggctgcgacattctgtctgcttaggacccgatggagattttggtgatttcggaatgaggtgtcagaattggagcagagcctcgtctctttttggtagaatagagacatactgagatgagctggtttctcagcagtgtgtccagtgtctgccaggtgaaagcaggggccagacgatgaacctgcccgcatccctgcagagtgtctgccagagctgtgtttctcactgcttttgtaccaaagaatgaatccttgcaaagatgaatatggtgaagaattgttttagaaaggtctaagataaagctgtgggtcgt

SEQ ID NO: 32076 - DNA, 1184 bp, Artificial sequence
  DNA replication origin
cgccgcctcaggccgcgtgatgtcagcggccgctccgcgcggggaccgcggcggccccagccaatggcgaggcggggcgggagcgcccgcgccggagcagccaatgagcgcgggactgcagcaggagccggcggcgcgtgcctcgcgcggggagccgcggctggactcggcgcgcgtggacgcggcccagggcctcgcggcgggggcgtgggcgtgggcggggactcgcgacggggacgggggcgcggccgggtgcccgcggcggggcggggcgggaccggccggagctgggaccccaggagacgagcgctgcacccggccgggacgcgtcgcccctccgcgcctgtttatcccggctcggattaccgcgcagggagccgccccctcccgcggtccgcgaggactggccgggagctcgctcgccattgtcctgggcgtcccaaagcgggcggtccccgctccgctgctcccgcgcctggaggaagccttcccaaccccgcccctcagcgtcggccggcggaggtcttcggaaatctcatgcaggggggtagggagaggggtcccacggtgcattcgcatgtctcctgccccgtgttaatgctggtgaccggctaggaagatgccgcctccctctcacgtgcgtctattcaaagcgctcccaactctatacatgctgtttaaggctccttgtagccctaaagttaggagaacatcgactgaggataagatcaagacatccagcctctgtctgtatcgtggaaacgggaccccggaaactttggaaaggcctgagtgccaagagagtcaacgcaggcgaaagcgaaccgggccaggcagaaccgggagctcctgttgataaaaacacacacaacagtgggaagcttgggccggcggaagacgtcattccattgcttaattacagacatttgtgttttaaaccttctattttctttgtgggtctggtgttttttttcctgagagagtggactgatcagcaaacatttcaactgctagaacatgactttcacaacttttcaacagtgttcgaagtacagtttggggtgtctggttcccttgattaggtttgtaaagctattttacggagtctaggtctttcctggttatattttgtttttgtttttctgtgttttgagacggagtctccctctgtcgcccaggctgga

SEQ ID NO: 32077 - DNA, 1631 bp, Artificial sequence
  DNA replication origin
cccctctgcacgtggggcagccgagggtcgggggccgcgggccgggcgcggaggcggggagagccggtggggggcccagccgctgcgtttcctgactccgcctggcccgccgtgtcactgccctgtttgtccgcagaccgcgctgagcacgttcttccaagaaaccaacattcccaacagccaccaccaccaccagatggtaagcggcggcgggcaggggcgcgggccggggccgctgtcagcgcggcggtgacagccatgttgccggggagcgccgcgccgcgaatgtaaacaaagagccaaaatgtcttccaggaaagagcggctcccgggccggcgctggcgcctccaactttgaggcccgcctcccgggctgctgctgcttggcctcgggactggtgcccggcactggtccctggggggaagcggcgccaaagttggggggagggggagagggccgggggcctggcgaggggctcaggagctgggggaccccagagccaggggatggggagggggagagggtgatgcccggacgtctggggcactgggaagcccgcgcgaagggcccagggagggcgatgggggtgcttgtgtttatggggaccccctcgtgctgttgagtggtttcccccctccccctccacacacacacacacccagcgctacagggaacaggaaaggcatgaatccaccctggctcaggaagccgggctctacccacaaagatctgttcaaccttccgaagcccaaggggactgggaagttggaaggacatacatcccccaagccaggaggacacacagattttgacccaagataaggccaggaatgtgtctttaatctctgtgttgagctccaccagcccagcacacagagaagtggtccggggtctggatttgctttctttttcattctagcccaggcccaagcttttgccctcctggccatggggtactctgctttcttgaggcccaggacatctctcctgtaccctacccccctagttacctattagccctgctgggggaggaggggcagggctcagcgatagggatcttaaaacattgttccccaggagagctgttgtggactctaggtgcatttttgggatttttaacacttggtgcccttgcctttggctctctgttttcatctagtcacagaggacaagtagaggggtctgtcttgaccttgttagctagtttttctcagaatggctgatgctgtatataaatcaagccaaaatggcatttgagtatgatgggagcatggtgctggccacagggctcttagaaacccaagagggtttcatctccaggggacaccgtcccctgcacttgaccaggagaaatggccagcacccgcctatgcttgagtctcgaagcttcctgccatctcctgtcaccggatccttgagatttccttccaccagctgtggccatcccaaaaaactcagaacttccagatactacagccattctgaggggctgagaacagggaggctccccaggaagagctggtctggcatcctgtttagttcctattgcccctcctctgcaaatcccaaggagatgctaagtctcttttgaagcttccctcaaggaaggcagcaggttttgtaacacaca

SEQ ID NO: 32078 - DNA, 1046 bp, Artificial sequence
  DNA replication origin
acatcactccatcagctctgcagcatggcagccctacccccgagcaccccaggtgtgccaggcccattctcacgcacattagttatatttatctattcatatatattatagttatatattaaaaacagaggaaaaacttgcctgaaaaactcctgaaggacccacgtggcccaggaagtttactgtccccccgacccacaaaaattcttttataaaatcttccagtgcgatcttcgggaaaccccctgccctccccggctcccccctccctggccctcctgtgtccccacaaccctgggctgcccccagctccagcccagcgcccggcggcgtccagtctcatctctggccgtccatggccgccatggctttctgctgggcgcccccctgctgtgctcctgggggccacgtgggctgtgggcggtggaggtggtggaaggtggtgggggaggagggcgggatccagggcgcctggtggctgggcggggacgaggcccagaaggggctgaagtttgcaggtggggagcaggctgcggctgtcatggggctgttgctgctctgcaggccctcggaggcgcggagcttggagaacatggccagcgcatcggggaagttgggcggcgtggcaggggtgttgctgggagtgcacatctgcgggagagaacacgggtgtggggaggctgcctcgggggtccccgagccactggatggggcttacccaggccagccgctcctttactcccatttttcagcttcattcattttcgcacaagcagcttccacaggacaaaagtgccctctccccgaggcaatacaaacagaaaacaaggacaaaacccaagaaccttatcaaaaccaacggggtttcatgaggcctggaaatgacaccccgaggagcattcaaagtaaatggttaattgcacccaggagctaaggtgtcagattaaagtgaaagggcaagggggcagcccaggacaccactgttccgcaccttccctgggcagggagaccagctgactgccccaccagccaccctcagatgctcc

SEQ ID NO: 32079 - DNA, 1889 bp, Artificial sequence
  DNA replication origin
agattccctggaggcaggagctctgtccagtgactcggccggacccggggcaggggcgccccgaggacctcgcagggcccccgaaaggccccaaggcgcggcgtgcagtgagcgggaagtggttggccggcgccccgcggcggcgcacagctcctgacagccacgatgccgcccgcgaccacggtctccctccgggagctggcggacctctccatcggcacgccagaggtgggcgccgtcaacttcacggccctgcacacgctcatcgtggccatgctcaagaacctcgacctccaaaatacccggatcgacttccagccctcgtcgcccgagcccagccgctcgctgcagtccgtccggagctcgttcagcatcccgcacctgcccgcgcccaaggaggtgcccaagggggcgccccgggagaagcgcaggggcgtgggccaggcgccttcgtcagcgctggagagccaagtgaaggacctgggcggccaggtggaggacctgagcaagcagctcaagcgtgtggacggccaggtgcagggcatcgccacgcacgtgcagcacttctcccaggccagcgggcttgacctggccgcgctagagtggccggaggagcaggaggtgggcgtgcgggcgttcgatagggtgcggactgggagtatcatgaaggacgccgccgaggagctcagctttgccagggtgagcacgcacacggaggcacgcgcaggccgtctgcctcctccaggccgccctccaggcctagccgagtccccaccaccctggaggggtgagcggtggtggggacggaggggatggggaccgaggaggtgccagacctcagtgcgactggctaaatagagtggcccatgctctaccttgcagtccacggggctgcaagacgtgaaaatcctaaaagaacgccaccaaaaggcctagggcctccccgagctggaggggcctggggaccccacctcctaagtgtagtggccccatcccaccccctccttcctagcccctgtttacgggagaggttcgcccaccacttatcagacatccaaggacccagagctggctcagagtggggccggcaacttctcagaagattcttagagtgaattccctttttaaaatgaataaggacatgaagagatacgtgttgaggacaaaggctcccagagaaggggagtcaggatggagagttggacctcagcttcctatggccatgacacaagccacagcaggcaggggaccgtttcacttggactttttttttttttgagaaggagtctcactctatcacccaggctgaaatgcagtggtgcagtctcggctcactgcaacttccgcctcccagactcaagcgattctcctgcctcagcctcccgagtagctgggattataggcgcgcgccaccccgcctggctaatatttgtgtttttagtagagaaggagtttcaccatgttggcggggctggtctcaaactcctgacctcaagtgatctgcccgcctcggcctcccaaagtgctgggcattacaggcgtgagccactgagccctgccttcaactggacttttgttttcttggagggacaaatgcatgtaatcattgagtataagtattgtccagtgaacagcaggaagcaacgcaggtcagcgccaggaggtaatagacacgtgcatgtctcagagccaccttaggttggttctgaaagaaaaagcagaagcaactaggaaggcagctgggtggggaggccaagaggagagacaggaggggaaaaagaggccgggaagaggcaggaagaagaggccaagccccagcaggggagccctggccgctcatgccctcctgccatatcaccccaggtctcgagaccgcagcaccaactcac

SEQ ID NO: 32080 - DNA, 1126 bp, Artificial sequence
  DNA replication origin
gagctccggacggactgcagcgagcggctgggctcgggcgacgagggctggaagtcgatccgggtattttggaggtcgaggttcttgagcatggccacgatgagcgtgtgcagggccgtgaagttgacggcgcccacctctggcgtgccgatggagaggtccgccagctcccggagggagaccgtggtcgcgggcggcatcgtggctgtcaggagctgtgcgccgccgcggggcgccggccaaccacttcccgctcactgcacgccgcgccttggggcctttcgggggccctgcgaggtcctcggggcgcccctgccccgggtccggccgagtcactggacagagctcctgcctccagggaatctgcgcctccgctccccggcggggtccgcgatggccacccctccgctgtctgtcgctggcctcgggtccccgagctggagccctggactcccagtccccgcgccggcggacgtttgaaacgtgggggcccccgcgtgccctgaagattccacgtaacaacacgcctccctgcgagccacgggggcggggggaagtaaaggccaccacaaggatcacaaggggagccttggcaacgggctgaggaggcctcctaagatccagctagactccatccatccccttaacctagaaaggccaggattcactcactcttggcggggccacataaggaaagacttgagggtttcctggcaaccatgctttgtgtcatcagctgcgtccattccagagtggtggccccatgtctatggccccatgtctaagggatgcagtcctggggccctggtcccctcagacagtccacatattttgttcaatcaaaggtgaagcaacttggaaaagacaacccactcactattcaggcagttccaattagccactagatgactaactggtggctaattgtcccttttctgtgctgccataattttttttttacttttgagagggagtcttgctctgtcgcccaggctgtagtgcaatggcacgatctcggctcactgcaacctctgcctcccgggttgacatgattctcctgcctcagcctcccgagtagctgggattacagatgcgtggtaccatgcccggctaattttttgtattt

SEQ ID NO: 32081 - DNA, 1217 bp, Artificial sequence
  DNA replication origin
ccaaaccggggtctcgcagtcggaagcactcagagtgcagccccgcgcggggccggtcgtaaccgcgccgcgggccggacgatgcccaagaagctgctgctgttgcccccgccctccgcgtcctcggctttccgcgtcccgcgcgcccgccccgttcccccgccggccatgaacgccgctcgcaccggctaccgagtcttctcggccaactccacggccgcctgcacggagctggccaagcgcatcacagagtaagggggcggtgggagggccgggccgggggcggcggcgcctagctctccttcgcgcccggagggacccgctcccctccacccgccccacctcctgcacctggggcgggaggcgcgggccttcccagccggacaaagcttggaggtgacggataccgccccccgctccccggttttgcagctgggaggcttggggcggactctcggtgacctcagccccccgccccgtgactgggtccgcggcctgcctgcctttcgtctccgcagtcccacaccccggggcgggccgagctttctggagccccggagtgcgtgtcttggggaaaggggctcagggcttggcttcctttcccacggctggagttgacctgggaatctgaccgccgccactctcaagtctcactgcagtgagacccgcgggcgtggttgtgagttgggggatccgacgcggcaggtgcggtcgcagagcaaaggtgtggggactggcagtgcgaagaaggcaattccagggaggcagatgggccggagctggtggtagaaatgacaggcctgaccctgctttgtaaatcagcttgggataagatcagtcatttgtgtctttaacccaaccaagcccctggtcttaagtcgcctttggggtctgacagctctgagatgccctcccagccttgccacttactagctctgtgtcagtgggcaagagacttgatttccctgaacctcatctgtgaaatgggcatggttgagaatattgtatgatcgggataatgtagaagtagtatctggttctagcagagtaggggctcatagtggccctctgaatagttgtttactaagtggcctcttttctttttctttttcttttctttttttttttttttttttttttgagacggagtctcgctctgtcacccaggctggagtgcagtggcgagatctcggctcactgcaagctccgcctcccgg

SEQ ID NO: 32082 - DNA, 1978 bp, Artificial sequence
  DNA replication origin
cagccaattagccgggcggcgccctgaactccggcacgcctccgcggtgtcttctcttccggaggacccaggcagctcggccccgtttcccaacacttggggggtcagacgggcgggacccgagagtccccgggcgggtcggggggcactggctgggacgcggggtccctggggccgcagctccgcgcgcgtatcggcgggtgcgccttcgccttgcgcggcccccgggcagtccccgctgggtccagagcgtcccgagcgcgttccgggaaggtgactcagcgacgcgctcaggggtcgaaaaactccgagaaacaggaacgaggggagggagcaggggcgtcatccccgactcctggcgtcgcggcgcgtgtcggaatgatgggtcctgcacctccgagccccccacccccttgctccaggaatccggcgcgggcgggggagagagccctgcagccgcagtgccgcggtcatgcgctgcggggacgcgagcggcggctgtgggaggagggggctccgcgcgggagcccaggaccagatccgtccgcccctcccctctcctctgccttcttcccctcctcttcctccagcgagggactttggtgcctagaaaacgcgaatcggaggctgtgctccccgagatctcagccttcgagggtactggctgcggagattagctggggcagccttccccgtctgctccccgccccggagagcatttccaccaaatctgaaaagctctgtcattagccatagagtctgaagaggggaaactgaggcacagggaagcactgtgagttcgtggtgataaagcccacctggttcagggtcccccctttttttttcctcctggggccccagaaaggtcggatcctgcgcctccaggcccactaccaccagccttgagtccgcggagcgggcgggggcggggttgactgcaaactgagttggcaaggggaggcggggcacgggctctttatccaacgcctccgggccccagctcccctcctggctctggaaggccccgcgggagggaggcgaagggcaaagccctctggccccggttccaggccgcacaatgggtcctctgtcctccctggcgcctaaccccctgcccccctcacctccaaggcctttgcccccctcattcttgtcattcacttcccccaacccaggctgcctttctccagacccctttccccttctccctttctaaagaatttgatcctatctccagaaactcccccagctgcatccctgctcagagaggcaggattggccaagagcaagatggttccccttcccacggttgcgggtcggggggcgggcacttggatctctcaagctgccagcttggcccgtttcccactgtactttacttccttttttaaaaaagaaaaaaggacaaggcgggaaggagttgggggggcctgaaaccctgagaggtgaagaggcttgcacaagcctccaaccagttccccacaaagcagagaagcaaacctgtgaacccagaccccacgctgagaagccaagtccagccagagctcccctctgggcctctctgtatcccaggctatttctccctgaagggcaggtatctggggatctggtgcctggtggattgcttgccgcagagctgtggcgtctccctgaggaggaggaagcagcaggccgggcgcagtggctcactcctgtaatcctagcactttgggaggccgacgtgggtggatcacctgagatcgggggttggagaccagcctgaccaacgtggagaaacccgtctcaaaccccgtctctacaccgggtgtggtggcgcatacctgtagtcccagctacttgggaggctgaggcaggagaattgcttgcacccaggaggcagaggttgtggtgagctgagatcgtcccattgcactccagcctgggtgacagggcgaaactccatctcaaaaaaaaaaagaaagaggaagcagctccaagc

SEQ ID NO: 32083 - DNA, 1154 bp, Artificial sequence
  DNA replication origin
agaggagaggggaggggcggacggatctggtcctgggctcccgcgcggagccccctcctcccacagccgccgctcgcgtccccgcagcgcatgaccgcggcactgcggctgcagggctctctcccccgcccgcgccggattcctggagcaagggggtggggggctcggaggtgcaggacccatcattccgacacgcgccgcgacgccaggagtcggggatgacgcccctgctccctcccctcgttcctgtttctcggagtttttcgacccctgagcgcgtcgctgagtcaccttcccggaacgcgctcgggacgctctggacccagcggggactgcccgggggccgcgcaaggcgaaggcgcacccgccgatacgcgcgcggagctgcggccccagggaccccgcgtcccagccagtgccccccgacccgcccggggactctcgggtcccgcccgtctgaccccccaagtgttgggaaacggggccgagctgcctgggtcctccggaagagaagacaccgcggaggcgtgccggagttcagggcgccgcccggctaattggctgcgtgctcctcctggacctgcctcttctcgactttaagaagcgatgagagaggtgtgtgggggcgggtggggccggcgggggcgcgcgagccccgcagcctcccgcaggggcttggtttctcctaactctggccctacctgggcaggtcaccaatgggccttggcaacttcttcctccgtctccgccgtaaccccccagggatctaactcgaggtgctcgcggacacgttctgtggcttgccgcgataagtgtatcacaaacacactgacaaacgcgtccctactggcctccaaagaagtgacaacttctgagcgcgtttccggcgccccttcttcacgctgagccagagggggcggggggcacgtaccacatgcttggctttccaatcccgacgggggcccccaggcccatctacactgtcaagcctcctctccggctcggagcccccggcctgtcgcctgctctacccgggacagcgcgctaggcggcctcaggctcggtagcccagctgcagcgtcgggaagttaaaaataacctccgtgggagcgcgggggaggaagaaagagggaagctggtgggcggcgggcgag

SEQ ID NO: 32084 - DNA, 916 bp, Artificial sequence
  DNA replication origin
cgggcagaggccgaggccgcgccgggctcaggttccacccccgggagcgcggggcggagccaggccggcgccgaggctcagtgccctccccgctccgcggcgccggctgcgaagttgagcgaaaagtttgaggccggagggagcgaggccggggagtccgctccagcggggcgctccagtccctcagacgtgggctgagcttgggacgagctgcgttccgccccaggccactgtagggaacggcggtggcgcctccccagcaaaccggaccgactgggtagggccgcccaccctgccttcgcgccgctcgtggctcctgtgcggcccgccctcgcggggccccgggaactgggccacttgtcgcttgggcgagagcaggcggcagctggtggcccggttcgggcttggctttggcgcgacccgggagcggctcccacgagcgccgcgcgcgtcgcaacggagcggggccctgagaagcgcgcgccgcggctcccaccgctctggagctccgggcaggggacacggcaacctggatggctggggcagggatcctctcccagaacttcgtgcccagcaatgtccgctcaagttctgggatttttacgcagctggactcccctccccctggcagccccgaggggtgaggagctagtccgtcggagggagccacggggctctgactcatccgtcgggccggaaccgaaccccaagccccagggagaaagccccggagcaggcgcccttctcagggattgtaggcttagtcacacggcgggggcgccctcggaggcaccggacctcagctctctggacttcccgggaacctggctccccgcgcgtggtcccgggatttagtcgggcgctccccacctctggcagctgcggccccggactccgccagcgctgtcttctctcc

SEQ ID NO: 32085 - DNA, 868 bp, Artificial sequence
  DNA replication origin
ggatttttacgcagctggactcccctccccctggcagccccgaggggtgaggagctagtccgtcggagggagccacggggctctgactcatccgtcgggccggaaccgaaccccaagccccagggagaaagccccggagcaggcgcccttctcagggattgtaggcttagtcacacggcgggggcgccctcggaggcaccggacctcagctctctggacttcccgggaacctggctccccgcgcgtggtcccgggatttagtcgggcgctccccacctctggcagctgcggccccggactccgccagcgctgtcttctctccctcaggtccagccgccgcagggaatgacgccggtgctcctgcagccacggctccgggcggggaaggcgagccccacagccggccctgcgacgcccgcctgggcagcaccgataaggagctgaaggcaggagccgccgccacgggcagcgcccccacagcgccagggaccccctggcagcgggagccgcgggtcgaggttatggatccaggtttgtggggttcctgctgggaagggctgtagggggattcctgttcctcgccaggaatgatggaacgcccagctggacgaaaggggctgtggacgatcgggagaaacattatccctcacgaggccagaagccggccgaatctgagccaaggaagggggtggcaggggcgccgcgtccccaccccaggtctcccagcaaaggccgctcctctggccagggtcaattaccggggtgtttcgggcaccaagttcccacactagtgccccattgttacccgtggccccctagtggtcggttgcggacgtggcctctttggttttgttttctcagcgggcgg

SEQ ID NO: 32086 - DNA, 1187 bp, Artificial sequence
  DNA replication origin
ccccaggtctcccagcaaaggccgctcctctggccagggtcaattaccggggtgtttcgggcaccaagttcccacactagtgccccattgttacccgtggccccctagtggtcggttgcggacgtggcctctttggttttgttttctcagcgggcggcccccggggcgtgctcccgcggccctgccgcgtgctggtgctgctgaacccgcgcggcggcaagggcaaggccttgcagctcttccggagtcacgtgcagccccttttggctgaggctgaaatctccttcacgctgatgctcactggtgagtacctctcggagggggtttcgggagcatcccctggcaggggacccccccagtcctgatagctgccggtctccctgcagagcggcggaaccacgcgcgggagctggtgcggtcggaggagctgggccgctgggacgctctggtggtcatgtctggagacgggctgatgcacgaggtgaggaccgcactgcgcggctaggcctggggcttggcgcggtgcgtcccaggctgaggccacgtgtgcttcaacaggtggtgaacgggctcatggagcggcctgactgggagaccgccatccagaagcccctgtgtagcctcccagcaggctctggcaacgcgctggcagcttccttgaaccattatgctgggtgagagcccagggccagagtaggcctgtttcccgtcagtgctcctctaccgcgggggttttcttgtctaagctcccataggctgagatcatttccatttccccttctcccttagtcctggggccctctcctggtgaccccagctgactgcttccatttgctccatctgtcacctaccagtcctgccaactccccagggaccacatggcgctttgccagctcccactccccgggaggaggaagcgggggatacatgggggctcctgtcctgccttatctgactttttccccctgcagctatgagcaggtcaccaatgaagacctcctgaccaactgcacgctattgctgtgccgccggctgctgtcacccatgaacctgctgtctctgcacacggcttcggggctgcgcctcttctctgtgctcagcctggcctggggcttcattgctgatgtggacctagagagtgagaagtatcggcgtctgggggagatgcgcttcactctgggcacctt

SEQ ID NO: 32087 - DNA, 1603 bp, Artificial sequence
  DNA replication origin
cctccgggtaccactggacgcgcacgtagccgcggcgcagggggctggcccggccctcctcgtggcccgcgcccccggcctcggagcaccccgagctcccgcggccctcctcctcgccctccgagtccgagtcctcgccgtggatgaggcgcaccagcccgaagtgcacggagccacggtaacggcccgacaccaggtcgtgagaaaacagcaggcgctgcgagccggcttctgggccggagtccgaggacggcccggaggccgagtccgaggcgggcgccggcgccgggacgggggctgcggctggggccgggactgcctccggggctggagccggggcctgggctggagcgggagctgcgggcgtgggggctgcgggatccgccataactgctctgcgcgagtctcgggcggcggcggcgacagcggcggcgaacgaggcgcggggaggcgggaccagcgggcgccgggggcggggccatagcgcgctgacgtgtccctgcgtggcgccgtcgtcagggagccgggatgcagttgctaggagccaccgcctcgtcgctaggggacgctgaagatgccgcggggggcgggggcaggatggaatccactaagaaggggcgagaccagtgaggattcaactaaagggagcgagaaggggcggggacccgggaggaggaagtggagtggccaccgaggaagaggggagtggtcggggtggggcacaggatggtggagagactgtcaacaacttttaatgagctcccttggcgtcctagcctagcccccaggcactgggagcattgcagaaagagaaagatactgtccctgtcctctaggtgtttccagtctagttggggagacaaaacaaatacacattaaatagataacaaacaactccaacttgtaaggctataatagatacgtgtagagcatatgtataatgcactgtattcaggaattccaagcagttcgaacgtcatgacccctcagaagttgacccagaagctggtgaaggaggcccagagaaaggtaacaaaaggatcagtggtcccagtggtttggctacaaatccatgcagataaattcaaagctccctgaagccaagaatgaatggcaagaggtagtatagtaaggtagctaagagtggggaccacggattccaatttttggcactgccacttactaatctataaaaataggcacactgattaacttattttcatcttaatttgctcatctgtgaaatagggatgataatagcaatactcatctcattgggcaattggaggattaagtgaagtagaacagtgcctggcatttagctccttcgataagcttaaccattgttgtactatttccaaactccctgcctagactaaattccagactggcagaactgttatggtctgctccatattgtcattttaaaatataaaaagtaggccgggcgcggcagctcacacctgtcatcccagtactttgggaggctgaggtgggcggatcacgaggtcaagagattgagaccatcctggccaacatggcgaaaccccatctctactaaaaatacggaaaaaaaaaaaaaatagctgggcgtggtggcaca

SEQ ID NO: 32088 - DNA, 1073 bp, Artificial sequence
  DNA replication origin
gggatcccaggtggcagacgtggggcctcaggtttcagggggtgggtgctctgcgtggacattctggccactggtgcctccttggggcgccccagctttggaagtgtcctcctaagccaaggagggcctcccagcacctgttggagaacagcaagggacaggggtctcatcctcatctccagggaggcaggccccagagtatgtatctggcctcttttgtagcaggaactggggtggagacagcccctaaatcaatgggcacattccccaggtacctggtccccgaggctgttaccaggcattgcaaacattggcactgtctccccacctttccctctcagccagaaggatccctggaggtttgccaccttgcagacctgcagacattggtctcagggtgccgtctgggtgcttctgagccccagagatggtggcagggatgagcagggctcagtggagcctggggcaccccaaccctgctgcccacggtgggaggggaggcaggactcgtgaccctccactgaccacgtctaatgcaactgtgcagtgggtgggcgcccggttcccccacaccaccattcatgtggtttatcttacctccccagagggaggcttctggtcctttgggtgcaagatcctgtggcagagagctttttaggtagcctcagcccttggtcctagagagccccttaatcaaagtgggcccttagggagcctctacttctatccagatggcctcagactgggccacacacatgcaggatttgtggtggggggtggggaggttagagggagccgggggctgcagagggcctggggaatggggaggagcaggcaaggagagtgcataggacaccccctgccccacacatccagctcatcagacattcccctctgggcactcttgtctcccaagacaccctgcagatttgcagttcttagaggaggccatccctccctccaccttccaagacacttaataaactccatggcttccatgtttccctccatgtctagaagctccaagtagagaagctcctgttcctaaaggctgagagccaggagtgggggtc

SEQ ID NO: 32089 - DNA, 1849 bp, Artificial sequence
  DNA replication origin
actgcaaatctgcagggtgtcttgggagacaagagtgcccagaggggaatgtctgatgagctggatgtgtggggcagggggtgtcctatgcactctccttgcctgctcctccccattccccaggccctctgcagcccccggctccctctaacctccccaccccccaccacaaatcctgcatgtgtgtggcccagtctgaggccatctggatagaagtagaggctccctaagggcccactttgattaaggggctctctaggaccaagggctgaggctacctaaaaagctctctgccacaggatcttgcacccaaaggaccagaagcctccctctggggaggtaagataaaccacatgaatggtggtgtgggggaaccgggcgcccacccactgcacagttgcattagacgtggtcagtggagggtcacgagtcctgcctcccctcccaccgtgggcagcagggttggggtgccccaggctccactgagccctgctcatccctgccaccatctctggggctcagaagcacccagacggcaccctgagaccaatgtctgcaggtctgcaaggtggcaaacctccagggatccttctggctgagagggaaaggtggggagacagtgccaatgtttgcaatgcctggtaacagcctcggggaccaggtacctggggaatgtgcccattgatttaggggctgtctccaccccagttcctgctacaaaagaggccagatacatactctggggcctgcctccctggagatgaggatgagacccctgtcccttgctgttctccaacaggtgctgggaggccctccttggcttaggaggacacttccaaagctggggcgccccaaggaggcaccagtggccagaatgtccacgcagagcacccaccccctgaaacctgaggccccacgtctgccacctgggatccccgagtccccgagctgtcagcggcgccacacactccctgccagtgagtttcgctgcctcaccccggaggacgctgtcagcgcctttgagatcgagcgtgaaggtgagtggccccgcacagggtcagagggatgctccactctggtccagttatcctgtggggaggagacccttagtctcctgtccttggaggctgggtcccagagtatcagaccatgtgtgcgctcaagaaagtgggggaaacagcagccctaacccccattttcctgtggggaacggggcatctgagtggacactcggggtgcagcagacagtggacgcgaggcacagcgactaccagtcacccacctgagcctcctgccacagccttcatctccgtcttgggcgtctgccccctgtacctggatgagatccggcacttcctgaccctatgtccagagctgtccctgggctggttcgaggagggctgccttgtggccttcatcatcggctcgctctgggacaaggagagactcatgcaggtgaggacagggctgcgacgcccagctccagggaggcctctgaagacagaggtcagccagatggcggggaggggagcccaggggctgggatttcttcctccagaactggagagatgagtacaggccacaggcccctcccagagcaagaccttctgggtcttcaagttttctccatggggttgggggtatggctcccaatttggggccctcctttgctggggtgggtgccctgaccacaggcacccaggggacacctgctccctgcctgggttggtggttgggggggagcacgtgtcagcagaagtgacctgggatctcatcccttgctcgctcccaggagtcactgacgctgcacaggtctgggggccacatagcccacctgcatgtgctggcc

SEQ ID NO: 32090 - DNA, 1576 bp, Artificial sequence
  DNA replication origin
ccatcaccgtgggctccctcaccttcatggagctccactgctccctgcggggccaccccttcctgcgcaggaacagcggctgctgaactgggctgcccacctggctgccaacatgatccccgtctctgccctgggctcctcttagctcagctgagcatggagacagcagtttccagagagtggagagagcagggctaaataaagaggagataaggtggcttctcacggcctgagctggagtggtgtgtcttgtctgtccccacgaggcctctggacctcctgtgttctgaactctgtacctgagaccgggctgggttggtaagcggggacaatgggaggtgctgtggggttcctggctcctttcctcctggcaggtgggcaaaggcaccaaggcggcatcctcacagtagcccattgctcggtggggggggggggtgtccttattctccccagcctcatggatgccgcttcccacccttagcccctagggtgggggagagtggggagcagcaggatggggcagaggcgggaggcctgtgctgtagaggcagcttggggcagggaagctggtgcagggccctctgcccatggtaatcaagtggtcatacccggtgcctcactggccatcctcagtgtggtgggtgaggcactggcacagggagtggactcgtccccgggtggggtgacaggtcccctcagtgccatccccatcagggcaggccaccctgggcccaggcagccccttccctgctctggagccaaggcagaacaggtaggggtgggaaccccagggccctaaggattcaacccagccctcccaagtggacccctggggtctcccacgtgaccccaatctgctttctggcccaactaattccccaagatgctccacaagttttctgctgtccaccgggccaaactgctgtctctgagcagctgatggctgacccctcacctcacccccaaatcccagtttcatgctacctgaggtctccgttaaagacaatgtactgccataaagaatattatttaatccatgagacatcgtccgtacaaagttagcgttacttttaaaaatgaagaccgtgatataaactggtaaaaaacgggcctgatgcgcctcgagcactccctgggagcaggccctggggtggctccgcccagtgtcgttctacctgaggtctacttgtgtctccccccttgttctctgcccccagaccatggccaaagcctttcccacaatgtcccatctgagagccttatggatgggctcacagggcagaggtaggaggagaaagaggaaggggcatggtgggcacccagccctgggggcaactgagggcacagccacgtccccagcaagggcacgctccagtagtagtgggggagaaggcaccagcagaggcagcgctgaggacctgggaagaaaaggaccctgccccaggagatggtctcagcaaggagcgggatattaggaactgagacccaagactcagagaggcaggtgccttgggtgtgcctgagcttgggtcaggatctcacaggcctcacgccccagaaaaaccccgccttaacc

SEQ ID NO: 32091 - DNA, 1116 bp, Artificial sequence
  DNA replication origin
cccggggccgggccttccgccacccggaggagatggacaggccccacgccccgcacccaccgctgacccccggagtcctgtccctcacctccttcaccagtgtccgttctggctactcccacctgccacgccgcaagagaatgtctgtggcccacatgagcttgcaagctgccgctgccctcctcaaggtgcggggctccctcctgcagggcccccacctctgcccggcctcccttccttgcccctcccttccactcctcatagtagcatcccctaaagctcacctgggcatctgcctacggtgccaaggacagtggatgtgctgggatccctgggcaaagagggaccccgaagcccagcacccaggcgtccatccttctgtcttaaatctcgtgtgaccccctgccaagttttggaacctggtctctgcactgactcttaagctggggaagtgggaagtgagatgcatacttgctcctcatccacccgggttttccaagtccctgttacgtgctgggcaccgcgtgcagagccatcgccatcctggctgagctcgcagcccagggtgagggtcaccattcagggtggtcagtttaggagagcggctgttatcagggaagacattgagttaagcccagaagacacaaggagacgttcactagggaaggaagggaacagcattctcagcagagggaatggcctatgcaagggccaggagcccagaggaagtacagtgctttgagggggcagcaggcggtttgatgtggttttagtgaagggtggttataggagctgtggcaggagatggggtcagaaaggtgggcagggacctggtattccgtgccaagaaacagggacagggagacatggcccaagcctcgggagtgagggtatagaatgtgggttgctttgagtgttagggtaccagcagcccaaggcagaggggcagcagggaccaagggaaaggtgactccaaactgtgccaagagtggtgtgccaacggaagctggtgtctcatttcctggccttccagtctcaggagctcctcttgcccgttcagcttgcagaatctccacgctttgggcaggatccctcctcccaaggcgctgcctgcag

SEQ ID NO: 32092 - DNA, 921 bp, Artificial sequence
  DNA replication origin
cttgaggagggcagcggcagcttgcaagctcatgtgggccacagacattctcttgcggcgtggcaggtgggagtagccagaacggacactggtgaaggaggtgagggacaggactccgggggtcagcggtgggtgcggggcgtggggcctgtccatctcctccgggtggcggaaggcccggccccgggccagcggatccacaatctggaagggaggggggcggtaagcagagccattagggtccccacccctgcctcctttccccatggatcccaccttgggcatcttgcagggctttggggactcagtgccctggaaggacggtgcctcctggctggggagctccaggtcacgctggcacgaggccttcaggcggccgtagcgcatgctgcagtggtgcaggctgcggcgctgccactgctgccgctgcccctcccagtcgccgctgactccaaaccactgggctgcgcccctgcggaagcagacaagggacaggtgggcatacgcttgtctacgcctgtgcacctgagtgtgtggaaggggtgatggcacgtgtgtgcccgcgtgcctacagggaggtggggggcggatctgcctgtgaggcccctggctggagcccagtgaccagatgagcagaagcaggggatgacgggagcgtgaggagccaggctagggccccaggcacccccacactgatccacccagctcctcgaagccccccagcctccacaccgtgatattccgcaaagcacatacccatttccccatctataccatgataataggccacagggagacattgctcattaatgccggcctcctccttccagagaggggacgcagggaccaggcccaatcatgtccaggccccgagaatccacaggttgctgggtggggggtgctgggcttgggtgtaggggg

SEQ ID NO: 32093 - DNA, 1130 bp, Artificial sequence
  DNA replication origin
tgattttttttttttttcaatgagcatatgccacttttattgttaaacagtgttctcactatgggggagaaaagtgccagacaggtggcagtttcagttatcttttttttttgagacattttctcactctgtcgcccaggctggagtgcagtggcatgatcttggctcactgcaacctctgcctcctgggttcaagcaattctcgtgcctcagcctcccaagtagctgggattataggcatgcgccaccacacctggctaattttgtatttttagtagagacagggttttaccatgttggccaggctggtctcaaactcctgacctcaggtgatccacctacctcggcctcccaaagtgctgggattacaggcatgagccacgcacccagccagttttagttatctttgaaaaatgaactggggctgggcacagtgagcttgcacctgtaatcccagcacttgggaggccaaggcaggcagatggcttaagcccaggagttccagaccagcctggctaacatggagagacccccacctctacagaaaaaagacaagaaaaataaactgggtggccttgggggacagggaccagcacagtaggtttctcatctctcggcccacctcggcctccccaagtgctggtattacaggtgtgagccaccgtccctggcctgcatcttcatgctcttttcagggtttggttcttgcctcaagcggagagatcagaaattgaatgaggtagtaagttgaggacctcccagacccatatggtccgggatgcaaatgatggtcagaaatagacctcactccaaccactgggcctgaggttcagcctggttcaggctgggtttagtccccagggatggtttgtttttggttttgtgtgtgtgtgtgtgtgtgtgtgtgtgtgtgtgtgtgtgtgtgtgtgtgttttcagacagagtcttgctctgtcgccaggctggagtgcagtggcgcgatctcggcttactataaccgctgcctcctgggttcaagccatcctgcctcagcctcccgagtagctgggattacaggcacgtgccaccacgcctagctaattttttgtatttttagtagagacggggtttcaccatgttggccaggatgg

SEQ ID NO: 32094 - DNA, 1709 bp, Artificial sequence
  DNA replication origin
aaacagggctctgcccaggcggggacccagctgggtggagggcggaggcaggaacccaggaagccgactgagcaaagactgcgtccaggccccgcccccatgagcccggccacgccccctggagcccagccccgcctcccggccgcccgcgcgcaggtagggaagaggcggagcgccgccgccccgcccccgaggagccaccgcccagccgctcgcaggcgccgcacggagttgcgtcccggggacttggggccgcagggaggtgagcgcggggcgacgagcggggcaggactcacggccgcccagccgcaggcgccggaagggtcccgaggttgtgcccgagcctgccctggagcggtggtgcgcggccaggaagggtgcccagtgcccggtgcccgccctgcggagcgcctgggtcccacgtgggctcggctggaggcccgggctggctcagacggcgccggcggggccgctggacccggtctgctggcccctagggctcggctcggacaggacgcctaaggggtccctgggcgacggggcgccagatgtaggggcaagacgattgggcagagatttaaacctccggaggaagagaggagactgcgcagggcagtcccgcctgcgtcccagaagtgcctgcagttcagacccttctctcccctccactttctcccgggtgagcaccgggcggaccggggccgaagtttgttggttgagccagccaaggtggaaacaggtgcgggggtggggatgagggactcacacagcagggctggaccggagctcagaaattggacccaggagtcctgacttctggatggaggggctggggaaggttggccctgggcttgccttttacctgtttggcccctcggatgttcccccagggcattgggatagagacggataagttccctagggtacagaccccgccccactcccacgccagggcgcaaaggaagcctaggttttggccctgccccattccatgaaagattaacggagggggctctagggttggagctactgagagggtggcagcgggtgtgtctgaggagcagaaggcggtggggagctgaccccacttggggagaggctgctgttgcctgggcggctggcatcaggcccccagtgtgtgccatttgctggtaatataatgagaccagcatctgccttattcgaccctcactgtccgtagggcaggcagtggaaagggaggcgtgttttagagctgtggttctcaaccaggggcgactttgcctgccatgggatatttggcaatgttggagtcattttgggtgtcacacacttgggaggggaagtgagtgttgttgttactggcaggtagtgggtagaggccagggacgctaccagacatcttcagggcacggaacagcccacataacgaggaattatccagcccaaggtgttgggctgtgctgaggctgagaaaccctgcgcagcagctggtccatcaggttccttctcaatgatgctccctcactggggaaactacctcagttttccagagtggttaggggaggaacttggaataaacctgaatgagatgaggggtaaggcagtgtgagggcacttattcccctcacaagagtcttcctttggtgccatgagacaccgcctttcccaatctccactggccctgcaggaagctggtctaggtgctgtgggggagaggttgggaacag

SEQ ID NO: 32095 - DNA, 1974 bp, Artificial sequence
  DNA replication origin
catgagtatactgtactccagcctgggtgacaccaaaaccttgtctcaaaacaaaaacaaagagtttagacagtgtttctctttaagttatgtaagtaatatatgcacatgatacaaaatgaaaagcaagtgactctctccccctaaacccctgcagggttactccacagatatccttccagaaagtttgtatggatctaccaacatatatatgtctgttctatttaaatttaggtaaataggattatactaaacatgcagcttgcttttttttttttaacttactataagttggagataattcctttctcagtacatggatagctgcctcgttgcttttaacagctgtgtgacattatcacaagttatacccctggcctatttaacattcttccctctctggcctcacaggtgcgtgttgctgcagccaaggctgtaatcagcctccctgcacctatgtggccgggcagcacgccatgtttgcatgggacaaatccctgacaccagcttaagcaccaccatgaatccctcccctcctggggactcctgcagagcttccagtagagctccaggagagagaacccagctcaggcatttgcagcagtgtttgttagagtctaaagtcagatcatgaccgagtttaaaccccagctgctcccctcacatctccctctgcctcagttttctcatccctaaaatggggatgatcataatggtacccacttcatagacctgtactgcggattatacagactaaagcactttggaatggctagctgctctcacccttcctgttacagtattgagttccaacgtctccctgtagaatgctggcacttcgtgggcaggccctggttttgttcctctctgcacataaccccaggatgtgctggttgcacaataaatggtcccttacatttgttactaggagcaacccccaccccagctttggcccactccccctccttccagcctgtgccctcctcatggccccagagctggggaggagagatgcatctctcaggataatctccagcagccaggtgctccccacctccacccaggtcagcaataaacaccagagtccttgggttggggggcagggtggctcaggagctctctaagggccagaggttttgccttggccctgacaaccccacccccacccctccaagcctgagtctcttcaaactctgctcctcctggcctagccaggcctcctggagagggacggcgagatgataagcgctggggctgagaacggggcatccagaccttggagttcggtcctagctgccctggccaaggttttgtttgtctagtcccaagaggcaggcccttggagtccagggaagagagaaggaaccacctgggcagacagacccaagccaaggggccaggtgtcgccagcgtccccaatctccagtctggctctggcccgcatggcagctggaagggccagagctgggtgggttctgtcaatgcttctacggggtgtgtagggggttggcaggagtcacaaatgttggccttagctgcagggcaaatgcagataggacctccacggagtgcctgttcccaacccaagggcacagcagagctaggagagaggcctcagggtccaggagggagaggaggtgttcaggcccagcttcccggagagagtgtgactacagactaaaagggtcaagggaacaggcccacttggcctgaggatgagggcgctggaagaaggggatgggagattgggtgctttttcttgatggggaggggcgacttgaagacggcaatcaagacctagatgacgtgtttggtctggggtggagtgaggacgccaagagggaaaggacggcgccctgaagagaccagctcaggcgaaaacagggctctgcccaggcggggacccagctgggtggagggcggaggcaggaacccaggaagccgactgagcaaagactgcgtccaggccccgcc

SEQ ID NO: 32096 - DNA, 2156 bp, Artificial sequence
  DNA replication origin
ttcaagcaattcttccacctcagcctctcacgtagctggaattacaggcacatgccactgtacctagctagtttttgtagttttagtagaaacggggttttaccatgttggccaggctggtctcaaactcctgacctcataggtcaggatcctcccgcttcgccctcccaaagtgctgggactacaggcatgagccacctcgcccggccagtctctttttaaataatagtcatggggtctcactatgttgcccaagccggcctggaactcctgggcttaagcgatcctcccacctctgccactcaagtagctgggaatacagacaggagccaccacgccccgtttaatgtgatttactgatggatgggatgtgaggggtgaaagagaggacagttgagggggactccagggcttctggcctgtttaacttggcaaacagagtctccactttcgagggggaatagccaggggagaggaggctttggcagaggttccgctttgtccacacgaagcatgagggtccaggaagcaactggaggctccagcctgaatcaggacagagacgtcagggctgggatttaaatttgggattggatgagctcactgagaaaagagtgtgggaagaaaagaggggcgaggacagagccctggagccatcagccctgagtccggaataaagggaccagggagagggaggatcgggagagggaggattaggaaggaggaggatcagggagatggggggataggaaggatcaggcagagggggcaccagggaggggcagctgagggagaagggggactagggagagggcaaggagagggaggaccagggagagagggaagcagggggaggggacgccaggtggaggaaggatgtgggggggaagccagggggataggggatcagaaggagaaggtcagtgggagggaggatggaggagggggcatcatggagaataggggccagggagggggaggaaaaccaggaggctgcaaggacagcattttgggccagtgggcagctgtgtgggcactctgcttaggtccagagcagtgaggacagatggcagggtggttcccaggaccgtgacctggctgattcagagactggaggggagaggtctgggtgggaagtatgggtaaacgatggtggtcagggagagataggaggctgaggtgcaggaggacatggggtcaggagagggagatgacagcccctctgtgtggcctgatccctgacagagagagagagagagatggcaatgcagggggccaggaggcgggggcaagactgctggagggaagtcctcaaaaaagaaaaggaggggatattgaccgggtgtgatggctcacacctgtaatcccagcactttgggaggccaaggtgggaaggtcgagaggtcaggagttcgagaccagcctggccaatatggtgaaacctactctctactaaaaatacaaaaaattagccgggcgtagtggtgggtgcctgtaatcccagctactcaggaggctgaggcaggagaatcacttgaaccggggaggtggaggttgcagtgagctgagatggcaccattgttctccagcctctgtgacacagcaagactccatctcaaaaaaaaaaaaaaaaaaaagaggggatgtcttcatccatctgagcttccctaacaatgttccataaaccaggtgcctggactgcttataaacaatagaagtgtatttcatatggttctggaggctggaaggtccaagaccaaggaggcttctagtcggtgtctggtgaggacccacttgcttgtccacagagggcaccttcttactctcctcacctggtggaagggcaagggtctctctgagagggcctcttttgtaagggcactaatcccattcatgaggacaccctaatgacctaactcccttccaaagatcccacctcctaacaccatcacctgggggttaattgcaacatgtgaatttctgggggacacagacttcagactctagcagggggatgaccttaaagggcctgcctgggaagggggaggtgggctctgccacagctggaagacatgcaacaagggacgagggacgatggtggccaccccagctggtgcttctcaatgctgtgagacagctcctgacctgagaggccg

SEQ ID NO: 32097 - DNA, 1413 bp, Artificial sequence
  DNA replication origin
accacacccggccttgttttttttttttttttttgagactgagtgttgctctgttgcccaggctggagtgcagtggcccgatctcagctcactgcaacctcctcctcctgggttcaagcgattctcctgcctcagcctcttgagtagcgggactacaggcacgcgccaccacgcctggctaatttttgtatttttagtagcgatgcggtttcaccatgttggccaggatggtcttgatctcctgacctcaagtgatctgcccacctcggcctcccaaagtgctgggattacaggtgtgaggcaccgtgcccggccttgcctcctgaccttttaacaaggctgacctcccccaacccccacaaaaccccagttccagtttccagccctgcgttcctgatgaaccaggtgaggaacccacagcaatcttaatccccaatttagagagaagcccagggggagccaaaggtgagacacaggggatggggcgcccttggtgtgggacaggggatggggcacccttggtgtgggacaggggatggggcgcccttggtgtgggagaggggatggggcgcccttggtgtgggacaggggatggggcgcccttggtgtgggagaggggatgggccgcccttggtgtgggacaggggatggggcgcccttggtgtgggacaggggatggggcgcccttggtgtgggagaggggatggggcgcccttggtgtgggagaggggatggggtgcccttggtagtgggacaggggatggggcgcccttgttgtgggacaggggatggggcgcccttggtgtgggagaggggatggggtgcccttggtagtgggacaggggatggggtgcccttggtagtgggacaggggatggggcgcccttggtgtgggagaggggatggggtgcccttggtagtgggacaggggatggggcgcccttggtagtgggacaggggatggggcgcccttggtgtgggagaggggatggggcgcccttggtgtgggacagtggatggggcgcccttggtgtgggaggtcaggggaggactttcaggaaaaaggcctgcgtccagaaccggggatgggggacagaggtgagggaaggtggcaggaagagactgcacgagtgtgcacaggtacagcaagaacgggtctgtttaatgacacagctgggtctggttacaaacatcagaaactagaaaaggaggacgggcggttgcacagatgaggatgaggatgaagatgaggatgaggatgggccaggaggggacacagcaggagccacagcagcaaaacatccttgaagacgacacacgtgaccaaggggcacacacggggggcccccctggcaagcctgacgcagatgaatagacagggccgactgccggccaggaggagggtggggtggg

SEQ ID NO: 32098 - DNA, 1371 bp, Artificial sequence
  DNA replication origin
atgaggaaacaacagggaacatttattgagcacttactgtacgatctcacgaatccttgcaattctctcctgaggtaggcactgttttaatccccatcctatgaattaggaattgatgtccaagattgcccaacaaagtagatggcagtgccaggaaggggcccaggcaggcccgctttgacagtttccctacactgcctggagagacagctgtgccaggggatcgtggcctggtaaccaggtgtctcctgcctcaacacccaccaccgggttgtggccctgaggaatgacagtctcagggagtccccacccagaccctccacggttctgtggcccctggggcccatgtgcctggctccttcctcctggctctgcggtgtttccacctgagaccctcccggtctcagcctgtgctgccagggaggagcctccacagccagccctggggagtttctcagctcccagaggcatctgggcttccaagagagcctgaaataggcctgtctgagtgtgaggaggaaggtgtcagagttacaaccagcagggagggtgggtgttccctcttggtctcctccctggcagggaatggaagtgtggggtctgcctcaggctctaaagcaacgcctcctccacccccaccaatgtggcaacttctccaggttgggggtgtggaagtgcagctgcctccttcctgccctgcaggctcataagggctgagggtgctggcctggcgcagtggggagggcagaggtgagagtgctggccagagggctgcagctggggtcttgaccttgaggatgtgtatgttgtgtgtgggaagacagggtgctgtgtcaagactgacgggcccaggatctgagaagggaccttcaggagcccttatccccctttcttccccttcccccactgaccaggccctggacagagacaggaggagagaaaaaggaaagcaaggccctgtggggcttgggctggcagggagtggctgagacaaagctgggccaggctgtcctggggctgggctctagtccacaaagaagtggagtcagagtggtgaggggttactctgggcactgagtgcattggtaatgacctcccccagcccaggcccaggcccctctaagagacaggagtggggaactggaagaggggtgtagagagagaaagaaatccttgctgaaaactcggactgcccagacatggccctggcctcggtgtttcgtttctcccttggcatctgccctaccctggtccccttcctggggaggttcaatggtgttccatgatgtggacggtgagcacttcctccacgtatccgcacaggtacctggcaggggttgggacacaaaacctccaaggtcctgaggaccc

SEQ ID NO: 32099 - DNA, 1721 bp, Artificial sequence
  DNA replication origin
cctggggctgggctctagtccacaaagaagtggagtcagagtggtgaggggttactctgggcactgagtgcattggtaatgacctcccccagcccaggcccaggcccctctaagagacaggagtggggaactggaagaggggtgtagagagagaaagaaatccttgctgaaaactcggactgcccagacatggccctggcctcggtgtttcgtttctcccttggcatctgccctaccctggtccccttcctggggaggttcaatggtgttccatgatgtggacggtgagcacttcctccacgtatccgcacaggtacctggcaggggttgggacacaaaacctccaaggtcctgaggaccctgcctcgcttcttcatggtgacccatgagtgtgccagacgcatgcaaggccggtgggctgcaggtgctgacacacggctgacggcaccctccgaggacgcagtctggcacatctgcggctctgctacccacaatgtgcttgtgtgggtgccagcacctgtggggattggtggttccgagcgtctgaggccctagtatcccaatgtccctcttagcttcctgccactcccgactgtgtttctgggcttgggggctgctgagatagctgccccatcctcaggagcgctcctctaactccttagaagtgcttcctgctctttttcctccaaaatctgcttctgagttggaatcagggcatatcatggtggagctgggtcggtcccaggcttgggagaggccacagggagaagaagctggagatggagcaggcctggtagtcaaggatgcactaaagctgcccttccagagcgaggcttcaccccatctgcacatgacaaggctgccctgctctgtcctagatttgaccgctttcctctgccaagaagaggggcttgagggtgagcatggtctggggctcctctgcctgcacccccagggaccagcacgtgtggaaagagagcatggatttgtagctagagtcagtgactagctttcgagacttggacacatcacctctataaggatggtgtgtgtgctctaagcctaggtgtgtgaagaacggggcgctctgtgtttgtgggtctcttgggggcatgtagtgcctgaatgacccctaagcccaagccactgcatttcctccctaggtgggaggttttagggttaggccctgtctcctgaagcttctctcttcttcccctcaccctccaaactcagcagggattgtatcctaggggactgtttgcttctccactcacctgtgcctgccctgggcgctcctgctggcccgtgccctccagcgggaagggggcagctgggaacactggaccccccgggctctcctctttctcaacctctgctctttgctctctgttcttccaagaggctttgaatcccgcaagccgctgagctggagacagggttctgctcctctttgtcccgcttcttggctgagcctcggttttcccatctctaaaatggggagcccctgctatactacctttgaaaggccagaaaaatgtgtgtgtctgacagtttggctgggtgtctggggtggctggccgagcaaggagttctgaggccggggagaggagggggaccgaggtgctctcctgcatctggttcctagatcctggtgaacaccgcgccggagccagggaaggctcaacccaggcttcgttcaccccaaggcgccccacgccgcc

SEQ ID NO: 32100 - DNA, 755 bp, Artificial sequence
  DNA replication origin
caaggagttctgaggccggggagaggagggggaccgaggtgctctcctgcatctggttcctagatcctggtgaacaccgcgccggagccagggaaggctcaacccaggcttcgttcaccccaaggcgccccacgccgcctgctccgccgacctcggaccggccccattcgcggctggggaggtggcgctggagctcggacccgggcccagccctcctctgcccggagccgctgccgccctccctgcccagggcccggccgggccgggcgacacctacctcaccaggatggccacccccacgtcctcgcagttggcatagagccgggcccacatagcctgcaccgccttcctctccgcctcggacagctcctcgctccgctccctgcgctcgatctccatctcgcctggcactttctccatgagcagctccaagcccagcccggctttgctcggcggcggcggtggcggggcgcggggcgcggggcgcggggcgccgggagccggggccggctgcgtgcgcggcgggcgggcgaggggtagagcgcggagggagggagcgtgtgtctgtgcgcgccgggtgtgtgtgtgtgtgtgcgtgcgtgtgtgcagggtatatgtgcggggggcgggggacagccagcggtggggcggggatgtggtctgctggaaaatgtttaaaaaaacaaatccgctccaaacccccagccccgtgtgggtaagagccaatgccggcaaggtgaaggctgcgcggggtg

SEQ ID NO: 32101 - DNA, 1022 bp, Artificial sequence
  DNA replication origin
gggaggaatgggcggtcacgcggcgctgggcggcgcgggccgcacaggagtgcgctggggcgggcgcgggccgggagcgctgggttccgggtcccagtgcttgcggcgtcgcgagtgtgcgcgtgcggacccttcccgcggcggggaactgactcaaagtccaacactcccgagctttcgcggcgaggccgaccgccagcccgcccgtgggggcgaacaggagcccctccggcggccgccgtggacctagctgggctcccctcgcccgggcctctccccgcgcccccgagccagccgctgggggccgcggcgccactcccacggctctggacgcccaggctctggggggttagcacgggggtcgtccccctgcccgcccaccgccccggctgtcggaacttgagcgcacctccgacctcgggcgccagaggcctgcgccccctctccttccgcccagcacctccatgccctcggtgcacgaacgcggcggcggcggccagaagtcccccgtggcttatgaatgacacggacaggcaagaaccagccgctgccctgaattctagcccagctggtggcggaggaagtccagagaggcaccggatagggcagacaggacctggcagacaaaaagtcttgaggaaggcgcaggctgctggggacatctcagccgccaccaagggcccgattccgggcctgggggaggcaaatccttcctcctggtgggccctatccagggcagtgtgagattgggccagaggtggggggagaatcccatggtgcctgccctgcagcggctgctcagtcctggggacagcctgaggccagacagggcctggcagtgttgggaagagatgtcactcaggctcccggcgacccctgtcctcgctcaagacttgatgtcccattgcccaagcattgctaagggttggctctgcgctttcactatggttcatgtatttattcttaaaatccgactttaaggtccgggggaggcgaggagaactcaccctggccagcctcag

SEQ ID NO: 32102 - DNA, 773 bp, Artificial sequence
  DNA replication origin
tccatccccagcaggaaccgcaggacagacggcagtggctcctgagagctggctggggccattttggcccctcgcctgtggccttctgcagacttggcctgggaggggatggggcagctgcgccatgtgcaccacccttttcctgctcagcaccctggccatgctctggcgccgccgatttgccaaccgagtccaaccgtgagaaactgaccgggctatggctggcggttggtcggggggggggggcatggggctgggctgccaccaagctgaaggtgggcaggggctgcgtgaaccttcagcggggctgggagggcattttgaggaacccttgagagagcacagtctcagagcagggggacttagagcttcaaaggctctagttgcagcctctactcccatagcccaatgcggcctggacctgtggagggacagtgaggggctgggcacagccatagctcttcctccctactcttgcctcccacagagagcccagcgacgtggatggggcagctaggggcagcagcttggatgcggaccctcagtcctcaggcaggtaaggcaggagtctgggctgggggagggagggtgctgccaaggaagctgtggctgtgcatgcctgggggtgcacgtgtgtgcctgtgcgcgcctgtgcgtgcaccgtatcctggcccttgccctaagcaccctgctccctgtccgcctgctgggcaggctggatgtctgttttctgcggttgggaatgggaaccctcagctcgctcctctggacca

SEQ ID NO: 32103 - DNA, 872 bp, Artificial sequence
  DNA replication origin
acatccacacacccctctccaactgctccctgccctgggattcgagcctctggtccacagcagggtttctcagtctcagtgctgttgacacttggggccaggtgcttcttgtgatgttcagcagcatccctggcctctacccactgatggcacttgccgccaccacccttgtgacaaccccagacgaggaccatatgcacatccacattgagaacccctggcaggagggagggaagggggttgaggctggtccccgggttccttccggcaccttgtgttggctgtgtttgggcctgaaggttctgatgccctgctgctgacggcgccactgctgctgtgcaccttatggtcccagctcccagtctgtgcctttgtataaacctccttgagttatcctgagtttcctgtccatttcctggtgactgacatatatcaccctccctctatcaaggtgctaaataaaacagtaaatgaagtgacagtgctttgcacacagcactcgggacagtggagctctggttatcggtcagtgcgtggggctcgtgcgagggcgctgactggatgtgggtgggtgtgtaaaagggggaaggaaggggacgctgttcttcaggcaccccactccgtacctttctgtcaggtagctgatgaagtccggatgtagcagcttgaatttactggcagaggcttctggtccaaaataggcgtgcggcctaggacccatgatagaagtggacagagcgcccagagccgtcgtattgcaagggggagatggaggggagggtcagggcgccggagtagccgcggtaccctgagcggtaggagcggggctgggagtagtagcgggagaagggggtgtagaaggtggcaggcag

SEQ ID NO: 32104 - DNA, 796 bp, Artificial sequence
  DNA replication origin
tgactggatgtgggtgggtgtgtaaaagggggaaggaaggggacgctgttcttcaggcaccccactccgtacctttctgtcaggtagctgatgaagtccggatgtagcagcttgaatttactggcagaggcttctggtccaaaataggcgtgcggcctaggacccatgatagaagtggacagagcgcccagagccgtcgtattgcaagggggagatggaggggagggtcagggcgccggagtagccgcggtaccctgagcggtaggagcggggctgggagtagtagcgggagaagggggtgtagaaggtggcaggcagtacgttggggaccacgtgcggcttcccgctcaccaggacctccacgggcggggtgtaggagagagaggaggggggcatgaacagaccggggggagttgggaaggggcagttaaactgggggtggtgggggggcgggggaaggagaggtaagtagagtgagtcaggagggggtgggggcttccgggcagggcagggagagggacaggcaaagcatgggttttggggaagtggtgctgtggggggctggaaaaaggggggctccttcagaaagcggggcacatagggggtgatataggacgggatgttctgaattggcccgatataggaagatgaggtggcagggctgtagaaggaggacttggggggcacagcgggggttagggaagggtttcgagagagggatttgaaaccagactgggagggagatttggaggtgggtggggtgggggtttgggcagccccgcggggcacgtgttgg

SEQ ID NO: 32105 - DNA, 1147 bp, Artificial sequence
  DNA replication origin
gaggggggcatgaacagaccggggggagttgggaaggggcagttaaactgggggtggtgggggggcgggggaaggagaggtaagtagagtgagtcaggagggggtgggggcttccgggcagggcagggagagggacaggcaaagcatgggttttggggaagtggtgctgtggggggctggaaaaaggggggctccttcagaaagcggggcacatagggggtgatataggacgggatgttctgaattggcccgatataggaagatgaggtggcagggctgtagaaggaggacttggggggcacagcgggggttagggaagggtttcgagagagggatttgaaaccagactgggagggagatttggaggtgggtggggtgggggtttgggcagccccgcggggcacgtgttggacctgaggactggggttcagggacgaagtccgggaagagggctgtgaggcatttggggtgggagggtgggaggggggccgggaggaagagccccgagtgggggagggggaaggggcaggctgctggcctggaggggtgacaatgttgttggaacgggactgggagggagactgggtaggggatggattaggggtgtgggaaggggagctcattggtgttggggaggcttaggtccacccgatgtctctgaggcagcccctaagggcccaagcccagcgtgtcacaaagcccagctcagaccagcagtggaagcaattgttgggtaatcaccaagcgggggtggggtgggcctggctttagaacccttaacccataaggaccacctgtaaagctgctctgtggggggtggggaagatgtcctcagcgagacgccgagataggagggctggttgtctgggccacagcagtggcgtcgatttttagggacctgatctcagggacaagaaattgtctcagaacccccgggaggaggttcagatgagggtcaggtcgtggctcaagagagctggacccaggcctgctgtgcaggaaggtgggaaagaagacaaagggcccattgtttccgcctctcaggacactgggcctcgagtctgctctcccgtttcatgggcatgaccctgggaaggatgcccagcaggaggagtggcccagactggccccaactcttgtttccagc

SEQ ID NO: 32106 - DNA, 1878 bp, Artificial sequence
  DNA replication origin
gaacgacccgcgcgggagccccatacagccccggcccgcgagcgccccgtccgctgacgtcccaggcagaagggagagaaccgggtgggccgggtggcacttgcggaggcggccgtcttgccctgccccgccctgcccgccgggtgcctgcggcgcctgcccgcccggcagctccctctcggccccggctgagtggccagaggctgccgcaccctcgggagctgggcggcgggtcccccggggctggagtgtcgtcccggcgcccagagcgcgcgctcctttggccctgccccctgcccgggggacttcggcagcggccactcctgccactgcgctctctccagagcccagccccgggaggccgccagtctcgggttgggcagggcgctttcctcgcgccgtccggggctagctaggcgcgggtagacgccgccacctgctgcgctggctgcgctctgccctctgcgggcccggcactcggcctctagactctgtggcgggtgggcggcggccgggaggagatgtgcccggctccctccaaaggaccctcagatctgtcagtctgcggacgccaggacagctgggagggggcgggcagggtggaggagcaaaacccgacagctcagtctctgggctggcggtagaggggggaaaagggggtgaggtggggagcttgccgtgatgggtttcgtgggggagctaaggctgtcagcgcttatttggtaaccatccagggtggccagtcccctcaatcgcattgagttcctttcacagaacgaggccagtcagagagaccacctgaaatgttcagcacaacgggttcccaaacttattggcaccagggactggtttcctggaagacaatttttccacggaggggggtgggggtgggggggttggggatgaaactgttccacctcagatcatcaggcatgagttaagatgctctcataaggagcccgcaacctagatccctggcatgcgcatttcacaaaagggttcgcactcctttgagactctaatgccgaggctgatctgaaggaggcggagctcaggcggtaatgctccttccccctccactcacctcctgctgcgatgccctgttcctaacaggtctcggaccaggcttgggattggggacccctggtctagcaggctccagcatcagaaagggctgggaagctcagcacccgtgctctctaagtggaacactccctggcagtgagtgatggatgagatgggtgtgcttcagtggccactgttcggcaagctgtgacatgcggcaggctgtgacatgccccagactcccaactgtcagcaggctgcaaggatgagagggacctaggctaccgtgtcacgggcctttggctctaatctgttcttcatgtatccgaggaagtctgggtgcagcaacaggtacctgtctgattgcaaggcttcccgaaaacctcccagggcctgggcctgtggtcaggaatggccattcagtccatccagtctcagtactcctaccaagtcagggtcactggaggtcactcacattgggccagttctttccttcaccccaagactgctcagcagagccagactcatcttgctaccccgcagatgggcactacttggaatttatggtgtcacgactttcatttcaatctttatgggtttacttgtcaaaattcctgtagatgttacttatcccctgatcactggcttctcacatttcctcagaccttctctctgtgcccataaatatccctcctagcccttgctctcagtaagtgccttaccctctacttcatggagaaaaggagaatcattcattagtaatttattcaacttccacttacaaacctacaaacttggcccccacacacagcc

SEQ ID NO: 32107 - DNA, 1096 bp, Artificial sequence
  DNA replication origin
ttgttggtacagcagactgccttggaagataaagatagtgcctccctctggagcagagggcagatttcctcactatccaacgtaataaagataatgtctccctcttggacaagagcaggtttgcttgcagcccattataaaagattctggtttccttatctcagggattctcagctgtgctgcaaacccattgtgtgtgcaacactcacctgggcctctctgtatcactctcatggggcttgaggagtaaagagaagtgacacaaacatgatgcctatgttgcttgctgcaccatgagtaataaagtcctttgtctctgatccagtagtcttgtgtcttctaccagcatccacagaactatggcagtttcattggttagcttgtaaggagagcaaaatctgcacagttcttaacaaaagatgactttgaacttgggggcatgggaagttgaaggtcactcctgatgggctgcattttctcacaggtatggctgggaaaagaggaggcttgaggaaagaagtaagttctagaatcattgttgagcaggatagaagctggagctgagcaaggataaggaaatggctgatgttgagagccagctgaggccaaacttgtgttcccaattcacactctggaatgagctacacctgacccctgacccctgcagcactcagccaggccagggacaggcagcacaggagaggcagaggcaagagtgaatccaggtcagagttttgctgggaagaaagccaggaacacaagagaatctgggttactgatgcaggagtagctcagattataacccagggagtcctgcctagataggaaagaaagctgctgagagagggttggcccactgggagaaaagggaaggatggagaccctggaggtcctgtgaggctgaagatgggaggaaggagaactccaggtgggtggataggagatcttggtgtgaggggagtactgccatttaaggcattggaggtggacctggattattaacacagatagggggttaactcccacacaggaggagagcaccctctccccagctcttaagactggagtcctgaggcctggcgcagtggctcgcaca

SEQ ID NO: 32108 - DNA, 1627 bp, Artificial sequence
  DNA replication origin
cgtgagccaccggacacagccaggatccagtgttttagaaaatgttagaaaaccactgatctagtgtggcttccgcctaaggaaaaacagtcgctgatggaaacttggatgaactgctggtatcccgtctctgtctgaacgcttctggcacaggaaactcactaccttacagagcagtcttcctctctggggcataacataacagcacgagggcaagaactgcaggcggctgtgcagggcgctgggctacaggcctgggcagggacagaaacaagataccttcctgctgccccaggtgggagacaaagagacaggacctgcctctaggcaggagcccacagcgatttctgttctttctttttgtggcattgtggcgtatttattcaacaggtgcctactgcgtgcgggcctgttgcaggagctgggatgtggcgggcaagggccctgctctccggaacaggcgttccactgcggcagacaagccacactgaaataaaagatgacctcagaccggatgaagtgctatgaagaaagccaaacgtgatgatacactggagagagagagagagtgggcgggcggcaggcgggggactttacatctgctcacgggggcaaggacatagagaggagagaggtgaggaccgactgcgcggaggctcaggcagggaggggtgtgctgggcagggtcctgatgtgggcgcagggctggcaggtctaagcaccagaaaggagtctgtggctgtggggggctgggagcagatgccgagtaggcagggtgctcctggacctggggctgtgggaagtttggaattgcacgcggagggctgtgagcaggggccggggggtgtgctctctgcgctaggaaggtcatgctggttgctggaagagcctggcaggggtggggaggacgggaaacagggagaccagtgaggaggtcactgaacagccaccgaagcaggagccagaaagatgagaggagggagggctgctctcggaacacactctggagagaggtgaccagaattgcagacagcaggtcttcagggcgtgagggaggcggggacaacaaggacatgtctgggcttttggtctgagcagctgagcgtcgggggggtggatccgggatgagatgaggaatgccgggtggaggggcagcagaaatgaggcacttgtcagcgtgttgggctgaggtgcacgtagacaacccacaggccagggagctcaggggaggcgagagctgggcgtatagatgtgggcaccatcagctattgatcagggggatgggggcggcaggtgtgttctggaaggcagcaaggcaggcctggtccaggagtcctgcagttgatattatgggcatgagctcttccagcagggcaaagagcagagggagtgtgctgggtaagccgcagacaaggagggagtatgttgtgggtggggggtgtctggggagagacaggatcactgttcctgcgaggagccgaccccatccgggccccaacccctgcccagggccgactgctgcgttccaatgtccagaccaaaagcatcgtcctgcattccaacctcacatcccgatcaagggcacattcacaagccctaaacaaactcttgctcagatgactggagc

SEQ ID NO: 32109 - DNA, 776 bp, Artificial sequence
  DNA replication origin
taaccatgtgacttggccctggttcccctgaagtcaccctgctgtcaggtccacctgtgtcctctgccctcaccaacctgttcaccataggtgtgggctctggaagctacagagaccccagccttcccagaatgacccaggagcaggtgaacttccccatcatctctcctgcctttgtgatggcagtgtggtcctttttgatggcagtgtggtcctttttgatggcagtgtggtcctttttgatggcagtgtggtcctttgtgatggcagtgtgggcctctgtgacggcagcgtgggcctctgtgacggcagcgtgggcctctgtgatggcagagtgggcctctgtgatggcagcgtggtcctttgtgatggcagcgtgggcctctgtgacggcagcgtgggcctctgtgacggcagcgtgggcctctgtgatggcagagtgggcctctgtgacggcagagtgggcctttgtgatggcagcgtgggcctctgtgatggcagcgtgggcctctgtgacggcagcgtgggcctctgtgacggcagtgtggtcctttgtgatggcagcgtgggcctttgtgatggcagcgtgggcctttgtgatggcagtgtggtcctctgtgatggcagtgtggtcctttgtgatagcagagtgggccttcgtgatggcagtgtggtcctctgtgatggcagtgtgggcctttgtgatggcagtgtggtcctactttctgttctcttagcaaaatctcagaagccaagtagtggagggccaagtagat

SEQ ID NO: 32110 - DNA, 2157 bp, Artificial sequence
  DNA replication origin
gaaaatgaagagggaggggagaggtgagttacacgctgctccccagggcagtgacttccgagctaacagcaggtggagttgccctcctccctcgctgttggtggggttcgcttagggacggagggagaaggaggctggcagagggcatagccccacttcccaaccctgatttgagttatcttccccagggggcctttctccctatctgtcctccaagccccagcagtgtgatcatcagaagaaagcactggaagctcttggaaacgctggagtccacttcaggacaatttgttttcctttcttttttttcttgtcactgactcgaagctcatcaagacaatttctaagcagcttcttaggttaatgccaccactgggagtgggtgggatgacacaatatctgtgtccccacagcacctggcttaatgtttgcaggcaggagttttgggggagctttggccagctcaggaaggcctggggacttgaacccaaaggggaagggcactgacttcaattgaattctcctgtggggtgggttctctctggagggtgccttagcgggaggacagacacaagcctcaagtcatcctcactggcacctatgtcatgggggctgcctggcacgcgaacccccatactgccttgtccttcagagcacccattcagcttcagaggacgtgcattcacccagacagtggcaaattatgcgagtggccctatttaaacaccactgaacctattcctgtaggtaccatgtgctgagagccgaaagccttgtagaaagttctttaagcgctgtgccccacaggattgagctaagacagggcgccgctaaaggacattttgcacttcagtccagagcctggtgtgggtgataaagggccagccctgtaaggccaggactgactgagtgtgcatgacggctccagaactgtctaaaggcctctcctgctcccgcgagacctcgatggaggcaggaatcccaaatatgggagcaaacacaacagatcagcacatgtccaaaccgcgccccctccaccatcaccgcgtgaggtctggaagcccaccccaagcaagaacggcagggcctgcccctgctccaccccattaaatgtggctggttagaatcctctctaatgacacaattagtcacccacttgtcaagcaaagcgcctgctcagagggggtctggcgcacttactcagcaaagagaaatgcctctgagcacagcctggctgcctcctcctcccccgaagggcttctctccagggtaaaccattgtgtccagcacaggacagagtgggcacgcagacacgcaggcacgctgacaatgcgcatcccggctctcctcccttccaagaaaaggagctcaggggtaagaacaagggattacaatccgactcggagaccctggcggtggcctggaccggccaagcgtggtgaactccagggaacatgggcacacagtgtaggggctgggatgagtggatgagggaaatccgactcctctcagatatccacaggcaggacaaggtggccaaggccgagctgatggacagcatggcgggaggcctggggcagaggcagggagggccgctttggggtgctcactggtgctccaggagggctttatcctgcatcttcactccatccaggcccagcttacctacaacccgggggagtgggggtaggagggtgttagatgtgtagcttgaaaacgacaataaaaaggactgctgggatcgggtgccttttctttcagtcccagcccacgggcttcacaaaacgccacagcactgactctgaaatctggacttcaaattggctgaaaaagaaaagccagctttcctccctcgccccccgaaagtcctactttttaaacatcaagataactctcatggcaggcctggaaataagccacaggcacgtggatttgggaaccggtgggcgggaggggtcagaagtgggtgaggagcaaaattccaagccctggtcccgaggcctgggagccagcagctgcggagcacgccctgggctgggagaggccgaggggaggggagagcaaaacacctccaaacaaactccttcgggctcgcccctcgccacactttctgggggagggcggcgagtttgcggggctgcggcttagcatggcggg

SEQ ID NO: 32111 - DNA, 1143 bp, Artificial sequence
  DNA replication origin
gccgcgggatcccctggcccttcgggctcccccggtcccgcaggctccccgagctcccccagccccgcgggctctccaggctcctccggccccgcgggcgaggccgccggctcgggggcgcaggggcgggacggcgccggggccccggtggcctcggccgggggcgcgggttccgggggcgcgcgggcaggctccgggctcgcggccgccccacgccgcaccagtagccaggcgagcagaagggccagcgcggtggccagcgcaggcagcgcggccagtagctcggccggcgcctccatcgcgccgcggccgccgagtgcgggccagctgggaccccgagggagcccgccgcgccccgtcgccgcgcccggtcgccgcgccccgcctcggggcggagcccccatcgccgcgccccgcccccgccccctccggccccgggagggtgacgcacaggctgcgggcgggggtgttgagggggcagagccctgaccacctgggaggcacaggagggccaacccctgcccggcctgggcagccttgacgctttggggcacaatttagctcaggttcaatttgaaatactgtatgaggtgcccttaggttgtcatctttggccttagtacggcggttcgtcttagagcattttggaaatgtgggaatgcagagagacaagcaaacccgggaagcttcatggaaacggcagcctggattggcttgtaaagcaatcataatgccggattacgttcagccactgccgtttttataggcatgtcaggagttgcttttaatcctcagggttgccttaatgcactttcacagaggacatctccagatcccggccagtgaatgctcccttcggagctgaggccagcagccttcaacacaggcctccctgttaacagtaacatggctcccccgcccctagacctgaaattcagctgcaggtccttggtcaacgctattcctcttaccagactttcttctttgcacaattccagaatgcatgcagggtgggagggtacaatgaaggaaatgaaggctattgtttttgtttctccagatcctcccaggcctctgttgctgaacagtggattttgagataaacacgttgtaaccaaaaacatactttcctaccactcccca

SEQ ID NO: 32112 - DNA, 1391 bp, Artificial sequence
  DNA replication origin
tcccgcggcttcgccttcgttcgctttcacgacaagcgcgacgctgaggacgctatggatgccatggacggggccgtgctggacggccgcgagctgcgggtgcaaatggcgcgctacggccgccccccggactcacaccacagccgccggggaccgccaccccgcaggtacgggggcggtggctacggacgccggagccgcaggtaaacggggctgaggggaccgcgggaggcggggcggggcgcgcgggaggcccgggcgacctcacaaaggtccgcggcgaagcacgtggtgcgggcccggacggggcgggggtgcacgccgcgtctcgcgaccctccggccaccccgcgagcttccgccgtctgcgacccgggagtggccggggtgtgggcggcgcggggcggaggaccccgcctcgcgactggggaaatggcgtctggcggcgagataatggcggcctgggcgggagcgcgcgggcggggccggccccgctgcctggaattaaccccgctgtgcttgctcgtcccgcccgcagccctaggcggcgtcgccgcagccgatcccggagtcggagtcgttccaggtctcgcagccgatctcgctacagccgctcgaagtctcggtcccgcactcgttctcgatctcggtcgacctccaagtccagatccgcacgaaggtccaagtccaagtcctcgtcggtctccagatctcgttcgcggtccaggtcccggtctcggtccaggagtcctcccccagtgtccaagagggaatccaaatccaggtcgcgatcgaagagtccccccaagtctcctgaagaggaaggagcggtgtcctcttaagaaaatggtaatgtctgggaatccgagacacataaccctaattcataaatgggatttggggtaggtctttttgagtcgtgttaatgtaagaatgactcctatcattaggagtgctgctcggaggttactcacctttgggagtaatactgaagagaggggtctgcagaaaggatgtgtatgaagcttagataataatggctgtttcgtaaactgtttgagacctattaatgaaaatgactatttcttgctgtttttatccaacgtctgcattttccccctttaaagctgcggtctcctgtttgataaaagaatattggccagtattgcagattttaactgatttggctgatcctccagggaccagtttctgtgggcgtgtattggagcaggtttgtctttaaatgttaaagatgcactatcctcttagagaaacaatcagttcaactattgttgtactgactgggacttcatattctaatggatgtggcaaaagaattgcaataagaagcagtgaacatttggaaccccaaaagaaagttacaggtattgc

SEQ ID NO: 32113 - DNA, 803 bp, Artificial sequence
  DNA replication origin
ctctcctcggggcgaagccactgacaatcctggagaaagaaatgagatggtgagtggagaaggcagatgcaggagccaggcagccaagctgtcaacttccagttcctggatcggaaccccaggtttagggcgaagttctccccaccggcagttaggatactcctaagaagcgatccgagtacggaagagcacaacccccggagaagcgccaagaatttatccgctccaggttgaggggcccacgaaggggattaaagggccaagtgccagccgcagcagccggcgcggccccgccctcccagcctgactcactgcggccaggcgaccgggtcacctgaccgcagccgcggcgccggccgctcggcccgctgggaaacgtagtcccgggtggcctggcacgcgcaagcgctccgcggggagtccccaccgccaggacgcagagccgacggagctctcgggctctggcgaaagggggttgggaagcggactccggcgaagagcagtcaggaacggctggacggggccgagagacgacgcagcggagtctgagggggccggggtcacagggagaggcaaatgagggcagaagcactcttcagacggagacggggctgacggctgagcaaaaaaggggcgtgaacttggagtattggcatgaaaaaaaggtgggggcccagatggggagcacctcctcttcctcctgcccaatcgcgatcgtccggcctcccaggcggaaaaagcgtttcgcgggctttccaactgcccgctaattccgctccccctccctccagccgtgactccgc

SEQ ID NO: 32114 - DNA, 874 bp, Artificial sequence
  DNA replication origin
ggagcgcttgcgcgtgccaggccacccgggactacgtttcccagcgggccgagcggccggcgccgcggctgcggtcaggtgacccggtcgcctggccgcagtgagtcaggctgggagggcggggccgcgccggctgctgcggctggcacttggccctttaatccccttcgtgggcccctcaacctggagcggataaattcttggcgcttctccgggggttgtgctcttccgtactcggatcgcttcttaggagtatcctaactgccggtggggagaacttcgccctaaacctggggttccgatccaggaactggaagttgacagcttggctgcctggctcctgcatctgccttctccactcaccatctcatttctttctccaggattgtcagtggcttcgccccgaggagagctgactgccctgggctgctgcctccggcagagctgagccaaaatgtccccggaatctaaaaagcttttcaacatcattattttaggagttgcctttatgtttatgttcactgcctttcaaacttgtggaaatgtggcggtgagttggaatctgtcctccctcctttgaagtgcccatcataatgcagtccagaaatgaaaataaacgttcattatatctaatagcgcgctttaattgcatctttcatttttcccacccagacttcctcattttttatgattaggtttgatttcttgtgtcagacatttctcatgggggcgttaagcattatcgtttaatctgatttgattaggggtttggatgttaacctggttattttgtttctcgtctgtattaagcgcttccttagtacttggatggttacagctgcttttcctcccccctccctgtcattggtttgcc

SEQ ID NO: 32115 - DNA, 962 bp, Artificial sequence
  DNA replication origin
cgccgccacctgctccagggcacccagtcccatcgaccacccaagggctgaggagtgcaggcgcatggcgcgggactggcaggcagctccacttgcggcccagtgtgggatccactgggtgaagccagctgggctcctgagtctggtggggacttggagaatctttatgtctagctaatggattgtaaacacaccaatcagcactctgtatctagctcaaggtttgtaaactcaccaatcagcaccttgtgtctagtttagggttggtgaatgcaccagttggcgctctgtatctagttaatctggtggggacttggagaatctttatgtctagctaagggtttgtgaatgcaccaattggcactctgtatctagctcaaggtttgtaaatgcaccaatcagcactctgtgtctagctcagggtttgtaaatacaccaatcgacactctgtatctagctaatctagtggggacctggagaacttttgtgtctagctcagggattgtaaacgcaccaatcagcactctgtcaaaatggaccaatcagctgtctgtaaaacagaccaatcggctctctgtaaaatggaccaatcagtaggatgtgggtggggccaaataagagaataaaagcaggctgcccgatgctgcagtggcaaccacctcaagtcttttggaagctgtgttcttttgctgtttgtggtattgctgctgtctgctctttgggtccatactgcttttatgagttatagtaccacaaaggtttgcagcttcactcctgaagtcagggagagctggaacccacaggggggaacgaacaactctagaagtgctgccttaagagctgtaactctcaccgcaaaggcctgcagcttcactactgagctagtgagaccacgaacccaccagaatgaaaaaactctgaacacgtctgaatatcagaaggaacaaactctggacacgctg

SEQ ID NO: 32116 - DNA, 855 bp, Artificial sequence
  DNA replication origin
cttctagaactgaaataaatacctgctgtcagccgggcgcggtggctcacgcctgtaatcccagtactttgggaggccaaggcgggaggatcacgaggtcaggagatcgagaccatcctggctaacacagtgaaaccctgtctctaccgaaaatacaaaaaattagccgggtgtaggggcgggcgtctgtagtcccagctactctggaggctgaggcaggagaatggcatgaactcgggaggcagagcttgcagtgagctgagatcgtgccgctgcactccagcctgggcgacagagtaagactctgtctcagaaataaagagagaaaaaatacctgctgtccagacatccggtttgtggtcattcatcacagcagccacaagaaactaacaccccggctatgctcagccgcatgagaggacaggaatcagtcaaccgatgggccatcaaatggcagggagggagggaccctattcagcccggctgaccgtgaggagaggagctgaagagggaaatgcaggatggcactgagctcaggaaagcatgaggcgaatcccagagcagggggtaggtttacggtggaacactcaaggtgggtggaaggatgctgaaggcaaggctgcgggcagctgaaggacagtcaagaggagacacagcccaggaagggctggggtcgggggagcaaaacggagggtgagcagatcaactccacttccagacgtgtctcggcaaagctcaaccatccaagagcaggagcgggggaaccagcaaggtgctctgggcaggtgcgtgtgtgcagaggtgtgcaggacagggagtgtgtgtggtgtgtgtaggtgtggtgggtgagcgttt

SEQ ID NO: 32117 - DNA, 999 bp, Artificial sequence
  DNA replication origin
aatgccacctatttcgtcagacgtgtgaggatgagatgatgcatatatacaaagtccctgccagaaccacagatatattagggtcacatgactcttcaattctctcctcgtccctccccaaaacaaagcctctcttctgatattgaatgctgactttccatgtggagcttgttgcagaaggacattcctttttgtgtgggaagtaaggaaggtggaaagagtgtatgcatttgcaggggctgggagggtggcccaatggagacagggagcacagagcattgtgtctccctgcaaatgatcacgctgtcctgggcggggcctcctgttgcatgacagatgatggtactcatccagcccctccccaggacagcccagtcaattcctctgcagtgagttctatggctgagtctttggtgaggagttggggggatggtagagggtccattgtgaggggttcggggtataatggagggtcccttgtgaggggttggggggatggtggagggtcccttgtgaggggttgggatggtggagggtctgttgtgaggggttcaggatataatggaggatcccttgtgaggggttggggggatagtggagggtcccttgtgaagagttgcggtgggggatggtggagtagccatagagaatgctctagactgaatattgtatctccctgacaatcactatgttgaaaccatagctgtcagtatggtggtattaggagacgggccttaggaggtgattaggttagataaggcatgagggtggggccctctccatgggattagtgctcttgtatgaagagacccagagagcttgcgcgtgaattctctctgccatgtgaggacacagcaaggaggtggccatctgcaagccaggaagagaggcttccctgagaacaaaatctgccaacaccttgatcttggacttcccagcctccagcaccatgagacacaaatgcctgtgatgaggcctcccagtctgtggtttgcaatg

SEQ ID NO: 32118 - DNA, 2127 bp, Artificial sequence
  DNA replication origin
ggagcccagcctgcaagcctccaggttcccccagccaaagcccaccccaagtgatccccccaccctctaccagaggagcactggccggtccagctccgactggtcagggcactcggcccctctccccacgaacagcgcaatttgctgcctgagctacaagaggtgtttgtttgaaacatgaaggtactgaaggactgatccaggtgccctggacccactgggtacaaggggaaactagtcccttccggaggacgctgctggagggggtggggtcaggtccagtaaggagcagagtggaacccccttgcgtggctgcatcagaggccacccaggggccacagcatgggcagtcacaactccagcgtgggggtagtgatgacttcccttgctcaggaattccagcttttgtcttccttctacccttcacccaaaagaccggaaccgggggagaaaaaaagggagtgtcctggggcaaagggagacacagccctccacagacatgggtgggtggggggaacaaaaggagagagagagggggagagactgagaggcagagagagagagagaaagggagggagaggcaaagagagagggagagacagagaggtggggtggggggagggagagacagagaggcagagaaagagggagagagagacagagagggagaaagagagggagagatagagagggatagagaggcagagagagagagggagagagagggagagacagagatgcagagagagagggagggagaggcaaagagggagagacagagaggcagagagaggtggggggagggagagagaggcagagagagagaggaaaagagagagggagaaagagggagagacagagaggcggagagagagagagaggaaagagaggcagagagagatagagacagagagggagagagagacagggagagggacagagagagagagggagggacagagagagagagggagggacagagaggcagagaaagagaggcagagagagagagagagaagcagagagtgggagagacagagaggcagagagagagtcgggggagaaacagagggagagaggagaaaagagacagaaatagagagagacagagagggaacaagagggcggggagaggagagaaagagactgactgagggaacagagggagtcagggagagaaagagggagaaaaggagagagaggaagagacaggtggggagagagggaggtagaaaagaagagagggaggaagggacagagagcttggctcagggaggccaacaagactgttttaccaggaacacagtgatgagaacagagctctggtctggaggggctgatgctccctgtggaagtccagctctggtctggaggggctgcgtgctctctacaaggaagacgacgtgctgtgctagtgagtgttgggacaagacctctttgaggaggtaacactgaattcagactggagtgaggaggagacacaaaggtgccagggaggtagttccaagcagcaaatgcaggagccctgggaggggtcagcactgggcaactagaaggggaaggaggagatggggtgggagggctgggcaggccagaccacagagcagctgggatggattctggttgcagttaggggtgcagggagcgaggtgctgggatttgtgctgtagccgggtcactctggctgctgggctgggggacacgggacaggagtggggaggcagagagctgggagggccagcctgatccggagtgggctgaggcagtgggggtggagggaagtgtaggttgggatatgtctggagggacgagcccaggtgactggctcagggcaggagaaagaaggaaacaaatgcaactcctgaatctggaggctgagcagtggcaggtgccgttctctgcgatggggaaggtgggatcagagaattttcacgtgctcaatccatgtgcctatgaggcacccaggagaggtgtcaagaagagatggatctcatgggggctcaggggaggtgtcagcgcagggaacagaaatgcagaagacagcggcagatgctctacaaaggcacggcacaggtattaacagcctcctaggaggcgctgtccaacaccgcagccagcagccagcag

SEQ ID NO: 32119 - DNA, 1408 bp, Artificial sequence
  DNA replication origin
gtccagatctaagggtgtgtggcccaggggaagaggggagtaccttcccctaccttctaaattctggcttctgtggagggtaggccacctccccagatgacccacaccagaggtggccatgccttctagggaaccccatctccaccactgaggaagaggcttcccctttggcctaaaatggcaaccagatataaatgccaccccctaagcctactcaatcagaagaacccccaatcagaagagagacacctaatcagaaggaccatttcattccttagtgtagatatggcttattgccaggatttgtggcagatgtaggcacccaggcatgagatgtgatttacaggcctggcagagacctctgccctccaacatctccttagccagcctgccacgatgcccaaatttccggccaccattcatcactcttctgcacaaaggcacggtcagcatgtccttgttcaatgcaaatttgttacctagcctgtgtaacacattatatctgctaacaccaatttatcacccattttcacattagcagagagcaaggcagtgagataatggaactcagcaccggtaaattttgatgaagaaggagcagcaaagcagagagcgtgagtcatggccagtgagtaatggcccaggaagggggccgggaggtgggcagggcaggcagcaaggggcctgggtatgggggattggaggggaccaggcccagctggaggaaaataaagtctcctcctcgcataagccaggctgcagcatcgtggcctgagctgggaagaccctcagagtcatttgacacatgactgaggctttgggcacttcccagggtggggtggtcagatatgacctcgggaagtgcttttgaagccggagagctttcttcaggctggctctgcgagctcccaggagtctctgtctctgcaactgcaaacacatctccagagccaggaagtacgaggagggggaggggaggacgcctagatgctaagagacgacatgagatcctacatgctttagggttgcaagggaccttggtgagcttctggtcactatcatttcataatggagactctgagacgtgcacacttgatcgcccactggctagtggaggatctggggctacaactcagtacgcccctgcgcctggctctgtgagcgggccccagcaccacaggccgagtttatactcagatcagtaagcaaagaggagccacgggagtttctgaccagggaggggcagaagataggcatgtgttgccaagcgaaatcgtgggaagcggctgatgaggaagcccacggaggcacctggcagaagagaagggtctccgctgggtgcgcatctcttctgtgctctgcgggagccaaagcagctttcggccctcggggctggtggcgccctggg

SEQ ID NO: 32120 - DNA, 1036 bp, Artificial sequence
  DNA replication origin
gcggagccagcgggcgagagagcgcgcggcgggcgcgggttgccctcgtcgagagccatgggcgcggcgcggcgcggggctgaggatcggcgcggcccggaggcgctggggaccggggcgcgggcccggggccgcctttagccggcaccgagggcgcggggccggggatgagggcgcccgccgcggggagcccgtctgcgcgccgcggcaccttcccgcccagcgagcgagcccgagcaggcagacgcgcggccggcggtctgggggcgcgccgcctcccggtccccaaaatgtgaagcggggagggcggagacgcagagacggcccggccgggcgccctcgccgccctccggcagccgcgccgctccctccgctgcacgcccaggcctgagcagcgaggccaccgggccgcgcgctcccagcttcgctcggacgcggcttcggcccgcagagggttcgtggcccggacgcggcgagagctgggcccaggacggtgcgtccggcctcgcccgcggctgctcgcaccaacaagtttgaacaatgatcaccgtcaaccccgatgggaagataatggtcagaagatgcctggtcaccctgagaccctttcggtaaagttccctcctggttggttttttccccaggggggcgccgggtggaggtgggcgaggtcggttcctgcgaacgttcaagtcctggtggcagagggggcggttcacacttcaacccctggtgatgaccagtggggctgggctgggggaacggatggcgttggggttcggggtgcggatggggagggttgtgttattcggggacctgtcccgagttgggcagggttggagaggactcggggtgcagaggtaagaatgggggcagaaaacccccaggtcgtggtcctgggcccagaaagttgccccagcctgcgcgccccttcccagcccctcagggtccttcctcaccccgcggacggtcccatccgggtggcaaagttagtgtgcggcgccttggagctccccctccggtccctcccgtcccgccc

SEQ ID NO: 32121 - DNA, 1703 bp, Artificial sequence
  DNA replication origin
ttcgggcggccaacacctgggggcccaggccaggcagggctggggccgcgcgggactcactggacccagccaggggcccccagggcccagcggtgccggggcagccccctctcctcccaggcatccgcggaaccggcccgcagcggggtggggagggggcgctgcccagtggacgcccggcggggcccgagtgtcaccccgtgggtagctgggcagcgaggaagctgggggagtgaccgccccggcgcgggggccggactcgggacgtggccacaggtgggctccgggcgcgggaaggagcccgagaaggcggagcttgcaggggccctgaactcttgccctccaggtctcggcccagccccactgtggtccccctgccggctccagacggggatgggggcggggagacggtggctcacctggagcccgcctcccagcacaccgggcctgtctgctgggccgaggaggcaaccccaggggacggcaggggtcaggctggacctctgcggtccgggggtccgggaggcccggagagctggtgcaggccgtgggtggtgatgggggcgtcgggagcccatgggaagcagggcgggaagcaggcgtctctggaaagggccttgctcctccagggaaggccttgaatccctggcctgactgggaacgctggagggtcctcgccccttccgaccccatccctgtcccgccctccgggccgctgggtgtttcctggcgcgattggaagcagccgcgagaccccagcaccacggacagtgctcgcgacccagggctgcttccctgtctggtcctgccctggttttctttcaggcccttatctgaaggcaggattgggggtggaggtgcatgggtccccaaagttgtgtaacttcaccccagggtctccctgggctgcccggagacccgcagccatcagtgagtcccttcagttgaggtggggggcaggctgcaatcatagcaccccagcttattcatcctcaaaggcaggctggggtcctgttccctgtggttttcccagggctgctggcagggtctttattccataggtgcccctggaatgttgcttgagtggatacatggatggctgaagccattttaacttgaatccactccaaatggcccccagctgccttgggggacattgaaccccaggatggggttctggcagagggagatgcagatgaggtgtgttagggggcttcaggttctgggctgaagggggtagacacctttctcatagcagggttgttggatcctggcaggcagcccaggtccccagctctaaatacaactccttcactcccctggcctcttctccagggactagagacatgagtgggggaagtccgtccttgtcctcagactgggaggacaaatagctgatttcccctgggatctccctgagcatgggacagcacctctcctgtgccatggccgtggctgttgtctccagagccacctgacttcctctgagggaccccaagatctgagccccacccccaggcttggtggaattccgtgaggcgtccctctgcgctaaggaaagtgtcccttgcgcggtcttgcctactgaatcatgtctcctgtccttcctgctgggggtgtggtcttcgagtctctccttggagctcccaagcccctctctgctttggggttctcctcttctctgcccaaatctctaacagctt

SEQ ID NO: 32122 - DNA, 936 bp, Artificial sequence
  DNA replication origin
ctgaggcaagtaggtttctggaactgttcgagggttggctctgtgagattcccctgcccctctggggaagtctctccttgaagtccaccttcttgaacttgcagggcttggctttctggctcccctgttctgagtgatgaatattgtagacatcccaagttaaataggttgtcatctgggtgggtgctgaggggctcttattatgccatctgtcatctcatcattagattcattcctctggtttcacatgcacttctttaaacttgcaaaagccctcagaaggaatctcacgcttattagtcattcaagcctgagtgtaagttaatttatcccgtctctgacttgcagagattcctcaatctctgagcctccaaattttcctctggtaaatggggatggtaatacccacttcccaggctcgttgcgaggctgtgcaaagataaagcaagggaaggggcctcagcagcatctgtcaaacggcgagcactccatcaatacttaatggatgtgtcgagtctgaaatgggggcactgcagcaaagcgtgtttatgaaagaggaccaaggaggtgctggagtgtctgtgtgggagaggctgaggattgaggtgggtggggatgggagggagcagtcgtgaaggtgaaccggaagggtggcttggggaagggctggtgggaaaagtggtgcatgggaagatggggtgtagacagagattcataaactacctggctgccacccctggaaaggaggtgtgcctatctgggtgggctgctacagaggccttgaggaagttgaacctccagaaaggtcaggggtctaagaggtgggaattagggatgggggagaggaggggtttttggccgggctctggtttttatgcctatctccctaagggggttagagagtcaaggtaactcacctaccccatggctcttgcc

SEQ ID NO: 32123 - DNA, 985 bp, Artificial sequence
  DNA replication origin
ggggggccatgagggagcggggagtagaggagggacctggacacttattgatgacttagaaagaccccactgggccagacacggtggctaacacctgcaatcccagcactttgggaggccaaggcgggcagatcacatgaggtcaggagttcgagaccagcctgggcaatatggcgaaaccccatctctactaaaaatacaaaaaaaattagccgggcatggtggtgcacgcctgtaatcccaggtacttgggaggctgaggcgggagaattgcttgaaccctggaggcggagggtgcagtgagtctagatcataccactgcactccagcctgggtgacagagcaagattctgttaaaaaaaaaaaaaagaaaagaaaaaagaaaggaaggaaggaagggagggagggagggagggagggagggagagaggaagggagggagggagggagggaggaagggagggagggagggaggaaggaagggagggagggagggaaagaaagaccctagcggctgctgagttggaatagctggttggggtcagtcagtggggtgagaagaggtgggcttctaaggcgtattctgaaggtgggagaatttgctgagggatggggcaagtgtatgagagagaagagccaggggtgactgcaaggttggggtccgagccatggcaataatggcactgatacagcctgagatgggggctgggagagaaggggatcctgagtgcaaccaggagaccccacgtctgagtgttcccaggacacccaggtgggtcagcaggtgcctattctgagagcagcagcatccagggctacagcgccagcttaagacataaactggggagtctagaggacaacggtgtttttttgtttttgttttgtgagacagactctcactctgtcacccaggctggagtgcaatggtgcgatctcagctcagtgcagcctccgcctctcagcttcaagcgattctcctgcctta

SEQ ID NO: 32124 - DNA, 886 bp, Artificial sequence
  DNA replication origin
cgcattaataataaaagcaataacactgcctgtcacttttttccctaataaaatcatgtgggatcgtcaatgggactggagcacacgtaataaatagcagggctctctgtgctaaattaagccccacatcccactggctgcagtgagacagggagcgatggccttggccttcctccagacggagagagggtggggtggaggaagagaggggtgtgctgagctgctctccccaccccaaggtccccacagcagggtcacagcccaggttaatgtcctgttccgttatactcttctcttcaattcctcagctccgctccatgtagatgaccccggcctcctgcccccagcctcaaagcagcagaggggtgatggagcaactccctgggtggtttattaaatatcattgagttagccgggaggcagacacggaagtggcaggggaggggaggggagggcggagggcaggatgcaggacagtatgttctcccacctgggcccagctggctgagtggggacgtgggggcagggcgtgaaggaggagctttctcccctggcatgtgggccacgtgcccaccctctggccgccctctcaccggtacttcttgaaggagagtcccatgtgccgcttcatctgctgcaggccgtggtagtcggtgtagatgaggtcgaagggcaggggcatggtgagcgggcagcttccccggcctggcggtacccctaagttactgagagaagagcccttcagattctgggccccaagaaacccacctgcccaaccggccaccccagttccttagagcccagaatgaactgtacaagtgcagagagcttagcacagactctcagaaaggaagtgagcaggatggccctgtacggtaacgtaggt

SEQ ID NO: 32125 - DNA, 1191 bp, Artificial sequence
  DNA replication origin
tttttttgtagagacagggtttctccatcttgcccaggctactctcaaactcctgggttcgagccatcttcctgccttggcttcccaaagtgtggggattgcaggcatgagccaccatacctggccaaagcaacacttaatatagcattttttttttttttgagatggggtctcgttccgtcgcccaggctggagtgcagtggagcaatctcagctcactgcagcctctgcctcccaggttcaagtgattctcctgccttagcctcctgagtagctgggattacaggcacctgtcactacgcctggctaattttttgtatttttagtagagatgaggtttcaccatgttggccaggctggtctcgatctcctgacctcaagtgatccgcccacctcggcctcccaaattgctggggttacaggtgtgagccaccacgaccagccttaatattgcatcttgatttggagcctggcagggcaggaggtgcaggcgaggtgagcgtgatgggaagggagcaccccctgccacgtggatggctggaggtgctgaaggccgcttggatgggtggaggtgctgaaggccgcgtggatgggtggaggtgctgaaggccgcgtggatgggtggaggtgctgaaggccgcgtggatgggtggaggtgctgaaggcgttacagagcaggcagcattggaggctggccttgaagggtgagtagcatatcaggacaaaaatgagagcaagggcttcagagctgagaaaatctcatgagtaaaggcacagggacaggagacagtgcagggcttgagagatgggtgggcggagagcctgctgtgaagaagaacataaggtgtgggaaggggaggcggtgaggggccgggaaggtgggaggcaacagattgcagagggtcagggggcaggaattcttcaacgtagagaagaaaagattcagacagaaaaacaacccctagctgtggtggctgtaatgatcaccagtctataaaggactcttacggagaagttggtccccacatgctgcagagaccacctggacctaaacacccctcaaatggtgactcccagccagggttctccctgaattccagactcagatgcccagagagatctcaaaccaccgctcgtttcatgaatgcctgtgagtcaccaggcagagtgtgagaccttgtgggtccatca

SEQ ID NO: 32126 - DNA, 998 bp, Artificial sequence
  DNA replication origin
ctccgacccgcgagcgtgggaggagctcggagaaggcgccggccccgtcgcactgctggatgtgcccgaggtcctcgtggcccctcccagttttgcgtcacttgttgggggcggggccgggctgggcttcgcgagtagcgggcggaggcggagtgaagccccaaggggctgccggcgtgcaggggaggggttcggctgagcgggaaaagggaagtttgcgggaggtcaaaaccaccggggccctcccgtatggctgctgctctgaggcctgcctctggtcgccctggcggctgcccccgtgcttcctcatttcttgttgactgttcaggagcaccaggctgctcgcgccagtgccccgaccgcattctcgccgagtaatggggaggaggcggacgccggtgctgcgcggcccagggctcgggagggcccgggtgagcccgggtggagcccagcggcatccttgtcaacacatccagacggctctagtgtcgggccgcgggcttgaaactgagacgcgcgcccagggcctgcccctcggaaacgagggtgccaaggtggggctgctaagtagctcccgaatttcagcaggagagcaccgtccagccccaattttcaatccggtaccactgagacattttggggtccttaagaggagctcatgactagaaaggggcacctcgcatgcccacccacacagcaaagctggttttataaccaacatgcaatttcactgtcaaagtcactgttgttccgttcacattagtcaccctgagtggctgtacatttcatgctgccattggacagaacgtttttggacctgtttaggaatttccatcaaagccagtttaccagacacacaagcaaatcattcatggcctcatcaccccttgtgttccacgtcaaaccatcatcttccagctgggtcacctacattattcactacattcagtctgactggcttttgcttgtttgtagaaatcacatccaccggccgggcg

SEQ ID NO: 32127 - DNA, 858 bp, Artificial sequence
  DNA replication origin
ccgccggtatgagcgcccctcgccaccccgtgtcccaggcccggcctttctgacaagaggtaggcgcgtcgtcgcggcgggtccgagtgcgccctcgccccggtcccggtctccgtggagtccggcgcctctcgggcgggccccccggaactcccggccgcccgcttgctgagcctgtccctccccagccccggctgccatcggcccggcacccgaaacgggccgtgcccccgcccccctgctcgccctccgcccccctgctcgcccctcgccgcccctcgcccccctcccccgcccccacccccacctcgccaggcttccagttcccgggagccgctttttgctgagagcggagtttcgggtccggagccagtgcccgcccctctctcccgtcggtcggggctttggccccgtggggctcagccgcgcgggacccctgctgagcagccccgggcgccggccgcccctcgagcctgctcgggatgcgttcagtgggtctggcctttggctcctgtttaaacagcgattgtcatgcaatggaggccgtccggctcctggatgccacttggtcgttgtcactccggatgcccgcgtagggcgtttatctggaccagagcatcggcagctgagacctggctgtggttcacaagctcgtgaattagcaggttcttaagtgagtgtagccagttctgccaggcggtggaatcctgaatggatgttaccgtttcttaaacgagcattacgcttttttgcttcttcccccaactcttgtttgtacccggttatcgtcctcatatctgggagagtaccctaaaattaatattcccaattaaatttttaaaagatgattggattccc

SEQ ID NO: 32128 - DNA, 1334 bp, Artificial sequence
  DNA replication origin
tggcccgctcggggacccaggtgtgctgagaagggggtactggcgttggcccggcgtgaaaggtcaccctgcacccccgcacccaggtgaggcgggcgcgggatcccggttgccacaggcatcggagcggccgggagcgggggcagggggaggcaatgagaactcccggggagggggctcgcaggggccgcatcggacgcctgggccggcggggcagagggaggcgccctgctctccggtccctccctttgcctccctcccgccccgggcgccgcctgcgggagccgactcgttccaggggaggcagcgccacctgctggagtgtgcgcgtctgcgcaccgggccgggttccgcaggtcctggggctgcgcccgagacccccgaccgagtcttcggcgcctccagcgcttccccggcgtcttgggctgcgaggggccctttccgcagggcgatgttttagcagttctgggaggaagggcccactgccgttgccctctgaggaccgaggccgagagcctggagggcgtggagaagggtctgaccgccggctctggtcctcgggctcttggcgacagcgacctccctcctcctccgggcgatggtgacgggcgctctcagagtggcggccacactaggcgcagggccgtcttccaagtgtgtggtcctctcagacctatggagttggtgctgttctggctccctcttaaagagcgggaaactgagacacagagaagtcccaccgccgggggtcggggtggggagggcctgggattggaacccaggcatgctggcttgtgtcacctgtggttctctctgcctgaagattttttcacctgcctaactcatgagctgctacttaccctttgggtagcattagatgtcgcctcctccaggaagccctccctccccctccatgtgagggtgggcgctcctgctatatgtgggcctaccggccctctgcgggctggatcatcacagtctgttcacttgtctgcctcctaccccttgacgtgggctcccaaggatcatttgtgtctgtcttgttcacctgccctttgtagtgaaccaaacctttaagtgcacattttaaaattgatttccaagggggctgagagctatggaggaagagccaggtcagagagtcatcagaagcccatattttacaggatgtggctgggggcccctctggggtgcccctccaaggaagatgctgagctggacctggagcaccgtggaggcaggaccatgtctgccatgctcagagatgggtgccaggggcgctggcttgtcactcaagactccccactccatctgccctcccccactctcccact

SEQ ID NO: 32129 - DNA, 1191 bp, Artificial sequence
  DNA replication origin
tgggccacacacgggctcgggaaggaccagtgactcaggggctttcattgtttcagatcaaaggctgagtgtggccaagtgaaggagaaagcccctgtgcgggcacctgcagaggcgtccaccctgcccaggggcctctggggacgcagcgcccaccctgcccaggggcctctggggacgcagcgacccactgaccagtgagcgcagatgagcgactgcacctctctgcttcagctcttcatggccagatgggaggacaatccccaccttgcaaggtggcgttaaggactgagaaagaacgagcaccaggcctggccccatgagcactgctgggtctggatccaggcgccgtccaccttccacccggcagcactaatgcttccctccccggctgcactggcccttatctgggggtcaggaactcacgtgctgaataaagagcaactcttttccagacaggaacgttgggtgtagcagggacaggcactggggctgaagttgcttttccaaggagacggtttggagtggtgccttccagaaaggagcatggtaaggtgaaggaaaggaagctggagagggtgaggaggggctgtttcaggaaatgaagctgaggggaagtggctcaggatgtggaggtggaggaggtgatagaatggaggaggtgatgggaatggaggagatgatgaggatggaggtgatggggatggaggaggtggggagatgatgggatggaggaggtgacaggaggtgatggagatggggaggaggtgatggagatgaaggaggtggggaggtgatgggaatggaggaggtgatagaatgaaggcgatgatgggaatggaggaggtgatgaggatggaggaggtgatggggatgggggaggtgataaaatggaggagatgatgggaatggaggaggtgatggggatgaaggagatggggaggtgatgaggatggaggaagtgatggggatgaaggaggtgaggatggaggaagtaatggggatggaggaggtgatggggatgaaggaagtggggaggtgatggggatggaggaggtgatggggatggattccattctggccttccctcataccctatgggcctccttcatcactttggttaacaacttaggcagttcccaaagctgttcatctagcttcagcaaatgaaccatctcatcttggccaatc

SEQ ID NO: 32130 - DNA, 1854 bp, Artificial sequence
  DNA replication origin
aagagggggcggcccgccgtctggagtgcaccgaccgggccccgccccggccccgcccccgccccgcccctccccggagatgcgcatagaaccccggcccagccggctgtggtcccgcccctgacccgccccctccccgccccgtgaacgtgcgcgccgagccccacccccgcccacccctgcgctgcgctgcacctggcggagcggggctggcgggcgccgggcctgggagggggcgcccccgcgcggcagcgcagaccagaccagaccaggccaggccgggggtgggggccgcctgcgtggcccgccgcgcccgcagctctgcacccccagctccccgcgctggcgccaatggctggttccgggagtcgccgcacttcccagtcccgagtccgggcggggcgggcccggccaggtggaagcgggcggaggtgcgggcgctccgggcggccccgccgggcgaggcggcggcgccgggcaccgcggcggcgccgggcacagccgggggtcggagccggggtgccggcttagtgggccggggtagggcgggacaggacacctgtcctgctacttttctggtaatcaaaagggcagagtgcgtcgattgagttggagccttagtttcctcacctgtaaatgggcgcgttggacagatgatcatttgttctccctgcgctgggcaccgtgcgcagctcggtgtatcggtgcagcggggcagacacagggagccgccctttacaactcgggtaacgcaggcagtggtgagaggatgcaaaacttgcacggaagaattctctctacttggatatccttaaagtctccacgataaagcggtgtttccaacgtacagaggaagaagtgactaattatgactggagggtggtgtcagagttttattgaggcgaaatcaaaacagggttttaaggaatgagcaggaattagccaggcagccaaggtgatggaaggcagctgttcccgaaagagggaagggcgtggcggagcctgggaggcctgaggtatcacagcgagtgtggagagacagaggcagggccgggcccttgcacagctgccaatggaggccgtagaggacgagaggaaggcgggaggccagttgggaagcgctcgctagttctgggtaggggcgcagcattgccttctcctgcagccctcccaaaaatgcacaggaggctgaaagtgtcactaacagccccgaaaaatcctcctcctcttcccctctcctttactctccttgggggtccaagaagcattttcatttcctgcctgagtgtgggaaacttatatgcatgagaacggaggcctatgtggcaccgtgggttcgttccggcccacctgcttcctttcttgagtaatctgtccagccacagccctgcagagggagcagcccagccagaggagtttcccctcaccccaggtagagctgattggaccggagtggacactggacttcaactgagtccacccctttccttatctgggggttagaggctcaggaggcctcgggagggaagtgctgtaagggaggggagcagggagtatggacgaattgtgaacagcgtcctggattctgggatgtccacaccctaaccgcaacccccacccacacgcccactcaccgcttgtaccagcaccagcagattccggcttaggccgtgtcctgacttggccagcaagcaccatgatgacactgcccccagcctagccatgatgacactgccacgagcctaatgcctgggattcccaaagtccagcggtgtctcaagaatctgggttatgggtgcattgctggctttgtccattttactcagcacaagtcagaggtgccctggagcacag

SEQ ID NO: 32131 - DNA, 1126 bp, Artificial sequence
  DNA replication origin
cggcccccacccccggcctggcctggtctggtctggtctgcgctgccgcgcgggggcgccccctcccaggcccggcgcccgccagccccgctccgccaggtgcagcgcagcgcaggggtgggcgggggtggggctcggcgcgcacgttcacggggcggggagggggcgggtcaggggcgggaccacagccggctgggccggggttctatgcgcatctccggggaggggcggggcgggggcggggccggggcggggcccggtcggtgcactccagacggcgggccgccccctcttcccgccttcctactaccggcccaggattagcgccctgggagcgcgcgccccgctgcctcgccgccacactttcctgggagcggcggccacggaggcaccatgaagaagtcttactcaggtgggcttcgcgcccggggtggggaggggtcggtgtcccgggaccagcgctgctcacctgagtgcctgcggccgggagtggcgaggcgcccccggagctgagcgagtccccgcggcgggcacactgcaggtcgagttcctcccaggacagggccgctgtcgggccgctttcgacctgagccgaccgtcccctgcgctgtctccagcccttgctcgagtgtcggaggggctgccctgggggacgctccctcttcctcgccccttgcaccctcgcaggaatcgctgactttccaggtcggccgggtgctttgggtccctgtgcgtctgtgtgggtgaatggggtcggggctaggtggaggggtgtccttgggttcagcctctagggctggtggtccaggccgcagcatcctttcttcggattctcttcggtttctcctctacttagtggggcacgggacggcctccagatgggaccgtccagcagcgcccaaacttggcgactcgggttcacgttttgcgctcaggacgccgcccgcggctgacatcctcactccaccctagcagggcccgccttaagtaggcgaagggggcctgacttgggcctcaccatgagccggttcaggagctttcatttcataagaggctcccgctctggcactctgaagttccatttcacagatgggcacaccgaggccacaagggcaggttaagagaa

SEQ ID NO: 32132 - DNA, 865 bp, Artificial sequence
  DNA replication origin
aaggttctgtccttttttttaaaaaaaaaaaaaaaaaagaaacccagtgaggggtggggtaggtgtgtgtggaggagaggagaaaaggacaagtgatggtctccccacctcccagtaagccgcaggtgcagagactccaagcctgcctcagggcccttccggcatctgtgcaggagggtctccgcagaaaaaacccaggacccacgacctgggaggaccccggtcacccccactgtctggacccaccagtgggaggtaaagtgtaagaaaccaagggcaaagggccctccctgggcgggctagagatcccctggaaagggccatgcaccgcgcgatccccacaacaatctcaagtatttggagcatgttggggaggaagccccggtgccaaaaccaagcatgtgccacctggaagcccgctcccgcccaccagcacaccaacccacccacgctcctgacagagctgtgctccgggtgcgtagagggccatcttgttcgcaacaaccgggtgaaagttgaaattctaagctactgacccagaagggtattttcggggaagttctgagtaatcctctttgagacaaggtactttatcactcattttggttcctaaatatggaaagccagaggaaaccgacaatggcccaaaggcagggggatggccccgatgactccttcacctccaactaaggcccatgattctgttctcctatcaataaaaattaattcatggatccttggcaggtacctttctatctgaatgaattaaaggagggacattaaacaaacggtttctagatttagaagaggagacgctatttataatttgaggactgaggaggacaaaggatcctgcctgcctgga

SEQ ID NO: 32133 - DNA, 1703 bp, Artificial sequence
  DNA replication origin
gaagctgaggcagaagaagcacttgagcccgagaggcggaggttgcagtgagccgagatcgtgccattgcactccagcctgggtgacagagcgaaactctttctcaaaacacacacacacacacacacacacacacacacacacacacacacaaatctattcccattttttttcttgaaactcctgagagaggccaggtgcagtggctcacacctgtaacctcagcagtttgggaggctgaggtgggaggatggcttgaggctaggagttggagatcagcctgggcaacacagcaagaccccatctctattaaaaaataataaaagtttaaaaagctcttgagatagcccctggggaaaggtgggtcatggagaccctcatcctggtcatccgtgcctcccccgtttgtttccctgtggctccttcccactttgagcctggggtgggggcggtttgagcctaggatgggggtggtttgagcctggggtgggagcggtttgagcctgggatagggcggtttgagctggggtgggggcgctttaagcctgggttgcgggcactttgagcctggggtggggatgctttgagcctggggtgggggtgctttgagcctgggttgagggtggtttgagcctgtgttgggggtggtttgagctgggatgggggcggtttgagctgggatgggggcggtttgagcctggggtgggggcgctttgagcctgggatgggggcactttgagcctgggatgggggcgctttgagctgggatgggggcgctttgagcctgggatgggggcggtttgagctgggatgggggcggtttgagcctggggtgggggcggtttgagcctggggtgggggcgtccaggatgcacaggcttcactccctttttctgaggctcagtttgctcacaggagctgtgaagggctggatcaaagtcaaaggtttaaattccagacttatctccagacttagtggacaactaaaatactcaagcttatctccaaaggaagctgagataaggagataatggccacctccctcttctcctcccctctgtccttggcctctgctacctggagttgtgtcctgaagaggtacactgggcaccaggccctcctggccttgcccccaccccctgcctagacacagaacaacctttccccaccctcaaggctgacacgtggggctgtggatcaaagtcaatttattcatccatgaggggagcaacctccttgccttaggaacttgctcctacaggagaataaacactgtagaaggcattgttctcagtggtggtgcacgcctgtaatctcagctactcaggaggctgaggcagaagaattgctagaacccaggaggtggaggctgcagtgagccaacatcatgccactgcactccaacctgggtgaaaagaccaagactctgtctcaaaacaaaaaaagaacagcaccctgtgtcaaggtcaggggtctcagccatcctccctgtgaagcggaaggggcaccaccagctcctgtgagaaggaaacagtctacccaactacaaaatgccaaccaaaggaggcagcacactggttctggtgcggtgccgttggcctctgtttggggtaggaggagggctgggggagagccaaaagccaaagaaggcccatggaggccgcccctctcttggtgaccagcccctctcttgacggcaagct

SEQ ID NO: 32134 - DNA, 1480 bp, Artificial sequence
  DNA replication origin
ctctttggagccttgtgtcacacgcatttctcacggtgttgctttccctggaggatgggttcaactaaaattggggcccatctgggggttccctccagcaccagagaagctcaggcttagtagagatgggtaccctgtcaatactagttccgcgaaggatacactgtgctcattctgctgccagttgctgagtctggtgtcctgtagttatggaacatgtgtacaggcctgggctgctggacacgaaggccagatgggcagttcactctgcctccgctctgagcctttagaaacaagctggctgcacccatttccatctggtcacagtttaggagtggggttgtggaatggatggaaggaaggatgagtgggtgggtgggggggtgggtgggtgggtggatggatggatggatgatgggtggatgggttgatggatgggtggattaggtggacaggtgaatggattggtgggtgggtgggtgggtgaagggctgaataggtgggttgggtggatgggtggatggatgtgtggaggggtggtggggtggatggggtccatgggtgaatggatggatggatgggtgaatggagtaaatgagtgggtggatggatggatggatgctgcaagagcctttctggagggttccagggaggaactggcatctttgaccagcagccagcatggtgatcagatacagggaggtgtctgggtctgcctgatcccttatctcactgttggtgggactgggctggttatgtgtccctgaagctctctgaagggtggctgtatggcattgcccaggggacatccccagagtgccgtgctctacagcaatagggtggccgcctgtgctcccagggccgctcctcctggcagcctttcgggtttgcttggcttagcacctcagcaaatctcctcgagttaggacttgcctgccatgagcctctccaacaagcagccccaggccaaggcctgtgtgtgggcagagggagcgcatgccgcgggaggctgcattaatctgaggttctgtttttgttccctcctggggcaaaaggtaaaaatagcctgtcccactccatccccaaatccagcccggctgcacccagccctgggagtgaagggggctgggtcaggactgcccgtgagttgtagaccctggtgtagggaaaccctgattcataagacgggtggacatggaggaaggaggagactccgtccagcagagacacgcttgggtgcagcccagcttggagtctgatggacgtgggctcacctgtgtgcaactctcattcactgtgtggccacagggaagtgacactctgtggagactcagattccttatctgcaaaacaggggtagtagggcttgggggaggatgtgtgtgaaggtttggcccagggcccctccagcagccagacagcagtggctgtcatccctccagcgtccagggttacctgggggagtagggcctctgtcccc

SEQ ID NO: 32135 - DNA, 2017 bp, Artificial sequence
  DNA replication origin
cgccggaggagcccctaggccccctggctcagctgaatgaatgggggaggaaggcgggcgccggcccctccccgcgcgctgcgcccccgccccgcccccgcctcccgggcggatcaggttcccgcacccgcaccggcctccctgtctcgcactggctgctccgcccgcctgtcaaggccaggcctggggggctggggcccgagtggccgctgggggacagtcctgggcacacgaccggagcgcccccctcctccccgcctggcccgcgcccaggggacggcgagagacgcggcctcagcccctccccccgggcgccccgctgcggccagatgtgggcggatgtggaggccgggccatggcgaggagggcgggcgcccagaggggaagagattcctccccttccccgggcgcagggtccttctgcaggaggctgtatttgggcagccaaacaaagttctctgtcaccgccgccgcgcgctctgcgcctgcaagggttaaacggcagcgcacgcggctggcaggcaggatcccggcctgtgggctcaagagccgaggggcgcagggcgaacatgcgagtcccatggcaccagcgagaggccaccaactcccacccaccgagggcacccctgcagctaacacccccaccacgaccaccgccccgggggccaccgctgcaccctcctgggtgagccctggagaaggcactgtccgggagaaggggcacagggcggggatggaacacggctgtcagagaagccagggacgggcgacgcctcccttcctccacaataagggcctcctgagagcaggaagtagaccttgtcaggagcagacgtttccgaaggaaggtgtgaaggaaggagctaggcagtgagtgagcagaaagggagctgccccaagggcttctccctcccttctgggccctaacctgaggcctagccttccctccaggccagcggtctctacccttaaactatatcatccacaaggcaggcagggccgaggggctggggtagacctggggacctgggttagacacagaacttgagaagcaacaggctctcatcctcaagaagggccccccaggtctgtcacctacaagagagagaggcgcttcttccactcgccctggaaagccagaaacccactcctgcatgctctccctgtcaccccgtcccttagaccctcggcctctgcccagagtcaggggccatgtgagaattcacagcatggaacaacacccccacccccgaagcagcaggccgcaacgctacaactgcactccggtcccttgaatgtgtggccggggagcgcctgacagctcatcctgggtctgaggtcgctcgctgcccacttgcccctccccaccccctctgaaatatcccaaatgtgcaggagtgctgagactctccagccattctggagaggcggggggcagggggtctcttgcggaaaatgttctaggtttgggtggctttttaagtagatgaaatcaagtccttcctttttaagaaaagcaggcactccctccctcatgctttggatattttgaactattttcaaccaagtgagtttgtggacatgggaactgcaaaaccacagacatttcagatgcgtgcacaccctcgtcggcctgggagcccgggtttcagaaatgcagccattgctgccattaatagcaccccgtatcttccacgccaggccagggtatgtcttgtctgaactccagcacctgggcctatcggatagtccagcccctactgggccacctgtccacgccgtatttggggatttgggggtccagtacctaagaaactcagcccaacaacacagcccccctgggaagatgccgggtccggcacaacagccatcctaagccacagcattattctcgagtgtttttctaaaaagcacctggtgagtgtggacacacccatgcaattgttctttcccagggctggcatggagttccaccagattagcacagggtcagccaattgtacattctccatctcca

SEQ ID NO: 32136 - DNA, 1673 bp, Artificial sequence
  DNA replication origin
gccgcggacgtgctggagaggaccctgcgggtgggcctggcgcgggacgggggtgcgctgaggggagacgggagtgcgctgaggggagacgggacccctaatccaggcgccctcccgctgagagcgccgcgcgcccccggccccgtgcccgcgccgcctacgtgggggaccctgttaggggcacccgcgtagaccctgcgcgccctcacaggaccctgtgctcgttctgcgcactgccgcctgggtttccttccttttattgttgtttgtgtttgccaagcgacagcgacctcctcgagggctcgcgaggctgcctcggaactctccaggacgcacagtttcactctgggaaatccatcggtcccctccctttggctctccccggcggctctcgggccccgcttggacccggcaacgggatagggaggtcgttcctcacctccgactgagtggacagccgcgtcctgctcgggtggacagccctcccctcccccacgccagtttcggggccgccaagttgtgcagcccgtgggccgggagcaccgaacggacacagcccaggtcgtggcagggtctagagtgggatgtcccatggcccccatccaggcctggggatatcctcatccgcctcccagaatcgggccgtgggggacagaaggggcctgcgtgcgggcagggagagtattttggctctctcctgtcttcggggtttacaaagtgtgttgggacttgcggggctgctctgtccaagcctgggtctggcgtccgcgtctctgagcctgtgagtgcgtgcgctttcctgcgtcctcttgactgccggtgctggggctctgcgtcctgcgtccgcgggagtaaatacagcaggcgaaggggaagctcacacaatggtctccagcgctctggggcagggcttctgaggggcgggcctgcctctgccgggacctggagcccccgcccctcggagaggctcctaggctgacttgggcagagccctctggtgggccgggagggggaaaggctgtgttgaaatgagcaaactgtccaggtgtcaggccaagctgggaggtgaccagcctgaggtcctccccgctccatggccagaaccagggctgacatctgggtgtcctgagcccagctgcccacacggcccacctggggtcagccctatctgagtgggggaggcggggcctcctgggggaccagaactttggctggacgccaagcagagtgccagtggctgttcttcagggctgggcctgaggagggtgtggggcggcgaagggacgggagggggttgtgatccagtggccactggcgctgtgcagagtgtgagctggaaacatcgtagttactttgtcagcttagtggtgaaagccctttttcaggctctatccctttgcatccctgcttcccagagggaggggaggtctgggtctgcagagctgggagggcttgctgttcccgcccccctcccccacaacacctcctcatctggacatctttgggcacatgctcatactggggtctccctaggtccactgtgttccgttgagcctcctgcagtccccgagtgaatgtgacctccctgcccctgcctctttgcaactcctccctgcgaccgctcctccaggggccttccttgtcccaaatgtccaagtggcacgacttagccg

SEQ ID NO: 32137 - DNA, 1160 bp, Artificial sequence
  DNA replication origin
tagttactttgtcagcttagtggtgaaagccctttttcaggctctatccctttgcatccctgcttcccagagggaggggaggtctgggtctgcagagctgggagggcttgctgttcccgcccccctcccccacaacacctcctcatctggacatctttgggcacatgctcatactggggtctccctaggtccactgtgttccgttgagcctcctgcagtccccgagtgaatgtgacctccctgcccctgcctctttgcaactcctccctgcgaccgctcctccaggggccttccttgtcccaaatgtccaagtggcacgacttagccggtctgaccactttccagtaagcccttatggagagaggccctgtgttgtgcagagctctcctcctgcctgcgggatcgaggtctctgctctcagttcctaacagaaagtgtcgggcccccagtgggatttctggggaagaactctcgtgtctcaacgggagccctgtggcgggaggggaggccagggtttggggttgtgttcgttgtacagctgtcaccatttgcactatgaaagttgttagtgccccttccttgggtctctgggtgtaactccacccttgcccccatgtgcctccatctggagctgcttctgcggctgtctcccaagccagttttgtgaccctgtaatttagtccaagacaatgggctcattgagaccatcctggtgcagcagttggcaatcctttggctctgggggaaggtttctcagtctcggggagtggggcctcaatctgctggttccctgtgtttatcagtctcccccttgtgtgtcctgaatggttttgctgggaattctggtcttagagccatcaggtggcccgagtcgataggcgtgagagagtgtgtgtgtgcatgagtgcgcatgtgcatgggggctgacctggggtatggaaaggtggccctccctggtgcccaaggagcctggagtatagttggagggtgtgggggtgtgtatatgggagttggacaaccttgggtggacagacagacgtggggaagggatgattgaaggaggtggaggagagagtgtgattcagcccagccaggggtgatgtggacaggcagcttccgaatcagggtagagaaaagtcaccactagctagcaggggaga

SEQ ID NO: 32138 - DNA, 1171 bp, Artificial sequence
  DNA replication origin
gtcacagatgggtggaccatatgcccatctgcagggccaagcgctgacaatgaggtgagcacttgctggatgaccggaccatgaggacagcgggggcgctggcagcctgcgttcggctctgcaggctggcctttccctgaaaagcggttgtggcagagtgtgcatcccagggagtggtgcctgctgccctgaacattctcatccagcaggcctctgcaagggcccagtcaagtgtggtgcagagctgggctggcagctggaacagtctcatcttgtctagtggtgagaccaagggctgatgggccaaggctgcgtgctgcttgcccagcccgtggacccatccactgagcacccccatacccctacactgggcccggggtgtcaggaggtggaggggggactgggtgcctggaaaaacaagcccaccgagagcctgagcccccaggggtcagtatcaggcagtcaccacggtgcccggtacacagtggccacctggtctcgtcggctgtcttggtggtggagagcgtgcatggtggccgtacgtgatgggcatcacccagggtaatacagatatgcagactgtgcatttgtctgtaggagccagggacttctcagcctggcaacctgtgacctctgcctacccgttgggagagaggtgctgttccctgatagcctggtgccgggagagcagaactagggtctcctcctcctttctccacctcccatttcttacatgcccaggcatcaggggaggtcacactcagggatgagtcttggccactgggttcagggcctcactgttgccatctcttccctttgccagccagccaaatgcccgtccatcatcgtgccggggatggggctggcctgctcctctgaagtctccttggtgtatagcctaggctggagccccggacgattccgccaccccctcccccgactttttctttttattttgattcatcccagaaacccagccaaaaaccaagttcctgtgctctcccttgacaaagccactgaggaaaaatggtcaaacactgcctttctttccaaagccctcttggtttttcccaaatttggaggctctgagttgcttatgagaccaaagggtccggaactctctggaacacagtcccagaagtgggaggatttgtcatctctccagccaaac

SEQ ID NO: 32139 - DNA, 938 bp, Artificial sequence
  DNA replication origin
gtgccttgcccaggaagctggcagctgaggcggccagggttagggggttgggcttcctcttcccctccccagtgcctgagtgcatttggaggaagagagacgggtgaggggaaggcactgaaattggtcctggagcgctattattgggggctggggaccagctgtcatcccttttcctgtgggcaggggaggcagtggtgggatcccatgagacccggactctgtggcctggtgaggcagggagcggctggggagacactgtgggtctccacaggggtgcgctgtgggtctggcctggggaaggagctggtgaatgtgcctgccatgtgggtccctccctgctctggccctgataaccaggagcggctggctctcatttggagtgcggttgtggggactgtggaggtggcagcttcccaggtaccatccccactgcctccgagggagcagaccctggtggagaggcaggatggctgcagggcgggagctggtggttggcatcactgcacgggcttgtagtagtggatgggaagatgcaggagaggctgatgactgagaaagttggttcctgtggactaagctgggggagccggacaaccaagtggttagaaccttgggctctggtatcagcctgatgtacagtctggctctgtgtctaccccgtgccccactttccccatctgtactgggggtactggtattctttacatcccagggttaagcggctgcagatgtgatgagctcggtaggcccggcgcctcgccggcactgaaagctccagtgtccgcccttagtgtcattgatggggttttgttcctgctgcggttctgattggttacagttgcggtcacttattattggaggcatgtcccccgctgtggctgatggtagaggtgtgtttgctggtggtgtcccagtgtgtgccttggctggaggtg

SEQ ID NO: 32140 - DNA, 1462 bp, Artificial sequence
  DNA replication origin
ggagtttgagaccagcctggccaacatggtgaaaccctgtctctgctaaaaatacaaaaaaaaattagcttggcgtggcggcgcatgcttgtaatcccagctacgggggaggctgtggcagaagaatcacttaaaacctgggaggtggaggttgcagtgagctgagatcgcgccactacactccagcctgggcaacagagccagactccgtctcaaaaaaaaagaaaaaaaagaaaaaaagtaaaaaggcatgttgaaggtacctgcttgtggaaagttgcaacttgacgggaggtagggcgagcacttcttagaaaggtggaaatgggccctcctgctacagagacccacaaacatagactgaggcctgcagcctaggagactcaaaagaggcaaaggtgaataagagtcaaggtctccaagtcagggtctgactctgggggtgggggtcacatatgatggaggatgtcaggagggcttcctggaggtggtgacatttaccaggggggattttaggtggggtttgcgagacagtaggacctggctgaagagcgtaggctccttagacaggagtgggaattcaggcttgaaaatgagttggccagattgcaggggtcctcgaatgcaagggaagaatttcaactttaacagaggagcctgggaagctgtttgggaaaaggagtgataaagcgggaggggtcctccagcagagccctgcatgggcaggagggagcgagatgggaggtgggtgttggtaagggatgatcccagtggtccaggggagcagtcatagggtggaaactaaccttgtggggtctgggcaggaagggactgatttgagacaccgggaagaaacagccagtaggactttggtgagagggctgggggtcggggaggggggtgtggagagtgggagcttgagtctctgaaaacagacagtgttccaagggggagacctgaggcaagatgtggagaggcagctgagctgggaagctggaacggaggtgtggtcactccaggagactaagtcagggggcgaggggacccttgggagctatctagaccccagcactagggaatacggaggggagaaggaggggagaagaaccagctggtgcgtgtcaggcactgccctcgaggtcagatggggtggggctggatactggccatgaggattttttcaagagctgggttaatagtgagacgggcggacaccagatggctcgggctaagaagtaagtgggcggtgggaagctagaagccgtggtgtagacctactttgagaggttgggctgttcagacagggagaaagttcacagtttgaggaggtagataggtcaaaggaagagggtttgcttgtttttgagattggggcatcctgaacgttctcccaggccaagtgagaagaaaccagaagaggaacatgtcacccaaatgtgctgaaacagcccagcagctgcgc

SEQ ID NO: 32141 - DNA, 1015 bp, Artificial sequence
  DNA replication origin
gtgattttagagaaagcggtggccaattcgaatttcttcctggccctcctggaagccagggaaaccccttgcgaaaaggaaacatgttccaagaagctccgggcagcaggagaacttagccactcagcttagttggccaaatatttacaaagagatagctgtgaccacacaaagccctattcttctattttgaggccgaaaatctggtccccgcgtggagatcgagctccccgccacccctctcctggggaccccgctcggtcctgccggcctcgggccggggcccagggacagcgtggctcccggcaccgccaccatggccatcagggtccgcctcgcggccgcgccacctgagagcccccgagccagtggtgcaaggctgggaagaacaaaggagcaggactcaccccagcagcggaacgtcgggctgcgctggacgcgccgagagccgcggcccgcccaccgggtcacatggctcagagccgagcagaggatcaaaggggctttgtggtcgcggaacaaggagcctcccagagcgcggggcagaggtagggagggacctcgactgcctgggaagggaggctcggtggggaattgctccaagggggcagggcgaggggagcaggaggagggggcaggcagagataggggcgcccagcggcaggcccggcgcagaagcaacctgaaggcacgggagggacgccaaggagctgccacacgctaaaggaaagtgacagggtccctgggaagagtgagggggagctgctaggaagaagagaggggaagaggctcccagggacctctggccatgccgtccttgcccttgtccctgtgcttgccagaggcggtgcccgtgaggagccccctcctctcagccaggtcctgaaactgacctggacaccctctctccttgtgctctgcctgacacccctgcttcctaggtgctcccccacctacctgctcagacatcgccacagctgggctctcagggagcatggccagccaccccagaaag

SEQ ID NO: 32142 - DNA, 950 bp, Artificial sequence
  DNA replication origin
ggaagctgaagagtaggttaggggcgtgtgttttgttaacaaagacttcaagcatttactgaccaggcacaacactatgtgcttcataaataaatatctcatttgatccccagcattcttatgagacagatgttattatcccatttcacatgtaagaacattgaggcacagagtggttaagttacttgctcagggtcacacagcacgtcggtggtaggcaggattctggagccacaggaatctggtatatcccaggtgcaatggaaaccagtcacggcttcatagagggaaatcatcagattagtaaattttacacacgccccctggtgctttgaggaggagggattcggacaggggcagctaatggtggtggctgtgagatgtgttgggttaacattgatgagagtttgggatggatgagtggattcggagtaatggaaatggagggcccaggcccggcccctggagatctagctgcaatagctgttggctggagaggctgttcacttagatgggggatggggtgggaggcaggtgagatgagagctccagagttcagcctggggcacggtcattgggttcaagatgccttcagatgttggggcttgacagtgacagtggctgcagatacccaggacccagcagagggcctggcacagcggggcccagggacacgtctgtgagtcaggctggcactcaagtgtgaatctggacaaagaaggtggcattgttggcattgaatgctcaggggctgggtgaagtcagctagggagaggggctctcaaggcaccaggactgactccgtgggtgagggcggaggaggagacggcagaggctgagagaatagccagagacaggaggaaggtcagcagagccatgcacagaagcctggagaagatttgaggaaaggaagggctgggtggtcgtcattccctgcagctaggaggcaa

SEQ ID NO: 32143 - DNA, 2236 bp, Artificial sequence
  DNA replication origin
ccctgaggattcagggctgcctcccgggaagatggctggagagaaagagaggggagaggcccaaaggcagtggccaggctgggactcatctctgtgggctacggaggggctgccctgctccctagccagggacagggtgagaaggacctgggaacctctgcgtcccagccatggcacaggccttcttccggagctttggccccaaggagagggagaggcagcccagcagccctcgccttccgtggctgccactgtgacagccttgccctctgggaatggtgcgcaggaggccacttcacctgtctgggcctcttcgccctttcaaccctgagaagaacagtggtcctgattccccacaaaatcactccctcccagggatgccgagtgaggaacaagacgtggggcagctctgctctcctccctcctccctcccatggcagctgtgcccacctgcagaggtgcaggcaaggtggaggggcacctgtttggaggtccacagaccccggggagaatcccagctttgtcctaactcagcggggtgaggcttgtgtgtcttcccctgggctcctcctctgtgagccttagcttcctcgtccataaaatgggatcatcccataaagtgagatcaagcgagctaggccccgggcagggtccccaacaggttgtggttgttcgagaatttgcagcagtggtgatggtggttgtggtgatgaggatgatgggggtggtaatgacggtgatgatgatggggtgatggtgctagtggagatgatggggatgatggtgatggtggtggtgatagtggtgggatggtagtggtgatgtgggtgatggtgattgtgatggtggtggtggtggtgatggaggtgatggtgatagtgatcatgagggtgatggggatggtggtggtggtgatggtgacagtggtgggatggtagtgatgatgtgggtgatggtgatggtggtgatggtggtggtggtgattgtggtggtggtggtgatgatggtggtgatgatggtgattgtggtgatggtgatggtggtaattgtgatggtggtggtggtgatggtggtgatgatggtgattgtggtgatggtggttatgatggtggtaattgtgatggtggtggtgatggtggtgatggggatgatgatggtgattgtgatgggggtggtggtggtgattgtgatggtggtgatgtgggtggtggtggtgattgtgatggtggtgatgtgggtggtggtggtgattgtgatggtggtggtggtggttgtgatggtggtgatgtgggtggtggtggtgattgtgatggtggtgatgtgggtggtggtggtgattgtgatggtggtggcgatggtggttgtgatggtggtgatgtgggtggtggtgattgtgatggttgtgattgtgatggtggtggtggtgatggtgatgatggtggtgattgtgatggtggtgatgggagtgatgctggtgattgtggtggtgaagggggtgatggtggtgattgtgatggtggtgaagggggtgatggtggtgattgtgatggtggtgaagggggtgatggtggtgattgtggtggtggtaatggtgatggtggtaaaggggtgatggtggtgattgtggtgatgtgggtggtggtggtgatgtgggtggtggtggtgattgtgatgggggtgatgatggtaatgtgggtgatggtgattgtggtggtggtggtgatggtgatgattgtgatggtggtgaagggggtgatggtggtgattgtgatggtggtgattgtgatggtgatgtgggtgatggtggtgttgatgggggtgatgatgttagtagtggtggtgatagtgatggggatgatggtggtgttgatggtgatagtggtgggatggtagtggtgatgtggttgatgatggtgctggtgctgatgattgtgatgacagtggtggtggtgatgagggtgacggaagtggtgatgatggcgggagtgatgggatgatggtaatagcagtgatggtattgtgatgatggtgctgatggggatggtggtgatgataagggtgatgatgatggtgatgataataataaaagtaacaataataaagggatacaccttgcagtatcccagttggcatctcctagatctaaggtgtcgtggctggaacattgacataactcctgacctgaggttggccaggacacagacctggtggacagagagagatggacgaggagtgt

SEQ ID NO: 32144 - DNA, 661 bp, Artificial sequence
  DNA replication origin
ccctggaaggggccagcactgatctctgtgcttcccgtctaagaacgcaccaaaccctctaaggggtcccatgaggcagggcccggatgagaaggtcagtcaccgctacgggtgcttggctgggggctcccactccacctgccagagcctggcctgagaaggcaggacacagaccaccaggctccagaacagcccagggcctgcctgaccctcagctccccaagacgcagctgaaggatgggggctgggcaggacacttgcataggggtcagtgtgaggctttggaggtgcagacatggcacacccccaacttcatagctggcggccatggcccctgactcagcccctctgcacccagcagcagggcagacagcaccgtcttgcagtcccaggggacagagggaacccagggcacccggcatgaggacgccgacactgcagggacgtacgagtggccggtggcggggatgaagtagaggcagcagtggacgcgggtgtccgggatgcgcttcttgcggttgatgttgacctcctcctgcaggtatttctcgtactggtcattgatgaacttcatgatgggctgccagctgcgtgggggatggggacgagtcagcaggcacatgagatgccctccccaagcaggtcgtgcattcccaggact

SEQ ID NO: 32145 - DNA, 2295 bp, Artificial sequence
  DNA replication origin
tacatctccggggcttctggctccttctcctccatgccgttggccatggcgctgctgccctcgttgaggcgcttcacacggtacgcctcgaagtggatgctgctggtgatgtccttgatgttctgcatgtgcgtcctgtgggggtggggggcgggcgggtcagtgaggtgggcgcagcggggtgggggcagcggggcaggggccctgctcggcctgcctcggactcaggcccgcctgcccccacccccactccccatcccgactgcttggctccccatggggtcccccaggcccaccatgttggaccagatctggtacacgttttgggggaagggtcagtccccctggtaagcccagactcggtcagaacacacatattccagtgcatgtgtctccctctgggtccaccctatggccctgggtccagggcccagggacagtgcatagactcagagggacagggctggagcattgttgctccaggccggtgtccagggtgctggcagggtggaagcagtgggtgaccaccggcctccaggactatggcctgtggcaggcaggtggcctggggcaaagggctgggttgcccttgtccccaggaaaaaaaagtcctgggctcggattttcattcctctgcagctcaggaggaataatctggagggaggttggaaagcccagtatccccacaatggcagaacggctcccggaatccccccacccctgcccccgccaacctggaggcccctcctcttgataacattcccatcatccatgccagctgcttgctgaggaagaacctgcccaggccagggcccacactccagggaccacccacccagcaccctctccatcagggcttcccctccttgcctggactcaagggaaacaaggagaagcctcagccaggtgaaaggggtaggggtcagaggccagtgggatcggagctggagacgccccacgctgccggcagggcctgcacatgaggcctcactgggcccttagtggccaccgggcagctctaacgggccagaccacagtggatcaaagctcagccttcccatccagccaacttcgcaggggttgaaaaggatcttcactgcctgcttcatttcccagtgggttttctttttcagaagatgggcttccaagatcttcccgagggcagggcaggcaggtggcagggggcacccactctgcccagggcttcggccccacacccactgcccccacccgctgtagggccctcttaggggtgaagccgtcagccccacccaagcaccctgtctctcacctgatgagaaggtcccgcaggtaggcaaactcacagtgtgtggtgttttcaactaggagaggagacaggaggggctttaatgtcccagtggagaaactctgcccggaccccacctctctccccctgcccagaaatgctggtgccaaaagcagagtctgagggcagccccatgggcaggagggcaggggaaccacctgctctgcagctgagtataggacacctggcactgccctcagtctgggggatactggagtgaccagcaccagctcctgctcctggacagctcagctcctgctctccagaaagttcctggctaatgggagatggcacagtgaccaggccaaataggagcatggaaggaagccacagtggagaagccagggcagtgggcccccgcaccactggggtgaccagggagagcaggacgtcccagcaggggcctgaagacaggcagggggctgggctgctgggaatgggatgaagcaggaatcggagctgggattttaaagaaaacctgtggcccacagggtgttacccccacggccccatccaccttgtgtgcgctcagagcacacacacacagggacacacacaggggctacgtactgtggacgaccattcacaagctcaagaatcagcaatgctaaacattgctcagggacatgtgcacttcacacaatacatacaagcccaagctcgggacagtggccacttctcagggagactgggcaggagaccacgggcacccacaagtgccctcgggctcgagctggtggccatctcagagtggtcattttattgctgtgcttcgtaactcctatatgaacacgcggtgcctggcatgtgtaactgttatataacagaaggccttttaacaaggagggcagtgaacggcatcactggaggtggggagccgggcagggaaggcaaataaagacacccggtgccctcccatgtgatgaacttcgtcttcacacacctgcaagtgtctcttgtgattcctt

SEQ ID NO: 32146 - DNA, 2301 bp, Artificial sequence
  DNA replication origin
attcctcaccttgtgatccaactgcctcagtctcccaaagtgctgggattacaggcgtgagccaccgcgcccggcctaccttttcttgcccatgcttcttgcccacctgcagctgaccccaacctgtcccgaggcccaaagaactgcacttcaggggcagaaaaaacattctcactcaggagccttctgggtttctgcatttgaaacatttatttcaggaaatacattttcaacactttgtcatttatacaaaaagacaaatttctcgggaggcacgtagcaaaaggccattgaggaacagagcctgatgaaacgaacaatttttcaaagtctggttacagagaaggaaagtgaagcatctcaaggctgggatgctgctgcccacccccaccccaccccgccaccaagtgacattgaggctgggcaggccacatggcctgggccctggcgctggccactcatttccttcaaaatcttggttttggcaaaaacatggcaagttggcaaagtaaactgtctcaccagtgggggtggtgaggggtccttcctctcttgggtggggagggagtcagacgcccagtgccccaacttccatgcacacacactcacactcatacactccttctcgctgaccttctcctggctgcaagcagccagcccggtgcctgcagatgcacctggtgatgtgtgcacctgagtggagtctcatcaggcccctctttctccccaggagcaagacaggtaacaggaagcaggaagggactttggtcatctgtgccctgcaaagacagcccccatgggtcccctcgtggggacagagggtgaggggccgggccgtgctgccacgaaaccttgctcttcagctgtggactgtgcacccctgacgcccgttctctcctttctaggggttcgttaccatgggctctgaggggaggggcccaggcacgggtagatcaacagagtcaggctcgcctggcctcccacctccccagctcagagagtcagcaaggcctgggccaggaagggtgagtggcaggggtggctggctgggcattaatgtaactacagcccagtcttgggccaaacccagacactagacagacagacggacacgcatacacatggacacacacacacttccctggtcacttgggcagggcaggcgccgggcagctcacgccactctgaccagcccaagccacggcccacacgtgcccccgccaaccttccttctggcaccttccatggctccctccctcagctcctccaccagactcacttgcttagaccttttcaaaactgggggatgagggggtaggggtcatctctccttcctttttatcctcaatcagatcccagcgcatcagcagcacctgcagcccggtgggggcgggggtggcgtgagagggggatggcagggagatgaagacgcctccctcattccagcctgtccccgcatctggccaagcagtctgcggatggctgagataaaggcactttctgctccaggaggggcagctgccagggggcttggagtggctgggcagtcggtggcaggggaccctggagttttctacccttaggagcagggcaggggtaggggctgagtgatggccacaccatgtggcgggcagggggtccaggtgctcctggtgggctgcattctcccctgggctctgacacactccaggggacagggccgatggggatggaggggagcgtgcagcccactgggctcctctgcaagtgcgaggcctggcccccaccccaaggcctccggcactgagaaccccacacagacggatgatctgcacaccgaagctgctcttctgagccctcggggagccaggcctggggacagagggtcatgtcaattcagtgggtgctctcacccctgcctgtggctccagtgcagcctccccacaacctcggggaggccgcggcctcatcactgactcactcggagggaggccccttcccttgtttcctggcagcatgtcgaaggggtggggaacgatgacaaatggagaaaatcatataaaataaaatggggtggtgggagggcctggggggggacggaaatgacttgggggcaggatcccgggggtgggcagggtggcgtctacatctccggggcttctggctccttctcctccatgccgttggccatggcgctgctgccctcgttgaggcgcttcacacggtacgcctcgaagtggatgctgctggtgatgtccttgatgttctgcatgtgcgtcctgtgggggtggggggcgggcgggtcagtgaggtgggcgcagc

SEQ ID NO: 32147 - DNA, 1038 bp, Artificial sequence
  DNA replication origin
cgggggcgccgggtcccccagcactgccggcccgcccgagccatgctggaattctcgccgggcctcagctgcctccccatgaggcagggcttgggacctgcagcccgccctgcccgagccccaccccccaccccctcctggtgggcttccgcttggcccgagcttcctcgacgggggctgccccctgctgggcagcgcccagtcccatgaccgcccaagggttgaggagtgcaggcgcctgacgcggccctggcacagaatccactaggtgaagccagctaggctcctgaggcgggtggggacttggagaacttttatgtctagctataggattgtaagtacaccaatcagcattctgtgtctagcccaaggtttgtaaacacaccaatcagtaccctgtgtctagctcaaggtttgtaaatgcaccagtcagtgctctgtgtgtagctaatctagtggggacttggagaacttttgtgtctagctaaaggtttgtaaacgtgccagtcagcaccctgtcaaaacagaccaatcagttctctgtaaaacggaccaatcagcttgctgtaaaatggaccaatcagcaggatgtgggtggggccagataagggaataaaagcaggctgcccgaatcagcaggggcaacttgctggggttctcttctgagctgtggaagctttgttgttttgctctttacaataaatgttcattctttgggtccgcattgcctttatgagctgtaacactcactgtgaaggtctactgatgccaccgagaccatgaacccaccaggaggaatggaacgaataactcctgacgggaggaaggatcaactccagaggcgccgccttaagagctgtaacacacggtgaaggtctgcaccttcactcctgaagccagagagaccatgaacccaccagaaggaggaaactccaaacatgtccaaacatcagaaggaacaaactccagacacaccacctttaagaattgtaacactcactgcgagggtcggtggcttcattctttaagttcgtgaga

SEQ ID NO: 32148 - DNA, 1273 bp, Artificial sequence
  DNA replication origin
attgcctcagctgccgttccagaagatgcatcgtctggcgcgcaaagcggtgcacggtccccagcccgcgcgcagcagcctggaggggcgccagagtccccgtcccacttcctggcggcactgcccccgggcagctccctcctcccctctctccctccatgcccccaccccatcttgggacgcttccaggaccgaagaggcaggagggggatcgcgaggggaaggcgcggagctggggaaggaggagcagcgccgggcgcagcagctcagggcggtccgggaggctgcgcggcgctcgcggacccacgccccaggacagaggacgcagctccgagcatcgcacgtggcttccagattcctcccacccctaccctggcgaccacgagagggggtcgggggcatcttcttcccagccccagctggacaaaaagccttgcaaaagggaagaaattaaaaagcagggggagggaaggtgaggaggggaggggtggggggagaaggaaaaagtcccttccagccatagtgggtcccagagaggaacagaggggtgaacataggcagggtcctcgggttccctccccacctgcctcctcccagggtatgtgcagcggcctggcccatccgcctctggggcgaccacgggacacaccgcatggccactgtcactctgagtccccacctgccacacactcatccgcgacttctggctctttgatcttccctttacaaaatagtcgtgctttgttcacgacagggtgaaggccccagggacgcgttctgcatggaggatggcaagggggaggtttggttgaatcaagaacccttgatcggccccttgggtttccagcccccaagagcgctcacacagcccacgtgttatgtcccagctccgagcaaaacagcgtgccagtgtggatgccccgaactcagacgcggccccctggacacagatgggactttctgtccagaaacaacccagcccccacaacagcctggacgttacactgagttcatttcgttccaatcaaagagcaaaatatataccgtgaagggcccacctttccttttctccttgttctatagggcgattagcatggagaagccatcacactgtagtggaggggagagggtggcttaaaaataaatgggctctgggagggaaggagtaacttgcaatgccactcttggcactcttggcattgtgcaggaaacccaaccctcagctctcacccacacagaaccccatcatctgctgagcttctgccactgctga

SEQ ID NO: 32149 - DNA, 905 bp, Artificial sequence
  DNA replication origin
acaggtgagataatagatctttccttcctcgcgtaagattttatttgaagattagattctacagccaaagagaagttgaaagccgctggtctagaccagcccgtagtctaagctggtgactgaagccgagggtgtcaaagtggcttaaggtagcccttgcagcttaaatgcaggatgggggttggcactgggtcttctgaccccgaagtctgcactctgtgcaccatgagatgtgtcctctgcagcaaagaagctgaatgaaggtgtcatatacggagtgcaaagaggaccctgggagcaaattccatgtgcgtgtgtgggcggtggtgggggtgggaagagttccatggggagggtcatatccttctgagggagactgaagagaccttgtgggagagatctcattggaggtgaaccttgtactgtgaccgggctgcaagtactagaagtcaagggagggaaggcattcctccaggagagggtaagagcaggagccagggccgggggagcgctggggagcacttagactacagccagaggtctctattgtgctcagcatgcctggagctctgagtctacatgggtgcaggtggagaaaagaccagaaaggttgctgaggccatgtctgcatggctttgcatggcaggtggttgagtgtgtgctgagtttgtttggcagtgaggaagtttagggctttgagcaagacagtggcatcctggattgtgggacacagtgggcagagcctagagctgggaggccaatgagggccaggatgccaggaggatgagcagggcagaaggggagatgtagctttgcctggaggctgggcgatctgttcaggcttgaacctaagggtggaaatgcagccggggagtgacccctgaaggggtgaaagctgcctcagc

SEQ ID NO: 32150 - DNA, 1050 bp, Artificial sequence
  DNA replication origin
ggaggcagcctccccatccaagcagggggccgggaaaatgaaccccaaattaatttattcagccaattcattaggcaggcgttgattgagtgccggctcttcgcccggcgcggggctgggagcccagggagatacaagataaagtggaatgcggatggcacattcctggcgctcgccgtccgggaaagggaatcaggcggctggtctaagacacgccagaaagtggccgatgtgaaacagactccatgctcctgaggaattccaggaagggggcacggggctgggttcttgcggacggcccagggagtgtggcaggttggtgaggtacccagaagccagggctgcaaatgcaggaaactggctgagagctgaaggggcagctcagctcgaaataaagctcagctcggctcgaaataaagcagaggatgtcaactgtgaaattacacccaaaaggcaggagcctgggctgggtgtgacatggtctggcttagtgacaacgtggctttggctggggtgtgctgagtgctggggagtgtgaagaagaagatgtgggtgggtggggaccagctcaaggaggttgcagggcccacagcggggagggggaggtcagcaaatggaggggctcacctgggctccttcatccagaggccagttagagattaggatggagctgatgcagaatctcagatggaggagggaggaaggagggaggaggagcacaagaggtcactcataggaaggattagcaaagcttgcacctgattagagctgaggccccaaagaaaggcaagtgccagggttcaggctagaaggaacagtgtgggggtgtcagcacccatggctgggaggggaggagggcttgggctttggggttggagcaggagcaatgtggttggagatggccgggtgggtctccacggagccgcggcagtggacaggaaggcccgctggggacactaatggggaaagaggacagacaggggctcttgggtaaggtctggagactccagaattcacccgacctcaggcctcagaggaccacttaggtgg

SEQ ID NO: 32151 - DNA, 1111 bp, Artificial sequence
  DNA replication origin
agcgggaagtttagcagggcaggcagggcaggtaggagccccctggttattagagagaaacacaggcgtctcccaagctggagcttctctcagcagggagcgctggtgcccatcagagacgggagggcagagtggggagagaggcaccgagctgcccaggggcctccttcccccactcccgctcagccccgccccctgggctgactgccaggtttcccgggatggagacatcttctagcccccagctgaatcctgggaggagccagaacccagccagcaattactcaactcccggcttaactcacaggcaaagcccagggactgtcagtggcctgccagtggcctgcctgggacccgaggctctctggtgggctggggaggctcctagagcccagcgagggggtggagccaggccgtgcgggtctgttcctgtgctctcagccctgctggcacatgccaggaccctctcccgatcttggcaaagggaaacaaagttgctgctgcagagttaattaaggagggaggaaggcaggcgggggagttggcacgcagagaagtcctatgtgccaagtgtccaacgcagtgccacgtgccagggcctggggaggtggtgggagatgggggaatggtactctgcctagaacaaagccagctgtttggaggtcaattcctcctctcccccgcccgcacttgccagttcaacagatgggggtgtctgtcccctccccccaacattcatcaggccccaccggtaggagcacaccgaggaaggggacagcctccagggctgtgccatccagtgcagaaaccactagtcacatgcagctatttaagcctaaatgagatgaaatgaaagaaaatgtaaaattcagttcctcgtttgccatctcaagtgctcagcagccaccagtggctggtggttgccaccctggatggtgcgggtagggtgttgccatcattgcagaatgttctgttgatcagggctgctcttgtcttcagcaactggccccgtgcttcaaaaatgaaacaaaacaaaaaacaaagaccaaacaacttttgctgcaatgatcaccctaacgttctacttccattgttttggctgcagcctaaa

SEQ ID NO: 32152 - DNA, 942 bp, Artificial sequence
  DNA replication origin
ctgctctgaggaggaggatctacccagcaagggccatgccagtatttaacagcccagcctcccttcctccagtgcagggcaagcctgtctgcgcttgcttccccctcagggatgatgtagaaaaaccctgtgaccctggcccctccagtcctgcaggtggtcgggaagccctgcctgcttctggcccagtccctggctggagctggaggccctgttcaatgggcaggtgctgcgtggaagacaaggaacctcttcacacggagggcactccagcctgccaggcccagcctgccctgggcgagcagcctccctccctccctccccgcccactgctctccccttaaatggcccctgatgggtgtctgcaaactggagctgaataaaaataaacactacagagtgcctggcacagggaaggctctctaatatttgtgaaaaagggagggagggaggaggggaggggaggtcaagggagggagggatggagggaggcggggaggtcggatgggggagaagagaaggggaggagaaggatgggaagaggagaaggggaatggaggggaggagagaaaggaagagagaggagtggggaggtggcaggaggaaaaggagggagggacagaggaatgaagggagggaggaatcatttttacaaagccaatgggagaacagaaagagtgctgaactggaaattagaggacctgaatttggttctttccctctccttaactaatagcgaaccctctctctccagaccctgtaggggacccactgtctccaggcctccgtttgctcatctgtaaagcgaggggtgggccagtcaccccggcatgagctttgacattttaggatcccagccttcccgctgtggttgcagaagtggctcttaggatcccagccttcccgctgtggctgcagaagtggctcctctccagaacagca

SEQ ID NO: 32153 - DNA, 1149 bp, Artificial sequence
  DNA replication origin
gggccatggaggaggaaatggggcattggtgggtgggatggcagggctgccagcatctgacccaggaggctgggaggaggctgctgtgtgaatacacgctcggcctctcacagtggctgccgccgcattagccccttgtgcttcagggaacagagcatccgtgatggatgagactttaattaaagtaatgagacatttataatcgcggttatctccaaaattaggccttttagcaattattcctggggaatattcctccggtagatagctccctttttagaacaacgtcggggggtggtctgtacctgagagagattttcccagcaggccctgggctgtgacaggtcaacgatgaggtttccctggaaaacaggacgtggcttctgcctcaggtttctctccagaggagcaaaagttcgatgaccctgggcacctagtcaggtcataggacacttctagtgccctcagagagggtgcctttgggctcagaacctgaagatctgggttcaagtcctgactttacaaccttgctgttgctgagactgtttgccaagtgggatgtgatggttgatactgagtgtcagcttgattggactgaaggatgcaaagtattagtcctgggtgtgtctggcagggtgttgccaaaagagattaacatttgagtcagtgggctgcaaaaggcagacccaccctcaatctggtgggcgccatctcatcagcttccagcgaatataaagcaggcagaaaaacgtgaaaaagcgagaccggcctagcctcccagtctacatctttctcccgtgctggatgcttcctgtccgtgaacatcagactccaagttcttcagttttgagactcagactggttttccttgttcttcaaacttgcagacagcccattgtgggactttgtgattgtgtcagtgaatatttaataaattcccctttatatctatctatctatcctattggctctgtccctctagggaaccctcactaatacacgggatgaaaagcacacgggctgagaggcgccaaagccataaggtctgtgaaagtactttgtaaggtctcaggcatcaggccccaatatgtgaccatcatgtgttcctaacagcagattccagaacattcctctttaaactccaggaca

SEQ ID NO: 32154 - DNA, 1254 bp, Artificial sequence
  DNA replication origin
ccgggcagaggcgcccctcacctcccggacggggcggctggccaggcagggggctgatccccccacctccctcccggacggggcggctggccgggcagggggctgaccccccctcccccctcccggacggggcggctggccgggcggggggctgacccccccacctccctcccggacggggcggctggccaggcggggggctgacccccccacctccctcccgggcggggcggctggccgggcagaggggctcctcacttcccagtaggggcggccgggcagaggcgcccctcacctcccggactgggcggctggccgggcggggggctgacccccccacctccctcctggacggggcggctggccgggcagaggggctcctcacttcccagtaggggcggccgggcagaggcgcccctcacctcccggacggggcggctggccgggcggggggctgaccccccacctccctcccggacggggcggctgccggacggagacgctcctcacttcccagacggggtggttgccggacggaggggctcctcacttctcagacggggcggttgccaggcagagggtttcctcacttctcagacggggtggccgggcagagacgctcctcacctcccagacagggttgcggcccagcagaggcgctcctcacatcccagacggggcggcggggcagaggtgctccccacatctcagacgatgggcggccgggcagagacgctcctcacttcctagatgggatggcggccgggcagagacgctcctcactttccagactgggcagccaggcagagaggctcctcatatcccagacgatggggggccaggcagagacgctcctcacttcccagacggggtggcggccgggcagaggctgcaatctcggctctttgggaggccaaggcaggcggctgggaggtggttgttgcgagccgagatcacgccactgcactccagcctgggcaccattgagcactgagtgaacgagactccgtctgcaatcccggcacctcgggaggccgaggctggcggatcactcgcggttaggagctggagaccagcccggccaacacagcgaaaccccgtctccaccaaaaaaaaaaacgaaaaccagtcaggcgtggcggcgcgcgcctgcaatcgcaggcactcggcaggccgaggcaggagaatcaggcagggaggttgcagtgagccgagatggcagcagtaccgtccagctttggctcggcatcagag

SEQ ID NO: 32155 - DNA, 881 bp, Artificial sequence
  DNA replication origin
gtcagccccccgcccggccagccgcccagtccgggaggtgaggggcgcctctgcccggccgcccctactgggaagtgaggagcccctctgcccggccagccgccccgcccgggagggaggtgggggggtcagccccccgcctggccagccgccccgtccgggagggaggtgggggggtcagccccccgcccggccagccgccccgtccgggaggggggagggggggtcagccccctgcccggccagccgccccgtccgggagggaggtggggggatcagccccctgcctggccagccgccccgtccgggaggtgaggggcgcctctgcccggccgcccctactgggaagtgaggagcccctctgcctggccagccgccccgtccgggaggatggtgggggggtcagccccccgcccggccagccgccccatccgggaggtgaggggcgcttctgcccggccgcccctactgggaagtgaggagcccctctgcccggccacgaccccgtctgggaggtgtgcccagcggctcattggggatgggccatgatgacaatggcggttttgtggaatagaaaggcgggaagggtggggaaaaaattgagaaatcagatggttgccgggtctgtgtggatagaagtagacatgggagacttttcattttgttctgtactaagaaaaattcttctgccttgggatcctgttgatctgtgaccttatccccaaccctgtgctctctgaaacatgtgctgtgtccactcagggttaaatggattaagggcggtgcaagatgtgctttgttaaacagatgcttgaaggcagcatgctcgttaagagtcatcaccactccctaatctcaagttcccagggacacaaacactg

SEQ ID NO: 32156 - DNA, 1383 bp, Artificial sequence
  DNA replication origin
tccagatttttctcccagaggagctgaatttcagccgaatacccatgggcagttagggtggcctctaacagctctcagggagccagtcccgatttcacacccctcccgctgtgggcactggtaaggaggcatctcactggtccactggcaatcccgtggggagccggctcttcttgcgggatttgctgaacccaggctggcagagctcaggctggcaaatccctgcattgcaaagccagggcactgaaaggaggcagggaggggctgcttccgggacccagagtcttggcagctgttgctgggcaagaatccacccctgccgctgccattggtccttctgcctcttcctggcagagcaagagtgatgcccacacccaggggtctggtccgtttcatcacccaggctgcctaaggaggccatgcccactggcttaggcagcctcttggggtccagcgccatcccggccagggccacaaagacagacacagaggaagcagccacagctgcttggccatggcccccatgccagggctcctgggcacagctgctctgtgattctcctgcctgctgcttgcccggctcccttgccttctttctccccagggcctcaccctttcccagtgcctgttgctgctggatgggcaggcgggcgtccaactcctgctctcctgctgtcctgtctcctggggtgcagtgctgggcagcctcatgcagccagggtctgtctcgggctgtagggcactgggcacccttcgggcacattggcctcaggctccccaagggcaggccccacctggcttgttcatctgcacctagagcagcacttggcacacagtaggatcgaatagattagtgatctgagggactgtggcacccactcctccccacagcaggaactggcctgtttgcacccttcctgcgggaatggaagcctgacttctgggaagccctggaaccctggaagaggaaggggcagatcctggggtgaacaggctgtgcggtacagcagcaaacagcagagaggctgggggtggggtgagggtgagtggcagggaagtgagggcagaccctgcagaattccagaaaggccagatcagcagtgacccctgtttatcaggggtccccctccaaccaggaactgggaccaaaccgtcagagtgtctgcaagagtcatcagggccagaggcagtgtggtgtcatggttagagcacgagctttgcaagggacgtacacctgggtccacgtcgccgtgtgacctcggggaaatctctcaactcctctgtgtctgtgaaacagaaacaacaacaataacaactctcacagagttactatgaggatttgatgcgatgatgcaggagaaatgcttaaaatagtgtctggca

SEQ ID NO: 32157 - DNA, 1209 bp, Artificial sequence
  DNA replication origin
gaaggagtggagagggcctgctggagtgaggggcacttactggagtgggggggggcctgctggaatagggggaggcctgctggagtggggggggcctgctggagtgggggggcctgctggagtgggggggcctgctggagtaggggggcctgctggagtggggggggcctgctggagtgggggggcctgctggagtggggagggcctgctggattgggggggcctgctggagtggggagggcctgctggagtgggggggactgctggagtagggggggcctgctggagtggggggggctgctggagtggggagggcctgctggagtggggagggcctgctggagtggggggggcctgttgtagtgaggggcacctactggagtagggggggcctgctggagtggtgggggctgctggagtcgggggggggcactgctggagttgggagggcctgctggagtgggggggcctgctggagtggggagggcctgctggagtggtgggggctgctggagtcgggggggcactgctggagttggaggggcaggagtggccattctcttacttctccctccactgtgttttctttgccccctgctactgccaggccaagcacctttctcccaggattataattcgcgtggagtgaaccccctttctattttcaaggtgtccagctcttgcagggcactgcaccttaggtggatcacccaagagtctgctgagtacccccgcacaagtccggagagacacacagaagcggggcgttgtcctcagggactcgagactcacagacgaagattggaaacccaccaagccctctgtgaaatctgggccaccagcaccctgctcctgtggggtgagagttgtatcatggggacaaggatggtgccctgtaaatgctgacccaccgatggggacactggggatcgggcagtttggggacaaaggcagacccaggggagtggctacttggagattaggaagagaagtgtgggtgggaggctgcctcctgtggcccagggtatcctgtcagtgtgctgtttgacccaagccatgtggtggggtccccaagaagcagcaagttcaggggatgctgttctcatgcaattatattcctctcaatagcagctttcaggaaacacaaggccagaggcactttaattggaatggctttataacacttttcacatcagatcaaaccctgtg

SEQ ID NO: 32158 - DNA, 989 bp, Artificial sequence
  DNA replication origin
actgggacgtgggtcagcatttgctgggctgagcagggataaggcagaaacttccaggttgaggacacggaggtgtgaaagggcttccagtctctgcgtggcaggcctggtcagagggccgggcgtagagggaaggagctgggaagctcagtcaaggtcaggtggcgaagggcattgggtgccaggctcagggttttgcatctgctcttaagcagaatcactgcgggctccgcagcagggcaggtccctgtaaggaaagatgactgctggcagcagcttaggggaggagaaggcatggaggggtggttggggggtggtggcagatcaggaggcaattgcaacagctcagggaaaactgtgggagcctgggctgctcaagatgggagcagatggaaagagtggaaatactcaagaagtaggatctgaagttcgacgacgtatagacagacccggtgtgtgtgtgtgggtggcggtggcagaggagtgggggatggactgcactgcagctttgactcaggaactctgggtgaaggagccaatttggggagaaggcaatgagttctgttctgaattgattgagtttgatgggctcactgggacgtccaggttgaaaggcacaaaggaagataaaagtgcaggcctgaaactcagggccaaggcagggcattttacatcattcaaatggcatatgaaagaaggtctaacgctgtgcaaacacatggcgaaaaacgcagtataaatagtgaccggtgattcctggtgatgtgtcgcctgccttgaagattgaggtctacaggatcaggagtgtggggtgttgggctgagttttttggggtgagatgggcagagtctggtggaggtggtcgtggagaagagcaagccattactcagttgcttggggcggaagtaaaggtggaggaaagaggagtggaaaagaaacagggtgttgcttgtggtggctccccagtaaacattgcctgcttcccactg

SEQ ID NO: 32159 - DNA, 787 bp, Artificial sequence
  DNA replication origin
gaggctgtggagaggaggggaaagctctgtctcaggtgctgtctgcatgtcaccctatggctccccttcccagcagttctgggggtgggggcggtgtcatcccctctgcggaatagacaagcaaacctcaggcctgggagggtggcttgttcaaggccaggcaactgtaagtgctgttttccatcccaggtctgtgaagcccccaagctcacgatcctgccctgctctgagaggcctctcaaggacactgttgcatggtctgggaaattggggtgggtgtgtgggtgggtgtctgaggccctgaaggtcccaggggccatctctagcagatgccagcaatgaaggttcccaagagttggcagtgaggtctccttgacgtgggaagcggcggggggtgggggtgggggttgcggatagagatgatcacagacaccctgggggtctaggaattcctggctcggggaagccagcctctgcttcctgagtgggggcagtgatggggaggggtggcagggcggggggagctaccctgagggagtgcccttctaatgctcctcgggcactgaccactgctctgtaggagagactttgggctgtcagccccagccagagtcctgctgcctcggtctctcctctactcctttgggggtcaaggtcacaccttggcctttatgcctggactcccccagtctgctctctgccgtcagcagccaggcttggtggagctgcctaccggtactcatgttccctggcacctggacatgcccctgtctagtcccccataccg

SEQ ID NO: 32160 - DNA, 1052 bp, Artificial sequence
  DNA replication origin
ggttggatggaaggatggatggatggaaggatggatggatggatggatgggtggatggatggatgggtggatgggtggatggatggatgggtggatgggtggatggaaggatggatggatgggtggaaggatggatggatggatgggtggatggatggatggatgggtggatgggtggatgggtggatggatgggtggatggatagatagatgggtgagtgggtgtgtggataggtgtttggattgatgggtggttggtgagtgggtagatgggtgggttgatgtttgaatggatagatggatgaatggatgggtggaaggatgggtgaatggatagttgcatggatagatgagtgggtgggtgaacggaagatgtagtggaaaaatgaatgaatggttggatgactggatagttggatgaggggtgggtgggtgggtggatgggtggacaggtggttggatggataaatgagtgggtgggcagatgggaggggtgatggaagaatggagggatggttgaatgagtggatgaatggatgaggggtaagtgatttgcttgagtgatagaaagcagtggaagtgatactttgcgactgctgaggtgagggtggaaaagccttctggcttctgcctgtgtccgctgcctggaagacaattagacatcacctctcaataagaggagagtccaagacttggcagccatttttaacccaccacaccaagtagctattcatccagattggcttgaaaaagatggagtccttgggaatctattggaccttgaaatctatcagaccttgaaatctatcctccacatgtaattcccttccttcacatgtcagcccactgaaattatgtttatgttaggcaagttatgttatgcagatcaaacgcccccagtcttccaagcctttggggatgagtcacagtcacgtgtacagccaactgtgcaggtgtgtttatctttatctgtgttagcgcagaacctgggcctcagtcagtttgtgttctctccccttccaccatccactgggggccctcacatgcccttg

SEQ ID NO: 32161 - DNA, 1226 bp, Artificial sequence
  DNA replication origin
caacgcggtcagatagcacagtcccctttagcgctatcccaccgtgaccagcacgcaggagttgagaagcaaatgcccctcagcatggagcccttgcactgagctcccacagagctggcacttttcctcctacagctctgctctctcagaattgtctttgcctggatctgtgtcctacatcaaagagcaagcaaagtggggatgggaaccaggtgaacacttcaccaggtagcatcaatgctttacagaacaatcaatcaattggtcaatgggtggatggacgggcagatgaatgaataaatgggtgaaaggtggatggatggatggatggatggatggatggatgaatggatggatggatggatgaatggatggaggatgggtgggtgaatggatggatgggtgaatgagtggaggatgggtgggtgggtagatgaaagaaaggaaggaaatacagatagatgagtagatggataaatggacagattgatgagtgggtggatggacagaaggaaggaagagaagaaagagtggatgggtggatggatgaacaggttaatgaatggatgagtggatagaaggaagggaggaagaaaatatggattgatagatgggtgggtagatgggtcaatgggtggatgaatgaatgggtgtgtgagtagaaggaaggaaggaaatatggatgaatagatggatcggtgggtaaatgggtggagatgggtggctggatggaaggaaggatggaagaaaacatggaaggatgtccatttgtaaatgaataaaaggacagatggatggatgagtgggttaatggatagaaggaaggaaggaaagatggatggatggatggatggatggatggatggatggacagatgaatgaatgggtggacggatagaagcaaggaagggcatatggatgggtggatggaccctttgctcaagatactccctggaactgcagagaaaggggttaagcaagagggtgaggaaagactggttcaatacttcaggaaggctccacatgaaatttccacaggcactaaaaccacccagcagctgtccagagtcctggtgtccctgcttaccctagtgtctctgcccacaccttggagatgggaagtggaggccaactggggaataggaggaacccagaaaacctcagcagtcgccagagcaaaccaccttctgccctaagccgtggaaaggcttagaggccaggcctac

SEQ ID NO: 32162 - DNA, 923 bp, Artificial sequence
  DNA replication origin
tgtctgcatgtgtgtttgtgtgtgcgtgtgtgcgtgtgtgtgcttgtgtgcgtgtgcgtgcatgtgtttgtgtgtgcatgtgtttgtgtgtgtgcatgtgtgtgcgtgtgtgtgtttgtgtgtgcgtgtgtttgtgtgtgcgtgtgtgtttgtgggcgtgtgtgggtctgtgtgtgtgtgcacgcgtgtgtgtgtgtgtatggtcattcacacccctgggtgcagcagcaggtgtggaggagcatatatggggggagctctgagcacacgggctcttggccggtgctgctcccaccaactctgtggcttgagctgccttctgcatgtccctcatcaagtcagctgggacatcgttgggggccagatcgtgtcctctctcgacgaaatttatgtgctaaagcccaagcccccagtgccccagaatgtgactgtacagtatttggagatgaggcctttcaaaggtgattaagttgaaatgaggccgttagggtggctcctcatccaacccaactggtgtcctcacaagaatttggacacagagacaccagggatgtgtgagcgcccagagaccatgtgaggacacagtgggaagacagacacctgcaagccaaggagagaggcccgaggagaagccaaacctgctgacaccttgatcttgagcttctaacctccagcactgtgagacgatacatttctgatgttgaggccacccccagtctgtggttcttcgtgatggcagccccaggaaacgaatgcagataccatcaccttcccgtcggcagtccaaggtcaccgagcagacccaaggagacactgcaggcgaaagtaccgtggagattagcaggcaatatgccattctcgttcattcttctcttacagcattaaggagaaaatctcatttggtgaaggtatgtctctaacac

SEQ ID NO: 32163 - DNA, 718 bp, Artificial sequence
  DNA replication origin
tttcatccacctgcaaaatgattaaggcttggggcagcctgagccaggactgacaaatcaggtgcaggctttcagagactaaatcctgttttgaagtctgtttactctaaaaaaaaaaaataatctctttgatgcctggagaagaaagatgcatattaaacaaagacccaactctgaattccaaatgcatggtcgtcgttatcaatctctccaggtccaaactcgggaaagcatgcatcctccgtgtgcgtccttttcaccaggcgtgtggacacgtaattcattagagttaattagttagtcacatgcatcccccagatgctggatcagagccttcgtgggggcctgtgcagctgttggattgagagggagacacagtggagatggcaagggcaagggagctgaggctgaacagtcttgatctctgaaacagatggtgtgcacgtgtgtgtgtgcatgtttgtgtaagtgtgtgcatgtttgtgtaagtgtgtgcatatgtgcgtgtgcgtgtttgtgtgcgcatgtgtgtgcatgtgtttgtgtctgcatgtgtgtttgtgtgtgcgtgtgtgcgtgtgtgtgcttgtgtgcgtgtgcgtgcatgtgtttgtgtgtgcatgtgtttgtgtgtgtgcatgtgtgtgcgtgtgtgtgtttgtgtgtgcgtgtgtttgtgtgtgcgtgtgtgtttgtgggcgtgtgtgggtctgtgtgt

SEQ ID NO: 32164 - DNA, 883 bp, Artificial sequence
  DNA replication origin
gacgagtctgcatcagatgatggcagagctgccttggagcgcgagcttggctgtgacggcagggacttgggaggagaggagctggaggagtgggggatggggcatgagctggggtgccggatgggctgctctcccagcagccatttggaagatgcttccagtcaagtctcaatctcagtcggtcactggtccatgtatatttcatggacatctaccctgtgctgggcactgggcagacaacagtctactggacccagtctcactctcaaggggactgtagtccaagagagaggcaggtagattatcaggtaattccagctcaccacgattgatgggaaggtagggaaagtttgggatacatgcaaggccgtaggagaggcaccccaccggggcttgggggcaggaaagttttccaggagagagggatatctacgtggctttctggcgggggggggggggtcggggagagagagagagggagagagggagagagagagagatgaatgagatctgccaggagtcctcagtgcctggagctccaagggaggaaggctagggagggaagccatgcttgtcctggggccgagatgaggaggaaggggagggtctgctccaggccagccctggacaaggggataaattttgtcttcaccagacactgaattggtcatcctcacctcccaccttacagatgaagaaactgaggctcaaagagccacagcgggacggaggaggtggacccggctctgatgcaggtggctggttcgatggcagactcccctgtgccgagactcccagaccaaatccggaggtcctggagtagagtgggtgggtccgccagggcatggccaggctgcctgtctctggagactcccccaaggaa

SEQ ID NO: 32165 - DNA, 1048 bp, Artificial sequence
  DNA replication origin
agtaagggctccgttttgcagcatggcatcgggcacagcctgggtgctcagagtgggctttttgagtgaatgacgaatgcatgaaaggtgactctcagagcagagttcagaggaagccaggtgtcagggggatgaccagacccttgcccaggagggaggagtctcaactgtggggggtgggtgggggagagtggatgggagggtggggggcacgcagccctgacacctggcactccagccagccttgggcctctgctgccctgtttggggtctttgatacaagcattcctgcaagagctccttgcacgccgacaccttcccatcgggagaggctggaagcatggtggttgcctgccgtgtcccagctgttgtgggtgcttcttcacggccagttcctctgacctggaatggccagactcgtcttgaagggtgagaagtcatatctccgaatgcccagcagggtgcctggcaagggctgctgctctcttattattatcattaacgttgggagatcggcattgaactcacctcttgagagttgaggagcccctggtgggggacactaagcacctgcccccaccgaggggacaagctggggttggcacagagctctctcccgctccaagtcctgccttccccgccgggccacagctgctccaatcacgatgcttcccaaaggactttctgcaagtgaccctggcctcatctctttctgaggactgtagacacctcagggagagggacactgtgtcggtttcctgtggctgctgtaacaaattcgcacagactgagagccttcgaacagcaggcatggatcctctcacggctctggaggccagaagcccaggatcaaggtgtcagcgaggtgggttccttctgacggctccagggaagaagccaccctgtgcctctcttcttgcttccggcgcttgcctgcaggcctcagcgttccttggcttgtagactccagtctctgccttggtggtctcatgcgtgtgtctctgtgtccaaatttccctttctggccagacgtggcgactcactcctg

SEQ ID NO: 32166 - DNA, 1684 bp, Artificial sequence
  DNA replication origin
tggaggcgtgtgtgtgcatgggcacgtgcgtgttcaccaacgtgtccgaagaaagcctttgccaggcaaaagcaagcaggaagagagcaagaacctctccatgtactatattctctgatgacccttttaaatatatgacaaacagttaaaacaaaagcccatttagcttttatgcctgtgattcgtggtatccatcccagttaattacagtgatttaaaaacatctgcatttaataaagaaccttcctctcccccagttctcagcccaccccgctcccaaccccagtctttcttcaggccactgggctaatgcagtaattacatctccatgccaggccacagctgagggatggcagaaggggaggcttcatcaggcggggaaggcaaagtagggatgggcggggcagggaggtagggctggggtgggagggggagagagttggggagggggagcttgtggggcagggcaggttggagctgggtggggaaggtggggctgggggaggtggggtaggggcagaactggggcctggggagctgcaggggggaagctgggacgaagggagctggaatggaggtagcgggaggcttgaggcagagctgggttggggggaggttttggggagccgagtcaggccttctctctagcagaggaatcctaggttgggaggattcaaatccagagactaggaaatgggtatattcaaagccctttattcattctgggtcataggattgtttatttcacaaaaagggagactgaggcaaggcaagggacttcactcttcaccctggggccctccctttgcttcaggaaggaggctgggagtggtagagagaagggcaggagaccgagaacagagaggcgagtggaaaagcctccagacaggggagccagtcctagggccagaacgttctttttaaaaatgtgatgcgctggcctccggctccctcctgctgccctggtgatgtgtttgtggcccatgcttggggctgtgcctgtcactggtcacatggactcctcggtggacatcaggaggctcagtggcctcctggacacacagccttgggtgagtcccagcctgccatggacaagcagaaaggatcctggccgggccccggggaagggagtgtgggccacagccctgcagggagtctggcctcggtcgaggggcaggtgggcctgggggtctggctgaggactgcaaggtgccagccctttgctcaggaatccccgttcccgcagctgctgaccacagtgcagcgcactgcccactgcctcccctggcaggtctctcaccttgccccaaacgccaccttcagtgcaggagtagctgatggctgcctgatttcagtggaggagaaaaactgaacacctgattctacggagcagttcggggctttggaagatctgggagatgtggggaccctgggagaggaagaaggatgggcacagcaaggaagagggaggagaaaccagctttggggtctggagaaggagggcaaggtcctggtggccctgtgtgggggtcttggggaatgacacattcccaagttcaagtgcaagacctccgctctcagaaagaggggtgtgggggccaaggaggaaggagggagactggcacttgggcattacccagggctggcatccttctggcctcaatacctgcagccaggaagtgac

SEQ ID NO: 32167 - DNA, 1229 bp, Artificial sequence
  DNA replication origin
gtgactcccaccgtatctgcataccggagggcgaactggccaatcggcactctgcacctgagctcctcccccgcgcgcccctcccggcccattggctcctcggccaggccacgcctcctcctttccccttaatacccgcccgcgctgtggttccctgcaccgcgcggggagcgcgccggggtgcgagcggtgcgcgctccgagtggccgggacgcgcgccagtcctgggagcttgcactgctcgggggggttacgtggagacttgcgtggtgtcctttaccgccgccgcctgccctccggtccctgggcgctgtggctccgcgttagggtgctggcgggaggggtgccgatccggttctgcgcgtccggtgggttctccgggccagcgccccgcggcgcccgggctttatgctgtaattgcgcccggcggcgcccggcgcccgcaccggcgcgcgtctcgcccgtgccgtgcacacgccctgcaccgccccactttgcacacgcacacgcacacgagtccttggggccctggagcatcgtgctcgcctcgcgcctcccggcccgcccttgcgctcagtcgctccccagggagcgcccagctgcgagcaaaacaagcctcgctgcgaaacagtcccccggggagacagccctttccccggagcacagacaccacaccttcaccgcgcaagccttcggtccgggccgaacccgggcgctccggcgcctacgcaccccacgattcctccccggtgctccgtacgccgccgtgatcctccattccacggctcctcgatatccattattcattagtggtaggtaaggtcaggcgcaatgtgcaattcgaaaagtccctttttaactttcggttcaagccaggagaagattttgaaaccaagaattttctccattttcatgcaaggtcgcagaagcaggctagcttttcccccatcgttcagtggaggatcagcagtgctacttggaagttggtattggaagaggccattccctgtctacgtgtccctgtcttgaagaggagataataacacactagtactttcgcaatgcaattttgttaccgcaagtgtcatgctttgaaacgactgtggatgaaagagacaaattccccgctctcgtttcccttcagggtcccatgagctcctttcttcttactgccatattttaagccctccggtagtcagattcacaaccagcctctaaagggtcgtcaa

SEQ ID NO: 32168 - DNA, 1909 bp, Artificial sequence
  DNA replication origin
cccgcgcccagccgtccgcagctgccaccgccgccgccgccgccgcctaggacccggaccccgccggagccgcatcccgccgggcgtgaggaggaggacgcgtcgcggcgttgccggggccggacctggacctgccgggacgcgccgccgcccactcgcccgcgccgccgccgcagccgccgccgccgcccgcgccgggacctgagtccgtggcgccggcgctgagcgggcccccgccgcccgcgcactcccgaggccctcgggcggttgttcgtgccgccgccgccgccaggcccgcgccaccggagccccgcggagccgccgccgccgccggggacggagcccaggtgagcgcggcagtccgcccgctcctcgccgcagccgcaactttgccgggaggttcgcgggccctttgttcggccgagccgagccggggcgggcgctggcccctagcgacccgcgtgcggcgccaggccccgggccggccgggtttgaggggagcggcgggaagcggccggggccggggcgcgtgtgtgctagtgtgagacggggctgtgcagacgcccggtgtgcatcacaatcaaacgggagtggaatggagggctgaagatggatgtgccccctcccttttaaaactcatgcagcggtgaaattcggtcctttccgggcagccccccgcagattttgcactggtgatggcaggcgcgaacccgccgtgttttggtgcaggagcccggtgccgttgtttgggggaagagaaaaacccggggcgtgctgcgggtgggcggagaaggacccctgggcgctctgcggctctgaaatcaggtggattttctaacggtgctgcggactgcggagtaatgcgtatgaggaaaacgagccgtacaacatctgtcctgttatcagataacgtaacccgagcgcctggttgccgcctctgctttaagcggtgcctcctttgcacctttaccttgaggacgagatttaattaattgattcgtagctatgaaaatgtgcagatgtggatgtgggggttccctgcctgttaacctggggaagaaataactggcaagcatgttacacggagctttggggatcttagcaaaaatgaaggcttgctgcttggatgttgtgccgggaggtaggggaggaggagccgctagatcgtggctgcacctattgcattcgaaggcatttgacggtattggtgattctgcacgtaattagtggagttgtctcaaacctttgcctccgccaaatgaaacctccatttgagtggtccgctcggttatttctaggcgtgaactgcggattctaaactcaaaatggtgctctgtagatgtccaacttcagcgtctttaaggagttgcaagttggagccttctgactgggttaatccattgtgtagccgaggttcggtttttctcgagtgtctggtgttcacgttgacgtacttcggccagtacaaggtagccaatttatggtgatcgctgtgagagcctcgtacgtccctgaatgtaatttgagcctgcataaggcctactttatgcaagtgatttcctgcagttggaattgaataactatgcgaatgagttgagaccctggaaacctggcttgagtgatttcagaggacagtggtagctggtttgaaatgtgtagggggtgttggcaatgatattcatagattccggatttccttcagtactgtatgaaagaataaatgataaaacttagccccaggccagatgaacttggttagtagagggcaccttgaagaaatttacattgttccagaacagcagaggtggcaatggtctttgagcatgtttcactgtagcacccctaggatgctttgttgggggaaataatgcaaaacagggtttttaaaatgactagttcagttgtcgga

SEQ ID NO: 32169 - DNA, 1727 bp, Artificial sequence
  DNA replication origin
ataagacgcacaaaataaaaagctacgaggaacatcctgtcattagcatgtgacgctgacccaccgcagcccgcactgttttgcgaacagttcgcaaggactgcggccaaggttcgtcttcagtcctggacagaggtactcaaaagggcggccgctgctgggttccagcgggtctgtggggccgcccagccgggaggggtcccgggaggggtcggctctcctggtgctgatgatggcagagcctacagggactccccgctgagcaggtccccaggcagcagggtggttagcggcgtggggctgcctatcaccctgctgtcgtcggcgctgggcgggccccacaggctgctggagtactggggcaccccgccccacagcagctcactgctccccttgccacccaggcacggggcgttccagtggccagcgtcgctgcgtaccaggccatgggagctgcccgctgcgctgagccgcggctggctggacgcgctgctggactgccagctggaagtgggtggcagcgcctggccttgggctaagaagcgattcacttcttcttcaccagcgaactcggccaggatggtagtgtttcccaggacgcacctgcaacagcaagatggggcacgtgaacagggccaccccaagtcctgctgagttcgtggcactggctttctctgtattgggaacggccccacatggaagccatcctgtggcttctgttttgccactgctatttccaaacccagactgtgaatgttttgctcagttcagacttctagtggcaacatcgtactggtacacagagtacatcttcaagtgcgtgaacagatcattaaatgtgggctcgtttagggtcagtgtcatttgcatcctgggctaaaaacaggaatgactaatttctaggttccaacgtctcaagtgatgttactgatcaggtctactcgtacttctatcaaaagcaacctttcactagggtgaagggttggctgtgaggaccactgctgggccctgtgtaggaatgtgtcacagggagggagtagacacagcaactcagcagcagaaaaaaaccagtaagtcccaagatacctgtgaggaactgacctgtgtcgcctttccccaattcctttgttgaagtcctaacacccagtacctccccatgtgactacgtttggagatggggtctttaaggcgggaattaagttagttagatgaggtcacatgggtaggccctagtccaacaggactggtgtccttataaggagagattacggcacagacatgcacaaagagacgaccatataagaacagagggagaaggcagctgtctacagccaaggagagaggcctcaggagaaaccagccctgcccacaccttcatcttgggtatcagacttccagcctccagaagtgggagggtggccagcctgtgggattctgctatggtggctcaggacacccctgcaacacccctaacctaatgctctgggggatggggagctacttggagcgctgaggtggctgtgagaaaacatacatgtgcagagacttctgggccttggcagcctcctccttggagctgtaccggaccacagcattgccttgagtcagattcaggtggaatgtgataagaggcccatgttgcaaacacaatgtccgcagtgtagaaccatcaatctgatagaggaagcacagggacatgaatgagctttcttctgatttctttcact

SEQ ID NO: 32170 - DNA, 1208 bp, Artificial sequence
  DNA replication origin
tacagccagacaaccaccgcagccgagatgccaggctttcagctctatgtggtgaaacgggaaaggcaggagatgggacagtgtgtactacagtgtttacaacccaagcaatgtgggagccgtcccatgagtgcttgggacgagctgggacgagctgcctggagccctggatcctggcaccaactagccagcagcagggtcacatggctgccgaggcccactggctgcaccccgccctgccctcgccttggcagacgccagccgctgatccccacaagcgcccccctagccctggtgtggagcatgcctaaggacactggcactcaccagccccagagtgaaaacctgcaggaggacaaatggcaatgggaggggatggggagccctagggggagggcagagcccagcagcaggacgcaagcctggaaaagccacaggacctgcttcacggggggccgttccccaggggaggggcctcggggaggaggccaggctgggtagcccggggggaaagtgccttgtctccaacttggtgggtgcccagtgggcaaggaggtcctcctgggcagagaggagcgaagggagtgggcacaggggcgaagggagtgggcacaggggcgaagggagtgggcacaggggcgaagggagtgggcacaggggcgaagggagtgggcacaggggcgaagggagtgggcacaggggcgaagggagtgggcacaggggcgaagggagtgggcacaggggcgaagggagtgggcacaggggcgaagggagtgggcacaggggcgaagggagtgggcacaggggcgaagggagtgggcacaggggcgaagggagtgggcacaggggcgaagggagtgggcacaggggcgaagggagtgggcacagggaccagctgccgggtggacagtactcctgggggctgcctctccggtatggggtccgacccccttctgcaactcactcccatgacacagcatgagggcctcagcaactcgctctgtcgcccgggctggagtgcagtggcgcaatctgggctgattctcctgcctccgcctcctgagtagctggtacaggtggacgccaccacgcccagctgatttttgtacttttagtagagacggggttttgccatgatggtcaggctggtctcgacctcctgacctcaagtgatctgctcacctcggcctcccaaagtgctgggatta

SEQ ID NO: 32171 - DNA, 1611 bp, Artificial sequence
  DNA replication origin
cttgttggttgccatgtctgtgtctgcttctccccagcatggctcactctttcggggagagctaccgggtgggcagcacctctggcatccacgccatcaccgtcttctgctcctgggactacaaggtgacgcagaagcgggcctcccgcctccagcaggacaatattcgcacccggctgaaggtgagtggccccggagcaccaagctggcctgcccagctccctgcaggcctggccctgggtccacttaggaccatgtgaccagaaccatggtctagagggagggccagctgtccgtgagctgaactcggggcgctgggcaggcgtggtcttctgcttgcagtgacgggcaggccctgagtttttctctggcacacacccatcagttaggggctgcctctgttgtctgctagcgcgtagtagcgccatggccccgtgggcacccgggagccagccctgaggcctcaggccccagctggcacatgctccctggctggcgttagcttggttggtggccataggaggccagtgggtgaggactgtcaccttctgtgtgcctcagagaggagactgaggcatagaggccgaggccctcgtagaggttgcggggccaggaggctgcagagccgggcctcgtggaacattctctgcctttctggggttctgtgcttcaaggagctcagagctgtgacctgtcatgagccattccgtgtaggggggcttctggtcactgggggccacccacatccacagggaacaggaaaggacctctgagcaaggcccctgccccagcgggcagggctggggaggtgggtggagaggggttgaggcaggcctcgggagtgaacgccagcccaggcacaggggcctctcggcagggggactgggtcctctctgcgcctggagggagggccctcagcagatgaaagggcaggtggggcatggggaactggccctctgtcctggttcaagcctcctggtgtgtctcatgtgtgttgtgtgtgttgtgctgtgtctgcacgtctgcgtgtgcccgtgctctggtgtgggtgacggggacacggtgccgcctgcaggagctgctggccgagtggcagctgcggcacagccccaggagcgtgtgcgggaggctgcggcaggcggctgtgctggggcttgtgtggctgctgtgtctggggaccgcgctgggctgcgccgtggccgtccacgtcttctcggagttcatgatccaggtgcggggatggggggagcctggcccttgcttggaacgtgtccccagtgactctgggcacctgccccctggggaggcagccttgcctctcctcctccacccagccagcccagggtgccacgtacgctgtgccccgtgctggggccccctccgagccccacttctcagccccttgtcctgtctcacggttttattttttggtttctggtttcttttccactacttgtacccctccctgcttcctgtgtggtttgaacttgaggcctggggagggccagatcttggaggagggaggtgctacctgccagttccaccccgggcccttccctgtagctgcccgctcccaccatggatggggggcttccatgacaccgctccctg

SEQ ID NO: 32172 - DNA, 2654 bp, Artificial sequence
  DNA replication origin
tctgctgagggccctccctccaggcgcagagaggacccagtccccctgccgagaggcccctgtgcctgggctggcgttcactcccgaggcctgcctcaacccctctccacccacctccccagccctgcccgctggggcaggggccttgctcagaggtcctttcctgttccctgtggatgtgggtggcccccagtgaccagaagcccccctacacggaatggctcatgacaggtcacagctctgagctccttgaagcacagaaccccagaaaggcagagaatgttccacgaggcccggctctgcagcctcctggccccgcaacctctacgagggcctcggcctctatgcctcagtctcctctctgaggcacacagaaggtgacagtcctcacccactggcctcctatggccaccaaccaagctaacgccagccagggagcatgtgccagctggggcctgaggcctcagggctggctcccgggtgcccacggggccatggcgctactacgcgctagcagacaacagaggcagcccctaactgatgggtgtgtgccagagaaaaactcagggcctgcccgtcactgcaagcagaagaccacgcctgcccagcgccccgagttcagctcacggacagctggccctccctctagaccatggttctggtcacatggtcctaagtggacccagggccaggcctgcagggagctgggcaggccagcttggtgctccggggccactcaccttcagccgggtgcgaatattgtcctgctggaggcgggaggcccgcttctgcgtcaccttgtagtcccaggagcagaagacggtgatggcgtggatgccagaggtgctgcccacccggtagctctccccgaaagagtgagccatgctggggagaagcagacacagacatggcaaccaacaagctgacgggcagaggccaaggggagaaggcagaccggatgctctgggcagccagaccccaccacccactcaggagccatctgggccctgactgggcctcctgccacacccctgccccaccaccagccctctacaccagtctcatccaacatagcacccaccagccacatctgcctagaagagggggcagggctgcattcaccgcggacttggctggctgcctcccagcgagacatggaccagaagatgctgggctcacctcagggcctttgcactgctggtcccaatgaccaaaacatcttccctgcttccttatccatccccactcttatctaaccttcccctctcagggcaagtgccgcctcccctgggaagcagcctgactccttccccagtgctcccataacactggggaaacaccactaagcctcatggattgtcccagcccattcagtggtccatcttctcccagagacagcaagcccccctaggacatttaccatcctgccctgagctgagcacagagaatgtttgtggaatacgtagatgcatgggtggatgggtggatggatggatgaataaatgtgtgggtggatgggtggatggatgaacggatgggtggatgaatgggtggatagataaggaggtggatggatgtgcgaatggatggatgcgtggatgaatgagtgggtggatggatgaatgggtggatgggtgggttaaactgagtggatggatgggtgggtagatggatgaatgggtggatgggtgggtggatgggtgaatgggtgaatgtgtgaatggatggatgggtgggtgaatggatgaatgggtggatgggtggatgggtgggtgaactgattgggtgaatgggtgggtagatggatgggtgggtgaattgagtgggtggatgggggggtgaattgagtgggtagataggtaggtggatggctgaatgggtaaatgggtgggtgaattgagtgggtggatgggtgggtggatggatgaatgggtggatgggtgggtaggtagatggatgggtagatgggtgggtaagtggatagttggataggtgagtggatgagagcagacaggtagatggacagaaggaagaaaggaagagggaagaatcaatgaatgggtcgaaagatgaatggatggatgagtggagctcggagcctgggtcatgaggtggaggcattacctgtacaccagggtgatgcaggtgataaagaagctcacgcccacagtggagaggtaggccaggggcatgttgtagggcaggccacccaccctgggtgtgcactggctgccatccagggggctgccacacggctggttcagcgtggcgttactgtagtggccgtagtacatgacggtgtgggtgaagcaaccctgccacagggagatccagccgagtcagggactttccccacgccccacccgaccctcaggcctgacagccacaggggcagagcaggaggaggccaggcaggggcagtgagggaaacagggaggggccttggccacagcaatcttgggcctccagccccatgggaaccccagcacgatgagcatccagggtcattgagggggaggcggggagctggctgtggccacctggagtcacagcggggcaagggttgggggccccaggggagctgggacaagaagggaacacggtaccagggtagcagaagacaggcaccccccgtcccccagtcctagggcttc

SEQ ID NO: 32173 - DNA, 1853 bp, Artificial sequence
  DNA replication origin
agacctgcgactggcccagtcgcccctggggccctttgccactcccttggcaaggagagccgagacctcagttcccggcggctcttgcggggcacaggtgagccctggctgcgcgcgcggcccctcctccccggcgcctcccaggtgagcggccgcgatcccggtcccgggtcccgccagccccagctgcttctcctatgcggggacagcggcaatcccccctgaattcctttcggcctctggggccatttggcagccgagttccctccccgggtgctcctggagctcccagggcttgaccctccggctcggacagagctgggagcggcaggggcggggaggacagtgcggggagcaaaatccgcagcccccacccaggtcccccagccgagcgccagggcacggggaggggaggggagggggtgtggccgggatgggaaggggcgggggacagggaggccggctggacgggttcggtggccccagagttgcagccgctctgggctctggggccaggttgcggttctccctgggtagcggctgctcccgggaagctcgctgccggctggggtgggggttcctggaaacgggcgccacccagcctctccccacctagctcaggaatggtgcgcctggaaactccgctggacttgcctgggcctcggggcggagtgctggggcgctgggtgcccgagtccccgggttccctgagcttagaagggcctgtctggaggaagggattccagctctagggactgggtggggcgtcctcagcccctctttcggcagctgtcccgtgttaggctgggtggggccgcctcggacccagctctgggctggttttcccacgtctttgctcctgctggagggagggggtggtgtggggcctgggcccgaagatggcacccaggacactgagggagggcgccgtccggtcctgtgactggcacccctgcaaggagctgctctgtcggggcgcccccgggctttgcctgtccgaggaaagcgcccttcaacccggccgactttgagccctgagttcctgagggtgagcgcaggaggagtccagggcagaggccggcaggactcgctggtggctgggagctgagtcctggctccactctcacagatgaacgggccccgagcccagggccccagacaaggctgctctggttccagttgtgccgggtgacggcagagccaggacaaaggaggcctgttgaggtcctggccacccccagccggccgccctgggatgatggaatgcagggcagtgggtcttctgagaacatgaggaccttggcgccctgacggcggtggcatggagtgacctctgtgtgtgggggaggagccccctgtgctgcttccgcctggggctggttgggggtgagggctccagcagctaatttcctgctagaggaagttctttgaggtcacagggcagacgcagagaaggcctacagcctactctgacctttctctccaaaaaggaggtgtctctgtgccagaaccctgggcatggagatcctgaaaggggctgtgtctacaggcaccctacctcttccccatttcccagggactggcgacatcgaggaaacagatgtggaactgcagaccccacacccttccttcctctctcccctcccctgacactggagggggccccccattccattctggcatgaggcttattcggtgcctcaccatttatgtacctggggtgataggggggtgggcgggactgtctgggctgtgagtggcacctcctgtggttcccccaggaatgggtggtgtggacagctgccaggcgttgaagaccacccctggctctgtgcccctgtctcatcagatgg

SEQ ID NO: 32174 - DNA, 1486 bp, Artificial sequence
  DNA replication origin
cctccccgcccctgccgctcccagctctgtccgagccggagggtcaagccctgggagctccaggagcacccggggagggaactcggctgccaaatggccccagaggccgaaaggaattcaggggggattgccgctgtccccgcataggagaagcagctggggctggcgggacccgggaccgggatcgcggccgctcacctgggaggcgccggggaggaggggccgcgcgcgcagccagggctcacctgtgccccgcaagagccgccgggaactgaggtctcggctctccttgccaagggagtggcaaagggccccaggggcgactgggccagtcgcaggtctgccggggccgggggagtagccgcacctcccggcccacgtgggcggggggggggggggcgggcctcggctatcacgtgacccggcccggcccgcggcgcccccgccctcctccgggcgccccgcggcgactatgccttcctcccctgccaacttccgacccctcctcctgaggtctgagctgggctggattcattccagcccctggttgaagtccccaatttttctgacgctcagtttccccaagttccaaaaaggggcaatatttccagactcatctgcttcccatggttagggatcgtccaagtaagatgccgccgaaagccccagggacacagagtatctcactccagattgggcagcgcccccccccccgccgcccccgcaagcctcctgctgactctccccgaccccggcggggggagcctggttatctcccactcctgacacctgggcggggttcattgtttatctagcaagagttctggctcacttcctgtgtgctgtgtggagaggaggggatgaaaaggaggacacgctgacacttaggtgactgtccccaggtgctgtacccgttgccctgttttctgttattccccatgagccaggaaggtatgcactgatattcccatttcacagatgaggaaactgaggctgagagaagttaatcaccctttagggtgcccccagccaaagcaggagacttagtggtccacctgggaactctatggaggaaactgcctttgagattgtaccccccaccccaagcccatttggaagggagggtcattcctggcggggagaagccatgaagcaggcagggtgaatgtgagctggggcccaggagggcaggagagggcactgctgcaggggagagcaggcaagcaaaagcgaggaccaggcaggggtcaaggctggggccttttggagctgccagtgtggtcctcagatggctaccccaagctggttcttggcaagtggcaccctggcatggagacccagcccctgcctctcctcccactgcttccccctccctgcatacccacactgaatttgcatgaatgccacctcctctggggagcctccccagattgaaccctggtggagcacctaccacttcctattgacatgtacatctgtggttctg

SEQ ID NO: 32175 - DNA, 1390 bp, Artificial sequence
  DNA replication origin
gccaggtgctaggcctgggtcttggcacaaccataacgccaatgacaggggctggaagtacagcagtaacaccaagagtatctggaaacccagcagccaggttctggggagcccaccatcctgtcattatcacaccctccagggtgaggccggcagataaagagtttggcccctgtgcccccaccgttcccatccccacccatgtcaggctcccagctcaggcctcgaggtcaagtcctgcctatccaggctggaaggagttgaacagagagggcctcagctgcaggctggacatccctggaggcagccaggcggcagacccggaccagtggaccctagggctgcaggagaccaggccctgactcctgtgcagaggggaagggtgggccacccgcagcccagcatgcacagagctccctgggaggccaagtggcctacgcctgtcaccttcacctctgcatctcaggggcccacaggaagtgcctgcttggcctcagtttaaagcagaggaaaccatggggtgagaggggaggagggaggtagtggagagggaagctgggtttcctgtcatatgacccctcctctgggctccctcaccaccctgcctggcttggcaggagtcgtctgagaaggggactcctccagggacttggtccctaggtccccaggtgagctggatgtccagtggagggagaatgcagagggtgaggggctgtgggggccagctagagccctgcaagggtagcagtgggtccctgctcctgtccccacggctggggctgtagccacaggtcctcatcaggggctcgcggggtacctgggactggaggctggaccacaagaaggaagacagaagggggtcccccgacatccagagtcagatgtggcagatgccgagtcccaggaactgtggggtttgggacacaggctcttccggaagggcaaactgccacgtggagaagagagggaattgtctctccttggggtgacggtgggcccaggcacaggtggatgcggggtgcagcaggtcttggctttctttgcctgtgccggtccagactttctgtgccctttggatctttcaccccatttgacagatggggagactgaggccgtggctgtgtgtccctctgagagttggagcggggctgggcccgaattcgaccgcagcaggattctctctcatttctgagccccggaggtggcagagcggcagacccgggcaagtgaaccctagggctgcaggagcccaggccccgacgccggcgcagaggggacggaagggcccgcccccagcccagcgtgcacagaggccatagccaaggccttaaggctcatccaaccggggactcatatcccccccaccggcagcccggcgccccagcctcta

SEQ ID NO: 32176 - DNA, 1425 bp, Artificial sequence
  DNA replication origin
cacgcactcgctcccatatacctggagcttgtggatctcaggcactcactcgtgcacacaccttgaactcgttgctgatctcatgcttcttgatggtggctgcttcctgcacccggatgcagaagtcccatgaggagaagaccttggcgctgagaggcgcctgatagccctgacccagcagagtcttctgcggcagccccttcaccatcctgcggggcaggagaccaggggctgctggaggaggggcacctctaccatccagcctcagccttggctcggctctgggtctgggaaggcccctgcagccccaggtgcaggtcctggtgagtgaggagtcggggtagggggcggtggccctgttcctaaggtttgcggccagagcctgggctgaggaagcacccaggagcctgctgtgccgggccatgggccttcctgccaatgggagggtaccctgccaaggaaggggtgatcagggaagattccctggggaaggggtgaaggtgtggacctcgctctcaccgccgcagagtcccacagaagcagaggagcaggcaggccagcgggctgaggaggtaggccaggcggatgctgtacacggagctgctctccggccccactcggtacgcaccgtagaagagataggtgttggtgaaggcctggggacagcgacgaagatacccagcccgggtgagcaccaggctctgctcaagtgctttccatatatgatcttgttagcccccgtgcaatccccccatcaggtagggagtgtcccgtcttacaagggcccacagaggttcggcaacgtgcccacggtcacagggctttgagaaatagagccacgactggaacccaggaaccccattggtgaccactcgatggcttcccaggatgagggtggggaagtgcttctcccagaggccggggcacttttccccctttgtccctggcaccgcctacaccagctgggctctgaggaccacgggcatgtgtccatgagtctatgttgggcacagtggcctcagcctctctctaaccccaccaccggccaggccagtctgtctaggtaagaccatcccctgaggagccgaaatgtccctggaggagcagaggtcctcttagacttgtgtcccctgaagccagttccctgggtctcccagactctggaccatagccgggacagacctcactcaccctgccagtcaaaacatgccaaagttgattgtggaacctcaaaacgccaggcggggactggcggctaccagggcactggagggctgttgaggaggaagggggtcaatagagagggatccccaaggcataggtgaggctctgcggctactgctctataacccccaaccctggggaggcctgggcagggggctgaggatgtgccaaaggcgtgccccacacaaggcgaggtcaggg

SEQ ID NO: 32177 - DNA, 726 bp, Artificial sequence
  DNA replication origin
gcacagcaggctcctgggtgcttcctcagcccaggctctggccgcaaaccttaggaacagggccaccgccccctaccccgactcctcactcaccaggacctgcacctggggctgcaggggccttcccagacccagagccgagccaaggctgaggctggatggtagaggtgcccctcctccagcagcccctggtctcctgccccgcaggatggtgaaggggctgccgcagaagactctgctgggtcagggctatcaggcgcctctcagcgccaaggtcttctcctcatgggacttctgcatccgggtgcaggaagcagccaccatcaagaagcatgagatcagcaacgagttcaaggtgtgtgcacgagtgagtgcctgagatccacaagctccaggtatatgggagcgagtgcgtgagagccacgtgttccaggtgtgtgcgagcaagtgcgaccgtgccagtgtgtgtgagcgtgtgtgggagggagcctgtgggagcgtgatggagagcgtgtgaatgtgtgtgcatgtgtggccgagtgtgagggcacatgtgactgaatgggtgatggcgagcacgcctgtgaatgtgtgaatctgagtgtctatgggagcatgacagtgtgagagtttgtgactgtgtatgtgagcgtgaatggttgtgactgtgtgtgagagcgtttcctgcaccctttcctcccatgcccaccccgcctgcagctgcct

SEQ ID NO: 32178 - DNA, 1197 bp, Artificial sequence
  DNA replication origin
tccaccttcttcttccagctagtgctcctcctgggcctgcttctggctgcagtgcccctgggctatgtggtcagcaggtgaggggaagaggaggggggcacccagaggctggcaggggcagtttctcacccaggaccctgatgccagccccacttggccatctctcgccagcatccactcctcctgggactgcggcctcttcaccaactactcagcaccctggcaagtggtcccggagctggtggcccttgggctcccgcccattggccagcgtgccctccactacctgggctcccacgccttcagcttccccctcctcatcatgctcaggttctcagggcagccggggccatgggaggggacacctggagggggaggtccttccttccatgggggtggtgagcctgtgcacccccaaccaggagccagacgcagaaagccaagggaagcaggggcctctgaaaagcaggaacctcctgggcccaccctctgggctgccatggggattgcaggatcactggggaagcaccgtgtctgggtggctgcagctgctgagctattggtattgctgtgccagaggggaggggatgaggggctctgcgaggaaggagaggagggtcccatcctcagatacagcagtgtgcagtgagaagaccccagtaccgcgtattgtagagattgaggtggggagagaggaagtcagggagaggcgcctgtggccccaggggcaactgaccacgaatccccttcccacccaagccttgtcctgacggtgtgcgtctcccagacccaggccaatgccagggccatccacaggctccggaagcagctggtgtgggtgagtgtcctcggggctggtgaggggacagcagcttcagtggaaacccttccctatgtgtggccgagggcctagaacacgtctgagcgggtcaggtgggttcttcccactggagggcgtggcctcaggctgagagtgaagacggggaaggggaggaagagaacagctcgggctcctgagaccaggagccagacctggtaagtacatgaccttaggggctgggcctttgcctgtaatcccaacgctttggaggcccaggcaggaggatcggatcacttgaagccatgagttaaaaccagcctgggcaacaaagcaagaccctggtctccaccaaaaataagtaattaattttttaaaag

SEQ ID NO: 32179 - DNA, 1374 bp, Artificial sequence
  DNA replication origin
ctatgtgtggccgagggcctagaacacgtctgagcgggtcaggtgggttcttcccactggagggcgtggcctcaggctgagagtgaagacggggaaggggaggaagagaacagctcgggctcctgagaccaggagccagacctggtaagtacatgaccttaggggctgggcctttgcctgtaatcccaacgctttggaggcccaggcaggaggatcggatcacttgaagccatgagttaaaaccagcctgggcaacaaagcaagaccctggtctccaccaaaaataagtaattaattttttaaaaggagaatgtggccgggcgtggtgactcacgcctgtaatcccagcactttcagaggccgaggtgggtggatcacctgaggtcaggagttcaagaccagcctggccaaaatagcgaaaccccgtctctacttaaaaaaaaaaaaaaaaaaaaaaaaaccgggcacggtggttcgtgcctgtaatccagcactttgggaggccgaggtgagtggattgcctgaggtcaggggttcaagaccagcctggccaacatagtgaaaccccgtctgtactaaaaatacaaaaaattagctgggcgtgatggtgggcgcctgtaatcccagctactagggaggctgaggcaggagaatcgtttaaactcaggaggcggaggggcggaggttgcagtgagctgagaccgccccattgcactccagcctgggcaacaagagcaaaactccgtctcaaaaaaggaaaaaaggataacatggctgagtgcagtggctcacgccgaggcgtgaagagtgcttgagttcaggagtttgagaccaggctgagcaacatagcaagacctcgtctctactaaaaatcaaataaatgagctgggcgtggtggcgcgtgcctgtggtcacagctattccggaggctgaggtgggaagatcgcttgagcctgagaggtccaggctgcagtgggctgtggtcttgctactgcaatcctgcctgggcaacagggagacacccagtttccacaaaaaaaaaaaaaaattacgactttaggcttggggccaggggcttaatggagctgagggaggaacagtgacctggctaaggcgtggcctcagggtggggcctctaccgggggcgtggccttgggctgcttggggacggactcttagcgggcgtggtctagatctgcatggggtgggaccctagtggggcgtggtctcagggtgcgttgggggcggggcccttggaggtcgtggtctcgggcggggacgtggaaggagtggcatctggctgcgttgtggacgggactcctgagggcgtggtctagggctgcatcggggcgggaccctggtggggcgtggccc

SEQ ID NO: 32180 - DNA, 1225 bp, Artificial sequence
  DNA replication origin
tggggtgggtggcgggacccgggaccgggaggggacagcgggacagactgtggagggcgggaaggcggggcccgggacgctggacgccggccccgctcgccgccaggccccggacgcggccgccgccacctgtcgcgctcgtgggctaggggccccgccgggcctggcgacggagagggggtccccagggtgccctcggcccgccctccccgggctcaccaagcacacggcgcgcgccaccacctgcggctgcgtcaggaagcgccgcaggtcgaaggagccgcccgccttggccgcgccgtaggccccgctctccatgtcgccgtcgccgccgctgccgccgccgcggaacgcagaggaacctgcccggcgccccgcccgactccacccgccgggggcgtggccaggcgccgctagggaccgagggcaaagtgcggccctcgcgagcggcgggcgagccgcgggactgcgcttctagaggcggggaggggctgtggccgcggagcacccgggtccaccccacctcggggttgaggggctagtctccgggccacgccggccgcagcacggaccagaaagggtcagagagtcccccgggaagacggacgaactgaggaccgctcaccctctttgcccctgccctcccaccgcctcctctaggaagcccaccacctaccaagaacccacccaggctcataagcaacccctcccccatcccactgaaaaacccaggccacaccctggagcccctccctgcctggcctgccactctttcctcctctctggggctaagcctggggtagggtcaaagaccccctccccattcctcctggtctgggcagagccccaaggctgtgaagggcagtgtggcgtcacacttaagatggtgtgcaaggccgggagcggtggctcacacctgtaatcccagcactttgggaggccgaggcggttggatcacctgaggtcaggagttcgagaccagcctgaccaacatggagaaaccccgtctctactaaaaatacaaaaattagcctggtgtggtggtgcatgcctgtaatcccagctactcgggaggctgaggcaggagaatcgcttgaacctgggaggtggaggttgcggtgagccgagattgtgccattgcactccagcctgggcaacaagagcaaaactctgtgtcaaaaaaaaaaaaaaaaaaaaaaaaaaagatggtgtgcaaggccgggcg

SEQ ID NO: 32181 - DNA, 1730 bp, Artificial sequence
  DNA replication origin
cgcctggccacgcccccggcgggtggagtcgggcggggcgccgggcaggttcctctgcgttccgcggcggcggcagcggcggcgacggcgacatggagagcggggcctacggcgcggccaaggcgggcggctccttcgacctgcggcgcttcctgacgcagccgcaggtggtggcgcgcgccgtgtgcttggtgagcccggggagggcgggccgagggcaccctggggaccccctctccgtcgccaggcccggcggggcccctagcccacgagcgcgacaggtggcggcggccgcgtccggggcctggcggcgagcggggccggcgtccagcgtcccgggccccgccttcccgccctccacagtctgtcccgctgtcccctcccggtcccgggtcccgccacccaccccacccccagcctcgcgccccgacgcggggtgtccggatctccgcagggagcgggcccctgcctcgctggcagtgggaggagtttgggggcggctcccggacaggtggcccgcacgccgcgactcccagattggggagttcaccgggacggggttttccgaagccacgtggggtaagggagggggcggggggcgacccaacgcccggaaacagggtgtccttcccactcggggcaggccacgggtccgccttcccacccgaagttgagggaccccaagatgtaccccctccctgtaaggtgggcaatacctccaaaaccaggttttgtgtgtgtgtgtgtgtggcggggagggggcctgttcttggacagccagccctgaaagctggagggggtggcatgagggggcaggcagaggtgggcctgctgtgcccagaccatgcctgggcctggagcttctgaggtcctccagggcgcccacaccagctcccagccaggctgtgggatctgatcgcctctgtcctgggctgtgtccaagaatcaggtgcccagtgggtcgggatggcagtgccaggagtcctggatgggcaccctgctcccatcatcccggagatccggcttcatctccatctgggggcggggcctgtgactgccagctccagagccctatggagagctccctgggacaacagggcaggactggcaggggagagtcctggggccatcccagagggatcctgatgctcacagacctgtcccacacctgctgaggtggagcaggcgtgggtggtggccttcaagtttagggaggtggtatggggctcttcccaaggggctggagctcccctacatccaccctgggtcctccaggtgtctgagttcagagctgtatccacaggcctgagttagtccccttgtagtgccctgtgcatgcagggccctctgtggggtgggagacagactgggagggaccaggatgccacagaggctgcaagtccttgtgtggagacagctggccaggctgaaccagggagggttccaggggttccaggaggtgaagacacaggggcgccagcatggccttcccaagagggcctgtccaccttcaccaaggtgttcaggcagaggctgggtgctgtagaagtgacttgggctgaaggtgacgggggatgggtagtctttgtgacttggcctgtcttggttaaacctctttcaaggtgaggttgggctggggatggaaggactgcccttcatccatcaggtacctaagcagaatgattcctgcagcaggccgatggggcaggagcagcccctgcctaggaggt

SEQ ID NO: 32182 - DNA, 962 bp, Artificial sequence
  DNA replication origin
ctgggggaggacgggtgaagcgtcagttccatggaaagggaggggctttccaggactctgggaggggacgcgggcaggtagggcagggacctcccgggggagcctccacactatggaggggaggacttggaagccgggccgggagccacctccaaagtcccccacactcgggccttggcagggtgggccacagcagacagcctaggggacaaaaggggcagaggcaaagcccatctgctcgggtgtgctgcaggtccactcagcttctagctaccccaggcagggctggtgccattcaagcacggaaaaacactagctgaaaaccctttcctaaaaatgccctggaggagtgagctgctccctgcccctcccagagaggccgagaccctcccagctgcggaaccctagagttaatgcctcccccaagatcaaatggaggtgccacaggcagatacctgagaagagcaggtcaccaatgaccaggtacttgcggtcagtggcgttgctgatctgggggaaatacgcgtcgaccaccaagaagaaggccgaggccaggaaggccagcaccccgatggcactgccatagcggcaggcatcctcgttgcggttgaacacgcagtacatctgcttagactcgtgggcattgctgtagccctcaccatagatgcaggagaacacgatcaaggcgaagacctgccgggaggggaggacctggtagggctggtggccgcctgaggggcacacacagcggggaccctgatggggtgtacagatgctggcctctcccactactgctgtccccttttgggtttttgttgttgtttgagatggagtcttgctcttgttgcccaggctggagtgcaatagtgcgatctcggctcactgcatcctctgcctcctgggttcaagcaattctgcctcagcctccctagtagctgggattacaggtgccctccaccaca

SEQ ID NO: 32183 - DNA, 1366 bp, Artificial sequence
  DNA replication origin
gggacaaagcagggaggggaggccggcctggacccaaggggcccagccacagtggcctcgctggggacaggacggggaggggagggcggcttgtacccccgaggcccagtcacagtggcctcgctagggacagggcaaggcgggcgtgggggaccccaggaggccgggcagtctcacccgctccggggtgcaggcgcagccctccaagaagggccagttcttgaatgtagagatgcggtggtccttgagaaagggctgccaggcagggggcaacgtcggggcacccatgccgccgccgccacctctgccaacgggtcccgcgattcaaatctggcggttaatggcgcgccgcggggcatgtcgggagcgcacgccctcttaggcggtccaccccccgcggccttctgggagtagaggcggggcggcgcggggtgtgccgggagttgtagtcctcccgccgcgtggctctgcccgtggtcgcggtgcacccagcgacgccgcgccagctcgtccctgcccacacctagcgccccctcgactgctttcaaagaacgcgtgcaggccgggtgcagtggctcacgcctgtaatcccaacactttgagaggcctaggcaggagcatcacttgagtcctggagttcaagaccagcctggccatcacggtgaaaccttgtctctactaaaaatacaaaaattagctgggcgtggtggtgcatgcctgtaatcccaactactcgggaggctgaggcaggagaatcgcttgaacccgggaggcagagggtgcagtgagctgagattgtgccattgcactccagcctaggcaacaagagcaaaactcagtctaaaaaaaaaaaaaaagtcagacaggagagctttacagggtgccacctctgcaaaaagcatctactccagacgggcatgaaggacaaatgaacaggggagggatggagtgcagcagacatcgctgtcccggcgagtacatcgttgactgcacgacctgggtttccaggagggccaccttctggagtcaggggccagggactgggccactaccgtgataagaagacaagggagctggggaaagcccagtggagggtgggggcctgtgctcagggcaaactcctcctttcccttcgcaaagcagggcgtcccaccaacagtaagtcctgcagcctattaaaaaaaaaatcagtgtgtcctctgctttggaacagggtgttctggagtcacttctggagctgggcatcacatccactcacttctctggttctatggccagagataagaggcctggccttattagccctccagccccacgcaggcctggtgcctccactgtctttttcattttggggtttatttattta

SEQ ID NO: 32184 - DNA, 1841 bp, Artificial sequence
  DNA replication origin
gtggccggttaccttcgcagatgcgccagagccccgagtgcgaggagagcagctctgcgcgcccgggccaggcgctgccattgccggcgtccgccacctccaggatgtaccagtagtcgctggcgaccgcggcggccaggagcgcgaagctgagcagtgcacccagggcggcggccaggagcagcgcgcccagccgggccatgggggcggccggcgggaggggacgggtcgggggtagcagggccccgggggcggcggggggcgcgcggagccgggagccgggggacggggggcgggcgggcgcggcggcgcccggctcttctgagcacgtccccgctcctgcccgcgcactggcctcgcgggccccctggggtcgcagggagatcgaccccacctctctgcggtcgctgagctcgcccctgggggaaaggagaggaagtcgagagccgcgcggcgaacctggggcttgggctccaatcccagcgtccccacgggctggccccgggtccctgggcacgttccttaatttccctgaacccccggctcctcagcagccaaacaagatgcacctgcctggccgggctgtgcagggcttgagaggaggagggaggatcggccagagaccgaccccaggaggatggccggccaggcagcaggaccacccacccgtgctcctggaagcataggagcctggcacgggctggccctggggtcctggtctgtatcagtcctgaggaccaaccagacggcatccggtgaagtgcagtggctgggccccacagccgggcggggggctgcggaaggaaaaaaccttgttttggattcactcataattacaaatgccccctccagcaaggccggcctctgcctgtccagtcactcacggagaaaacaggcagaaagaaccttctaggacaggcgtggggtgccagtgggggtgggaggcagaggagccggcgagaggcccccacccatccacccaggactagccccatgagcaacgcccgcgtgggcagccacacaggcggaagggacaggctgggcagccatcgcctaaggtctggggttaaatctcaaacgaaggggaggcttcctctgggttgccacacagggctgggcagagcctgcagagaggggatcagaggtctgaggacatcctcccggatggtggcccttggaggtgaagccaaggctctcttcttggggcgttttggccatgctttcctctgctaggctcttgttggtttgaggaatatagtcaggaaggaaaaaccagcctagcagttattgaaacaatatttcaaacagagttcagacagagtgacagaatggctcaggtattttgtagccgtcctcacacctgcagcaccagactgtgttgccgcacgtgggcagctctggggttttccagcccccttggagctggggcttccctgaccacagcccctctctgggagccatgtggcatccagcagccctgttctctaggggtggggatagcacattagatctggaaggtgaaagaactcaacaggtgctcagagagtagcagccgttataaaggcagaggcgatagggatagggggtggggcctcgttccccccctaaacacactgcagctggggaaagaacggtgcgtgatgaaaactcgtggtactctgacactgaccccacaataaagcaatataacaagaatcaatattgcttcggttggatcaacacctttgtgcatgtgaaaggtacgaactgactctgcagggagaacagaggagccccatttgggctgcgtgctccatgtgtgtcctcccggtgacttccccttctctctctcactctattta

SEQ ID NO: 32185 - DNA, 1683 bp, Artificial sequence
  DNA replication origin
gcatcttgtttggctgctgaggagccgggggttcagggaaattaaggaacgtgcccagggacccggggccagcccgtggggacgctgggattggagcccaagccccaggttcgccgcgcggctctcgacttcctctcctttcccccaggggcgagctcagcgaccgcagagaggtggggtcgatctccctgcgaccccagggggcccgcgaggccagtgcgcgggcaggagcggggacgtgctcagaagagccgggcgccgccgcgcccgcccgccccccgtcccccggctcccggctccgcgcgccccccgccgcccccggggccctgctacccccgacccgtcccctcccgccggccgcccccatggcccggctgggcgcgctgctcctggccgccgccctgggtgcactgctcagcttcgcgctcctggccgccgcggtcgccagcgactactggtacatcctggaggtggcggacgccggcaatggcagcgcctggcccgggcgcgcagagctgctctcctcgcactcggggctctggcgcatctgcgaaggtaaccggccaccgcgccggccctcctccctccgcgacctcgtccctccgacacccccttaaccccgccctgctcgtgttgccccgccagacccccttccaggacccctctcttgcatcccgctctgccccagggtgtctctccgctccctccccatcaccctccgtcttcccccaaaactgacagcccaagggctacaggagggagggagcccagttcggggcccctcacagccggaggagggggctgtggggcgacagtgggggagggaagcctagaggtgtgtagttggggggcctcatccaagtcaccaggggttgtttcttgatcacgctccccggggtttgggcctggcagccccttgtccccgtccctgtcaggcactgtcagagctgttcaccccacacctcctgatgccgcgggggcaggggttccaaatgtgtacagaggcttcagagtccggggagagagaaggggatcccagcaggctggagggtccacagggccccctccgttccccccagctccctcctccggagctggggccagcctggggagcttccccttcacagcgcgagggctggcagggcaggggtgtgtgtgtgagtgagcatgtgtgtgcatctgaatatgtgtgcatgtgctgaacatgaacatgtgtgagcacctggctgtgtatgtaaatatgaatatgtgagtgtgagtgtatgtagttgtgtgtgcatgtgaatatgagtgtgtgagcatgtcagtgtgcatgtgtgtgcatgtgagagtgtgtgggcatgtatatgagtgagtgcatgtgtgggtggtgcacatgtgctggtggcttcctcagtgcaactggggaggagttaggagccttgtgttcatccaacagactgcctaactgtgctccaaagacctcctgacatgcacctgtgtgcacgtgtgcacacgcctgtgcctatgcaggtggctctgcacgcgtgtgagaaccagagagtatgtatgcccacatgacacgagtcaggaagattccagagcgaggcttcccaggagcccgttttgtacaccctttttcctttcaggcaaagcctgagttccacacacaaacgcattacaaggacccctgcctgagggact

SEQ ID NO: 32186 - DNA, 995 bp, Artificial sequence
  DNA replication origin
gagatccagacctggccctgaatgtcagcttgggtcagttgccttcttttggctgggcagtgcccagaggggaccctgtgcacccaggaagtgcctgtggggaaatcagggccacctgcccccctggctaacattccctacagtcggcgccaaggacaggctttctcatcagcctgaagctgtgggaagggggtggcactccgggctggttcctccaagctcagtggacaggaaaatgccctggaggcatgggccgagtcccctacctagctcgttgctggaccctgaactgccggatgaagcctggtgcccgccaccctgtgcaaagcccagcttcattcctttgacaacagctttgaccatgtggagagcgggagggaggagagaggagggcccagggcaggcatcctcccctggggaagggcctgaaactcagagctgggaggacaggggggctctggaaggggagtcagagggagggggatgttagccccggaggtagggagggcaaaggtgtgaggaagaggaggcgggggtgcagggcagggactcactctgatcagagcactgggcaacgctgctgccagcagaggccatggctctgtgtgtgtgtgtgtgtgtgtgtgtgtgtgtgtgtgaatgtgtgcaaatgtgttcgtgtaggtgtgcatgtgcatgtgtgtgctgggggccatggagggtacagagtgtgtggggggcagttatgtgagtgggaaccatgttgaggggcaggtggcactgtttgcaggaggctttatgggatgaggtctctgaggtttgaggactgaattggagcctcttaaagctccactccgccaaatgcagttgactacctttagccctgtccaaccccaagcaggaggtggtgtctgggagaggcggccaggttgacagccaggcagggctaaccatgacaggaagggcggtgtgctgcctgcagctctgcctgaatgctagcggggccggggatgctg

SEQ ID NO: 32187 - DNA, 1556 bp, Artificial sequence
  DNA replication origin
gccagcatccccacctggtgcatgcttccacccagggctttttggaggcgccaggcttcttcaatgaagtccttgggcctcccagccagggaccccactggggcgcccaggccctgggaggtggagaggagagactcctgccagctcacatccctgtccttgggccagggtggggacagatgcgtagccccatctgcagaggtgttaaaggggaacctggggccagctgccagggatggagctcaggaatccaaccctgcctcctgctggggcgccccaccccacctgtctgtgggaggccagcccagggctttcccaccttggagaggcagaaagacacagagtcacagtgctccacaatgtaggtgggcgggacatgcagggccagcaccacgttcatcagctgggccctgtccaggtggacccaggccccataggtctgggccaggaggtgcacctgggggtgaggtgcaggcagagtcagaggggccaggcctgagggaggcatagagggaggagggtcctgggcttagctgcctgaggaatcaggagggatcaggagacctggctggtgactggctctggtgatctgggacccaagcagtcaggctgtgctgcctaagcctccatgctgggctctgggaggatctgggggtgcacatttaacccagctttgtcgcacactgagcatgggccaaacgaccgtgggccaagggtaaatgtgtgtcacctcatttaggctgcacaacaactcgagggagacgccgctgctcccatttcacaggcaaggaacgcaaggcttggagagttaggctgctgcctaactagtgtctggtaaacagcagagctcagacactgcggcctcctcacctcgcacgtgggtggcaaggaccaggtggagggcactcacacgagcttgttcctgcagcctcatggggcacacgtttctgcgccagggcagcaggtcctggtgctgctctgggactcagctctggggacttgggggtgggggcatctctgctgttgggctggtgcagggactaggggccctgacctggggtaataattccctttgtgtctcagcctaggaccacacatgtgtccttcctgtgacaggtctggccgctgatgggtgcccatggcataaatcagaggggactgaaccccaggatgggccaggggcacaggaagccaggatcaggctggtggggggcacacagtggtggggctgggcctacctggcgtaggtagttgatggggaggatccggacccccgagatgctgtgtgagttctccaggcaaatgagctcgcagacctggtggtagggactctggaggccccgcgtgatcatcctctccagctcagccagtccagagtgcagtggggcagctctgggagggagtgggagtgcactccagccctctgtgggtcaggaagaggatgagggctgaggggtccaggggcacctcttggcggagtggggggctcctctggagtaaggagccagaccctgagtcctgtgtctgctcccccgaggcctgggccttggagcctt

SEQ ID NO: 32188 - DNA, 1915 bp, Artificial sequence
  DNA replication origin
aaaaaaaaaaaaataaaaataaaaataaataaataaaagaaatgcagattcacatggcctgccgagaagaacctgcatttctataggctcaccaggtggttgtgtgtgtcctgcattgtcacccagctgccccctgagatgggtgatgtccagtcttgcagaggagggttctgagatgtggagggaggcgctccaggccccatacttagtaaatggcagaaccaaggtttgaacccgggtcttctgactctgaaacccacaactgttctcctgcactgccttcccccacagaaggcaaatggaaaatagatgtagaaaggggcaggttctacaggctgcacctcgcaaggagtgggttctaataacctagggagtgtctccagggtacagcgacccccagccccagccctgggttgtgagttgccatagtgaaccactttgactgttggggtgtgcacacccctcagctaggccaggacaagccatggggtcaccagttgaatcccgagggcccgtctgctaaggggttaagggatggctggggctaagcatgtatccagctgctgcccagcgttgctggagatgctgatctccatgctcccaggcagcctcacatgtcaacaagtcactgccgctcaaggagaggctggggaggcgcttgagttgatgggagtctagagagggtgccctgggaagcagaggatggggcgaggctgtggctcacggggaagggggcttcacagaggagccctcctgcaggctgagtggaagcatcccaggcagggaagggagcgccggctcacagggcaggggtcttcaggagcagaagcagactggtgagaaaggtcttcagggcgcaggtggggatgtggcaggtgtggagagtgcaggaggctctgaggagggggggcagaggccaggtcactccagccctgagtgtcatgctaaggacttgatgccacagttggggggaccacagtgggctttacagcaagagcgggagccttcctcaccctccagctgcaccctcacaccccgtccagccccccactcatccctcctgacgaggaaaggaagtcagcagagaaaccacaggccccacctgcaaagggctgaggggaaaggaagtgagacaggtgtgaggtctgccggggacaggttcaaaccacaagagaggttcttggggggagcggggagaggccatggcccagggtaggtggggtgcagagttgactgagggccctgtggggctggatgtgtggttgctaagcccacagagtgtgcagctggtggatggggctccaaacccactcagctgctcaccggagcctcgggctaggggcctcacctgggctcagggcgtgctctggcccaagtgacacagggaaagcagcatggacggtgctgacacccgagtgtgcaagcacagcggcttccctgtccctccgcagagctgcaagaaatggctgtggagctgctagggctggggcgcaccctctttgtgccctccaacactatggccaacctcatctctggtgagcgcagggcgacttctgtctgcctagcaggtcctcagtgcatatgggggggctctgacactcatggaccacattcctccatttctgttgggttggtggggagccctggaaggagatgggggaggaggacagtgggggctgcaggtctgctcctccctagctcctcttccgagggtccccagggcctctgggccagcgtcagggacctctccacatagccctggctccgggttcctgcagccacaccttcctctcacccctcaggcctgttctccgggcttccctgctcctgcctcccctctataaaccgtcccatgattaaacactgccagtttcccagtgtgtgtgtgccgtctgtttcctgccagggtctgacg

SEQ ID NO: 32189 - DNA, 1492 bp, Artificial sequence
  DNA replication origin
caggacccagggccgctatctccagctgcgatctgctgcctccctttatctcagcggggccagccctgggttcccagcagcagcctccccggcgcgcacttcctgccagcagcccagcgttacaggaatccgcacactgaactcagcatgtgagtgtgtgcccacaccccagcgcctgcgcctgggcgggtgccagggagccgggggcgccgtgaaaggcagcccacctggggcttatgtcgcaaggccccctccagccagcccagtggcctcccactgctcaggggagccgcaaatctctcaagaaggccagggagggggctgtcttcaggacccccagacctgactctgagaggctgaggccaggccagcccctgttcctctggaatcctcgccatgtccttctgcacaggggtctcacaccctggggggtgtgcacacttctgcctggggggtcccaggggcaggggatggcgaaccacatgtccctccattgtcagtcacctggctggtgtttactgagtcctgtggtcctggcactgggctaggcatgcaggacacaccaaaggaggagggcgtctgggccctgcaggcacagggcatcagccacacggagaagtcagaggagtaaacaggcagctgtgacccgtgcgcagtgggaagaaaaggtgctataggcagcacaggaggagggctacctccatcccccactgggctgggccaggagggcttcatggagaatgaggcgtctcagctaagatctgaagacttagaaggtggtgaccagggatgcgtgccgacggttgggggttttccagacagaatgcaggtgcagaggtctcggggtgaaagagaggccagcgcattcgggaacagaagtgttgcaagccagagtgtggggcggggaggcgtctgggaggcagaagggctggatcccacagaggccagggaggaagccccgccgaggggccccactgcacccacggacagaggagctcagaagtttgggaagggctgggctgcaggggtcagtcctggggggcaggggctcaggagagaagggagcagctggcatgtgggggtggggccagcctgcgttggggcaggagatgaccccaggacctccagtgatggtgacccttctagtgagaatgtcaagaagaactgcagagaggggagggaagagggtcagtgctgggacaggggtgggggcaagtagagttggctccacagagggctttgggcttctcatcccagcctgggaactgcggcccgtccccagcttaccagcaagacaactcagatctcagttgcagccagggtcacacacacacacgtgcgcacacacacatgcacacacacacacacacccatgtacacacgcatgcacacacacacatgtaggagcccagacaaccccccagaggccaagctggggtcatggggtccacctgccacaggcctcactgcacctttccgtgtgagagcccac

SEQ ID NO: 32190 - DNA, 1437 bp, Artificial sequence
  DNA replication origin
tcctgccagggccctggcaggagcagaggcggtgtgtactgccatgcattcctggtctgttgggtgattgacacatacaagacgccagcggtcctgagagtcaggtgccttcctggaccccttggtgagcggaggtgagttgccatcaaggagggaagattcaggaagataactccaaggtcctcaatccgtccaccagtcagtggatggcaaacataatccatgggcactgattaggtttgccagcccatgctgagtgctgggttcagtgtccttcgtctcctgccaaggggagaggacctcgaatggacgcctgggaccatgatcccattttgctggggaggaaacagattagggaggaagggaaccttggtggtgagcagtaaagccaggattggaacccgcgccgctaaggtctctgcctccctgtaggacccaccctggctgtggggaggcactagcttggggaggagcccctggctggtcctcccaggtgtgtgtggagtcagccaggggcagtgctggcagggcctccaggcactgtccagcctcctcctcttctgcacttggaagaattccagctgtttttcagcctctctcttcctccaggaagccttgcatgatagccctacccctctgccaagacacacaccctcttctccctttttccttggcacctggcttatctcacagttgcctttgtcgtcggccagcgtccctcactgggtttcaggctcatggagggcaagacctgagtctttcattctcaggatccctagcagggggcttagggcataatgagcattcaggaaataactggagaaacgtggatgaggaaacggatagcagagggtggagaggggcttgcttctaaaggcgagacgtgaacctagtgggatgaccaggcagggtgggggtggtggggagttgtggggaggccagtacagaacagctccagggagggcatggagcatggtgtgagcaggaggcctgtctgacctccggggatggccccgtgggacagaggaccttgaaagccaggcagagggatgggatcagatactaacgcccatagggagccctggcaggtccttgagcaggggcatggcagggcaagccttcctttagcccagggtgagcttgcgccaacccgtgctgcagaggagaagggcatggaggatagctactccctctgggtgttcttccggcccggctaccctcagccagagctcaggaatcacactcccctggaacctggagttttggattcaatctttattcaataaatggcttattgggaaccgacagggtggctagagcctgcctggtgttggggttgggggaccctgcctggtggtttgggctctgtgggtgtgtgaggaccactccacggtggtgctggcgttccccattccactctgggctcagcgcccctga

SEQ ID NO: 32191 - DNA, 1507 bp, Artificial sequence
  DNA replication origin
cggcgcggccccggcttctctgcgagcccgtgcccgggccgggctgtcgggaactcggcccggctccacttgctcgcgcttactggaaacgtgctcccgagcggcgcaaggctcggcggctggagcccggggcggcccttggccgagggcagggccgagccaggtgctcgggcgccccaggctgccgcgccctgctgggccaccctgggcgcgtgccacccccggggacccgtcccgtcctgagggcgcccagggcctcccagcgccgctctccccagggtgagcgggaggagggagggagctgggggcagcccggggaagccgtggggcgggctttcagcagctgcgaggcgaacccgcctcccttcccggtattctcgcggccacccggtggaaggtggcgccacgccagggccaggcggaggcggggagccaagcccgcagccacgccctgcccagggcgcaggtgggctcggctggaggaggtgctgggggtgggtgtgtctcctgacacaggaagagctgcctcctggctgccccagtcacagaaatgtttattgagcacctactaggcaaggtgcgaccactgcagtgggggtgggggcacttttctccccgggcgtgtatatttatttatttataaaccataggcactttattactgggtttatatattatgtatccatagaagttgagatttaaagaggatgaattaaaaaatagaaacagaggggttgttttcctttccgtatgccagtgagttgtcttatacatgtcccactttggagacctgggtttagtggctgtatcctgctgggcgcccccctccccagagctggagacaaaacccccacccgccccctggttcacgtcatcctgcctcatgaggcccagggctgagctgttttcggggccctggtctcggcttcacagcctgcagtggagtgtagcagatggcagactagggtaagtgaggatgccttgagatctgggttcaaatcttgcgtctgctgctccctggcccagtgacctcgcacctctctgagcctcagtttcttcttctgtaaaataaagggagtggcatctccctcttgcccggaggtgggcctgggggctgcaggctgccctcctgatctgctctgctgccagatgggcacagataggcggggggatgacagccctgagtgaacccagaaggcaaagtggttaggaacacaccccagaggccaggcagggtcctgcagggtcctgcagattcagagaaagaacccatttatcctggggtttggcagagattatggttccggtaaagggtggtcattagtaaagtccatgtcatgcagccgagggcctgtgggaaaggtagggttcaaggaggagttagtgggagaggagagtgaggaatcagagttggtcagtcagacagtcagtcaacaaacacaaactgagcatggcctctgtgccaggcatggttttaggctgtggataaccaaggagcttgctcagc

SEQ ID NO: 32192 - DNA, 635 bp, Artificial sequence
  DNA replication origin
tgggcggggatttctccccctccaactccctcaccaatcattaaccaatatccgacagtaatagggttttttcttttttcttttttttttttaagctcagctatatatattctaaagtatatgtcagttcttgggagcagggaagtataactgatctgaagggtggggtgggggttctgctctggaaggagccttgggtgagctaatggtgaccccaagtcataattgcaggtccctggaggggatttaagatataggaagtagcacttcgcaagcctgagaggaagaagcatggggtgtaaaactgttcaggtggttcaagagtgcgtgtgcgtgtgtgcatgtgagtgtgcatgtgtgtgtgagaatgtgaatatgcacatgtatgcgtgtgcacgagggcgcacacgtgtatgcacagatgcacacgcatacctgtgtgattgtgcatgtgtgcgctgtgcatgtacatatgtgcgtatgtgtgcacgtgtgtgagtgtgtacgtgtttataggagcatgactgcctgagcggcatggctggaatgtgtggaccgggaccaggtgggggtttgcagtgcagggacagcacttcttgttttcagagctgggagagttggggtggggaatctgg

SEQ ID NO: 32193 - DNA, 1171 bp, Artificial sequence
  DNA replication origin
gaggtgatgatcactgatattggtgacgctgtcatctcatggcccccaaagctgtgaggccctatgtggaattctatacctgcacttacgcccatgccaactgtccctggaccctgccgcacccaggctcccctccccagaacccgagccttctcctcccgctcagccagatgacctggtctgtttcctccctccaggggatgagggagggggacttccgatgaactctggccgcgtgatgggaatccctgaagccaggatgttctgtgggaaagaactggaagggagtgctgagccgagtgaccccgctggtcctggggccactgcctcaaatccaaaggagagggccacccccatccccaacctcagaaacctcctgagataccccgtgattgggagggagcccacagctgcacaccgtgtacatcaggcccagcccaggagcacgccccaattcccaggctgacgctgggagtgggagggtgccgggcagtcatcctcctctgacgcatggggagatgaaggcctggcagagatggtctggctggaggctgagtggagcagggctgagaagaggctgagaccatggggacatgtccacagctgggggtggggcaggggagagagcagttactggccccagctgggctaagtgatggctccaaaggaaggctcaggaagggtgggccagggactacagaatcagagtcactaactctagccctgacctgggatgactgagaaggcaggactcaatccctgaagaccaggagtcataagcccagtcctagaaatgactcgtaaagaatgctgctccacagaagggcaggggcctttcggtggatggaggtcaaggagcacccccgtcagttcccaagcaagcctgagaccagggatggaggcaggctgggctccctggacccctggaacagcccggtctcatcccctaaagccctggaccagtggacagaggccaggctctccagctgcccagctgcccggaaaacagtgtgcggactccctttgtgcctctgcctcagccagcggggtgacattggacaagttgcttaacctctctagacttcaactaccttgtctataaaatgggaataataggccgggcacggtggctcatgcctgtaatcccagcactttgggagaccgaggttgg

SEQ ID NO: 32194 - DNA, 1691 bp, Artificial sequence
  DNA replication origin
ggaccccaccatgcctggctaatttttgtatttttagtagagatggggtttcaccatgttggccagactggtctcaaactcatggcttcatgtgatcctcccacctctgcctcccaaagtgctgaaattacaggcaacagccacctcgctcagtcaactttctttaaaaaggaaggatgactgggcacagtggctcatgcctgtaatcacagcactttaggaggctaaggcgggaggatggcttgagcccaggagttcgagaccagtgtaagcaacatagggagaccccccccccacccccaccgtctctacaaaaaaatagaaaaattagccaggtgtggtggcacatgcctgtagtcccagctattcaggaggttgcggcaggaggatccattgagcctagggggcaggggctgcaatgagctatgatcatgccactgcactccagcctgggtgacagaaggagaccctgcctcaaaaacaaaaggaagctaaggggtgtaaactgcctggggaagactctctggggtcatagagagtgggtttaggatctgggggacattctctgtggccagtcagtcagggtgctggcctgactgctcaacaagcttcttaatgactctaaacctcagattcttcgtttgaaaaccaggcagatgagctcagagaactgctgtgtggattccccctcccagttccagtgtggcagagtcctggcaagatagagtctacctagagctgctcagaaatgcagcatctcatggcccaccccagccagatgaatcagtctgcagtttaacaagatccaggtgattggtgctgacgtgaaagtttgagaggccaggctaaataacatgacatatgtaaaacacctggcagagagtgggcatggatgggcgtcagctgccctcctcctctcccccgagcatcctcagacaccatcccagggagatcttttgcttgggagggagagatgtgggttggattgtgggtgaaatgtgggcgacctgcattctcatggtgcagcacatattttgtctccttgcaatcattgatgtgggccagactgcaaagtgtggcccctaggagttcagcatatggtcctaaggttacagggtgaacccaaggcgaccagggccacgtatgcaagtacccacagcttcttccaccaagccgccaccacccgtggatgtggtcactcactctggtggggcaagggggcaagagggcagctggacctctagtcctcatatgggtttgctggttgtatgtaaaaagccccttaggggctggtgtccgcaatgtgatactgaatgtgatggtttaacagctttcatgacacacccattttggaagcagccatcctgtgctgggcactgcggattcaacacagaccaaatggacccatggcaggaaggtcgttagagttaggatgggcagagaagtagcacatggggacaagggctgaacccaggtcagcacagggtgttgggaagaccaccctagaaaggaagtgggggccgggcgcggtggctcatgcctgtaatcccagcactttgggaggccgaggcaggccgatcacttgaggtcaggagttcgaaaccaccctaccctggtcaacatggtgaaaccccatctctactaaaaatacaaaaactagccaggtatggtggcgcgtgcctgtagtccca

SEQ ID NO: 32195 - DNA, 909 bp, Artificial sequence
  DNA replication origin
gccccccagtacacacacactgggccctggcaacgggaggcaagttctctctgagtcctccctacaccaggggcctctctggccgggcagcccaaccacaggacaatcaggctttgggccaggaagttacagtaagtcaggcccgcccttccccacatggggtaccgctgcttccctggtcccaagcctcggctcccctagaggaagagaagggggatcaagaccccttctcaaccctcccccaccccactgtgctctgaatcccaccccaaggacatgctggtctttccagagattttcagaggctgcctcttgctggcaacttagcagccccagctgcacagggcagctgaagccgcaactgaatttgggaggagaggctgactcaccccagccaggctgggcctccgctaatattcttgggtcgcagcctgggattcctgcaggttccgacaataggctggaccatcctcttgtaggaggcggggttcaaagtaaccccaagcgcggggaggggagctctggcaggggcgtccatgtgtccaggactctaggcctgggggttgggggtgacatcggcacgcccccctccccaggcctgatgcaggaggaaggaggtgtgggacagggaaagaggaccgcgtttggagtgcacacggcacattacataattattctattttaatataacaagcctggatggtagctatgactaatctctagttaataggtgaggaaaccgaggccgggagaggttaaggagttaggggtgggtggagggccggtgaggggtggcggctgtgacgggcagagcgtgaggccaggccccttggaaactccccctcagcctccgtgtccacctaagctaccagtgcggggcctgcggctgcggcccgtgggctgtgcagg

SEQ ID NO: 32196 - DNA, 1697 bp, Artificial sequence
  DNA replication origin
ccctaactccttaacctctcccggcctcggtttcctcacctattaactagagattagtcatagctaccatccaggcttgttatattaaaatagaataattatgtaatgtgccgtgtgcactccaaacgcggtcctctttccctgtcccacacctccttcctcctgcatcaggcctggggaggggggcgtgccgatgtcacccccaacccccaggcctagagtcctggacacatggacgcccctgccagagctcccctccccgcgcttggggttactttgaaccccgcctcctacaagaggatggtccagcctattgtcggaacctgcaggaatcccaggctgcgacccaagaatattagcggaggcccagcctggctggggtgagtcagcctctcctcccaaattcagttgcggcttcagctgccctgtgcagctggggctgctaagttgccagcaagaggcagcctctgaaaatctctggaaagaccagcatgtccttggggtgggattcagagcacagtggggtgggggagggttgagaaggggtcttgatcccccttctcttcctctaggggagccgaggcttgggaccagggaagcagcggtaccccatgtggggaagggcgggcctgacttactgtaacttcctggcccaaagcctgattgtcctgtggttgggctgcccggccagagaggcccctggtgtagggaggactcagagagaacttgcctcccgttgccagggcccagtgtgtgtgtactggggggcggaggggctgtgctgtcactgatttcctgagacagctagtagaccagatgaggctgcctggaaggtggctcctcttccctaagcaggttgggccactacctaaatgccaggttatttacaagaaaaaaaaaaggctgtccaggggctcagccccttttggagggcatcagagccgccagtgttgactgagcactcaccatgtactacgccatatgggcgtttgctcactgaactgtcacaaccacccaagaaaacgggaactgttgttatccccattgtacagatggggagcggatttagagtcctgggatgcaaactgggtttccccgctggctcccgatccccactccatctggcctatgagcgtgggaaccagtgtggcccggaagagtggtggatggcccagctgactgcccaggtgcccccaccccccagccacatgggcatgcggcttgctcggtactcagctgacttcctgtccctggaagagcagctgccggtatgctggggcagggcggtccccttcctgtggttcaggtaagggcataaccccatgccttcttggcatcctccctctctcctttctcaggctctgcaagtccgacctgggtgccccagagagctgctccgggaaagacgtttacctgctgcccagagctgggactgcagaccctgattggcgagggcttggagagtagctgagaaccttcccttcagctactgaagaccagacagggctttctgtatcacgctgcctgacgatgatgagggtgcagtgactaagagtgcagatgaaaggcccagctctccaaccaggtggatggatttgcaaggagcttctatctgggcgtggtggctcatgcctgtaatcccagcactttgggaggctgaggcgagcgaaccacctgagggtgggagttcaagacca

SEQ ID NO: 32197 - DNA, 1889 bp, Artificial sequence
  DNA replication origin
aatgagtaaggatgtttgggagggggcaccgcaagggtaccgggcgggggttgggcggagaggcagtcgagagtctatgggagtaagggactccggtcccaggagcgcggggcgggatgatcgaggccgagggtgacaggagccccagggctgggagcaccttcttgcgccccgcccccactcccctccagatctggcggccgccgggctggcgggcgggcaggcgcgtcgcctcgaggccgccctctgccaggaagagtcacttcccggacaccgcgggagccctggcggagctatgcgaagaatgtccgcgccgagtacggggggtggcacctcccgggcccgcatcgccgcggccgcagccgccgctgcgccctgcagagcttgcgcctcgggtacggccccgccacgccacgcccccgccacgcccccgccacgcccccgcccgcggagcgcggtcgccggggcaacgggattacgggcggagagcgctgtttattctcagcccagtgccaggaaattcggccgggaggctgccaggcgcacctccctggggtggggggcgggagagggaggagacagggtggaccaggccgcgctgggcgcgtgggggaaggggggagtcaggcgttcgtcaccgggggtcactgacccctcccaggggcggctgctcagaaagcctggactctttcccggccgtgagtgggtcaagttttcttgtcccaggggagccgagaacccccttcaggtcagcggagcaaacccacccccaacacacgctctattcagggagcctgttcttggagcctcagccctctccccttctagtcactcattcattcactcgttcattcattcagcaaatctctgtggaacacatcccacggtcaaggactgttctatatccagcaagacaaggccctgctcaccctgccctccagaggttaagtgggagcaaccagacaataacgggtaaatatgtaaattaaataaatatagcctgtgccttgaagacgcatcttcaaatcacattcccattacagcatgcatccaccctcagtagggtggccagcttgtcccagtttagttctgaaagtctggcaaactaggacagttggtctctgtaccctcaggtccgaacacacccatttcagagatggagaaactgaggccccaaatccaaggacagctctttccttgtcatggagctagagaaagagctggtggccctaacttagaatcctgggttctatgagctaaacgcttttcattgcctggagctccacctctctgcccctcaaggcctctgaaagcacagaggaccacctacggccagtcccccgaggtgtgcatgaaactgctgactcccggactgtgacccagctcttctgaatccaaagcctgaagacagccttggaatctgaataaccgcctcctcaggtgactctgagacctcttgcagctgccttcagggcagacaagcctggatgctccttttgtcgtgagacagcgcatttcctctttgtaccttgactaagccaaagctgggaaatcagcagggagggaaggttccgagctcgcgggcctgtaggcggcaagcatggacaagtgcagcccttccctctccctgagctggaggacggcagggccaagggaagaggaggaggaggatgctccttccccccggcactgagccctcccagctgtgctgtgctgggaacaggccaggcgtttgtgaaatcctcgggtgagcctgacccactgtcatgaggacttgcctgtggaagctggtgccgggagggggatggggggctgttcccagaagcgggtagaactctggacttcccactcctgagcgctctgattgcagcacagccttaagcaacagt

SEQ ID NO: 32198 - DNA, 2172 bp, Artificial sequence
  DNA replication origin
agagtccaggctttctgagcagccgcccctgggaggggtcagtgacccccggtgacgaacgcctgactccccccttcccccacgcgcccagcgcggcctggtccaccctgtctcctccctctcccgccccccaccccagggaggtgcgcctggcagcctcccggccgaatttcctggcactgggctgagaataaacagcgctctccgcccgtaatcccgttgccccggcgaccgcgctccgcgggcgggggcgtggcgggggcgtggcgggggcgtggcgtggcggggccgtacccgaggcgcaagctctgcagggcgcagcggcggctgcggccgcggcgatgcgggcccgggaggtgccaccccccgtactcggcgcggacattcttcgcatagctccgccagggctcccgcggtgtccgggaagtgactcttcctggcagagggcggcctcgaggcgacgcgcctgcccgcccgccagcccggcggccgccagatctggaggggagtgggggcggggcgcaagaaggtgctcccagccctggggctcctgtcaccctcggcctcgatcatcccgccccgcgctcctgggaccggagtcccttactcccatagactctcgactgcctctccgcccaacccccgcccggtacccttgcggtgccccctcccaaacatccttactcattcctaagactaggacacatcgtgcaggctgattttccatcgctggctcccctgtctgaggcctccttccccccctcccccagagcaggacttagatttcccattcttggctctagcctcaggaggcctgccctaaaacagcaccaccggagagaggatagggcctcttggggtggagtcttacagctctagaagcaaggtaatagggcacagggctgggagcggggatttctcccctttctgttggccggggaccctcagccttgtttttaaccaggccgaggcacgagtgcctgcccaagccaggagaagctgcccactgcctgcaggacacttgtcagcacatctgggagccaggaatacccctcctcccccagccaggccagagggcccccgactaagtcccttagaggagggtgtcttcccttctgaggattgagaagtgcagaaagacttctgttatggggtatgggatgaggagagaagggagccggtgctgagcagagtcatctgggggagagattctttcctggccttcccagcagcttgttgtgtgggcttgagcatgttgcttcccttctctgggtctcggtttccttgtctgcaaacccaaagggttggtccagtctgatctgaaatggaaagacacaccaggcgcggtggctcacgcatgaaatcccagcgctttaagaggacgaggtgggcggattgcttgagcttgggagttagagaccagcctgggcaacatagcaagatcccatctctacaagtagtacaaaatttagccaggtgtggtggtgtgtgcctgtagtcccacctactcaagaggctgaggtgggaggatcgcttgtattctggcagttgaggctgcagtgagttgtgatcctgccactgcactccagcctgggtgacagagctagaccctatctgaaaaaaaaaaaaaaaaaaagaagaagaagaagaagtggaaagacagaggaaggttgggatgggcagtggtctggaggagggaaatgagtcttcttgcctttgcaactccacaaaaccaagtttcaacctccctggggtgggcagggagaactacttcctccctggccagagaagatcaaattcttttgctagcattctgtgaacactggacaacctggctaaacagctgccttctgggtcaagcacagggacccagtggctgggcacagtggctcatgcctgtaatcccagcactttgggaggctgaggctggcagattgcttgagttcaggagttcgagaccagcctgggcaacatggcgagaccctgtctctacgaaatatacaaaaaaaaaattaaaaattaaaaataactggccgtggtgataatgtgcctgtagtcccagctactcaggaggctgacgtgggaggattacccagacgtgggaggtttacccaaacccgggagttcaaacctgcagtgagctataatagcgccactgcactccaacctggg

SEQ ID NO: 32199 - DNA, 2273 bp, Artificial sequence
  DNA replication origin
ctcctgtcccctccctacccccgtgcctcgggtttctccctccgtccacaccgcccggggctactggactgagcggcgcccaggcagtcccgggggcccttctcctgctccccacccggccacactcctggagacctaacttccgcgcgcgagtttcccacgctgcgcccttgcagtgcgcgcctgggaaggggctgcccggggccaccctgccggcaggggcgggagccgtgcgggctccgtgaggcgcctggatcggagcgcgggcccaggagagggcccccggggcagtgggtgccccagtcgctcggcgaaggcaggggagccggggcgggccgggcgcgctggagggttccgggcactcaacgcgctcgcgccttcctctccgcagccccccgggatgcggtagcggccgctgtgcggaggccgcgaagcagctgcagccgccgccgcgcagatccacgctggctccgtgcgccatggtcacccacagcaagtttcccgccgccgggatgagccgccccctggacaccagcctgcgcctcaagaccttcagctccaagagcgagtaccagctggtggtgaacgcagtgcgcaagctgcaggagagcggcttctactggagcgcagtgaccggcggcgaggcgaacctgctgctcagtgccgagcccgccggcacctttctgatccgcgacagctcggaccagcgccacttcttcacgctcagcgtcaagacccagtctgggaccaagaacctgcgcatccagtgtgaggggggcagcttctctctgcagagcgatccccggagcacgcagcccgtgccccgcttcgactgcgtgctcaagctggtgcaccactacatgccgccccctggagccccctccttcccctcgccacctactgaaccctcctccgaggtgcccgagcagccgtctgcccagccactccctgggagtccccccagaagagcctattacatctactccgggggcgagaagatccccctggtgttgagccggcccctctcctccaacgtggccactcttcagcatctctgtcggaagaccgtcaacggccacctggactcctatgagaaagtcacccagctgccggggcccattcgggagttcctggaccagtacgatgccccgctttaaggggtaaagggcgcaaagggcatgggtcgggagaggggacgcaggcccctctcctccgtggcacatggcacaagcacaagaagccaaccaggagagagtcctgtagctctggggggaaagagggcggacaggcccctccctctgccctctccctgcagaatgtggcaggcggacctggaatgtgttggagggaagggggagtaccacctgagtctccagcttctccggaggagccagctgtcctggtgggacgatagcaaccacaagtggattctccttcaattcctcagcttcccctctgcctccaaacaggggacacttcgggaatgctgaactaatgagaactgccagggaatcttcaaactttccaacggaacttgtttgctctttgatttggtttaaacctgagctggttgtggagcctgggaaaggtggaagagagagaggtcctgagggccccagggctgcgggctggcgaaggaaatggtcacaccccccgcccaccccaggcgaggatcctggtgacatgctcctctccctggctccggggagaagggcttggggtgacctgaagggaaccatcctggtaccccacatcctctcctccgggacagtcaccgaaaacacaggttccaaagtctacctggtgcctgagagcccagggcccttcctccgttttaagggggaagcaacatttggaggggatggatgggctggtcagctggtctccttttcctactcatactataccttcctgtacctgggtggatggagcgggaggatggaggagacgggacatctttcacctcaggctcctggtagagaagacaggggattctactctgtgcctcctgactatgtctggctaagagattcgccttaaatgctccctgtcccatggagagggacccagcataggaaagccacatactcagcctggatgggtggagaggctgagggactcactggagggcaccaagccagcccacagccagggaagtggggagggggggcggaaacccatgcctcccagctgagcactgggaatgtcagcccagtaagtattggccagtcaggcgcctcgtggtcagagcagagccaccaggtcccactgcc

SEQ ID NO: 32200 - DNA, 1861 bp, Artificial sequence
  DNA replication origin
cgcggccggccttcttgtaatgtttagtcactactcgcagcagagaaaggctgagcgcggagggtgagggaggggccgcgggcgccgagggcgggccgcgagcaggggcagggaccgggagggacgcgcgcggagacaaagcgcgacgagaggcggccgaggcggccggtgggcgcggcgccagccccggcggcgcgttcctggcagcggcccctccccgccgcgcgctccgcccccaacttctcattcacactttccccccacccccctcccttctaagaaggctgatttctggcagaggcgggggcgccgcttcgggagagcgggcagttctaggaggccgacctggagagcctcccggttccccttccccttttcccggaccccgcggggacaccccctcgccgccacccgggcctccccgagggcccaactgcgggtcaggcggcccgggccagccgaaagggaagtggggctaccccacagccaggcagcggggctggggtcagacccgggagccggaggttggagacgtgcgacagtcacctgcgggcagattccagaggggagacccagggctgcaggggacgccccttcgtggcagctacccagcctcggcccactgccaggttctttgccaaccctgacgcgagtgtggagcccccctcccctcccctatgaaaacgctttcatgcactggggtctgcaaacctggttggtccggtgtgggttgggccaggtgctctcggccgggctggagagctcgaggtggaacgatggccccaacctacggcccgcgtccgccagagggcgccctggggtctcctaggggagggcagtttggtgctgcgcggcccaggccttggaataggcacgccagggatctgcgggaatggctgtctccggagctggaaaggtggccgagaagggggcattcacaccccaggctggggtcagacctgggaataaaattctagcaggagagaatttccggaaagcagttttccggggttcaggctactgccagatggcccacaccccctggaatgtgaccccctgcctctcttggggtgggggaggacttgatcactggcggggagggggtagaggggaggagaggaagtgattgaggtgaaagattggtttgctgctggtcacgttggcactgacgtagatagtttgggcttggagacccggggccagccttatgaaggatggcaagttttgtcatcttgtccccaaatgggctgtgtggtgctggggacacccgagagctgcctcagtggcatttagattttcacctctcgggatgcagacgctgtgggcctggggccctgcgctcttcctagataccaggataatgaggtgctgaaagggaaggaagagactgccgccagggacagggagcttgggatgccagaacccagaactggcccttttgccggccctggaattgataggtgcgcactgcctttgccactgtatcctcagtccgtgccatcacctctccccagcatgtgctggggactcagtgagatttggacaagacacacagtttctctgggcttccgttttgccacctgtaaaactggagccagaaccttttccttccctttggcaggcggaggcgagaggatcacttgagcatggacattcaagaccagcctgggcagcaaagtgagcacccccatctctgcaaaaaatagaaaaaagttagccaggagtggtggcctgtgcctgtagtcccagctgcttgggaggccaaggtggaaggatcgcttgagtcagggaggtcaaggctgcggtgagccatgatcgtgccactgcactttagtctgggcaacagagtgagaccctgtta

SEQ ID NO: 32201 - DNA, 957 bp, Artificial sequence
  DNA replication origin
tgagccgtgtccgcgctcgcctttgtcaataaagttcgcgcccgccgggagcggaagcggaagcggcgagtctccatggcggtggcggcggcagctgcggcgggacccgtgttctggaggcgactgctgggcctcctgcctggccgcccagggctggccgcgctcctgggacgcctgtccgaccgcctcggcaggaaccgggaccgccagcgcaggaggtgagaggggcggccgggatgagagtgcagccctcgcggctgcagcccggccccccggcgctcaaactcccggccccagcgtcctgggcatccgcagcgagtccctccccggtttccgggcccatttctgcctcccggggctcggcgcctgacctatgtgcttcttcactggccttcttgagggagggtgggcggctcgtgctccattatcggccgggtccagccggcgggcctcctgcgcagcccggccagtccttgctccccgtctacaccgtgcttgttggcgagccccggccaccgtgcacttacacgttaaaagagggactgtgtgtgcgttcagggagcttcggtcaagctccagaggctgtttatatcatggtttcggccccaggatgtgagtgtcggagagttcagaggggtcttttccttaggtaagcctggctgtgagtgaatcaccgttgctgggattttgtgtatagagcgtttctcacatcctgccagaaaaagctgtgaagcaatccttagtaacactcaggcatgggaagaggagccactcgaaacactttttacacatttcaaagggcctgtgttctggaaaagtactgaagttatgtaaatgatgaagtaggctttggagcaatttgttcaggcagtggtcttttaaaataaacatttgccaagaacatgctgacctgaggcttgctaatattaaaaaaaaggggataaataattcttggcc

SEQ ID NO: 32202 - DNA, 1706 bp, Artificial sequence
  DNA replication origin
ccttaatccattcaaccctgagtggacacagcacatgtttcagagagcacagggctgggggtaaggtcacagatcaacaggatcccaaggcagaagaagttttcttagtacagaacaaaatgaaaagtctcccatgtctacttctttctacacagacacggcaaccatccgatttctcaatcccttccccacccctcccgcctctccattccacaaagccgccactgtcatcctggcccgctctcaatgagctgctgggcacacctcccagacggggtggtggccgggcagaggggctcctcacttcccagtaggggcggctgggcagaggcgcccctcacctcccggacggggcggctggccgggcggggggctgaccccccacctccctcctggacggggcggctggcctggcgggggctgaccgcccccacctccctcccggacggggtggctgccgggcggagaggctcctcacttctcagacggggcggttgccgggcagagggtctcctcacttctcagacggggcggccaggcagagacgctcctcacctcccagacggggtctcggccgggcagaggcgctcctcacatcccagatggggcggcggggcagaggcgctccccacatctcagacgatgggcggccgggcagagacgctcctcacttcctagatgtgatggcggccgggaagaggtgttcctcacttcctaggtgggatggcagccgggcggagacgctcctcactttccagactgggcagccaggcagaggggctcctcacatcccagatgatgggcggccaggcagagacgctcctcacttcccagacggggtggcggccgggcagaggctgcaatctcggcaccttgggaggccaaggcaggcagctgggaggtggaggttgtagcgagccgagatcacgccactgcactccagcctgggcaccattgagcactgagtgaatgagactccgtctgcaatcccggcacctcgggaggccgaggctggcggatcacttgcggttaggggctggagactggcctgggcaacacagcgaaaccccgtctccaccaaaaccagtcaggcgtggcggcgcgagcctgcaatcgcaggcactgggcaggctgagtcaggagaatcaggcagggaggctgcagcgagccgagatggcagcagcacagtccagcctcggctcagcatgagagggagaccgtggggagagggagagggagagcgataagtgaggttttaatgtaatatttttgaaaatcaaattagcgctaaaaaattcatgatgaacaaatcatcagaattgtaaaccaaggtgggctgttgggtttttttgtttcattgtcctgcaatcctgtgccagggaggggtggtttccaatcagccccggcgcagccaaggctccagggccagttcaggaaggctgaggacatgcagcgtgcggacagatcgggcgactcaggctttctgccttgcctcgagcacttggctggaaagcctgtatttgctggaataagtatacacaagggcacacaccattgccttgtgcacctcagaggaaagacgggtccgacattctcttgcagtctcttttcattgaaagatggtgccgagggctgggggcagtggctcacgcctataatcccagcactttggggggccaaagcgggcagatcacttgaggtcagga

SEQ ID NO: 32203 - DNA, 2003 bp, Artificial sequence
  DNA replication origin
agtgaggaacacctcttcccggccgccatcacatctaggaagtgaggagcgtctctgcccggccgcccatcgtctgagatgtggggagcgcctctgccccgccgccccatctgggatgtgaggagcgcctctgcccggccgagaccccgtctgggaggtgaggagcgtctctgcctggccgccccgtctgagaagtgaggagaccctctgcccggcaaccgccccgtctgagaagtgaggagcctctccgcccggcagccaccccgtccgggagggaggtgggggcggtcagcccccgccaggccagccgccccgtccaggagggaggtggggggtcagccccccgcccggccagccgccccgtccgggaggtgaggggcgcctctgcccagccgcccctactgggaagtgaggagcccctctgcccggccaccaccccgtctgggaggtgtgcccagcagctcattgagagcgggccaggatgacagtggcggctttgtggaatggagaggcgggaggggtggggaagggattgagaaatcggatggttgccgtgtctgtgtagaaagaagtagacatgggagacttttcattttgttctgtactaagaaaacttcttctgccttgggatcctgttgatctgtgaccttacccccagccctgtgctctctgaaacatgtgctgtgtccactcagggttgaatggattaagggcggtgcaagatgtgctttgttaaacagatgcttgaaggcagcatgctcgttaagagtcatcaccactccctaatctcaagtacccagggacacaaacactgccgaaggccggaaggcctcagggtcctctgcctaggaaaaccagagacctttgttcacttgtttatctgctgaccttccctccactattgtcctatgaccctgccaagtccccctctgtgagaaacacccaagaattatcaataaaaaataaataaattaaaaaaaaataaaaaataaaaaataaaacctcacttatcttgatgcctgagtttctggcagcctcttaaacgttgagcccaaggcggacgcctcacttggctcaccctaatcccagcgcccttttctcccagggagccagcccttgggcctgtccttgtcctctgggctctacactcaggcagaggtggcctcagtgactcaccggaatcccctcagtctcctccaggaagcgggcgctgacggacaccagcgcatcttccggccactcgtggaaccagtcgatggccgtgcagttgaccacagctgggaactttctggctcgtacccgcagcacggagcccacaggggagaaacacaggatcacctgggtgtgggagacacagatgcgctgcctactgggactgcagtgctggggcctaatccatcactctgcagaaagctctgccagaaagcaacgcgccctgccgggctcagccgcccagggcctgggcagcacagtcctggttctgggtttgaagggcggccgctgcattgccgtggataaatgctcatctggcttcatgcctctcgctagcagtcccaatccctctggaaggggcccttgcctctctaaaaaaggccgggcaaaggaaggaatggggagtgggcatccacattgggcagatgaggccccagaacgggccgggctcccaagcccttcggttcagcaggaagggtccccgctgggccctgagggatagtggctaattcccagaaagggcagggagtccctgggatcccagctggagaaggtgctgtggagacaggcctggggggctctctggctagataaggacctcccttgtaatgggtctcagcctcccagctgctcttgctctctagtcccctttcgtggcataggtgttgcacggacgctgccattgaatggggtggctcactgcttagctgactttgcacccctcactgcgtgatgacgtgagggtgcaggacagagccggcactggcagggcaccaaagaggatccaggag

SEQ ID NO: 32204 - DNA, 1090 bp, Artificial sequence
  DNA replication origin
gctggctgactggagtgtttggttgttttggggtagcgccatttctgcgtgtttgctgtgagcttccccggccaggaggccctcaccaccatctacaacacaatcctgacgcagcacctggccttccgctcggtctccatggctatccagaggataagcagccagctggtggccgcggccctgggtaagctggctggcctcatcccctctcccatcggtaaaacctatggctctgtgggctgatggttcttcacattttcccttgataaatattttatttataattctaaatcaatatcttaaaaacgatgctatgtttcgacaggagaaattgtgaaatacaattgcttcatggggaggtaggggctaggaaattctatacacaaatgatttaaggagaacagcaaattccctcccacttcaaagagctgtgcagatttcttactccagttgtcaccatttcgtagtccattggctttagaaacttgaggcttgcacttcctggggccatcaagagtacatgagaattgacacgtccttttcctctaacagctttgcatcagaaaatcacggcaacatttcttcccacggccattaagtttcattatgtcttcaacctcagggacctctccaatattttccaggtactgctcttgtagctttatgtcatgcctgccttacggtccagtgcctgatccacaggtgctttcctcatcacagctctcagggaggtgtggactgatgatggtggtgatggtggtaatgataatgatgataataatggtggtgatggtaatggtggtggtgacagtggtagtgatggtggtaatggtgatggtcgtgatgatggtgatgtgatgatggtggtagtgatggttatgatgatagtgatggtgatgtgatgatgatagtgatggtggtgatggtgatgatggtggtgatgatggcaatagtggtggtgatggtaatgatggtaataattgtgatgatggtggtagtgatggtagtgatggtggtgatggtaatggtgataatgattataataatgggggtgatgacggtggtggtgacagtggtagtgatggtggta

SEQ ID NO: 32205 - DNA, 1305 bp, Artificial sequence
  DNA replication origin
tgaatggggtgggtagatgtgtaagtaggtggatgggtgggtggatgggtgggtggatgggtggatggatgggtgggtgggtgggtgggtgggtggatgggtgggtgggtgggtgggtgggtggatcggtggatgagtggatgggtggatgggtgggtggcgtgggtgggtgagcggatgggtgggtgagcagatgggtgggtggcgtgggtgggtgagcggatgggtgggtggcgtgggtgggtgagcggatgggtgggtgagcggatgggtgggtgagcggggtgggggggtgagcggggtgggggggtgagcggggtgggggggtgagcggggtggggggatgagcagatgggtgggtgagcggggtgggggggtgagcggatgggtgggtgggggggtgagcggatgggtgggtgggggggtgagcagatgggtgggggggtggggggtaagcaagcagatgggtgggtggggtgggtgggtgagtgagtggatgggtgggtagggtgggtggatgagtggacagatgaatgtggtgggtagatgtgtaagtggatggatggatggatggatgggtggatggttggatggatggatgaatctctaggatactaagtgctatagggaaactcaaagattaatttcactcagtctataccctcaggcaggtctattctaataagggagagaagacttgggctcaaataacttcagcataagataaaaagaaatggctctaatgactgtcatgagagtagccatacgtggtgacagagttgtgcacaagagacaacaccatctcatcacagttggggaacagaataggctggcttgttgcctctgcccctcttaggctcctgtccctgctgcttggcttcaacctcagcccagtcctgcctcctcgcctgccctcttgctatgctcctgccctctgaaactttactaaccctaagtcaaatctctctcctgtgctctgtttccaacccttctgagagtgttaacaagctaatcagttaactcttccaagtaacatttttgcagtttagcattttaattcagagggagctactggcaccgtggcagggaggggagggatgggaactgggaatgaggcacaacagactctggttcagtcaagtcacttcctggggtgacgatctttagagcaatgatgtgacaataggaacagccaataatggcccatcccccgggtgtggcctgctggtctgtctagatgatgtgactcatcattaaagtccacaccactgatttgcaccacccactggaaaccgccccccccaa

SEQ ID NO: 32206 - DNA, 1169 bp, Artificial sequence
  DNA replication origin
tacaagcacagccccagagctgcccaatctgcacgtggcaaggcagggaaaccagagatgcggctcttccttggaaatcttcccactcactaacattcattctttcgttcaccaaatacttactgagcacctactacatgtatgtgcttgggataaattagtgatccagacagtcagagagctgtctgtcctgccctcctagagcctacctccaggcaggagggcggggaggatgatcagctagcattcacgagggagtcaagtgtatgatatggtagaaggtgcaacaggttccgcggaaggaagagcaggaagggcaggttaagaagatcaatagagccggtagaaggggcaggtgcaattttagatgtgagcagagacttgtgggaggtcagagtgccgctgagcagagatggagggaacagctttgcagcacggcatgcgggtaaagaaaaggccaggtggcgcccgagagcctggtgcagtccaggagcagcaaggaggccagtggggcgggggaatgggcaaaggggaaggtcgtaggagaagagatgagaggtgacgaggaagggccccatggaccacagagggacttggagtttggtttgagcaagatggcagcccctgcagggtgtcagacagaggtgtgctgcgattagatttctagttgtaaaggacccttctccacgctgtgaggtgcgtagattgaacggagctggggctggaggaaagagcaggaaaatcagttgggagcctgttggcacagtccaggcaagagatgacagctgggaggtggtggctggaaccagagtggcagcagtgaaggtggtggtgagcttctggacttgaatatagtgccatggagactcctagtaggttggaaatggagcgtgattggaagaggggagtcagtcccaatgttttagggtcaggtgagtagacaggtagaattgccattggccaagagggcaggtggggcagaggccacaggggaggatgggctgctgtgctttagccttgttgggtgtgagatgtcacctggacatccaaagagaggagctgagtaggcgggtggatacagaaggctggaagtcacgagagaggctggggttggagacataaacgtgggagccacccacacagagatggtacttgtagccacaacactg

SEQ ID NO: 32207 - DNA, 811 bp, Artificial sequence
  DNA replication origin
ccccccatgcttgcctcccttcatcaaggaggaagtgtctttccccggattccctgcagacgtgtccttacgtttcagcatcaccctgggtctcgtctccacctctcagccaatcctccgcttaggcccatttgatgcctcactggggctgggcacacatcctgcagacacagttggggtaccgtgggccggacgccggcaagcagagggtggagaatggatgctaggtcggcagaaaggctgtggccgccaaaggtggagactgggagcagtgagaacccgtgtctggcgctcagagtctgggtagagcagacatgagaaaattgagtgaagtgatcccggggtgtggggggctaaccccaggagcaaacaggtgggcggctattggaaagagcaagcggaggaggtaacttgaacgggctgatgagggaaggccccactgagaagaggttgctgagctgaagaggaggccaccaggcaagggcccggggcgccgcttagagtagggtagctagtggtggggtggagggatcctgaaggaattgctgggatgggctggctaaggcctggggtggcaggggatgcagaggagaggtcagcaggggccagatggagcgggaccagggccatggtaggggacgtctgaggtggcgtggagcttgggggctggagagggactctggctgctggagggagaattgttgggggaggacagtgccagcacgaggctgtgacatgactcagttgggggtgatggggattgtactgggacaaccgtgagagaggtgtaggggacaattaaaaattcatg

SEQ ID NO: 32208 - DNA, 1951 bp, Artificial sequence
  DNA replication origin
aaacagggtctcactctgtcccccaggctggagcacagtggtgcaatcatagcttactgaagcctcaacttcccaggcccagaggatccctcccacttcagcttccagagtggctaggactacaggcgtgtgccgctatgctcgacaatttttaattttttgtagagacagggtctctctatgttactcgcgctggtcttgaactcctgccctgaagcagttttcctagcttggcctcccaaagtactggggttataggcatgaaccacttcacccagctgaaaaacaccagtctaatggaacaatataagggaacagaatttgtaaacagtcatgttctctgctaatctgtgattagcagtaataccagtatccctccctctccaaatctattcagttggtgagttcagctaagaggtctagagtgctgatagtaagaattaacatgccatctgaatcgcttttcttctggagttctggtctttgagcaagagctgaggtggtctgggacttgcatactgataagggaagaaagccagctcgaagataccttgaaccttctggtgagtctggggttagaagtgaagtagggagtgaaacagaggatggcaaatactgggggagaggctcagtgctccattagcccatgtgacagatggtttgagaagatttgccaggtcaatgtggggtcaattctaaaagtgtcctaagtctaggccaagaggaacaaaatgcagctgggtctctgacctcacacgccgaagcccaaggacacgttagggccaaaatgtgactctctaaggtcacctgtaaaactggacaatctggtaaagtcagtgaaggttaagatcatgaatccagccaggcgtggtggctcacgcctgtaattccagtactttgggaggccaaggaaggagaccaaagagaaaggatcacttgagcctaggagttcgagaccagcctgggcaacctagcaacctccgtctctacaaaaaatacaaaaattaaccaggtatggtggccggtgcctgcagtctcagctactcaggaggctgaggtgggagaactgcttgagcctgggaagcagaggttgcagggagtcatgatggtgccaccgtactctagcctgagcaacacagcgagtgagactctgtctcaaaatgaataaataaataaaagaaaaagaaaaatagtaaaactcaggacaggtgggcccacaaggaaagagttctgtggcttttactcccgttttttggttggtccaaaaaattcccagcagtccagggatctctgtggagttctcagtgagtgttctgtgtagggtgcaggagccacaagtgactgcagggggaaaggggggttctggtgctggcattctgcagcagtgggattgtcctctgtcataaagaaagagaaggccgagcgcggtggctcatacctgtaatcccagcactttgggaggccgaggcaggcggattatttgaggtcaggagttcgagaccagcctggccaacatggcgaaaccccgtctctactaaaaatacaattagtcgggcctggtggcacatgcctgtaatcacagctactcaggaggctgaggcaggacaatcgcttgaacccgggaggcggaggtttcagtgagccgagatcgggccactgcactccagcctgggcaacaagagcgaaactcgtctccaataaataaataaaatccaaaacgctgggacttgaagtgccctcctttcaatcttgacccaggtaaaactcaggacaaataaaaagaagtagaagcagtaaacttaggacatacagcatgtaaaggttctgaacgcaggagtaaatgacttcaaatagcttttgtggcctttcgccaaggaccgggccctccctggcaagctggggccgggtctgaccttccaggttggcgtcagcaaggaccaccctgcccttc

SEQ ID NO: 32209 - DNA, 909 bp, Artificial sequence
  DNA replication origin
tgagggagcagggcggcgtggctcagctcagagccggggcagttggaggtggcggcagtggcatgaagcggccgagcatgagaagagccaggctgcccaggcctgtccgggcgtgtggccatggacagggcatgcatcctcgcagcttccgcccctttgtcaatagggggactgcaggtcgccgtgcacaggggtcattgtgaagagtgggtctccagagagctcatgagagcccggcctgtgtgcaggacctgcatgcagcatggagccccgtgggccaggaaagagccgtttttgggaactgtgatgcctgtgattcttggtctaggaaaagaaaattaaaaaatttaagagagagaagaggagaaacttcaacgccttccagaaacttcagactcgacggaacttctggtctgtgactcacccagcaaaggctgccagcctcagctatcgccgctgactgtgcccctgtggaaggaggtcggttccgagggggtgggtgtaagggtgaggtgggggtgtgtgtgccgtgtatgtgtgtaggggtgtggtggggtgtggcgtgtgtgtatgatgtatgtgggctgtgtatctggcacatgtgtgttgggtggtgtgtgtggtgtgggcgcgtctgtggtgtgtgtcctagtcacttggagaagggtgtgtgtgggatgcgtgtgtataagggggtgtgtgtgggatgcgtgtgtataagggggtgtgtgtagtgtgtgttgggtgtggggtgtgtacacctggcatctgtggcatgtgttctggtcacttggagaagggcatgtgtggggtgtgtgtgggatgtgggttgtgtgtatatctggcatgtgtcccagtcacttgcagaagggtgacttcttgccagccgcatcgagatgccatgcattg

SEQ ID NO: 32210 - DNA, 935 bp, Artificial sequence
  DNA replication origin
acactttgggaggccgaggcgggcggatcacaaggttaggagatcgagaccatcctggctgacacggtgaaaccccgtctctactaaaaatacaaaaagttagccaggcatggtggcgggcgcctctagtcccagctactcgggaggctgaggcaggagaatggtgtgaacccaggaggcggagcttgcagtgagccgagattgcgccactgcactccagcctgggtgacagagtgagactccgtctcaaaaaaaaaaaaaaaaaaaaaaaaatactgccctaacatggcaccagagctgtgctccgtgccaccctcggagcgaagtggagttggcttgttagtgcaagggacatcacttgagcacttgcggtgcgccagggtccatgccaggtgctggttgtgtctactgaagtgcgccctgggccctcggggctccctggcagagccagaaccacacagtaagggctcatgctcagcaaggaggcgctgggggccgcatgggctcttgcagtcctgtgcacctgaggagagtggctaaatgggcagggcaccagacccaagggcaggaggcgcagcacgttgggagcaggcaggctgctctgcatggccgggtccctgggctgtgtggatgagatgggaaccatggaagccactgtgtgggggcaggggacacttagcctggagctcactgaggaattggaggcagggagaaatgaggtcagatttgtgtgaagggaggtgagtatattccaggggctatgtggctagctgggcagaggacgagttcagaaagggtttctagaacccgatgagggtggtgagtgctgtcctggtcccgaggtgctgggtggacctgtgcggtgttgctgatggggaccaggttccccctggacagggcttaggaggtcgggcccctgatggcagcagccaagc

SEQ ID NO: 32211 - DNA, 1340 bp, Artificial sequence
  DNA replication origin
tgttgcaggcgggtgtctgtgcgctcctgctccccttccaatttgctcagagctgactgctgcctctcacttccaagcagctgctctcccatgggtgatggtgatccagaggccatggaagagtctccaaggaaaaagaaaaagaaaaaaagaaagcaggagacacagcgggcagtagaagaggatgggcatctcaaatgcccaaggagtgccaagccccaagatgctgttgtccccgagtccagcagctgcgcaccatccgcgaatggctggtgtcctggggaccgcatgggtatgcaccgggcgagggggtgggaaccgcatgggtgtgcaccgggcgaggggttgggggaccgcatgggtgtgcaccgggcgaggggttgggggaccgcatgggcgtgcactgggcgaggggttggaccgcgtgggtgtgcaccgggcgagggggtgggggaccgcgtgggtgtgcaccaggcgaggggttgggggaccgcgtgggtgtgcaccgggcaagggggtgggggaccgcgtgggtgtgcaccgggtgagggggtattggggagtgcacaggctgagagcagcgtctactgcatctgagcttgggagggtctgggagaagatgtggagggccctgggaccctaccaaccttcaccccccacccccgagtctgctcccttgggtgatggggttgaagcttcctcatgtgtcacagcatttgactgaaacagccccatgagagaggttacagtgcacatgaactttaaaacattctgtgaatgccagtgggtcttccgattcaaagctgttctgtctacagcttctcacggaatgactccctgaactcccagcctgagtttttttctgtgatggttgaatttagaagagttgggttcaaaagtgaatcctcctctccctctatgtagctgggccattcagaacatagcacggtttgcttgctgttggggacctgtgtgctgtggctgtccttgggcaccacccctcaatcggagggtgttttgttttctttagggctggctggggcatgccttggcaggcacccgccacagaacacatttgttaagtgaaggggagagaaagtcctggctgcttggtatagggggccgagcttgagtgaggcctcctctgcagtctggaaggtctgattatggcagtgcatctgggggtcagcaggaccttagagactgatttgtatttatccaactcttaagaaaggaatttatcgttaaaaatgaaatggtatgaaataaatagcaaaacgtgggtgctagctagtgccgactgagtttgctggccagcatgctctcagaagtactgccct

SEQ ID NO: 32212 - DNA, 1350 bp, Artificial sequence
  DNA replication origin
gggccgggctgtcctcgccggtctccgccgtcccccgggctccgggccggtgatgggggtcgccggggcccgctgtctgtgcaggattcaggtcaacttcggagaggttgaagtcggaatcagggcgagggcgtcgcgtgcggccgcagagctcagcggggcgggtgcggccccggggcgggcaccttcctcgtggttgcggaggaggccatggagcccggggcggggtgcggttccgatgctgctgcttctggcgggtggcgtgggggtcctgggcctggggctggagtggcggccgccaaacccagacacacgagaggggagactccgcgcgcccccgtttacgtaacgctcgccacggagccatgctcggggagaggtgctcgggtcgctgtgtccgcggccgggctcggggcaggcgctgcggagtcgcccgggaggcccctggagcgcggcgctgggccccgggaggccgctgcttccgtgggctcctctccccagcacgtggttgaccctgcgagcgtccgttgcagttcatcctggaaaagtgactttagaaggaggagggagcgggaatgagcctaaatggtgctggctggggttcgcgcaggtggaaatgtggatgaggcctgtgctgtccttggacaagagagagcatccttcctgagttgggtagagtgtggatggtgtgtgcgtcggagggattgctagtgattacaggaacacttgtctcgggctcctacacgtcagagagcgagcgagcgttgtttaggttattgcttaatgttttaggtggaattggtgaagtagagattgacctgtcccacttgaaaaattgtgttcaaaatctctgcatctacattaaggagtgggttaagttcaaagttacttatctcgagtgaaactgggttacatctcccaaggttcgtttatcccctccctaagtggttctcaagcgttggttgtgcatgacagagttctcaccttccagggtagatgtgagtcctaaccgaaagcagtgatattgtggggagtttttaatacgactggatgtcttcactttgtagatggcttttattctgagatcatttccttacacatttttcgggagttggtatgcttttatttatggatgaagtcataggtctgagatttgctgtagaattacctggggatgggaagtgactcaggatgggtcagatgtagttactgaggctgaataaggggggctcatgtgctccctgtgcggttctccatctgtgtgtttgaatgttttcactgtaaactgtttttacgaaccttaattttatgtaatcatagtgatcgtagatggtaatgaaagagaaaatc

SEQ ID NO: 32213 - DNA, 1599 bp, Artificial sequence
  DNA replication origin
aacaggccatagtgtcctggaggctgagaaagaagtgagtgtgtcaccaaagccacctacctccaaaatccttcccttcctaggctggacttcttactatgcttagctggcgtcacatgcagaaagccccgtgcagaacgatggctgtcagtctttgagggagggaacactaagcctgggagggcacagcaagacccagctttttctgtcctcaggatgtgcagatggggagcccagccgggccctgcacacaagcccggataaagcaaagctgtgcaactcaatccaggtgcctgatgccagaacaggcaagaagcaatggcaaccgcagcagctagggaagggaccttgagggcagccaccggccccggacagcagcctcaggacaggacctcaccgattcctcctgcaagctggggagcatgtgggcgggggggggggggtgggggggtgggtgcagaccaaaaagactcagctgaggctggaacgcagctcagctggggtttctcgctcccatttctacaaggctcagagggaggctcccactggaattctgaggattaataggattgatggggctccttcaagaactagccactggttccaggctgcccttggatgtggggggagtcaggtgctgggagctcatggtgggcaccggggcgatgggagcacttgccaggggcagggagtgcagaggcgtggaagctgcagaaaacaagggccatgtccctctcaagatgaaagggacctggtaggcctgctacacagtcttgcaacgaccctcaaaagtttctgcaaaatgcacatttccaggccctgccctaacccagctgggagatccctaagtgctgcctgcttggcatctgtgacggtgccaaggcagggactgggagggaagccgcgtgtcccagccctgcctgcacccaaggatcgaagccccagacacatagtgcctggcagagggaggatgggatgaggaccttggacccacgtctccctccagacccacaaccatgtctaaaaggagaaggggggagcagaatcatattaatttggacccatgggatgagtgttttattcatgctgtttccaggaagggatgtcagagctggaccagtcgaaacccttggaggctttttttgcagttggccacaggggcgttggaggcctgcttatgggtcctcgatgtcgagaaactcctgcttggggggcgccgcgccgcggtaccacgcacaggagccgtcacttctcttgatgcaggcgaagaacttggcctggtgcccgttgatgttcttctctgtgacccagtccatccagaggcactcgtccggggaggagatgtagcacgggatcatggggcagcgcgtgatctggggaggggcacacggagggggacggagtcagggacccaggaaggggtgggcagaggctgctctgggggcatgtccagaacccggcaatgtgcctacctgtcatgtgcagggatggcagcctctcccgagacccacggttcctgcaggggcaggcagctggcctgcgagggggtctaacctgcagggaagctgtgccctgcccaccgctgccccccctcctact

SEQ ID NO: 32214 - DNA, 1308 bp, Artificial sequence
  DNA replication origin
ttttattttatttatttatgagacggaggcaacaaagcccaggctggagtgcagtggcgcgatcttggctcactgcaacttccgccccccaggttcaagcaattttcctgcctcagcctcctgagtagctgaggttacaggcatgcaccaccacgcccagctaatttttgtatttttttagtagagacggggtttcatcatgttggtcaggctggtcttgaactcctgacctcaggtgatccgcctgccttggcttcccaaagtgctgagattacaggcttgaaccactgcacccggctggtagattttatttctttttatgtgcatacattttaaagtttccaaaatatgtaatactcttctaagttgaattctatatatgttttcaaattgttaacatttccattaactttttaactcagatactacttagtatctcaaggaggaggcacgaggttttgatgaggacacagaactaaaggtgccaagtgcaaacagtttattgcataaagaaaataaggaaatgggctgaccatagtggctcacacctgtaatcctagcattttgggaggctgaggcaggaggatggcttcaggttaggagttcaagatcagcctggacgatatagcaagaccctatctctacaaaacaggaagggaggaaggaaggaaggaaggaagggagggaggaagggggagggaggcatggaggaagggaggaagggaaggagggagggagtgaagggagtcagggagagagggagagaggcagggaagaaaggagggagggaagaagaaggaaggaaggaaggaaagaagagatgagctgggtgtggtcatgtgcacctgtagtcctagctacttgggaggctgaggcaggaagatctcttgagctcaggcatttgaggctgcagtgagctaggactgcaccactgcactctagcccaggtggcagggcgggaccctgtctctgttttagaagagaaaaagataacgactaagtgtcatgaaaagatgtgaagaaatacaatgagatgcccgagtgaaggctctgaaaacacctgctcgagttcgaatgtgtgctctgacacctgactcgttaatgtccttggccaagtaactttacctgtctgtgcctcccatgccgatccgtacatgggggatgatgacagtagtatctgccccacgaggggttgttgagaggatgaaagtgggagtaggagaccagaaatgatgatcacagagatgctggttatcttggtcaggccccactcaagggtagctgataattttatgtcttacactggag

SEQ ID NO: 32215 - DNA, 1114 bp, Artificial sequence
  DNA replication origin
ccactgtgggtggattcacccattcccgtcatggtgcctggggctccagcagcctcgtcacaacacagcctggtagttggagggtctgagcctttgttacaaccgccctgacttagccgcaggactatgcacctggtggggactggggtgggcggccactctctcacaggcccaccccaaggctctagatgggcacgtgcattgttcaaatgccgtcataccttgggggtgcgagggggcagcgtgaggcagacgagagaggcggaggtctcacagtgaaccacaggatctggtatcctgcagccggggtgcaggcctgactgtggagcccccattctgggcgcctcacactccctatgactgtgatgcttgccccccgccccccgatgccacaggagtgcacagcaggcctggagtctccttcggagggggtgaggaggccggcggggggcgggggggtgctgtctgtgggccctggcacttccacgctgcctgggtggagggtccctgggtgaggtctgccttggctgaaaagctgtctgagcggccgcccagggaaaggcgagctgcttggacgtcattctcaagctgtaggccagaggttgcctgactttggtgagaatcgctgggaatctggtggccaagcacattcctgggcccaggtgctgggatcggatcggtctggggtggagctgccatgggctggctcctgcgctggggccacggggctgtagagagcaagagaggagaatgggcccagtgtccactccgctctgtgggaggccctggtgccgtccggaggccagattggtgtccactcgccttccttctgctgctccgagcgcggcttctgcggaggggggagctgtggtttctctgagtggttgaaggcagccagcagaaggcaggcttgtcagctcggggtggcaggaccagagggcagcaggggagtagaaaacaccaaagcagcccaggatgctcagaacactcagaggatgtggaggacagaggagcgccaggacccctgccccttctagaatattctaagcaaccagagagggcaggtgcctctgggaggggagctgtagcgagggccctgattggaaccatggct

SEQ ID NO: 32216 - DNA, 1723 bp, Artificial sequence
  DNA replication origin
gccgagaaccgcagcgccgctcgcccgccgccccccaccccgccgccccgcccggcgaattgcgccccgcgcccctcccctcgcgcccccgagacaaagaggagagaaagtttgcgcggccgagcggggcaggtgaggagggtgagccgcgcgggaggggcccgcctcggccccggctcagcccccgcccgcgcccccagcccgccgccgcgagcagcgcccggaccccccagcggcggcccccgcccgcccagccccccggcccgccatgggcgccgcggcccgcaccctgcggctggcgctcggcctcctgctgctggcgacgctgcttcgcccggccgacgcctgcagctgctccccggtgcacccgcaacaggcgttttgcaatgcagatgtaggtaaggagcggcgaccccagcccccgcgcggggccccacctcccccgcgaccccgagggttcgcagacgccccgcccgcccgccgctggccgagggaccccagcgcccgcctcctggtccctcggcgccttctcgaatcctgcaagtggacgcccagagccgactttctttcccccctccctcctctccctttctttccctctctttgccgagatgcgtctcaacctcaaaattccaccgaaattccgccgcagctccagccccaggaaagggagccagtttggcttttggcaggcggcgcgccctgggatgccagcgctgggggcggggagcgtgggggacacggcgtgggggcggggggctggaggactggggaccccaggaagaaactttcgcagataaggtgggagttgggcttctctgggcttggggctgggtggggaagggcttctctgctggggcttctcccaccagccccatttgggggctccccgatcaagccagggtgggatggaagcccgccctacccgaggcaggttccacaggcccagaggggcaggtgaaaaagccggtggcgtctcctggcgtggctccttgcttgcgccctgcccaggaggccctgcaaactggctgggcagggaccgggacccccgaatgttccgctttttcgggacgtccacaaaagctggagactttggtgaccggacccggcacgtgggactgtgctgctgctcagattccccagcaaatacccatgacctccggactcctagcccccaaaagacaggcgccatggagggaggcaggaggggcccagttatttgttctgatccatggagggggaggaccagcagaaatgggaggaacccgctggctcgaagtttccaccctggtcctgcacctcaagcctctgcagccctggtgctggtcagcatggttttcctggggcaagtctggctacacggcaggtggtctcggagccccctgccctccttccttcttatgtctgagtctcagtcgagtgacctgtccagggcagatggagcaaggcgggggccccctcacctgcccagagtggaggtgggactttctgtttctcctgctgtcagccacgcccttcccataccccgcccacggcttcttgccccaccccggttagccctaggagctgcgtgcccagctggggaagttttcagttgcaccaatctattgagatcacaggtctcaggtggctcaggccacctgggcggaaggcttggtgtgtgcctgtgtcagtttccacaaaacccagtttgggggaaatgaggtcttttctccagtttagc

SEQ ID NO: 32217 - DNA, 1170 bp, Artificial sequence
  DNA replication origin
ggcgctgcggttctcggcggccgcgctgccttctacggatgtgtttgctgcgggcttgggccgggccgcagttttattgcgctcggaggattttctgctcctcctcccggtggctggcggccaatgcaggctctgggcgctcccagcagccccctcctccccctccgcccgcgcctccccccagcccgcgcttttgttgtgcccggcctggcacgtcgggggcttcccgcaccacctggcgcccgcgacccgcacccgcgcgggggtccccggacgcccccagccccccgaccccggtccccgctgcgtggccttctgcgcccggggtccctgactcagcgcgggggactcgcgccccgttcttccaggacaccaggcgacccacccgctaccctttccccttcagctcgactctggagggctacgctgctccgtcccccgccaccccggggtcccttcgagcccagcctcggggcgagccaaggggtgtcctttggagcaggggccgttccctgtcgccacctccccgtttctgtgggcgggtggcctattgagaaactgacaggatccctttttcaaatggaggccttagaattttaagtgcgcctggccagtttagttggggggtggggggtgtggttactgtgaacaaaacaggattttatataaactggccatatttttgaccagccaacaagagacgggggtgggcccaggcgcccaggagccagtaggatcgcagcagaggcattggctgggttccgctcacagtttcctctcttagtccacaaatgtgggagccgaaggacttttcccaaaacagttttgtgttccaggaaagacccaggcatatgaagggatgaacatgtgtagggtggtgaggcgggcttcctggctgtgaacctgcctgtgcccggctgtgggcacccaccctgtacatttggtgtgtgccccgtggggctccatggacactgctgcactcaggtcagcactccagccctcaggtcagcattccagagtgtttgcagtccagctagggagagggaagcccaggaaaatgacacaggaagaatcagggcgggcacggtggcttgcgcctgtaatcccagcactttgggaggccgagacaggaggatcacttgaggccaggagtttgagaccagcctggct

SEQ ID NO: 32218 - DNA, 1445 bp, Artificial sequence
  DNA replication origin
ggatgataagaatacacggtagaacacaggctcccacacagcctgaactgtggcagccttcaaagttaggcttattttaaataaatcagtttaaaaaaagcaaaaacagcttctgaacaaatccattgaaaggaagactgggagccccagcaccaagcccctctccggccactggagttagagtgatgctcggtgagacctcaggtgtggccgagggcagcacccgcactcccctgggacacacgtgccccttcagagtgctgtcacttttcagcttttctagcctttaaggataatcctaaggttggggttacagcttgaggagcggggagttggggatcagaggagacttgagagtggtcactgaaccttcaggagctgaggggagggcagccggccggccctgggcgggagccaggtgcgggccggaggggaggcaggtgtggagccgggcgggagtcaggtgcggggtctaaggacaggtgcggggccgggtgggagccaggtgcaggggtgcggcgggagctgggtgcggggcctaaggacactctgcttggccaggcttcaaggccgaatggctggcagtgaaggacgagcgtctgtacgtgggcggcctgggcaaggagtggacgaccactacgggtgatgtggtgaacgagaacccggagtgggtgaaggtggtgggctacaagggcagcgtggaccacgagaactgggtgtccaactacaacgccctgcgggctgctgccggcatccagccgccaggtaagagacgcctgccccagcccacagtgtggcttccacagcccagtcgctgggaacctgcttcctcctgcatttgcctccaaaaccgttttttattttagacatagtcttgctctgtcaccccggttagagtgcagtggcacgatctcagctcactgcaacctccacctcctgggttcaaacgatttttctgcctcagcctccccagtagctgggactacaggtgtgcaccaccacgcccagctaattgtatttttagtggagacagggtttcaccatgttgcccaggatggtctcgaactcctgacttcgggtgatctggtgatccacctgcctcggcctcccaaagtgctggcattacgggcgcgagccaccacacccagcctccaaggccgtttcttgcttgattttagtgattttggttgcctctgatggtggcttccctcaggccagtggattctggcggcaaatgagctgttttctctttcctgccccactcgccctggcagctggcctcctagcatcccagcctgtggcccggttgtctgcactggtgggtcaggccctgtccctacccctggcgctgggccgtggtgttccacaccaacatagggccagcagcactttggcctccccctagtcaggatggagtaggccttaggtgcctgaggttcaggagg

SEQ ID NO: 32219 - DNA, 960 bp, Artificial sequence
  DNA replication origin
aggtgaggacagtggctctccggagtgctgagggagttgaacagggaagaacatgggggttccaggggctggtgacgacgacacctcacgatgtctgacagcagtctatgcaggcaccgttgttctgtgctggcaagcaccgtcttcccgggcctgcagctcagatgtggcagctgagcagctcgatctttggggtgcttgatccaggttgtgggttcataatatgcctaaggtggggcccccggtagagtgcagaggggctgttgaagaagtggctaatggctcacctggcatctctttcccttcagccaatgcgtgcagactgtctgctccctgcctggcagtgcgtcaggtgctggggctgtgacagtggccagatccctgccccaggagcagaaataatcacctagccaggcagggacggtgggagagccggagcggcatgggagggagggcgagtgggcaagtcttcccagggagctgatgccccgtaggagagaccgagctgctggtgcgaagagcaggcccgactgttccaggcagggggaactgcaggctctgccagggccagtgtggtcaggggacagaaggaggtctatgtagccagccggcaggcagaggagatggtacagtgtgagggctgagcgggagcagagtgggttcaccccaggacctgaggaagccgctgaagctgggagtgtgccatctgatggatgctacttcatggcaggtggcgagggagtgtcaggggatgttggtggggggcagctggcagggcaacttcatggcggggggtatgggagtgtcaggggcggagaggcaggaggggtggagggaggcagccggcatggcatggtgaggaagggccatggaagaggacagaacctgtccacggagtcaatgctgaggaaggaagacggaggatgaggccagtcaggtttttcgtggtggcagtgcctt

SEQ ID NO: 32220 - DNA, 823 bp, Artificial sequence
  DNA replication origin
ggtcttcaccttagagggcaggccctgggagaggtcagtgggctgccagcagtgggggccgagaagacctgcctgggaggaggcccacagagagtgcccccctgcctcgaggagggacactgacaatgtgctcactgggtttgccactggtgaaggcttcaggtggctgcttctgaggattagccagagggaaggagagggtgtaggtgtgggtgctcttgtaccatggtgggcgagggggcctgggcgggggtgggaagggacagaggtgccggggactcagggaagggttttccttcattaacagattcgccatttattcagcagcagttgagtgtctgtgggagtgtggggtctggaggtaaaatggtgacaaggtgggcgacttggggcagcctgtggatggaagggaggaaccagaagagcaggtgcccggcggctggggggactgacctgagtggcaggtgtgagccccacccaggggcctcggctgctgaagttggccacagagtggtctcctgggagaagtgggccggagatttgacaggaatggtgaaggtgaggacagtggctctccggagtgctgagggagttgaacagggaagaacatgggggttccaggggctggtgacgacgacacctcacgatgtctgacagcagtctatgcaggcaccgttgttctgtgctggcaagcaccgtcttcccgggcctgcagctcagatgtggcagctgagcagctcgatctttggggtgcttgatccaggttgtgggttcataatatgcctaaggtggggcccccggtagagtgcagaggggctgttga

SEQ ID NO: 32221 - DNA, 1049 bp, Artificial sequence
  DNA replication origin
atctacacactaggcgggagactgcatttggcccacgggtggtagtttgcaaccctcccagcaggcgagagggtacttgtagagtgagtgagaagcagtagcagtcagcccctgtgcacagttctctaaccccatcagcatggctccgggaagtaaactgaggccaagggaagtcccttggctgagcccagatggtctatatcaggggtgtccaatcttttggcttccctgggccacattggaagaagaattgtcttgggccacacataaaatccattgatagctgatgagcttaacaaaaaatctcatctcatcatgttttaagaaagtttacgaatttgtgttggaccacatgttggacaagcttggtctagatcattagaccaagactctgagagtcatcagggtgagatggaactggagccgaggctgtgtggatggggagaagggaagcgagtctcaagctgggtgggacacgtggggctggggagggaggagggttaggacgaattgcttcctgggatggctcctgagggccggcactgccaggacagggagttcctgaggaggacctggtttgcggtgcctgtgggtatcggatgaggaggctcagagactaggtcaggctagaaaggcgtgggggtcttcaccttagagggcaggccctgggagaggtcagtgggctgccagcagtgggggccgagaagacctgcctgggaggaggcccacagagagtgcccccctgcctcgaggagggacactgacaatgtgctcactgggtttgccactggtgaaggcttcaggtggctgcttctgaggattagccagagggaaggagagggtgtaggtgtgggtgctcttgtaccatggtgggcgagggggcctgggcgggggtgggaagggacagaggtgccggggactcagggaagggttttccttcattaacagattcgccatttattcagcagcagttgagtgtctgtgggagtgtggggtctggaggtaaaatggtgacaaggtgggcgacttggggcagcctgtggatggaa

SEQ ID NO: 32222 - DNA, 960 bp, Artificial sequence
  DNA replication origin
atcagccggccttaaagtagtgagatgatcctggattttcccagggagcccagtgtaatcacagggtccttaagaacagaagagggaagcagaagagccggagggagatgatggccaagagccttggggaagtgcagtgggcgggctttggagggggaggaggggccaccaggcagggaatgtgggtgcctccagaagctggaagaggcatgagaatggagccatggcccgtgtgaggcttctgtcccacaggacggtgcctgctgcctgccgtgtgctggatactaggggcggggacaggtgcagaagtcagtcagatcctgagcttgacctttaaggagcgtgctgtctgtggaggcaggatggcctaaccagactccctgtgaccttcttcctttctggtttccttgtactgcccacccccgaggagatttgccgtggaatttgcaggtacaatagttagccttgcaagtgccaaagcaggaatcaggtaacgttttcaaggagtctggcccatagcaggcattaataagtgtttctttgagatgcgccacccgtgttctctcaggcgctgttagcatgagtgtgtgaaggccttggcttctgccttggctgtgctgaagagtctgtaggtcagtggggtttgctctttaccatggcagtgaacacagtgggcactctgaggcctgcctgcctgctctctgggtgtgggaagggaaaggaaggtagctcttctccagagataaggggttggcgcacctgccacctgcctacccgtcccttccaaggaggtgggggctaggatgtggcggcctcttaacaggatgatgtggcttcctgccctgcctggatcctgaaagggaggagcctggcagccctcagtaaacctgctggttctgccacctgtcctattccactcctgcaggaagctggagaaacaaaccctcttggctgtctgct

SEQ ID NO: 32223 - DNA, 987 bp, Artificial sequence
  DNA replication origin
tcctggcgattcggcctttgtgtcccgggagccgagcctggaggaaagcgtgaggagagaaggtggcagtaagcaggtgggctcgtgcaggtgccaccgcggtgtggaaggcagccctgatccaggtccatggggcgatgatcccatcccgttattttcacacactctggaaaaggacaccttcccagatgtgtggtgccatttggaatgtgcctttcaactgagaaggtcgccttttggctaaaattcctccaggtgtaacatcgatgatacaaattaagcagacacagcctctttacaaggcagtaactgcaaaccgtagagggttctgaagctgtgcgcccacaccatagacagtgactggtcctggcccttggaaaaacctggaggctctttcccctcttcctcctgtgattggtggaggaacagctccccgagatgtccacgtcctaccttctgagcctgtgaatatgttacattacatggcaaaggggaattaaggttgctgatcagccggccttaaagtagtgagatgatcctggattttcccagggagcccagtgtaatcacagggtccttaagaacagaagagggaagcagaagagccggagggagatgatggccaagagccttggggaagtgcagtgggcgggctttggagggggaggaggggccaccaggcagggaatgtgggtgcctccagaagctggaagaggcatgagaatggagccatggcccgtgtgaggcttctgtcccacaggacggtgcctgctgcctgccgtgtgctggatactaggggcggggacaggtgcagaagtcagtcagatcctgagcttgacctttaaggagcgtgctgtctgtggaggcaggatggcctaaccagactccctgtgaccttcttcctttctggtttccttgtactgcccacccccgaggagatttgccgtggaatttgcaggtacaatagttagccttgcaagtgccaaa

SEQ ID NO: 32224 - DNA, 815 bp, Artificial sequence
  DNA replication origin
cgcgcgcgctcgccccgcctctgggcccgcgttcccggcagcctctgctctgcggctgcgcgcggacggcgcgagggctgctgggagctgtggtttgtgtttttttgggttttttttttgttgtttttttgtgttttttttttccgtcctgcgcctgcgcgctggaggagcggccggctggctgcaggctggaggggcgcgagggtccgcactggcacatgagggccgtcttccaccgcgttgcgctggaacgtgggcccagcagatcttttggggtgggaggcattgaggggggtgaaggctactagggagggaagttctcattctccgagcgagggcccccttacatgggcctcccgaccctcgtagtcttgggaggcggaaaaccgtgggcccctttctgccatcctcattctcaggcagcccctctccttggcccttcaaaacagccgcctccagagtgctgctgaccagttgccaaagccaggatcagggaggtctaaggctgtagtgtcctggggtggggacggtggggtgtttccctgcaaaaaatctgcagttgacaaacctgccaaacaagggtctctgatttctcctttcccctccgtagccctagcccccgagatattttagggcactctgttaaaaggcttccccggccccgccctcctccatcccaaagttctgagaaaggcctggtggccgtggagcctctggcaggagagcttggcagaagggtgcaccagccccctgcccatctgcaccttcagctttcctgcttgataccagctacttcccccagctctctcaaaacc

SEQ ID NO: 32225 - DNA, 912 bp, Artificial sequence
  DNA replication origin
ctcttcctttactttcgagaaaccgcgcttccgcttctggtcgcagagacctcggagaccgcgccggggagacggaggtgctgtgggtgggggggacctgtggctgctcgtaccgccccccaccctcctcttctgcactgccgtcctccggaagaccttttcccctgctctgtttccttcaccgagtctgtgcatcgccccggacctggccgggaggaggcttggccggcgggagatgctctaggggcggcgcgggaggagcggccggcgggacggaggtaggtggccgggccgggggacccagcgctgccccgccccatcctcgtggcttcagcctggtggccagggcggggatggcagacacctgggccgggacggacggagagcgccgtgggaggggccggttggcggtggcggcgcaggggcggaaagacccgggttttcgggggcagccctggcgtctggctctggctcagcccccgccataggcgcctttgcgcgggggtcataatggtcccgggtctccctgactgtggaggagcggggcttttctgcacgtggatactaacgggaggaattgcaccttccccctagttttttgtggggtgtttatcttgtttcactgttctctggtgcctttctgagggtgtggaaggaagaggaatggtactaatgcccgcggctgcacctggcggggatgccctcaccccactccttatcactgggaccacctgaccgccgggtctgtccagtcctgtctgtggccaacctggaccttcacggaataggaagcgctgactttggccccccgcatctgacagccttggtgtcctggagggggtccagcttgggcaggaaaaaacggtgttgcttccccggggccctcctgggaagcgaagctgcctgtgccgc

SEQ ID NO: 32226 - DNA, 1312 bp, Artificial sequence
  DNA replication origin
cagcttgcagccaccttcctacccacctacccaccggtgaaggacctggtcattgagccagctttgctttgagttaagggatgatgatcattcaaagcttgcttgggatttttcttactgtcctaagaggggtggtatacaattgtctgtggggccagcggctgatggactctccttcccgagaggctgggtgggcagagacagcaccttgctcagcaacccctcaacaccagcctgactggctgaggctctgggggcagagtgtgtgcgcacatgtgaaggtgtgtgtacatgtgagcgcatgtgtgcatgagtggatgtgcatgcatgtgaatgtgttgagagtatgcgggcgtgcacgtgagtgtgcatgtgatgtgggtatatgtgtgcatgttaatgtgtgcacgtgtgttgaaagtgtgcatgtgtggattgcatgtatgcgaatgtgcatgtgtgtggattgcatgtatatgaatgtgtgtgcatgtgtgggttgcatgtgtgtgtgggttgcatgtgtgtatgtgtgtgcatgtgtgcatggattgcatgtatgtgaatgtgtgtgcatgttggattgcatgtgagtgcatgtgatggtatatgtgtgtgagtgcatgtaaaagtgtgcatgtgtgtggattgcatgtgtgtgtgaatctgtgtgcatgtgatatgggtatatgtatgcatgtgtgtgcatgtgtgttgagagtgtgcatgtgatttgggtatgtgtgcatgtgagttgtgcatgtgtgttgagtgcatgtgagcatgtggattgcatgtgtgagtgcatgtgtgtggactgtgtatgtgcatgtatgtgcatgtgagtgtgagtgtatgtgtgttgactgtgtgcatgtgagcgtgtggattccatgtgtgttaagagtgtgcatatgggtgcgtggattgcatgagtgtgcatgtgatgtgggtatatgtatgcatgtgtgtaggtttcattgttgagactgtgcatgtgtattgtgtgtacatgtgtgtggattacatgtgtgtggattgcatgtgtgttgggtgcatgtgaatgtgtgggttgcatgtgagtgtatgtgactgtgtgtgcatgtgtggattgcatgtgtgttgagtgtgtgcatgtgtgggggttgcatgtatgtgaatgtgtgtgcatgtgcgtgtgtgcacgtgagtgcgtcgtgagtgcgtgtatgcatgcatgggtgtgtgagagtgattgtcctcccagaagctgtgtaactgcagcatttcccagtggcgtgaggctggggaagcacctccgatttccaggctg

SEQ ID NO: 32227 - DNA, 1041 bp, Artificial sequence
  DNA replication origin
cctggcttggagtctcttcattattttgagcgttgggctgacttgatacttgaggcttcagactaacttcagtgtacgatgggattggacaggatttgaggttgagtcacatcattccgttctttcttcctctccctcctctttctttgattgagcccctcctatcagtcaggccatcccccaggcacggggggacacatgagtggcacagtcctggcctccaggagctctgaggccgagagggagatagacacatgagagacagggcagcgtggtgggctttgtagtaggggtgtacccatgacgctggaggcagggccaggagagggaggagcgggtcccaggaagactgaaaggagtgaactaggtcttgaaggacacctgcgggcctcccaggtgcagaaggaggggaaagctacctggtagccagaatggggtgtgcaaaggcatggctggtggtgtttgttgggctggtgggtggtttgggatggtgagacccagtgctggaggctggaggctggaggacagtagggcagttgagcctggaggcagctgggtctagttggggagggtctcacctgaactcaatcctacaaagaacaagaggaatcatgggaaagcttgaattggacggtgttctcggaagaatgccagagggaggcagcagagaggatgagctggtgcggggaggggcagattccaagtgagagtcgaaatggcaggggtgcatcagagatgatgagggccctgggctcagttctggaggtgccttttggctgggagcccaggactctgctgaaagttgtgccagggggttggcggagggagtcgggggtgatgccgaaggctccaccctgggcacccgctgttgatgccaggaacagagctcagaaagagaagattccaggggcgaagggatggggacaggggtttcggttttgcatacatgacatctgtggggcctgttgcatctccagatggagacttctggtgagaagtttgaagtcaaggtctggggcttaggagagaggtaggggtgag

SEQ ID NO: 32228 - DNA, 1434 bp, Artificial sequence
  DNA replication origin
aggagcccttcggctgcttctaccaacctggagccaaggcagggggctcagctgtccctctgggaggctgacgcctggggccccagcccccatcacctcgcagctgtgactcagaaagaccagcagagcccttgggcaaggccacagggatgtcagggtccacctatccctcaagaaagttcctacgtggcttaaaagaattaagccagaggtagtttcctgcccccggcccctcccctgaccccagagctttaactttggatcttctcttaagcagagtctcaactgaaaaggcctctctcttgggagccagcaggctggctggaaagacaaaaataacaacccttttctttgtcctccacggtttactttgctccttttgagacctttagaatttgcctaattatttccaaggactggagccgcggtgccgcaccctgggacgccctgccgccacccgcgtctcgccgtgcggggtcacttgaggatgtgtgcagagagggccgcggaaggtcccagagggttctcgcgggtgccccgccctggtgatttcatctgccgtcagctctctccagaggctgcgggatctgggagcaccgatcgctttggctttctgtgtgtgcagggcgtctcactgaatgccaaagccagggagtcggagtccagggatcggggaagaggcggtggggtcagcacagcgcaggggtggaaggtggcgagaggaaaggaggtggccggccagctagggctcggtggcgtgcttgaccaggtagccactgaaggtgatgtaggtgtccagctcctcgctgaagatggcgttctcacgttcgcccttgtagaggcgtacccacacctggtcctgctctcgcagctccagcatcaggctctggctttgcatgatgctgcggtcgcccacctgcgcgaacaagatcaccacctcctcctcgttcttcatgatgtgcaggtaggtctccttctggttccaggtgtgcacgttgaggctgaagaagtagaggccgggcacgtagcagtagaacttgccggtgaacatgttgaagtggtcgtagaggttcacgaactccgtgtcgaagatcaccgtctggtagtagtggttgctgtgcatgggcttcttccggcccaccgaaaaggcggcgtagtggctcttgcaccgctccccaggggcccccatggagcccttctgccctttgggtccagtgtggcccctggcccctgctgagcctgttttgccatatttcccttggaggcctcgatctccgcggtcacccttctcccctaaaagggatgggaaaacgcgtgctgttaatggagcaatccggtagtgtcctgagccttggctgctcactctccggtccctggcgctgtcctgattcgtcctcacagccctgacctggcagaagcttcactcctgccccc

SEQ ID NO: 32229 - DNA, 2027 bp, Artificial sequence
  DNA replication origin
gcccggcagtggcgcgaggacggcggggcggaccggggcggaggggcgctgccaccctctgtcccttactgtgcacggagcggacacaggcgccggccccccgcccctcggcgcgcccgtgccgggaaacctcgggccccggggccacggactctcagccccgcggatcggggttcacgcgggccccgcagccccacctccttcccggccgccgccgccgcggccgcggctcctgatcctcctgctcctcctgcgtccccgcctccggggccgccagcccctgcagctgccgccgccgccgccgtgtagccgaccgggtgaccgtcaccgccgcggcctccatgacactgtccgcgcacgccgagaggcaatcgcaggcccgggcccgcccccgcgccgcgctcggccaatgggaagtgcgcagcgctgacgccgcgctgggacgggactccgagctgactcccggccagcggccgcgcggcggggactttgttgaggcgacaggccgggggcggggccgaggacggggcggggctgtgaggggcggggcctgggcgagttccgagcccagggttcgtcgtcgttcttgttgttgcccatcattggctatgagtccagggtgctagaaggctctagaaggcttcggaacgccccaatcttagagttctctctttagcctcaccagcttcctttgtcaagcaaaccgaggtttatcccagagagattaagcaatctcccagagggcacaaagtcagcaaatggtggcaatgagattttaactcatgcagctaacccctattaaaagataattttcagaccgggcgcggtgactcacgtctgcgattccagcactttgggaggccgaggcgggcggatcacctgaagtcaggagttcgagactaccctggccaacatggtgaaaccccgtctctacttaaaatacaaaaattagccgggcgtggtggtgcatgcctgtaatcccagctacctgagaggctgagactggagaatcgctggaacccgggaggcagaggctgcaatgagccgagacggtgccattgcactccagcctgggcgacagagggagactccgtctcaaaaaaaaaaaaaaaaagatgaaaggttagtaggttagtatcgggccatgtggaagctggtgtcctatgtaggatgcatagttttccagtgaaacacggatttctttctacagccccacgcctgtgcccaacagtagtagttgctctacccctaagcgtgcagggcctggagtggcacctctgcaagagtggcactgcccagcgtcttaggcacaaaaggagttcacaggaaacatgatagaacagagccctgagaagccagaactcaaggctgggccccacagggcaaaccaaggctctcctccctccaggccccaacgcccctccacagctaggagcttccagtgctgggctgcagctgccgcccaagccaagttgactgggcctttattattgttgcagactttgaactttatgaggctccaagcttccataaacgccaatggtgggaactatgactaaggttgttgaatatgggccatggtgcaggccagccagttaggcaggaaggacgggccactcagaagcaggacacgctgacccatggggaggacagagaaggcagagggctcctctttggggcttcagtcctgggaagcttacagtgagcgagggcagtggatccccaagttccctcctgctgtgttcaggggtgcaccggacgtggacagtcttgatctggggtgcatgtaaccaggtgttcccaagccctcacctgcagcttagcaataaaaatagataaactttcatcctacccaggttagaacacagttctaagggatactttgaacagcctttgggtaatgctcagtctctgggagaaaatatgcccaaacctcccttttcttctctcctttccaaagagtaggcacctggtctagaagagcaagaaagtgaaggcagccttgcacgcccctgaggacagaaagg

SEQ ID NO: 32230 - DNA, 1469 bp, Artificial sequence
  DNA replication origin
gcgggggcgggcccgggcctgcgattgcctctcggcgtgcgcggacagtgtcatggaggccgcggcggtgacggtcacccggtcggctacacggcggcggcggcggcagctgcaggggctggcggccccggaggcggggacgcaggaggagcaggaggatcaggagccgcggccgcggcggcggcggccgggaaggaggtggggctgcggggcccgcgtgaaccccgatccgcggggctgagagtccgtggccccggggcccgaggtttcccggcacgggcgcgccgaggggcggggggccggcgcctgtgtccgctccgtgcacagtaagggacagagggtggcagcgcccctccgccccggtccgccccgccgtcctcgcgccactgccgggcagcggcctccggcccccgtgcgtgacccctgcctatctcagaaatacgggtgcaaacccgagtggccgcggggcccagcgggaatcccgacgccccggccagacccctgcttcccacgtcgctggtctatgcggaagatcccggcggcggtgctcatgcctggctcagtggatgccggctggtggaaggggtggccttctgtaggggtgacactagaactgagtctttggggaggaggaagccttcagtaggtggagaatagggagtagggtatccaactggcggggaacagaaagggccaaagcacagagacagaaagggacgaacatgcccctctgggctgggcttccttcctttggggggcacttgcccacccggtaaactccccctcagtaggttgcagggggagaagttaggagcacagacatggcttccggaaacagcagccgtagctttgtttctaaacccaaagcagtgagactgctgagcatttcagacctcatgaagatgggatgaaggctggctgctgggaaagatatttttggacaggaggaatgtggagatggctctttccctcctagtggaggaatgacaggtgacaaaggtgacctggtgtgggattgttctgagaaggtctgggagggggtggctgaagtataataaggacatcaacgaggaagggggctttggaaaaggaaggtggagaggaacaactgcggcatctctgcttgaatccgtccccgacccctgcagttctcagggtctcccaatgtcattctggaggccctgggtcagtgtttggtgatggcagatgctacagaggactctttgcaacaggcctctgaatggcagtggagtgatggcagatgacaactcagtgaacaaagaagtggccttgggcgttggtagatttagggaatctcaacgttggtgccatggcctctaaatagccactgcggtgtcttcttactgctcctaaaataataatgattttttaggccaggcatggtggcttatgcctgtaatctcagcacttgggaggctgaggcgtgtgatcacctgagttcgggagtt

SEQ ID NO: 32231 - DNA, 993 bp, Artificial sequence
  DNA replication origin
acggtgaaactccgtctctactgaaaatacaaaaaattagctgggcatggtggtgggcacctgtagccccagctactcgggaggctgaggcaggagaatggcgtgaacctgggaggcggagcttgcagtgagccaagatcgtgccactgcactccagcctgagcgacagagcgagactctgtctcaaaaaggcagagttctcttaacatcctgagcctcagcagacaccatggatgctgggcgagggtttcaggtcaccatctgggctgctcgctgcccctggggaacaggccatatcctaggtcctggaggcagctcccagcctgtgagttgcaggtgcctctgagatctaggaggggaaaggctgagattgtgcaggtggagggggtggccctgtccctctgggctctaggaggggaaaggctgaggctgtgtggggtggggtggggtggggtggggtggggtggggtgggcccatccctctgagtactaggaggggaaaggctgagactgcagggttggtgggggtggccccatccttctgggcctgggcctcacagcaggtccttgttgcttctcagggtcttctttgattcctgcgacggcttcttcactaactataactggcgggaggagcacttggagcggatgctggggcaggctggggagcgccgggctgatgtgtacgtgggcgtggatgtgtttgctcgagggaacgtggtcggaggccgattcgacacagacaaggtgggtggtggctttcgtccaagggccagcggcccagtgcctcccctgggacctcatttcctcatggaccttccattcccgtctgcacctcaaaggaatgacagcagctgttcttcccagagtggggatcccgtggcactgagaaacaggtgtcctgccccggccaagctatgtccccactgaaacccctttcccggctatttctacaatcagataatgtatttttgtgtgggtgttaccagacag

SEQ ID NO: 32232 - DNA, 2365 bp, Artificial sequence
  DNA replication origin
ttgatctttgtggccagctgtgccagggggccggcggggctgaggggtgcgggcagctttcatcccaggggctccactgggccccgtcaccctcctgtcgcgtcccctgcgtcccacctccctcctgcccggcagtcccgcccgtgcccccagcctggcgaggaagccgtccaacagtagccccggggccagctcccaacagaaagggctgacgtggctccaggactcaggggcgctccatgggaggacgaaggaagcccagccagccaggagccactcctcacacctccaagtgtggccaagtgggccctgaggccaaggacttacttgctcttcctggccatctctccctttctggaggaggcccggggcctgtgtacaccaaggctgacctcgtgctgcctgctgggacccagccctccctgccgctcccctgtgagcccagtccaccgtgggcgcccagggccagggacgggccagcgcccggctgcatcgcgaggttgggagtcacagtggctgtgggcctggacgggcacagccagagcaggggcccatgggaagggcaagggatggggaagcctgggccggccccttccctgctcccaaggcaggtgtccaggtggcgggagcagcaccaaggacagccaggcttacccggtgggaggagcaggagcagagcaggtggcagggaggaacccctggcgaggcagggagcactgaagtagggaagcagcaaaaaatacaggctcccaacgtggctccactgtctcatgaagtgtcaaaaatttaaaaatacacctcactttctattcagcatcagctattgaaatggaattctccttttctattcccgttgtacatagccccacgccctgcctccggctttgtcctctgtacagagccccctgtcccctctgctgttccggacccttttcttgcagcagctcaaccccccgactcactcagatccccaggactgcagccgagccccgggcttcctttcttaccattctgtatgcttccaaggtgtgaccattcaaactaacagtattattaagattattaataaagatttctttcttcaaaccaggacaactctgtatgctctggcagctcccgggcatggtgggtggagggcatagcggcccagggtgcaggacgggggccaggacgggatgcagccctgccttggcctacagccaggtggcaatggtgtcagaaggccctagactttccagtcccaatcctcaagtccaggctggtcgtctgcatcccaccccaggataggctgggtgggtggcagctcatggcatatctgtgctgcctggcctgcctctcggactcaggtcgaggccagccctggtcccttctttcctggttacagcatgtgctggacacagcgtgacctcagagcagaatgcaccccaggaagcagaaaggttagaactggtgaccacacagctgtgcttggtcgacccagtgcaacaaagagcacggagctgggagggtggggggacatggcacagaggcatagatggctggtgctccagccagttctgcacgcctggtgtagcctgagttgttggggcccacaaggagccatgttgcttcaaggtaaacccacttcgccagccccagtcacccctcctggaaggtgggtaggagctagagcacagctgcaaaggctcagctgagcggggagatgggaagacgagtggcagaacctgaacccagagctcagaagcctggggctggggccagggctggacagggagccagcatccagggccgggctggtgctgcccgcgccccatcacaccaggactcgactgcacgcttcacattgtcagatcatttatttcagcgcagttacacccagcagaggggcacaggcttaaacgccggcatattagttttcccgcacgcgagccctgcatggcggtgggctggggagccggggcggtgcgattctgccacacgccacgctctactaggcccccttactcctaattaattgcctgctcaccagactgtgagaaaataattgccactataaattttccctcctctgcataaaatattcgggggaaccagcacttaaaaaacagacttcatgaaagaagggcagcaaggcgtggatgctgcgccccccacaacccccactgcagaggacacagagaggccaggagccccttcctggttccccctggttccaaatgagacagaaaggctcaaagagctcccgggaatggtcacagctgaaaaaaagtcgagtgagtggctacatgcggcagccgcttgtgttcacctgccgtccacccaggacagtccccggcagcagcttgtgttcacctgccctccaccc

SEQ ID NO: 32233 - DNA, 1375 bp, Artificial sequence
  DNA replication origin
acagcccagaccccttcctgggacccatcacccctgctattctcgactccctcccacacatgcctcgtcttctccatcccaggctgcccctggacagcctcacccaggcatatgtgtggaaaataggtgacttcgtgcccagagcccccctccctgtcggcctcgtcctccaggggcacacgggccccatcagagacctctgtactctgcagcattgaggactctggcctcgggggaggggggcatcatccaggaggggtatgtggccatcttggtacccatgcctaggtgggccttggcagcctcagggaggagggggcatcctggagtccagcctcttagctggttctggtcagagagcactctgtggagagtccaccagggagctgctccagctgtcctggggtgcctgggagcctggggctgggtttatgggaacagccacatgaaggatacaggccagcaggcctgggtctggggtcctgggccaggcggggctttagcccgtgctgggagcagtgggggccaaggctcccggagggcaggcagcatggtggagagaggaggctggggcggggggtgccgggggctaacggagcagggcggggaggagtggccagtgggtcttccaggaggctaatcctccctcttcctctctctccttccctctttgaacaggtcaataatgccacggcccgagtgatgaccaacaagaagacggggaacccctacaccaacggtaaggggctgggtccccccacaaggctgctggggtcactggctgggacagaggccctgggggagctgaggctgctgcaggctgaccttcctggatcctaggcagcctccgtccccagtgtcccagccctggggctgccgctctgctcccggtcagaagcgggtggggcagaagaggcgggaggagagctgggggccactcacccctctcatggccccatacagtcagccatagctggagtctcactttcccaggcgtgcctggcccccagaggccacacgtgcaggcttctgatccagggggatagctgtgccttcctggattaggactgactttcccccagggccagagtttgaaggcttctgtgctgagacctgctgcaccgattcccagtgtaagcaggctcagggagggcagtgagggcacggggggccttggatgagcttctagacctctctgagttccagtctcttcatctgcaaaacaggaatagtgacaccatcccccagagctgttcgatgacaaatgacacctttaagcaccatgaggaagggcccggggggaggtgctcagatttcggaggatgtgattacagtaactgccttcctggggctttttgacatgggtggccctgag

SEQ ID NO: 32234 - DNA, 905 bp, Artificial sequence
  DNA replication origin
tggacccctggggagcagggaaggaggggacagagcgggatgggtgtcagggagggacccagggcccctctccctgctcctccttggggcctggtctcttcctctgccctggccattgccactgctgcctctgcttctacccaaacaaggggtggagtggggccaaggtgggggcaaactgcagggcccagactgggccatgtggggacaggttggggacagccgctgctccatggtgagcagggtctggggattaatggctccttggccgggtgggctggccatggtccttgaagctgccaagccccaaatacaggatttctggggctcctccagtgtctggttggggacagcgcctctcctaggaaaaggagggaagaggcaggggagaggggacctcgggtgagcctgaaggggtgacaggtgatagggctcagccggcagctgagcaccctggccttagtgcgacccttcctcccaccccagggaaccctggccaggctctctgaagggtgcggcagtggcagggctggttggttgggggagctggggggcaggtgggcgatcttggggcatccctgccgcagcacacttatctgagcacctcaattttccgtccctctacgatcgtcccattcagcttctcccgggctcggtcagcatctgagctagtttcaaaagttacaaacccaaaaccctgtgagcagaggagagggaaggacaggcacggagaggaggacacagggcgagaaagaggaggaagacgaggaagaagaggagtgggaggggggcaggggagtggggagagagagagaaggggttgagtcaggtgagttgaggcagagacgcaggcagcccagaggtctgtcctagggccaccggcaggatgccaggaggggtatggg

SEQ ID NO: 32235 - DNA, 1378 bp, Artificial sequence
  DNA replication origin
cccaggggggcagctgctgacccagcctgagcccagcctgagctgatcacccggcatctccaaagggacaggccaaagccacataagagacgccatacctgaccacaggccaggcctgccccctgaaccccaccttggggtagggggcccaggctgggcttcaggacctgcaggggcagcccacccatctccaccctcggagcccagggtagagggtcgtgccttcctggaaggggagtagggcttgtctccgccggacaccctccccagcctgccctctctgtagcccctccctcaagcttcaaggccagtggtcccctggggtaagtgttcagtgggggtggggcccggacctggggcccagggctctggggtgcaggcaagaggtcctggtggctcagaaagaaaaagcggcagcggcagcaacaacacagacagctggggtgggggcggggcgggtgggggcggaagagcggggaatacaagcacccgtgtcgctcaggggtcctcgggcgcgaagctctccaggaaggaaacgcacatttcacacgttagcctggcgggacctacagccggcgctgtaaggcggcagctccgtgcggcacccaccttggagccccgctcgttaaaaatgatctccacgtctaaaatttttccgaattgctgcagagacagagacaaagagggagtggggcagacaggaaagtgcgggttaagactgctggcccagctgcccgctccactcctgagacgctcatgcctgtgctctgccctcggcccccagcttgggaaaggagaccggggaccccctcccacccctggccatggagcagctgggacttggccacttggagaaggcgatggtggggatagggtgcccaaggcatcaccaagagggtccttggtgtggtgtggggacagggacagctctcccagcctctcctggaggcccgtgtctcccttctgccttggggagcttttactgccaggacactaactccagctgccagctgggcatgggggtaggcacatcaccagtgtcccctcctcaccctgctaggacatggccacttggaaagggttacagtggggatagggtacccaaggcatgactgccccacccctaattcacactaaagggtaaaggtctgctttgagacccttctctaaaggatgggggagagggagacagagggacatgagtgtccattagggacaaagtgccacagagaagagaaagtgctggggtcaggaaatggagactgaggccaccggagagcaggacccctggttgggaaatgggaccctcaggcctccctgagatggggaggaggttgggcagggggaaaatggggttgagggtgtgagggcaagaggg

SEQ ID NO: 32236 - DNA, 1024 bp, Artificial sequence
  DNA replication origin
ttccaggaaggcctttccggagctggggcccaggctgtctttgaggatcctggggtggaggagacggagaggtctgaggcatggggatgggctgcaggggccactgctctctcccatcgacgccatcagccccaggtcctagaacggaacaggctgcctgtgtgggcccccgggcctggacaggaccctgccgtctaggggccggctctgccacagctaccagtggggtgggtgatgtgggggctggacaggcactccaagctccccctctccactgccctggccacaccaactgccagggcagcccatgctcaccagcagaaggaagtccccttgggcgagagggcgggaagccccagtggcctctgggtggcatctgggtccagggagcgtccagggggttgtgtgccctgacctggtgccaacctgggcagcaggctctcggggggggggtgggctgggtaggacttcagggatggtggggaaggaagagaccagggtacttggtggctgcacacgggccctcgagtgccccgggagctcaggaagacactctgacctaggcaggtctggaccaaagctctgaactcatcccacttcctatcccgaagatctagaccacaataccaggctgcttggggcagggccaaggggaggctcgagtgagctgaaagggccctgctgatgacccagggacagggtctggggacacctgagccagcagggaggcgttcggccttcagctgtgagtgccgggcagcctctgggaggaaggagctcctggaatctagaacaccctctccagctgccttccaaggtaggaaggctctgcatgaacaaatactccaaggttggggagcgcatggcctctgaggaggcccaggtctttgttcttcgtggggcaccacgccgatgccgtaacttctgcctgcagccctgccctgggtgcaggtcatggaggatgactctctcctctgggtccctggatgaaagatctgcagaccatgaccctgaaccctctgcc

SEQ ID NO: 32237 - DNA, 1404 bp, Artificial sequence
  DNA replication origin
gcccagttccggccagcctcacggggaaggagcccacatcccggtcagcaggagaagatgaatgcttttaattcagagagctcttcacgagccaatgagaaggtgtaaatcgtccttccaggccctggagcccagagctggcacccagtcacagcaggaagtgcagccagcagggccaagatgcggctgggcaggtcatctggatgacaggtggacctggagacatagtcacctggcatgcaggcatccatagcaagctcttcctcctctggggtgggcacagccctgcctgatgcctgtgtatctgtggtctccctgtgtcggggtggggggggccctgtgtttgtggggagggtgccttaggtgagtgtgtgaactggaatgtgtgtggacatgggtgtgagcccaggtgtgagcatgccaaggcaggaccgtgaacgcatgtgctgtgcgtgtgtgggtgagagtgggtgtgaacatgtgcttgtgtgcatgtgtgtgtgggtgaggggtgtgaacacgtgctgtgtgcgtgcgtgtgtgggtgagggcatgaacgcatgtgctgtgtgcatgtgtgtgagggggtgtgaacgcatgtgctgtgtgcatgtgtggggctgaggggggtgtgaatgcatgtgctgtgtgcgtgtgcgggtgagggtgtgaatgcattgctgtatgcctgcgtgtgtgggtgagagggggcgtgaatgcatgtgctgtgtgcatgtgtgtgggtgagggggtgtgaacgcatgtgtgtgggtaagggggcgtgaaggcatgtgctgtgtgcatgtttgtggatggtggtgtgaacacgtgctgtgtgcatgcgtgtgtgggtgagggggtgtgaacgcatgtgctgtgtccatgtgtatgggtgagggtgtgaatgcatgtgctgtgtatgtgcgtgtgtgggtgaggaggtgtgaacacgtgctatgtgtgtgtgggtgaggggttgcatcaccatacaggtgtaatgtgtgttttggttgtgtgtgctcaggagtgagcatgcacagtgtatatgcgtgtggatgcagtgtgggctgtacgtattacctggacatgactgtgacatggtgtgtatgtgcatgagcttgggagtgagtgttcacagtgtgagagtgtggagtgagtgttcacagtatgagagtgtgcactgtgtatgtgtggagtgtgtgcgtgcgggtgttcacacctgcgtgtgacatggtacacacgagcgtgctcgggtgagtccacacagtgtgcgagtgtgtactgtgtgtatgcacatggggaatacaggtatgtagaggcatgcacggtctgagtgtgcgtgttgcacacggatgtgtgcagtgagtgtgcaggcatgtacaggttgctcctgcggtgggagtg

SEQ ID NO: 32238 - DNA, 1127 bp, Artificial sequence
  DNA replication origin
tgagctgagcttccactgagcatctctgagtgccagggtgaggggacagagatggctgccagcctcctcctctggggcctggagacaggagggggacaggtgttataataagcagtgacagtggctgcgctgaggactcaggctaagtgccagggtggggatggggatgggggctgagggtggggatggggatgggggtgggggtgggggatggggatgggggttgagggtggggggtgggggtgggggatggggatgggggttgagggtgggggtttggggtggatctagttggaggcagacaaggagggactctcaggtatccacaggggaggggcaaccaggagctgcccttgaggtcaggacaagagggtggtgggcagcggtgggcggcagctgtgggccacgacctagagcagcagccacgtcccaggagactgaggccctcaaggcacaaagcctcgtggggggtcctggctggggcccaggccactctgcttgggtaggacgctctgggtcaaggggcagagtggctgctgtgggcctgggacacgcagacagtagaggcctggccgttctctgggctctgcaggcggccaaccccctaactcagctccatccgcaacccccataccctgttccccagcccaggaggttccttcagtgcctcaacctcaccctggtcccgcctgcccatcactcaagataggaggcagctgaactgccggacactctacaggtggccgcgctggctcaacttctttgagaaccaggggagacaatgggaggtgcagggccaccagagctgtcactgaagtaggggatacctgaccacctctgggggcaaggccaggcctgccaggggcaggggcaacagattcacctcccatctcctcctttccccagcaaccccacacctgccccacattcttagccagagaagaggcaggtagggatgggcacttccgagaaaagaggggggcagggaactgcagaggccacagggtgcctctgactggccatggggcctcaggggggtcacctcagctcgagcctcagtgtccccgtgtgcgcaatgggaggacgagggcttgctcatgcctagcgccgcctgcgagggagcctca

SEQ ID NO: 32239 - DNA, 855 bp, Artificial sequence
  DNA replication origin
ccctgacaccgaggcttagctgggctcacacctgttatcaccccaccagccccaaaaatgggcttctcgtggagagaattttctagtagagggaatttggaaattctctcaatgaggcatgaagttccttcagcaccttctagaaggcctgtgctgtttacctccctggccacaccctctgcacatcttggccagcacagggtgcagggaaatggggtgatcacaggtggtcgttgcctgctgtgtccgccacccacccccagccaaggatctgggggtcagcagttctgcaaaatgggagggaccccagaacagggccaagggtcgggggcagacacagctggaccagggtgaggcaggaaaagtgagctgctcagttggtgaggggcaggacggggacagaggaaatagggcagccccagcgggcagatgtcctgccctgcacttagggagtagggtggggcggggtatctggacagcgggcccacccgaccgcagccacctccagacctcccctgcctcaccagagaagggctggaaacacccccagcacaggagtgctggcagcctgtaaacacccgcaagaaagcaatgggcaatgcggcgaagtcccggaggccggcgccgtgttcctggtgtgggaggatggggcaagtctggcacctgtgcccaagccactctgcctctcggccctgtcttcgcctctggccctgcctcctttgttatgtggatactgcttcggtgccccccacagctgtgtctgccctgctctggccctctcgctggctgtgacattgttctttccctctctttccccttttccgtctccttctggggaccctccacctctcccag

SEQ ID NO: 32240 - DNA, 946 bp, Artificial sequence
  DNA replication origin
catggggaccctaggcctgcccaactggagacgtggaagaggggtgagggcagccaaggaaacccagttcccagcccaagcagctcaggcgaggttctcccctgcccccgcagtgtgtggggctgccaggcctctggggtcactgtccctgggaatggggaccctcccaaccaggggctcttcctctggtgtaggccccgggaggctggtccagagaagccatggttggtgcctgggtggatgaagaatggaggactggggtggccaccatggaacccccaaacctgagtcctggacagcagaggctgaaggacagtttctctctgggtgacctctcttggatgccagatctctctgcatccaagacccccagaaagttcagagcgtagcaaatgaggcgggcgcatcctccttcccaagaccttttccccgtcacccccaagtgtgtcagtccccagaacaacagccagattggactcaggcaccaggggatggctaggcctggccgagggacgaggccgctgaatgatgcccacctggaggggccagggaggttctgcacttggggcctccccgagaggccctgctgctacgcacctgggaggcagcgatgctgaattggcaccaaggctttggcctgacacccgagccccgtggcagtcagagaggagaggtgcgggtgggaacagctctacccccagccaccatcgggaggggagtgcgtctggggtgcctccaacctgggggtgcaggggtgggctgcctcctgccaggctgtggcactcttggggactcccaccacccaccctccagtccttgcctcccccgtcttggaggtgctggcacctccattctcttgcccaccctggtcagagagttggtcgttctcatctccgtgcccctaagggacagggtccttctccccacccacttcgtcttcaccctg

SEQ ID NO: 32241 - DNA, 905 bp, Artificial sequence
  DNA replication origin
aatgacaggtgctcagggtcagggacctcatgctgcccaagcgctgttcagccatgtgtcctttggccatcgccaggtactcccacctgcgtgtcagacccccatgagtcaccgctgccctggcggagttatcatgtgggtggggaagggagatagagtgtcactaaagaggcagatagacttgccaggtatggaggaagaggaaggaagaggcaggaggggctggggcatgcctgggggttggcacgggggcctcggagaggggcagaggaggccccgagctgaggcctgcaagcaggggaaggaggaaccgttccaggcagaggccactgtggatgaaggtgcattttgctgggattcgtggctgtaccctgcaaggggacgctcagctctcctgtgcccaggtcgcctactcctaggcctcagtctcacttagacaaacgtcacctgctcctcactgtgccgggccctgtgctaagtggggcaagtgtgttgtgtgtgcgtcagtgtatgtgtgcgtgtgaatgcattgtgtgcatgtgtctgtgtgtgtgcaagtgcatgtgagtgtgcattgtgtgtgagtggttgtgtgcattgggtgtgtgtcagtgcatgtaagcgactgcattgtggatgtgtgtcagtgtgagtggtgtgtgcatgtgtcaatgtatgagtgcatgtgagtgtgcattgtgtatcagtgtgtgactgtgcatgtgtctgtgagtcggtgagagtgcattgtggacatgtgtcagtatgcgtgtgtgactgcattgtgtgcatgtggcgtatgtgatatgcattgtgtcagtgtgtgtgagtgcatgtgtgcgtgtctgagtgtgagagtacattgtggatgtgtgtgtgtgcgcatgtgtctgtgtgcacgtgtg

SEQ ID NO: 32242 - DNA, 2401 bp, Artificial sequence
  DNA replication origin
gtgcgccccgcgctgccgcccacgccccgcacttggccgcctctgcgccgccgccgccaccggtggcccccgctgcgctccccgcgtcatggcgccggggctggggtagggggaactgcgcccctgcgcggcggccgagcgcgggggcgcccagggcgcgcgcggcgcgaggcgggggggccggagtttggggcgtcgctcgcaacttttccgaaggcgcgggagggggcggcgggcggagtctccggggaagcccgaggggagggggcgggggttctcggcgcccgggtcactttggggaacttcgcgccgggccgctggggactcggggcggggagcggggcatcctccctggcagcgtcgggaaagccggggggcgcgcagaggtggcggcgggggcgccgagctctgctgcagcgcagaccgcgcgccgggcctccggggaggcgggggaggtgggccacccgcctggcgagggaggccccaggagctctggccggggagggggctggggccagacttttgcaatcttgggggctgcgcaggaagctccggctggcgagttggggttgggtgggggcaggaaagtcggcgactctgagccaccagatccccaggatgccccgtggggaggtgcgcacagagcatcagcagccgcctgcccgccggccggccggggcgttgggggaggggacgggggtcctgcgctgccacccaatgcggaattagtgcagtcccaggcctgcactggggacagagggggactccctcgtctcccccaggcccctcggcctctgtgggccgcagttcccggcgccagcctggcccgggcttcaataccctggcctcacccaccctggctgcccacatctctgggcctgtctcttcctcctggcgctgtggcgtctgccttgttttcggttcccaccctcaccctctgcttgggcctgcaggggtgggggcggctgctggaggagcctggtgggattgtgagcacttcaggctcatcctggggcctgcagggcccagtgagaggggttcccataggacgcgttctgcaccccgtgttgggggcttcgagactggagagagagagagtacagggtgcccaccccaaggaacttggccaggccaggccaagagtctccatgaagatgtctccccacccccgcttccatgcacacgttggaggagaaatggagaagagtgattgtgtgtttgtgtgtgtgtgtgtgtgtgtgtgtgtgtgtgtgtgtgtttcttggagacaatgagagactccaggggtctgggcctttgggtgatgggttcttacccgtttgtgccccttggccctccaaggagctatagaaggtggtttaaggtggagcaatggacagagaaggcaaagatgggaccttccgagctggcccagggcagctagcccctgggcacttgggtcagcccgttacaagggcccatgcatgagggactgccaaacgtagcagccgcagagggacaggggaactgtgtgatggtcaggagcagaggctggtccaggagcagagggtggccagcagtggcagagggtggccggcagtggcagagggtggccggcagtggcctgcagcccagggcccttgatctttggtgccatcttcccaggaccacctgtgacatctggggactcctggacacagcccaggagccactggggagcccccaaactgacaggcaggaagtcatccaatcccaggccatggccattgccctaaattcccagttgacactgaatcacagggagtcaggataggcctccgaggtcaggttcccagcccctcccggttttccatgagcataggactgacttgggaatctctggggtggccaggtcaggttattggggacagatctgctgtacagccacccaggcatggcaggaatgtcccaggcagcaggaagcgtagctctgggtttctgcagatagagtgtaggatttagagtaagggtcctggtctggagaccaatccatggtttattgattctgttgtcttagttatcaccactctgaacctcagtgtcttccttgaatgacatagtcctcactggctgaatgtgagggctgagttaagatgaagtagaggcaagcctccgaaaaatggcagccacacatttggcgctgtctcggtagaattagaccagcgctcatagttggggtgagtccaccaacatgacccacggggaagacaccccgatttctccagagctaggtgaatgcatccctgacttgtggcatttggagctttctgtaggggcagtgggaaggcaaaaagatgtccacggagccatagccatcccgaattgtccctgggaaagccagagcctgctgttgccccgggctttgagcattcactttccttcc

SEQ ID NO: 32243 - DNA, 850 bp, Artificial sequence
  DNA replication origin
ctcgcgccgcgcgcgccctgggcgcccccgcgctcggccgccgcgcaggggcgcagttccccctaccccagccccggcgccatgacgcggggagcgcagcgggggccaccggtggcggcggcggcgcagaggcggccaagtgcggggcgtgggcggcagcgcggggcgcacgtgcgccgggccgggggccggggccgggcggggggccgcttacctgttggaggtagaggaaggcgggcgggcagggcacggagtgcgggagcatgctgccggagttggacagcaggaggcagcccgagttcgccatggagcacagcatggggcggcaggggggcgcccggcggcggctctgcgctcgctgcgtccctcggagtgtgcgcgcgccctgcctcccgggcgccctcccggtctctctcctcctcctcctctgggcctcccctccccctcgtggcgctctttaagagggaggcatcgaaaggagagcggcgcgcctctgcccggtgttccccctgcccgggcggggaggctggagagagcgcgcgcgagaatacggccagagagtctgtgcgcgagagatcgggcgagcgggcgagagcaggagtcagtcactttggagcctccggagccctgtctgcaaagagtggtgcgtgtgcgtgtgtgagtgcgcgcgtgtgcgcgcgtgtgtagcggtgggagggggagtccctggcgtactccaacatcaaacggagccccgcgcggagggaagagaatccggagcgacggcacaacagctgatcccacacttaacccctcgcccgccggcaccggggcagccctccctcgcgccctcccacgctcgggcccctgc

SEQ ID NO: 32244 - DNA, 2025 bp, Artificial sequence
  DNA replication origin
gtgaccagatgcagggctgccagaagtgatgcagatgcagatagtggggaccaccctggctttctttgggccaatgactgagctcaggggtccaggaaaccttccctggccacaccccagatctgagctctccctgtcctgggctgtcaaagctctcagtacattaggctgcagtcttcgtttacaagcttggtttcccccactagacggtgtgctcactccagggcagagaacttgatttctgcagccccagcaccgagcacactgtctgcatatagtgggttctcaataaggaaaaacagtagcgttgactcaaaaagtggctctgtgtcaggcatggcttaggaagcactcccaaatccctttctggaggggatgaggcttggattccacaggagatacttggtcataatggtcataatggcaaattaatgagcaaatgattcacaggcagggtggatctggagcctgggtttcggctgaatgctatgtggctgtcccgaattcctgagcatcctccagggaaggtgcagcagggcagtggtgacggacaggtgcccagagaagacaaaagagggatggcttctggaacaagcaagaacaacctgactcaggagggaggcagcaagggccactccagggcaccacgctcacgaggagcccttctgcgaggctcaggtggcaaatgctacaacccacctcatcttcctggcccaggcatgcccggcccttgcgctgggacccccaccactgtcctaggctgggaaaccaagttactgacagcagggagggcctcatcaagtccatagccaagaccctgtggagacagaccagccccctatccttgtcctgtgccagcaccaccccagagggaacacagagcaggattgcaggtcagaccacacggctagatggccagctcgcctgcctcgtctctcccctgagccttctctcttcccctgtctgcctccctcccggactccacatcccagctcctctacgaagaagatgaacaaggggcacctgagagaatggtcccaggtgcctgcacctacctgccttgttcaaatggagcctcctaaactgggcgtggagaggccacccttctctccctcccttccttgttccctcttcctcaatggccctcaggccacgtgtcctgcagtgggtgcaacagggatctcagacaacatctgacccatctctcgggctggatgtggaaaccaaggccccaaggggacaatcgaccttcctgagatcacacagcaagtgagggtccgacatgactgccgggccagccatctccccactgccaggcggccccaggcctgcctccctccagctcagggctcactgtctgcagtgagaggaggggagtcacaagtgccctaaggtaggacaggtgcgttcagaatgggtactgggtgcctgggatctgcccctttcctggaaggcgtgaggttaggcatgagccactggctctgcctctgacagtggccactggcagcccatccctcttgcagccaagctcacctgtggcttatcctggtaaactgagactgatccacggggcctctggtgagtgtggactcggggcaggccagtgggtgtgtgtgtggccgctgaagctgcaggtgtgtgcacagtcacagtggtggaacaaggggcactgccgagacctctgccacatgctgaatggggcaaggaggtggggacctatgcacgcctgtcccgtgggagcgaaacacgtcaagtccagtgtgtctgggtacagggaggggaggatgcattgtggccggtgcccgtgtcccccacccccatctaagtagccacaagaccaggtgcctgtggcaggaggctgggatgtatgatggggtctgggggccagcaggagggcaggagacgctcctggaggctctggttggatttccaagccctgggcagccagagaagccttccccagcgcggaagcctctgcgtagatgccctcggattacatcaccgacatccccgccactgagccgg

SEQ ID NO: 32245 - DNA, 726 bp, Artificial sequence
  DNA replication origin
ggtcagatgacttgggggagtatttcttttgacccctacccatgtcctttggaaattcccaaggtggcaagtggcaaatcatagtagaaaggaagcaactccacactccctttaggggaggaagggaggtgaattcctcatgctcctgcccctctttccccttccaggcgcccaggccgaccatcctcaggcttcccctgcgccgtgaggacagtgtgcagcttggcagcagcgctcccaggacaaggagtgagctcacagtctctggttgcagctgtgcttggccgcgccaagccgagccttcatcgacaaatacatcgtgctttccgcagagccagaccttcctgccccagccctggggtatttggcctgggcttgggcatgagcactgggggacgaaagaggcagagtggcagaactagatctccacagtggggtggggtgggcatggctcagggatgggaggatgtgtgcgtgcctgtgtgtgtgtgatggggtgtggggagagccaagaagccactctgaccagctggagtcctgtatcaccatggaacactttgcaggggaattaatgtcccaattcagcagccagggcaacagggttggagtcagggagaagcccccactcaggctttcatgggatgcccccagcagacaccacggggcaaggtcaggctggggatgggaaacccagcagacaccatgggggaaggtcaggctgcggat

SEQ ID NO: 32246 - DNA, 1156 bp, Artificial sequence
  DNA replication origin
cccaagctaaggcagtttgttcctaagatgcctagaaagtggcccctcgggataggattctggagtggggccagacattgctaaggaccacgctgctggtgacagatggggctgtgacaacccctggcctgtgggggcactgtgattacatagaccctcactggcagaggatggggaagaggggcaggtggaggtgaagcatctggctatgctgttcctgtggcagtggtttgagggtgaaggggcgtgtaaggactgtgggggtgggtggagggcgaaggggcgtgtaaggactgtgggggtgggtggagggcgaaggggcgtgtaaggactgtgggggtgggtggagggcgaaggggcgtgtaaggactgtgggggtgggtggagggcgaaggggcgtgtaaggactgtgggggtggttggagggtgaaggggcgtgtaaggactgtgggggtgggtggagggtgaaggggcgtgtaaggactgtgggggtgggtggagggtgaaggggtgtgtaaggactgtgggggtgggtggagggtgaaggggcgtgtaaggactgtgggggtggttggatttattaatggacttagaagctttgaaaaaggaaaacaactgtctcaagctagctgactgtcaacacagggcccctggccttcatggaaatatgtaactagacctttgtctcctaaagcccaggaagtaattgtcaccaattagtttttggtgtaccaattgtataccaattgtaccaattacaattgacaccaatcagagtcaccaaggagcctgaacccacggacatggcacttctcccctgacgaagtccaagcaccgtaggaaagagtgagaccctgggatgagaacgtttgtgtggatgagcctgagaactttgcacccctaaattccctgaacgctctgggctggtggaagtggccccttccatctttgctaagagaaagcagacttttctcacctggagaaccagcaaagacctcaactgagaaattttctcatgagataacacttgtcccccactgagagctgcccctacttcccctactgccatgacagcaatagctagagttggggttcagcacaggccaagggggcaacagccccagctcaggaagaaaacagccacacacccaaaaag

SEQ ID NO: 32247 - DNA, 1139 bp, Artificial sequence
  DNA replication origin
aattgtataccaattgtaccaattacaattgacaccaatcagagtcaccaaggagcctgaacccacggacatggcacttctcccctgacgaagtccaagcaccgtaggaaagagtgagaccctgggatgagaacgtttgtgtggatgagcctgagaactttgcacccctaaattccctgaacgctctgggctggtggaagtggccccttccatctttgctaagagaaagcagacttttctcacctggagaaccagcaaagacctcaactgagaaattttctcatgagataacacttgtcccccactgagagctgcccctacttcccctactgccatgacagcaatagctagagttggggttcagcacaggccaagggggcaacagccccagctcaggaagaaaacagccacacacccaaaaagctccaagacccagtggatacacaccagtggacgccggggagcggacacacaccagcgggcgccggggagcgggtacacaccagcgggtgccggggagcagggggcgtaggtggggttggggcagaatgtaagtctgaacagaggagagattactgacgtgaaagtaacttctcatgactcagggcttaatatcctggaaaggacacgcgtaccagtccagtgaacagctccttgaagcgcacacataccgacagcattcagtcaacgaggtcgacgcgctggaactactttggtggagtattaaagaaggggtccgaaggccccagatgctgtgaacagagaacccactagatgactctgtgtcccagaagggtatgggggacattccctccactaaggcaataaaaaatgcaattctggggtgggggaccgctgaggcatttggaaagcttcgtggtgagtgccttcacttagggttgccattaggagatgctgccactaactgggctccttagtatcagtgaggatgagaagattctagaatagcaggggccagatagttgcatttaaccatcagaggcaagttggaattaaataccaccgtggtcagccaggctttggagatgaccagggtgctttgaactacagaagtctgcagctaataagccatggtgttcctggggatgaaatggatgggtggccaagtagggtattgc

SEQ ID NO: 32248 - DNA, 1273 bp, Artificial sequence
  DNA replication origin
tccccgcacggccaagctgaaagggcctgggggcaggttcctccctgcaacccactcttgctttgccaaggccaggccccttggctctgctggcaactgtccccttcacaatgagcacagaaatcattggccgcaagtttgccagctttaaaatgggagcaacaatatctccagtgctgcccttgaaaagccatgcccatgggaggtggagatatgttcactcgaggatgggagaggaggctgcacaagagtggggagccctacagagctgctgcttcaggggatacccctggccaggtcccatcctgcatctcggaacagactcattctttcaatcactcactcgttcatttcagtgttcagtgttcccagagccccagctgaacatcagacacagggcagataccaggaacaagaactgaacaagacccagccagggtgctcgagggagctgcaggcagaggggagatggaggggtgaatgggtaacaggagcacccaaggatgagggtgggggtgcagaggaggaaatggcatctggctgtggggtgctcagggagggcttcctggaggtggtgacagctaagctgcccttgactccatgcctgcagcagcccctcatgtctctgcctgaaagctcaccctgaagtcaagcaggagccagttatgggggtggggtgggaggcagggtgtttttttaggtggaacaagcccaaaggagaacacggcagatgttcagattaaccttggagcagctcagcctggctgggccacggggcttagggaggagccggaaggaggtgcggggtgaggtggagctgagagggcagggtggggagaagttagcgctctgtgttacgaaggtgagatttgatcggggcaggcggggctggggctgggcctggaagctgagtgggaagtcggggtagagggaggcaggacccactctgggagctggggtcaggtggacggtggtacccactggtgatccgcagggcaaggatggagaagccagtctgaaggaaacagcagttttcaaggctcatttttgagtgtgagtttgaggagtgtgtgggcatcaggtggacaacaggaatcgagctggcgaggctgggagggggtcctggtggggttcggacttggggggtggcagcgtttgggtgccgtctcccacactggggtgggtgacatggctcagggagggacagcaggagaggaggaggatcctcctatgggggcctggttctctgcccagctgcaaatcccagcttgga

SEQ ID NO: 32249 - DNA, 1132 bp, Artificial sequence
  DNA replication origin
ttccgtctcagcaaagaccttctgcatgaacagaacccagggaagacagcaactatctattattaaacaaacccaactgtcgatacaggcacaatctgcaaattagctgcttgtcaatgtgggttagttgcagatggacgttcaccgggacatgggtgtgatagaagtccatgttcacatttcacttctgaggccgtatccagtaggagactgaaattgatcatgtgagtaaagatgtattaatcccgaaaggcaattgctgagcagtaatagtctttctgacgcggctgtggcagtggaaactctgaatccggttgagccagcagcctctgagctgcaccaagcgctaaggaactccttaccaccagggaagcattacggtttcatccttaaaactggctccctctcgcaagagccaaagcgatgccagggatgccggcaggtgcagctaggatggtgaggctggtggggatctaaggatacctggaatttgttttaatggggtaaaaaagacacacagatacagaaatgactggcatggcagaagaagcctatctagggacagatccctagagacagggaactcggcatcagggacacacagggaggtaccaggtttggtcgggaggcagagggaatgggggttcacaggggcaggggtcttgactgtggtttccctaggaaggaacgggcgaggcaggggaagtggttttggggctggctggtttggatcatttcagtgagctctgggctatggggctggatctgattgtctgtacctggctctggggtgattaggacaggtaaacagtctccgggagcatgggaccccgatagaggcaggggcttggggtgtgggatctggttggccggtttgcaggtgaaaaagcacaccccaagcccgttgtttgctgcctctcggaatctgctactttgggaggagccgtctccccagggccagcaaggcttcagatgtcaaagcatcagaatacagggaataaaagacggtgactgcagcagcattggagccgagcgggccgagacacagggaacagagggaggtggttatgagtggactctgactttgttcacagctcagcatctcactagccagaatccgcagcccaagcac

SEQ ID NO: 32250 - DNA, 1372 bp, Artificial sequence
  DNA replication origin
accccctgtgcttctgtgtccattggggaggggccctcacccattccttcacttcccttcaaggacttcagtgagcgtgcggtctgcaccctccaggtattggggatgtgggtggccctgagctcatgaagcctaccgtcttggaggttggggggggaccattagtccccaaacaggaaatcatgatcacgtgagtgctcagcagagaacagaacaagtgtgaggcccaggctgtgcttcaggcctggtggtcaggggcctctctgagacctaatgacccggtgacatcagggacagagaaaaccagacacagggacagctggagtgcaggccccagccaggaacaagctgggaaggtcagaagaatctgggaggaaattttagtgagaaggggaggaacatgaggccaggggaggagcatgaggccaggggagggggagagagatagggagggagacagagagagagagagagagagagagagagggagacatggagagagaggcagagagaaggggtgtagaggcaggctggctcaggaaggccgggtagcacagccaagagtctaaggcaggaccagtttggctcctagctctggggctggtggatgatggaggtgggacgggggtggggtggggatgcctgcgggggccatgtgagaccctagtgtggggagggggtgaaaatgacctggattggggcactagcaggacgtagagagaaggggatttggggttggttttggaggcagggctgagaggcttgctggttggattgtgctggcgggaccgtggtcagggaggatgggcaggagccaagcgtgcctcctgggctttcgctgaagctgcaggcaggggagacatttcctggggtggaaaagtctgggggccagtagcggggagtgagccaggtggagacgtctgtgcccccagcctcttgggggatgaggggaccctcgctggtgccctgacttggcatttccaggtgccacagagccagccctgcaccacagggctccctgagccccacgaccaggaacagcctctgcccagggcaggtgggaggacagaggtcggaccagcctccccgcccagatacggaagcttcaactcctcggcctcacagcaggacaaaggagttccctcgcgcctgagtgcagagaagagctgcgacaccttggtttggctgagcacttaccatgtgctgggccctttgccgagcaatcttacaattctctcacttcatcttcatgacatccgatgaggcggtactatttccttgtgttgcaaatgaggaaactgaggcagcaaggtcctgaagctcctgccaggttacaggggcaggaaactctccgccatcctgatatccaacc

SEQ ID NO: 32251 - DNA, 744 bp, Artificial sequence
  DNA replication origin
cattctatctcaggtctgagcaaccacgtgtccagactccttggggctccaggagcagacccagggctcccggcaggtctgctctggtcccacctacagggtcatccgaaaaccagagcagccatgaactagcccctcttagcggctgcctgccttctttccccacaccccttgccatttcctgctccttgtctgctgccgtctgggctggaattctgtctccaaattggagatcactccaggccctcaggactggaatttgagccctgggaggggaagggaccatttgtagctcttttctttttttatgctgctgagcgaagcagggatcaggctgagcacagctgccagggaggtggtgttttgtgataaatcaataaactgctcggggtgggagagggaaagggatagatagggagccctaggatgctggagaggaggcaggctctggggtccacgtgagcacctgagtcaatgaacaaaaagagatgagagacggggtgcagaggggaggggagcacatgagtgaggggcagccagagacagagacacagagaagtgtgggggcgtggggagacagaaacatagaaccagagagacagagagaacagagacacacacagagagacaaagagagacagagatggagacagagagacaaagagagatggagacagagagacaaagagagacggagacagagagagagagacagaaagacagagcctgagagacaaagagagc

SEQ ID NO: 32252 - DNA, 1341 bp, Artificial sequence
  DNA replication origin
cctatagtcacaggatgtatcagtcagggtccccccaggagaagggagacccatctgggagtttcagagagagcatttaataccaagaatcagttacactgaccagggaagagttggagaattaaacaggaccatcagaggaggaaggacagcagcagacagaagcccctaggactggagaggcgggatggggcgcagagccggccactgtcagaactgcctgtcaggaggggctgccagggcagctgcagccagggaggacagagctgttggacaatgccacggacagggggcatcctgggcgctctcctccccatgcctgagccaccattggctggcttgagtgtctgattctctctacacaggtggggcgggaatggatctgcgagggatgagcagatctgaatgacctaaggacgactttggtggcatggacgatgtggactgtgattttctggagcctctcctcctggagcagagggcacccaactgtgggtgtgggccacgtggcctaggctcagggaacccattctgtcctggtgatcatggccgtgcctgccccggggggctcagggaacccattccgtcctggtgatcacggctgtgcctacctcggcttccctaggaggcaaggccctgctggggatccaccactgatggcatctctcggtgcaccaagctacatgacgcatctttgttgagctgtgacggtattccagggctgggctgagccccggggatacagggggaaaggaaataagcagggacgtcatcttcaggcattgccgggcctggtgggatcaccagacatcagactggagtcgcacaaaccagtggaaacatgaaagagtggtcaccatggtcagggaaatgctcaaggcatcctggggtgcttcaatgggaggtctgggggttctctgagaagcagaatttcaatagggaccgggagggtgagtaggagttgggagaaggaggagaaggtgggagaagtgaggaggagagtgagaggtgacagacagaagcaggagcaatagcagtggcccccgggaggcaggatctcagcaaatgagagtgaccccagacccagcaaggctgtgtggctgagtgggcagaggagtgcgagtggtgagaggtgggaggagagggtgcaggcaggactgtgcctggccccgcagcccacagctcagtggaaggcacgtgcaggggctgagcagggataggtctggctgctcggtgagggtgaagcagggactccaagcaggaaacttgcatggttggggcaggagatgatggagcgccaggcgtggggatggggaaggagccaagaaatgggtacatttt

SEQ ID NO: 32253 - DNA, 754 bp, Artificial sequence
  DNA replication origin
ccccggaggggtggatggtagtgccattttctcctctgctgcatcccgtagtaggtggctggggaaatattttcaagttactggctgggagtaaatctgacttttgcaatctaaaccttaaaaccagggaaagcggactcttcttactgtgtgtcttctcttgtctcggtctctcctgacacctgtagcccagagctcatgagtgctcatcgctaactgctgggtgatacatgcatgaatctggccaatgtgatttgcgttttgaagaaggatcaagcagtgggagaaggtcgggggacttgaggtggaggaggactggaggggaggatgtggaggaggagtaggaggaggagggggaggaagaggaaatgaagaagaggaggggaagggggaagaggagagggaggaggagggggaggaggaggagatgaaagaagaaaaggaggaggggaggagggagaaggggaggggaggagggagaggaggaggacttcgaggagaaggaagagaagaaggaaaggagggtgtctgaggctggggtcctccggaagccgactctgcgaaggtgacatgcaggcctggggtcagcactcatgtgggagcgagggcagcagaattgggcaagggaggtgtgaggctgtgaggcagtcacaacacggtgcagcagacctctgcgtagctctggagctgccccaccttgaggcaaaatggcatggcctttgtacccctttgcccacctgtcatggatgtggac

SEQ ID NO: 32254 - DNA, 772 bp, Artificial sequence
  DNA replication origin
atcccgtgggatcccgtggaaggaaagacagggccaatgcgtaataaaggatggtgtggacaggaacttctgtccccacgcctcttaatctcattagcaggaaatgaaagcaaatcccattgggactaaccttgccatgtgctgagaatctcctgtaagaatttcaggtgtccctgaccctcggttgttgtttgtctttggctgaagttaattccccagccctgaatgcacacagagtcatgccgggatgtcccagacattcggaggcaggagaaacccattcatagtgaacgattgtcggtggattgtccacagtgtctgccttcaggtgagcagccttcctggggggccaggcgggctctgattcctcctctgtcacataccttggctgccacagagaccccccaaaagagctgcctgtccggcccaccatgacacccactggccgtggctccctttgcctgtcctccccggaggggtggatggtagtgccattttctcctctgctgcatcccgtagtaggtggctggggaaatattttcaagttactggctgggagtaaatctgacttttgcaatctaaaccttaaaaccagggaaagcggactcttcttactgtgtgtcttctcttgtctcggtctctcctgacacctgtagcccagagctcatgagtgctcatcgctaactgctgggtgatacatgcatgaatctggccaatgtgatttgcgttttgaagaaggatcaagcagtgggagaaggtcgggggacttgag

SEQ ID NO: 32255 - DNA, 1082 bp, Artificial sequence
  DNA replication origin
ctgtccctgccctgcccctgtgggtggggaggaagtccccaggaaacatgggggagctgacatcccagagcctccagccaggagactgggctgagctaggctgttcatcctggcagggatctgggggggatttagaatggagaaagacccgcaggggtgggagcccgggccaggcctggccttgggagcatccatcacacagaggcggagccatggactggcccataagtccaggggggagacataaaactggggggtcataagactgaggagagccataggatgggggagcccatagggcttagggggatccacaggatggggaggtggggcctgtaggacctgggaggagacataggatgggggggatttgacaggggggggtctatagtatagaggggctataggacccaggggagccataggattgccggggatagtatggggaggccataggacaggctggggagccagctgacagagtcctgcgggcaggcagtgctgtccggggcaggctgttcctggggaaggagccctcacagcaccgggcagcgcattgctgagggctgccgtggccacagtcatcctcgcagttactggcgtttagagggtgcattcaccgtgctaggcccaaatgaagcgtctgcgaggagggtctcctcgaacctgcctgtaactgaagcgtctgcggggagggtctccccgaacctgcctgtgggctgtggttgctctgcacctctccttggcctgcttaggagcctcgatcctctgatcctggttttggtatgaattgaacaatgctttctgcggggacagccagctccccatctcagtgtcgtgacacagcagagacacgcttctcaccatgccaggtccctcagggcacggctgaccagggcgaggctctgctcccaagggtgaccccaagccccagtccctcccacttgcaggatctgccatctttaacacgtggtttccacattttcgagaagaggaaagagcgtgagggctgctgggggtgtcctggagatgacacgtgtccccccaccacatttggttggtgggaccttcctcatcgagtg

SEQ ID NO: 32256 - DNA, 1284 bp, Artificial sequence
  DNA replication origin
ctcagcttggttctcagtgcaaagctggtgccccacgatttccagccccttctcctgagtgcctgcccctcacccatttttctcccatttccaaaggacaaatgctgcagtaaacggtccctgctctctggctcagcatctaggaaaggcttccaagaggccaaggaggctctgggcagaccccaggggttgtgcagccctctcccaggccaggggcgctgacagccagggccacggtcagcaggtccaggctagggcccttcattgtgaatgcacagcctgtcggccaccttcacaagagccttggataaagtgttcctgtgaagaagataattgaaaattaaaaaagactttgttaatttgattaggcagagccgtagttgaattgttcttcatcaaaagagatttaattttgacatgcaattaaatccttctgctgtaagatctgccccgtgtgctggagatgggcttggcagcctgggggaggggtggcaagggggggattgtggagatttgttaggtgggggagccagacggggagggttagagatgctgagggttgggggaaagatggagatgatggccatgcggtcatggactaggagaggaaggggctgcagtggggctgtgggaggtgactaacagagggactcaaagagggatggaggggaagaatttggaagagaagcagaacagcagagccggggatgtgcggacagggagggagaagctgtaccaaggagggtgcgggagaggccgcggcaggaggagctgcaggacgcacatgcagactcgtgcgggcctgagagccgctctgtgcttcttaggtgggtaactagagggaggggactgtaggtcacatgtgaggacccggatggcatcttgggggcctgaaatcatgaaacaccctggagtccgatctggaccgggaattggatgtgagggaagccatcttcgggggcgcagatgagtccatccgggatttgcgggggctgagctgtgtggccctcaccacaagcgcagtgtagccctggagccagcttcccgcctggaacgccggcccctgagaggctgagtctccgaggtccctgctcacccgtgttcattctttcaaggccagggtgtaattctctctggttaaaatgatagtggtgtttgaccaaaacagccatccgtgcttaatgtagaaaatccaggacattgagaaaggtgtgaagatggagacaagtgtgtgtctcccttaggtgaacgagggaggaccttaaaacaaaacgaaaacggggt

SEQ ID NO: 32257 - DNA, 926 bp, Artificial sequence
  DNA replication origin
tgccaagagaggacaagagggagccattccgtgtagagggcatagtggctgcaaaggcctcagggagctgagggcatgtggcgtgctctgggtagcacatgactgagtgtgcgcctggactgggcatccgggatggggtcaccaagagcctcgtggacgatggagaagttgcaaggggatttgctgatgggcagccctgcccagcagcgactccactgggcttgttccttgtccgttccttgaacaagtatgtattgagctgaccttgtctgtgggcacggggtggtcgggggggcaggcattcctgggaaaaagcaaatgggacgaaggggtgggggctgcgtttgcacagggggcagtgtccagcgtggagaggtggcggcgtttgagaacgatgtgtgggagatagcggagaaccccaggtgctgggtaccggcagcgctggcaggatgtgacttctattttaaaggaatctctttggctgctgtgctgagaatagccgggggctgggcacggaggtagagagatagcaaacgtccggcagaggtggtggcgccggaccacactggaggtagggttggggtctgtgcggcaggatctgcacaagcattgaaagcagaatcatcctggctcctggcatcctggtcgatgggggcgtggcgaggacggtcaaggaatccaggacaatgccacgaacttgtacctgggaacctggaaagatggggcttccacggggagaccgcaggacgtgaggagtttggttttggacatgtgacgccaagacacgtttgaaaactctggtgggggtgactagttggccactggacccaagagtctggagtctggaaggagactggggctggaggcagaaagaggggagttcgtggcacacggggcacccgaagtcccgtcgcaggggccggcct

SEQ ID NO: 32258 - DNA, 823 bp, Artificial sequence
  DNA replication origin
gacttccttgtccatcccctggtcagtgccgagggagagacgctcacccctgtgctcctgggacgggcgggaggcccggacaggctatgattcccacgccacctgtgctgggagagcccctactgtgtgttcattcctcacatgatgtacttgcctggaggattccgctctgcacttggggagaggggtgaataagacccgcccctggctgcagggagcttctgctgtgagcaggagacagggagggctgaaggctgtgcagcaccctggtatggggtgagtgagggtgcctagagggcgcccacagaaggggctcctgactcggactgaggggcagggaggtctccttggatgaaggggtgcctgggctagggctgcaggctggctggcccttgccaagagaggacaagagggagccattccgtgtagagggcatagtggctgcaaaggcctcagggagctgagggcatgtggcgtgctctgggtagcacatgactgagtgtgcgcctggactgggcatccgggatggggtcaccaagagcctcgtggacgatggagaagttgcaaggggatttgctgatgggcagccctgcccagcagcgactccactgggcttgttccttgtccgttccttgaacaagtatgtattgagctgaccttgtctgtgggcacggggtggtcgggggggcaggcattcctgggaaaaagcaaatgggacgaaggggtgggggctgcgtttgcacagggggcagtgtccagcgtggagaggtggcggcgtttgagaacgatgtgtgggagatagcggagaaccccaggtgctggg

SEQ ID NO: 32259 - DNA, 921 bp, Artificial sequence
  DNA replication origin
gactggagccgtgtccacagctgccaaggatggtgccctaaaagattctcacttccttcagaggggcaaagcctgagatatctgggagacccaacaggacacagcagaggccatgggggtaaataaagagggagtttccaaggtagaccctgctgagctgtgcacttgggatcaaccttggggcggcactcacagccaagagatggacagagcaaggaagggggagaagacaggagggccacgaattccgacttagaaggcggcaagagcagagggagcagtgaagggacagagcgggagattgggggcccgggggttccgaaagacactggacagttgcagtggagatggggagggcaggaggagaggatggggggaggagaggacaaggaatggtgagggcagagacccccttccagggatcttgctgcaaagaggggcgggcaccaggcctgcgcctgggaaggtggtgcgaggcgagggctctctctgcaatgggaagacagacgcggtgaccagtgtaacactggaggaatcacggagagtgtggagggggagagagcaaggctgcgggactcatggcctggagctggggaggagagggagacacagcccacaagcagaaccaggggcttttggcaagagtgagtcagggggcatgggtgctggtggcctgggtttgaggagagagaggagcagaagagctggctggggtgtgaggactttcaggttccccaggtcgtggggcccacctttccggcagcatcccagtcctttgtcccacttgtcccatgcaggcaaggcccagaggggaggcagacagtcgaggatggctgtcgcaggtgctgggagaggaggtgttctcgtgaatgcgccatgtctttcttgctcgaacagtaaataaaacctcagggtcagggg

SEQ ID NO: 32260 - DNA, 998 bp, Artificial sequence
  DNA replication origin
gccccaaacttctcagggaagcttccaagagcaaagatgctcttcaaaggccctggggtgaaagggacgtgttgggagacctgaccatccacggccctctcctctgtccctgctgagcctggcctgggagggaggggaaccccattcggcctccaaccacagctgctggggaccactggcagaagagagaggaggagggagggggagagagagagagagagagagagagagagagagagagagagagagagagagagagagagagagagagggagagagggagggagagagagggagagagagggagtgagggagggagagagagggagggagggagggaggaagagggggggagagagagagagagagagagagagagagagagagagagaaagagagacagagagagagagagagacaccaagcagggctgggtgagttgggtgtcagggtagtaaggagctcaccctgcaaggccccttgtggtgagaggcgtatggtaagagctccaaatggcggtggctgctgttgctgggatttcatgacaaaatgcagacacaaaggacaaacccagaggagggagccacctaggactctgctacaattgtgtgtttccacctagtacctgccgtgggggctgctggtgctccaacctcatttcccagagaggaccctgcactgcttccctggggctgccgtaactattaataattgccagaggaagctgcaggcagagccggaggggcagactggggtgggggtgaggaggggagagagggtgaggggaggacacctcccagaagaacccctcccaggaggacaggacctgaaggtttcttctctcagctcccgggtagaatcaggtccgtgcatgattccactccttgcttctggtctgaagctccccacagccacaatggaaaatctgactgacttggccttaaagaggtcccaggccatgaagcagcgcccagcagctcggcattggtcagaagcct

SEQ ID NO: 32261 - DNA, 2026 bp, Artificial sequence
  DNA replication origin
aaagagttgcctcccttcctcccttctccttgcctccccccggcgtctgcatcacggcacgttcctccagcaggcagatgtctgcgggggaatctgtcgcctgtcctcgggccgccccgacagatgtactgggcatccttcctctgtgggccgaggtgcacgtgacacctctgtgtccctgctccgccttgatgggcatcctccccaagttggcggtattgatggacggcaccttgggcaggcacaaaggcccgtccacgtaaacattcccctcttctccgggctgtcgctaacatttcccccaacgtctttctgggaattttctctgtccgttggaagaagcttgaaggagaggaaatcggccagtctccttggtggtgaagggagagcgaacatttcctgatgtgcgcccgtttcgcagaggcctcgccacagagcacgaggagctggtgcactcctgcgtcttcccatctggatttcctggtctgggtccagcaaagcagcagtcaagttccccatcattggtggttgccaagggcttacggttaagcccaggaggagtttgtttttgcagagcagccctaggaaagctgtcacggctgctaccaatggtggtggaggtggcagtggcagtggcgatggtggtggaggtggcagtggcgatggtggggaggtggcagtggcaatggtggtggtggtggcagtggtgatggcgatggtggtggcagtggcagtggcgatggggaggtggcagtggcaatggtggtggtggcagtggtgatggcggtggaggtggcagtggcagtggagatggtggtggaggtggcagtggcagtggtgatggcggtagaggtggcagtggtgatggcggtggaggtggcagtggcggtggaggtggcagtggtgatggcagtggcagtggcaatggcagtggaggtggcggtggcgatggtggtggaggtggcggtggcagtggcggtggcgatggcggtggaggtggcgatggtggtggaggtggcggtggcagtggcgatggtggtggaggtgtcagtggtgatggtggtggaggtggcagtggcgatggtggaggtggcagtggcgatggcagtggcagtggcgatggcagtggaggtggcagtggtgatggcggtggaggtggcagtggcgatggcggtggcagtggcaatggcagtggaagtggcggtggcgatggtggtggaggtggcggtggcactggcggtggcgatggcggtggaggtggcgatggtggtggaggtggcggtggcagtggcgatggtggtggatgtgtcagtggtgatggtggtggaggtggcagtggcgatggtggaggtggcagtggcgatggcagtggcagtggcgatggcagtggaggtggcagtggcgatggcggtggcagtggcgatggcggtggaggtggcagtggcgatggtggtggaggtggcggtggcagtggcggtggcgatggcagtggcgatggcggtggaggtggcagtggcaaagtcggtggaggtggcagtggcgatggcggtggaggtggcagtggcgatggtggtggaggtgtcagtggcaatggtggtggaggtggcagtggcagtggcgatggtggtggaggtggcagtggcaacagggcaatcgaacgatgctcaaagaggcttctcttgctttctctcctccaccttggaatgggcttgggctgagagtgtcccagaagaagtaaatgtcagataaccgctgtgtctgggctggagacgctctgtgtgagctttcaatatggcagctaatgggttggaaagatagacgtgtgtgtagtcatttccccagttttataattccgtatctgggactttatttcatctttacgtcttgcttctttctctccagaaaccaattttactttatatcaggacttctcaacctcagcactagtgatgttttgggctgtaggacactgagcaggatccctaacttctgtctactggaggcagtagcaatccctccactaagt

SEQ ID NO: 32262 - DNA, 1086 bp, Artificial sequence
  DNA replication origin
aataaacccagaagtattaatgggggagtaacttttgtgggttcattcattcattcatttacttatccactcagaagaatacggagtgagccccagctatgtgccaggcacatcctgggcactggggattcagcactaaatccagccgttgtggatgcctgccctcagggagcctgcattccagtggaggcaaagtgggatggcgggatccagcacatccgcatgaagccagatgtgctaagtccctggggggaaattcgtggggaaaaggagaaggaaatgccatagggatgctggttattttgatggggtgttctgctcctggatggccttggaaaggtgccatatgtgcacagctccgaggcaggtaggcaggcaggcagggagggagggagggagggaggcctgcaattgtgcagggaagagcattccatgcagtagacctgcaaaggtgtggtgcaggggtggggtcggggaggcatgcgcctgtgtggagggatggccaggaagccagtggggctgcaggggagagagggagtatactaggagagggagccagactgccgagagccccaaaggcaaagggggttgaccgtgaagctgtctatgagcgcacggcccccatgtgagacctcgtatgttattttcttaggaagtccccaaatcacagaagccagattcacctggcttgcaggccactgaagcaactttaagtgtttcttccaaatgacacaggacaccagtggaaggctgtgtcaccagatcaggacagtgacatcatctgatgaatatttttaaaagagagggacaaagtagctgggagagtgcggacagtggtgggtcctggaatctaggctgggtgggggaggaagcaagagcgggcggtagtgggaaaggcgatggggaggggccagcgtggtggggtggaagagtccctgggattgggggaccattgcaagcgggctgggagaggggcggaccctgggatggactgcacggtggctgtttggcaatagggtcctaatgatgtgttttctgcaagtttccttttactcccctggggcataaaaagcaaagtgccctttg

SEQ ID NO: 32263 - DNA, 1340 bp, Artificial sequence
  DNA replication origin
caggacccaccactgtccgcactctcccagctactttgtccctctcttttaaaaatattcatcagatgatgtcactgtcctgatctggtgacacagccttccactggtgtcctgtgtcatttggaagaaacacttaaagttgcttcagtggcctgcaagccaggtgaatctggcttctgtgatttggggacttcctaagaaaataacatacgaggtctcacatgggggccgtgcgctcatagacagcttcacggtcaaccccctttgcctttggggctctcggcagtctggctccctctcctagtatactccctctctcccctgcagccccactggcttcctggccatccctccacacaggcgcatgcctccccgaccccacccctgcaccacacctttgcaggtctactgcatggaatgctcttccctgcacaattgcaggcctccctccctccctccctccctgcctgcctgcctacctgcctcggagctgtgcacatatggcacctttccaaggccatccaggagcagaacaccccatcaaaataaccagcatccctatggcatttccttctccttttccccacgaatttccccccagggacttagcacatctggcttcatgcggatgtgctggatcccgccatcccactttgcctccactggaatgcaggctccctgagggcaggcatccacaacggctggatttagtgctgaatccccagtgcccaggatgtgcctggcacatagctggggctcactccgtattcttctgagtggataagtaaatgaatgaatgaatgaacccacaaaagttactcccccattaatacttctgggtttatttagaatcatatcccacgatcacaccggagagcaggaattcccgggatatggaggggactgaaggattctgtttgtttagttggtgagggctggcagggggtagacccaagcctgggaagtcttgtttgcttaatttactccaacccaaacagtgtatgtgtgccatcagccagacaggacacaaaaacggtttaggagatccactctgattagcctgagagactgtctctgggacagagtcatgagatcagggtggccagggagtggctgagctgtgtctccctgaatcccccccaccactggcaccacccagaaatttcacaacggagttttaaacagcaacacacaacaataataaatctaccagtttgtttcttttcctaaaatccagtcactggacagagtaccacccccataccgaagaaccgaagagcagaaccagcatcacagagagcccagcaaccccggagcaatgcctggggaacatctgccct

SEQ ID NO: 32264 - DNA, 1100 bp, Artificial sequence
  DNA replication origin
tagagagagagagagagagagagagaacaggtaaaccacaaccccagaggcagggtatgggctcctacaagatggcaagctctagaaggttggggccttatttttctcagcaccacagctaagccatcgagaatggtgcctggcacaccccaggtgctaagcaaacatgcttgagtgagtgcatgaaagagtgaagagccaatagagagacatgggtgacgggtgtctaggaacctaagcagaggtactgcattcatgggaggtgttctggcttcctagggcaggtgaccaaccctggagtgaatcggagaggagaggggaggggaggaaaggagaggggaggggaggggaggggaggcgaggggaggcgaggggaggggaggggaggagaggggaggggaggggaggggaagggaggggaggggaggggaggggaggggaggggaggggaggagaggggaggggaggagagaggagggcaggtgcagagccttggacagaaggggtaggggaaatgtcatctagggaatgcaaataatagaggaagtttaggactaggggtagcaggagatgagaccagacatataagttagaaaccagatcaggaagtaccttgaacaccatgccaaggactttaaaaagccatttgaggaattttaagtaggacatgatgaagatttgggtattcggaagcacgctctggtgccgatgtgggctgggtagaggggaaaaaccaaggcaggaatctcagtagggaggtggcccaggtgatccaatggcctacggaagggcggatggagttagtgactgtgaacaccaggactcggtgaccagtcccacccacatgggagatgaggaagacgcaagccacctcccgggtttcgggtttgtccaactacataaatagggggccagtttgtgataaggtgaggaggaagaagttgggcttgggagaccaggacatcaggaaattgcagtgcaggggccttcagcttggtgatggtgtcatttatcgcattattacccacagtctactctgctattccttacaccttttcctatgttaaaaatggcacaaggccgggcatggtggttcatac

SEQ ID NO: 32265 - DNA, 890 bp, Artificial sequence
  DNA replication origin
acctctgtaatctgctctcatcctgtcttctcacttcgcgttcttctccatgcctgtggctccagccaccattcatatttttttgtaatccctatgttatctattgctgtgtaatagattatccccaaatttaatggctttagacaacaatcatttattagctcatggtttctgaggttcaggaatctgggaggggctcagctgagtgcctggctcagcgtcccttcgaggttgcgttgatatgttggccggggccgcaggcatgggaaggctcaactggggctggaggatctgcttgtaagctggtctctctcgtggctgctggctgtggccccagttcctctccaggtggcctctctgtagggctgcctgagtgtcctcatgacagggcggctgacttcctccagagtgagagaaagatggagctcttttaagacctaatcttagaattgatgaaccttcacttctgctgaattctattggtcacacagaccagtgctggtatgacaggggaggtgacaccagggggtgtctgggcaccaggaggtgaagacacaggggctgtcttagagcctggactgccacagtccccagtgcaggcaggattctctccagcttggatgctagcaccaccactgaccaaccctcctccccgacattccaggggctcttcaaactcagcatgtccagtgtgagctcagccccatcggccttgaaacatcatactgtgccatttcttttttgttttgtttttgagacagagtcttgctctgtcatccaggctggagtgcaatggcatgatcttggctcaccgcaatttccacctcccaggttcatgcaattctcctgcctctcgagtagctgggatttcaggtatgcaccaccatact

SEQ ID NO: 32266 - DNA, 1948 bp, Artificial sequence
  DNA replication origin
gggtcttcggtcttcaatgagaggccttccctgaccacccatgctaaaggagtccccaaccccagtttcccggtcactctgtcatagctgcctggcatttgttgcaagttgtaattatattttcatttgtttctgtctcagccatgacctatgaaggctgggaaatatctgtttcattcactaccataaaccaagtgcatgatatatcctagtttctctatatttgttggataaatggatggaaagaaagaaagataaaaaccctgagtttcacctggaggcccagttcaactggtggaaaaaccacttccctccccaagtcacacacccgccgcggcagtagggctccttggctctggaggaaaacatagctgggctgggggaggaggtggagaaggacaggagactctgaagttgacccagaccagctcttccatcattctaaaagtggggaagctggatacggtggtgcatgcctgtaatcccagctacttaggaggctgaggcaggaggatcacttgagctgaggagtttgaggctagcctgggcaacatagcaagaccccatctcatatctcataaataaataaatagtaattaaaatgagggcttctttaggaattccaagtggccaccgtatttccttcaagcattcaacaaacatcaacaggctgaggctgtacaactgggctaggtggtgggaacctgtcccctcagcagttcagagtcttggtggggaagctggcagccaggcagggcaggagaagatgcagtgtaaggggtgaggcctgaaggctgactgtccccctccacccttcctccccgagctgtgaggccctgggcaagtagcataacgtcttaaacttccacagcttgcctgtaagcaggactgctcccaccgcacaggctggcaccccctcttgttcctcaccaacaaagcacttgggcctgggccagagcataggtccacattgccatgatttcaactggtaattacaatacactgcagagaagacacacagagcactgtggacacagggagggttggagtgggctggggaatgagcagctttctgaaggaggtaacagtggaggcttgaaggagcgggaggcgtggagcagagaagcagctcagagacataaaccctcccatgcccaggcaaggaggccagagggcctgaacagctgagggcttcagcagcaggacccaggctggaagtgaggcccgtcaaggactgaacccaaccctgcctacagaggagtatctgtggccagcggcacagtcaccaacaccagcatccggtccagggccacagcctgagatagccacacccaacagaggcacaagaggacccacgcaggagccatgcagagctggaggtcgatgattttcatctgaacagggagctgggccccgaggaggacttggaaccacccaagtctgccccatctttgggggtggctgtctgtccacgcagtggccatctgggatatggagggtggcacgtttgccacagttcaggttcatccccatgcgtgcttccccaggtgttgtgccccgttaagggtcgaagccccctcctcacagcccatcctgtttcccggtcccctcgaggatctccacaggtgagttacctggcttacgtcgggtgggaggtgaagagaggaactttctagttgcttttctccagcttggaagtgaggccttggagaagcctcctgaaggggggaagggagggacggctggcacgggtcgtgaacaccatgggggaagcagagaagggcggggagttggggggtgcagggggcttccgggggacaagggaggggcactagtgtagaagccacgatggggtggggtacaagggcacaaggaggtaggaagggggaacagggggtggaggtgtggggagagggagaggggactgggacaggggtgcaaaaaggca

SEQ ID NO: 32267 - DNA, 1349 bp, Artificial sequence
  DNA replication origin
cctgtttcccggtcccctcgaggatctccacaggtgagttacctggcttacgtcgggtgggaggtgaagagaggaactttctagttgcttttctccagcttggaagtgaggccttggagaagcctcctgaaggggggaagggagggacggctggcacgggtcgtgaacaccatgggggaagcagagaagggcggggagttggggggtgcagggggcttccgggggacaagggaggggcactagtgtagaagccacgatggggtggggtacaagggcacaaggaggtaggaagggggaacagggggtggaggtgtggggagagggagaggggactgggacaggggtgcaaaaaggcaagaaggtgggggaggggtgcagagggtggggaggtgggggaggggtgcagagggtggggaggtgggggcaggggtactgggggcagggatggggatgtgggaaggtgggggaggggtacagagggtggggaggtgggggaaagggtactggggcagggatgggggtgcaggaaggtgggaatggaatgcatgggacaggcacaggtacataaaggtggttgggggcacaggggtgcagatggagggaggtgggggagagggtatgacagggtagggcacggggcaggggaggggtgcagacatccacagtctgggtgcaggtgtagggtggcagaaggtggttgggggtgtaggcggtggacggggtggaggttaaggcagaggcccctgtgggcagggaccctgcaggccgggaccctgcaggcctccagcctcggcacagcctgagcagtggcagcgtggcagatgggaacgtgcagaaacatgcagaagcatggcccctggttaataagattaggatgttgaacggccgacatgttctccgagactggctgtatgccacaaatggaggggactgcgaccttaatagaatgctgaacttttggaaagtggagcaaaatggagagagtcagagttggggactgagagtccccctctcgggctggaggccagggctactggtgacctgagggcttccgggagttcagagtggggcattttcacttctggatcctaaaagccggtgggcctggatgggactcattccttggcgtcctgttacagcaacaggaatgaccagcgctcctaaaggccccccacctggccctgagacctccatctctgcccacggtctggctgcatctcctggaaggttttgttttttaatgctcctgtcctggggctcttcctctctctaggcctagcacacacttccagcctgggcatcagggaaataactcaaaaccataacacgctttaaaaaatacactagcc

SEQ ID NO: 32268 - DNA, 1012 bp, Artificial sequence
  DNA replication origin
tgcatggatggatgagtgaatgaatgaatagtggatggatggatggatggatgaatatatagatggatggaaggttggatgcgtggatggatgagtgcatgaatgaatagtggatgaataaatggatggtagatgggtgggtggttggatgggcaggtgaatggatatgtgaatggatggatgaatggatatatgagtaggtatatgtatgattggatgaatagatgagtgaatgggtagatggatgggtgggtgggtggatgagtgaatggatgggtgggtggatggatggatggataagtggatagatgagtgagtagatggatgagtgagtacatggatgggtaggaatgtggatggatggatgggtagatgagggtatgagtggatggatgggtatatgagtggacatatgagtaagtggatgggtaggtggaaggatgagtgcatgagtggatgcatgggtgggtgagtggatggatgagtggatggatgggtagccatatggatggatggatggatggatggatggatggatggatgagcgaatgggtagatgtggtgggtggaaggatgggtgcatgagtggatggatgggtaagtggatggaagggtgggtgagtggatggatgagtgtatggatgggtaggcagatggatggctggatggctgaatgggtagatggggtgggtggaaggatggctgcatgagtaggtggatgggtaagtggatggatgggtgagtgagtggatggatgagtggatggatgggtaggcttatggatggatggatggatagatgcatggatggatgggcgaatgggtagatggggtggggggaaggataggtgcatgagtagacggatgggtaagtggatggatgggtgagtgagtggatggatgagtggatggatgggtaggcttatggatggatggatggatgagtgaatgggtagatggatgggtgggtggaaggatggctgtgtgagtagatggatgggtgagtggttggg

SEQ ID NO: 32269 - DNA, 1173 bp, Artificial sequence
  DNA replication origin
aaaaacagcaccagagaaccagctcctcaaaggtggagacttggagagtggggagctgctcaggagctcacacagtgctgtgaaaacagtttttcagcattagaggcaaccacacattttaggagcaattccagttgcccgagtttttccagggtctcccctccagtgtggcctgcactggtccaagattccgtcgggtgaaggtcagcctgtcaccagcagcgggagcagcagcagagccctcctttgccgctcactctggccctgagtcctgagccaccgacttcactgaaaaactcccatgtccacttcactggcaatggacattagttaggctacacagttatctaggactttgaatgagccgagataaaatttatttagcaaaaaagtgtcttaaggatatgtatgtgcatgtgtgactgtgtgtttttgtgtgtccacacttgtctgtgtgtgcgtctatgtatttgtgtatgtatatgtgtgtgtgtgtgcctgtgtgaatgtataagtgtgtctccgtgtgtgagtatgagtgtgtctgtgagttcatatgtctatgcatgaatgtatctgtgtgtgagtgtatatgagtatgtctgtgtgtgtgtctacacgtgtctgcatgtgaatgtgtatgtctgtggagtatgtttctgtgcatgagtgtgtgtgtgaatgtgtgtctgtcaatgtatccgtatgtgtctgtgagtatatatctgcgtgtgtgtgtgaatgtgtctgaatgtgtgtatctctgtgtatgtgtctgtgcctatgtgtgtatgagagtgtgagtctgtgagggtatgtgtgtgtctgtgtatgtgagtttgtgcctgagtgtgtttgcatctgtgtctgagtgtgagtgtgtgaatgtgtgtatgaatgtgtgtgtctgagcatgtgtgtgtatctgtgagtgtgtctgtgcatgtgtctgtgcgtgtgtctgtgagtgtgtgtgtgcctgggcatgagaatgtgtgtgtgtgtgtctgagcgtgagtgtgtatctgtgtgtgtctgtgcatgcctgtatgtactggtgcattgctgtggtcactgtggtaaagcaggtgcctggctttacctggtgtaagggggacaagctgtgtctctcatgccccccatcctctttgcgtgtcttccggcccctcccag

SEQ ID NO: 32270 - DNA, 956 bp, Artificial sequence
  DNA replication origin
aagtctgcctgacactcaagcctgtgttctggctgccctgccctgtggaccctctttgttcccctcaggctggtttcctttgctttttgtgactgtacattttagctgttcatgaggctgagttctgtccgttgatgttctatggtttggagaagtctttagcttctctaagcccgggtcttctattccataaaagagggagaggaaaccccacctcatggtggtgtctgaggattaaaaaagttatgctcatcagaacctaacacagagcctggaatagaattaatattcaaatattggttttagagttataatgattgtatattacatcaaaattactatccaccctgtaatttttcccacaaatgtatattgaaaaccttccatgtgtgagaccctgtgttaggtgctagacatccagaactgagcaggacgtggtccccacctcctaggagcccagcctgctggggaaggcaaagtggaaacagcacagcacaatgaagtcaggctcacagcggggtgcgaagcacccacgaagaaagggccagcagggccaggtcgggggtgactgtgagtgaagatggagagggccaggtgaggggtgactgtgagtgaagatggagagggccaggtgaggggtgactgtgagtgaggatggagagggccaggtgaggggtgactgtgagtgaggatggagagggccaggtgaggggtgactgtgagtgaggatggagagggccaggtgaggggtgactgtgagtgaggatggagaggatgcacagccttaaattcacagccaataaaaatgagagaacaaaagtaactcagttaagcttatgattcaaaaaagttagaaaaaggacaaaaaataatgcactgaagaaaagtagaaggaagccattaatgaactaatataataataatgggccacaaaatagaaaaatgggactagtaaa

SEQ ID NO: 32271 - DNA, 963 bp, Artificial sequence
  DNA replication origin
tcacctgtgaaatagggagaagagtatccatatccccaatggatgactgtaaaaatcacatgggtgatagctatcacatacccagcacaatgcctggcccatggtaagcactcgggaagtggtgatagtgatggccatggtggtggtggtagtggtggtgatggtggtgatgatggtagttgtggtggtggtgatggtggtgatgatggtagttgtggtggtggtgatggtggtgatgatggtagttgtggtggtggtgatggtggtgatgatggtagttgtggtggtggtgatggtggtgatgatggtagttgtggtggtagtgatgatgatgatgacaatgataatggtggtgatgacagtggtggtggtggtggtgatggtggtggtgatggtagttgtggtggtggtgatggtggtgatgatggtagttgtggtggtagtgatgatgatgatgacaatgataatggtggtgatggcggtggtggtggtaatggtgattatgtcagtgatggtggtggtggtggtggtgatggtgatgatagtcatgatggtggtgatggtggtgatagtggtggcaatggtgatgatggcagtgatggtgattatgatagtagtggtggtggtgatggcgatggtaatggtgataatggcagtgatggtgatgacggtggtgatggtgacgatgatgatagtaatgatggtggtgatggtaacggtggtgatgatgatgatagtggtgatggtggtggtagaaggcagtggcagcagcaatggtgttggcaacaatgacaacaattacattatcccagaactccaactacaacaatgtcaccaaaacccaataccatacagtgaagacaggccccattggaaagatgaatcaatgcccacagagcaaaagaaatggaagattctagaatgtcagagcgggaaagcatacttgcaatcatccagacgcaa

SEQ ID NO: 32272 - DNA, 1171 bp, Artificial sequence
  DNA replication origin
cggggttttctggggtgagttgtccatttctagcagctatccaccctcctccccccaaagaaaaaagggaacctgggtgattgctttgatccaccttcctcaggggcctggggcctagagagacccgtgcccaccccggggacctcgggtcgcctctgggtgccaggaggagccaggagtccagggaagtccctaggctccgccccttactcggatgggcctttgcggcaaatgctccgcacccagtgacctcggttgggagccacagcggggctgggagtattcactgcccttccgcagggaccagaggcggatgtcgagggaaggtggcggcatgggcggcccctgcctctgagtggctcagcaggcactcagcgggcgccagcaccaaggacagggccggggcctccacagcctgccctcctcgccctccctcctctgacacggtcccagggccgctggaggcgctgcgggcggccgccctcaggctgctgaggacatggggagggctcccgaggctcattcaagagccagaaaagcccagggcctgcgaagaggtaattacagcaaggaggcctcctgggtaccattccagagtgggccttctgtcctgcgcctgtcacttactcaacttggagcgtggctgatggcgcatcggtgaaatggagagattatcgggctctttggtgtctagggatgaactagacactgtagtggccagagaaaatgccatcttccctggctggttcagccctgttgcctctcccctgcagccttctttgacacctctctcccagccacattcagccctggcctaaggcgccttcataccgatgtgtggcagttggaggtgccttgctgctgagggcaggggccctgcttggtttatctgccccctcccccatatacgcagatggtgttctgacccatgatgcctgtgcaattcggaaggaaggaatgcataagtcacgctcctatccctcccagaagcgccagagtggtggtggtagggggtggggggcagtaaagagaggaaaacatgtcagtgggccagagccacagtgctgaacgcgaaactgcaatattatttttcagcccttgcagggtggggcttccctcctctagcccagcccagcccagagcctgcaagttttggtcggttgtctccctg

SEQ ID NO: 32273 - DNA, 1927 bp, Artificial sequence
  DNA replication origin
ggcggccatgccccggctgcatcccggccgccgagcgggcagcggcgtcctggggccgcacaggcaccggcgagccagcggcaaggggcgcgcgaggccgggctcgggcggcagctgtggcagctgcttctcctccgaccacgcgagctgctggggcccggctggggccgctgtccgaggaggttctgctggcttcggagcagccccgcgctcgctcttccctcgcctcctctctctctctctctcctccctcctctctccgccctccttctctctctctctctctctctctctctctctctctctctctctccgccctccttctctctctctctctctctctctctctctcgttcctctggctcgttcggctggagcgaggcggcagcaggagcacgcggcggcggcgcgggcggcggtggcagctcgagcggagcgcgcagcgcgcggcatgggagggggctctggctgtcgcgcggccggggagggcggcggagcggggagagccatgaccgggtgggcttcggcggtcagcaccctgcagccttcagcgccaactcctcggggcaggggcacagaagaggtggggtacacacggaagatcccagaacccagtgctgccctggtcccttcaagggcagccccaagcccgctgcccctccccacctccaagctatcttgggggcggatcaacccaggtgacccttaacaggacccctgcccttgtgcctcgctgtccctgggggccatttttctttgccaggcccagggatccccagcaatgggacgtggtcaccaagcatcagggacgaatgccaccccaccccgcatgccatgccatgcctttgagttgcccacataccccaaaccccctcactaggcccaggtgccctgacttcctggaggaccactggaaaggaagggatcgggcccactccgtgctgttagtccagattggccaacccaacccatttaaacatttccacctgtgcctggctggagaggaaggactgtgggaggtcagcttaggatttccctaaaatcaaaagatcaggtagctcctgtccccagtcccagcctcccccagcatctagagtaaggggcctggtgtgagttctgggagggtctctatccttggtgcagagggagcaggagagcagaggctgaggacacagtggagtggggaccctctggaaaggcaggagagatctattgctggggtcagcccaccactggcacacaacaccagaagtgggcaagaaggtctggacggtcccaaacaggtttaggcaggaggctgagtaatcatttccaaaacaaaagacattctggtgcagcaaccaggctggagaaacgagcctgcaccatcgaaggacatttccaaattacacacaaacagatccaaacccgtccccatgtcacttttgctcctgaaggctgctcctggaacaattagcctcctcctcgcacctgactgtcctgcttttctgtgtgaggtgaaaagcacatcatggaatctggggtttggtaggggcctggaagacccagaggccaggaagaggggagtatggatttggagcttctcggtagtaggggctctgggctgctggctgccccccctgcagggcagcagagacggtggccaagacagtggccgctgcccacttatgagcgtcatgcttttaatttctggccctccagcccgtctgggtcattgatctgtcttggccggtgggaatcgtgttatacaattccaagcatacagctaaacagccccacagctaaccaccagataaatgccgtgtctacgagcaaggcagccgcctggttgactgaactttcccctgccaccggatttgaaatggcgcattccagctctaaagccctaattgggcctcttggttctctgctgtcagatggtccaggc

SEQ ID NO: 32274 - DNA, 1237 bp, Artificial sequence
  DNA replication origin
ctgtgtcatcaagcagcacaaaaacagtaaatccttgtggtgtggacgtgggaccctgaactacctggacttccctctgacatttcccatccacgtgggaggagagacggacggcgtgcaagtggttcatcctcctctggagaagataaatgtcagaactgaaagccactgggcactgatatggagtcgcacactcttaaataaaatatcaagcctggaggtgcacatgtgacatcgcagatgcgcttgctgctccctgcatgtgacacaagaggcggcggggcagtggggctggcgcagtaggcagcatcccaggccaggacccagagctgctggcgagccacgggacattctgggcctcagtgttctcatctgtgatatgggcggactgtgcaacatgacctctgaagttgctttcagctcaaaatgcggggatgacttccacgacagtgagaccactggagggatgagctcattggggagaaaaataggatcacctgggaaaatgggacgctggtgtttagggagaagcagagaaagacaggtggagatgctgacgtgcaacctcgggagagaagagtgggagacggtgctgtggtggaggatgaagtcgaggtttctagaaagggacttggccacggggccacctgcagtaaaggatcaagtaaaccaaggagggagtgcaggcctggctgtttgtgattcagccttccctggtgacccgagagagccatttccctggggtgtccgtgggtgtggacgtggaggtagggatgcttgtgatcgagggaaggcgaggatggaaggggaacgaggggagagaagagcatctaggggtgcttctggaaggatggggaagaccagataaggtttttaggctggtaggctaagacccccccatccccagagcaggaaagacagaagaggatagagcaagagagggctggatggagggagaaaacggaagaagaatttgaaagggagcaggaagacaagatgaaactagaaggaggcgtgcagggagaaagctgctcccactgaaggctctagcttcaaggtgaaactgtgccaccatctgccaggaaaaaagggtcaggagaaagagggatgataaaccttgggactgaagtgaagagcggagagccagccggcggacacagctgaggctgaggctgggtgtgtgagggccgaacacctctcttccagctatgggacagagcacagcccggccctgtga

SEQ ID NO: 32275 - DNA, 859 bp, Artificial sequence
  DNA replication origin
gacagacagcaaggcagtggttgcccgggggtggggaatacagggagagggaggaggaggaggagggcacatcagggcaggaggaaaccttgggggtgacggatatgttccctatcctgatggtggtgatggtttcacgggcatatctgcatgtcatagcgcataaactgtaccctttaaccatgggaggtgtgccatatgccagtcacacctcaatcacgccctttaaacacacacacatgctgccttccccagtctctgagtacacagggcaggagtcctgcccttggggcgcttcgtggtggggaccccttccttgagcttggctggcagtgagtgtgcccaaagtgggagctccggatggttctcctcgagggatggggcggggggtggggggcgggggtgccttctaagggtgagttcagaggtgggagaacctcagtgacatgggagaggcgtctgcaggctccaagggctgcctgtgagtggagggtcggcagggcccttacttccagaagtgccgaagcaccttggccatcctggacacaagagaagcaggtcccgagaaaatcctcaacagagacagaggactgaggtggtgctaggcaccagggtgagctgctcccttcgctcggctctggatttagttcggacttgctggtctctgagagggctctgtggtcgctgttggacttgagtctccagattccaccaaaccccctgccctggagctcctccctgtctttctggctgcctggcaactggaggcctctctgtgatggaggactttctggaatgatggaacttagtagggtgagggctgcctccctcccttccccagcctccctcccttccccag

SEQ ID NO: 32276 - DNA, 1202 bp, Artificial sequence
  DNA replication origin
atgatggaaggtgcagcaagatagaggtgctggctacaaaacatggtgaatgcaccgagtgcccctcaattgcacactttaaatggctacttttatgttatataaatttcgcctcaattaaaaggaatggagttcagggctcccctcgctggccccagctcctgcctcttcagtctaaacccgggcacgtcatggcagacaaggactctgcggccttgtgatgaagcagggattgcatctatgcacccatcccctaatttcctgtgttagccctaagatctcagatcagaactggtgtcccacaatccaggggagtcttcgagggggaaacgatcaggtttgcagaggtctgagcaggaagcgcattggggccaggccggggttggtcatccctaggtctgtccttgtttggggtggggaacagaaggatgtgctaggctgggagggtgacttgagccaagggcagctggggaccagggctccggcctggtcaagcatagatcagcacacctgtttgtttggagttgggggtcctggaacagaggagggggagttgagcctgtaggagcttttaaatgcttaaagcagccgctttctctgaggcctgggatgctgtgaggacccttgggcggggagcaggcctgagcagagcctctgtgcagttgttctgccgccagcagagagaggcagcccaggggagtgatgggggctcaaacagaggtgagggggttgacggggaccgtgggggtctcttttgtctacgcttgtacttctgcatcttgagaacgtaagccctcccctgctccctccgccggctgcccttgcagggggcacttggaagcctggaggagacagaaactagcaacctggggagggaggaagaagagttattttggaaaaaacgagctgcccagagaaggaggaggagagaggaaagtcatctccagcaataagcagctcacctctcctccctaccaccccagccacctacgccgctgctccctgcagaagagaagcaggaagaggttttgcagaaggcaccaggctgcttgggtctcggatccttggagaggcgcgggctcttattctttggcttgctgtgggcagcctggggctgtttcacatagaatcacaggtctcactcctggagtcaggcctgagggcttatggggtctttcctgttagcagaggagaaagccgag

SEQ ID NO: 32277 - DNA, 941 bp, Artificial sequence
  DNA replication origin
ggggagagaggtggatgtaaagagaggaaacagtttttgcgggaggtgcaggagcatccatctaaatcaaggatgtcgaattattgcagattccttttgagtcctgacaaacttcacaggttggttctgggcccctccatgggggtgtctcaaggttccctctactttaccccatctgcctgccaggtgagggctcctcttctgtcaggtgagggctcattgcaggctaaccccgcttcactccttctgccctggccaggcagccctgtgccttaagtgaaggaggccgctgcggtccaggcagcaagtgtttaagggaaagacggtgaactggatgatgccagggatgggctgggcagttgggtgatgccaggcctgggctccctgggctggactgggaagttggcagacccagtggcaagtgtagggctggaagcaggggatggagagaaggggcagctggaaggtatgaggtcttaagagggtcctcaggcaagcctcgcttagaaggtgacattcagcatcatcttgaagggtggggaagaggcatgaggatatctgaggaggattattccaggtaggggccaccagaactgcaaggtctccgtggccaaagtgtgcttggcatttggtggcgcataaagaggcggtgtttctggcgggtggctagtcaggaggaggagggtgggactgaggggtggggcacaccacacaggtgcacttgctggacattgcacgcaaggttttggggttctgagcagaggagggacatgaactgacctaagaatgagcgaaagaagaataagcgaaaggcggggtgtggatgtggggagaccgttcgggggcttcacgatggcccaggtgagcggtaagggcagcttgagtctgagcagtggtggcagaattggtgagaagtgattagactctgagtatattgtgaa

SEQ ID NO: 32278 - DNA, 1009 bp, Artificial sequence
  DNA replication origin
tttggttgctgttgtccactggagacttttctcaactctctggcgctgtctgtctttccccttatgtttaagacctgcagcatcgagctgatggccaggagctcacagaccctctctatctaggttcctccagaagccaaccctgagccaaggcttgggggaaagcagtttactggggaggtggaggaagccctggtaggggaagtgggcacgtggaccctggaagggaaggccgccaagaaggggtgcatcaccaaaccggcgacttggtgactcaatcctgcagtgcgtgtgtttggaactcaaccctgcagggacctctgaggaacagtgcagaacacacacctggaatcccctgcctggatggcgctggcggagctggggtgtttatgccccacctcaggcgagtcccgggtgcagggctcttggagaggccgagggtaaaggccaggaccctgtcacccccacgagaggcagagccatcttctgaggttttaggagaagcttcaggcatggagatgctggtgccaccctggagcctgcagggcgcttggagatgccggggactggtgggcgctgacgtcgatggcagtcttccctcgggggccatgggtggacagctgcctttctactgtgactcctaagtgtcggtgtatttataggtctgttctctggggagctttagtctctccagaagtgcatcctctgatctgcctggggtgggtcctgggttctggggtgggcagtggaggggccggagacttctgtttaatagtccttcagtactgtgcttgtcccctgctctgtgagcctggcatccctgagccccaggtctctctggttcacgtcctagtggaaatgcgcctcagtgggtgggagagcggcgtggctgcaatgaggctggcagggtgcagaatccttatgagaacccccagtgccttggcctcccctgggcctttaaagtacccagggcctctgctttccctgagttttggaggttccttagggc

SEQ ID NO: 32279 - DNA, 1089 bp, Artificial sequence
  DNA replication origin
aacagcaaatggcttttatctcacagtttccatgggcgggggatctggttgggcttagctgggtggttctggcttggggtgtgtcgtgaatttgcagtcaatatgtttgccagggctgggggcatctagggcatgactggggatgaaggatctgctcccaagctcagccacttggttgctggcaggagctgcagttcctcggcacgtgagcctctccatatggctgcttgacatggcaggtggcttccctcaaagccagtgatggggggtggtggagggggggaaagagagagaagagagagagagaggaagaagacagagagaaagacagagaaggagagggagaaggatggacagggagagggagggggagacagagagaaaggcagagagagaaggagagagggagggaaagagagacagggagggaggggggagggggagggaaggagggagggagagaggcgggggaggagagagagagacagagagagagagagagagagaggaaagggggcaagagagaaaaggagaaagggagaggacaaaccaagatggaagctgcagcatcttctgtagcttaatctcggaagtgccatatcaccagtcacattgcatgccacactccatcagtcacagagaccaacctggaacagtgggaggggacggcccgggggtgtcaccaccagaaggcagccattttggagtctggcaccacagaacatgatccgcatcttcccctgtctgttgttttggttgctgttgtccactggagacttttctcaactctctggcgctgtctgtctttccccttatgtttaagacctgcagcatcgagctgatggccaggagctcacagaccctctctatctaggttcctccagaagccaaccctgagccaaggcttgggggaaagcagtttactggggaggtggaggaagccctggtaggggaagtgggcacgtggaccctggaagggaaggccgccaagaaggggtgcatcaccaaaccggcgacttggtgactcaatcctgcagtgcgtgtgtttggaactcaaccctgcagggacctctgaggaacagtgcagaa

SEQ ID NO: 32280 - DNA, 1059 bp, Artificial sequence
  DNA replication origin
cagggctggggcagcagtgacttacactggattcaggtcctcaaactcacagcataggggcaagaacacatctcttctgtggctccacccacgtcgctgtctttggcacctgcttccctgagcagcagacactgtgcctgcctgtcctgtcccctcacccttgcaatgccttctgaatgccagcacctgtgcttctttgtctgagggctttctctggcttttcgagccactttgtccccatcctccccaccttgcatcccaggcagcaggctggaagcaccagggtgttcacatcccaagggagcagccctcagaggctggtagggctggtgtgggaactcccagctcctttgcctcctgatgggataaccccaagacataagccacactccggcggctgtccggataatcctcctggataggctgccctccccggcccgtcccatgcccctctcccccactaacaggttttgcgtcccccgacaaattacttgcaccctatccttatctcgggtcttctggggaaaccctatccaagcacccactgccggctgctgatgggacaagctgggaattggagtgaacatcagaccttgagcaggccagcctcgggggtggatggtgcaagaaggcaccacctcctgcaaatgcagctaaatcagccagggctgaggtcttcaggcagtggtggacacctgagggtccaggggagtcaaagcaaagcccttggggtcagcagcaagcagaagccactgagaaaagagaagcagtggagcaaacccaacagctcccaggaagatccacagagggccaacgggcacgtggaggtgctcagagccctcagtcatcaggagaatgcagagcaaagccacaatgagataccactgcatacccactagcatggctatgattaaaaactagaaagtaagtgctgccgaggagacagagaaatcagaaccctcatcactgctggaggggatataaaatgttgcatctgctttggaaagtggtctggcaaatcctcaaaaagctaaacgtagagttaccatatgatccatc

SEQ ID NO: 32281 - DNA, 873 bp, Artificial sequence
  DNA replication origin
gtggagggggctcagggagggggtggagagggttcaagctggaggggttcaaggagtgggtggaggggattcaaggacatggaggagagattccaggtcacacggaggtgacggaggtggactggcactcgagccaggctggggaagtccgcgatggtttcagaggagacaccctaccccagggcacagacctcttcccttattaccgacctttcacctgagcttgttcctaaattgccacagcacctgggaaagaaacacgccttcagaggtagctgcaggtgcccctagctcctcaccagaaccctgagtgcccactggagaggccagctcccggggcacgcgctgagtcattccaggctccaagctttaacttggccttgggtgccttggccctggacttgctctgcatggtcccagccaagcggtccccggagcccctgcctcctggatccccaggctaaggagctgctgggcccagaggcagccgcaggatcaatgcattgctcagaggaaagcaggagggacctggaacttggaagtggcctgtggagccatatggggaggggaagccagcagggacgcacttggatcgtggtccgggcaagtatttggggtcagtgggctggccgagggtgggaggctgcagggaggcctgcctgggaaaatggcattgctctgttaggaaaaggctggggttgaggaaggaggggaagcagcatcttttatgaagggatccaacctgagcatcattaatccaacaaaaacaaccatcacagtgaaagggttccaagtagacacagcacacatccccatcaacatgttaatgagggctcattaactgcaagtgagccctgcacagcccggggaggc

SEQ ID NO: 32282 - DNA, 1023 bp, Artificial sequence
  DNA replication origin
cattgctgggcctgtgccgggggaggtccatagcatgttcgagactcagaggcaggagggggtctggctgctcagggggcccggcagtgcagcccgggaagtgggttcaagctggtgcgattcctagcaaggattcccgggctttctcccactgcaggcagagtgtacatccccttccctactgacactgggctccagggcctgactgttgaccagcgggatggcagtggacaagatgcacacagagctcacgtggctggcttggttcttgagttcccagtgacagatgcctggagaaaagcaggcctcaggcagccactgctccttcagcctgggcttcagaatgaacacacgagggacaggcctgggcccagcctggtctggaggaagctctcctggaacgcagctgcagcagagtggtgggtggagcccgctctaaccagcagagctcggacccgcctgcaggctcgctagataggaatgaataccttccccagtgacatggcgggagttttcttacctagtgttaactctgcagttgctgactaatacactgcatcaagaggctggggagctttagaagtagatgtggcagttgaggggactcaggggagtggggaagggcatgagacctgcaaaggggcagcagtgagaggtgtggactgagtgtgcagggttcaaagtggaggtgagggggttcaagatggaggggttcaaggtggagggggctcagggagggggtggagagggttcaagctggaggggttcaaggagtgggtggaggggattcaaggacatggaggagagattccaggtcacacggaggtgacggaggtggactggcactcgagccaggctggggaagtccgcgatggtttcagaggagacaccctaccccagggcacagacctcttcccttattaccgacctttcacctgagcttgttcctaaattgccacagcacctgggaaagaaacacgccttcagaggtagctgcaggtgcccctagctcctcaccagaac

SEQ ID NO: 32283 - DNA, 1049 bp, Artificial sequence
  DNA replication origin
ctgtctgctttaatgtgtccacacccagcgctcgtcccgctttcagctctcagagccccctgcctggggcagggtgggattctgatggacctgccatgcctgccaacccccagatggccctgcaggggagaagtgaagccacgttctcaccagcacaggatttcggggcccttcctgtccctgggtcttaaccaggactttaaagttttgatgatttatgccctgttagagagtgtgggtcagttcccactctagaaaagtctggcatcagtgagcaagcagaggggataacagagtggcaaccatagcaacagagctggaggtgtctctgcagaggctagggcagggcagggcagggcagagaacagctggtccccttgtccctgccttgggcctggatggggccagcacatcaaagcttccccaacctgtgggggaagcgcactcccttgttgagctgtgggggttggggtgggtatgctggggtgaacctggcccttctgagtgatagaaagctgggtgcgcgaggagattacagagtgtgtgctgagcatctactatgtgacagggatcatgcaaggggttgtgcaggtaaacaggaccacgagaggccacagaactgtaggcatcggcaacccagcatatgcagcacattgctgggcctgtgccgggggaggtccatagcatgttcgagactcagaggcaggagggggtctggctgctcagggggcccggcagtgcagcccgggaagtgggttcaagctggtgcgattcctagcaaggattcccgggctttctcccactgcaggcagagtgtacatccccttccctactgacactgggctccagggcctgactgttgaccagcgggatggcagtggacaagatgcacacagagctcacgtggctggcttggttcttgagttcccagtgacagatgcctggagaaaagcaggcctcaggcagccactgctccttcagcctgggcttcagaatgaacacacgagggacaggcctgggcccagcctggtctggaggaagctctcctg

SEQ ID NO: 32284 - DNA, 1857 bp, Artificial sequence
  DNA replication origin
ctgtttgcaggtgaactttggaggggacacacacattcagactggagcacccagtcctccacccctgcctccacctcctgtccctccctgagcccttcccaacaccccctccagctcccccaccctgccctccccctcatcctgtcccccgctccccaggccctgtcccctctttctaggcctcctgaagcaaggcagagtgcccgcactcctttttcaggaggagactggctgggaggaagaaccttccagagcaaggcatcagggaagggtgggggcggggcgtgtcatttccagggctccctgttgtccccgggcggcagaccccaaatgcagaccttccactctgagcctgactgtgggaggggagacgctgccttatcgttttcaggaactgcctgactttagagaaagatccctccctcagatgccccatcccagggcctgcggtgggggaggaagtccgggagacgctgcctgctggggggccctgggcaggtggggctccttgtcagggctacagtccctggactggatgccgcctgtctgtgaggctgagggaacctgttccaggccctctgctggggtgcagttgggtcccccaaacctgtgaaatagatcaagacagctaccagcaccccagcttccgtgcatcctaagtgactcagtcccctccaggcaggcaggatgccccatgtgaatgtggacgggtccagggtgggagtaggtgggtccagcatgaaagtgggcaggtccagggtgaccatgacagtgggccagttggggtgagagtgtgggtgggtctggggtgagagtgggcaggtccagcatgaatgtgggtgggtccagggtgatggtgacagtggacaggtctggggtgagaacgggcatgttcagggttggaatgggtggatccagcatgaatgtgggcaggtccgtggtgaccatgacagtcacactctcaccttgcacgttaactgaaccaagggttggggtgagggtgtgggtctgaggtgagagtgggcgggtctgaggtgagagtgggcgggtccagggtgagagtgggtgggtctgaggtaagagtgggcgggtccagggtgacggtgggtccaggttgagagtgggcgggtccagattgagagcaggcgggtctgaggtaagagtaggcgggtccagggtgacagtgggtgggtccaggttgagagtgggcgggtccagattgagagcaggcaggtctgaggtgagagtgggcaggtctgaggtgagagtgggcaggtctgaggtgagagtgggcaggtctgaggtgagagcaggcaggtctgaggtgagagcgggcgggtctgaggtgagagtgggcgggtctgaggtgagagtgggcgggtccaggatgagagtgggtgggtctgaggtaagagtgggcaggtccagggtgacattgggcaggtctgaagtgagagtgggcaggtttggggtgccagtggggtgggtccagggctggaacgtaaatcccagcctccatcctctggttgtagatgctgcgtggggaacagttgacccccctagctgggtcatcatgtaatttgtcaaatacttagaacctaagagacggacgcagcccgtgggtgtggtcagcagggtggcttcaccaggaaaggtggaagggccttcttggacagggacatgggagctggacagctggtggcccaggacagtgagtctgcgctcgaccatacggaatcccctgaacgctcatgtaacacagctcgtgagtctcacccccacagcgtctcatcccgtgggtctgggcatggcttgagaattcgaggttctaaccagctgatgccccgggcaccctac

SEQ ID NO: 32285 - DNA, 1157 bp, Artificial sequence
  DNA replication origin
gcaccccagcagagggcctggaacaggttccctcagcctcacagacaggcggcatccagtccagggactgtagccctgacaaggagccccacctgcccagggccccccagcaggcagcgtctcccggacttcctcccccaccgcaggccctgggatggggcatctgagggagggatctttctctaaagtcaggcagttcctgaaaacgataaggcagcgtctcccctcccacagtcaggctcagagtggaaggtctgcatttggggtctgccgcccggggacaacagggagccctggaaatgacacgccccgcccccacccttccctgatgccttgctctggaaggttcttcctcccagccagtctcctcctgaaaaaggagtgcgggcactctgccttgcttcaggaggcctagaaagaggggacagggcctggggagcgggggacaggatgagggggagggcagggtgggggagctggagggggtgttgggaagggctcagggagggacaggaggtggaggcaggggtggaggactgggtgctccagtctgaatgtgtgtgtcccctccaaagttcacctgcaaacagtctccagcaggattgtgttaagagctggggcgtttaggaggtgatgagggccagagggctcctccctcctgcctgtgcccggattaaggccacaccaaagaggcttcacacagcactggacaccttgtgtccttcacttcccgccaggggagcacagagcaagaggcaccatccgggagcagagagcagccctcaccagacacccagcctgccggcaccttgatcttggacttccaacctccagaactacaagaaaataaatgccttttctcataaattatccagtctcaggtatcttgttctatagcccaaaaggtctcagacatgaaggaggggaggggcacaggtaggagggtgggggagaggagggatgcaggtgggaggatggcagaggggaggggtgcaagtgggagggttggggaggggtgcaggtgagagggtggggaaggggaggggcacaggtaggagggtgggggaggagaggagcacaggtgggagggtggaggaggggaagggcacaggtgggagggtggaggaggggagggtcacaggtgggagggtggggga

SEQ ID NO: 32286 - DNA, 854 bp, Artificial sequence
  DNA replication origin
gagggtggaggaggggagggtcacaggtgggagggtgggggaggagaggagcacaggtgggagggtggaggggggcatatgtgggagggtgagggaggagaggagcacaggtgggagggtgggggaggagaggagcacaggtgggagggtggaggagggggagggcacaggtgggagggtgggggggcataggtgggagggtggaggaggggaagggcacaggtgggaaggtggaggaagggagggtgacaggtgggagggtggaggaggggaagggcacaggtgggagggtggcggaagggagggtcacaggtgggagggttggggaggagaggagcacaggtgggagggtggaggaggggaagggcacaggtgggagggtggcggaagggagggtcacaggtgggagggttggggaggagaggagcacaggtgggagggtggaggagggggagggcacaggtgggagggtggaggggggcataggtgggagggtggaggagggaaagggcacaggtgagagggagggcgaggggcacaggtaggaggggcatctgtaggatgcaggagcaggggcatctgtaaccccaggcctggcgccgtgaaacactggaggccaccaggtgcagggagatggtgctgggtcaaatgagcctctgcagaggatcaatggcggccagagccattagccaggaaaatgagacagaagcgaaggcctgacaggtgatcgataccgggtcacccagcgcagacaggaaagggtccagcggaggacaccaggggccagcgattgacatctcaccctgaggaggcggccgagctgtctgtcacacacacccccggccacaagcctc

SEQ ID NO: 32287 - DNA, 1054 bp, Artificial sequence
  DNA replication origin
gtttcgggggctcctgagggtctgggggccatgactgagcagagcctggggcgcgtcccgggaatgaagccaccgctgcagatgaggggctttgtaggtgggtgggtgactgtagcccctggaggggctgcctggggcccaacgctgatagggcccgggacaggaagatgcttagtcacgtgtttgcgctgcaggtgcacccccagcccaggcgacatcaacggccagccccacacacgtgaggagggattgtgggcccaggggcgctcaggatggggccgggctgcttctcagaagaggggacgctgagcccaagcaggctgcactcctgcttggacggaaggtggatgggtggggtgggaaggggtgggaaacgcccagccctgatgggcttgcgggagcctgcgggagggccttgcgtctagctaaggcgtggggagcacctcccgtggccccgtccttagacccccgaggggtggggcgctgcgggtggatcctgggggtctgagggtgccaggaggatttctcatgttgagttctagtgttgatgatgctaatccaaaaaatacctgaaccaaaaaccaattccaaagaaaatcccgtgcagcaatggctttcgatcggctgcggcttctgtggaacagcttcggtgtctttggcgtttggtgttttcggacaggctcggaagtcacgctccccaggctcaggaacccctcctttaaaggaggtcggtccgtttcctcaagtcacaggagcagacgcagggtgggggcgtggggcgtcatggggaacagcaggcggggtgccagggtcaatgttaaggtccaggtcactctccaaggagcccgctgagggctcagggctcagggctcaggtggccctcctgcccgccccacctcttgctccctccagcaatgtcttcctgctgccagctctgggagccggaacgctgccttcaaggctgggcccatcacgaggacagctgcgcactgtcccctgctcacttcctgtcagtctcttcctgatttcctccttacactcagttctcttgtcc

SEQ ID NO: 32288 - DNA, 1566 bp, Artificial sequence
  DNA replication origin
aacaacatcttattagaagacaaggacttcttctcttttctttctttctttctttttttttttttttgagacggagtttcactcttgttgcccaggctggagtgcaatggtgtgatctcggctcactgcaacttctgcctcccaggttcaagtggttctcctgcctcagcctcccgagtacctgggattacaggcatgcgccaccatgcctggctaatttttgtattttttagtagagatggggtttctccatgttggtcaggctggtctcgaactcccgacctcaggtaatcctcccgcctcggcctcccaaagtattaggattacaggcgtgagctactgctcccggccttttctttctttagagacagggtctctctctgtcaccctgactggagtgcagtggcatgatcacgactcactgcagcttcgacctcccgggttcaagcgatcctcccatctcagtgtcctgagtatctgggaccaccacgcctcactaatttttgtgtttttttttttttttttgtagagatgaggtctcgccatattgcccaggcctggcaggtgtttctgatagtcacaaagcccctgctactggggaaagagaaaggaaggcccagctaagacccaattaagaaaatcccagaaccaagaacgaattgactgttcggctttggtaatctccaacgtgtccaccaggtggtgctgtccagccacgaatctcccagctttgatctcgggctttggccgagggcacctccagggctggggtctctcatcgtgttgtccccactttattccaacgtccaccccaggcctgggggagcccagggaggaccgagtctcctgggccccgcagggcgcacagaggtgagtttggtggtgccgtcccgacctcgacaagcatcccagcgaagcaggctgagcgcccggctggctccctcaggtcccctcttccgggccttctccgtcctgttgatttgggtgttttaatgcaggaaagtaggacactggttgtcacctgcctgctcctacaaggaaaatgcatgtttgtgtggttatccgtggccacccccaccagggcctgcggggggcccagtgcagtggaggtggggaggggactcgtgggctccaggatccgtggagagtgagtgtcagcgggagggcgtcccccgaccttggtcaatggaagctgctcttcctgggggtcctgcgggaggcccgtgatgggggtgggggaggaggggtaaacaccgggccctgattggccgcctgtccttgggtctttgctggtcctaagagggaacggggagcacagctggggtcacagcctcagctgggactcctgccctccagcacctcagcatcctccctgcgggtgctctcctgggggctgctcagggcaggtggcaagtagggggctgtgggaccagagacagggggtggacatgcccagggcctgcccttttggcctgccgtggagacccacccaggagcacctgggggctgaccctcccctgcagagagcagggtgaatcccagccctgccctcacctaacagccggg

SEQ ID NO: 32289 - DNA, 1501 bp, Artificial sequence
  DNA replication origin
tagcagggcctggttgcgggcgcctgtaatcccagctactcaggagtctgaggcaggagaatcacttgaacccaggagacagaggctgcagtgagccgaggttgtgccattgcactccagcctgggcaatagagcaagactccatctcaaaaaaaagaaaccaaacaaacaaaaaccaaaaatacttgctgttgtccactagagttattgagttatcctgaaatatagtttaaaagggaaattcttaattcttttcttttaattgacaatgttctgaatagagttggaggcttgtttttccagtggattaccgatgggttttggtttgctttctctctttaaatctatttatagcttttgtgtattcattgtgtattcagcaatcatacacaatgagtacacaaaaaatcacacaaccaatacacaaaaggtaaaagtagatttaaaaagtgagacaccaaggcttgattttaggctcaatttgtcccctctttggccaaagatttctaatttttttcccctcaaaactggtaggccagggtgccagggtgccgtcccatcagtggtgggaggaaagggtagttgccccagacagtgggtgaatgccagggtgccagtgtcagggaggggaggggctggtgggtgaatgctagggtgccagtgtcagggacggaggggctggtgggtgaatgccagggtgccagcatcagggaggggaggggctggtgggtgaatgccagggtgccagtgtcagggacggaggggctggtgggtgaatgccagggtgccagcgtcagggaggggaggggctggtgggtgaatgccagggtgccagcatcagggaggggaggggctggtgggtgaatgtcagggtgccagtgtcagggaggggaggggctggtgggtgaatgccagggtgccagcatcagggaggggaggggctggtgggtgaatgccagggtgccagcatcagggaggggaggggctggtgggtgaatgccagggtgccagcgtcagggacggaggggctggtgggtgaatgccagggtgccagtgtcagggaggggaggggctggtgagtgaatgccagggtgccagcatcagggaggggaggggctggtgggtgaatgccagggtgccagcgtcagggacggaggggcttgtgggtgaatgccagggtgccagcatcagggaggggaggggctggtgggtgaatgccagggtgccagcattagggaggggaggggctggtgggtgaatgccagggtgccagcgtcagggacggaggggctggtgggtgaatgccagaatgccagtgtcagggagggaggggcttgtcgaagagaaactttcttcagggccattgatttccctgccttgtttgaagtgcctggattgggctctctgaaaccaacaacatcttattagaagacaaggacttcttctcttttctttctttctttctttttttttttttttgagacggagtttcactcttgtt

SEQ ID NO: 32290 - DNA, 1681 bp, Artificial sequence
  DNA replication origin
cacagggtgcacagggctggctcctgccgaggaggacaaagtcccagggtcacccgggctgatctcatcccgtgcgcctttggaatgtggctgtgcacatccccgggtcgaacctcgggagtgggctccccagccgtgtcagtgccacccctggtcccagcctcacgtgcgtggggtggcatcaacttgagcatctgcctttattgccagccgcgcccttggtgctccaggctcctcccctccctccccagagtggggacagtgacccagggctcagagcacagcaggagcccattccactgggaaagtcgtgccctctccctctcccatagcaacaggtggtccctctgtcccagctcaccctgaccccaggggacccaggtgaggctggggtgggaccccctctccaggcctttagtggtgcatgggcctcaggcctgcctgggtgagggcctgtggggtgggcttcccatggtcagggccaggaccaagcctgggtcacagcatggccttgtccggggggaaccccaggctgggtgcctgttctcctcctggtcctgttaaggggctccttgagcgtggtgagcagaccgggaaccggatggctccagaccagcgtcctgtgggccttccttcttgggatgcttccttcttgggatgcttccttcttgggaatttcagagggtgcctggggctcggacgttcttgcttgatgacaacaaggggtcagaagagggggactcccttgttaccataggcacatgaagggtgggagaggaacccctggattcagtgtgcggttctccctccctctcccccatctctccttccccttctcttattttctctctctttctctgtctctctccctctttccttccctgtatgtctctgtctcagttcctattaagcacgttctgtgtgccaggcatggttctaggttctggggacacagaagtgaatgagacagacaatgttcctcgtggcctccattcgagttggggacacagaagataaaatgaacaaacaagaaaaaaagagtttcccaaaagaagggaaggcaggaagacgtgatggagaggctggcggggtgggtgggcggcacgcagtggtggctggtggggtttcgctgagaggatggtggaggccagtgactctgggggaccatgagctaggggagcgggcatggggcaggtggcaggggtggcagggccagtcccgtagggcaggtggcggtgattctcatgccaggcagtggaagccaggcgggggttttaagcaagagagtgacatgaactgatctaatgctaaaatatactctccatttgtgggtgaaggatagaccagaacgagggcagaatggacactgggtgctccctggagaggtgactgcctgtgtctgagcaagagctattggtggcccggaccagggtggtggctgtgggatggggctgggtttgaggcggatcctggaggttttgctgggaggtggtgcgctggattgcatggtgggaggtggtgcactggattgcgcggtgggaagacggaagggcatggttggaggtattgtcacaatttcaatctggagccacacacctgccgacagtggccccggccttccttaagacctttggctggctgcagcaagcagacgccgtctcgaagcgatggccgtggcact

SEQ ID NO: 32291 - DNA, 1512 bp, Artificial sequence
  DNA replication origin
agtgggtgtgtggggtgcgtgtgttatgtggcgtgtacagggctgcagcgtgtgcagtgtgggtgaagggtgttgttcgggcgcgtgtggggtgtgtggctgcttgtggcatgaggtggtgcacacggtgccaggtgtgtgcagtgtgtgcgtgtgtgttgtgttgtgtgtctgtgtctgggtggggggatggggtggcaagcgcatgagtgtgcctgtgagtgtgccggtgtgcagcgtgcgtggatgcccgtcgcacatgtgcagtgtgtgtggcgcgtgtgcgggatgccggtgtcccggtcccgcctgagccccagctctcggcttcttggactgcggtggtggcggcggtggcgccggatccgaggagcgcagcgccgcgcgtcaccatggcaacagatgctcctgcagcccccgcgccgctgcggtggggagggggccctgcgcacctcagaaggcgggcgtgggggaggggaggctgctcgtcccaaagaagcccgcggaggaactgggctgccccagcacgcacccctgggaatcctccctcgccttgacatccctcctggtggggcgccggggcaggggtcgggacgcggtgccctcctcggtccctgctgcttgcccggggaacccggggacctcactcgggtcctctgccggcctggagctggggacagagtaattcctgctgtttctttcccctgagagtcccccgcgccaggtgtttgcagctcctaggtcggaagcctcaggcgtggttattggctcttaggatcggcttgtgggagatgaacccgcccatactaaagatggggagcccaggccttaaggagcccaggacggcatcgcgaacagacttgtcggttacatgaacctacaggttctcctgttccgacccgggacacaagaaaaggcttatggtgaaccaaggaagtccctgcctttgacagaggccggacgtcagtgcagaggagagaatctgggcccgtgctccctgcattctggaaagaaagggcttgtttgcataagcaagcagcgcctctctgggaaggagctggccaggccccactgggattgagcctggaggtgcctgtgctcccctccctcctctgcccagttcctggcccaggggtggtgctgccttttcatccgtttaacctgaggaggatgggcaggaccagctttcactccctcatgcattcatttatccataacctttatcaggtgcagcgattctggagtgtctggcccaggccagcagcagcggaatcacgcaggctctggtcagaaatgcagagtctcaggcccaccctagaccttcaggttaaggagtgtgggagtggatgtgcctgtgccccccgcgccccagatctcacaaggtgattctgaggcttgctcagatttggaaatcactgatccacggtggtctttgtgctagggatgggactattgatcccttccctcaggggatcccttccctcaggggatccctccccacctccccggaaa

SEQ ID NO: 32292 - DNA, 891 bp, Artificial sequence
  DNA replication origin
cgggtgcgcgaggggcccgggtccctgccccgccccagaggtgccccatccctcctccaaccccacaggatggaagggcgatctcttccagggcgcggtccgggctaggcacggaggcatcccggggatgggggtcccgaggcccagtccctccctcgcccttgcgggaccgcaccgccggcggcccaggcgcgggcacccctgacctgggcgggttgcgcgttggctgcgccgcgccctgggatgcggtactcaggcgctccgggcggcggggggcgcgcaaggcccggcgaggggcggagggcccgggggactgcgctgaccgttccttcgcggggtgcggggctggagcccaccgcgctcccggaggccgtcgggcacccagggtgccccgcagggcccggccgcggagagggcaaagacgtggcagccggcgagggggagggggcggcactagcctgctgcgcgtgcgccgacccgggtgcgacccccgccgcccgccctacccgctacggcccaccccgagggcctgttcccatcgcttgttcacccgcgtcggggtcccgagtgggtgtgtggggtgcgtgtgttatgtggcgtgtacagggctgcagcgtgtgcagtgtgggtgaagggtgttgttcgggcgcgtgtggggtgtgtggctgcttgtggcatgaggtggtgcacacggtgccaggtgtgtgcagtgtgtgcgtgtgtgttgtgttgtgtgtctgtgtctgggtggggggatggggtggcaagcgcatgagtgtgcctgtgagtgtgccggtgtgcagcgtgcgtggatgcccgtcgcacatgtgcagtgtgtgtggcgcgtgtgcgggatgccggtgtcccggtcccgcctgagccccagctctc

SEQ ID NO: 32293 - DNA, 1722 bp, Artificial sequence
  DNA replication origin
cccgcgcacgcgcaccgccgctccgcgcccgcgccccggcccgccgcccgcccccgcgcgctgcccaaatcccgtgcgggccaatcagcgagggggggcgggtgcggggcggggcggggcgcgcattgtccgcggcgggctgggcctcgcgctccggcggggggtcccgcgcggggccccgggcgggggcgggggcgggggtgggggcgcgggcgggcccctggctgggggaggaggtgcctagggacttcgggcctggggcgcccaccgagtcccgcgtgattcccggggcgcgcccgcccttgctcccaactccgttttccgggcaaaaagccattgttctggcccgaagggagggaagcgggacggggcgcggcggctgcttcctgcccccgccttcgaggggcgctgctccggggcacgcggggccccacccttcccccggcttcttgaactggcttttcctcggcagcgggggagtcgctctgttttggacgagagcaaaacgggtcgggggctggggaaggaaaggaagacgaagtccgggggaggggcccacaaaccccagcagccgaggctttttcccccaaaggcgagagaggaaaatgctttaacttaaaccaccaagcactctgagaaagaagtaatacgaactgcccggagttcttattaaacagctatgaaaagtggatccagcccccgagttttagggcacgtgtagggagaaaaccagctgcaccttttctgaatttgttccccgattttgatgaaatggagggggagggggcggtttgcaaggctgttcctaacttcggactaggtcagtagtggcccgccagggctgggcagccggcgtccttcggatcaattgtccgcggcagaaaagggtcaggccatgttatgaaagtgggggtgaccccttgtcctccctgtgatcgtcgtcagcaggctacccttttattccggtgttaagattcgaattccatgaagaatcaccctttaagttatttagattttgaatcaggacaagtcaaacacgtaatgaaagagacctgagccttagcttcattcgtctcaacgcagtctaactccatgaaaattcactctctgcttttcttgcttccttgaacacagctgcaaaattctctttctgttgagcagatccaaaagtcgtttcttgttgtaggagactgtctcaatgtaattgtgatcatcaaaaccatatttataaagggttctgcaggagaaatgtgtttttttgtttttacagaaaggcctactggagaaaatactgaactgtaggaaccgatctttcaatttatggcgtgttcttcagtttctttggttagataggttacattcatttgatttcctggagagtacgtgcaaattcagatgttgtttgcaaagagggcaggagaaagggaaatgtccttggggggaaggtgtttgtttactcaggggcagaggcagtaaagaatccttgtgttgggataaaactggcctctggagtgaagggatccgctaacagtgtctccgccggctccttttgtatccctgtcttgtgcagcttggcagtaaattgtggagttgagggcaaaggtgtatttattgtaatcctacaaatagctggatcagtttcacatcacgtttccttgcagaattcatcttgggtctaagattttgccctggaagtttccagtttcctctttgactcatggt

SEQ ID NO: 32294 - DNA, 1403 bp, Artificial sequence
  DNA replication origin
aggagctgagcagcgtgggcgagcaggtcttcgccgccgagtgcatcctgagcaagcggctccgcaaggtgcgtgcggcccgccgggccccccgcccgccgcccgctgtccgtctggctcacggcccctcttctctccccgcagggcaagctggagtacctggtcaagtggcgcggctggtcctccaagtgagtcccccgcgacgccgcgcccccctcccgccccctcgcccgggggtggggacgtggagcccctcggccgcgccgtccggtggcctgggggcgcccgcgggcagagcgggaagttcgcggggtccccgcgggctcctccggctctgaggggggcgggggccgcccggcccgaggttgccctttgtttacacgcccgcgggtgcagagctgggcggccccccgcgccagaacctcctcggctgccgcgccgcgctccccccaacccccgtcccggccgggagggaggcgcgggatgcaagcccccctcctcttggccagattctccccgctgtaacctgagcttgctattgatggatgtagagtttctttttttttttctttcttttaatggaagggagggtgtttggcatccccggaaggggctctctgcacagctgctcccgcggccccgtttctgcgtcttcccggaccccgctctttcttcgctacccctcgaggtgccccggcccgcgcgccacattgttctggatctcgggctgggcgcctgtgcccctccctgcatgctggacctgccttcccttcctcctctggctccgggccagggtttgggggaatccctctctgcaactttgcgttttatgggggtttgtttttctcccaggcagagactgtgggagtcctcttgtggccttgttttaattggggggttggagcggcagtttccctttgggtctgaggttagagtgctggcttggtggggggtggccagcctccaaaacctgggtttggactttgagaagtgccatggtgctacggtgccactgccatcggcccaagtcgaggagcggtgagggcgagccccctcgggctgccttgcaaagcggtgatcatcagcctggcgtctaatgctgccctgtcctctgctttgcagacataacagctgggagccggaggagaacatcctggacccgaggctgctcctggccttccagaagaagtgaggacgctgacagcactggggagggtgtgggggagggacggtggctggttggagtcgtgctgggcgctgctcgcctgccgggaggctggagctggggctgtggtctgaggtcccttagcaagattgtgtccagggccatctctgtggctggctgtaaaagtccccagccagcccctctcccaccttctcctagccagcctgtatccatccct

SEQ ID NO: 32295 - DNA, 1424 bp, Artificial sequence
  DNA replication origin
tttttgtccttttgttatctcttagtatatcaataaatttttaaaaaaaaaatttggcctgatgtacatcatgagtgatccctggaaacacagtagactctgctcttttcctttcttgaggcaaaataattcgtctggacataggccaaatacttggggcacagaaaaatcaaagactgggaaaggccacttgcagagggtgcagaaaaagatatgtttccaagcaaaggatgggtgtttaagagtccatataccagtggctcacaacagagaacaactggcattccagggaacacttgcagatctggagatcttgcttgtcacgctgtggggtggatgccacttgcatctagtgggtggataccaggagtgctgctagacgtcctgaggtgcacagaacagtctccatgacagaaagaaatgatccttcccagcacgtcagtagtgctgagtttgagagactgaattaatgggaaaaacagaaaaaacacaatggcaggggttgggggcaggggcggcattatcggcatctgtcaggtgaggtcagggatgctgcaatatataatcaactcattttgagactgctcccttcaaaagacatgcaaagttaaaataaaactccctctccccgcgcccacagtatccagagatgctgtgttggaaagccactcaaccccttgaagccaccacatgtgctaataatgctttacaaggaggcagccataaaattccaggggagtcactgtgagttagcagctactgcaactcctaacccaaagctcgcgaataaagaggcgatttgcttattacagaaccttccccggctccttaaggcttccaccaacttcagcatgaatttattcatgaattccagcctccagggagaatagagcttctttgaagtgaagagagaagctgggcctagatgttggagtaactgggtgaaaagctacttggggccaaggcctgaatgttttggttcaggaaagggttccccctgcaaatggaaatgtgacccccagcactagcccgctccaggaagtcctgcgaattcgaaatcgactgttgcagagaaagaagactgctggtgggctctcttttgctgccttcgcaaggctctggctgtttccttttggagaaagtgggcaagggcgaccccagcgggcctgtcctctggcttatgagagctgcagaaaggggctgggaccgccaggaaggagcaagctggccgagcaggagcaggcgcggccccggatgtggagccaggctttcgggagagcccatttctacagggattcggcccgacgggtgccgggccgagctcgctcggcctttgttagtttcggcgccgctgatgtgatcgcctaatccagtggaccctgagaagaacagactgggctgccaatggcccgaccccacgccgc

SEQ ID NO: 32296 - DNA, 1583 bp, Artificial sequence
  DNA replication origin
ttcctcccctccgccttcgtggctcgagcgccgggcctcagggaggacgcagagggggcgcccgtggcggtgggcgcccagcggtacctttgggtcggggggaggtaaggctttctcagctcgggttcggaaccagaaagccaccggccccccgggggtaaggggtgggcgccggcgacccgggccgacgccgccacctgcagagggcgcgcgcgtcccaccaaggtcggccgccggcccttcggacggacgagggaaaagccagccgcggctccagggtgcccgagactcaatcgcaccacctgcaccccggccacctccgcctccgaagtctcaggaggaaagccccgacccagcccgcagcctctctcgccgcgttcaggacccgaggctgcgggcagccgccttccacgacggacagcacggagtcccgccgggccccgagccacgccagtctcggacttcagctgggtccgaggctcctctgggcctggagggcttttagaggagaagaggaaaccagcacaggagccccagagggccgggacaggtctgtgcgccagcggcccgggcgcatggcacagtgcctggatcaggattggtgcgaagccagcatcaaacggacagaaaatgaatccgatccgacactctaggaagagcatgaaccttccaatccaaccaatgtttgtgcgaggccaggttccccgccgcggtggccacacaagccagccctgtcctcgggacgcaaggtaaccagtccggctggaggccgccacgcacgcctggtctctgcagttgtggcggattcccagggactctgcccaggaaatggaaacccgtgagggcgctcctcaaagccgagggtggtgatggccagcgaacccgaaaaaggggcagggtgggcgccctcccatccgcttaagcagtagcccattccactgccccacacgcccaggagtggacgcaggagggagccccgtccgagtggacgcaggagggagccccgtccaagtggcgaccatcgcggggccaccccacccaccttcccttgacgtcccctgccagcacagagaccgcccgttgcggtggggcagtctcgggcggagatctttgacgcctggcggccagcgaccctactcggccggcagcgcaggccctcacgtcggaaggacactcaaggctctgtgacccgctaacctgggcctgggcagcaggacgctgctgtcctcccgcgccctcccacaccggtcacagctggggaagggggaagctctgccaagggccgggccactgactcctcagcaaggggctggagatgcgtgagctacccctgtccatgttcctcctggtgggcgttaggggtgagcctgaatcgtggcttcctggcagggtgacgtctgcggggcactacggaagtagaaatgggtttagtgcggtggcctctttggggatccgaagagtggctctcctgtgcgggcttcaagaccccgcccccactgctgtgaagtctgcggccagaaaaggccaagaacatctctctctccaccccccaccccgcactctgctctcccgcaccgtccctt

SEQ ID NO: 32297 - DNA, 801 bp, Artificial sequence
  DNA replication origin
ccggtgagctgggcttgtcatccactctgctggtaccccgctctcgttccctctcacgttcccgctccctctctcgctccctctccctttctcgatcccgctcccggtccctatcccggtctcggtcccggtcccgaggggcctctgcgcggcaggtgctgctggtgctggtgctgctcgctggcggggacaaacccatgtttcgaaggccctcccgggcccgggaagtggaggccaggtcctggggcgagcggccagggtaggggatccggatgcccctggctgagtcacttcgaaactcgtaagttttggcctttgccttggcctgcgcctgcaggagagaagatggtctcaagagtggggcagggccctgtccacccccacaggactcctcctctatccctgacctcctatctttaccctatgatgcctgggaatttctacatggatgcatggatgggtgggtgggtgggtgggtggatggctggatgaatgggtgggatggctgttggagctgagaggtagaaggatgagagaagaggtagaagatttggctggaagtagtcatttgcaaaaagtacactttttgcatttgattattgtgtccatttgggagggggagcgtaaaggaattctagtgtggccaagcccgtccccccagacacagttggtgctgctactgacttggtgacatcttgtcagggaactccctcctacattacaaataggcaacatgtgtggacaccccattggctcacagccctcagagcccccttcccacaaatcactccataacatggt

SEQ ID NO: 32298 - DNA, 1024 bp, Artificial sequence
  DNA replication origin
gcgggggcgcaggcctccggccgctcggctttagcaacgtcgttagcaacacgtggggcgggaggaagcactgggcggaggggagggggccgagcggaggagcgcgggaggggggccgcgggagggagcgagagcgccgggagggggaggagaactgacgtcagcgggagagtattatggtctgtcgtgcgctggctgctgcttttctgctcctggaagcggccaaggggggaagcggcgagtcaacatggagctttcagcggtgggggagcgggtgttcgcggccgaagccctcctgaagcggcgcatacggaaagtaggtgcccccgggcctagggcctccgtgcggccgggccctcccctcccggcccgggttccctccccctgctgcagcccagcttcccttcccccaggtcccagcagcggccgcggccgtggcggcggcggcggcggcagctctgagcccaggcgctttccttagacttgcagcgatgcacggattgcatgggtggggggcggggtggggaatgaatgccggtgcatgcactttgtgcagcattaggtgcaggggtgatgcagcgggcgcgtgccttttgcggcggggtttcgagcattcatctggtgcatgcattttcgcatgcatttcttgtatcctcgtcatgcgtttctccccatgcacacacattatcgcctttgcacccgcagggacgcatggaatacctcgtgaaatggaagggatggtcgcagaagtaagtaggttatatgcaattctcaaccccagactgttattcgggaggtttctttcttcctctttttgcctttacattgaaatacaatacaatgcaatgagaaaagttacacacacacacaccccctctgctctcaccctgctcctgggactgatgcccacttcttcctgattccctttaggtacagcacatgggaaccggaggaaaacatcctggatgctcgcttgctcgcagcctttgaggaaaggtacagacccttccaagtcccagccgct

SEQ ID NO: 32299 - DNA, 732 bp, Artificial sequence
  DNA replication origin
ctgggggaggggaccgcgcgagtcctgggcggtgggggtggggcggcgggccggggtctgccgaggggcggagccgggctgacatcgccgcggggatcccagcgagagctgtgggggacgccgaacgccggagggacaacttggtggcgggggaggggggccccggcgaggacagagggcggcctgcccccctcgccagccccgcagactgacagcggccgggcccgccttcccctggcgtcacttccggcggcgccccctcccactcgcgcgctcggtctctggagtcgcctcggactccgccccctggcgattggaacgctggtcacgtagcaacgcgggggagaaaggcagaggggcgtggctcggagctcgtccaatcagcgtgcgggggcgcaggcctccggccgctcggctttagcaacgtcgttagcaacacgtggggcgggaggaagcactgggcggaggggagggggccgagcggaggagcgcgggaggggggccgcgggagggagcgagagcgccgggagggggaggagaactgacgtcagcgggagagtattatggtctgtcgtgcgctggctgctgcttttctgctcctggaagcggccaaggggggaagcggcgagtcaacatggagctttcagcggtgggggagcgggtgttcgcggccgaagccctcctgaagcggcgcatacggaaagtaggtgcccccgggcctagggcctccgt

SEQ ID NO: 32300 - DNA, 773 bp, Artificial sequence
  DNA replication origin
accccacagaggatgtcgcgcggcttcttcctgccccccgaccatccccgacgcccgcagccacctgcccctgcccttagcccaagctgcccgcccccgccaggcttcggccccgaacctcgccttcccctcgccgccccctgctcggggcctgggtgggctaagggcatctgggcggagccggcagaggatggggcgagcggctgggggtgcgtctggctttccccgaaccccggcgcccggcccgcgcacttcctgtccaccgctcttcccaacgtgggcggcggacatcctgcgagaaacgccagcgcgggaagctgggggacgtcgccgggtccagtgcgggctgggcgagagggtctcacgcgcgaagatggcgggctcctggaaagggacaagggccggccgcgaccgccttgccgtgcgcacacaagcacgtgcaccgccgaccctgccgccagctaggctaccggtgacccgtggcgggggcggcgctggggacagcagcctcactctgggcccagctccctcccaccctgttctcttattgctcaagctccaaatcacaactcccactccttggaacccacgatttagttcaaacatcgatgatcagcctgactgcaagcagtttcccttggccagagatggggtggagaaagagggggggaaaagagagaggcagagagagaacgataggaagagagagagaagcagccaaggagtctgacacggaggggcaggaagcccagagcggaaaactggcctcctgt

SEQ ID NO: 32301 - DNA, 894 bp, Artificial sequence
  DNA replication origin
cggtctggatctgacccggctggaatgactgcaaacctcctccccctccacgcccacgcatgctagcaccctctcccggaacacagggcttcctcccgcgcccacccagccagagcccgggaggtgggctcccatttctcagaccgccacctcccgctttgtctccaaactgtcgaggaatgaggttgcccggtgacctgttttcacaccccctgcaacgctgctctctcacgggttggggggcaggggttgcgccaggcagggatgagacacactctgccccgttggggattgccttccttggcgggactgagcgcgtctgctactgacaagagccaggctccctgccctcagatcattctatacctcttccttccttctgaatcgagttccacctttgccacaagctttgcaggattccccgacgtttgcaaactcagacttttcgcaagcgatagttttgtttagagcaagcatttccgaaataatcgccatcaggcacaaagacaggtggaaaattgggtggggaagctaagataattacctaagaccctatccagaggagggggccgcacctgccagcatcaggggttccatttcttcaagtttcagaggtatttaggcaaagaagggagaatggggcagaaagagagggagacggaaggaaggaaggatgggaggaaggaagggaggaagaaggaaggaaggaaggaaaatggaaagaacgcatggaggaacgactacagctatcttttttggggagaaactgaaaccatcgccctctgcacgcctagcgcaaaccccatgatcagtaaaggcatcaagggcaagcacaactccgggaagcgggttccagaaaccctatctgaaggaaaatcaccgctcttcgcgggt

SEQ ID NO: 32302 - DNA, 787 bp, Artificial sequence
  DNA replication origin
ttgcctaaatacctctgaaacttgaagaaatggaacccctgatgctggcaggtgcggccccctcctctggatagggtcttaggtaattatcttagcttccccacccaattttccacctgtctttgtgcctgatggcgattatttcggaaatgcttgctctaaacaaaactatcgcttgcgaaaagtctgagtttgcaaacgtcggggaatcctgcaaagcttgtggcaaaggtggaactcgattcagaaggaaggaagaggtatagaatgatctgagggcagggagcctggctcttgtcagtagcagacgcgctcagtcccgccaaggaaggcaatccccaacggggcagagtgtgtctcatccctgcctggcgcaacccctgccccccaacccgtgagagagcagcgttgcagggggtgtgaaaacaggtcaccgggcaacctcattcctcgacagtttggagacaaagcgggaggtggcggtctgagaaatgggagcccacctcccgggctctggctgggtgggcgcgggaggaagccctgtgttccgggagagggtgctagcatgcgtgggcgtggagggggaggaggtttgcagtcattccagccgggtcagatccagaccgagaggacaggtcagctggtggcatggtcttaggaacccacagaaagaggatccttgctccccacctttcttatcaacccccttccccaaccgactcaattctcgccacctcccttttctccatacaaccgctttcctgtttcaaagttagataattgcctt

SEQ ID NO: 32303 - DNA, 1665 bp, Artificial sequence
  DNA replication origin
tcctgagagcccggagtttgggggccctcttaggcctccctgggcccgcggaccacggactcgtcctccgggagggagggtggaggctggagcactccaaggagaggggcggacgggccccagcggggcgctgggctcctgggtcttgggccaggccggcaagccctagcgcgtcctctagcttgaggatgaggccggcccggttctttgggagcgtttcaacttcgcggcttggcgggcgtcggacctgcccggtcttggccgcggacgcgggcagatttggaagccaaccgtttgcctcgggcgggccggcagtgaaatgagcgcgggcggctccgaggcgtggccttgtggccagtggcttacctcccgcggtcccggagccgggcgggcgtcccgcagcgctgcttcctagacgccgagctagggctgggcgcctgccgcctgctgcgggaatgccgcagggtgacccgacattctggaaactggtcccaaggcccagcctgggtgactggaagtgaggttgtccaggtttctggccttggttcccgccgctagttgttcccaagagcaagaagctcccacctttcctgtcccactttctcctccctaggagacatccacacatcctccttgttagagaagcactggaacaggctgcaaaggataagaaggggctgcccactctacaggaatctcccacaaggctgcacacattctagaagccacatttctgccttaaaccccggaaactgaaatcaggccccctttcttcccctccacaggaagaaaatatcccctcagagttaagcaacatctattgcttaactagttgccctatatctagggcctgcgttatcccagttaacattcacaacagccaggtaacatcagttcccttacccccattttctagatgaggaaagcgaggcaccgcggggccaagtcacttgctcaggggcacgcagcaggggttctgcctgagaagccgtaagctcacgtccctaaagctccgcagcaggggctttggatccttgtgaatttcagctcctccaaggcttgaggaaagaattcaagaaaggtccagtggagcctcgtggaagcgcagagcagtgctccagcaggaggaccctcagagccctcggcaacaaggatgagactggaacaatagagacaggagggagttctaggggccgatttaagtcaactggaagctggatgttggtgggcgttttcgcttttttttttttttaatgctagagcacagtggctaaaaaaggtgggctctggggccagcctgcctgggttccaatgcacttgctggctgtgtgcccttgtgcaagttacttaacctctctgtgtttcagcttccataactataagaaaaggaatattagcacgttttcccaacagagcccatggggggttcaatgagatatggaagcacccccacactgtcaggcacaggcaaatgctcaataaatgttcattattagttactgttgttgctgttattggtgttctgagaccagaacaaactcataggacctagtgattctgttctgactttccccaggaactccagtatcagcctcggctgtcccttcttctccatgaggggcaagcccagagagggtgctcagcacacacccatccttccctggg

SEQ ID NO: 32304 - DNA, 1169 bp, Artificial sequence
  DNA replication origin
ggcacaggcaaatgctcaataaatgttcattattagttactgttgttgctgttattggtgttctgagaccagaacaaactcataggacctagtgattctgttctgactttccccaggaactccagtatcagcctcggctgtcccttcttctccatgaggggcaagcccagagagggtgctcagcacacacccatccttccctgggaaacggaccgtatgctgcttagaggcagttttgattcattccttgggcatctggaccggttgggccacgtgggctcgctgggaaaacgcgccggcgtcccctcggagcgccgaggccgggcgagctgagggtgcggtgccgctggagcacgcgcacagcgcccgaaccagcacgcatgcgcgccgcgggccggccccatttccgccccccccccacgcgcccccccatcacacgcacacccaatccccggactgctcgctggtgctgcttgtgagacccattcctaggagccccaggcgcccttggggagcagaaagaggcggtccagagttgggccggacaaccgcaacctggaaggagtccgggagtccttgggtctgggcgctcagttctcacggtctggggagaaggggctcagacgggacggactaggcacagccaggggcggggactgcgagaggcgaggggaggccggcagggtgtggcggcagagcagcccgggacaagtgagcggcctagagatcaaggccttggagtcccgtccgagagcaggacgttatcagaaacctccagccccaacccctgcctggagatgcccggggcgcgctgactctgttctcgcatcaccccgggccctggctcaacgcgtgagcagcctgtggttccagataccccgagtggagagtttgaccccagattctgcctgcactgacaggcttggcctggcggttacgagccacggttgatgagcgcccctcctcccgtgacccagctcatgagaaaggcggggagcaccaaccctcccacgggaaaacacggggagaggctgggcgagtcaaggaatggtggcaccagagcctgggcgcagagaggcagctggacctcctgggctcccttgagccggagctccgccagggtgggcacttctgcctccagcgatgctgggtgccacagtcctcccgcc

SEQ ID NO: 32305 - DNA, 1298 bp, Artificial sequence
  DNA replication origin
agtctggggcctctcgcagaacctcggggaacagaggcgtctgccgggccgcctaccctccgcaagagtgggccacgcgggcggcaaacccgagggcagacgtttgggagctgaccgagaaaacgcgacggtgccggcgaggttctgggcgaagcctcggcgtcctccactgtggtcgacgcctttcctcgcagccccggtacagggcttcctcggtgcacccctagccgttgccccgggaggaggcgccgtctgggacacgaaggggctcggctggcgtcgaggctccgcggccagagcgcggcggctccgcgcacgcccagaagccgtgttgccggttccggggctgccggaaagcgtggggccaagctgctgctctgtgcccgcgcaagcgcctcgctacccgggcgggaccttgctctctccggccgccctgggccgaggggtggctcagcatcgtgggggcggacgcagacggccactcggccgggacaccgtcggcccgggagccgtgatgccttttctctctgcagctgaagcctccgatcggtttccccgcccttctgtaggaaatcaaattcagggaacatggtaccgtatttacccgcacaacttcctcccttgacattttgcactctcgaagttggggcagaagtaattatgcaaacatctggggctgtcccgcgccgctaccggcaccgtcttattcatcctgagagccgcactccctcatttgcataataatggcttatctagaataacacagcaatcagaggcaaaattaattttcttcagctagtccttgagatcctaaaaacagaggaggcttatggcaagaaaagccggtttagcagagggtgtagggttcctgaccaggaccaaggagagagaaagtttaaagcagtggaaatgtgatgttcacgctgagtttctgtatttttctagtttcaacctcagagcttactttttggccaaacggatgaaggggtaagccaccgtggaagtcccagcagatacccccaccatcgccccatccatcctgggaggttcggtggccctcgaggcagagacatggactgtggctggggtattgggggcagatgttcaatgtgttggggtgtggagagggtagattggcagcctactgaggattaaaggggtgtcctgcaaaccagctccggggtctgggtccggaccttccagggactcagttccgcaccctttgaacagatcaagacagagcacttccttgctctgggatggtcgcctcagccaccgagacagcagaagtcgttgaa

SEQ ID NO: 32306 - DNA, 1462 bp, Artificial sequence
  DNA replication origin
cgcccggccgcggccccggcgatcgatgagcgcgccgccgagcgggctgcggcgcgcgggccccgggagccggcggggagggggccgcggcggccgttcagcccgggccagatgtggccggcgcaatggctgcccggccagctgcagcgctcggaaggtgccactcgccgccgccgcgctccccatcctttccctctccccctgcccccccatttggaggtgcaaatgcagatgaaccgggattgaaatctaattgcttttgtttaaaaaaatgtgagccagtccgtgttgagtttgagcagacgcctgggatcccggcaaaccaagcagaacgcctgggggagagaaggggaaaagccctagggtctgggcggggggcgggggccggggggaggcgccggtagagtgctgcgtggagcctcagcgccaggaggccgggaacagtggccacgaggacccactggctctgtgccctggaggcgcgggcggcctggagccagccaggtggtggaagggagaggtgagaggtgtcgctgtcacacctttcttctctgtcgctgtgccagccctgctcctgacggcaggctgcaagaggctggggggataggggacaggccccccagctcggaagattgaagccatcagggccggatctgggcaaggaaggagtcatctcagggattctctgccagaggggcggtgggtcctgggtgaagcctcctgagatcctggtctccttggtcagattgacgcctgcctgtgctggtgacctcagtgtccgtctcgaacaggacgccccacttgctttccctctccccacttctggctggtctgtttgcccacggaagaggagtctgagctgcccctgcaagggtctggacggtgaaagtggccccaggatgtccagggagtgtggaggggcctctctggctaggacacgtggtgcactgacccagttctctcacgcagcctggtggcaaggcgacttggtgcaggtgtatgctgttgtagacctagtggtagcccgcctagcacccccaccaggtgcacagtgaggcctttacctcccacgggtggcagaaggcaggagagacccccgacacccacaggccccaaggcctcaccggtggatggcacggaagaagcttatgcacctggagcagtggcccctaatatggagaggactgtccctcagcacatacccatcgcccctcaggtgtccttctccgcgcagtttagactgtgattgtgtcaaccttgcctcggctcgccagtgcctggagatgctgacaagagagcctctttctccaaggaggccatttccagtagcatgatgccacctatagaatgtacctggaattagtctgagctgcagccttgctgccagcagtgtggggctggagggaggagcacaccttagattgttcctcgccagagttgagcctggaatggtagcctagtc

SEQ ID NO: 32307 - DNA, 903 bp, Artificial sequence
  DNA replication origin
gatcccaggcgtctgctcaaactcaacacggactggctcacatttttttaaacaaaagcaattagatttcaatcccggttcatctgcatttgcacctccaaatgggggggcagggggagagggaaaggatggggagcgcggcggcggcgagtggcaccttccgagcgctgcagctggccgggcagccattgcgccggccacatctggcccgggctgaacggccgccgcggccccctccccgccggctcccggggcccgcgcgccgcagcccgctcggcggcgcgctcatcgatcgccggggccgcggccgggcgagcggagaacaaggtatagcctgtatttaggttcctgcccttatatggcgatgtgcgcgagcgcccgccgagcggccgcaccatataagggcacgcggcgggcgccgggctgagctggtgcgcgctcattggcccgcgcgtctctcggcaaccggctctcacgagtggaaaccagccagccgcccccgcccgctccccgccccctccctttctttctccccgggtatctccgctcctcgcctccgcacccccttcgttgcttaacccccctttttgcctgtaccctctccccaatttttcttcccgcggccttcctcctccctttgcctcgttgtcattcttctcccgtggccgcttggcctgtcctctcccgctccgcgcacgctcccactcccaccccacgcaccccctccccaaacccggcgagcaacggcggaggagcgggaaggcccggatgcgggaggggagcttgtgtgcgtgtgtgtctgtgcgtgtgtgtgtgtgtgcgtgtgtgtgtgtgtgtgtgagagtgtgtcgctgccgcagtagccgctgcagcatcaggttcactgcgtgcacgcacggggct

SEQ ID NO: 32308 - DNA, 1599 bp, Artificial sequence
  DNA replication origin
cccacccccaccccggtgcccggtgccctcgcgaggtcgcggcgctccggtggggaaatgttaatggggtgttgacctcggtgaccgtgtgtcgctcccacccatttagaaatcagtctcccccacaccctctggcgttggagctgggcgggctagccccgatgctccccgcagaaaaattaaaaaaataacaaataacaaagctgtgtgcgtgctgactacagacgagccaagcccggaactccgcggagaagatccgggtggatcctcgggcgccataaaccgcagccaccaccgtagctcagcaggtgccgagcgcccaccctcctctcggcggggagccgctctgcgaccccctcctcggccccgccgagagccatccgcgccgaagaggcgccggcggccaccccgccgctccccagcacccgggcccgagcacccttctccgggcgccaaggggagctcagggtgaactggacacccggcctggggcatgggctcagggcagggcccgggggcgcaccagggcaggggacgaaatcgccccaggagctccaggactgagactgctgagaaataaacgaaaagtgcgcacagaggactggtgggtggggttggactccggagttgggaccccttggcacagccgcgtgggttcgtacccccacttccccaacccaaaggaacccaggccccagcgggccgggccggccggggagaggtgtgcctgtagacttggtgctttatttttccctttctgcaagtttctctctcatccctctccgccagctgcgttctcgactcttctgatttcaccaccagcgcctggaaaattcaaattcagtgtataagagggcaggggccagggaccaggagccaacaggtcaggaaaaggggtttccagattcgggagcgcttctgctcctggggtttaagaacagagaagaaaaggcgcatttgagacacgtccctgtgcagagagaagtcgggggacatccgggggtccgcattccccctcccccacctgggcggaggaatccatgtacctaagcacgcagaaacttgaagatggggatctattataaatgacctggctaaatgggcgtggggagagcgggtcagggatggtgtacttcgggggcaccaagaggcagcacccgggtatccatggattttccaggacctgaagaggtctcaatggcagaggtccggcgctgggcgaaaacccaggcaaactctccgccccaagggcactccccagtccctagtctggagggaaacagctttcttctgggcaaaacaccgcggcagcgaatctcagctaaggtcagggagggatacatgctggcaccaagggctgccgccgccgcagcgcttccttccgcagaaacagcaaggaggaggcggccgaagctaactcgatccagcaggcagcgccctccccaatctagcaccctcgttccctggcagtgcccgcttccaccaccttcctctggtagggaccaggttagggaatttgagattttgaagagaaggaggacgagggtaagggaggatgcccaagacgggcggaggtcgcgctggtcatcgcgccctggt

SEQ ID NO: 32309 - DNA, 1694 bp, Artificial sequence
  DNA replication origin
ggaacgtgcctacccgcccaccgcagtcgggcagctgaagccgggcgccgatgccagctgttcccctcctgtcccgcccgcggtcccctcgaggccggcctggggctccccgggcgctgttctgggacctcgagcagtcgcccctgcgggcctggccgccttttccgcggcccgccattcgattccgggctcagctcggtggcacagcccggctgtaagcaaccccagggcggcacggggccgggtgcagaaggcggctctgcgccaggtcggcaggggacaggcgaccccggccctggagcggagcatccgaccgtccgtttcgcaatgtggggacacggggcggggagcggcctggaggccccgggcgcgcgggcgggagcgtcgcttggacgccggccttctgggcagagccattcatcgcagggcggccgaggcggcggccgagcctggctcaccgcaccatggaagctggccggccgccgcccggggaggcttgggaaatgggcgaagtggtcagactggtttccggagccgggctcggaatccacgcggactggcagacgttggtgggggaggaccgaaccccgagggtggcggtggagggtcctttcccgaccctagcaggcgaccccgcagagtggaggcggggggacggcaggcatccggtcggggaaaccccgttttcaggtgtggaccagcagactggccgctccccacccccatcccccaggtgcccgcgcccctcccgccgccgccgggctccccgaggttggccaagtgtacttggaggagtgagctcccgacccaccagtgagcctgggctttgatctccgcatctgaaagaaatgggggtggggtgaagaggcagctctgccacaagccttaggaatggccttaccccatcacgtccccctcccaatctcagtttcctcatctcccactgtctcttccggccggacgctcctgggagtctaggtagactggggcacgaggactcctagggtcggtctcaggaggaggaaggcggcagagctggtggccacgtgctcccctgggggtcgagctgtccccaggaaatacgatcggttgttgtggacaggaccttggatgctcccatcccaatgccaggcctgaggacttggagacaggaaaatggaatcattggggagcaaatttcctatcaaggagtggcatgcttgataacataggctgctaggcaccgggttctcggtgtttctgggctgaggaagaggtgcctcactccccacacagcagcccagggcctaggtcccgagttcctgtgtaggagcgtcgagggaaaggaccgagagggctgggggattgaggcgatagtgctcccatctgagagaatggagtgcccaattttcccggtttcagcagctgctgggcgggggggcgggggggggtctcgagagccgcccacgctgccgtctttcttgcggttcttccgtgggaaaattggcgcgtggggctggccctaggagggggcgatgggggctctagggctagtgacccccccaaccccatcagaagagagaaggaacccagagctagaaaaagtccccagccctcatctgtgccgcgcctgtgggaacccctactccttccagcaaccagggtgggctggtgctggggcttgggcgcgggtccagtctggcgatcgggagtgg

SEQ ID NO: 32310 - DNA, 1947 bp, Artificial sequence
  DNA replication origin
atcggcgcccggcttcagctgcccgactgcggtgggcgggtaggcacgttcccccgcagccacccgcgcacgggtttccaaggcgtcaagggcaattcacctggtcgctgcaagaaagcgactgcgcccccacgtccagccagccgccttgtccatgagaaccacctggagggcagggtccagtgcccgggtgccacccgccacgtggtgacggctctgggatggcacaggctcgtgcgtggccgccgggctgccgtctcggcccctgtgcgggtctgcgctttggcggccgccgagccgaggggagaaaatggccggtggcgcggggcccggccgagggtcgcgggagggctggcaggcgcggccgctggaggggcgccgctctcagggctcggtcaggcggcccctgcgactcctggtgcccggctgggacacgtggggccggctttgcggagtcagcagggccaaggtgcgcggggtgcgctcccccccggaaccccgccccttctcaccccatctcgcttttttgggagaggagagtggagccgtcagcacccactggcagtgtcggtgctgtgctgggagtcctcccagaccagcccactcctcctggtttgagcttccgatccatccctactcctttacggttcttcttccccgtagttaacctgcggagaggaggaggtactgtctccgcacaaggtactgcggaggtaccttgcggaggaaccttgcggaggaggtactgcggtggggaggcaggggggaggcgcatctgcctccgcacaaggggtctaatggcttgcttattccttctaggccaggttgaaaggtttttaaaagcaggtgggggtgccaggatagtgagaaaaacaagaaaagacactgctttttaccccatgcggggcagagctggtctcctttctgcaggtgttgaggggagttgagtaggagcccagagctggtacaggccccgtttaacgtgcccccgcagagtgagggctgggggtcaccccataggcaggggagcccttctgggagggaattcctgcttaggtgggaggttgacctgaatgacatctaggtcctctacctcccagatgccgaattttcagggaaggaaccaaatggatgtatggcccatgcctgggtttgaatcccagttctggccttcattcctccaggcctccatttccttgtctgcactatggggccatggtgagaactctgaaataacaccaactgcctggtgcttggtaggtgccacattacaaaagcggtgggaaggaggccctttggtttccatgtcggtggtcatgtcccacagtccccgttgccatcctgattatggaaaacttcatttcatgctccaaatgttcctcaattcctggcactgttctaggtcctgcacccaggctggtatgaaaaaggtgccgagaaggtcccatgcatcaccagcctggaggtagcagcagaagggaaaccagtgcctctgagagtgggcaactgtgccccatccacctcctcttcttcttggagatctcaagataagacaagagacatcaacctgggattgggtttctgggcagagagtaaaagtgagctccttctgcctgtgcacgcagcttccctcggtactgggatagccgagatcccttactagaagcagctcacaaaacctcccccagttactgggatagcccagacaccttcctagggcagcagcggaagaaagaaggggacaaaataccaacgaccagaaagaagaaagaacttagcctcagtcaccagccactgggagctgatagtaactgaagggatggaaagccctctgggacagttttagtgggagccctccagagcctggagagactgcaggtggagcaggaaggtggggaagaattagagcagtgaccccggccacttttggcctcacggttctgcaca

SEQ ID NO: 32311 - DNA, 1470 bp, Artificial sequence
  DNA replication origin
tgccccactgaggaagctgccgaggcccttgctcttcgggctctctccccggaaaccaccaggccagaggctcccactagaggcgcggcgagcgctgccggggtggggggcggggggcttcctgcgagatggatggggacggggaggagggcgggggagcgaggcctgccacccccacttccttagcgaggagagctgggactcctcacccttctcccttagggtggcaaggccaaggcccttggtgtcgcgggggaggaaggggttaaggtcccagagggggcgacgggactgggccgaactccggggtgcggctcagcgggccaggaagccgcgacccgggaacgcggcggcggtggccagctttctgcagacgcagcgatcttcctcctggttgaggtggccgcacagggccagggaccgcggggctgggggcctggcgggcgcggggctgctcccggcctccgaagcccttcccctgcccgcctgggaccaaggggcccgggtctgtgcggggcgccagggcggaagaggtcaacgtggttcagagtggtggggggtggcgaggtggcgagagagccagtgtggggaaggctggggagagatgagggccaggagggcggggaggcctgaatgcggacagtgtggccagtgttggctgcaggccaccagcggctggacgtgggggaggggagcccagcatggggaggggagggggaagggaagttctttaaaaaaaagccgttgggagtttctagccctggcttttgtgagtggtccctcccactccccggtcaccccagccccatttagagtgagttacacagtcccctccccctccacggaatgaatgtcctttgccaccccgggggtggaaggagggtgatcttgcttctggcaaactgcctgctgggcacgagaattgggcctgtccttcaccggctggtacacaaaggcccatgccaggcgtggacgtcgtctccctgtttttctagctgaggagaactgaagactcgggaggggaagggaagcctcttgttcaggcccacagttggtgaccagagtgacccttagcccttggtggtgtcccccaccctgtgggtggcttctgcctggctgggtctgggggtgggagaggggaggtagagggtggcactcccgcagaacagggaaggaaaccgttccactaccattcctggaaaggtgtggcctgcaggtggcctgaggccttcaaaaccaggcctgctagcagagccctcgagtggagaagggtggtcctgggcagagcctgaagcctgaggtcagaaggcagacaacgggcagaggccacgggtgggtcaggaagagctgctgggatatcagcctggtgccagacccaacagagtgcccaagaccccctctgcccctagtgtccgagaccccctctgcccctagagtgtccgagaccccctctgtccctagagtgtccga

SEQ ID NO: 32312 - DNA, 1129 bp, Artificial sequence
  DNA replication origin
gggttggcgagaggggagcccgccccgaggccccaggtgctcagctccccgcccccccgcgggaatggcgcttccccttccgacgccctccggctacaccgtcacgtactccttgaaagtaacggtgaggcagttcgcggtgacgtcggtgataattatattcccaaagaagggcttgaactcgctcagcgactctgcaggttcgtcctgggcctcggctggaggcttctccgccgtcgtggtgggtgccgctgccgccgccaccgccaccgccgccgacgccggtgtctcgggcttcacctggagggagctgggcggctccccggcctcgctgcgcgtcttgacgcagcgcaagtctatgggttcatccaggtctgagtctagcaggatgacctcgggctgcgggagggcggcggctggtggcaggtcggccgggcgctcagcggctgggctgccccccaggcaggtgggggtgctgatgctgcgcgcagtcagccgcttcttgcagggctcgcgctcgccgtgggtctcggagaggcagcgcttgcgcacgtgggagagattcaggccgacggcgtggtggtggtggtggtggtggtggtggtggtgatgggggtgcgggtgcgggtggtgtgagggcgggtgcgtgttccgggccgggtcccaggcaagcaggtcgggcttggtggtgagctgcaggggctgctctccaaaggcctccttggtcggggacagcttgcgggagccggcatcctggggctgcggatcgctaaccccggacacctcctcctccctcctcttgggcggcgcctccaccttcttctcctctgcgcccgccgcctttttaaaagtcctgtcggcaggagggtggcgctcgtcggctgcccgcttcttgtggctgggggagcgagcctccccctctgccacctcgccggacttgatcttcaccgcctgcatgccgttctccatgtatttgctcatcacgatcacgatgcgtccgttcttgttcttgttcttgactatcttcatcttgcccccaatcccgttgcccgtcacagcctctttgggggccggcatcattccgttgggggggcccttctcggagcctttgcctggagcacccgccgca

SEQ ID NO: 32313 - DNA, 1610 bp, Artificial sequence
  DNA replication origin
ctcctccctcctcttgggcggcgcctccaccttcttctcctctgcgcccgccgcctttttaaaagtcctgtcggcaggagggtggcgctcgtcggctgcccgcttcttgtggctgggggagcgagcctccccctctgccacctcgccggacttgatcttcaccgcctgcatgccgttctccatgtatttgctcatcacgatcacgatgcgtccgttcttgttcttgttcttgactatcttcatcttgcccccaatcccgttgcccgtcacagcctctttgggggccggcatcattccgttgggggggcccttctcggagcctttgcctggagcacccgccgcaccggccaggggcttcaccgcccccaggtagcctttggcccccgcaccttgcgcccacttgtcgggcgggtggctcttggcccccaggtccgggcaggtggggctgggcgcctccttgtggccgccctggtactgcaggtcgtacattttggggtcgggctggtaggggtggtgcttcttgctgttgagctggtagtagtacttgccgctcttgcccggcggcgggggcttgcccgcccgctccttgctgtgcggctggtactggtggtgcttcttgctgttgagctcgtactgatgcccctggcccttcccctgcgcgcccaaatccagcttggcacggttgtcagtggaggagtcctggaggccggtcaggacattggaacgacgggcaaaggtaggcacctgagggaacgggtgcaggggtgagaggagggaggagacagccccaccgcatgccgggagtttctggagcgtcccagcccccaccaggtccgcagctgcctcatggggggcaggaggtgggaggtctagtagaaagggaacagggtcagggtgctgggaggaaccaccaccaccccccccatccccaggcctggaggcagctctggtggccatgtcaagggggtgcccaggggcggccgtgtgtattcacctgcaccactagcggtttgggcttcggccctctcttccgatatcccatcagctgctcctgccgttccctgggtgggagggaacagagggcagtgctgttagcctcagggtcgccccctacccgctaattccggaatcttctgtgatgcccccccccccgcttcagagagcatcaggtagggctggccggacacaggaatcaagagttcagggcaggtcaggcctctgcgcccttaaccctcacaccaaccctcctctgcccaagaggtcctgggcaaagggctcccccactttgatgcccacacccgaaccagcacccccccaagccccacctctgtgctcaggaggcagaagctcagggctgcacctctggccctcctgcccacggccttgggcctgtggctctgtgcgaagcaaagtggacacggggatccagggaagacaaaccagcccaagcgaggtgtgcgccgacctcatccctcccgtcagaagcgcgggatgctaatgacctcattaagattccgataacgagtgcctccggcagaagggagggccctttcttaaaggccaggcactaaacagggggaggggctgcgcccttgtttacacagcggcaa

SEQ ID NO: 32314 - DNA, 1865 bp, Artificial sequence
  DNA replication origin
agccctcgcggggactcggggctggggagaggagggggactgcgactttgcatttcggctgctttgcacgcagggttcctggtgagcaaagtggctttggaacatgtcgcagtaacatgcttaaaattcttgacaactgcaaaataaactgctagtttcattttccttacccctcccctttcttcctgcccttgcgtgtttatttgaggggggggctgtgtatcagggactacgtcaggcctgcggaaatctaccttccacatccacggctaaatgttcataaagacagagtagggccttatgtcactccccacctggaggccgcggcaaaggtggcttttttttttttttttacaccgtgtccccctcccttttcccttgcaagatataacacgtgggaaccggaggagaacatcctggaccccaggctgctgatcgccttccagaacaggtgagcgtcccccacgcagccaccgcctgccacccgtgaccgtatatgggaatggcaaagtgggcgacgcagcaataggaaaggggcgtggagggggctggtgggagccccctccccaaccggcctggatgggcacgctgcggccccagctcctctaaccagcgtccttggcggttgctgcagcttggggtgggggcggggcaaggccagggaaggccaggcttgggttttgggggaagtttgggaagggtgtgtgtgggtggccatgcagctgcccggagaacttggggctgtgcctggttccccaggggcccctcctgttgcaacctgggagccccacccccggagcctaggtgttgctgtcctgcagccactggccgcttggcaccagcacctcgcggtgcagctctgagggagctggcattgtgaaaccgcccggacgtcatggaactgaacttaacctgttggcggctggaggaaagttgacatggccttaaaagctgcacccgcacaccccagggaatttaagcttggtcaggagtagattccatagggtgctgggttgccccccgccccggaccccactgggctgtttggcagggcagggccacccaccctcaaggcaggggggcttggcccaagggcctggggtgggcgctgcttggtggtggaggggtggcttcttctgggggactcatcctcgtgcgcacggttgcttgtcacgctgcagctgctgcagctgggttcgtcgccggtggctgtggttctctgtttcggagagggtagaagggggaagggcgaggaggggaggagcagccggggcccttggagctcggccaccccgctgccttccatctctcctcccccttttattttgcactatttcctgtggcgcgtttggcgctaaaactgtaaactgtagaccctctgagctagccaccggcggggcagggcagttgccctcccgcaatgcagggggggcacgtagctgggatcctgccccattccacctgggagttcaccaccctgtaaccatgtcagcggctgatgccacgttgcataatgggtccctgaagaattaaaacgcaggctgtcgcaatgccacgcaacttcagagtcaggccccggcccccgccctggggcatgtcagaactccccagggttggtccaaggaggcatgggggtggtagctagggtctgtgaggaacccgtttccggcccaggaatgggctgcaactttggcagacactagagaggcatcccactcgtccgtggagggctgggtagtgcctgggaagatccagcccccagctgtggatcacccttaggctggcctgcaggcaggagcctggtggctgtagtgaccggtgcctccgcccatgggctttattcattatttggaaattgaggcagc

SEQ ID NO: 32315 - DNA, 1356 bp, Artificial sequence
  DNA replication origin
gcgggagctagcagcgtctgcagccgcgccggccgccagcgccccggcgcgctccggctcggccatggagctgccagctgttggcgagcacgtcttcgcggtggagagcatcgagaagaagcggatccgcaaggtagggcggcgcgggggcggcgagcggcggccggagcggcccgcgaggaggcggggagggggtggggaggctgcgggccgggccggggatcccgcggaagctgatggagtgctgtctcttccccccagggcagagtggagtatctggtgaaatggagaggctggtcgcccaagtaagtcgcggcggagggcgggggcccgggggccgaggcgcggggctcggggccgcggacccgccgagctgctgggggggtggggggagcggacgggaggcggggtggaggtggggtggagggaggagggggtggggaagtcggtggcaggcactggggaagccgagccgccgagcccgagcccggcgccctgtgttgtgctccgctctccgggaaatgccatcactaatttatgcactaaaaggagccggaggagctggagagacgcggggccgagccggggaggccggcggagggagggagggcgcaggcactgactgatgtgcagcagaaaatggctcctttcccctttccctccaccgaacggctccatattgcaaaaccaaaaaaaaaaaattaaaaagcgacgaaaatgcaattgtgtgccttctccctcctagtggtgcagggaggggaagaagaaaggcagaaaatgttgggaactgtcactgcggcgcttttggtggagaattttttttctttaatttgaaatgcgaaggcaccggatggagatagacgcgcaggcacacgcacactcacacacacacacggaggcatatttttgtgttgctgagtatttggggtttgctcgcccgtgacagcgggctcctgggccacgagggggtgtgggggggacgcttggctgttggctatcggattaggggtcaaatggagaacggctgaagccctcgcggggactcggggctggggagaggagggggactgcgactttgcatttcggctgctttgcacgcagggttcctggtgagcaaagtggctttggaacatgtcgcagtaacatgcttaaaattcttgacaactgcaaaataaactgctagtttcattttccttacccctcccctttcttcctgcccttgcgtgtttatttgaggggggggctgtgtatcagggactacgtcaggcctgcggaaatctaccttccacatccacggctaaatgttcataaagacagagtagggccttatgtcactccccacctggaggccgcggc

SEQ ID NO: 32316 - DNA, 1079 bp, Artificial sequence
  DNA replication origin
atgcaaatcccggacgtcagcgggcggggcctcgccgggcccagctcggcgtcagggggcgggccgcggcgcggattggcgcagccgggcctaccggaggccccgggcctgggcggcggggggaggaggaaagggcgcgggtgggggacgcggaggggagggcgccggggaggtgcagggggagggatcggcgagcctgggagagggaggctgcagagagggagcgggaccgggaaggagaggtgtgtccgccggggcggaggcgggcggagagcttgacagcccggaagggtctcggcggcgacccctcgcccacatcccggtgcccgggcctccccctcgcggcacgttctcagtgttcacggccccgggacccctgctgggggccacggaagcatccgccgccgctcccagttgcaccgaattgcgtcaccagcgccccgggacgcgcgggccccgccggcagggggcggaatggggcaggggcagctcgcgccccactgcgggccccgcctcgcctccaggctccgggcattttggagcgcgaggagggaaagggacagggcggagagaaggccgaggactgggtgccaaggagagattgaagaacgcacgaggaaggggaccgaggagcagccaatcccggggccctggcgcccaagaacctcggcagaaagggctccaaatccgatcccaccccgatcctcaatggctccgaatttacacttggtcctcttattgacggggcgagatgtcctgtttctagcagcctccagagccaagctaggcgagaggcgtaggaggcagagagagcgggcgcgggaggccagggtccgcctgggggcctgaggggacttcgtggggtcccgggagtggcctagaaacagggagctgggagggccgggaagagcttgaggctgagcgggggacgaacgggcagcgcaaaggggagatgaacggaatggccgaggagccacgcattcgccttgtgtccgcggacccttgttcccgacaggcgaccaagccaaggccctccggactgacgcggcctgagcagcagcgagtgtgaagtttggcac

SEQ ID NO: 32317 - DNA, 1400 bp, Artificial sequence
  DNA replication origin
ccagagccaagctaggcgagaggcgtaggaggcagagagagcgggcgcgggaggccagggtccgcctgggggcctgaggggacttcgtggggtcccgggagtggcctagaaacagggagctgggagggccgggaagagcttgaggctgagcgggggacgaacgggcagcgcaaaggggagatgaacggaatggccgaggagccacgcattcgccttgtgtccgcggacccttgttcccgacaggcgaccaagccaaggccctccggactgacgcggcctgagcagcagcgagtgtgaagtttggcacctccggcggcgagacggcgcgttctggcgcgcggctcctgcgtccggctggtggagctgctgcgccctatgcggcctgccgagggcgccgccgagggcccgcgagctccgtggggtcggggtggggggacccgggagcggacagcgcggcccgaggggcaggggcaggggcgcgcctggcctggggtgtgtctgggccccggctccgggctcttgaaggaccgcgagcaggaggcttgcgcaatcccttggctgagcgtccacggagaaagaaaaagagcaaaagcagagcgagagtggagcgagggatgggggcgggcaaagagccatccgggtctccaccaccgccctgacacgcgacccggctgtctgttggggaccgcacgggggctcgggcgagcaggggagggaggagcctgcgcggggctcgtgttcgcccaggaatcccggagaagctcgaagacggtctggtgttgaacgcacacgtggactccatttcattaccaccttgcagctcttgcgccacggaggctgctgctgcccggcggctgctacccaccgagacccacgtggcccctccccaggggtgtaggggtgacggttgtcttctggtgacagcagaggtgttgggtttgcgactgatctctaacgagcttgaggcgcaaacctaggattccctgagtgttggggtgcggcgggggggcaagcaaggtgggacgacgcctgcctggtttccctgactagttgcggggggtgggggccggctctcaggggccaccagaagctgggtgggtgtacaggaaaatatttttctcctgccgtgtttggctttttcctggcatttttgcccagggcgaagaactgtcgcgcggggcagctccaccgcggagggagaggggtcgcgaggctggcgcgggaagcgctgtaggtggcagtcatccgtccacgccgcacaggccgtctgcgccgtcggaccatcgggaggtctgcagcaactttgtcccggccagtccccttgtccgggaaggggctgagcttcccgacactctaccctccccctcttgaaaatcccctggaaaatctgtttgcaatgg

SEQ ID NO: 32318 - DNA, 1916 bp, Artificial sequence
  DNA replication origin
gaaggggtgaacctcaggggcacgggagagccgcggggcgaccttgagcaaacgaaacccaaataaaaacacagtgcgccgaggccgttgtgagcgcggcggcggcggcggcgggcggtggaagccgttccaaagatcatatttgaaatatggatcccgggggcgcagatctccaggccggcggggcctcgcgactgagtgggggccgggggccgggtgggcttctccgggcgggcctgaggtggctgccctgacgttgggagggacggacgtcgtagaaaacagcgcgtcccgcttcggcgcctgcgaccccagcgtgccgcaatgcggaggcgcggccctgcgggcggcggtgtggccccgaggggtgcttgggccctgccaaaggaccctggcgtcgcggtgctcggggcccgcgtccccgtccgcgcaccctgtcgggccagtccgcaggaacccccggctgcagtgccgcgcggcccgctagggtgggactcgggggcgtcggaggcttcgccgaccaaatgaaagccgagctttcacgggcggtgggacaaagagcagaaacattgaagtggggacccgggggttgggggggcacccttagaaacaaagccactcctccagaagggtggaggggcggagtgcagggctccctcacagcctccccctgcacgcacaaccccaccagttccgctgcccctaagctgccgctacaagtacgatatgatcaacgccagcgcgaagtttttctaaggacaagggagagaaatgagcgcttgttaaagcccgggtagattctgtagtggttactggtaaatcccctctcggtgatctgcaatccacctccgagggccgggaaaacgataccaacttgagagctttctgagtcgggggagcgacccgggaagccacaggcggcccgctcaaggcagagcccaaatctgggttccgtgggctggcggtggcaatctcctggcccagagcacccgctcagcgagaagattcccttaagaagtcgtttatttccccgggatggtgcgggtcatgcctcttcccagaccgaacacttagtagccaccctccagcccacggctgttaaaaggttcccgacctctccagggtccactccttcagcctggcccccaccaggagcgagcctgtggctgagctagatagcagctctcctctcctggggcccctgagggccctgggggcccaaaccgaggtggcgtctggaaggcttcagtctggcagcagaaccaggggctcgaccagcccctgtctgggagggggcagtatcaaataagcaggccagcggcccttctcggggacctgtgcggagctggttatccgaagtcgggggcaggagccccagcagaaggctctgggaatcccaggtgtagggctagtttctcctgcggctccctgggaggggccaagacagccgggtgggatggtatggggcacccccccgggaggtttcccaggaagggccctctggggcatcaggggagcttccagggcgtccgctgtaccttcccaggattctgtcccacctcctggcgcccattcgctctcccgcggacctgagctcctccccacaccggctggcaggggtggtctagggaccagccaccgaggttaggtaggggcctctctccccatctgcccaccatccacaaagacaaaataaataaccacggaagggaagtcaattgctggtgcttgtgcatttcactttcaaagtcgttggcaaaaaggccaggagcgggggtggccgggggctccttgggcttctgaagtgcttgggcggcccctcaggtagtcttggggagcctcaagacgcttcctgccgccgcacaggcagcaacagaaaagatccgctgcaccgacccccgccccttcctccccag

SEQ ID NO: 32319 - DNA, 863 bp, Artificial sequence
  DNA replication origin
ccgccctgcagtgcaggccaagctgcggtccggctgggccctgccggccgccatcccacggccacaggatccctgagcccctctccgttcgcccctcagtcctgcagaggcatcgggaccccccaggtgtccggcggggttcaccgcgctcccgcctttggggatcgatcggctggcgggcgacgcgcggccgcggctccggagcctccgcccccctccccctctcgggctacgcaggacgcggcctccaagcagcgtcctcgcggttccgggccgcggccaggccaggctgcaggccagccggggaggcggagacgcgccgggcccttccgatcgggccgcccctcggctccggggttggggagagggaactagagcgagcccagcttctccgccagcggcgctcggcgcccccttttctcgcccccctcccaagccaaatacccccacctcgcgcgcgcgcttaaccctcggcgcgccgcgaggctgggagctgggaggggagtagccgagggggaggggcgcaggggagcgagttggaggggggcagttgcgcttcggctgacgaccacttcggggtccgcctagcgatttttatttcattccctgccttgctgcagcagctcttggttggaaaaaggaagaaagaaatctgccctgcgagtgggccccgctgggtttgggggcgcgacggggacacccgagaggaaaacgcaggggctggcgtgaaggggtgaacctcaggggcacgggagagccgcggggcgaccttgagcaaacgaaacccaaataaaaacacagtgcgccgaggccgttgtgagcgcggcggcggcggcggcgggcggtggaagccgttccaaaga

SEQ ID NO: 32320 - DNA, 893 bp, Artificial sequence
  DNA replication origin
ttttaaactctcaaataaaaagatatgtgtgtgctgctcgtgtggacttcccgctgggagtggaagggccccgagcacgaggcccgcgtcggggacaatagcccgcacccctggggcctgttccgtgctcagggcgcaggggctcccaaggttcaaagtcccctggagcgggttgtttctggctacgaaagcagcagcccggccgccgtggggagggggaagggacggggtgtgcaggaggcgggggtgcggggcttttcaggccatctctcattgcagcgagacccccgctttgcccgcgtccggacctccttcccccctgcgggagaggcgcggaggggctgccggaccggccagggggagcccgccccctaggggagggcgtggcgagtgcaagctcctctgcgcccctgcccgggccctgcctgggcacccgggactggcaggcgaggagccaagggggatccctggggttgggggctcgggggggctgggggaggtcctcaggggccatccccagggaccacttcaggaaacggccttctggaagaagctggggaaggggacttttagggcacacctgggttatcttcccgtaggtggggtcgaggggacacccgaacatttctaccaggattcaggagggcggggcgaccagatagactggggtgaccgcgtcccacgacctcgtcatcggggatgggggtggggttgggggctggacaggtagggatgaagttgcactgcgaccggactcggctccggaagtgtccaaagcctgggccccatgcagacaatatggaattttgggggtgcccgaggtgttaccacccgccctgcagtgcaggccaagctgcggtccggctgggccctgccggccgccatcccacggc

SEQ ID NO: 32321 - DNA, 1063 bp, Artificial sequence
  DNA replication origin
cctcagcaggctgttcctgaaatccagctgtgcagccaggatcggtgagcacacacacattttcagggataatggtcttcagaattccaaaggatttattggagctcgcccgacgtggaccacagccgagctgaaacccacacttgacaagtgatgcaatcagcgctcgactcttgccagcgttttcgggagattaggcagcagcaggggctggggtgcacaggagcaggcagacaggagcaggcgattgcagcagcatcaacacctgagtcgatgtgatggcgtggcgagtggccacagactctgggagccagccggggagcacagcgtgcccggcagaaggaggtgatgctggctgagcagaaaggtcaccaggtggggttgcagtggcctggacagccaggaggatgctctgtgggcagccagccgtggccagaggggaaggctgtgaacggggtggttagaagccacctgcactggagtcctggccacagtggggggtggtcctggatctcaggctcctctctgtatagggggccttacatggcccacctccagagcccgaggaggctgagtttggggaggacagtaagcccttggacttcctgttgctgcttggtgctgttgttaggagtctggaatgtgctggagctatagattgggtcactctctgcaaaaagcagaggaaggaggtgcaggaggtcaggggcagttcccgggggaatatctgaggaagggcagccatggaagagatggatggaggccagggagacggtcccagaggccacagcaatcacaggcttaaagacggggggagggtcagggagacccaagggtgggtcggagatgggccccagggactgaggaggggaacttggacagagaagtttcatagacagaaaagagcagacaggaagttatggagggttggggtcggattcatgcacacacacacacacacatgcccatataaatacacacacaccagcaaacacacgtgcatgcacgtgggcacacacacgaatacacacatgcacacacatatgcacaggcagcaagactg

SEQ ID NO: 32322 - DNA, 1165 bp, Artificial sequence
  DNA replication origin
tgggtaggggacatagatccttctgtattatttcttacaacaacaacatgtaaataaacaattatctcaacattaaaatgttaatttaaaaaataaacaaaacctactcagcactttgggaggccaaggtgagcagattgcttgagcccaagagtttgacaccagccgaagcaacaaagtgagacccagtctcgaaaagagagaagagaggagagggaaggggatgggaaaggaggggaaagcaggggaggggagggaggggaggggaaagcaggggaggggagggagacaaagagacgagaggggaggggacaggaggggaggggaagggaggagaggggaggggagggattagctgggtatggtggcatatgcctgtggtcccagctactcgggaggctgaggtgggagaatcgcttgagcctgggaggtcaagcctgcagtgagccgtgatcatgccactgcactacagcctgagtgacacagcaagattgtctcaaataaataaataaataaaatctagttcaagctttcaagctggtgtttaaaaaaagaaaagaaagaaaccgaaccaaaccataactgcctcctgactgccctcacctccagttctgctgcctgtgtgtgtgtgtccgtccatctgtctgtcccaccagccactgctgcagaaagctcctgccctgtgttttcgaaggcagctgtgctgtggtggggctggaatcaaaagccagaggcagatgggcacgttttcatcctccctgcatcttccagggtgtggacttcggcaaagacttcacatagaagtccccaaatctgaggaggttttagaaatatgaatctgagattccacccaggcctgttcaagaacggctccctgcaagcagcatcctggtgtttctattcgaaccagacaccaggtgttaagccagccagccacatacccattttggggggttcccaaccgtaaccctccgagcgtctgtttctcccccctgtgaaatgggagaaaatgcagtaaaggaaggccagggtgtgaaaggggctcacaaggtgaaaagcggggatcaccgaggccggtggggttccgccttgaaccccactcctcctccgggctcctggtccccctgggctctctctgcctcctccccaatggcttcaggctcgg

SEQ ID NO: 32323 - DNA, 883 bp, Artificial sequence
  DNA replication origin
ttgcttgaacccaggatgcagagtttgcagtgagtggagatcgtgtcactgcactccagcctgggcaacagagtgagactttatctcaaaaaaaaaaataaataaaataaacaaaatcaaggtaatgcgtgcatacagattttctaaaatagtgcaatagcttccttggcttccttttccctcttctgaacctgttctccagagacagctgctcttcagggcccttagctctttgtggacttagttctggccattgcctccacatcttcagatggcaaacgcatgcaaccccccatttgatggatattgacccagggcctcctgtgtgtcaggcactgtcccaggcccttgtgaaactccagaaacaaaacaggcaaagatccctcccctctgggagctgatataggggactgacctcatcctggagcaaacataattcccgcaggggcagatggacaacaactgataaacaccataaacccgtgagtggggtgcacctgagaatgcaggaagcactttggaaaaaaaatagcacagggtaaggggagaatcaggagtgccaggaagaggggtacgagctaaagtaggctggccagggaacactgagctgaggagacgtttaagccaaggcttacaggagaggaggggctagctacatggaggtgtggggggacaggagcgggtgttccaggcagaggccccaaggcaggagtgtgtctgctgtgttcaggaatagcaaggaggctggtgggctggaggggaccctggagtcagagatgaggaggaatgaggagaggaggctggggggctggaggggaccctggagtcagagatgaggaggaatgaggagaggaggctggggggctggaggggaccctggagt

SEQ ID NO: 32324 - DNA, 1003 bp, Artificial sequence
  DNA replication origin
gacaggagaatcacttgaacccgggaggcagaggttacagtgagcagagatcatgccattgcactacatcctaggtgacaagagcaaaactcaaaagaaaagaaagaaagaaaagaaagaaagaaagaaaaaggaaagagagagggagggagggagggaaagaaagagagagagggagggaggaaagaaagaaaggaaggaaggaaggaaggaaggaaggaagaaagaaagaaaggaaagagagggagggagggaagaaagagagagggagggaggaaagaaagaaagaaagagagagaaagagaaagaaagaaaggaaagagagagggagggagggagggaaagaaagagagggagggagggaaagagggagggagtaaggaaagaaagaaagagaaagagagaaagagaaaggaaagaaagaaagaaagaaagaaagaaagaaagaaagaaagaaagaaagaaaagaaagaaagaaagaaaattgtccatcaagatcgagaatgagcatgactagaggcagaagcaagctacccttgctaccctcaagagtctgggaggtggaaagtgaaaatccccacattggaccaagggacctattgatggccaaagggctgttggagtagaccaggggtcccctgactctgtcacacgctgcaccacccagaagccactagtctcatagtgtgatgcaacagcgttttgaaggcatggctaagatgatgcaaggatgtgacctcagcctcctagatgcagaatacacctgaaatcaacaaccattctaggggcgtgtccccagtaggcagaatgcattgatccaggaagcagggggtggaaggaggaatgtctccatttactgtcactccagtggtctccctgggggaatttctgccttccaacctcacaactctaggtttggtgagtctgcaagacccgattcccagagcggtacccttccagcaggatttgcatcatgggtcccattacacttggcactacggct

SEQ ID NO: 32325 - DNA, 749 bp, Artificial sequence
  DNA replication origin
gaccactgccccacttcattcattcattcactcattcattcatccattcactaattcattcattcattcactcattcattcatccaccatacgtttattgagccagctcctttgcaaagctccgggtcacaactgggaacaggtaggtaggactccctgtctcgtgcgcttctgtcctaacagcagagctgggcagccagcaaaacgaccaggtggcaaaacacagtggacagagcagagctggggagaggcagcacaaggaggggctgggagagcaggactgcaggtgcgtgtccatgtgtgtgagcacatgtgtgtgcacctgcttgggtgggtggtcagaggaggctgccgtgcaaatgaccttggggaaaagctgggtggggcggcagggccaggcatgagcatgtctggaggaaccgagtgtcagggagagggtggcagcatgaagccacaggtggaaggtgggtccgggggcttgcaaagcagcaggaagctagtgagggagcagagggacgcaggaggaggaggtggggccaggggctggagggtcgaggggcaggtggaggagggcctcaaagccatttggaaggctctgggtatagctgggggtggaggtggaaagccaggtgaggacagatgagaaggcgcaagacgggcaacatcatggctcaggggctgtggttttgtagggggctcagagcgagggtcaggccaggccccagcctcagtcccctgaccgcctccct

SEQ ID NO: 32326 - DNA, 1140 bp, Artificial sequence
  DNA replication origin
tgcattggctccagcaagtcttgctcagacgttggtggggtggggtggggagggtcaccgaggcagggaggagcctgggggttgtcctgtcgtcctcctgggcccctagagtagaaagggcacgtgaggaccatcgagggtccgaggggcatggacaggtgtgaggggactcacgggggtgggtgaggtgggggaaggagcttcccagagcagcacgggggcccaagcccaccctcctcgccacccctgccccacgaggccgtctgggttggggatgccccaggggggcctttgcgcaaacgtctccactggcaacagccggtcgcttggcaacccgcacgccccaggcccctgcgccccggggagccccgagtggggcgggggtgccccgcggctcagcgaagcccctcctgcagcgggcaggggaggggtgcaggcagcaaatggaaagcgctcacccaccccagagccagccgggaagtccttgctggagctgctctccggcactggggcacctgggcagccatgtgctgccacccaggaaggcaggagacccaggctgctccccaggatcctggcaagccccttcccttctgggacaatagaggcagcaaggccttctccgggggctgggtgaggagagagggcctgcaggtgtgaggcatctgttgaggcacaaaccagaggctgtgctcagctcagcaaaacacagtgcctgtgggtggtgggtggcagggtcatttcaggtgggatccaggatgttcaaagtgacatccaactctgggctggtccctctggggtcggctgggggctaagggcagcagctggacatgcctcttcctggaccctgggagctggtcgcctacagagcccaagctaggagctgctggcagtcattgtgactaggggtccccccatgcagtgcctgcattttagggagacattagccacccttgacgccagcctgatttggggtttagtcaccactcagggccatgcattccaaccaaaaagttacaggcgtccccatcttaactagcaccaaacccagcagtggggccgatgaacttggccaagcagcctgtgccaggatcctggtagaaagtgggtttgggcagctgcaggtgtgaaacatggctt

SEQ ID NO: 32327 - DNA, 1196 bp, Artificial sequence
  DNA replication origin
gcctgatttggggtttagtcaccactcagggccatgcattccaaccaaaaagttacaggcgtccccatcttaactagcaccaaacccagcagtggggccgatgaacttggccaagcagcctgtgccaggatcctggtagaaagtgggtttgggcagctgcaggtgtgaaacatggcttagcttctctcctgggactggggcaggctccagttcagcagcccacctgaggcacctgcaaacacaggtgagcttttacacacgcccagcccccagagaaggccggggaggccttgccacctctgttttctcagaagggaaggggcttgccagcatcctggggaggcgtctgggtctcctgccttcctgggtggcagcatgtggccgcccaggtaccccagcgccggagagcagctccagcaaggacttcccggctggctctggggcaggcgagcatttcccctttgcctttacacacctgggcttctgcggtttcccaagggctctggtgaggaaacgggcttaggtgctgagaggggggcgcataggagtgggggcatttggccagggtggctgagtcccagcgccaccgttccgcacccggaaaccttggctgtgatgcttctctgtggcttctaacctggaacccgggggacatccccttgccccagtgccttctcaatgccaacggtgacccagcctgagctccccacctgccaaggtccgagttgagctctcagaacccttggcctttccgcagggcctccgagggcgtctggtggatcctgtgcgtgctctgcggcaccccctctaggctttccccactcactggaggccccagcctggcttcagagggactcagtggggcttgaccacgtcccagctgcgtgaccttgagcaggttccttgacctctctgggcctcggctttctcactctgtaaaatgggcacaaacaaggctttgtgaggatgagtgtggctgtcgtgcctgtgagtgcttatgtgattctcactcctgccccaggtcccctccagctcctcccttttgcggtcccgaggtctagcctaagtcccccttgcttctcttgcagggtgtttatttctctcggcttcttcctctccctacgctctcactttgttttatttcatctccgtccctctgccctccccttttcgctatcggtttcaattctccgctg

SEQ ID NO: 32328 - DNA, 902 bp, Artificial sequence
  DNA replication origin
attcagcagttcctcttcaccccctagccactggcacacggatctgcattctgtgtctatggatttgcctattctggatatatcatatcctaaggtgttttaaaaagaggattaaagggccgggcacggtggctcatgcctgtaatcccagcactttgggaggtagaggtgggcagatcacctgaggtcaggagtccgagaccagcctgaccaacatggggaaaccccatctctactaaaaatacaaaaaattagccaggcgtggtgacacacaactgtaatcccagcttcttgggaggctgagacacaagaatgggttgaacccgagaggcagaggttacagtgagctgagatcgtgtcactgcactccagcctgtgcgacagagctacactccatctcataaaaaaattaaataaaaataaaaagaggattatagagccaaagcgggtaattgggttccagtccccagcccacgtttccagctgtgtggcttgtgcacaacactgcatccgcccgtctcagtttcgtcatctgtaaaatggacataagaatgtccacagtggggtcgtcatgggggtacagggctcatccaggcagagcactgagtgcggtgttccaaggccgtggtgcactgtagctgttggtgacacgggtgtcaagtatcaggtgtcagggtggtgtgggacatggacagccaggggcctgggagagcaaaggctggaacggtagacctggctctccacggagcacggctcatgcacggaacctcgaacaggccacagaatccttccaagtctacgtctgccccttcctacctccgtgacattgggcttcagtttccccatctgtggaatggcaatgtagacctcacagtgctggagggactgagcctggcatcgtg

SEQ ID NO: 32329 - DNA, 907 bp, Artificial sequence
  DNA replication origin
gcccctgtccttgcatgcatctgcacagggctccttgcaagggggcccggctccatatcccccacctcgccccctccccatctgggcctggggcggctgagctggcttcctgcactgaggggaccctccggcctccttcctgaagcagctgcccttccccgagggactcccgggtgagggcctcccacattgtctgctttagtgatgctggttctcccacagacgctgcctgtccaccccgcacagatggcatgactgtcctccccttgcccgggcagggatacggcggcacagagatgggggccgatggctaggacctgaactccaagctgtgggccccaggtttttcatctgcttaggccactccccactgcccagacgtcccctggggtgtccggtttgctggaagggccaccactggccttgagctcccagtgtcatttccgggcgctgacgcgtgagggtctccaacaggcgggcccacgggaagtgctttctgtgcttggcccttcatgctttgcctctggttcctgaaatgggcactggaggtgggcacagttactgtccacatttcacaggtgagcaaagtgaggcttagagaagctaagtgacttgtccaaggtcacacagcaaaagaggggcctcgaacagaactaaagggcccatggtgcacaggcagaggttgccatagagcgaccagggccttctcaaatccggctgtgagcagaaacttctcccgcccccccgggcccaccatggtgacctgtggagtgcctccatgcgccgagatcgcttatcagcccatcagcactggtcacggccacttttatggtctgtgttctctcgtgtgtctgtattcgtgcgacgttccttcattcaggcaatatttgctgagcatccaggaggc

SEQ ID NO: 32330 - DNA, 993 bp, Artificial sequence
  DNA replication origin
ggatcctagcgtctgacactaagttcagggaggtcacaggacgtgctggaaccaggagttcagggttcaagcccaggcctttctcctcatattgaacgggcctctcctggtaccatggggtgcccttgatccaaagcccccagtgaggaacatctcacggtatgtggggatgggcctttgccatagcagcccatgcaaggccttggggccagagccagccccgcagggaccctccttgcactattcttcacatacaccattgaggacaagaggaagggacacccctggcctggccatgtggtgacagctccctgtgcattgacccccaggggtgctgcgatctaggagtggccatgagacgagggggagggagacactttcccgatggtgtggcgggcaggtctggcaggcagggttaggcggggtcgtggaagaggctgtcctggcccagaggctgccaggcctggcctggggctggctcctcttccaggaaaggtgtgaggcctcttgtggctcagcactttggaaagtcagccaagttctaagcttacaggtgcatgaaggttccatgtctgtggtttcaagaacataaaagtggggtgggaggccctgggaggtggtcctgtgtgggggcagccaagtagggggcgtgggatggggaatgaggtaggggatggagtaagatgtgggagaagtgaagtgggggtgaaatggggaagtgggagtgggaggggaggaaggggcaggtgctgggaagttggcccttgtggccctaatctgtctgtgacagcttccgctcctacccatccacagggacaagaacaagtatccccttccccagcctgctccctcttaaaaaaaaatcctcttcctatttagtatgcaacaggtgctcaatgtgtgctcctaccgttctccaggaaaggagggagctaagcaggacacagcccagagctcagcactcccctagcctcccaccctcacctcccaagg

SEQ ID NO: 32331 - DNA, 1566 bp, Artificial sequence
  DNA replication origin
ggcctcccggagcccccggcccacctgaggccttgggggcggggtccgtgcgccgcgaaccccaccgagccgggcaggaggaggcgcatttgggcacaaagggacctcgcgtcctcaaaataatcctcgccgctaattcccattccagcaggaagaggccggcgccgctcacatccaccccattttccgcggaaggggctttgttgcttttcttttgatttcaccccagcgggcgcgcgatcccgcccggcacacgcctggcctccgagccgctgcgtgcggttctgcccaagtcggggaaggaggggcgcgcagaacgggagagggctggagacgggcacagaaggagaggagaggagaagagaggaggggagaggaggggagaggaggggaggggaggagaggagaggggaggggaggagaggagaggggaggggaggggaggggaggggagaggagaggggaggggaggggaggggcggggtgcgagaaggggcagcagcccccgggcccagtcatccagccacgtcaggtgtgcgtcgggtaaaggtagtaacctggtggcggtgacgaggaggctggagaacgtgcaagaggaggccgagcctcagagtcccaaaagtcggaggaaactccccacctcctggagcctcccacttgctgtaattccctgcagtgacccaccccaccccaaccagggcagcgaaggacccaccgggccctggccccaggcccctctgagccttccacccaccctgcccaagccctcacccagcccagccctagagcccgcctgtagccgggacaccgcaccactccctccaccctcaccctcagccgccagcccctgtctgtccctgtccagcccaccctctctctataaaacctgagcaaaggcaggagaccctcccgcctcagaagagcagcagcaccccgggctccctgcagctctctacggggcgggggtgcaggaagccacagcggtgaccaccagggccagggcccagcaggctgggagctgctggcggagtgggacagagtcctcaccaaccgaaccgaagtgcagtctgtctgcctgatggatcccttgtcatggggacccacaggcttgcagggcctgtttttcttgaaaagaaggtttatttgggtcactcttaggagttcatgctgctctttggccttcggcagcttggctcggccaagctggagcaggaggagagagaccagaagacaggcagcctgcgggcaggctcagatcctgggctccgtgctcccacagtctgactccagcccctcgcccagaccctggccccagctcccagtggagggactgcccgtcagggtgggttactcggctcttccttcttgtgtggggtaaagggacctccctgtccagtgccacgcccctcccaggtggctgcaggagaaaccccccaggggcagatcatcagatggcccgcctgtgtgaataggcctccttggggaaactccggaagaattgttaaatatttcaaggtgggaaggggacgtcaaggtcatcaaggcccactccaggtggggcatgac

SEQ ID NO: 32332 - DNA, 963 bp, Artificial sequence
  DNA replication origin
acaagcaggtttgggggattctgctgttgggtgtggtaagaaggctgggggaggaggcgggaaaggataccaccctctgatggccccactgggtgggccgggccagcaggcagcacacggggcagcagctctcacagtcacagcagccccgcggttcaatgagcagatgacagaagggggcacccatgggtgcggtggggcctcagactcgagacctgccctgtgttgtgagcaacgattctgaagcgcagctcccgcagggtccacttgggaagatgtcaggagccctcggtcttctgggcccgtccgcggcgcagccacggcagttcaggtgatggccccacatgcccatctctgatctagttttacctgactcagtttccttgagagcccaggggccccagcagtgggaggacctgttcggctgacttccttaggcaggtggggaagaaaggccacctgccactcaccaggcccagggctatgcctgacgcagtagagggctctagaaaggccagtcaggtttctctgtgtgaagttcccagtggggagggattgtgctggaaccctccaaaggagctttatttacttagacctggtgcttcttggaggaggaagtgcctctggattgattgcctctaatagtttatgttctgagctcaaacgggaaggcaggtgcggtgaatgcggctgagtctctgtggggtgctgcagttggggtccagagctgagtcttgcctgtactccggttttattttagcagacatttgctagacattaaatctcaagagagtgtcaggcgcgatggctcacgcctgtaatcccaacacttttggaggctgaggcgggtggatcacctgaggtcaggaggtcaagactagcctggtcaacatggtgaaacctcgtctctactaaatatatagaattagctggtcatggtggtggacgtctgtaatctcagct

SEQ ID NO: 32333 - DNA, 812 bp, Artificial sequence
  DNA replication origin
gggtcgcacacaagtggaatcacacagatttggccccttatgtctggctcatttcactcggcgtaacgtcctcaactcatccgtgttgcggcgcgtgtcagaattgccttcccaaggctgaacgttccgctgggtgtgtgtggaacatgtgtgtgaacacaccgcgtttctctagtcacccgtcgggggaacttggacgctttcaccatgggctactgtggacggtgctgctatgggcaggggtggtcatgtatctgagctccttctctttatttctgacacttctatataaccatgaatcatctatgaaataattttgacaagcaagaggttcacaaagtaaattccagacaaagccaccctggagacccagctgggctgtcccgggggcggtccctgcgtccacgccgggagagcaggaatgacacaaagcaggctgcatctggctgtgtcaggcctcccacccatcccatcagccaggcatctctgctttggggccagaggtcaaacgtgtctgggttccgtgtagtctcaggggaggctgaggctgacgcgaggtggggtggggtgaggttgtgctggaggctctccacctctccacccaccagacacccagagaagaggcggaaagtcagcagggaaggcagaaggctgctaagagtggacaggatgcaggagtggcgtctggctgaccctgaccagggggacctggcccaagtgagtgtgcaccccagcccggccctcagaactgcttgcaggcacttgcgagttaatatccacgtgatttaggattcaccaaaatctgcttggaa

SEQ ID NO: 32334 - DNA, 1243 bp, Artificial sequence
  DNA replication origin
cagtgcacgcggtcctgtgcctgtgccccactgtgtgtggccaccacgccctagaaatgcagcagatgtggccaagcaactggactttggtctttctttatcttcaatgaatgtgaagtttggtggtcacagcgggaggcctccatgcctgacagcacaggtctggacggaatgttcctgggaggatggaaggtggaccctagaaacgtagcgaccctcccagcaggacaggcccgaaaaactctctgtccaaagtaatgggggaaagacgagatgataagacaaggcccctctactccctcagggtggcccctgtcatgggggcgatggcacaagggttcacctggagctggccagtgcttggacagcagaccccatggggcggccgctccccacctcacatggcttccctggcaggtgccagcccaccccgcagggcgtgcgaggcagtaataaacggcatctaagtgctttctgcctttaggaggaaaaggctccttgtcgaccgagtatcagcggcagcggctgaattattaacggcgttatcgttcatcgttggtgtaatggcccctgtcctcctacacggcacagaggacagaaatgaggctctcggggaagagtccagtctctgagaatgagctagagccagtgcgcttggtgggccaggacccagtgctgggaagcatccttgcaggagctcccacggaaggccctgggggtgtcgccctggactcacaaagctctgctcgttccggatcccttctgcgtttcctgccgttccttttctgcccaaccctccaggcaagcccgaggaggattagaaactcctggaggtgggcgaagaagtgagcggtggcacacgaatcaggacacactttgcccttcccgtctttgttccggggcgcagcagctgcccagcaaatcagagcctggagcaggagacggggacacaaagcaggggatgaggaagggagcaggaggcggggggtggagggaagggcatgtgagagggtccagggcaagagacagcagggaagggggcaaggggtgagtggggagggtgggccgtgcgtgtcttaggggccactccagcagcagcagggaccaggggcaggtgcagcacagatatccaggagctgccgccacccaggggagggacaactgggtcccagagagacctcggaggtgggatggccaggagctgggagggctgcatcctccattcctcccaaatttcaggatc

SEQ ID NO: 32335 - DNA, 1511 bp, Artificial sequence
  DNA replication origin
ggtccctgggtcttagggacacaaccaagggacagaagtggaccagaagtcactgccctgggcaagctcctggccattaggcagcagtgtctccctggcactctagcaggagggtgctcctgggtgggggtggggggctcctggcaggggggtgcttccagcaaggaggtgctcccagcaggcggctgctcccagcaggcgggccccgaagcccaggtgccaggactgctgcaaaactctccagggctctccgggggcatttgccaggccccttattcagccctcagagcctaggcgccccctcctccagctcacagagcctgcacttcctgccgcccggtgacaggtggctgacttgtgtttatggacccaagacagaccagcatgggggctgggtagggaggctcctgcggccccggatccgcctggggcttccctaatcctggagacagctgggaaggagtggggcccaggcagcctctggcgtgtcaacactggcgctgtcggagaacagaggcaaagctggtagagcagagggtggctgtgtgtggtgtgtgtcatggggtgcgtgtgtgtcatggtatgtgtgtgtctatggtgtgtgtgtcctggtgtgtttgtgtgtgcctatggtgtgtgtgtgtctgtggtgtttgtgtgtatatggtgtgtgtgtgtcatggtatgtgtgtgtgtgtcatagtgtgtgtgcctggttgtgtcatggtatgtgtgcatctgtggtgtgtgtgtgtgtctatggtgtgtgtgtagagtgtggtgtgtgcctacggggttgtgtgtgtggtgtgtctatggtgtgtgtggtgtgtgtgtctatggtgtgtggtgtgtgtgtgatgtttatgcagtgtgcctatggtatgtggtgtgtgatgtatgtatctgtggtgtgtgtctacggtgtgtatgtagtgcgtgtgtctatggtgtatgtgcctatggtttgtagtgtgtggtaggtatgtgtgtctatggtgtgtatgtagtgtgtgtgtcttggtgtctggtgtatgtgtggtgtgactatggtgtgtcgtgtgtggcatgtgtgtctatggcatgtgtgtctgtgtgtctatggtgtgtatgtctatggtgtgtgtggtgtgtgtgcttatggtgtgtggtgtgtgtgtctatggtgtgtggtgtgtggtgtgtgtgcctatggtgtgtcgtgtgtggtgtgtgtgtatatggtgtgtggtgtgtgcatggtgtgcgtggtttgtctatggtgcgtgtggtgtgtgtctatggtgtgtggtgtgtgtgtctatggtgtgtgtggtgtgtgtgtctatgatgtgtagtgtgtgtgtctatggtgtgtgtggtatgtgtgtctatggtgtatggtgtgtgtgtctgtggtgtgtgttgtgtgtggtatggtgtgtggtgtgtggtatgtgtgtctatggtgtgcgtggtgtggggtctatggtgtgtgtgcttctcggcctctgactcctccggggtgggag

SEQ ID NO: 32336 - DNA, 1123 bp, Artificial sequence
  DNA replication origin
gcgtccgaggagccctgcctttcctttggggacgccaggctcgggacggggcacagtccccgaggccgggacgcggcgaggcctgagggagggccagcagggaactagaggcttgggcccagggctgggccagaaggtgggcggggagaccggcgggggcaggcaggggccgggccgggggcgggcccgggggcgggccgggggccgggcctccccgcgcgtccccgccccgccgcgcctcactggcggcggcagcggcggaggcgacggtggcggctctcggagccggcgcgaatccggcccccgcagcgggacccgggtgggtatcggggcccggacggggccgcgggggcggggtccgaggggtccaccgcgcagcgagcagcgccccctcggcggagctggggcgggggcgcgcggggcgcgtggggcgcgtgggcctgcagccgcgggaccggggaggggccggggtccggccgccgtcctcggggtgcggggcgccagcaggagcgggagcgttgtgggaggacctggatcacggaggggcacctggggacttttccccgcggcgagtgagggcgcccgggcccggaatgggcctaattcggggagactggtccccgcctgtctggagcggtggaccggggaacttgcggtctttgtctggctgaatcggcggagcagacggatgagaacttgtggggtgccggcgcgcgcccacacagcctccaaagtgtgcgtccccccagcagcgcgcgctcagctttcccggcctgtcgggcttggtggtctgggctgtttaagatccgcgtgtcgggatactcacttccgttccgcctgggctcccttgttctttcctttgggaaaaaaaaaaaaagaaaaagaaagaaagaacgaaaggaaggaaagaaaaaaaggaaaggcaactgaagattgctaaacataacctaggggatcctgccggaagccgctgaatcctgaaatcctgtgattcccacactcggaagctggtgtcgtatattggccacaaagtagttcagatttgattcagaaataggaaatgaatagaaaagacataacaaaagttagtctcgccttatggtaaagtttgttttactgtctg

SEQ ID NO: 32337 - DNA, 859 bp, Artificial sequence
  DNA replication origin
cacattctttcaacatttttctatgttttaaacacacacacacaccctgaattagagatcatagtatacctacccttttacatttatgcctatcgttttattaataatacctttagtctttccatgtcaatacatacagacccacctttaaaaaaatgaaacaataccgatgtgtctaaggtaaaaaggccaaactctttccaatcgtttctatccttttaaacagagcctaagcgagcagaggcccggtggcagggatcttcactcagccgccctccctgtgcgcgctcagtgcttccacccaggccccaggacggtgaccgcggactatcgcgggccgcctaaccgcagggacccctcccatcgcgggtcacccccaagcctgcgagaggggatctgtccttgcaggagggaggcgcggggccgggctggtctccggccacagcgagtggccccggagcaaggtcaggggcggtatccaacagccccgcgccctgcagagccctctactcttaggaggactgcgcgcagggaccgccacgcagagtggttgccatggtgactgcagagtgagcggtcccgggttttagagggagtcgcgcgcttggagtaggggaaagagggaggccgagagaggacaaagggacaggaggggagaagtgagaagggttggcgggggggtgaggggctgaacgcagtggacgggaaaggccagcaaaatggcgagagaagggacacaggcgagaggaagggggagtggaggcgaaggggcgaggcaggagccgacgcgggggccacctggagcggtgaacggagagcgcggcctggcgactccaagacccgctgcccctcggcccgg

SEQ ID NO: 32338 - DNA, 1612 bp, Artificial sequence
  DNA replication origin
ggctgtctcatttcatttgcgagcaaagcccaagaacaccagagcctcacattcccaaatcttcctcttttccttctatcaccggtactttccttgatcatgcatctgcagaggggtaaacacgagcctgaatgtagctttcaagataacccgtacccgctttgagcctttgctcagggcctgcggtgctcagtgcttgggaatgaggaggaggagggaagggaggagagggaggaagggggagggaggagggggaagatgaaggagggagaggggaggagagggaggagggggaagatgaaggagggagaagggggagagggagggggaggagatgaaagagggaggagggggagagggagggggaggagatgaaagagggaggagggggagagggaggagggggagggggaagacggagaggaagagggagaggaggagggagaggaggaggggatcctggccagcatccgtgaaacacctctgcagggttggtggtgtcattgattcggactgaggtcccacaggacgggcccagcaccgcttcctgtagggaggccatgatggaaggaggtgtttgtctcaagaatggccagggctggatgctctcgtccagctgggggaagcagggctgcctagactgggaatgaggaggcacaactggacagccaggggtgggcaggtcaggcaggctgagcggaggctggaagtctaggggcatcgtggggggcagtgaggggccacctgcagtaagggcttggcccatgcaggggaggggcttgaaaactaggggggtggttcaggaatttactccaagggaaaggggagttcctttatgcttggggcacagaggttaaggctggtacggctgcctgggctgaatctcacccgctgtgcctcagtgtccccagctgtgacatgggtacaggagcggcacctccatgggtacaggagcgaccccggggctgccgggtcaagtgagttgatgcctgcatgcccagcacggcctggatcgcggtcttgttttgagtggtgtttgggattcttgatgagtcatccccaatgcaagcactgtgacttgagcaagctggcggcccgagtcagccaactggggcgtcctgtagaacgccaagtcccagaagtgcctgcacgccgtgacacccaggcaagcttggtagacagtgactgaaccacagtgcgctagaacatcacgggggagccgagggcagcgccgggcatgagagaggccatcgccctggagacaccatgcttggctgtgagggtttctgaaccatctattcattacgacgtaacctaaaatggtgtgaattaagtataccacgatgagggggacttttttttcctctcacagacgcttacttaggattattgggcagcctaggaagggacactgtgtacatcccgggactgacttcccttttgtctgtagtatttccttttattttagctgacatgttacagctgtatatctctggggtacagagtgatatttcgacacatgtacaatgtgtactgcttgaatcaaggtaattagcgtatcagtcacctccagcaattgttatttctttgagttgggaacattcaaaaccct

SEQ ID NO: 32339 - DNA, 918 bp, Artificial sequence
  DNA replication origin
ctgctcacatttctttgtgtttcttccagttccaggacggttttggtgcactcatcggtggcctaggagaatcacaggaccatgctgggcccctgcagcccggctacttggcggacagggaagagtcaggctgggaggacctgccaggcaccttccacacactccatccagggaggctcccaaagaggaatgggagggctggagaggcgaggcctgggagatgccaggcccagccagcccacactgcacactgctcctttaaggcaggtgtggcagagagatgggggcctgagtggttctggggctccccgtgcagtgggtctgtccccaggcaggagactggcacagttcagcagccgtgtgccaagggcagggctgaggctgtaagggccgagaggcaggctggggagcctgggagagaggagggtgggggcctctgctgagggaggagcgaggctggggccatctgtgtggtgttcgttccgccttcggggaaagcagcacaattaagagaaagaaaagccgggcaggcagtgtttggcagctgacatggtccagggggtgatgcaggagacacagtgactctcagggctggctggggacacggaagatctttggggtggggctggcaggggtgaggacaaggacccatcagtgatggcgtcgtgtggggcgcagggcctggggctggagaacttgagtgtggcttggagcagacaggaggtgaggggtgggcatggggtcctggcaggggactcagggggtgcccagggcagcaaggagtggtcaggggccgggctaggaagctgagggagggatggacatcaggagtagccaatgtagtggaaaaggactgagaagaggccactctgccgcctctctccagaaacttccagttacttccaaatgagcagccca

SEQ ID NO: 32340 - DNA, 2216 bp, Artificial sequence
  DNA replication origin
gcggggacccaggccggggcagcgggggccacgccccatctccgaccccacggggaccgggccgggactgcgccagcgggggcctcgccccgtctctgaccccagaggaaccggcagcgggcagcacgcgtgggcctctccccgcgggacgccggacgcgcagccagacgcgctccccaggccccctccgagagcgaggacgcgcccaggcccgctctgccggagccgccactggggggcgtagcgcggacgcgcacccttgcctcgggcgcctgcgcgggaggccgcgtcacgtgacccaccgcggccccgccccgcgacgagctcccgccggtcacgtgacccgcctctgcgcgcccccgggcacgaccccggagtctccgcgggcggccagggcgcgcgtgcgcggaggtgagccgggccggggctgcggggcttccctgagcgcgggccgggtcggtggggcggtcggctgcccgcgcggcctctcagttgggaaagctgaggttgtcgccggggccgcgggtggaggtcggggatgaggcagcaggtaggacagtgacctcggtgacgcgaaggaccccggccacctctaggttctcctcgtccgcccgttgttcagcgagggaggctctgcgcgtgccgcagctgacggggaaactgaggcacggagcgggtgagacacctgacgtctgccccgcgctgccggcggtaacatcccagaagcgggtttgaacgtgcctagccgtgcccccagcctcttcccctgagcggagcttgagccccagacctctagtcctcccggtctttatctgagttcagcttagagatgaacggggagccgccctcctgtgctgggcttggggctggaggctgcatcttcccgtttctagggtttcctttccccttttgatcgacgcagtgctcagtcctggccgggacccgagccacctctcctgctcctgcaggacgcacatggctgggtctgaatccctggggtgaggagcaccgtggcctgagagggggcccctgggccagctctgaaatctgaatgtctcaatcacaaagacccccttaggccaggccaggggtgactgtctctggtctttgtccctggttgctggcacatagcacccgaaacccttggaaaccgagtgatgagagagccttttgctcatgaggtgactgatgaccggggacaccaggtggcttcaggatggaagcagatggccagaaagaccaaggcctgatgacgggttgggatggaaaaggggtgaggggctggagattgagtgaatcaccagtggcttagtcaaccatgcctgcacaatggaaccccgtaagaaaccacagggatcagagggcttcccgccgggttgtggaacacaccaaggcactggagggtggtgcgagcagagagcacagcatcactgcccccacctcacaccaggccctacgcatctcttccatacggctgtctgagttttatcctttgtaataaaccagcaactgtaagaaacgcactttcctgagttctgtgaccctgaagagggagtcctgggaacctctgaatttataactagttgatcgaaagtacaagtgacaacctgggatttgccattggcctctgaagtgaaggcagtgttgtgggactgagcccttaacctgtggagtctgtgctgactccaggtagtgtcaagattgaattgaattgtaggacacccagccgtgtccagaaagttgcagaattgatgggtgtgagaaaaaccctacacatttaatgtcagaagtgtgggtaaaatgtttcaccctccagcccagagagccctaatttaccagtggcccacggtggaacaccacgtccggccgggggcagagcgttcccagccaagccttctgtaacatgacatgacaggtcagactccctcgggccctgagttcacttcttcctggtatgtgaccagctcccagtaccagagaaggttgcacagtcctctgctccaaggagcttcactggccaggggctgctttctgaaatccttgcctgcctctgctccaaggcccgttcctcagagacgcagacccctctgatggctgactttggtttgaggacctctctgcatccctcccccatggccttgctcctaggacaccttcttcctcctttccctggggtcagacttgcctaggtgcggtggctctcccagccttcccca

SEQ ID NO: 32341 - DNA, 1439 bp, Artificial sequence
  DNA replication origin
catgcaggagacggcgcttcagcacctgcgctccccagctcagtgcccccgcccgccgcccgccgctgtaccgtgggcgcaaggtcccggttccacagggtgatcctggtccagctggtgctgagcatcaggggactgaggtgctcggcgaggcctgtgatatactgcgagggcagcgaggtggacagctgaaggaactggtccgcaaagaacaggggcgccaccgtcgtgttcagcctgcgggacagaggccagccaggcttgctcacacccaaggggccacacgagcctgagagcacccagagagcacccccgggccctggtgccctgggagggcggagtggcctggccagccctgcagcacactgaccctgggacaggcggccgtgccgagccctgcagcccttggcaccctggcaccagcgtgatcaactctcagggcatatcagaagaggcgcaccgcctggctgggcccacaccacccctgaggggcccccaaggggctgacctccaggaactggctggtaccggaactggcacacatgcctgtcccatgaccccaagcaaggctgggcaggggctgaacagaacctttccaggcctaggagcttgtggccaaagtcctcccagatcccagcccagccatgcctgagaaggacccctgaggtttgctgggggtcaagtgcaaggcaaacagcacctccgagaaatgaaagccgcagataaacccggtccacaggaagacgcgtcctctgttaacacagcacagctaatttcgcaggacgggctcacaccgcacccaccctcccctgggcaagactacgctgagtgctttcaagaccgagatctgataagatgcctgtttgttgtttgttttttgagacggggtcttcagcaaggctgaagtgcagtggcaaaatcatggttcactgcaacctcgaacccctgggctcaagggatcctcttgcctcagcctcctgagtagctgggaccacaggcatgtgccacaattcccagctaattttttatttttattttttaagagatggggtcttgctatgttgcccaggatggtcttgaactcctgggctcaagtgaccctctcgccttggcctcccaaagtgctggaattgcagacatgaaccaccatacctagcttgataagatgctttgagaaacttctcttgggtctctctactcagaggtcagctcagagaggccacccctgtcccctgcatctgcacagctggtttccagagtggcctccccaccccccactcctgcacagctggcttccagagaggccacccctgcccccaacatctgcacagctggcttccagagaggccatccctgtcccctgcgtctgcacagctggcttctagaggggacctccctgccccgtgtctgcacagctggcttctagcgtgctctctgca

SEQ ID NO: 32342 - DNA, 1117 bp, Artificial sequence
  DNA replication origin
tgacagaaccctgagtagcacccggccatttctggggaccctcaaacccgacctccctggacagctggggccaagcctgcaaacttcttgatattccctcgatatcacaaagaccctcagaaaacatcctcggcgaccacacaggcacgaggatgacgctgcacagagaaggagccactgggcaccgggcggcccccttcccaaagacccacagtgtgggggcacacaccacgatcatcatgtagcgccggccgccctggtgcagctcctgcaccatggccgggaagtcccggaagccatccttgttgaacgtgaagtccctccgggagtccatgtagtccaggtcgttccactggacgtcctgcagccacaacacgggaccgtctgctggggcctgaggagacgcgtcccggccagccccttgcctcccctgccaccaccccaactcaccagggggaagtgggccctggtcatgttctccaccacctggcgggtgatagcggtggaggagtagccccagcggcacaggtggaagcccaggccccagtatggcggcatgaacgggtatcctgcaggccaacgccgacttcatgagggagggaggagggagccttggggcgggggccgcggccagggagcaggccctacccacaacgtccaggtactgctgcaccacgctcttgggctctgggcccaggaagatgtagacatccaggatcccacctgtcgacctccagctaagggcagggctcggctgcaggaccacatctggaagggaagcagctctggggttgggggacagattcttcacttggagggctctgcaccccacagatgggccaatcacaggcggagagttgaggctctctccccacgaggagctcagagtggcctggggaagccgtgctaagcctgactcaggaggaacctggcatgggacggaaagatatgtggtgccagcccacctccaggcagggccccagaaccctccttaggagcacagaaggccagagttgggagaggcatcagcccataggactcatttcccagaaaacacaaggcccagcaccgtgcccagggcccctcatgcggacctccagtctccagggcaggcagc

SEQ ID NO: 32343 - DNA, 918 bp, Artificial sequence
  DNA replication origin
ctctgggcagagtcacctaccagcagcgcttctcttgcaggacatgaacgagccttccaacttcatcaggggctctgaggacggctgccccaacaatgagctggagaacccaccctacgtgcctggtcagctcgccccccacctaccctggggacttaatcaaatcagagactcccttgtctggcctgggagacttagcaccctcatctctgagaagcagatgggccagcggggaaaggggcgggggggggatccccaggagaaaggctcaggctgggagactcagccaagcagtgcagacagggtgggtgcagaggcacaggccctgccggaggagacgccgctcacaggtgcttgccagagcacagtgaggccgactcgactcagagccgtctcgataggcgcagggaccatgcagcggagacctacccacccgtggggagaggtcaggcccaactcgaatgcagcacgggcaagtggatttctagccagggagcagggtgggctcagaggcaggaattaccaagaagaagcatgggggtcagggggattctggctgaactgacccagcaggattcttgctgaaggcaggccagggtgaccagacatcgcctgaggggtggtggaggttggggcttctcgccaaactgtcttagcaggaatggcagaaactgggttttacaaggaagtacaaggatgggcctgggagaaggtttgggggcctgaggctatagtttggcccagcaaagaatcagtgagaggatggggttttgggcttaggtaaacaggcaggggagtgcttgaaatgggccaagagacggtggatgtgaagtctgggggtctgcagagcccaggctccagcacccgcccagccctgtcttagaagcagtggagatgattacccaggttcccgggtaa

SEQ ID NO: 32344 - DNA, 806 bp, Artificial sequence
  DNA replication origin
gtagggaggggaggtcaggtgaggggaggaggggaggggaggaggggaggggaggtgcggtgggaggggaggagagatgacatagggaggggaggtcaggtgaggaggggaggtgaagtgggatggggacgggaggttgggaggggaggagaggtgacatgggaaggggaggtcaggtgaggaggggaggggaagggaggtggggtgggaggggaggtggggagggaaggggaggtgacatggggagggtaggtgaggagtggaggggaggggaggtggggaggggaagggaggtgacatgggaaggggaggggaggtgaggtggggtggggaggggaggggaggggaggtggggaggggaggtgaggtggggaggggaagggaggtgacgtggggaggggaggtcaggtgaggaggggaggggaggaggggaggggaggtgaggtggggtggggaggggaggtgaggtgagatgggacgtgaaggtgacatggggacatgaggtaggcatgtgagatgggggtatgggacacaaaggtgacatggggctttaggtgatgcggggacatgaggtgacgggatgtgaggtgagatggggacaggacatgaggtgatgtcaggcctcgtgacatgggaacatgacgtgatggatgccggcttgagacagaggacggcgcacacccactgtgggaatgtctgggggcctgctgaggacaaaggagctgcctctgttccagggcccctggatacatcctccctgccctgaatcccagagagacccgcagaagctgattccaaatgcccct

SEQ ID NO: 32345 - DNA, 1457 bp, Artificial sequence
  DNA replication origin
gtgctcttccgcggactctgaatcatggcgaccacggccacgatggcgacctcgggctcggcgcgaaagcggctgctcaaagaggaagacatgactaaagtggaattcgagaccagcgaggaggtggatgtgacccccacgttcgacaccatgggcctgcgggaggacctgctgcggggcatctacgcttacggtgagcgggcgcgggccgcgggggccagccgggggcgagtcgggggcgagccgggggctgagggccagactggtgactcccgggccggccctgcgctccggaggtcgtggtcagggtcgaggctcgggggccagtgacgtccgacccccacccccacccccgtcctcgccctcacgcctggctgtgtcggcgctttcggtgtgtgtcccccgtgcagagctcggcgctgggtctgtcgggggctgcagccgcttcgaggcacctcagcgtccttcattcagcagataactgatttctacctattagcttttctaggtactggggttttggcggtaaaccggaagggtttgcgcctttacgggttttgaatttcgtttggggggaaagcatactgtcaggttgcccaggcaacctgaagaacctgaagcggggtaattgaatagagtgggactgggaaggaggagagaattagtaaagcagagaggtaagggggttcgcaggagggggtgccatttgagcagagttctggatgaaggagactgttatgagaagagggaagagcagttggggcagaaggaacagctggtgccagggccttgcagcccttagccagctgcattccaggaactgaaagaagtcccctgtggtgggattttggagagctagtcggggcagatctagcaaagacgtgtagggtgacgaataatttgaatttcatttagaaatctagtgggaagccagtggaaggttttaagtagctatgtgacacgatcacatttacagttttaaagattcttctgggtgtctgtagatttgaggtgaggcgaggcaaggcaggagaggaaacaagagagttgggagcttttgctgcagttcagggaagagaggattgtgctgccttggagatggagtaccagggagctgacagcattggctgatggattgaacgtgagtgacagaaggaggagagttggagtgttttgagtaaccggtggttgatgctgcaaacatttggctaggtaggcagcactccagagagtcagaatcaggagctgtctcttggtatgtttgaaagatgtgaggaagttgagggagagcctggagaagaggttgggttgggcacatagatgggaatgaccagcatctgggataaatggcctgtgtttaatgcttgggacagggacattttttatcctgtagttctcttccttttctttcttccttttccttctgacagtcctgctcttgtcaccaaggctggagt

SEQ ID NO: 32346 - DNA, 1532 bp, Artificial sequence
  DNA replication origin
ttcgtcacgtgaaagggaactgggcgtttgccgcagggaaaagtaaggtgtttctgctctcgcgccatatgcagttcccgcgggatctcgttgagggcggggcacccagttccttacgaaagggatggagggggtggtacttctaaagttggcggtgtttcgtaccggccgcgggatttcgcggactggggcgctgaggttctttgagcggcgtgtggacctgaattccctggaaacaggctggggccgcgaggggcctccgctccgggcggggtccccagatagccccgcctcgaataaaaatgacgagcacgggtcctctctcgggcccgcagtgggtggactgcgtcgcagacccgtagtggaggcgcccagctcgccggggagattcgagtggaaaccctcacggccgccggtggtgggccccggcgcggcgctgggctccggcgggtctgcgctggggagggccagggcccctgaagccggcgtccctcttaggggacgcgcctgggtgtgtcttcaccgtttgcctggtgagttggagacagggtctcgctccgtcgcccaggctggagtgcagtggtaggatcagggttcattgtagcctccgcctcagcctctggagtagctgggacctcaggcgcgcgccaccacgcccggctaattttttaaatttttttgtagagacggggttgggggaggcgggggttagggttgtcctggctggtcttgaactgcggggcctcaggtgatccgcctgccttggcctcccaaagtgctgggattacaggcatgagccactgtgcccggcaagcagctgttataaataaaatacatgctgagcctgcaatttgctcttaatgaaggccacttgtcagtagacggtgctgctaatgcgtgtcctgcagcaaagataacccagacgggatcattttttaattgcccagcagaactttaaccagttgtgcatcttaacctgctttttgtttgttcgtttgtttgttttgagacagtctggccctgtcgcccaggctggagtgccatggcgcgatctcggttcactgcagcctccacctcccgagcacaggcgatcctcccgcctcagcctccagagcacctgggaccacaggtgtccacgcgcagccactaaccgctttcttatctgacactttaagtgcttcttcgtacccagctcctctaacgccttttgaagcagctccatcatctttgaagggcagttcatgctgttgagaatcatgtttttaactttgggaaaattgtatttccacgagcgccagctctgtccttttttttttttttttttttttttttttttgacggagtcttgctcggttcgcccaggctggagtgcagtgtcgcgatctcagctcactgcaagttctgtcgcccaggttcacgccattctcctgcctcagcctcccaaatagctgggactacagacacgcgccaccacgcccagctaattttctgtatttttagtatagaccgggtttcaccatgttggccaggat

SEQ ID NO: 32347 - DNA, 921 bp, Artificial sequence
  DNA replication origin
agaaatgatgatgaactgggtgaccgttcacaaaggagagaggattcccagcccccaagcctgaagccttcccctcaatcaccctcaatcaccatcttctgtgggtcgaccagatgcacggactgttctcagccatccctgtggttcttacggcaatgtctagctgtgggactgcactggtgcttcgatggctcatagaagccccatataaggcactgctcctgtgggatgtgcctgtcaaacctgcttgtccactgccgttcagttcagccagagattgggccacattcagtcctcgcttccctgggagggggaaggtaagtgcgcgcagtccatccggcgaagagcaggtcagcctacggagggctcagcctacggaggggctcagccgacacaggtctgatggggcccgagagtggtcccaggggagtgggaggggccggcatcttcctcatcaggagtggaggagctgccttgtatgtggactagagaacagaaaacggcttgtctgtgttgctgggtcaatcactggaacattctctgaatgctgagttctgccttaaaacagcatgggtcatgctagatgaaagggatctctgttttatactctcatctcttcgctattgccgtgggatgaaagacagcagaaggaaggtgtctaagttcagaacaaagtgagcaagaccagctggctgctgttggtagcagaggcacagccagcctgtcatggcactggggggccgaggtgagctgtgccccctcctcctgggcttgtgaccctctgccccccatggggtatgtacatgtgtgtgtgtgcgtgtgcgtgtgtgtatgtgtacatgccttcttccctacttcactggcaagggaagagactgacacttgggttaggagaaggatgttgacctgggaggggtcaaa

SEQ ID NO: 32348 - DNA, 1319 bp, Artificial sequence
  DNA replication origin
cccgtaagcccagcacccgggaggccaaggcaggaagattgcttgagcccaggagttcgagaccagtctgggcaacacagtgagaccttgtctctacaaaaaatacaaaaattagccaggcatggtgatgtgcacttgaggtcccagctacttgggaggctgaggcaggaggatcgcttgagcctgggagattgaggctgcagtgagctgtgattgtgctactgtgctccagcctgggtgacagagtgagaccctgtctcacaaaaaaaaaaaaaaaaaaaaaaaaaggaaagaaaggaaaaagaaaggaaaaggaagtgagaccacccccatccgcttgtcatgtgaggaaacagtgagagggtgaccacctgtaagccgaaagtggaccctcactggaacccaaccaagctggcaccctgaccttggattttcagcccacagaactgtgagaaatacatttctgtttaagccgatccatggcagtccgtgctaagaaaggccctagcccaggggccgcatagcctggactctgacagcctcctgtaggaattctgatccgcaggtgagggtccatgcagattctctgctgtgtttctgggaggcgaggagttggcaggagagctgtttatgttacagtgagccgaacccccgcccagagaccacaaaattaatcagaaagagggcaactggcagggcgccagacctcagaaggggaaagaatcgcaggccttgggtttggccttgtcacttgtcatgagccagagccttgattacctaaaccggaagtcttgtgagcagcacggtgcttgctctggaggaacctggggtttctgagagggactggggttgggggagacggtggtgggtgggtggtggagggctgtgcccttgggataagggaaaagacagctgagacacaggctctggggtcggaaatgagagccaggagggcaccctgtctgcagtctctggggaccggagcaccagcccctcctctgggatcccctcccaagagggatttgagatccgtggacccctgagccctggctgggcagggtcagaggagggtgggacaggcggcacgaggtaagtgtaggggtgctggatgctggggctcactcctccagcctttgctgccctctctggggagacacccgtgaagagtctgggggcggcacagagaggaggacgagagggaatggcagcgggggatacaagggcagggcacactagggtcagcattgaccacgggtggggaggaggccagtggccacttccccgggccaccgcaggtgggcgtgggggggcggcgccgg

SEQ ID NO: 32349 - DNA, 889 bp, Artificial sequence
  DNA replication origin
gggtccccgcggccctcggccttgctcggggccaagggaccgcggacggtcaggtggcgcagggtctcctccggagaccccaggatccggagccagcggccttgtgggcggggccgggggccggggagtggattttgcccggagcggagcggccgggggcgtggggggctgggggtgagggtggcggctctgcgcgcgggcgccggggccctggaagatgctgcgcacctgaattaaccgggcgcctctgatgtcctcccagaagcaactagaactccagggctgtgaaagccacaggtgggggctgagcgaggcgtggcctcaggagcggaggacccccccactctccctcgagcgccgcagtccaccgtagcgggtggagcccgccttggtgcgcagttggaaaacctcggagccccgctggatctcctggctgccacccgcaccccccgccagcctacggtgcgcccgcgggcccagcttctctctgcgctgctccccgttaaattccctggggagacggaaaaaaaggcaaaggaagtcggttctccaggggccagaagtgttgagcctaattagtcttcagacttctcaatgaggaatcgcttatcagtttcttatctgggagagttgaggatggagggacagaaggcacccaggatttgcacgggggggattcagggagagagggtgatgagggacggggtgggccttccagtcttggcccagtccccatcttgcacacattgttggcttcctcttagagccgttcgcccccctggggaggggagacccatagtgacctctcctgacacccgccgaccctgaccagtgttgccgggttcttcaaaggccacgctctgactgctggtctgtgtcacctgcaccc

SEQ ID NO: 32350 - DNA, 954 bp, Artificial sequence
  DNA replication origin
ccctggccagccaagaggggacatcgagctggtcccggctccacccagtcccagaggatgaggggagatgtgagctggggaaggtggcaatgggtgggattggggagcagataccgcagctaaggactgggggtaacacaccctgtttggctgtttttggagagcagaaaagggagactggggtctgaggccacaggcacttctccaagtgtcctggcctctaagcagaaaagagtagactaagagccaagtgccccaccccctccaccacccacccacctacacacacacacatacatacccacaccccaacacgcacacacacgcacacggggatagacttgaaatgcaaacaagcaaatgctgaggtcgagggcatccccttggcaagaaggtagagcctcacccaaacgcaggacccccatggccagctggatgcagccggacaggaaggccagcagcacagcgtaggcgggctcatggaaggtgtagaaggagaccaggagggacataatggcggtggggcccagagtcacatcccgggaggtgcccaggaagaaatacacgaagcagcccatgaaggcagagtagaggccatactgtggggagagagggtggtgagcactcaggaggccgaggcccatccaccagctccctagtgtgcgtgtccaagctcgggatgtgtgggtgtcagctgtgtccaggcccaggttaaaggtgcaccgccctgccctgtgggtggacctgcagtgatcaggaggccacttttttagcagcactcaactggggcctcagggtgcagacagccaggcagaggggtcggtgcaggcccgtgtgctgtgtccaagtctgaggaagcattctttttttttttttttgagatggagtctcgctctgtcgcccaggctggagggcagtggcacagtctcggctcactgcaagctccgcctcccg

SEQ ID NO: 32351 - DNA, 862 bp, Artificial sequence
  DNA replication origin
agctgggggactgggcagtgccaggtgacgcctccttctctcctttaagccacaggtcacctccatcctgttgtcctgactgaggaggggccgtagggcatctgggctaagcttcatgcccggctgcttcaggacagagccgaggcccttcctatctccacgtcctttcaggaattgactctggcaccaggagctaggagggctttggcgtgctgggaactttctagtatttattttagagacagggtctcgctctgttgcccaggctggagtgcagcggtgcggtcacaactcactgcagcctcatcctgctgggctcaagcgattctcctgcttccgcctccagagtaaatgggataacaagggtgtaccacaatgcccagtggaactttctagtatgaaactgcaggacgatctatgagaataaagaaacagagaacaccctggaggacagtgggtgacccccagccctgcctctccacggagcgttcacagtggaggacggggcgccggggtcagggcaggcagactccttgtcagcgtaacaacgttagggcgtccaacgtgggcaaacagaagaggcggacaggtcactcaccgtccaaagctgcctgtgaccgggtaggaggagacgagggagcccaacatgttggtgagacctggggaggaggcaagacaggctgatcgtggagggaaggcacacaggatggagggaaaggagatggggagggggacaaaaacccagaagggaggcaggaaggcagggctcgggagaatcatcctgggggcctgggcctacgcactccttcagggaaggaagaaaacaggccacattcttgcagacgtaaagcctagccttttt

SEQ ID NO: 32352 - DNA, 1095 bp, Artificial sequence
  DNA replication origin
tggtgacccttgccctgctgggtatgggggccccacctggatgggggcaggagacagagtcggcaggaacctgaaaggacacgtgcttcctgagcttcttcctatagtcagggtggcccaagcgcggctgtctgtgactgcaccctaagtctctttgcctcggtccccttgcagtccccgcctgcttcccaagccgtgctgggagctgacgtcccctcggaagatcagccacaggagtgtggactgaggtctcccttttcccggcccctggtgactgacggtctctgtgttgccttccaggacagccgtgaacgctcagtcgggggtgtgcaccccggcggggggcctggtgacgggtaaggccccccatcttccccttgtgcccgcagccctgagagtgggagaaagggaggagggggcccacagagacgtccctttggctcatgggccgtgcgccccgggactgcacagggacttggggggccacacaggagtagggggaccacaggagactgagcaggggctgggggccttggcagtcgtcgccctacccccacccctgtccccagtgggctctgctgaacaagaggctgctacgctgcgtgctggggggaccctgcactcccgaggtcacctgtgttcccgtgccccgcaggagtgctggtgctgctgtctctggactacctgacctcactgttctactacatccccaagtctgccctggctgccgtcatcatcatggccgtggccccgctgttcgacaccaagatcttcaggacgctctggcgtgttaagagtacgtccttgtcctacaggggagagcgctgtgatgcggtgtctgaacgcggagggtgtcatttatgctaccccattttcctgcagccccctctgtggggctgggactgggaagttagggcagtcccggaacagagaagtggatggccaggagatggccccagagatggtcccgaggctcagtgggaagagctggagctccttgtcctgacacctggggtcttgaggcgagcactgacccgggggagggtcccctcctgatccccctgcccccatccctaccctccttgccacccgcct

SEQ ID NO: 32353 - DNA, 697 bp, Artificial sequence
  DNA replication origin
gctgttcgacaccaagatcttcaggacgctctggcgtgttaagagtacgtccttgtcctacaggggagagcgctgtgatgcggtgtctgaacgcggagggtgtcatttatgctaccccattttcctgcagccccctctgtggggctgggactgggaagttagggcagtcccggaacagagaagtggatggccaggagatggccccagagatggtcccgaggctcagtgggaagagctggagctccttgtcctgacacctggggtcttgaggcgagcactgacccgggggagggtcccctcctgatccccctgcccccatccctaccctccttgccacccgcctccagccaccactctgcccggcccagctgggggagggacaggagacgtccctggtgaccagcagggccagcggaacagccttgcaccctggctcagaatggcagttcctttttttttttttattattatttttatttttttttattgatcattcttgggtgtttcttgcagagggggatttggcagggtcataggacaatatggggttgggggtaaggtcacagataacaggatcccaaggcagaggaatttttcttagtgcagaacaaaatgaaaagtctcccatgtctacttctttctacacagacacggcaaccatccgatttctcaatcttttccccacctttcccccctt

SEQ ID NO: 32354 - DNA, 1537 bp, Artificial sequence
  DNA replication origin
cgccctgcccgccgccgccgccgccggccccgccctgcccgccgccgccgccgccggccccgccctgcccgccgccgccgccgccggccccgccctgcccgccgccgccgccggccccgcgcaggcgtgtgcggaattccccgccggtggcgcctcccagtgactccgggcccccagcccccgggaggcgcctcgggccgctgcgcgccgggtacagacgcgggaggggcctcggttcccgccaggcgtggggcgcatgcgggtctcccggaagcccagaccccgggcaggcccgagcagccgagtggggcgggacaggcgcgccccccgccccggcgcccagcacctcggacagtgtctgcggccgcgcagagccggcggccagcctgggagcggcccagagggcgcccggcgggtgcagtggacgtcgtcagcgcgccgcgtgggggcctttgcagattaagggacctccgcggccccgcgcggagcgctctgtcactgatgatggaggggccacggcggtccgcaccatcccccgtgcctcagttttcccatctgtgaggctcatggtgtgaccagggacctccgttttaaaatcacccactttctttttcttccttctcctctcaccccttcatcccgtccctctctggacactgcgcccctctgcgcattccagaggggaccctcatcctgaaacaattcccggcgcggaaccccagctgaatgctcctgcttggggcggggggtcgccaacaattagtccaacatcctcgacagccacccctcctaaccgacaactgcccacgacagccatgggaacaagacacagaccctgcccttaccccactccccacggtgcccacggcaagtttccctagaagaactcgatggcagcctgggcaacatagagagaccccatctctacaaaaaaaatcatttaaaaaaattagctgggcgtggtggtgcacctgaagaggctgaggcaagaggatcgtttgagcccagggagctccaggctgcagtgagtcgtgatcataccactgcactccagcctggatgacaaagtgagatcttgcctcaaaaactaacaaacacacaaaacctgaggataaatttttaattttagggtggcactttatttattgtttgtttgttttttggagacagtctcactctataccccaggctggagtgcagtggcgtgatcttggctcactgcaaactccacctcccagttcaagtgattctcatgcctcagcctcccgagtagctgggattacaagcgcccgccaccaagcctggctaatttttgtatttttagtagagacggggtttctccatgttggccagggtggtctcaaactcctgacctcaggtgatccacctgccttggcctcccaaagtgctggaattacaggcatgagccactgcgcccagccaaggtgacactttagaacgctagttgggcatcttctcgctttgctgggtctccaattaaaacctgctttttcctcccaccaatcttgactgcacc

SEQ ID NO: 32355 - DNA, 962 bp, Artificial sequence
  DNA replication origin
gcggcgcctgcgtccggatgcccctcccggccgcctcttcctgccggctccaagtttcggtttcgccgccggggtgcccggtccagccccgcccgcggcgcccactgaccctgttccccggctgcgggaggggtcggggtgggggcagcgggcacgcctgggaccccggcgacatccccggagcgcagagcgcggaggaggctttgcgccccggcagtgctgcccccgggaagtggccggggcacggggggtgtagtggaaggggacagccggacccgggcctgcaggtccgcccgggaatcctgcgcctgtacgaatggcaacaacggaaaagtgaagttgcaaaaacagactcctaacttttacgagggaggcatcgccccgtctgaaccgcaccgcgcagcgtccttccgacttggcgaagtcgcccgagcgcggggctcaaggccagggtgggcacccctcccggatggctgcctgcaagccggcgggccgggccctgggggagtccagggcgggaggggaaggagctgtgcaaacatggtggtggcccttccctgcccccaccttgttgactttggttgtggttgggggatgggctttgatttgggtggcagtgtctgtgcttgggaaaaaatgtcagagaaaagacaggaagcggattgaatgcaacagtgttgggtgcctggggctctctcttgtgtcttccggcccctagagcagatggaacaataagatgctttagggggccgggcgcagtggctaatgcctgtaatcccaaaactttgggaggccaaggcgggtgggtcacctgaggtcgggagttcgagaccagcctggccaacatgaaaccccgtttctactaaaaacacaaaaaattagccgggtgtggtggcgcatgcctgtaactccacctacttgggagactgaggcgggagaatcgctagagcccgggaggcgga

SEQ ID NO: 32356 - DNA, 982 bp, Artificial sequence
  DNA replication origin
gtggcccttccctgcccccaccttgttgactttggttgtggttgggggatgggctttgatttgggtggcagtgtctgtgcttgggaaaaaatgtcagagaaaagacaggaagcggattgaatgcaacagtgttgggtgcctggggctctctcttgtgtcttccggcccctagagcagatggaacaataagatgctttagggggccgggcgcagtggctaatgcctgtaatcccaaaactttgggaggccaaggcgggtgggtcacctgaggtcgggagttcgagaccagcctggccaacatgaaaccccgtttctactaaaaacacaaaaaattagccgggtgtggtggcgcatgcctgtaactccacctacttgggagactgaggcgggagaatcgctagagcccgggaggcggaggttgcagtgagctgagattgcccactgtactccagcctgggtgaaactgtcaaacaaacaaaaaatgctttttggaggatttttcgagttttctggtctgtggttccccagtgtagcattggagaaggaaacacttcgggtggaaagaaagaggcctgggcggtggggagtcattgaaggtgtttgagggagggagtgtccactggtggttgtttcaggtagagtgtggaggggaggaggtacggtgggagccagggcttggctgtggcaggggtaggggagttttaaactctccttctactctgaaggagagataattttagtctctggaataaaagggcagcagacctggagaaaagggatgcaaattgtcccatacacctattgggaacctcatcaaagagaagactgcagaagacagatgattgatgtttttatggcattgggacaggggcttggggctggagaggggaggtgtgcagggttgtcttgttgtgcagataatcactcaggtgatctcagagctgctctcagaggaactggcgaggccgcaggcactcctctt

SEQ ID NO: 32357 - DNA, 1712 bp, Artificial sequence
  DNA replication origin
attgaatcaagctggtatacagtcggccctctgcagccacagattcagccaaccacagacagaaaatactggggaagaaaacagaaaataacgagacaacaataacaaagaacacaaagagcaacaccgcaccgtgtagcaactgttcatacagcatctatgtcatacagatgcctgtggtaaggaatctagagatgaattaaagtgcatggtgtcgggggccggcctcagtggctcaggcctgttatcccaatactttgggaggtcaaggcaggcggattccttgaggtcaggagcttgaaaccagcctagccaacatggcaaaaccccatctctactaaaaatacaaaaattagccaggtgtggtggcaggcgcctatagtcccagctgctcgggaggctgaggcaggggactcgcttgaacccaggaggcggaggttgcagggagccgagatcacgccattgcactccagcctgggcaaaagagagagaatccgtctcaaaaaataaaaaaaataaaaaattaagtgtacaggcggatgctgtgggttatgtaccaatgccacgccgtttcatatctgggactgggcatccttggattttggcgtcctccgcggtcctggaaccgaccccctgtgggcaacaagggaccactgtgtgtttcagtgtgagtatgagatgggtgtgagtgggacttgcgtatgttggggtgtgtgtgagtggggtgagtggggagtgtgtgttgggggtgtgtgtgagtggtgtgagttggctgtgtgtgttggcagtgtgtgagtggtgtgagtggggcgtttgtcttggggggtgtgtgagtggtatgagtggggcatgtgtgtgttggggtgtgtgtgtgagtggggtgtatgtatgttggggggtgtgtgagtgttgtgagtggggtgtatgttgcagggtgtgtgagtggtgtgaatggggtgtttgtcttgggggtgtgtaagtggtgtgagtggggtgtgtgtgtgtgttgaggtgtgtgtgagtggggtgtgtgtgtgggggcgtgtgtgagtggtgtgagtggggtatgtgtgtgtggagggtatgtgtgtgggggggagtgtgagtggtgtgagtggggtatgtgtgttgaggtgtgtgtgagtggggtgtgtgtgggggtgtgtgtgagtggtgtgagtggggtatgtgtgtgtggagggtatgtgtgggggtgtgtgtgagtggtgtgagtggggtgtgggggtgtgtgtgagtggtgtgagtggggtatgtgtgagtggggtatgtgtggcggggggtgtgtgtgactggggtgagtggagtgtgtgtgttttacccaaatgctgagcccatggtctagacaccccactttccacacccgtgtatacaccctgaccaacacgctccggtccgcatatgcagtgccctaactccagctcacatctcatgctccgtgcgcatccccaggtcgcgcctctgttactccgtgggaatgtttccacccgtgtacgttgacagctttactataaatctcccatccatttctcctcctcacatctgttaagtatcctcaccaatttatagtttaaaatctgtcaacttccaaaaatacaaaacgaggctagggtggtggtttatgcctgtaatccctgcactttgggaggctggggcgggagaattgcttgagcccaggagtttgagaccagcgt

SEQ ID NO: 32358 - DNA, 1088 bp, Artificial sequence
  DNA replication origin
ggtggtgaaggtgatggtggaggtaatggaggtgatggtggtggtgaaggtgatggtggaggtaatggaggtgatggtggtaaaggtgatggtggaggtactggaggtgatggtggtaaaggtgatggtggaggtaatggaggtgatggtggtggacgtgatggtggaggtaatggaggtgatggtggtggtggtggtggaggtactggaggtgatggtggtggacgtgatggtggaggtaatggaggtgatggtggtggtggtggtggaggtaatggaggtgatggtggtggtggtgatggtggaggtactagaggtgatggcggtcgtggaggtgatggtggaggtaatggaggtgatggtggtggtggtggtggtactggaggtgatggtggaggtaatggaggtgatggtggtggtggtggtggtactggaggtgatggtggaggtaatggaggtggtggtggtggtggtggtggaggtactggaggtgatggtggaggtactggaggtgatggtggtcgtggaggtgatggtggaggtaatggaggtgatggtggtggtggtggtggtactggaggtgatggtggtccgtggaggtgatggtggtggtggtaatggaggtgatggtggtggtactggaggtgatggtggtggtgaaggtgatggtagaggtaatggaagtgatggtggaggtactggaggtgatggtggtggtggtggaggtgacagtggtgatgctggtggtggtggtggtggtggtggtggtggtggaggtggtggtggtggtggtggtggtgatggtgatggtggtggtggtggtggtggaggtgatggtggaggtaatggaggtgatggtggtggtgaaggtgatggtggtgatggaggtggtggtggtggaggtgacagtggtgatgctggtggtggaggtggtggaggtactggaggtcatggtggtggtggaggtgatagtggtgaaggtgatggaggtggtggaggttatggagataatggtggtggtggaggtgatagatatttgaacatgcctgacctaagaaaagttcattttcatttttggctgggcacta

SEQ ID NO: 32359 - DNA, 2029 bp, Artificial sequence
  DNA replication origin
aacgtctgtttctgcctttgtacagcctctttcttgcgggtatccaagatgcgcctcagtgtctttttaaagaagcaagaagagagccagtttcaccctctggagtggttggcaagggaagcctgcaaccaggacgctctccaggaggcgggcacattcaggtactgtgactaaaggaagcaaggagtggctccaatctggtggcagcatggggacctgcctgcagggatcctctctccatccgggccatggggactgagctgtttctttccaaacctctcagccattcaaagctgtaaagtttttccccaagaagcacacagtaggtctggacagtggccaaatggcaggtgctggactcttcctctaatttcgtgtttacagtttttcatactaaaaacttaaaaaaagtaaaacatctgttcttagagtagaacatttaccgacattcatgttgataaccctagaaagggctgctgttttcagtcatgaagttaaaatgacgtgcagagcaggcaggggacaggcgggattttcccagtcctgctgtttgaagaatggtaacagcaaaaccaggacccagcagtatattcactgccatggttatttttctgtcacccatgagactaaccttgattatcttggatgtggccgtgtattgaggaaggaggggtgctctgggccccagacagagggtctctttaagacagactctcagacctcctgcctgaaagcctaagaaaccagtgacttggttatttgggcccagttttcccatctctaaaagacagcggactcctccatgagtccccttccaggtccaagcttctgtgccagtgataggttcgctttgggcctacagccaggtgtgatctgcaggagggaacgtgaggaagaagcggggtgaacggtaatgggggcttacaggggaagaagcggggtgaacgggaatgggagcttacaggggaagaagcggggtgaatgggaatgggggctcacggaggaagaagcggggtggatgggaatcggggctcacggaggaagaggggtgaccgggaatgggggctcacagaggaagaagcggggtgaccgggaatgggggcttacagggggaagaagcggggtggacgggaatgggggcttatggaggaagaagcggggtgagtgggaatgggggcttacaggggaagaagcggggtgagtgggaatgggggcttacaggggaagaagcggggtggacgggaatgggggcttacagggggaagaagcggggtgaccgggaatgggggcttacagaggaagaagcggggtggacgggaatgggggctcacggaggaagaagcggggtgaatgggaatgggggctcatggaggaaaaagcggggtgaccgggaatgggggcttacaggagaagaagcggggtgaacgggaatggggacttacagacaccttcctcgtgaccagagattttctgattctactttttctctagttatccttcgtttctctccttgtcacgccttctgaagggattttaggagatcagaaatattttcatttccctccgttcctccttgtggactctcttgatgcttttttttttttgagacggagtctcactctgtcgcccaggctggagtgcagtgatgcgatctcagctcactgaaacttccacctcctgggttcaagcgattctcctgcctcagactcctgagtagctgagactataggcacccaccaccacacccagctacttttggtatttttagtagaggcgagatttcaccatgttggccaggctggtctcaaactcctgacctcaggtgatccactcgcctcagcctcccgaagtgctgggattccaggcgtgagccagtgtgcccggcctgttgatgcttttgaatccctgactccactccccgggaccagccctgagtcactgaacctcctcagtctgctcttccccactctgctgttcacgcagcactaggcctggctccgtcgtgttctgtggtcaccgtgaggcctgc

SEQ ID NO: 32360 - DNA, 993 bp, Artificial sequence
  DNA replication origin
ttgaagcctcttctgcaattcttctattcctagttcttgctcttgcctgtctctgcctgccagaggtaaaaaggtcgcaccttgcaagctgaactacgtttaattcgctgaaagcaaaggccacaagaatgttctactttccttgagtgaaattcaattagaagtgatgcctaattaaagaagctctgaggtgagtgccctcaccttggccctacagcaggcagtgtaaacatgatcacaagctggggcaaatcagctgaagcacagagacaaaggaccagacagacaagcggcaggtttccttcctggctctggggatgctaagggcaggcggaacgcggaagcagtggcaccatccctgggtgtgagggtgaggtgtgggggtgtgagggtgaggtgtgggggtatgagggtatgtggtggggaaggtgtgagggggtggggtgtggggggggtagggtgtgagggtaggggggtgtgtgggtttggggtgtatggggctgtgggggtgcatgtttgtgtgctgcccggccccgcttctcacctgctgcttgacaacgtccttgggaaacacccactggtgcgggcggccgggcttggagaggccctgcacgaactccatcccccgctggctgctgagcttccgcaccaggtacacccggtgccagtcgttctccacccggatacagaactgcttgacttgctgcaggtagcactgcttctccttggccatctctgagaggccaacgagaaagcgggtgagtggctggtgacttagggcatttattgtaggacacaaggccaaccagagggcatcggacctacccacaggcattcacagaaacacatccaggggagaggggatgtagaaaagcccagtagtagtctattcgaagaactagtttcccatacttcctgaatttctaaataacggagtctttaaacccaaaggaaagcaaggcagagaagacttgcctgggcctccctcaggct

SEQ ID NO: 32361 - DNA, 1061 bp, Artificial sequence
  DNA replication origin
atctcgcgtagctatacctggggaatctgcctggtagttccactggggatcttctcggggaactgctctgatgccctcctggaggtctggctcgtgaagccggtggttgtcagtgtgagattgggctagagaaaaaactctttcccatttatctggggagagggtagaagttaggatgacatttcagtcactccaggttaaactgtaggacagagttagatatcggaattcctgtatgtatttagtggggtctgatgagaaagagcctaaacgctggctgatttgggaaaggtctgatagagaaaaaggcacatgtaccctgacatatgccttcagctccagccacctctctatgaggaaattgttgggcagatgggggagagctggtcgcagaaagaaactgtaaaccggaccgggtgtgggagggaggtaatagaagggttatagggtggggagcagaggctgaagaagagctggagcctgatcagcctggcggggagcgagctgaggaggagcagcctggggaggaggtgaggggtcagatgggtcagcagaaaaggaagattcacaagactcagcaacgctcgaggttgggactgaagggacaggcgggagggaaaggaggaggatttgggatgagtcacagtgggaacagagactagggagggaacgaagtctgaaaaatgcctggacgtaaggcacctcagactatttgcccatttttcgacaaaaattatctaggtcttgcaggatggagaaatcaaaagtgccattttctggccatttagaaccattgtcgagttcgtactggggccaagcggtgttgcagaagaaaataagatgcttagattttaggtcaagtgagagttgaagaggttttaagttcttgagaacacaggctaagggagaagaaggaggaatggagggtgaaaggttgcccacagtgaaggaggccagtttaaagagaagggtagagacacggagaaggggggtagggagcagccgtgggctgcaatgtgggtgagcagccaaagcaggttgtccccgcaattgacttgcca

SEQ ID NO: 32362 - DNA, 869 bp, Artificial sequence
  DNA replication origin
gggcaggcagaggtgatgcagccagcagccttagccttgcttctgatgaagaccaggtcctggggggctcccgcggacctgatcccagggaatcctcctatggaccaggtcccggaggctcctcctatggactagattccagggaatccttctacagtctaggcttcaggggctcatcctatgaactagatcccggggaatcttcctatggaccgggtcccggggaatcctcatacagaccagatcccggggaatcctcctatggaccaggtcctgggggctcctcatacagaccagataccagggaatcctcctatggaccaggtcccaggggctcctactatacacatcaggtctgggagttggggctcctccagtggaccgggtccggggtgggggttctcatatggaccgggtcccagggggctgctgctatggaccaggtcccggtgggggcggggtgggggtgctgttgctacagaccaggtcccgggggagctgctgctacggaccaggtcctgggggggtctgctcctatggaccaggtcccgggggtacctgcccaccaccaatttgcagggtacatcttctagttccttcttccaaacccatcatctcataggtgaggcagggaaggggagccatgagggtgacgtaagggagagggaaggatgaggggggcagggcatggacggactggggatggagcaggtggccgaaggctgtgcttcccactgagctgcgtgcctggtgtcaggtggtgtatgaggagagccgcatggtcagcctcacagccccctacgtgtcgggcttcctggccttccgagaggtgcccttcttgctggagctggtgcagcagctgcgggaga

SEQ ID NO: 32363 - DNA, 1176 bp, Artificial sequence
  DNA replication origin
aattaacccagggcagttcatccaacccaccgtcgctgcgtccagcagggccaggaatgagagaaagggcctgtggagcccagagcagggcagttcctccacccccccagggacggtgtgacaccggctgcggctacactggtggcagcttctgcagtcatgcctcgcgtgctcggcgcaccactcttgcctgtacctgtctctgtccattcattcattcattccacagtcacctgcatgtcagacctggaccaggcacggatgggagaggtgactgagggctgaggttagggagggacacacgtgcagactgcagacaggtgtccctgtcttgtgtggtctctgcagtcagcaagatgggtaacagcatcctcaggacagggaggaaagaagagttcattctaaaggtggtggggggacagagagagcatcatagctgggaggagagaagagttcattttaagggggtgggcgggggacagcatcacagagctgggagaagagttcattctaagggggtaacggggggacaaagcatcacagagctgggaggaggagagaagagtttgttctaaaagtggggggcacagaacatcatagagctgggaggagagaagaattcattttaaggcggtaaggaggggacagcatcacagagctgggagaagagttcattttaagagagggtgacagagtgtctcagagccaggaggaggagagaagagttcattctaaggtgggggacagagcatcacagagctgggagaagagttcattctaaggggcgggggacagagagacacagagagactctgtgacagcatcacagagctgggaggaggagagaagagttcattctaagtgggggttggggggtgggggcaggacagagtgcatcacggagctgggaggtggaggaggagaagccaggtccctgagacaaggggcagggtgggtggccaccaggcagagggtgcccaggcacagcaggggacggggctgctccaggcttgggcaagggaccattgactgtgcactgtccggacctgagcagaatctggctctgccgtcgctgtgctgggagaccttgaaacagtttagtaaaacctcgccgggcctctgttttcttatctataaaatggggataataacccccagttctgggagtgttgtggg

SEQ ID NO: 32364 - DNA, 1082 bp, Artificial sequence
  DNA replication origin
gacgctcctgggggctcggctactggggtcctaaggaggcgagctggccccctcattccgccccgcaggccgtgcctctcctgtcttgaggccgcttttgcctccccacacctcttacccaggacgctgggctggaggctgtgaacagccctgggagcagatcccagagatgctctcattctttccggaatcaggacgttccccccagtgtcaagcccaagtccccagggctccaggcttagccaaactcttctgttttattggaggtggcaccacccccatatcagtgggggcactgcagccaccagtgcatggccccctaggcccctgccccatgctgggctcaccctcctgtgcccagctggggacccaggcatgacaaagccctgctcctgcggcaggggagggcgtgggggggtgggggggcgtggggagggagtggggagggctgcaggggagggcgtggggagggcgtggggagaggctggccaaaggccaggctctgggggtctcagcacactcctctcccgacccagggctggaggctgctgccatggaaaccaggcctgtccacccactggccatgtgcatccaggggccatggccaccacctcctagcacccagctctgccccccacccccattcgggggagtgagaagtcaggagagagaggaagggcgctaagcagaacctggagggtgggcctggggtaccagaggctgaggtgctcaggcaggctaagggtaaggggcctgtcccctgagccccagctgagggtctaaccctctgtgctgctgggaagctccagaccctctgccacaaaccttggcatgcacttcgggcagtggcagcccctgtggggtgtgtccgtggcacccatcagcctcctccttgtggctggggcctaggagcagaatctgcacgctttgggccttccccagggagtcagggaggcgagggtgcagcccgctagagagtggcccatccatcagttccctcccaggagcgctggctggggatgctggtggggaggggctgcaggggcggctctgactccagctctgccgacaccctgtcccca

SEQ ID NO: 32365 - DNA, 1517 bp, Artificial sequence
  DNA replication origin
gggacggaagctccgggagggcggcgggccggggcgggtgtcagaaggctccgattgggccttctgcggccctgcttcccccgcccccgaaccccccaaaagctgcgggcagcggcagggcgcctgcgacacaggggcgcgccgcgcgggacctgaggaaaagctacggccaagccccgagcacaggcgcgccgccgcgctggctccgggaacgcggacgcacggcggggctgccacagcaacgcagacaggagcgcggcgactggcggaaccgcggagaggcgggactcaggaggcgtctcgcgagagttaggcttcgcgggcttccggccggtgccggccgcgggggccgacggggttaggcttccggcgtgggttgtgtggcctctcccagctccacgcgtttctgggcgccgggcactaggcgagccggccgggctggcgcgaggccgcaggcgggaagagtccccggggtcggccccgaagcggctctggaggcagtagccggggacgccgaggtcagggaggaggcggatccgagcgcggtcccgcagggccctgtccgttcttccgcctcggccggtcccgtcaggccgcctttaaatgcccggcgcctcgcacctgctaacaaaacgagctcctgctgttccccagctccgtaaatggtgcccctggccctccccagttctcaggcagagccttggcggcctccctgacccctaacaccccgcatccagcccggcagtacatcctgttggctgtgccttcgaaatttccccagacctgacctcttctcccacctctgccaccaccctgctccgagccgtcttttcccgccgagatgactgtagtagcgtctcagctgggtctccccgcttccaccttcccctcctgagtctcctcaacacaggagccagagcgatctcggaaagtacaggaggtcatgccccagtgtggttcccctttcctgggtttaagtcaaggtcctcaccgtgcctgccggcctcccgggtctctgcgcggtggactctggacctccctgccccgtcctgcctcagggcctttgcacctgctgttaccgcggcctggaacgctcctcccctgaaaccctgtgactcccacttagtgaggcgaccacctgttgaaaaccgtgcccccttcctatacagatgctcctgtcatatggggttagattccccatcaacccatcataggttaaagcattgtaaggcaatttacggtaggtttatccggatgtaaccccatctgtaagcggaggagtatactgaatgtgtatggcgtttgtaccatggcaaagccaaaatgtaagtcaaactcgaagtccaggacggtctgtggcctgtactcccttgctttccctccccggctcttagcgccatccagcatcgttgataatgtaatttgatgtgtattgtctgaaagcaccaagacggcagagtttctctcttatccagatcacagtgtgtgctcagtaaacactagactgagggggtgta

SEQ ID NO: 32366 - DNA, 1173 bp, Artificial sequence
  DNA replication origin
ggtggttgctgaccgggcaggatgtcttctagaaataatttttggcctggggaactggtttctttctgggcttcctggcaggaccacggctgctcacccagggattgaccaaggggtgtgtgttcctgggctctgggcctgctactgtgcccattgctggccaggaatgttttgcctggagtcagtcacaccatacccagggtgccacagtatatagatgggctatgggggttggcgcttacgggagaagtggccggtggggagggagaaggtgggccttgtggaaagggaggccaccaggcctggaacctgagctgtgaggacacttactcacctgagagtgtggcggcatcctagagcagtcaccttggggagccctggcgcccagagtactcccagctccttgctgccctgccctctcagcagagctccaggcagagtccctgctccaaggaagggccttggaggtggggagctgcccagcctcacacccaagaggcattggtgggtcagaggcacatctggcctggagggaagtgtgtgggcaccagggcctggctgtcgggtggggagaggcaggagcagagcctgggattgagcgaggagaggctctgagccccgccccatcctggaatcaggtcggttactctcagggtagctagcctcgttcctcctctgcagccacccctgctccttgggttgacttggcttggcggctgtccccattcccttctcatgcccaccacgcagcccagtgttgatgcagcagcccaccaggcactgccccccacccccatctccccaaggatgccagcacatgggcgtgacagcaggccagacctggagcatgaagagcttgggtcagctctttacagactggccctgtgccttggggcaaagtacttgacctgggaagctacccgctctgcgtctccagaatggagaccggagcctgccctggccacgcatcacagagcttggtggggaccgaactcaactcagacaccgataagcacttcacgcaggtgcagatgtcaggactgtgtcttccgcaggtcagaaagacaaccgccctggagacaagttccagctcacattcccactgcggaccaactatatgtatgccaaggtgaagaagagcctgccagagatgtacgccttcactgtctgcat

SEQ ID NO: 32367 - DNA, 1348 bp, Artificial sequence
  DNA replication origin
tgggtgagcagccgtggtcctgccaggaagcccagaaagaaaccagttccccaggccaaaaattatttctagaagacatcctgcccggtcagcaaccaccccctcctctaaaccaactggcagggagcagagcagggcaggccccctcagtgcagcaccccagcggctaccccaacccattgaggcctgcagtgggggatagggaggggcccagcccctggcctttctccgggtgtttttcattccccaatctccgctccttccctctccctccctcctgaggtccttccttctgatctgtttttcagttacataacaagccttaagatggcactgtttaaatctgtccggcacattttgcggtctgagcagggtcacgtggccttgctccgcaccgggcacccccccccctccccttttacaaccttgtttgatttctgcgacttcaagacagagcctccagcgctcatccaggcgccctgggtgatagactggctggcctgagttggtgactgagaaacctcagggatttgaaagatgccaggacttgggtcactcagaaaagaaaacctcagggtaggggttcaggacagaagtggggaggagctggagatcctgagaggacaccgggggcatggcagccgggaagaaacctgcttaacagcctcagcggcccggggaacgagagcgcccagccccagcctgcacccagctgtacgctgaggctggggaccagggagagacaggctttcttaagcagggagggtttgagccagcgacagccactgtgcaaagttactgaggattaaacaaatcagacttgaaaaatccagcgagtgtgtgagtgtgtctggatgggggagggggcactatgcaatcccctttcccagagacagccccagcccaaggcacccagccctgatagaaacaccgactagaagcccagaacctgggaaggggtgcggggaatgagaaagcggtgcaggggttgggggtagcggagcggcttgaggcttgcacagtgcagagctgggctgttagggatcgggaccgaggcagggtcgggcaagcaggtgcaggcaggcagcacggctccccctggccccagtacctttctcgagctcgctgatccgctggtgcagggaggtcagggcggtctcgatcttgaccctctcctcggtgtcgttcctggggccccccttgccctcctccagggtgttcacccgggacagcacctgcctctccagctcatcgatcttgctctgcagcagatccttgaggctgttggtctggctggaggaattgaggcggctgtactgctgcggggtgcaagggcgggggaaaccac

SEQ ID NO: 32368 - DNA, 1290 bp, Artificial sequence
  DNA replication origin
cccgcttgcccaccacggcgcgcccaaacccacgcggcccgcggccccttgcgtgctctgccgaccccgggccgcaggaggggttagcctcgccggtccccacgcggggtctgcgccggcagcgccacgggctggaacgcgcctcgggagaaattacccgcgcggggtcgcggcgtcttctgccccaactcccgtagggagccgctaggcgggtgccctcctggccccagcgctttggcctcgccgccctcccgcacgcgtccagtggggaggccgcgcccgtcaggcctggagccggaccgtgcccagccgagagcgcgcgggcgcgggagaggagccctgccctgcccagggcaggctgtttagacggggcgggaacccttagcctggccccgcgtctctatccccagcagccgtggagccttcctagccgcccaaggccagggaccctgcctggcttttcctccagggcagcagatctcagcggcctggcacctcggcacagaggagcgtgtcccccttccgcagaggaagggagtggacggcgtcagaaagggaggggagcctggggcggtgtctggggctagcgggacctctgggcactgtggggccccaggagaggagaccctcgggtccagcctgcaactgttgtgcaggaggcgctgggcgggacacctgcaggcgctgcacacacacgcgagggccaccatgccgcgtttctccttcacaagaccctgggcaagcggagggtcgtatttaggattccctcggcctccccagtgttctgaaagtatctgagagggagggagcaggaaaacgaagggccgccctgcccaaactcatcggggtgtctggttactaggtcggaagaggggggatggtgttgtgaacagccagtgatcccggccctgcctgagtcccacaccccagatgcagctggggtgagggaggcgatcccgtaatattcccagccgcgtacatttgtggctgcctgtgacacgacctcactcattgggaaaccatgcacactagcacactgttattttatttttgagacagggtcttgctctgttgcctaggctggagtgcggtggcgcaatcacagctaactgcagcctcgacctcttgggctcaagcgatgcttcctgcaccaccacacttcagctaattttttttgtttttttcgtagagatggttgaactcctcttgccttggtcttgggactacaggtgcaagccacagcgcccggcctagcacaatagtacttattatactactcccaccataacg

SEQ ID NO: 32369 - DNA, 1408 bp, Artificial sequence
  DNA replication origin
ctggggacagggccctgggtggtctctgtccccaccctgcctgttccttctcttgggctgagcccagtgctggggtcaaggatggggaatgggtgctcttgaactgctgactcactgatcccaatcaacaggagtttgcaggggaaaggtgagcccttcccacctggggaaggcgtgtcttactctccaagtaggcatttcatggcaccaggcagatgcttgggcatttgccatagtgtaactgttcagaacagttgctctcagttgaacaaatatttccagagcatccactgaggggcagaccaggtgttggggccaggatgagtaaaacaccattctccgtctctgaggccaggcgatctggcaggctagacagggctgaacacaccttgggtaccatgcgtgagggccacaggacgggagaggtcctgagccagcaccaggcgcatgggttagggtccagccatcagctggaagggtctcctgtggaggtgataacaggggcttgaagagtgagccaagggggctggcactagcaatgccagagcaatgaggggcaggccgtggggagacggacgtagttcatcctgccaagagtgagctgcaggggccagggtagatgtgggggagttgtgggcaaggtgggccaggaccttggggagaacccacagtcctgtggaggcgctgtctgggagcccttggtgagggcggagctgagcaggagcagggcttgcagaagagacctggagggtgatgtcacaggagccagggaggaaggggactgggcttgagaggcttgagggcatttgggagattccttggcaggggcttggtgatggcttgggcgtgggaagtgaaggagagggaggaacctgggaagatccccggcttctgggcgagggggtggtggtgattctgcctgcagagaaggggtggggagcctgggagggcctggagggagggaggagtccacagttcacactaggacgcctgggttttccagtggctatctgacatccgggaggaggccagagcccagcacacggaggctctagagattccaagacgatgaggaggctggtcctgagctgacctgagcggaaggggcctgagggtgcagagggaggacggggctgacagcagagtcctgggagcatctttagaggccgtggaccacagccaagccagtagggagcccatccagggaggcagtgggtacaaaaacagaagaaagctgaaaagagcaccctgggactccgatattcaaggaccattgttttaaggtttctgatctccgcattcaacagtgacaagggcagcagacatcggtactctcaggcatttgtacagcaccttctgcacttcaaaatgccttccctgcacccccaacacagggcttgcaaataca

SEQ ID NO: 32370 - DNA, 1211 bp, Artificial sequence
  DNA replication origin
aggggagggacacagtggagaggatggacacggtggaggggagggaagtggtggagaggagggacgtggtggaggggagggatgtggcggagaggatggacgtggtggaggggagggacacggtggagagggatggacacagtggaggggagggacgcagtggagaggatggacatggtggaggggagggatacggtggaggggagggaggagaggggagggacgcggtggagaggatggacacagtggaggggagggacgcggtggagaggatggacacagtggaggggagggaagtggtggagaggagggacgtggtggaggggagggatgtggcggagaggatggacgtggtggaggggagggacacggtggagagggatggacacagtggaggggagggacgcagtggagaggatggacatggtggaggggagggatacggtggaggggagggaggagaggggagggacgcggtggagaggatggacacagtggaggggagggacacagtggagaggatggacacggtggaggggagggacgcggtggaggggagggacgcggtggaggggagggaggagaggggaaggatgcggtggagaggaatggatgtggtggaggggaggaacgcattggagaagatggacacagtggaggggagggacgcagtggagagagacggatgcattagagagggatggacgtggtggagaagatgagcgtggtggacagggatggataagatgctcagcaatggacgcagtggtcatcggcgccttcttggcaggccacagggaggagtttagactgcgctagggcaagggggagccacacaagggtttggagcaggaactattttggccacttgatggagaccggatgcagtgttggggccagagcaggcagggagacccattaggaggctgttccggtgacccggtaggacgacaagcaagaacaacagtgggggtggggagaatacccccaaattgtgccatagtcagcttcagcatctcattccgtgtgaattacgaggctggtcatggtgagtgtcggggcctccatggatgctcggggtgatttctcatggatcctgcaaccacgtctccccttcacaagcctcttgccaagccctgctggccctggtcctctgtgttcttgctccttaggtcagtctcagacattcctgacacttgtgcttcgtggcc

SEQ ID NO: 32371 - DNA, 2887 bp, Artificial sequence
  DNA replication origin
cacctctgaaagaatcacttttccttcctgccaggaactgaagtcaaaggcacggcattattgagacacattggggagcagtgggcccagcactgggacccatgctgggtgtcccaagagcacagaatgttggcagggaggggcgggggccaggcagggagctccctgctgctctacggctgccccacctgcagcccttcccttcaccccacgccccagtttcctctgctcttgggtggccagtcacccaggggtggtatccagggaggttcttgcaggcccagcttcactggcctggaagggctaagctacctggcccaggggtgtgtccactttgtcctgggcaggctatgggcatcccacaggtggagtcccatggcagggctggagccagggggtaactcggcaggacagaggcccagccaccaggaagctcgcctgctgatggccaagctcaggacaccttgcaccactgtacctgaggacaggctgtgactgatgacagtggcttcatcctcagaggggaagtgtcctggagggatgtggctggaggcacccagccctgcgggagcccctttgaatgagcagatacctcgggaagcagggtgaagggggcagaaactgggaactctggatttcaagacttgaaagaaaagtgctgcattgtgcggtggcatctgcttgtggggacaagggctccctggtgagacctctccatcccctccctccctccccctctgtctcacactctttctctctctccctgtcctcctatctcggcctcgcactcgggtcgtgtttggtctgtgatgtcaccactcccctccctgtggctgccattcagagctggcagtaatgaaaagcacaggattcccactcactgggccccagcagcactacagagacatggagccctttgttgcaaataattaacttggtcccatgttgcataacatcctaaaaagctttcctgagcgagcacccgccagacactgtgatctcatcaatactgcatcgcatcggacactactgctgtgtgatttcattaaaaatttaatttgtgttttaaatctgcagtgttccctttaaaaggatggcgagggcgggggatgaagagagtgacaggcttgggtctgggggtgggcattccaaagcagaggaaaccccacgccccacaggaggtgggggcggggcttcccactggagcagcggcccctctccgattggctgggcttggtctgtggcctctcctggtgctggagggagagtgatggaccattgatggaaaatgcttttctgaagcttaatggttttccctttctctcggccacctcaggcagagggctgctcctgggaacccagacacaggaggatggccaggtggtggtgcaggtggtggtgcaggtggcggtgcaggtggcagggcaggtggcggtgcaggtggcggggcaggtggtggtgcaggtggcggtgcaggtggtggggcagggcaggagtgccaggtggcagggcaggtggcggtgcaggtggcggtgcatgtggtggggcaggtggtggggcagggcaggagtgccaggtggcagggcaggtggcggtgcaggtggcgggggcaggtggcggtgcaggtggcagggcaggtggtgcaggtggtggtgcaggtggcagggcaggtggcggtgcaggtggcggggcaggtggcggtgcaggtggcggtgcaggtggtggggcaggtggtggtgcaggtggcggtgcaggtggtggggcagggcaggagggccaggtggtgggcaggcggtgatgcaggtggtggtgcaggtggtggtgcaggtggcagtgcaggtggtggggcagggcaggagggccaggtggtggtgcaggtggcagtgcaggacgtgttttccggagaccccgtcctctgtgcccctccagacccagtgcctacagtggtcaagaccagagctgcagcctcactcctgccctcctggctgtgtgacctcaggcaagctgcttgtcctctctgagtacagatcactgcccggagtgtgagtgggggccttgcctgtccccagctccaggttgctgacaggagagtgtgagtgaagggccttgcctgtccccagctccaggtcagcacccgcagtgtcactctcacccccgtgtggctatggagcaggcagccattggtgactgggtagcagaccctccggaaaggctgcggttctgttttctttctttgtctagacttcactctcttccagagaggatttaagctggccttcatcatcggtgctgcctgcagacccgtccctgggatttcgctgcgaatgggatcctgttgtttctagacagggacctccattgtgttggggggggattggtttcactcctgtttccagtgagcggggagggaaagagagctcaggttctggttgggggaggagagagaggaaggtgaggggagcacggagaaggagactctggggcaacttcgtgatgctgcctgcctggctctgcctggggactctttggtcccgcccgccctggccaggccaattgtttcctgcggaaggcagggatttgtgcatctccaactatctcctgacagtatgccagagtgattaagctaagcctcccggggccagcagaagagaggggacaaattgctttgtgaaattgatttgctgctgttagcatttacagcttgccctgggtacgcccacagtgtgaggcggctgcgtgggcgtcctgctcccccttccctctcccgcagcacacgggctctcacttggcacctgcgcacacatcacctgtcgtgtgtcacatagccaggcctcaggacctggacttcagtaccactcacctcagggcacaggtccaaagtgtccca

SEQ ID NO: 32372 - DNA, 1823 bp, Artificial sequence
  DNA replication origin
acctgccccacagaggggctcttgtcttccttgtgctcaacataccttgaggacattttgctttagcacccagcaccctggatggcatgtaggggtccaggtgtgtctctgctccagacagtgaatccttgagcacctggcttagagctgggcccctggtacatgttgttacatggatgggtgggtaggtggatgggtgggtgggtaggtggatgggtaggtgggtgatatgatttggctttgtgtccccacccaaatctcatcttgaattgtaatccccataatccccacgtgtgaagggagggacctggtaggaggtgattggattatggggggtggatgggtggatgtgtggatggagggatgggtggatagatggagggatggaggggtggatgaatagtgtgtatggataagtggatggagggatgggtggatgggtagatggagggatgggtggaggggtagaggggtggatggacggatggatgggagcatgtatggataagtggatggagggatgggtggaggggtagaggggtggatggacggatggatgggagcatgtatggataagtggatggagggatgggtagataggtggatggagggatgggtggatagggggatggagggatgggtggatgggtggatacatggatggagggatggtggataggtggatggatggatagagggaggggtgggtggatgatggagagagggatgagtggatggatggatgagtagatgaacagatgtgtggataaagggatgggtgaatgggtggatggagggatgggtagatgggtagatggaaggatggatggaggggtggaggggtgggtggatggatggatggattgttgtgtgtatagataagtggatggagggatgggtagatgggtggatgtgtggatggaggatggtggataggtagacggatggatagagggaggggtggagggatgatggagagaggaatgagtggatggatggatgagtggatgaatagatgggtggataaggggatgggtggatggagggatgggtggatgggtagatggaaggatggatggaggcatggaggtgtgggtgggtgggtggatgggtgtgtgtatggataagtggatggagggatgggtggataggtggatggagggatgagtggatgggtggatgtgtggatggagggatggtggataggtggatagagggaggagtggatggatgatggagagagggatgaatggatggatggatgaatggatgaatatatgggtggatgaagggatgggtgaatgggtggatgaatggagggatgggtggatggagggatgatggatggtaggggtagatgggtggatggagggatgggtgaatgtattgatggtagggtgaatgaagggatgggtggatagatggctgggtggaaggatgggtggattggtggatagataggtgaatggattgagggatgggcggatgatggatggtggatggatgggtgggtaggtggatccatggatggatgcacagagggaaaaaggcacattgtatcagactccaaagggagaattaattgcagcataaaatgggagtccaggacctctcttatttcagagttcatcgtgtagatgggaacagtgtttaacccttccctctcccactgccctctgtcagctgcttcccagttcctaaattattggctctgaaagtgggggctgggggagtggggaaaagagtggagatgctgagactttcccatgtgtccagcttccagaggcttccaggacagactgtggcaccatggttagtagcca

SEQ ID NO: 32373 - DNA, 1199 bp, Artificial sequence
  DNA replication origin
cacctgccaggcccattctccacccagagccaggacgagctctaagaaggctggagtctggcctcagccctttccttctcaagaccctccagagagcccttttggtctccatgaagcccaagcccctgcacccggcatccaggcctgctgccttggttcctggcggctccacaggctgtccccgctgccctgcagtgcccacgccctcctcacctgcgaactcgctcaccgcccacctgccggggtctcacggggccctggcttcggtacctcactcctcccgctggagggcagactccttctgcagacgggatgctcctgggcacagggcctgccttcctctcgaggggcctccgctcccaccagcccagggagaggggcacatgccgtgtatgtgtgtgtgtttgtgtgtgtagtatgtgtgtcagtgtgtgtggtgtgtgtggattgagtgtggggtgtgtgtgtaagtggtgtgtgaatgtgtgggagtgaattgagtggtgtgtatgatgtgtgtggcatgagtgttgtgtgtagtgtgtgtgtgatgtgtggtgtgtgtgtggcttgagggtggtgtgagtgtgtgtgtgcgtggtatgtatgtgtggtgtgtggtaggaatgttgtgtgttgtgtgtgtgttgtgtgtatgtgtttgatgtgtgtggatttgagtgtggtgtgtgtggctgagggtggtatgagtgtgtgtggtgtgtgtggattgagtgtggtgtaagtatgtggatttgagtgtggtatgtggtgtgtgtggattgaaggtggattgagtgtgatgtgcatatggtgtgtggattgagcatggtgtgtactgtgtagtgtgtgtggattgagtatagtgtgtgatgtgtggtgtgtgtggattgagtgtggtgtgtgatgtgtggtatgagtgttgtgtgtggcgtgtgtggattgagcatggtgtgagtgtgtgtggtgtgtggattgagcgtgttgtgtgatgtgaggtatgagtgttgtgtgtggtgtgtgtgggggaggtgtggttgagtgtggcgtgtgctgtatagtgtgtgtggattgagcgtggtgtatgtatgtggattggtgtgtgctgtgtggtgtgtatggattgagtgtagtgtgtgatgtgtgtggattgagtgtggtgtgtgtgttgtgtgagcatgtgcataagtgctttctgg

SEQ ID NO: 32374 - DNA, 858 bp, Artificial sequence
  DNA replication origin
gctcctaaccgcgagtgatctgccagcctcggcctcccgaggtgccgggattgcagacggagtctcgttcactcagtgctcaatggtgcccaggctgcagtgcagtggcgtgatctcggctcgctacaacctccacctcccagccgcctgccttggccccccaaagtgccgagactgcagcctctgcccggccgcgaccccgtctgggaggtgaggagtccctccgccctgcagccaccccgtctgagaagtgaggagcccctccgtcgggcagccaccccgtctgggaagtgaggagcgtctctgcccggcagccaccccgtccgggagggaggtggggggtcagcccccgcccagccaaccgccccgtccgggaggagaggggcgcctctgcccggccgcccctactgggaagtgaggagcccctctgcccggccaccaccccgtctgggaggtgtacccaacagctcattgagaacgggccatgatgacaatggcggctttgtggaatagaaaagggggaaaggtggggaaaagattgagaaatcagatggttgccgtgtctgtgtagaaagaagtagacatgggagacttttcattttgttctgtactaagaaaaattcttctgccttgggatcctgttgatctgtgaccttacccccaaccctgtgctctatgaaacatgtgctgtgtccactcagggttaaatggattaagggcggtgcaagatgtgctttgttaaacagatgcttgaaggcagcatgctccttaagagtcatcaccactccctaatctcaagtacccagggacacaaacactgcggaaggccgcagggtcctctgcctaggaaaaccagag

SEQ ID NO: 32375 - DNA, 867 bp, Artificial sequence
  DNA replication origin
ccgcccttaatccatttaaccctgagtggacacagcacatgtttcatagagcacagggttgggggtaaggtcacagatcaacaggatcccaaggcagaagaatttttcttagtacagaacaaaatgaaaagtctcccatgtctacttctttctacacagacacggcaaccatctgatttctcaatcttttccccacctttcccccttttctattccacaaagccgccattgtcatcatggcccgttctcaatgagctgttgggtacacctcccagacggggtggtggccgggcagaggggctcctcacttcccagtaggggcggccgggcagaggcgcccctctcctcccggacggggcggttggctgggcgggggctgaccccccacctccctcccggacggggtggctgccgggcagagacgctcctcacttcccagacggggtggctgcccgacggaggggctcctcacttctcagacggggtggctgcagggcggagggactcctcacctcccagacggggtcgcggccgggcagaggctgcagtctcggcactttggggggccaaggcaggcggctgggaggtggaggttgtagcgagccgagatcacgccactgcactgcagcctgggcaccattgagcactgagtgaacgagactccgtctgcaatcccggcacctcgggaggccgaggctggcagatcactcgcggttaggagctggagaccagcctggccaacacagcgaaaccccgtctccaccaaaaaaatacgaaaaccagtcaggcgtggcagcgcgcgcctgcaatcgcaggcactcggcaggctgaggcaggagaatcaggcagggaggttgcagtgagccg

SEQ ID NO: 32376 - DNA, 1319 bp, Artificial sequence
  DNA replication origin
aggagcaaggctggaggtcagggaacttgagaaaaccaggtgcttcgctgagctgttgttttccatgcagggagaacagccagctccggtcctttccagaaaaatctatgcttaacttaaaggaaaccaaaatagacatgaagaacgtcgcttttgtctgagcatcatgactccgtttttagtaaaacccgagccactcccccctgcaggtcagatgctttgttgacagtgaagtgagaagaggaaggaaaaggaggtaacacggccacagcattgccttcagctgggaatgtgaggctgccaggagcccagcaaggctgtctccccctctccacccgtctaaaaatatggtggtatttatgcatgtgattttcaccttctacagcacacctttctattttattcatttttttatataataagcatgtagatcaattagcagaaacaaagttattcccatttttaaaagggtccctgggtagcatagggactgtggtgaaaagtgcctcttactgaataaacttcacccactgtccacatttcttccttcagaagtgaggatttttgcatagccctagccttaaaaagccagccaaggaaaacacggcaaagacagagccgagaaggagatgcatcagggaggggactgcctgagagcccaacacggagctgggacctgcaccccagcctctccttcccaccctgggctgttttgcgaagggcagtgaagagcctctctgagacgcctgccatgtggagcaagacaagggcaaagcagctgggagagcaggtgcccaggcccagtccccgctgggtggccttccagcctgggcgccctgaccgatgagtccggatggacttggggagccatctgcaaggctttacggcatcagacgctgctgtctacggccctacggattctttgtggagaagggatgaaggtacagtgtccgttggaggtcaaacatcccattattgggagtcccttccttcctcccccagatcctaaaggtagaatcacaaagatgtggtctgtacccatggcagatttaaaaagaaaaaaggggccgggtgcagtggctcatgcctgtaatcccagcactttgtgaggccgaggcaggcggatcacctgaggtggggagttcgagaccagcctggccaacatgacgaaaccccgtctctatgtaaaaaacacaaaaaaattagccgggtgtggtggtgcatgcctgtaatcccagctgcatgggaggctggggcatgagaattgcttatatacaggaggtggaggctgcaatgagctgagattacgctactgcact

SEQ ID NO: 32377 - DNA, 915 bp, Artificial sequence
  DNA replication origin
tacagacagtcaatgtggatgagaactaatcgctgatcatcaaatacatcaaataaagttataaaactcccccccaccaaaaaaaaagaaaagaaaactgaaccagcccctctgcccggccagccgccccgtccgcgagggaggtgggggggtcagccccccgcccggccagccgccccgtccgggagggaggtgggggggtcagcccccctgcccagccagccgccccgtccgggaggtgaggggcgcctctgcccggccgcccctactgggaagtgaggagcccctctgcctggccagccgccccgtccgggagggaggtggggggtcagccccccgaccggccagccgccccgtccgggagggaggtgggggggtcagccccccgcccggccagccgccctgcccaggaggtgaggggcgcctctgcccggccgcccctactgggaagtgaggagcccctctgtccggccaccaccccgtctgggaggtgtgcccaacagctcattgagaacgggccaggatgacaatggcggctttgtggaatagaaaggcgggaaaggtggggaaaagattgagaaatcggatggttgccgtgtctgtgtagaaagaagtagacatgggagacttttcattttgttctgcactaagaaaaattcctctgccttgggatcctgttgatctgtgaccttacccccaaccctgtgctctctgaaacatgtgctgtgtccactcagggttaaatggattaagggcggtgcaagatgtgctttgttaaacagatgcttgaaggcagcatgctcgttaagagtcatcaccaatccctaatctcaagtaatcagggacacaaacactgcggaaggccgcagggtcctctgcctaggaaaaccagagacctttgttcacttgtttatc

SEQ ID NO: 32378 - DNA, 910 bp, Artificial sequence
  DNA replication origin
ggaaaaggcaacatttgattggttaaaaggcattattcagaaagaatcaattgggaaagggtgggcaaacgggaataggagttttgctctgggtcttgggttttatccaggacctgccgtctggtctttcagccttcaggctgttatttggcttggaggtaggtttcaccagggacctgcccctgtctgcctaggcatttgactacctcccatcggtatcagaagcaccttgtgagccccagggagctggtgaggaccttgtaagggaggaggagggcggcgtgataggtgcaggtggcggcgtgataggtgcaggtggcaccgtgcacagccacgtcagggacttgggaacgtctgggccaaggagccaccttgtgcagaggcatggagtcatgagagattagccacggtgggaacgtggtgaggacactgggctgagcagagggctcgcaggtggtgctgggcagggagcctgttgacccacccacagagggtttgtctcaggggccggtggcctgactgctgtgcgttaaggaggaaggctctgacagaatggggggacttggagaggggtcattttggaggcctgaaggtggttggggtgtttgactcccatgaaggcagaggtggtacagcgaagtcagagggacacattcctgtgacccactgggcaccagggagatggcaggagcaggagctgagggtagtggtgaggtttctgctggcagagtttggtggttgagtttctgctggctgatttggtggggccagcgagtagacaaggatcccagacgggtgggtgcggggcaaggtggggaatttgaccagatttctcttgaaggtgccctatggggaaacggtgttgtgaaagtaggagggtgaggaacggaggcgactgagggtccacaga

SEQ ID NO: 32379 - DNA, 1341 bp, Artificial sequence
  DNA replication origin
tgctgtgcacggtaccctggtacagtgatggggagctagaggtgctacgcacagtaccctggtgcagtgatggggagctagaggtgctatgcagcctttggcatggcttcctatccagtgtctggaagagcatccaagaaggatgctttcaacatgataaaagacaagggacatttaacatgatacttgaagaatgaatagaaaatgaccaggcaagacttggaataggacatggagaaaaggtaggaagaaggttctgggcagaaggctggaaagtaggttagaacataatgaggcaaaaggcttaaaagatcctttcttgtggctgaagtgtagactctcagagattatgtctagtgatcaggctggagatcttgcagggactcgtaggtctttctaaagagttttcaaagttagtgggaagacatcaaaggtttctaagcgggagaaggacctattgagttttggagaatggatttggagtgaaacaaggctggaggataagttgggaagttactccaatgatctaagaaatagataagtggtggtggtgatggtggtagtggtggtgatggtggtggtggtgatggtgatggtggtggttatgatggtggtggtggtgatggtggtggtggtggtggtggtgatgatggtggtggtgatggtagagatgatggtgatggtgatggtggtggtggtggtggtgatgatgatggtggtggtgatggtagagatgatggtgatggtgatgatggaagtggtggtgatggtgatgatggtgatggtggtggtggtggcggcgatgatggtggtggtgatggtagagatgatggtgatggtgatgatggaggtggtggtgatggtgatggtggtggtgatggtggtggtggtggtggtgatgatggtggtggtggtggtggtgatgatggtgatggtgatggtagagatgatgatggtggtggtggtgatgatgatggtggtgatggtgatggtggtggtggtggtgatggtagagatgatggtggtggtagtggtggtttggtagtggcttgacctgggtattgatagcacggatagaaagaggtggatggactcagtcaggattgaagaggtagactcaacaggatgcaatgattgatgacataaaaatggaaagggtgaaagacaagaaggtgtcaagggtgattcttgggtttctgttgtccagctgggtgattctcaggtttctgttgtccaaatggttagtgaccccatccatatggattgaggagagaggggagcaagcttaggagggaagacacagaagatgtgcactggacaattcctctctgctgaaaggcc

SEQ ID NO: 32380 - DNA, 2602 bp, Artificial sequence
  DNA replication origin
tgggcctggcagacaggtaccaggtgagtggagcactgtcattgcctgtcacttgctgttggaacctctgcagccagagggcatgtcttcttgtctatacatcaacgtactttggggggcttcttaaataggtggggtttctgtcaatgatcacactgaatggggaaatgaagtttctagtaggcatatttgggataaagctctttctacatctacctgtccgactgctccctcggcaaccacagaatgcttccagtgtccagtgtgctccaggaggcattgggccaagcgcccgtgcatctcagggtgcaggctgagataggcacggcagatgcaaacccagcagcgtctggaccacgggagctttgtctctccaccggacaagacacagacttcttggtccctaaggaagtccccttcaaacctgctgagttctcatgtggctcctgtacactggagactcgccccaccaccccatgccatcctatgttctagtgctgacttggaagaaaggtgggttggtatgaaaagtgttagatttcagaagcttggcacaaatggttggcagcgatggagggactgcagtgtttagaggccatggtgggaggacctgttggatggagggactgcagtgtttggaggccgtggcgggaggacctgttgggtggatggagggactgcggtgtgtgtttagaggccgtggcgggaggacctgttgggtggatggagggactgcggtgtgtgtttagaggccgtggcgggaggacctgttgggtggatggagggactgcggtgtgtgtttagaggccgtggcgtgaggacctgttgggtggatggaggggctgcggtgtgtgtttggaggccgtggcgggagggcctgttgggtggatggaggggctgcggtgtgtgtttggaggccgtggcgggagggcctgttgggtggatgggggggctgcggtgtgtgtttggaggccgtggcgggagggcctgttgggtggatgggggggctgcggtgtgtgtttggaggccgtggcgggagggcctgttgggtggatgggggggctgcggtgtgtgtttggaggccgtggcgggagggcctgttgggtggatgggggggctgcggtgtgtgtttggaagccttggcgggagggcctgttggatggagggactgcggtgtgtgtttagaggccatggcgggaggacctgttgggtggatggaggggctgcggtgtgtgtttggaggccgtggcgggaggacctgttggatggagggactgtggtgtgtgtttagaggccgtggcgagaggacctgttgggtggatggagggactgcggtgtgtgtttagaggctgtggcgggaggacctgttgggtggatggaggggctgcggtgtgtgtttggaggccgtggcgggaggacctgttgggtggatggaggggctgcggtgtgtgtttagaggccgtggcgggaggacctgttgggtggatggaggggctgcggtgtgtgtttggaggccgtggcgggaggacctgttgggtggatggaggggctgcggtgtgtgtttggaggccgtggcgggagggcctgttgggtggatggaggggctgcggtgtgtgtttggaggccgtggcgggagggcctgttgggtggatggaggggctgcggtgtgtgtttggaggccgtggcgggaggacctgttggatggagggactgcggtgtgtgtttagaggccgtggcaagaggacctgttgggtggatggaggggctgcggtgtgtgtttggaggccgtggcgggagggcctgttgggtggatggaggggctgcggtgtgtgtttggaggccgtggcgggaggacctgttggatggagggactgcggtgtgagtttagaggccgtggcaggaggacctgttgggtggatggaggggctgcggtgtgtgtttggaggctgtggcgggagggcctgttgggtggatggaggggctgcggtgtgtgtttggaggccgtggcgggaggacctgttggatggagggactgcggtgtgtgtttagacgccgtggcgggaggacctgttgggtggatggaggggctgcggggtgtgtttagaggccgtggcgggaggacctgttgggtggatggaggggctgcggtgtgtgtttggaggccgtggcgggaggacctgttgggtggatggaggggctgcggtgtgtgtttggaggctgtggcgggaggacctgttgggtggatggaggggctgcggtgtgtgtttggaggctgtggcgggagagcctgctgctcagttctcaggactggttagaaagtaaatttaacgtaggagcaacttaacaaaaagaaaagcttttcattttgggggctttttttgtttgtctttagagatggctttgctctgtcacccaggctggagtgcagtggtgccaccacagctcactgccaccttgaactcctgagcccaagggatcctcccacctcggcctcctgagtagctgggactgcaggcatgcaccactacaccaggctgattttaaacaactttttgtagagacaggggtcttgccatattgcccaggctggtctcaaactcca

SEQ ID NO: 32381 - DNA, 1154 bp, Artificial sequence
  DNA replication origin
tattaaggaagacaatccaagacaaagatgtacatttattttttaaaagcagccaaacagtggcagattaaggcaggtgaacagatttcgactctggcctgtgtggtccaggcactcattcactaccctgatacccgaggtgcctcctcacctctatgtgcagaaattagtgtcaggcctgtaatcccagcactttgggaggctgcagttggaggactgcttgaggccagaagttaaagaccagcctggccaatataacaagaccccatttctacaaaaaatgtgaaaaattagccaggcatggtggtgtgcacctatagacccagttaccagggaggctgaggtgggaggatcacttgagcctaggaggtcgaggctgcagtgagctgtgactgcctcgctacgcaccagctggggtgcccgagcgagaagacgggcacgtcagatccagcagcaacagcttcccccatatcgggggcgaggcctggagctgggcatggcggtggctggctgagggacacgagggttcagaaatcctgggagatgccagctggcctccacccacccccaccccacccaagtctgaatggaggcagcagggtttcctgtgtcattcctaaggcctctcaggtgataccttccttccattacacagaaaaacaagaaacacaaacaaccagggtaaacacctggggctgggaaggagagggggcgttctaggttgaggagacctgattacaatattgagggctggacaggaagggcagaaaggcttgggaggtacccccttccgtcctgaagcttaactgcacctggagagaaagaactaggcaatgaggcccaggagggccagcgggcggcgggagtgccctcttgctggggtggaccttttgtttcaggcatgagaggtttatgcaggtgtatatgacgaggaaagcgctggcagagggagagcgtgaggaaggagggattatctcagaggggtcaggatagtgatcgctggatgagctgcagtttctcacaggcagaagtacgtcaagaggagggccaagaacacagccgtgggagaacatacgtccaagtgcaggaagagaggctggccagagagtgggagcttcagagaggcagccgcagaccccagggcagggaaggag

SEQ ID NO: 32382 - DNA, 967 bp, Artificial sequence
  DNA replication origin
ggcagaaggtaatgaagagaagagcgctcaggtcagaaaaccccggttcaaatcgtagccctggctctgcccctgtacagccccaggcgagttcacaccttgatgtccggctgccaccacttacctttcacttacacgatgaggataatggaactataaaacaggaattactgagattaaaagaaacaaaaagtcttaatatgtacctggtacataatgaaaattaaatacacattagtctgttccttaagaagatttttgcttacaaactcaataatgacctcacagtgctagagctggtgctttagtgaatgaaacaaggtccaagccattggatgagccgtgtggctggtgaagctgccgcaggagaatgggggcagctgcccctcatcagggaggcactgaagaccagacaagggcggggagggtaggggtgggggaccaggcatgtgggggggaggggaaggggaacagggcatgtggagggagaggaagggggtccaggcatgtggagggagaggaagggggtccaggcatgtggggggagagacagggggaaccagtcatgttggggacagcactggtggtccctgctggactggggtcaacccagcaccatttgggtcaagtgacagggaggtctaagggctgcccaaaacatcgaggtcttctgaaaaattgctagtattgagtttttggatgtgatattaaggaagacaatccaagacaaagatgtacatttattttttaaaagcagccaaacagtggcagattaaggcaggtgaacagatttcgactctggcctgtgtggtccaggcactcattcactaccctgatacccgaggtgcctcctcacctctatgtgcagaaattagtgtcaggcctgtaatcccagcactttgggaggctgcagttggaggactgcttgaggccagaagttaaagaccagcctggccaatataacaag

SEQ ID NO: 32383 - DNA, 2615 bp, Artificial sequence
  DNA replication origin
atagccaaataaatacatagcaactaaaactctcgaatgctgcaggcaggagtgtaaactgactcagccactttgcagagtgctctggcaccatctgttaaagctgaatatgggcaaaccctgggaccccgaaggatcactccgagaaatgtgaaggagggagcagcccctgaacgggaggccagccaggaaggggaggccttggcctcaggcacagaattggtgctagcaggtggggtaccaaaaaaaaaaatcagtaatcaagacaaatgatatttcagtgcaatatttacaaaaataaaaattaatacaaaaatccatactgaagaagatatcgacatttcaaagggaggaccaatatcacagaattcccttttgtctcaggctctgatgtgacagagtctggctctagccagcactgttagtgaggactgaaaactgaaaatgcccagtggccctagaagggacacatgaatgttgggacactcaatggtgtccaccttgcaatgaatgtgagctgcagcgccgtgagtgtgagctgccgtgtggtgagagtgagctgccgtgtggtgagagtgagctgcggtggggtgagagtgagctgcggtgcggtgagagtgagctgccgtgcggtgagtgtgagctgccgtgcggtgagtgtgagctgccgtgcggtgagagtgagctgccgtgcggtaagagtgagctgcggtgcggtgagtcagctgccgtgcggtgagtgtgagctgccgtgcggtgagagtgagctgccgtgcggtgagtgtgagctgccgtgcggtgagagtgagctgccgtgcggggagagtgagctgccgtgcggggagagtgagctgcggtgtggtgagagtgagctgccgtgcggtgagagtgagatgccgtgcggtgagtgtgagctgcggcgcggtgagagtgagctgccgtgtggtgagtgtcagctgccctgcggtgagagtgagctgcagtgcggtgagagtgagctgccgtgcggtgagagtgatctgccgtgcggtgagagtgagctgccgtgtggtgagagtgagctgccgtgtggtgtgagctgccgtgtggtgagagtgagctgccgtgtggtgtgagctgccgtgtggtgagagtgagctgccgtgtggtgagtgtgagctgccgtgtggtgagtgtgagctgccgtgcggtgtgagctgccgtgcggtgagtgtgagctgcggtgcagagagagcgagctgccgtgcggtgaatgagctgccgtgcggtgagtgtgagctgccgtgctgtgagagtgagctgccgtgcggtgagagtgagctgcggtgcggtgagagtgagctgccgtgcggtgagagtgagctgccgtgcggtgagagtgagctgccgtgcggtgagtgtgagctgccgtgcggtgagagtgagctgccgtgcggtgagagtgagctgccgtgcggtgagtgtgagctgcggtgcagagagagtgagctgccgtgtggtgagagtgagttgccgtgtggtgaatgtgagctgccgtgcggtgagtgtgagctgcggtgcagagagagtgagctgccgtgtggtgagagtgagttgccgtgtggtgaatgtgagctgccgtgcggtgagtgtgagctgcggtgcagagagagtgagctgccgtgtggtgagagtgagctgccgtgtggtgagtgtgagctgccgtgtggtgagagtgagctgccgtgtggtgagtgtgagctgccgtgcggtgagtgtgagctgcggcgtggtgagagtgagctgccgtgcggtgagtgtgagctgcggtgtggtgagagctgccgtgtggtgagagtgagctgccgtgcggtgagagtgagctgccgtgtggtgtgagctgccgtgtggtgagagtgagctgccgtgtggtgagagtgagctgtggtgtggtgagagtgagctgccgtgcggtgagagtgagctgtggtgtggtgagagtgagctgccgtgcggtgaatgtgagctgccgtgcggtgtgagctgccgtgcggtgagagtgagctgccgtgcggtgagtgtgagctgccgtggtgtgagctgccgtgtggtgagagtgagctgccgtgcggtgagcgtgagctgcggtgcaaagagagtgagctgccgtgtggtgagagtgagctgccatgcggtgaatgtgagctgccatgcagtgagagtgagctgccgtgtggtgagagtgagctgccgtgtggtgagtgtgagctgccgtgcggtgagagtgagctgccgtgcggtgagtgtgagctgcggtgcagagagagtgagcttactcaaacaatgctgagtgacagcgggcaggcacaaagactacaccctgcgtgactccacgcatccaagcacaaaactgggcaggaaagcggccactgctggggaagggaggagctaagaggggcgccgagggggctcatggggctgcttgatttgggtgtgattacacgagtatgtgcagcttgaaacattcaccaagctgtatgtgtatgatgtgtacacttttctatatgtaagttacacctccaataagattaaaaacaaaaggaacctagtgtgtggtccacgtcagttatccccgg

SEQ ID NO: 32384 - DNA, 1186 bp, Artificial sequence
  DNA replication origin
gggcccaggacagagcctctgctatggagaccaaggagatgagctggggccgcgctggggccggtgagggcccggcagtggagggaaagcagagctcaaaggtctggacgccagggagcaacgtccagggcagagccacaaaccagcaccgggccaggcgagataaggatggagagctgactgggccccggatcagcagcaagaacgctctggagttgggcaaaagcgcagccagaggggtttcgagacagggtgaatttggttttggttgcaaaggggaacaagacagacaggtggtggctggagagggatgtagggtcaggaagtgctttttgtagatgtggagtaatggggacaggacgctggtgagaaagacccagctgggggcacggagggtggggaaaggctgctggagggcatcctcgggcaggctgggggatgggactggaagcacaggctgggctggcagagcagggctgctccccaggggaaccaggcaggcggcaaagcaagggggcccagatgcagagaagcagggggagggctggaggacccggcagaggcggtcatgcgactgcttcttgtttcctcagtgaaatgggaaacgagggtactctctggggtgagggcgggaggaggggttgcagctggacagagaaggcgcgcgggtgagggagaccaaaaaaaatgcttggggtcagaatgtcaggcggcatcagggcccctcgagggggtgacacgagttctccgtgggccacaccgggtgggcccgagctcccagttagcccagccacgtgagtgcaggcacagagtggagggggattcgcctgggtgccatggagcaggtgggcagcagggctgctgggcctgcggctggagagcgtgaaggctgcaggggaggctgccgttggaaggtctcggaactgagcggccaggcaggagcagtccggcctgattccctccacggagagtcacttccacttaacacacagctctgccttccctgagcccccgatacaaagaattaaagaaaaaaaaaaaaacaactaccagcctctctctcccatccactatcctctcttccctacgttgtttgattttgctcggggggaaggtgggtggccgcagtggaggtgcgtgtctctgagaggaggtcgggaggaaccctccctccgctcatctggcc

SEQ ID NO: 32385 - DNA, 1063 bp, Artificial sequence
  DNA replication origin
gacacagctgggcagcgggtcctggaggtgacatgagggggttaccgcgttgcaggtggagaggctggaaaagcccgggtgtctgaggatgcacgggctaccagtatgactgaggtcagtgatgggggaggggccggatagggaaaggccccgccgacggcatgcagagaggtcagtttgttttgagatccagaagccaccagccgacgttaagcagcagtgactggtccagtgtgctcgctttggggacaggcctggcaagaggctggaagtcggggaggcgagtggaagggggtgggtttgaccagggtgccaatacggagatggggaggaggagactgcagcactggccagaggctgagagaagaaggggtgaaggaaagcaaactctagaaaagaaggtttgggatgagtttgaaaaccctcaagagaggcaggggaaagggacgaggaggccagtgagggtggaggatcgggggaggggagaggagatggcggccacctgggtcaagctcctgggggtcggccagcacgacttccacggaggagccaccgagtcaggagcatgggccctggggagccgtggagagggaggagcttccctgtggtgggagaagagcactggcaggaggatgagggggacagggaaggtcacaggtggcagcaagaggaggtggctagccaggctggaggggcagatggggtatggaggggatcccagcatgtccagccttgggggcagagaaagagcagtgggaatgtggcctcacttcccttctatgtgcccggagccagctcccacgctgggttcaccatggacccaggagtggcaggttccccgtgctggtgatgctgagagtctctgattaagaggctgggaaaggaacgtgggactgctcgcaggatatgtgaactggaaccggatccctctcctatgcttaactcgggggctgtcgcatgccactgctgcctggaactcaggtttgaggggccagtcggaggaaaagcactggctctggggccggctaacctgatgttaaccctgcctccatctctgcccaat

SEQ ID NO: 32386 - DNA, 979 bp, Artificial sequence
  DNA replication origin
aggcagacggccgaaggctcatgattttacagaggcaaatcatggccaagggaagtgaaaatgacttgtaagagcaaatgcggtgatgggatcaaactcagggttttaaccttaaatccagtgctttagccaatctttcaaagcagtcattctttatctgtagtttaatgggtagcagggaaaatattttgctgaaatatatggtattcaggtcaccattatggagcgttctctggtcacagccaggtgcagagcactgggcccaggagggttcaaggttgaactgaggtcaaggtcaacctcagctgtgctgagaggaagagcagcagctccccgcatccagctcaggaaatcaggagcagctgggagagatggcaagcacggtagccgacccgtgccagcagagccatggtcagtgccccaggcccagaaaaagagtgagagatcccagaaccggaagaggggctggaagctgcttctgcttggagagagcatatacataaaatcctagggaatctacaagaaccagtgaactagcagaaaatcccagggaatctacaagaatcagcggaaccagcgagaggtcaactggtgctgggtacgactgacgcctgcctccaaggtggaagccctcaccgtccgcttcggcagcagcctccccactgccccctgacttcagctgtgacaccaaagtagtacgtgaggacttggggtgtggggaggctatggtcagggctgggtgcagggagcagaagggctgagcaggggcccaggggtccgtgggcagcacagttggggacctgatggcctgggctggacttgaatcagcagcggctgtgggtgggagacacagcagtggctttgtgtggggtgtgcagggctgacgggtgagagcgcacagtgcggggtacgagcctgtggctcggggtgcctgccagtgcctggacaacagggtcagtgaatttggctgaacaaagcc

SEQ ID NO: 32387 - DNA, 1089 bp, Artificial sequence
  DNA replication origin
tgccgtgtcttcccaccgagcccgtgccacgcagggtgtgtgtgtcgcctgccgtgtcttcccaccgagcccgtgccacgcagggtgtgtgtgtcgcctgccgtgtcttcccaccgagcccgtgccacgcagggtgtgtgtgtcgcctgccgtgtcttcccaccgagcctgtgccacgcagggtgtgtgtgtcgcctgccgggtcttccaccaagcccctccgcccaggatgtgtgtgtcgcctgctgggtcttcacaccgagcccgtgccacgcagggtgtgtgtgtcgcctgccgggtcttccaccaagcccctccacccaggatgtgtgtgtcgcctgccgggtcttccaccgagcccgtgccacgcagggtgtgtgtgtcgcctgccgggtcttccaccgagcccgtgccacacagggtgtgtgtgtcgcctgccgggtcttccaccgagcccgtgccacacagggtgtgtgtgtcgcctgctgggttttccaccgagcctgtgccatgcagggtgtgtgtgtcgcctgccgggtcttcccaccgagcccgtgccactcagggtgtgtgtgtcgcctgccgggtcttccaccgagcccgtgccatgcagggtgtgtgtgtcgcctgctgggtcttcccaccgagcccgtgccgcccaggatgtgtgtgtgtcgcctgctgggtcttcccactgagcccgtgccacgcagggagtgtgtgttgcctgctggctgccgttctgcgcgtgtgtggtttcaagtcttgtttcctcttctgtttaacgaggcccttggtctaagtgtgcttgtaatttgggcgagtgagcagcagccgagagagtccaccccagtccccctagccagcgaagtgggagctcccaggttcctgcctgcggggagggtgggggcggtttgagttagtgaaaatgtgtgtattaaacagatatgtaaatgacccctgccgagcgctgaaaatgaaggtatgaaaaggcatcatcatccgtggttcccacctggcataatgaccgtatcagaacagacatctggtagtatacaccacatagttgccagactccgataccaaggg

SEQ ID NO: 32388 - DNA, 1329 bp, Artificial sequence
  DNA replication origin
cccgctccctccctctgccctccacactggagcacatccatccagcactcactcagaaccagcctgttggtgcagacccggtcccgctcaagcttttcttgggggtttgcttggacttacaaaatgctgaaaaccaatcgtgtgtgaggcagtaattcccagtgatttgtgtgcacagtcccacttgagcaggtgcttcccactggccccacttgttcaccctcaggggcagccccaaggtgggaggtttcctggtgctaaagctgctgccaggcaggcgaccttcccacgcttcaggccattctgtgcctgtctacacattcacagtcacgtggccatgactcgcctcagtcgtgaggacctactgtgtgctgtcagcacaatcacagccacacggccatggctcggcacagtcgtgagggcctactgggtgctgagcactaggtatttgtgccctgctcacagttcctgaaggagcagcgagaggcaccatagggtgcttggaaagcggggagagggagggtcttgtactttttggagacctctttacgctgatgagcagacagaactgtccagggcagtgagggaagaaggggaagggtgggatcgagggaaaagactcctgctgctaggaaatggcaggtccaggcccgggatgtgggagtgggaggagaaaggggcagggcaggtgggggcagggcaggcgggggcaggggcaggggaagggcaagcaggagcagggcaggcgggggcaggtggcgttgggcaggaggggctgcagagcccagcaggagctgcagccgggaaggacatggcaggtgggctacgggtcagacaggctgggttggagctgggtcagcaaggacagaggacggagatgatgccagggatgcgaggatccaagtggagggctgcccactgaagaggtgggttgcgttttcatcccggaggggttacagtggggcacactgcagctgaggcatcgatgatgagacacaagcagggctgctccggggcgcgcacagccgaaacgcagaacctgacccaagccaggcttctaagatgagaagtcaccgcttatcgggtggtgctgaagaccactttcagagggcaaggcgggggacggggcctggggaaggaggagggacgggcccctagaggaaggggcttccgagggtcctgtgggcgtcctggaggaaacaggccggctctgaggctggcagtgttaccggaagccacaccaggctgcctaacttggggacacttctgcaagtgctggctctggaagggaataaaatgatcctgccttggatattcaggggtaacgat

SEQ ID NO: 32389 - DNA, 1307 bp, Artificial sequence
  DNA replication origin
caggagctgagttttatgatgcctgagcacaggtcacaagacaaatattagccagtgctgtgttgttggagcggagtgggtggccctcagggcaggtgggcaaggggtagaggcgaggtgggccagtagcccatggtcagtgcagccgtgtcaacactgggaagtgtgtgggcccccagcggggcaggacatgtgtccaagaaagatgtccttgagtcctggcaccagttcacggttagaaactaaccatgtgctacagacgacacccctgcagggagggctgcacccacccagaacacacttgtcaggcacgtgccacgtgccgggccggctggggcctcagtgaccccgcagggcactaaccctgcctcttctctcaagaaagttacccctggagctgggggaggggctgggtgtgagagtggtgggccggggtggcagctgagcagagccagtatggatggggctgggggcacagggaggccttgccacagggagaggcccagtgcaggggctgtgcccatcagagggcgtgggcacaagaggccaggagggcagtggggcaggtggcccagccaggcacaagccttgtcgttcgtgatcagaggcctggaggggtttgggggcaggacctcaccttcggctgcccaggtgagaggggccgctcgcccagctgcagggacggcgcaggagggaagaggcaccagcactttgaatgcggagctcacagcacttgctcacaggtggagagggtacgagaaaagaagaggacagggaatcctgggggtttgggtctgagcaacagaagagcagagttgcccctcgttgaaggggccagccatgaaggagcaggttccaggatcacgcatggactctgaaggtggggagccgacaggaagggctgagctgacaggtgaaagtatgagtccaggcaaagctgcctccctttcgaggaaggctgctcagccccagccagggagcaggaggacagacaatggctttgacaagcgaccggtcagaggacctgggaagcctggccagtgtggagcccgtggccactaatgtggcctccccgtctgtgtgctgctggggagccctcagggggaaggggtcacatgacaacaccagccaagctcatcttgcaaaagctgagagagaggggagctcccacacccctggctgagcacctctgccagaccctctgatgggttctgcatgaatatcctaaagaaggccagtgcgtgtgtgtgttgctgtcagagcccagctccattcaggaagggcaggaagggtccaacgcaaaggag

SEQ ID NO: 32390 - DNA, 1443 bp, Artificial sequence
  DNA replication origin
gtggccactaatgtggcctccccgtctgtgtgctgctggggagccctcagggggaaggggtcacatgacaacaccagccaagctcatcttgcaaaagctgagagagaggggagctcccacacccctggctgagcacctctgccagaccctctgatgggttctgcatgaatatcctaaagaaggccagtgcgtgtgtgtgttgctgtcagagcccagctccattcaggaagggcaggaagggtccaacgcaaaggagagctctttgctgtgtgccaggcagcagcctccagagcgaggcccgccatctccagcaggatgtgcggcctccaagggaggcccccgtacgcagcaggatgtgcggcctccgagggaggcccccgtatgcagcaggatgtgcggcctccgagggaggcccccgtacgcagcaggatgtgcggcctccgagggaggcccccgtacgcagcaggatgtgcggcctccgagggaggcccccgtacacagcaggatgtgcggcctccgagggaggcccccgtacgcagcaggatgtgtgttcgggagtgagggaggcccctgtatgcagcaggatgtgtgttcaggagtgagggatgtgcggcccccgagggaggccccgtgcgcagcaggatgtgtgttcgggagtgagtgctctctggacattccccttgaataacagacgtggcccctgttggcctcccctgaatcgaagggcccaccacctcggtgcacgttaatccatgccagctcccagctctggcttttctcacctgatgtcagaaggaaagggaaaaaaatcggtgctttctgaagacaggtgcagccttgatcttccctggaaggggcccagtgggtgttcgctttgtcggaggccccgtctcggcagtgcctcactcctcttgcacagggaaggcagcgggggttctgtggtttgccaggggagcctgggacagtgacttaggcagttggagacgagcgccagaaccggggcgtgggccatggccgtgaagacgcacactgggccatggcccttggtgcccagcagggtgggaggggcgggtggagggtgatgccagggctccattctgagcagtgagagacttgcagttccatcggcgcaaatcaagagggcgctgcaggctgaagggaaagtagacggtgcccgcagttcatagggcagggagagtttggggtgcaggtgaagagccggcagctggacagccagcctggacctaggagagtgaggggccggcatcagggaaaccacaaagcatgataggaggaagcccggggcatgtaaggctggggtgggaaagtgcgtgtacagagagtgcgtagacggagagtggggtggccacgagaagaccctggtccctggtgggcgcccatccagagcctgctcatccagccgctgtggagacaggggcgtca

SEQ ID NO: 32391 - DNA, 1560 bp, Artificial sequence
  DNA replication origin
tggagcccccactcagaccctaaggactgatggccagggagacgctgagaagcactggcgggaggacgggctgtctgatgaagggtctggggtggcataaagaaaaaatacaacctggatccccacctcaccacagagacaaaatgtggttcaggatatacttaagacatgaacacaaaaaaggaaaattttaaatcttggaagaaaatgtaggagaatatgtttaggacattgagaataggaaaaacaagacacaaaaggcccaagttataaagaaaaagagaaactaaaagattaagcttgtgtggcaccaaaggcatcataaaaagtcatagattagatgcattttcgatggatatattcagccaggaatcagcacccagaactgtgatgaatgctgattacaaactactcagagaaagataaacgacacaaggcgagtctgtaaggctgcaaggctgtaacctcactgcaatcaaggcagatgcaaattcatgccacaaggagacaccaggtgtgtctatcagacagacaaaggctggccaagaccggcgtggtagagagtggcgagatgggggcgcctgcgctttagaacagaggatcccgtggaaggcctggggcgacatctacaaaagctgaaggtgcaggcaccgttcacgcagcagcttcactctgaggcaaggtggcgagaggcactcacgtgtatccacgctgaagaacacgcaccacacacgtgcccgtttatgtgtattgagcacctactgcgtaccaggcactgggtgtggacagggtgggaggagacagtggttaacaaggctgggttcctgcacgtgcggctctcaagctccaggggagagagatgggccgggccaatgaacaagttacacgtacagcacgtctgcagtccacagtcctcaggagaaaaataaagcaggaaaagggagcagggtcagagggcagctggggaagcctgattccaggtggggcgtggggctggggaggcttctgggaaggtgctgccagatgggggctctgaatgagaggggagcggccaccatatgccggagaagagcttccccaccgatgcccaggctgggggccgggtaggctggggcccagcagagctgggtgcagcgagtgagggtgtgttggatgtggggctccatggtggcaggggctgaattctgagtttgcttattaagaaaaggaacaaaaggcaagaagaaactagaaccggcctcactgtccccagacaggagaatggataatggagtcacggcagatcgcggaggtgaaggaacaaaacctagatgaccatcaaagatacatattgaagtcagagccaaagaaacgggctttgcgggccacgcatcgtgcgacggcgccaataggaggtaaaggcctctaagtgggcaccacgtgtgtgccagggctcatggccagggagggaaagtgtaatgtcaccagagggaatgggaccggggtagggtctggggctcgacctctgtaattccttaagctgggaacacaacacacacacacacacacgcagcgctctta

SEQ ID NO: 32392 - DNA, 984 bp, Artificial sequence
  DNA replication origin
cgtgcccagcccactggcattctttctttttttgccagcaacaggttttaaaaaagatattacttaaaattacaaaaactgaaaggtaacgtcatgcctgtgacctttatgcagaaagttagactgtcttgaagacataaagaagacttaagtaaatggaaagatacaccctgttcaggagcaggaagactcatgatgcaaggaagtcagtcatcccagggaaatccaccaattcagcgccattcaaacaacaccccagtgaggctgctgtcgacacagaaagcctgactgtgaaatgtatacagcagagcaaagggctaagagcggccaagacagttctgagaaacgaactgaggagcgggctcaaaggtgctgcccccgcagctgtggtgtgacggcgcggccgtgtggggtgtcggcgcggctgtgtggggtgtcggcgcggccgtggggtgccggggtggctatgcggggtgtcggtgcggccgtggggtgtgtcggtgcggccgtgggatgtgtcggtgcggccgtgtggggtgtcggcatggccgtggggtgttggcgaggccgtgtggggtgttgctgcggccgtggggtgtcagcgaggccgcgtggggtgtcggggcggctgtgtggggtgtcggcgcggccgtggatgggatgggtgctgctaagaatggagcccccactcagaccctaaggactgatggccagggagacgctgagaagcactggcgggaggacgggctgtctgatgaagggtctggggtggcataaagaaaaaatacaacctggatccccacctcaccacagagacaaaatgtggttcaggatatacttaagacatgaacacaaaaaaggaaaattttaaatcttggaagaaaatgtaggagaatatgtttaggacattgagaataggaaaaacaagacacaaaaggcccaagttataaagaaaaagagaaactaaaagattaagcttgtgtg

SEQ ID NO: 32393 - DNA, 873 bp, Artificial sequence
  DNA replication origin
cacagcagcgtggtcccccatgggactgcactctagctgggagctggggctggacggatgagcgtgggagtgacatggtgtggggccacatgcatgggtgtctgggggtgaggagggcacctcaggctgggtcccgggacatgtggacacaggccacagaccgtctccagccatccttccatcctgagcagctccacggccacttgtggccgtcaggaacacagataagtgcagagggcagacgcatgggctgggggccgggacaggtgaggcctgtgtccacacatccatgcgttagcaagaaacaactttataggactgtggtggtaaaaatggcgacatcatgctttgatgtactgggtcaggcacctacatggggatcctggcggtgggccaggcaacctcccggcaagaccacctggctctgagctgcacggatggcagaggggccgggccaggggccagccaggggtgctgcgggcaggtgcagtggagcggctgctgctgagacggggggcaggaggctgaaggaaggccttgaatgtcagacaatggtttggcctctacagaaaatgcggttttaacgaaggcttcacctggagggtggtgaggagctggtgtgaaagagggcctgcccagttgtggtctgcagagagcaagacccagggcaacgaggcctggtgggatgggggcactggaaataggagggattgaggtaggggattcttgtggatgtcaggccagacgaagggctgagtgagaaacaagcaggatggagacatcaaagaagattctagaacctgacacagtgctgagacctgggttcccatttagtttcacaaacatttatcctgccccaccagggccaggcac

SEQ ID NO: 32394 - DNA, 1538 bp, Artificial sequence
  DNA replication origin
gatgaaactctctaagaatgcacggttagaataaccacgtatttaatttaaacaacactgaataatcacagtgttctctaaaacaagcctgtctgacttggctgataaacctgacccctgactgtttaacactcagcagtaatttaccagacaggcgctggcactacagccaagtgtggagaaaggtgagcagaatggcactgcacggtccctgccccagctgtgggaggaagctgtcctgctgcctcggagactgcgagcaccagagtccagctggtggtggctgagtggaaacaaagtcagagaagctacgtctcccacttccacccaccaagtgtgttcttcacgcagcttccatccaaaaccaacgacttattctattctggtcttcctggaggggaatcgacctatccatttgctttccttctgaactttccaggaaagaacaggaagcacccattttagaagctgcagctggggtggagccagctgtcctcctgaggcgggtgaagcccacagcagactgaagtggataagctgaagatgagctgaggatgagctggggatgagctggggatgagctggggatgagctggggatgagctgaggatgagctggggatgaggatgagctgaggatgagctggggatgagctgagaatgagctgagctgagctggggatgagctgaggatgagctggggatgagctgaggatgagctgaggatgagctgagctgagctggggatgagctgaagatgagctaaggatgagcaggggatgagctgaggatgagctggggatgagctgagctgaggatgagctggggatgagctgaggatgagctggggatgagctgggcatgagctggggatgagctgggcatgagctggggatgagctgagctggggatgagctgaggagcagctggggatgagttgaggatgagctggggatgagttgaggatgcgctggggatgagctggggatgaggatgagctgaactgaactgaggatgagctggggatgagccagggatgagctgaggatgagccgaggatgagccaaggatgaactgagctgagggtggcacgaggggacttctcaggctctgcctgctgcaggtttatataaagaatgtcacacagagtgtcattctcagaggagaaaaacaaaacaaaacagaaaaagtcatttttgtgggagaatctatgacaggatgctcaatgttcactgcatagtgagaaaagcgggaccggaagccatgcaggcagggcaaccccagtgctgggagggaaccctgcgtggggactatggccatctcaagtcgctccttcactgcctgagtttctaatggtgcactgaaaccccagctgcacagccgcagatctgatgacgggcagtgcagcttccgcatccaccctagaggagcagatgctctcagggcaaaacaagatccccatgctctgcggagccgccaaacggaaatccccactgtagctttaagggctgtgtgaaataaactgggttctgcgtgtga

SEQ ID NO: 32395 - DNA, 918 bp, Artificial sequence
  DNA replication origin
atgtctggcaggggacagggcacacgcgtgggcacagcagccccgggcactgcctctgctgagcacccccgtgggcaggtgctgtccgggcctagcaggggacagtccgtcttggcccacacggctcatgcagcagaagtaaatttcacccagcacagagcgaggattcccagaaggtccttgtgcctccagcttcatcagctttaggtctgggattctcattcctgaccctccagtctgcacagatcggggagacacaatgaggagttttgagggaagcaaagcaaagggtgggcagggcctgggagcgctgcgatggccgcctggcccccgtctctgggcagcttccatgtggctcagacagtcctccagcggcctgacggtgacctagggcccagccctgagccagcctggggaggacacagggggtctctgctggagcaggtcacctggagggggctctgaccctgcgtgagcactagcccctcgtggggagcggacgggcgagggcctgcggacccgctggcacaggcagacctgggcagctcccggtgagagccccgaagggtggggacgtccttcagggaagccccacgctgagcgtgccccctcccctacagccgcgtcatgacgtaccgggagcacacagcctgggtggtgaaggcctccctgcagaagcgtcccgacggccacatcgtgagtgtgaggtgaggagcgccgatatttagcagccgttctgctgtaaaaacattattttcccctccatttaaaatacgtccttggtatttaaacagctggaaggggatggcatttcgggcagtaattaactcctgccctggaactggccagaaagatcaggcgcagcccgtaggggcccaggggccacagctgctcccctgctgggggacacctgacctg

SEQ ID NO: 32396 - DNA, 3395 bp, Artificial sequence
  DNA replication origin
atgctcttggccacggcaggccaccagccacaccgcaggagagccgggcctcgccacaccagctctcactcccgtggtcgtgggcctctcaccgccagaatgaagccacctggctccttcacctctcaataatcctgattcccgacgaacacggaaagaacacttttcaaaataccatcattgtggttgtgttctgtttgcaaaactgctcatacacgccctgcggcccctcctgggcgggactgtccacacagctcctgtctgcaccacaggcccagctgtcagccgaggtcgcatcagcatgggcggctcaaggctggagacggggctggtgtcacccggagccgtccgggacccggcagtgcctcttgcctgtatgtgaggaacgtgtggggacagagcagggagaccacgccgcctgcatgtgtgtgcccccaggtgccggccgtggtgccatctgcacatgcgtgtgctacacctgtgtgagggcacaggcatggagaccacaggtcgggctgctgtccccgcgcctgtggggaagagcagcccttcggagggaaaggagccccgtggattaaggcaggggctacctcgccaaggacctgcctcccctgtgcaccgccacagcggcccctgctgacagctctgtgtgagaggggccaaaactggagtccagagacctggaggtgcggggagggtgggctgtgcgcttcctgctcagtgatgctgccagcggccaaggacagcccggacccctgggcggcttccttcacacccgccagttggaggggcgtctccttcttcctctctcttggtttcccgaatttccagtgtcccccagctggctaggaaatgtccctgcttgcgtgcactgactgtgagaggtggtgggcctggctggggcagcgcctctcgctcgctcttggcctgatggggacagctgccccagggacccgtaggagccccagcgcctgcctctccgccagggctctgtcggggggtttttctgcagctaatgctctgattacatggaaataaagtgaggtgtttcccctttcagcgtctcagagaaacacagaacaggagagggacagaggcgccgtggccgcgggggtgcacctggatgctggtgctcagtgggaagccaccgtcaacccgagccctccccttccctgacattccagacacgacagcgaagacagacaaaagcgagtagcagggccctcctgccgtcatcagcagctaaggcagcagccaacgttcacactgcggggccgcagcagccgacgccccgtgccccggcgagtgacagcttcactatgtacagcaggcggccgtggcctggtgggcccgggtcacgccgctatctgacacgcttctccaccgagtacacggagatgtagtagtcgttgcttcccacggccaggtgaggctgcaaggagagagaaggggtgagcaggggttcaggtgcgggcagacactgcggggggcgggggggcgcaggccaacccgcatccttaggcagctcctgccggggtctcaggaacccccacgcccacctcaggcccggaaatgccgggccggtcccaccagtcctctgcagggcccatgcatggtgcactccgtgaggggcgtggcgctgccccgggccctgcgtggttttttcaggactgccccacggggcagctctgggatccaatgtcacacgtgtcagcagagctacatgcctggagcctcacaacacaaggcggcaggtgggcagaatcctaatctaaaaacaacggcctgaagccacgtggggaggctgcaaccaaggccagagagccgtgcaggtggggcccggccgcacaggggacagggtgaggactcggccgcacagcggacggggtgagggccgcagaggggacggggtgagggccgcagaggggacggggtgagggccgcagaggggacggggtgagggccgcagaggggacggggtgagggccgcacaggggacggggtgagggccgcacaggggacggggtgagggacgcagaggggacggggtgagggacgcagaggggacggggtgagggccgcagaggggacggggtgagggccgcacaggggacggggtgagggccgcacaggggacggggtgagggccgcagaggggacggggtgagggccgcagaggggacggggtgagggccgcacaggggacggggtgagggccgcacaggggacggggtgagggccgcagaggggacggggtgagggccgcagaggggacggggtgagggccgcacaggggacggggtgagggccgcacagggatggacaccccgagcgactctcctggaggtccccagggatggctttagtgcagggtctgagggcaggagctttgccccagccactgtgtgtcaattcctcccggagtgacgggactggggctctgcttccggggcgagtgcagggtggggcaggggccctagagatcctgggacccaggcaagtccctccctcaggcagccaatgggccccactgtggtgtggggtagccaggcaggacccctgctgccttgtccccttgcctcccatccctctaccccagcccccgacccccgacccccacccaccgccacactgacccagtgcgggtggaaggccaggcagctgatggcgccgacccgctggcccatgaagccgtcgtagtacttgatgttgttgatgagctctccgctgctgttgtagatggcggtgaactgattgacggagccactgtggggagagaaagggtcccggcatcactgccctcttctttgaggatggaagatgggcgcagatgccgagaccgcggggacaggccggctagaccacggggacaggctggctcggggcaggtgtgaccctctggtcactctcactgaggactcgggcctggcagggccctgagagtttatcctgggaggatgtggtgggcagacatcttttgtttttatgtccccacagcagtgaaatcctcccctgccctccttcagctcctgggggcaggaacacaagagcctcccgtttgcacagaggcccgaggcgggtgagcggtgcaggccagggaggtgggtggcgcctaccatgcgatcaggtccgcctgggggtggatgtccagggccgtcagccccttcacgatctgaagcacatttaccgactcaggcatccggggatcaaagatgcgcacatctccattgacgctgccaagagagggtcacagtgacacctcctcccggaggccccatgaggggcctggccagggggacggtggaaccaggtgtgtggggtcgcacacctgtttgcacacacactgctcaaggaaaaagctgcctggatgctcagcgtccccagtgagggctgcc

SEQ ID NO: 32397 - DNA, 1077 bp, Artificial sequence
  DNA replication origin
tggactccagttttggcccctctcacacagagctgtcagcaggggccgctgtggcggtgcacaggggaggcaggtccttggcgaggtagcccctgccttaatccacggggctcctttccctccgaagggctgctcttccccacaggcgcggggacagcagcccgacctgtggtctccatgcctgtgccctcacacaggtgtagcacacgcatgtgcagatggcaccacggccggcacctgggggcacacacatgcaggcggcgtggtctccctgctctgtccccacacgttcctcacatacaggcaagaggcactgccgggtcccggacggctccgggtgacaccagccccgtctccagccttgagccgcccatgctgatgcgacctcggctgacagctgggcctgtggtgcagacaggagctgtgtggacagtcccgcccaggaggggccgcagggcgtgtatgagcagttttgcaaacagaacacaaccacaatgatggtattttgaaaagtgttctttccgtgttcgtcgggaatcaggattattgagaggtgaaggagccaggtggcttcattctggcggtgagaggcccacgaccacgggagtgagagctggtgtggcgaggcccggctctcctgcggtgtggctggtggcctgccgtggccaagagcatcttctgggtggatggaaccctgcctggtcacatttggccagagacacacctggccctcagggggctgagctggagactgagctggggctggccgggacgtgacaaggcaggacagaggcggcccctccgctgctcctttttggaatgcgagctcccaccagaagaaggttccggcacgaatcccatccccacgtctgggccgagaaagcagcccgggtccggaaggtgtagagagtcccggcctcactcagctcacagggcgtgccaggcggcaacaccagaatcttccagaagcccagctccacccgcacacgcagcttcccatccagtccttcaactcaattcttacccaacacgcgtttctgtttgttttgagacaaaatcaccacctgtcaaaaggca

SEQ ID NO: 32398 - DNA, 2057 bp, Artificial sequence
  DNA replication origin
acccattcatacacttgctcattaactttttcacccactcattcgctcactcactcactcactcatacactcattcatattcattcattccttcagcgcctaccatgggcaggccctgctctgagaactgcagtccctttgtcatggagtttgcatatgacaagggacacaggggaatggaggtggtgctgggctggagggatgttgggtgggtagttgaggatgtggcatctgatctcaggagcctgaaccccagatagaaggacagcggggtgacagtgcagtgccaggactggatggtgggtggggcatggcagccctggggctggtccgcccctgttctcggacagccggaagcgcttggcccttgcccaggagggactgacctcacttgggttttcatcctggctgctccccctggggagaaggggtcgcggtgggaaacaggcttgaaggccacgggtcaacccggtgagagctgctggatgggcaggagcggccctgaggggaaggggcatgaaggcgaggtcagcctttggcctaagcccctgggcagacgtggcgccacttgggagatgacatcggccgacccaggggtcacaggctgcacacacactactgccccagctcccacacagccagccttccaggaggatgggggaccgtctgcattccacgggagaaactgaggcagggaggagtaaagcggcctgtgctgggtggagctggaactgccaggcaggcagctgcagcggccccccgggagtgatggtggtggccggaatcaggtggctgggaggctcacgcgcctgaggggacatgagcgcccaggaggggggccactgaggcctggagggtgtgttttgggtgagctatgcctgtggtctgaaggtcaggaaggatgctgggtgggatggcttgaagagagccaggaagggggtgagaaggccaggcttggggcaggaagaagcccggggaggtgggatgagctcacatcagctacggacacaggaggctgccacaggccctcaaacggtccttgcgtccccacacacactgcgctgggttggtctgagtgaccaagggcagaggagagtgatggcaggtcacttttgagattgggtcattaatggcacggtggcctccatcttggctgacagctggatggccacccccgggagacctgagcccggcttcctgctgagccgcttccggtctcctggcctgggagtgtgtgggatgatgtcggctgctttcagctgctgagtccttgggtcacttctcgcgtgtgatagacgatgaatgtgtgtggcacaggctgcccctggagtcagaattctgcagctcagctgctggccgggttcatctcaagcctgggaggctgccagagtcgcctccatgctcatctgagtggctgtgggcaggaggcctcagtcctggccacaggggcccctccaggtgacttcccccagagatgaggggattacagagctggaggccgggctgctagcctcgtgaccatgagagcagcgggtccctggggctgcctgatgtccgcctgtttctctgggctgttccaggcctgaatttgtgtctcacgactccgggccccttacggtccttggcgagttcttgggtcttagtctgttcatgctgctgtaacagaattcggagactgggtaatttatgaacaatggacatttctttcttgcagttctggaggctgagaagtccaaggtcaaggtgctggattcccgtgcctggggagggcggctctctgcttccacgatggcgccttgagctctgtgtccccccatggcgggaggcaggacagcaaaagggagctgaggtgtgaagcctcttacacaggccttaatcccactcacaggggaggcgccctcatgacccaattacccggaagggccccacctcttaatacgctagactggggattcggtgccaacaggggttttggagggacacgatgttcagaccacaacagtgggcaccctccctctcaggttgcactcttaacactcttaagagacttctgtttc

SEQ ID NO: 32399 - DNA, 1217 bp, Artificial sequence
  DNA replication origin
gcagtagtgtgtgtgcagcctgtgacccctgggtcggccgatgtcatctcccaagtggcgccacgtctgcccaggggcttaggccaaaggctgacctcgccttcatgccccttcccctcagggccgctcctgcccatccagcagctctcaccgggttgacccgtggccttcaagcctgtttcccaccgcgaccccttctccccagggggagcagccaggatgaaaacccaagtgaggtcagtccctcctgggcaagggccaagcgcttccggctgtccgagaacaggggcggaccagccccagggctgccatgccccacccaccatccagtcctggcactgcactgtcaccccgctgtccttctatctggggttcaggctcctgagatcagatgccacatcctcaactacccacccaacatccctccagcccagcaccacctccattcccctgtgtcccttgtcatatgcaaactccatgacaaagggactgcagttctcagagcagggcctgcccatggtaggcgctgaaggaatgaatgaatatgaatgagtgtatgagtgagtgagtgagtgagcgaatgagtgggtgaaaaagttaatgagcaagtgtatgaatgggtgggtgtgtgagtgggtgggtgagtgggtgggtgaatgggcggatgagtcaaagaatgagtcagtgaatgagtgtgtgagtgagtgtgtgtgtgtgagtgtgtgtgtgaatgagtgggtgaatgaatgagtgtgtgagtgaatgagtgggtgaatgagaggatgaatgaatgaatgagtgaaggagtgggtgactgagtgaatgagtgagggagtgggtgagtgaatgaatgaatgagggagggagggagtgaatgagtgagtcagtgagggacagagagacggagtgagggagttaaagagtgggtgaatgagtcaatgagtgagagaatgaatgagtaaatgagtgagccagtgagggacggagggagtgagttaatgagcaggtgaatgaatgagtgaatgaggaagtgagtgaataagcgggtgaatgaatgaatgagggaggaaatgaatgcgcaggtgaatgaatgaatgaatgagtgaagagggagggagggagcaggtgaataaatggatgagtgaatgagtgaggtagtgacttcatcaagccccgcaggtcccgcagccacagggcctcccactccccgtgccccc

SEQ ID NO: 32400 - DNA, 1232 bp, Artificial sequence
  DNA replication origin
gacactcacccgggatccctcagcaggcagcattgggccaagctgcccacagccggcctggaacatgggatgggaaggctgtggggatccgggaaggttccattgaggaggtgacatttggggtggccttcaaatgacacacgaatggagaggcagccggtgagaaaaggtggttcttgtgaggcaccaatgacgtggacatgacatcatcatccagctggtccctccacccaggtgtccaccagcctctgggggtcgtgctggtggctccactccacagaggtggccctaggccttctgggtgcaggaactgaccaatgcagtcaccagtggaggaagccctccccactctctgtccctcatctcttccctgaccacgcagccagcttcctcctagggctggagggccgttgggtggagagggcagccctccttctccgccttccagtcccagcctggtcagctgcagccatggtgggtgaagacccacggctgcctggcccaggagtcacacccacacctgagcccatgcctagtggggagggagggaaggtggggccgagaggcatgcagggagggaaagggccttttgccgtgttgcaggtgacttgcctgggctgcgtgctgacgcctggcttgggccaggagaccctgagatcatgaactgggggctgcacccctccttgcaggtgccccgcgtcggtggggcccagcggatgtgggagagctgccaccttctccatgggccgggggagtgtccaggcaggggctcccacgctcctggtgggatcttcagggtcagactaagcagcggtgactcagggagcagagaaaatgatgagcccgacgaacattctggagcaagtcaaaagaagcaaatcctcaaggaatgggcgagagcccagaaagtgctggtgctggacacaagtgcggggttggagggacccgtggctgcagacactccctggggcgcggcaatgggcggcctagggaagagaaggtgtcctcggaggggctgcggcagcgccggggagaagtgggctgctcccagaggagggccgggtggcccagagggaagaccctgcttgctggggaccctcagagacccgtggagtgggggcgctgggctgcagggggttaagggcgaagacatcttttgggtgcttgagagctacggtagaaatggggcaggaaggggtggcgcggggcctcggggctgacgtcccagcagc

SEQ ID NO: 32401 - DNA, 1491 bp, Artificial sequence
  DNA replication origin
ccccactaacttttgtagttttgtagagacacggtccactatgtgaggccaggctgatgtcgaactcctgacctcaggtgatccacccacctcagcctcccaaagtgctggtattacaggcgtgagccaccacacctggccagatggagtctgctagagtctcggggattttatagggacaggatgggggcgtggcaggccagggtggtctttggaaatgcaacatttgggcaggaaaacaaaaatccctgtcctcacctaggtttgtgggcacaggcggtggggggatccctagccaaggatcacgccttcctctacccagctcttccttcccccttcatgaggagcagggagtagcaagtcttttttttttttttcctcaacgtccccatggacaccaaggaaaaaagtacttcagatgtcttggtgagacaaatcagagggtgggagatgaaccccacaaaaattcaggggccccctcacctcagtgaaggttctggagtccagaggtttggaacaggtgataattattctccttttgatgttatttgttatattttttgtagagacgggggtcttgctatgttgccaggctggtcttgaactcctggcctcaagccatcctcagctgagtgcttttctttgacacttagtgaatgctcaggaaccacagtcaggatactcaggcgggaaccggggtggcttctcccttttaccctttatccccattcatgtgtttcttagccccccagggaagaatgcttctgtgggggacgcagccacgattccttggaaggagaagctgagcccagccatgctggtctcctcctggcactgatctacagacagggagcagcgcagtggaagagggaagatcccagggctgaaaggctgggtggagggcgctgctggtcgcatttcagggaacattttaaagtgcaaagcgggccgggtgcggcggctcacgcctgtcatcccagcactttgggagcccgaggtgggtggatcagaaggtcaggagctcaaggccagcctggccaatatggtgaaaccccgtctctactaacaaacattagccgggtgtggcagcaggcacctgtagtcccagctactcaggaggctgaagcaggaaaatcacttgaacccgggaggcagagtttgtagtgagccgagatagcgcccctgcactccaccctgggcgacagagcaggactccatctaaaaaaaaaaaaaaaaaaaaaagtgcaaaacgttggatatcacatcattaatgcggcattttgtgttcagagccagtgggacagtgattcctgcacaagattcctgaaagcctggggagactgaattatgttaatctaaaaggatcccacctaattaggagataagaaatttttgccttcacctgcacaggaagggtgcacggaaacacgtcatttagaacatcccgggcccgaacatcgcgggccctaacatccaggtatccgtgccact

SEQ ID NO: 32402 - DNA, 1212 bp, Artificial sequence
  DNA replication origin
ccccccggcttctctccttgcgcttcagccgcatgagatgcctgtggcttccctgcccctttgccaaccatccggctgcagggacacccactcggccccgctgaccgcctctcatctgtgtgccgtcccagagagggcactcggccactgaggaacttcagccagtcctgctctatcaggtccttaagttttccaaacgtcatcacttcagacaatgctgagcccgtgcaggcacagggattatggccttaaggcaggaggctgaggagaattagctcagtcagggcctgtgtgcctctttaagactccgcatgggaagccagtgctccctctacctgagagggctcattcccggttccctccacccacggagtctccccctcgccgtgccaaggcctgtgggtcctctcgttgctacagtgaaaggtgccccctgcccagccccactgctggggagacccaggggccaaaggcaggcaggtgtggccaggctgcccccctgtaaaacaaggtctcagtggagggtcacaggccacgtggggaacacctgttatcctagaaaaacagaaaaaaaaaagcaatcatttgtgctagtgtgtgctaaggatgctgttcccaagcacccaaaatcccagggagacctacggcagcccgcaacacgggtctgcacagccgagagcccacagtgacccttggcaagtggaaagctgtgcttgaagagaaaccggagctgagtccttaaagagaggggagggagtgccttggggctggcagggtaggtggaaggtggacgatggaggctgggtccagctgtcttgcaggcagctcgggacggtgcccagcgctgtgcccatcttctctagggacaaatgtgcccgttgtttcttttcacagcttatggactcagatgccaacgtaagattccctctttcatttacattcgcttctcttttagtataaaattaacctatttctgttgcacaaaatttagaaaagaaagcatccgaaaaagctagccctgctttcatttcggggtctctttcgtgacacgtttatctcgttacaaaaatggactattcttaacccgccctgtccctgacatgccaggcgattcctcctcctacagaagctaactttcacatgggaaaaggcaccaccaccggcccggctgtgccccggggggtcagtctggagtcgccgcaaacaaacgcg

SEQ ID NO: 32403 - DNA, 1590 bp, Artificial sequence
  DNA replication origin
ttacgttggcatctgagtccataagctgtgaaaagaaacaacgggcacatttgtccctagagaagatgggcacagcgctgggcaccgtcccgagctgcctgcaagacagctggacccagcctccatcgtccaccttccacctaccctgccagccccaaggcactccctcccctctctttaaggactcagctccggtttctcttcaagcacagctttccacttgccaagggtcactgtgggctctcggctgtgcagacccgtgttgcgggctgccgtaggtctccctgggattttgggtgcttgggaacagcatccttagcacacactagcacaaatgattgcttttttttttctgtttttctaggataacaggtgttccccacgtggcctgtgaccctccactgagaccttgttttacaggggggcagcctggccacacctgcctgcctttggcccctgggtctccccagcagtggggctgggcagggggcacctttcactgtagcaacgagaggacccacaggccttggcacggcgagggggagactccgtgggtggagggaaccgggaatgagccctctcaggtagagggagcactggcttcccatgcggagtcttaaagaggcacacaggccctgactgagctaattctcctcagcctcctgccttaaggccataatccctgtgcctgcacgggctcagcattgtctgaagtgatgacgtttggaaaacttaaggacctgatagagcaggactggctgaagttcctcagtggccgagtgccctctctgggacggcacacagatgagaggcggtcagcggggccgagtgggtgtccctgcagccggatggttggcaaaggggcagggaagccacaggcatctcatgcggctgaagcgcaaggagagaagccggggggatgtctgagccctgtcctggccgtgtggctggtggcacttgggtactcgccacctgcatgttcttgagtcggaactttttttttttgagatggagtctcactctgtcacccaggctggaacacagtggcatactctcggctcactgcaagctctgcctcccgggttcacgctgttctcctgcctcagcctcccaggtagctgggactacaggcaccgccaccacacccggctaatatttttatgtatttttagtagagacggggtttcaccatgttagccaggatggtctcgatctcctgacctcgtgctccgcccgcctcggcctcccaaagtgctgggattacaggcgtgagccactgcgcccagccgagtccaaacctttgaggtcctggcagctgctccctgacctgagcctagagtgcttgtaccgctggcaggcagcctcgagggtggacccacagcaatgccacggtggtcttccccatccctgtgatgggctgtggagtccgggtgaccctctggtggggccgcctcttgtgtggcaggatgtggagctgagtccctggcttccacccccagacgtgtccagacagcaccacctgtcccctggaaggcaaccctgccccatgaaggacactcacggagggccgcccggcctccatgcctggcg

SEQ ID NO: 32404 - DNA, 1679 bp, Artificial sequence
  DNA replication origin
aaggacactcacggagggccgcccggcctccatgcctggcgctcagtagcgtggccagggctcccagtgtgggctcggtgacgccaggccctctctctcttggcagcaactgaagcagcagcgggacaagctgaggcagtaccagaagaggatcgcccagcagctggagcgcgagcgcgccctggcccggcagctgctgcgggacggcaggaaggagtgagtggggcccgggcagcgtgggcaccctgtcggctggggtggggggcccgggcagcgtgggcaccctgtcggctggggtggggggcccgggcagcgtgggcaccctgtcggctggggtggggggcccgggcagcgtgggcaccctgtcggctggggtggggggcccgggcagcgtgggcaccctgtcggctggggtggggggcccgggcagcgtgggcaccctgtcggctggggtggggggcccgggcagcgtgggcaccctgtcggctggggtggggggcccaggcagggccacagcgggtcactctcgggcttccctctgcagacgggccaagctgctgctcaagaagaagcgataccaggagcagctcctggacaggacggagaaccagatcagcagcctggaggccatggtaggcggccgggtgcttcgccctggagtgcaggtgcagctggaggcagctccgcccggctgcgtggacatcagaaatttctcccgagagctgaaagctcctctcagatgcctcgggctgaagctgacctgaagaggggcgggcctggaatcccggggagtctgccaggaagctaatggtcttaagaggctggggggcaggttggctctcgcaggactgaggtggggaaggttgggccacccctgggtggtgtgggtaggtcaggggtctgcatggggactgagtgtccctggtgttagggacccgagcggcgtggttctgctctttggtaaccagagctactaacaagcaaccagcggtcccctgagtgtgtccctggcacctgctcagtcctgcgcatccccacctggcagtgggagaggacagggaggagcaggtgtcaggagtcaccctcacgcccagcagcacccgcccagcaagggtgtcatcctgaaccctgccccagggccgggaggagggcaccccggatcctcagcacctgcgtctgctctggtttccttttcaggttcagagtattgagttcacccagatcgaaatgaaagtgatggaggggctgcagtttggaaatgagtgtctgaacaagatgcaccaggtgagtctctgcagggccaggggcatggaggtgtggggagcccattgggctggagctggggatagggcggggggcttgtcccacggtgttcgtgtcagacacagggcaagaggctggcaggggagatgtgttgggtgctgccaggcaggcagggatgcagtgaccgggtgcagcacaggctgggaactgtgggaactgggtccccaggcgccgaagtgacatagaagggaagtctgagggtggggagggggctggcaaactaatcacagaaggcttcctggaggtggcgggtgtggtggctcacacctgtaatcacttttggaggccaaggcaggcagatcacctgaggtcaggagttcgagaccagcctggccaacatggtgaaaccctgtctc

SEQ ID NO: 32405 - DNA, 954 bp, Artificial sequence
  DNA replication origin
gtgtcttcctcacagacgagcgcgagccacgcggggctgggactgcaggggaacagcaccagaggcgttgggcctgggcctcggccaccgggggagcccacaaccggcagaagctgggctcggtcgagagttaatccggactgagagcaggccagtggcgcctgagtgcgttcaggctcaaggtctccaggagacgctctggagtcctcctgcaatgcgcctgcgtggctgcagctctgctcagcaccgtgcgcactgggctccagggaacccggtcaggggctggccgtgacccaaactctctgtgggccacagtccctggggcatccccgtgagtcccacaagacgaggccacgttacgaagctgccaccagctccgcctgcctgggcctggccttgacagggacgttttctgtggaggaaacagagatgtttatgacacgccaaagacccacaggcagagacctccagagagggacgaggccacaggggtggcaagggccagttccggggacttcgcactagggaagggcacgcccagctctgggggaggcaagtgacaaacaggaagccaatggggctgacagacagggccagggacacgggacagtgggccaggaaagcacagcccctcccagcgggactcagagaggagaagagccccaaagatgggtaaaggaacagaacaaacgtggatggacggttctaaagtcagcttcccagtgggcaggttggagagcctgtgctgaatggtgccacggggagagccatccctggctgagggctaatcctgggctacaccctgggaatgagctggtgctgctaaagaagcctttccccagttctgatttctgaatgtgtctctttgaatggggtatggctctcttatgaggttgcccagttaccgaacccctgggaaacccaagcccaaccccaaggccaggcacgcacgcc

SEQ ID NO: 32406 - DNA, 2001 bp, Artificial sequence
  DNA replication origin
tgccgcgcaccgggtgctcactcctgggtccgcccggggttcgcccgggggcccattgcaggcagccaggggctgacccgggtcgctccggagcgctggggccaggggtgcggattcccggggagcgcgccgggtggtccctggtgatcccgggaaaggcagcctcgcgccccgcgcagccgggtccagccgcagccaggaagggcgggggggcgggggtcgaggggcggagggggcagcggtcccggcccccggagccggtggggttgccatgacgacgcccgtgcgccgccgcctgcttcccgcgccgccgccccgggaagggctgggctgggctgggctgggctgggcagggttgggcggggtccgcggggcgcccttccttccagaagcgtctttacccgaggttgggggggtgcgagccccactcccgggtggggagcggaggccaggcggggatgtctcgggtcccacggtccctcccgcagggcctggggcagcgccgctgaaacaacgagaacgcccacccccaccaaccccgccagagcccccgcagagcgcctggggcctcgggaggcggctgagaaaggcgcagctcagggtcaccggagagaggaaactccgctctcacagccccgtggccatgtccctagcagctccgctcgcagccagcgaaaagcagccagatgtgcatcgacgaacagcaagggcggcaccgggagtattacccagcaggaaaaagggacaagcgtttggcacgtgacaacttcacaaggacaaagactttgtgcggggagaaaggcgccagaaaggtgacccatggtcggcttctgtttttgtgacattcccggaaaaacactatgggttggaggacagatcagtggtcaccaggggctggtggggttcggggggaggggcaaccctaaagggctggcgggagggagtttcaggggtgatggaaggttatggtgttggttacacgagtccacatgtgctgaaattacagcagtgtacgacgtaaaatcgaacttctgttttcctgtgtgatcttttttttttcagatggagtcttgtattgttgcccaggttggagtgcagtggcgcgatctcggctcactgcaacctccgcttcctgggttcaagcgattctcctgcctcagcttcccgagtagctgggattacagacatgcgccaccacgcccggctaattttgtacttttagtagagacggggtttctccatgttggtcaggctggtctcaaactcctgacctcaggtgatttgcccgcctcggcctcccaaagtactgggattcccaaagtgctgggattacaggcgtgaaccactgcacccagccgtcctgtatgatcatttaaaaaaatctattagcctgggcaacatagtgagaccccatctctacaaaaagtaacaaaaattagctggatttggtggcacacacctgtagtcccagctactcaggaggctgaggtgggaggatcgcttgagcccgagttccaggctgcagtgagccataatcacaccactgcactccagcctgggcaagtgagaccctgtcttaaaaaaacaaacgaaaacccaaactatcagtgctgctcccaacatctgtctgctggcggcctggagtggctgctggatgctgtcgagttggatggaccctgtctctgcagctcagcaagtactggagctgcactgttctctccaggatgatgtaaaacaggtcatggtttcacttggggtttaattaccatggtcattctgttcagtgtggttattgctccttccacactttctgccatggtttgaatgtttgtcccctccaaaacctgttgaaatttcattgccttttaacagtatcgagtgggaccttcagagggtggttaggccatgaaggctgcgccctaacggctgggattggttataaaagggtggggtggctcccctcctgccttccaccatgtgatgacgcagctggacggccct

SEQ ID NO: 32407 - DNA, 1013 bp, Artificial sequence
  DNA replication origin
ggtaaagacgcttctggaaggaagggcgccccgcggaccccgcccaaccctgcccagcccagcccagcccagcccagcccttcccggggcggcggcgcgggaagcaggcggcggcgcacgggcgtcgtcatggcaaccccaccggctccgggggccgggaccgctgccccctccgcccctcgacccccgcccccccgcccttcctggctgcggctggacccggctgcgcggggcgcgaggctgcctttcccgggatcaccagggaccacccggcgcgctccccgggaatccgcacccctggccccagcgctccggagcgacccgggtcagcccctggctgcctgcaatgggcccccgggcgaaccccgggcggacccaggagtgagcacccggtgcgcggcaacgatgatcccgcaagggaagctcacgggaggcaggagctgtggcagccgccccaggatggggcgcggggagcgcgctgagctgtcctttcccgcagcggccccgcggttgaagcgtgggcttgggttttggtttttcttctgtggcaacagttctgttgagatattactcgcctgccatacaactcacccattttaaaagtacacctcaggggtcctgcgtgtattgacaaacccgccgccgtcaccacagccaatttcagaacattttcatctcttcaaaagaaaccctgtacccttcagctgtcaccctcctggtccccatccggtcctcgtcccgccctcagcagccacgcactgcctgtaaagtcccctgtcctgccctgtaggtggaatctataccttggggtctgttctgacgttcacctaacagcctttccaggctcagctgtgctattgtatggaccagggggttgttttgtttttgttgtttgttgattgtgtgtgtgtgtgtgtgtgtgtgtgtgtgtgtgtgtgtgagcctggcgtggttgcgggcgcctataatcccagctgctcaggaggctgaggcaggaggatcactcgagctca

SEQ ID NO: 32408 - DNA, 1476 bp, Artificial sequence
  DNA replication origin
agtcttgctctgtcgcccacgctagaatgcagtggcacgatcttggctcactgcaacctttgcctcccaggttcaagcgattcccctgcctcggcctcccaagtagctgggattacaggtgcccgccaccacacacagctaatttttgtatttttagtagaggcggcgtttcaccatgttggccaggctggtcttgaactcctgaccccaggcgatctgcccaactcggcctcccaaagtgctgggattacaggcgtgagccaccacgcccagccgcatttggattttataataagctttgctgtgcaggagaagtggtccctggcatcccagccccctggcctgacgaggttggagggctccttgggcccccaccactctgctgcagccagggtgggtgcagggctgggagggtgagccacgaacttgacatcggtgaccttcactgccacctggtggacagcctgggagtggtagctggtgggctgcgcggcggaaggggtgcagtgtcccggacgaagacggctgagcattgtggagaccagcatagagaggccacagcaagtggggtgtgacatcagggacaagggagaggtcacagactcggatagtggccgtcctgtgctggcccctgcatctgggtggttggcaggtggagcaccaagatacagggttgataggactaggctggaatcctggactctctctgatcccggcaaagtcacagaagcttctcctgtcctgtcgctggtctttggaagggaggagtgacaccctcctcctgggctggcgcggggaagagaagctcccgcgtgtgaaacagctccaccaccaagcgcctgcagacgagcggtgtgttccgcctggaacctgccgagggaacgtgtggggaaggtgtggccgccctgggaggctcagctctgcaggaaattcgctccttctgatgtgcgtttcaaacggccctacgacatctttttcttaaattgaggtaaaattcacataacataaaattacccattttaaagtgttctgttcagtccaatgtggtgccattcagcacattcatgatgtacagtggcaactccaccttgttccaaaacattttttgagatggagtcttgctctgtcgcccaggctggagtgcagtggcgcgatcttggctccctgcaacctccacctcctgggttcaagcgattctcctgcctcagcctcccgagtagctgggattacaggtgcctgccgtcacgcccactaatttttgtatttttagcagagacagggtttcgcgacgttggccaggctggtctcgaactcctgacctcaggtgatccacccgcctcagcttcccaaagttctgggattacagacatgagccaccgtgcccggcccccaaaacattttcatcaccccaaaaggaaaccccagccactggcaatcactggctcttccctggccctagtggcccctcccccgccc

SEQ ID NO: 32409 - DNA, 995 bp, Artificial sequence
  DNA replication origin
attcctggattaaagcacttgtaatcagtaaccagaaagttccagagcgggagagaccggaaggcactggagtgctatcggacgggtgtctggggcagagccaggagggcgagcctcttctctccccgcctgcccttgctcacttccccctccatgccaggtgctgtgggagcagctgggcctggccggggtcggcgggtgaagctatccgcatggtgtctggagcaccgtttctttgcttcctggatgggctggatgggctcccgtgttcttcaccaatggcagcgttaccagcaccaatggcagcgttaccagcaagaaggcaaaggcaggagcacatcgagggtgggagccagggctgtggggtcaggagtcccgctccttgccgcgggaagcctggctcagccacctccagcacacttcggctttgtccagcataaaaggcagagcgacgttttcactgcaggctgtttcccaccagggcaagtgggacagggcgagtgctgacgtctgcaggcatggtgtgcatttaggggtgggcggcaccgagggggcatcatttggcataggcgggcccgggggccactgggctagatgactggctggttgctgggggcaggtgtcacagcctctctgagcaccctctaagtggaggacagaacattgttgggaggagtccaggcataaagtgacataaacagcgcagagaatgggaccagcgcacctgagaggtgatcattagcctcagcaactggatgggacattccgaagagctcccagccaacacagatggtcactccagaggctgacatttaaaaggaaggggcccggccgggcacagtggctcacgcctgtaatcacaacactttgggaggctgaggcgggcagatcaactggggtcaggagttcaaaaccagcctggccaacatggtgaaaccgcatctctgctgaaaatacaaaaaattagccaggcatggtggtgggcacctgtaatc

SEQ ID NO: 32410 - DNA, 1638 bp, Artificial sequence
  DNA replication origin
aaccgccaggccccgcccccgcaccgccctttccattggtgggttccggagaagggggaggggggcgggatcggaggtggggcctagtggccgactccaggcagcgattggtctgcggcggcgtcgatcctgggggaggagaggggaggcgcggcgcgggctggggccctgggagcagcctgagggggcccgggcaacagccgggctgggggcggggaggcgggggcggggtggcgcaggaagaaggagcagaaggtgcggggaggagagcggggggcgccggcggcagcgcgcgtggaggcggcacttcgcgaagtggcacttcggggcgggcggcccgccgggtcgcggcctggcgctgcggggcggggagcggctcggacgcaggacgccgcgggccgggcttacaggtgggagaggccccgaccccgccgcttcgcaggtaagcccgccgggcgggcggcgaccccccggccggcccctcggggcagagaggagaaccctgggggagggggtgctgcaggaggaccctggagagagctcggccctggagtgggggacgacttggagaaggaggatttcgggggagcatcgtgaggagaggacttggagggaggatcctgcagaaggtgaactctggggaggaccccagacaggcagacagcgcttgggggcttggggccgggattctggagaggggaggaccctgggagaggagggttggggaagaggatcttggaggagggccctgggaaggaggatctggagaggggacaggggagtgtcctgctggaaggcctggggacagggcgacccttagggacggggaggaccctcctgccgtcagaagattctcgttggaggcagtttactgagagagagaggtctcgggaaggaagggtcgagggcagtaggaaacgaggggcccggaggactctcatgcggtggaaagccctagggggtgggggaaccttgtaggaggaatggaggagtcagagctgcctccaatttttaggaagggtcctgcttaagggtcctcccaaggggagattctgccggggaagctggccgagttggcacacaggtctcccggtacaattcccgtggagaaatatttacataaattaggctaacatagaggaattatttgttttacgttgtgaaacaccagatctgagcgtttccgtttaatgaaacctctcagtctcccagcctcccatccctgcaaaatcattcattcattcattccttcaacgagtcaggcccctgggggagacgcagttgtgctggctggccggcagatccccagactggcacgggctcaggccgatggaaagaccagggaagtaagattcaggaagcattgcctccctcccaccacagccccgcgcctcctctcctccggctgaatttccttccagctactggccctggctgcttcctttttctttattgtctccagtgtttgggggtagatccctgtgtatttattttctaggattcttttggtggtaaatgacagaaagctcgctcaaactggccctaacaaatgagggcatttacctgaaggtaggagcatctccactgaccctgacccccttcttctaggccagcttcctgctgtgttccctgcaccca

SEQ ID NO: 32411 - DNA, 900 bp, Artificial sequence
  DNA replication origin
ccccccggcgccgagctgagcccgctccgtgtgcgcctgggtcgcgcgccgcccgcgcgcccgagcccgaccagggcggccccggggccgcgcgccgggccaggaggctgggactttgggggtcttcccggcgcggccacccgggacccgggctgctggggtggtgagcccggcgccggccgctcacaggtggccacccccgcccgggcccccccatcccatgcgcgccgcggcccggtcagtccccagccccaggcccggggagcactccccgctccgacggccctgctcggcccccgcgcgctcgccttggcgtcggcgggaacggagccgcgcgccgggccccggaagccctcggaccggtcggggtcgtagcacacccgggcagggccggggcggcgggggcggcgggcccaggggttgcggcggccaggacggcatgggggctgtctgaaggccgcggtcggcgcggtggcaccgtggggctcctccaggcgcggttgcgcgagcctcgggcacttcattctcaacaggctttcccttcccacaactcctgcccggcgcccatgctggggcctaaggtgggaggtcggagcgcgggcaggctggatgggtggacggataatctatcatcttatgtaaccgcggagagagaagactaattgtgtaggaggctgacgtgcctgcctttgcttcagatgtgttaagagtggcatccacgttctcgtctgcgaaatgacaggttcacatccaagggccgcagagcaccgctggaagcctcccctgccgccccctccccagtcgtttttgtggctgggataccgacaaacaggcccttggttttctctttcttcagcatccgttctcggtccagacccccacgcctgagcccggcagctg

SEQ ID NO: 32412 - DNA, 1106 bp, Artificial sequence
  DNA replication origin
gggccgtacaggcattcctaagctgcctccctgcttgctcagccacggttgctcctccagccgtgagcccagcccgaaagaccggccagtgccttcacagggaggggatggatggggcagcggcctcggggattcttgcaggccaggcggtgaccagacttgggtctgcgattggcggtaatgagtgacctagtgaccgggcctttccacgttggagggggaccaacacggcgccacagactggtgtgcccacaggacggccgtggcacctggctcgtccctatgttatctgtgccctctttcttgtaaggcgctggtcctatgggattagggcccgccctagtgaccccagttacttttatcgccttcctaaagaccctgtttccaaacacagttgcactgcgcgatgccggggcttagaacttcaacacgtgcatcttgggaggggacacagttcagccgtgacacccagcggaccccacccgtgacggagtgcagtagctgctggaggggccgagtctcccatgttgcctggaggtgaccacctgtctgtcttcaggctgattgtattacgagcctatgatggttttcccttccaacctcagtcagatcgcagcccgcagtttatgacaacaggaaggtttccacggggacagctgattctattggacgagcagtcagctggcaaggcgccagctcagtgctggccacaggcgaaaggcagccggaatgcaccgtcccgtgtgggccggacaccccgtgaggctgagcagttgctaagttctgtgacccgggccagggtggctggacattggaaggtgtgtgtaaggggctctgtccccattgaagctgggataggcaggatgtgcctctcggacaggaaggaagtggccagactgcttggtgctgtgtttggactttgctgggctgcggctcctcctgcgtgggccgggtcatggtgtcctgcgtgcaaggccccacgtgtggcttttgcccttgtggacctctgctccttgggacctcgttcaggagggctcagacttggggcccctgagagttgaggacgccaggggaaagctcgcagagggcgtgcaggtgtccaaggc

SEQ ID NO: 32413 - DNA, 1061 bp, Artificial sequence
  DNA replication origin
ccacctctgcaactgatggacacggccctcccatttgtaccttcagaaatgcatagctggggtccctgggggctgtagtagggacagctagggtccctgctgtggtcaaggcctggattccatgcgactccagggccactgggacatccgtctctgtggacgtcccagcaggagggcagccaagcgtgcgggcatccctgggcagggacccctcctctcccggcacttcgcggcatgcgtcctatgaggggaagccttccatggcgtgtgtgggagcccctcgtgggccggaccgccttcatgggcaggacccccttcataggcaggccggcccaggaccccccctggggtgggaaaggtgttccctggtcaatagtgaatgaacaaacgaggaactggaagtccgtgccggcccgggaacgcggcccagggagccagtgcgtggtcgccgggggcacagcagagctctgcacgcgccgggctgcgtttgtactgcacaggtcctggagtttgaggagtgtggtggttgctcatggtgtaggatttctgtcctggcaggggggcatggggtcacagaacgtgggcccctggggagctctctctgtgcctgtggccccccaggagtctctcagttttgctgtggtcttgaggatggcacagcgtgtccctgagcgccctcagtgtggacagctgggcttcaaactcacttcagagccgccgtgtgggggtggcgcctctgagggcttgaggttattttcttgtgcggtttctctctcctggcctaggtttttctgggttttttgcacctcttggtgttgataagaaacaagctcccttccccttttaaagcccacagactttcccgatctcctccccatcccctgccccagcactgtcagggcgtctgggcgtctgagctcagctccttcctggtggcatcctgcaaaaagatacactcgctcagtgactcggaaaagccacgtcggtgtggctgagaacagagttctttccacctggggccgctgctgttggttttcattccggaagagctggagctgcct

SEQ ID NO: 32414 - DNA, 1224 bp, Artificial sequence
  DNA replication origin
atcacaggaagggaagccgcccagccctgtcgcagacaagcaggaggctgtggggccccaacccacccagccccaacctgtgggctagagagtggggagggaagggcaactgcatcccccaccccctctcccagcacctggcctcagcctccgaagccaagagaacagatagaaagggcatttagggacaaggaagccactccccaccacgggacctgcctccagaaaacccgctatttgacgagtgttccatcccctgccctgaggtatggccagggtgtgtgttcttgggaaacgaggccccgagttctgcactacgccggggctcacagcaggccgggtacacctcagtcctgcctatactggaccctccggtggtaacgccacccggccaagttccagggcaggtgctccttccttccaggacgcagcaagggtgagggcgcctttgcgtgctagcccagaggccacgtgcacgggggtgggggatgcagcatcgacccagccgcaaagccctgctcgcacagagccaacatctcccgagggaaggcaggactaggagggccagcgcttccgcagaagtgggataggcgtgctcagcgagacgtggaaggcaggcagggaagcactttccatgccagagagcagtgggcagaccagggcagggcaaaggccccgaggcagggcccatggtgagttcctgggaaagcaggacccggcgtgagggtggaaggggcccaggggaggcaggaagaggaagaggtggatgtgctaatgggatagcccctgaggcccggctgcatgaagctaaggagggtctgagcagaacgatgggccagctacatttaagagattccgctgggtcagatgcggtggctcgcacgtataatcccagcattttgggaggcagaggcgggaagatcacttgagcccaagcgttcaagaccggcctgggcaacgtggtaagaccccatctctactaaaaatttaaaaattagctgggtgtggtggtgcatgcctgtagtcccagctactcaggaggctgaggtgggaggattgcttaagcctggaaggtcaaagctgcagtgaactgtgattgtgccattgtactccagcctgggtgacagagtgagaccctgtctctaaaaaaaataaaacaggccggacacggtggctcacgctcgtaatcccaacgctttgggaggccaaggcaggcggatcacg

SEQ ID NO: 32415 - DNA, 1507 bp, Artificial sequence
  DNA replication origin
ttcttagccgggcatggcagctcacgcctgtaatcccagcactttgggaggacggggtgggtggatcacctgaggtcaggagtttgagaccagcctggccaacacggtgaaacccccgtccctgctaaaaatacaaaaattagctgggcgtggtggcgcacatctgcagtcccagctactcgggaggctgaggcaggataatcacttgaacccgggaggcggaggttgcagtgagccgagatagtgccactgtacttcagcctgggtgacagagactctgtctcaaaaaaaaaaaaaagtaaaaatggtgaattttatgttatgtgaatttttctcaattttaaaaaaagagcctaatgctgggaggacggatgcttgggcttcccgcccgtcctgaggctggtggtgctgagtatgcgggtggctgtgggagcgggtgccgtctcaggtgcgagccagacaccgtgggtgcgggtgcaggtgtgggtaccgttttgggtgggagccgggcgctgtgggtgcaggttccacctcggagctgggtgctgtgggcacaggtgcgggtgccatcttgggtgggagccaggcactgtgggtgccagtgccatcttagatctgggcactctgggtgcaggtgccatctcggagctggatgctgtgggtgcgggtgccgtattgggtgggagccggacgctgtgggtgcaggttccacctcggagctgggtgctgtgggcacaggtgcgggtgccatcttgggtgggagccaggcactgtgggtgccagtgccatcttagatctgggcactctgggtgccggtgcgggtgtcgtcttgggtgggagccgggcactgtgggtgcaggtgccatctcggagctggatgctgtgggtgcgggtgccgtattgggtgggagccggatgctgtgggtgcaggttccacctcggagctgggtgctgtgggtacgggtgccgtattgggtgggagccaggcgctgtgggtgcaggttccacctcggagctggatgcagtgggtgcgggtgccgtattgggtgggagccgggcgctgtgggtgcaggttccacctcggagctgggtgctgtgggtgcgggtgccgtattgggtgggagccgggcgctgtgggtgcaggtgccatctcggagctgggtgctatgggtgcgggtgccgtattgggtgggagccgggcgctgtgggtgcaggtgccatctcggagctgggtgctgtggtgcgggtgccgtattgggtgggagccgggcgctgtgggtgcaggtgccatctccgagctgggtgctgtgggtgcgggtgccgtattgggtgggagccgggctctgtgggtgcaggtgccatctccgagctgggtgctgtgggtgcgggtgctgtctcgggtgggagctgggcgtgtttgcggctgttggtgtcatctcgggtgggagctgggcgtctgccttcctgtactgcagcctccgctcctctctggctgtgctctctgctg

SEQ ID NO: 32416 - DNA, 880 bp, Artificial sequence
  DNA replication origin
cgtgagaaggaagttcgtggggaggatcagacaagaggtcaccgagcggagactgggagcccagaaagcaagaccagcgtccacggggacagcaagatcagatccacaggtcacgcctttcggaacagggtgtgcccaggtgaggggccagcacggaaccaggaatgagaagtaggcctgattgctgcccttccaccttggagctgcctgagtgcccacccgggtgtccccgtgggatggggggatggggggatggggggatggggggatggggggacggggagaatgtgtcccagacaaacgcggaagctttggaaaaccctcagccctggcaggtgctcttgggcacaggaaagacaggtagtcaagccagaccctagaaccagggcagccagcaggcggtccccaccctgacccggcggtcagccgctcggcagcccttgcgtctgtggccctggctctgaccatggcggctgtcacgtcttggccactctgtgcttcttggtggacacacagtcggcccagaaagggttccagcaaagacgacagaagctgctccagccaaaatgatttccccaaaaggaaaactgagtctcaacctgacagagcttccagatccagctaccgattctgaacacaccaggacggagggtactaagagctttagtttgggaagatggaaagttctggagatggatggtggtggtgatcgcacaaccccatgaatgcgctaatgccgctgaactgtgcacttaaagatggttaccgtggtcaactgtattagttacgtgtattttatcacaatttaaaaaaaaaaaactttaaaagaagtagtgcaagcaaagccagaccaagaaactgtagctgagcccaggcctct

SEQ ID NO: 32417 - DNA, 1406 bp, Artificial sequence
  DNA replication origin
ggagcactggttctgtatcacgtgcgtgtgtgtgtgtgtgcacgcacgcgcacgtacatgagagtgtggtgggtggggggaacaagtgtcaaggtatagcccgtggatccctgcaaccctttattttagaaagacatgaccagggcctccctggtgggcttggctccggaactacatcttcgaaactcttgaaatgttccagaatgttccaggggacacatgtgatcccatcccaactcctacccatggactatgggtgaacaggggcctgctggccctgcctgttcccggtggggagtctggcctctgggccttgcctgctctgggggctaagtcagcctcctaggaggggatccccttgctcacatcggggctcaggatatccatggagggggctgctgcagcccgtccctgaggaactcgctcctggttcagcagggccaggcttggtcctgggacatggcggatcccagggcgggattcccccacaaggaacgacaaggctggggatgccggaaacacagggctgcaggactgtgctgggggacgcctagcgggagacacagggccgcaggactgtgccgggggacacctagcgggagacacagggccgcaggactgtgccgggggacgcctagcgggaaacacagggccaagagtctaccggcccaaggaggggccctcaacagatgacgggcagaggggtctctcagaggtcacgagggcagcagcatgtggccaccacccaaggccccacctgggaccacagtggctcaggggtgcaggcagaggtggtagaggcacaggtcaccaagagcctgggagccaggggaggaccctgtgaccaggtttgagtcccagggaggccactctggagcagtgagggagggactggggaggccacctgagagccaggcagggcccctggctacccaggaagcaaagagatagggcaggtttgggttgggtgaggggtggcaggtccacgtacgacagccgagctatggcagctgctggacctggggccagtgtcatggttgtcttgggtggcctaggggcccagtggcacagtggtcttgggtggctggggacccaggcttggggctgggggtcctcagtgcctcgggtgagcagagccatgagcccagaggctgtaccccaggactgtggatagaggggccacaggaagagcaagtgaggacacagaggccacccaccaggtgtcccaccgggactccggcacccagcacggagcatgaccgtcccctgcctggcgtcagcctgcacctgcccaggacatggctgtggcagaagagccaagaacattctagaagaatgttctagaaggccttgaaagcccatcagactctccctggttgcaggtggcaatttctaatgtgagtctt

SEQ ID NO: 32418 - DNA, 1388 bp, Artificial sequence
  DNA replication origin
tttgggctgggcagccttgcggtcagcccacgggctgtagtcctcgccatccgggcctgtgacgccgttcatgatgggtgtgctctcctgggcagacatccgctgcagggaagcaggcagagcaggctgttgctggagcccaccccgggcaagaccagggggaaagagaaccctccgccccctcagcaggggcccctggactctgcaccctggcggccccccgccctgacaacaagctgccctcccacccacacccgtgaagctttccagaggccacagactcacccccacgaacggtgccagctcggggggcaccggcaggggcttggcccccggaatggggtcggaaatgaccaggttggacttggaggccgacagggcgctggggagggtggcgccgttgctggccacctgctgcatgagctgcaccgcgcgctccgggatcttgctggggtcggcacaggcctgttgccacagcggcagcttctgcgccagcagctccttgccctgaagtggaagcagcaggaagggaggggtcagggccggctcagtctcctgcagccaggcacagcgctgagggccctccctgagcactctctggggctggaggctgctcttcaccaggtggtacctctcggcgagacaggccacccgtgagcctctgaccccaacccacagaagcggctgccggtaaagggccggggatggaccacaagccatgcagtcgggggacctccagggatgagagcaaacccaggctcaacgcccgcggggcccatcagggcctggaggaaggaggaacggacagggacgcacaaggtcaaactccggtgggcaaaccccaaagtgccaggaaggcgccccagatggccgggggagggggtggtgctgcccagtgggggtcaggcctggctgccgagggcaggaaggcagccccgtcagacacactgaggctcactgctccaaccactgcccttgggcccaagagcccgcgctccctcgggcgtactctgcggcctgctggacacagaccagctgagcacagtggggacaaaggaggaggaagccacaggcatggagaaaggttctgggactgggagccggccgggcctgggtcctgggagctaatcaagtaacccctgcccctcctggccatttggcctaagcaggctgcagggcctggattcccgggacccccagacccttaagctgtgggccagaactgctatgtctctggcacctctgggggcctctccggctttcactgctccccccaactcatccccgttcccttctacatgtggctgggcacccacgctggggacccacggaggatgttggacgacagccattctgagcaagtcctccccatgccacccctacccctc

SEQ ID NO: 32419 - DNA, 1285 bp, Artificial sequence
  DNA replication origin
ccctgatgggccccgcgggcgttgagcctgggtttgctctcatccctggaggtcccccgactgcatggcttgtggtccatccccggccctttaccggcagccgcttctgtgggttggggtcagaggctcacgggtggcctgtctcgccgagaggtaccacctggtgaagagcagcctccagccccagagagtgctcagggagggccctcagcgctgtgcctggctgcaggagactgagccggccctgacccctcccttcctgctgcttccacttcagggcaaggagctgctggcgcagaagctgccgctgtggcaacaggcctgtgccgaccccagcaagatcccggagcgcgcggtgcagctcatgcagcaggtggccagcaacggcgccaccctccccagcgccctgtcggcctccaagtccaacctggtcatttccgaccccattccgggggccaagcccctgccggtgccccccgagctggcaccgttcgtgggggtgagtctgtggcctctggaaagcttcacgggtgtgggtgggagggcagcttgttgtcagggcggggggccgccagggtgcagagtccaggggcccctgctgagggggcggagggttctctttccccctggtcttgcccggggtgggctccagcaacagcctgctctgcctgcttccctgcagcggatgtctgcccaggagagcacacccatcatgaacggcgtcacaggcccggatggcgaggactacagcccgtgggctgaccgcaaggctgcccagcccaaatccctgtctcctccgcagtctcagagcaagctcagcgactcctactccaacacactccccgtgcgcaagagcgtgaccccaaaaaacagctatgccaccagtaagggctccgctggggtgttgggctggggtccctggacgtgcctcctcagaccctacagtcatgccacaaccctcaataggggcctgggagaccctgaggctcacaattatgtgaccgtgtgtacctacatgcatgtggtacacacacgtgtgcctgcccagcatccagctccctcttgtcaagcctctggtgctcagtgggggcatgagtggggtacagggttaggctcatgcaggcagcagccacttgggagcaggtagctgctgctgcggagagcttagccagcccacttacccacctggggcacaggcggctgtgctctcagcacctcaaccagactccctgggctttgctgccccgccagccaggggcagtccccttacctgtcccttgtccca

SEQ ID NO: 32420 - DNA, 1439 bp, Artificial sequence
  DNA replication origin
cctgagaccgcaggctttctgtggctttcagctcttccacatgccagacgggctctccagtttggagttctagaagtcacctatggagtcagatgggccacacctcctcagtttactgaatgctgttgcagagaggctgggccagggtgccaccctcgctggacctgggggctgcattcccagggctgtgtttgtgcgggtgtgtctcttggcaagatgggaaaaggccctgacatttgtgccttcctaagcttggccttgcagccatcactctgaggagggggccgagggcagggggtctcccaggaggctgctccatctttcttccagtggccactccaatcttggtgccatccgtggcttagcgtgacactggggctgcgaggcaggagcaactgctctgcccgggctctggggccttgcagttgggtctggtggggccggcagctcccaccaggttgaggacagcccgggccaccttgcccttgaggctgagcacacagtgggagcgggctgcggtctttgtctccctggagcactgtctctgttgctccagagacagccgcgcagccatgctggggagctagagggacttgtgcatggatggtggtcggtgggggatggggagcctctgggctgagcgtggctcttacctggggcctctcttccaggcggggctggtttcccttctcctacacccgggtcttggacagcgatggcagtgacaggctgcacatgaggtgagctctgggcccaacgggagtgtaagatccccagctcgggagaggggctgtgatgacaccaggtccctgggcttggattgctcggctgggcttccggctccttgtctgctaccgcagggccatccccagtggccctgagagctggacgcttgaggccttcagggtggaggcatggtggtgccctgtgcagtggggcccgagagccctggggacaccagagcaggcagcaggtgctatgggggcagctcctgggggccaggtgtgcaaggacctggctgtcccaggtcctccaggttctcccagccttcagagaatcgcagctgaaagcggggtacatggctactgggagggtcaggggttgctgtggcagcccagcccctctggagtcctcccggcttagcttcatggccaggaggaggaagggaggccagactggcccggcccatggtccccagggctgccgccttggcctgagagcagcctccccgcatgtggcgtgggctaggtgagggcgggcagtccagggagccacagggttgtggggtgttgggggcatccggcctgctgggccgcctctgagtccctgtccctacagcctgcagcaagggaagagcagcagcacgggcaacctcctggacaaggacgacctggccatcccaccccccgattacggcgccgcctcccgggccttccccg

SEQ ID NO: 32421 - DNA, 1131 bp, Artificial sequence
  DNA replication origin
acagatgatgacagaacaggctacatgggaagggcgggggaagccaccagatgggcagcactgcagatgtggccatcagctgaggaggggggcagacctgtcgttggtcactgtcggcttcagctggacgtgggcaaagggattcctgaaagagaaaaacgtggttttaatttttagggcggaagccatgggtgaattgtgccacctgggctgcccgatgccccagggattccccagtgctggatgcctacggtccgatctcagggcacagagctcacagacaatatacgctgctttgcggggcagggaggaccaggcgctgtctgcaaggctgcctgacccccaagtccactatgtgccctagacaaggcagggtgcccccaccccgatccatcaccctcccagcagtgtgggctgggcagggcagggcggggtggggcggggcaggccagccacaacctcccagtgaggggcggacatcaccactgaggctggggattcaagacaggcctgaaccgggcacacaccagtttggtggctcccccaccaggccaggcccacacccagggacacagcgtggcagagcgtccagcccagccctggcatgggggcatccagagaaggcaggttaggctcacggctcccgcagggctgcagatggacacccatgggccctgcagagcagctggccatcccctgggccagacagtggttcacctgctgtgggctcagccacctgtcccccgaggggtgccgcgccctcccccatatccccggggccacagctgatgcacaaatacgactcaagacaagaagttgaaatggaacaagatgagcacggatgagagggatgcctgagcctttctctttggagtccccacccccggaggggacagcacaggacaggatgggggatgtcaggcagctccaagggtgacagcacagatggcacgtggacatgaagacgcagcagggacgggactgtgctctggcaaagctgtgcttggactctggagccattacctggagcagaatcacctctggcacagctgggtccacaagagcccgggcagccgggaacaaccctggggacgggcaggcagactccgtccagctacccgggaagaggca

SEQ ID NO: 32422 - DNA, 2663 bp, Artificial sequence
  DNA replication origin
gtccaggactttatcatcggcagacctcagaagacaacacacaaaggtttcttttgtcttagcttcatttctcttaaaaaacaaggaacaagaaaacattgcaccagcgttctaagcctcaaacaaaacacaaaacaaatccccctgcgaagcaacaataaactttacatctctttggcaacaataacttaaaatcacccaacttccattcgctccaaccacagcagttagttagttacaaaaatattccctgtgctgccctgcccccagctccaccccttccccaccatccctctccctgtaggtaggagccccccaacactgactgcggggcatggcccccactctcctttggcagctggggcacaggaccagatactgccccacagaggggagctgcctgcacggtcctgccaagggcacctctagaacggggcccacggggcaggagtacagcctggaagcccctccacccctgatcttttgggctgcccaccgtggccacagcgggacccaggtgggagcagcctgttccctgtgggaagggtgggcttacgggtctagctgagtcagtgaaggggaaacagccacggactttgagataagggcagcggaaacaggaccgacacgggcgcccagggccactccttgccctgagccaccaggaaccaggcaagggtgggggcacagggggtgggaagaggctcacaaacctgccagtgtctcggggccatgcctcgtcctggtttaagtgtcctgtgagcacaccggaggagctgccggatggggcatgcgggtcctccgaggccaggcaggcagggcagagggtgggggccgccgtgcccaggggcactggccccttttgagtgtgtatgtgtgtacagacacccactgtggctccaggcgcccccaggggctagcagcaagcctaaaagcccagacgaattctgcctctggggcggagcatggccgatctaccatccagggcctctcatcccacgggcttctccaggacaccgcgtggggcagaggcacctgaatctgctgccaacagccaccaggacgtggtccccaccttctcggtcaccatcctcgctgctgcctggcaggggctccggtgacgccagccttgaggggcaggagctgcccaggtctcaagcctctttactctcacccccggcaccagcttcaggtcctggcaagcaggacaacaaagtgaacacagggttctgagacaccagggctgcctcccccgcaactcccacctggcctccatccctggcccacatacaggccgggccccttccctgcagcagatctggctgtgtctaggtgagagatggacccatttcccccactcctgtcactggactcaggccaacaactctcagcaaatgcctccgagtcctgttttacgcataaggaaactgaggcctgaacaggaaggggatggccaaggtcatgcagtggcctcctggtgacctgcctgcttgttcagccacacagggggcaccctgcaccaggggtgaggctgacaggcccttcccccagggctgcagccacaggccaggacagctagggaagaggaagctggcagggggccttctccgaggaggtgggcacttgtcaggcacgtgggcagaggctgtaggggtagggacacctggcagagatgagcccagcctggggtggggcggatagtggagggccatggccgggagcggtggctcaggcccccagcagggctccacctgggcaccgtggggccggggcaccgtgggacctgggtctgcagggacttctggctgggaaggttccggtgagagggcctgccgcaggtctgcggggtagggtcaggcagaggagagccgagtgcaggggccaggtgagggccaggtgagggtcaggtgagggtcaggtgagggtcaggtgagggtcaggtgagggccaggcgagggccaggcggggtccaggctaggtctggggccgggaaggagcggggccgggaaggagcggagcggagcggagccggggctggcccggcccaggacctagacggaggggccccaccctcggagctccgtgccctgcctcccgcgtgcccttctgccacagccccgcccaggcctcacctctcttggactcggcgtccgagtcagacacgtgcgtgatggagaagcgggacgtgggcgcgggcgacaccgtgaagcgcgagaagggagcgggcgtgggcgtgggcgcagccggggcgggtgcggccgggtctagggccatggcgaaggctgccttggccgtcatcagcgggaagtcgtcgtcccacgcgaacccaccacctgcagcccaggtcgcggcgtcactcgcgctcacagcctgggaccccggcccggccccgctcccacagtcacgggcccaggccccgcctcccatcatgtcacgggcccaggccccgcctcccatgatgtcacgggcccaggccccgcctcccatgcagcacggacaaggccccgccttccgtgacgtcacgtaccagacccgcctcccatgacgacacgggccaaagcccgcctcccacgcgtcaaggaccaggtgctcctcccatgatgtcacacattaggccccgcctcccacacagcacggaccaggccctgcctcccgtgacgtca

SEQ ID NO: 32423 - DNA, 1460 bp, Artificial sequence
  DNA replication origin
cttcttgcgttccaggtcctcgcagaaggtctcggacagcaggctgggcatcttgagcaggctgcgcaggttgcgcgcgctctggctctcagccaccaccacgggcaccgccggcgcctcctcttcgctgtcctcgctaggctcctggacgctgtagcagcggagctcctcgtcagactcgtcgctgtcctcactgtcctcctcctcctcctccggccggccctccaaggccgcagggaggccgggcagagccaggcggagtggggctctgggggtgcctgggccccccatccgcttttgtggggccggccctgacaacagtcctgggggcccctggaactcagagctgttgccttctgatctcagcggaaccggggtcagcaggaaaaactgggagcagctggggctgggcccaggccgcaccttggctgggccttggggctccggaggctctgggaccaggcccgaggggcaggtgctgggctctggggaggacccttcaagctgcagcagtgggggcagcacctccccggggccagagccttgtgcctccccggaaaccccaggcctgagacagacctgctcagacggctgcccagtgctcggcaggcccagctctggcccgggggctcggtccccgccgcacttcttctctgggcctgaggtggcctcggcctcagcctcgaggtctgagaagtaggcagagtctcggtagggattcttctcgttgaggccactgagggaggtggagagccgtgtctcgggcccggggccctcaccctctgaggccagctccgcaaaggcctggggctcacacccttcctgcgcctccttgagcacaaactcaggggactcatagttctcggtgtcatagccactgtccagcgctcgcggctgccctccagaggggccagtggccgacgggctgaagacctcatagccaccatcactggctgaggacgggatgtccagggagtccagggagtcgggggtccccacctgcttctgcagagagcggaaggctggcaccacatccggcctcctggcctgcaggccgtcgctggacgtgtcggtgaagatgcctgaggtggcctcggccgtgtcctcatcctcactgctgggtgcctccacctcgggagagctgctgctgccattcagggcagaagccagcttgatggcagacacctcgccaccagtagcaggcgtgggagagtcaggcagggcatcaggggcgtcgggggcactggcctcctccgagggaagtggggctccctcctgggatggggaggggacggaaggaaggggcaggcggggtccggtagtgccctcagcctccgtggcaagcttgggctctgcctgcgggtggtcacccccactactggctgtctctgtccaggagggtgtaaccaggcagggagcaggtgccaggccctgggcagagcatagatgagggaggccgg

SEQ ID NO: 32424 - DNA, 1767 bp, Artificial sequence
  DNA replication origin
tcggctgtgggccgctgctcgggctgcagccagcagaactgcatcacctcgtacctgcgaggaggtcccccgggggccacgtcagaggcaacgctggccaggaacgcgtccctggagcagggatgggggttcccctaactcccagtgtcttgggggcattaagggtatctcccacttaattgacaccccaaatctgccaaggcaagcccagcagcgtgggagcaggaggtgggctgggcactatccttaagccttccctccctgtacacaggggtgcagaggtggcgggtggaggccctaccagaggggaggggagaccaggcagggctggaacgccagggggtcagggtgagccgcctctgcctggggatcaggataccccatctcggcctggctgtccgggacagggcagtggggccctcaccagcggtccgacagggtcagctgcagctggggcttgggcagcttgagctgctgctcccggaccgtgtacgccagcacctgctggtccgagtgctggggatagggctgcgtgcccagctcaaagagctcccagatggtcacgcccagggacctgtggggcgacagccgtgagccagggctgggcacagcctgccacagcaaggaccgcgcaggatccccggggcgccgaatggggcagctcccgccatcacgccagtgcctcaggaccggggcctggtaccataccagccgcccctccctgaggacagcgcgtcctttcagcaggcaatgtgcaccctgccaggcccaagcccagcacctgtggagcctgcacataaaggccgggctggccgaatccatctgcttgtccactcattcattcattcactgatgcactgaagaccagacactgcccggtgtgggagctgccctgggggagctggagggcgggcgtggagcccaaagcggagtagggcccgcaccagcagggggctgagggagggggagggagggggaaggaaggggagagaggggacgcctcaggccagcatgggcagggctgggtaacaggcaggggtgcacagagcgtgcaggcgggtagggtaactggggtctccttccccgtgggctgtggcttcacccagccactttggtccctggctgtcccaagaggctgcagagtgagacagaggtgatttggcaagacgtcaccatgaccttggccagagccctgtgactggagaccccagccagcgtgcagtgggtgggcaggccaggaaggggcaccttggtggagaggtgaggaggggacagtgtccatgatggggcagtcaagtggcttaggggaggccccaaaagctcagggagggggcctggcccgtgggatctgagagttccccagaagcagaaggcggccagaccaaagcccgggagtggtgggggcggttggggaagcagcagaggtgaggcagggaggggcgcccaccccggggcggaccactcccctggcggctcggccctgccccttccgagtctacaccaggtgtgaatgaacgctccgggctaggcactcaggataggggcttccaggctgcggccgtgggagatcccagcaccaccgtcagcccctctgcctggcacggcccgacctacgctcccgtgaaggcagccaacaccccacccagaccctctccccagggacaggtactcaccaaggcccccgtctcaggacagaccccccggcatgctgaagacgggccgttggccctgtacgtatgccttgaccccaccatggggtccctgggg

SEQ ID NO: 32425 - DNA, 2117 bp, Artificial sequence
  DNA replication origin
cggggcggaccactcccctggcggctcggccctgccccttccgagtctacaccaggtgtgaatgaacgctccgggctaggcactcaggataggggcttccaggctgcggccgtgggagatcccagcaccaccgtcagcccctctgcctggcacggcccgacctacgctcccgtgaaggcagccaacaccccacccagaccctctccccagggacaggtactcaccaaggcccccgtctcaggacagaccccccggcatgctgaagacgggccgttggccctgtacgtatgccttgaccccaccatggggtccctggggcaccctgtcagggtggtatctcccccggtgtggggtcgccacccaaccagccacttgggctgctggcgtgtggccactacaggtggctccggcagccccctgacctcactactcatggccatgatttgacatgggtgggcaggtggcactcggcctcggcccctcacggtgccaccagggccgcactcaccacacattcccgctcttggtctggtccacgacgagcaggttgctatgcacctcgtccaccagctctggcgcgatccagcgcagaggcacccacagctggtcggcagtcacgaagtagtcctcctgttggcacagggacgggtcacccctgccggcgcaggccctgcccctcatgcccagcccagcccaccccaccccactcactctgtacttgcagtgagccaggccatagtcaccaatcttcaccgtcaggtcagccgtgagcaggcagttccgcagggccaggtcgctgcaggcaggggcaggggcaggggcagggtgagcagggtgagcagggtgtgccgggtgggggcagggggagggtcagtggggtgtgccgggcgggggcatccagcacagggtcctttgccaacacttggatggctcacagtccaggctggaaggggcgttggagacactgccaccccccatccctgcccagggccctactctgtgcccaaccctgagacctggggagggactgtgtgcgtgggcctcaaatgttacagtgcagaggagaatggggcctagagagggtgagaacctgccggaacccacccggaccggtccacgcttctccaggaccctctcctcctagctctactacactatcactctcggctccccaggaggtgggaattgatggggaaactgaggcctggagtgtcccaggggtcctgccggctgccggagtccagttttagggtccagccctgccatgcccactcagagctggagctcactctcacttgagccaccactggccccagggttgggtagggtctggaaagaatgcaggttacgcctggcactacctccaacccagcctgccttggctgctggctttgaaccctgcctggctggtcacgtgggtgtgaggaggcacagggtactgggtagatattaccacagctgccgtattacttctgtgctcaggactcagggtggggacagaggccaacccagcctgtccctccccacataaaacccatgtctgcgtgccaggggatcgctacagggccatgtgtcctgggcctagggggtggagtggggtgggttggggttgggggcagggcagctggggcccggcaggcaggtcgggaggctggcagctgccctcttcaacaaaatcactgatgctggagtcgcctgagtcatcactcagcaccaggatattgttggagaggacagccgtgcggcgtctggggctgacggggccacgtgtccttcgccacttcttccagcatgtccccccggggtccccaggggctgggcatcctggcccaagcaggacagaaccctccctccagggtccttcgaagcagggtctgtctccctcaagccccaaagcgagggcttagcagagtgtggggttggcgcggggctgcagggtgctggctgactgcctcggggacagagaacaggccagcttgacagtacgcatctcttcgtctaaacctgcaaagtgggtgtcaaaccattgtcttcccaatttttcaaaaacgtcataaaatccctctgcatagtggttgtctgatgctgcatgagatgaacctggccggtcctcgcaa

SEQ ID NO: 32426 - DNA, 1335 bp, Artificial sequence
  DNA replication origin
cagcggcccctgctctcaagagaccctggctcctgatggtggccccaaggttgccagctggtgctagggactcaggacagtttcccagaaaaggccaagcgggcagcccctccaggggccgggtgaggaagctggggggtgcggaggccacactgggtccctgaaccccctgcttggttacagtgcagctcctcaagtccacagacgtgggccggcacagcctcctgtacctgaaggaaatcggccgtggctggttcgggaaggtacgtgtcccgcctgggagggaggactcccgcctgggaggcagaagggacacagggctgcagacctgctcctcctaggagccaccccagccccgacggtcccttcttcagtctctgggccctgctggacccttccccagggaggtcctcagcatctggctgcatccccttctccctagggggtcctggggtcagaggtacctggggaggggccctgggagggagaggagcagcctcttgctcatggccttcccctgaccttggcctaaacgagacacctgggtccctcttcctcacttcaaacccccagagagagagagagagagggcagcgggggaccttgtggggagagtaacacgaaagactcagaatattacagccagagggttgccgggagggatccggaagccatacctcacgctgcaatgagtggacggggcacaggaggagaagtgtcctgtcctgggggccggcgtggggcgggtgggagaagagtaaggcctggaagccggggccggtggaggcggagcagccgtgggtgatgctgtctgtcccacaggtgttcctgggggaggtgaactctggcatcagcagtgcccaggtggtggtgaaggagctgcaggctagtgccagcgtgcaggagcagatgcagttcctggaggaggtgcagccctacaggtgggaggccaccgggcacaaaggcctgtgctgtgcggccccctcctctccctcccctgctcggcccgactccccctccccacctcctcccaagtcaggggccgcctgtccactcccgcagggccctgaagcacagcaacctgctccagtgcctggcccagtgcgccgaggtgacgccctacctgctggtgatggagttctgcccactggtgagctgctgcccggggggatgctggggtctttgctgagccggggccctcccttgccctgccagtgtctggtgccaccccctccttgggggcctcacatcctccctaaagccaagacccagggaccctgcccccaccaccttccagaggaggcgatggggagacctagcctcaccagggaggga

SEQ ID NO: 32427 - DNA, 1728 bp, Artificial sequence
  DNA replication origin
ctgccctccactgagtcagcacgtggtgctgaatgaccccccatggccgcccagcactgggacctgggccttctagaggggagggggaactcacagcagggctgtgccccagggccagctgcctcagtgcggggaaggaccaggcatgggatggcgtcctgctggggggagcccagggtagctgaggtggggtcctggaggtgggaaggctgaggccagctgcctccattcgggggaggaccagggaagggatggggccatgggaggggagcccagggtggccgaggttggttccgaaggggaggttgagggggaggctgaggtcgggcctcctggggctgctctttgcccagcaggtggcctgtccagccccagggctctgctggctctgaggacaggaggccagatcctggccccaaaaggccacagataggttccttcactcatccagtgtgtcccatgagggaagggcccgccaggagaggggccaggagggcatgggcgaaggtgttagaggggtgtggactgatgccaggcgggcaccagatggagcctgggagatgggcaccatggcaacttgcagttccgaagagcgctggctgctttggagggcggggcctgttgagtgcctcgtgagcccctgcctgtgttcctgccgttcgggtatgagaacacagcggggcttacccggtgtgcagggtgtccttacacgcatgacacgcacgcccgcacatcctggaaacctcgcctgggatgacatctgttcacggccctacccgttggctcgtctccacatgcggcagagctggtttccttccccggtgacccaggtcttgctttgctggccgccccctgcctccttgtccccacggccctgtctggtcctcactccaagccgtcctggttccctcttcctcgtgtgtggggaacaacctggagacctgagcaggaagcctaggctgccctcactgtcttctagctcacgccacctccaggcagccttcccagatgccccattagcctgcagccctggcagagcatgccaggtgaggtcagctgtgccacctcgggcagccctgcccacactgaccctgtttcttggctcgtccagtggggtagagatgacaacacctttgggggtgtgctgggccaggagatggggtgttgaggggtgttgggagctgagaagttgcaggtgctcagtggcaaaaggcactgggggtggccggaaaatctccagggccaagtggagggcagccggacagaaagctcctagggaagggcatggattggagctgggtgcggtgggacggggcaggcccaggggatagagccagcgggtcagtgtgccctcccctgcccaggggacaccaaggctggcccccaccatgccatcctgtgggcagcagatggaccgagcttcctcaaagcctggctcagctcaggtgtcctgatttggaagccgggctcagctcaatactccgaagttgggagggatgctgtactgtcagttcccctctgggatgaggggctccatggaccagcagctgcagaacggggtttccccatggttcccaggacagaagcagcaccagaggggcctggcagtgggtttggcaaggggacggattcgaggcagcaggtggcacacgggagccctgctgcctggcagaggcagcaccaccttctcagggacagtgaggtccccgcacctcagaggctggaagg

SEQ ID NO: 32428 - DNA, 1471 bp, Artificial sequence
  DNA replication origin
acctgctagtgggggctggtcccaaggagataagtggggcctcccacgtggcttgtggaggggcaggcatggcatctggagcagggcagtggagctggcagagccaggccaccctttgggtgtgcttgtgacatcactgagcctcagttttcgtacttgtaaagtgaggatgatgatacctactgagcaggccagtagtggggactgagccaggggatgtgtgtgcacatgtgtgcattcatgtgtgtgcatgtttgcatgtgcgggtgtgtgtgcctgtgggtgtgcacacgtgtgggtgtgtggggtgcgtgcatgcgtgtgtacgcacgtgtgggtgtgggtgcgcgcgcacgtgtggggggtgtgcatgtgtgtgtgcctacacgtgtggtatctgtctacgcatgtgtggttatatgtgtgtgcgtgtatgggtatgtgtgcacatgtgtgcgtgttatctgcacgcgtgggggtgtgtgtgcgctcacgtgggtgtgcacgcgcaagtgggtattgtgtgcacatgggtgtgtgcgtgcatgtgggtgtgcatgcgcgtgttggtatctgtgtgcgcgcatgtgtgggtttgcgcgtgtgggtatctgcgtgcttgggtgtgtgtgggtgggtgtgcatgtatggatatgtgtgtgggtatgtgtggatgtgtggatatgtgtgtgggtatgtgtgtgtgttgtgcgtgtgggtgtgcacgtgtgtgggtatgtgcgtgtgggggtatgtgtgcacgtgtgtgcacgcgaacgtgtatgtgcacgtgtgtgggtgcattgtgtctgcacgagggtgtgtgtgcatgcatgtgtgcatgtgggtgggtgtgtgtgcacatgcatctgtgggtgtgtttgcatgtgtatgggtatgtgcacgcacgtgtgggggtgtgtgtgcacgtgtgcccgtgtgtccatgggagtgtgtgtgcgtgggtatgtgtgggtgtgcatgtgtgggtatgtgtgcacgtgtgtggatatgtgtgcacatgtgtgggtgggtgtgcacgtgcatgtgggtatgtctctgtgcatgtgtgtgggtatgtgcgtgtgggtggatatgtgtgcatgtgggggtgtgtgtgtgtgtgcacgcatgtgtgggtaagtgtgtgtgtgcatgtgggcgtgcgcgtatgtgtgcatgtgtgtgtggggtatgtctgtgtgcacacgtatgtgtccgcgtgtgtgcacacaggtgtgggtccgggtgcacgggtgtgggtctgtgtgcacgtgggtgtgggtttgcgtgcatgtgggtgcgtgtacgtgtgtgggggtgtgtgcacgcgtgtgggtgtctgcgtgtgtgtggatgtgtgcgtgcgtgtggatgtgtgcgtgtggctgtgtgcacgtgtgcccgtgtgtatgtgcacgtgggtatatgcctgtgcgggtatgggtgtgcacacgtgtgatatatacac

SEQ ID NO: 32429 - DNA, 1465 bp, Artificial sequence
  DNA replication origin
gtggggattgctaactgtggggcgacgtgctgaggagagaggctgtgaagccagaggggtcgaggaggctggaggaccaggtgtggccacgggaggcggggctgcatggctgggggaattggggctgcgtggacacggggggtgggggctgcatggctgggggaagtgaggctgcgtggacacgggaggcaggggctgcgtggacacaaggggtgggggctgcatggccccaggcagagctggatggggttgaggggaagtgcatttggacccaacacagaaaacttactagctcttggctttgaccagggccaccctgtgctgcagtgagcacccggtcctagggacagccctgtagaagctgggccaggtcaggtgacgtgtcctgggactccagggtcccgcacaggctgcctgggacctggggctgctgcaggcggcttccgcctgggacgtgtgcacgttgcgggggtgggggctcatcgagccaggtgtggccaagggcttgggctgtggggccactctcaggctcagccaggccactctcggaactctcccgtggccttcgagggaaggccgtgtgccggcaacgctgcggacggcagcaccccaagctgggatcccccagctctgtgctgagtaggcgccatcctggaccacgcctgtgttttgagctcaggccacgctgtgcctggagctggcctccctgttcctctgtgtgtggcccagagtcccaggagcctcctgtcctttccactgcgtgtgtaaaatggctgagagtgccacctggtgggcgtgagggtcacgccgatgatgcgtccacacctccgtggatagggtggttacaagtcaagtggactttgggggacggggacagggaggctggctggctggggcgggggtggggctgggtccttactgctcagggaggctcacaggtgagaagccactcccaggagggtgggactgactcaaagccggcagcctgttgtgggggtgtctccaccccaagcacctccttctcttccctgctcttggtcccctgccagctccctgtggctggctctgcctcttcccaccccaacctctcagcagagccaatgctccagagctggacaatggccaaatagacattaactttgaaactggaggccaaggcgggaggattgattgaacccaggagtttgagaccagcctggacaacatagtgagacctgtctctacaaaaaaatgtaaaaattagcgggtgtggtggtgcaaggctgtggtctcagctacttgggaggctaaggtgggaggattatttgagcccaggagtttgaggctgccatgagccgtgattgcaccactgcgctccagcctgggtgacagagcaagattctgtctcaaaaaaaaaaagaaaagaaaaaagaaaaaaaagagcgggcctggtagctcatgcctgtaatcccagcattttgggagg

SEQ ID NO: 32430 - DNA, 998 bp, Artificial sequence
  DNA replication origin
ttgctgatcctgatccatttgtttgtgtgatttggggacattttgggggcatttttgggaggtgtgggccaggctgggtctgtgcaagagacgctggctgttggtgccacaaaaggtgaaagaggctgcctcggggaggggagtgagccccaagttcctggaggggtgcacttagccacttagcaggaagcttcctgaagggccgagcggggacaggggtgggggcagagagccacaccttatgtgctggccaccctggccacccgtccctgcaggaaggcagcttgggtggaggaagcatgcaggggcaaccctgggcaccgtgctcaccctgggtgcacctgctgttgtggggggaatggctgggagccttggaacctcagactgagctagcatgtgggggtcacgcccgcacccacggggcatgcatgccaggcacacccgacgggtgagcagagcctggagccccgggcaggcagggcccaaggttccagaagaggcagtgtgggtggagagagtggaggcctcgccttaccccgtggggatcacaccccatggccacccaccgtggggcccctggactccacacagtcctggcctcatcaggggtggggattgctaactgtggggcgacgtgctgaggagagaggctgtgaagccagaggggtcgaggaggctggaggaccaggtgtggccacgggaggcggggctgcatggctgggggaattggggctgcgtggacacggggggtgggggctgcatggctgggggaagtgaggctgcgtggacacgggaggcaggggctgcgtggacacaaggggtgggggctgcatggccccaggcagagctggatggggttgaggggaagtgcatttggacccaacacagaaaacttactagctcttggctttgaccagggccaccctgtgctgcagtgagcacccggtcctagggacagccctgtagaagctgggccaggtcaggtgacgtgtcctggg

SEQ ID NO: 32431 - DNA, 680 bp, Artificial sequence
  DNA replication origin
gtgttgggtgtgggcggtggccactgggcctggtgacggggctggaggctgtggtggtgggtgatgtgctggggtcagggaagggaacctgcaccagctcaggggaggagggtccagcccgggatgggtgggctgcggacaatggagggggtgcccagaagctggaggaggctggcggggctgccccggccccggaatgcagctctcgggatggccatcccttttgctcaccagtcatgggacgcattcaacccagagctcggccagggtgctcccaggacagagcctgggtcgctgccccatcactggcctggccaaggcacctccacccccggtctccgtgtctccctcacctggggacacctcgccaactgcccaactgggggctattcccaagctcctcactagcagggtcatctgctccttggacactcgggtaggccccgctggctcagagcaggactgtggacacaggcaagggtgtgtgcgtgagtgtgcgcgtgagtgtgtgcatatgcgaatctccatgagtgagcgtgagtgggagcgtgtgcatttgtgtgtgtgcatgtgtctgagagcacgtgtgtgtgtgtgtgcaagtgtgtgcccgtgtgtctgtatgctccttccctcccttgccccaggtgtgccgcaggcacctcagggcgttggtgtcc

SEQ ID NO: 32432 - DNA, 909 bp, Artificial sequence
  DNA replication origin
cccctcagccacccacgcactttctgtgtctggatttgcctgtctggacaccgagtatccacagagctgtgtgctgtccccgccagaggcaccaggctggtccgcagtggtcccacggcagcatgaggactcacttgttatttcccattaaaaaaatcatggccctcctcatgggtcagctgctcaccttcctcaggggcttgagctgtcggaccagagggacatgcccctccaggtagactggggaaactgaggcaccgggcattttgaggctgggctgatgggggctgactgccgttgcagcgggggttcctgagtaccctgtgccttgggccctgcctccgaagaaaccctggacaagcagagagcccggacaggcgtgagcagggggcagagctcatgggggcacaggctccaggcacccagggctgttgtgagcccacggccatgggagccaagcccagggtgggctgggggtgccgcgggcagtgcttttagaagtggctgtgatctaggtcaggaatggccatggtgggtgacgctgcagatccccggggaggcgtgagcagggtcctcctgggctagtgccttggggtggaggttggaggcctgtgaggggctggaggatgtggagagaagacaagggattggaggttgggtttcctcagggggctggggtgtgagggtgggggaaggggttaggtttcccacaggccggggagggcaggaggcaggaccgcatggggaactagcctcagctgtgtgtggttgggaaactccagggcagtccgatggaggtgttgggtgtgggcggtggccactgggcctggtgacggggctggaggctgtggtggtgggtgatgtgctggggtcagggaagggaacctgcaccagctcaggggaggaggg

SEQ ID NO: 32433 - DNA, 841 bp, Artificial sequence
  DNA replication origin
aacacgatgcaaccctctggtgactgtgattttggggattttagatttcagggatttcagcatattctggatgatggtgttgagacggtgtcttttgggattatgatccaagcccctccttaatcactcccagggcagttccagctcttggggtcagggtgtcctttggacacagcctttgtcctgggaggctgggggcagatgggcccaagtgaccagccagatgggggaggccgggcctctgaagaactgggtcgcgtgggggcctggcgtcaggtggcctgctgcccctcggatgcgtctgagccacaagtgtgtgcacgcgtccccggccacggtccccccagccccaggagccttgcgtcatagaaaagttaatgcttgatcccaggcacagggtctgtcctttcatttctgggggatgtgggggaggaggggtgaggggggagacaggaggggtcggtgggggagacaggtggggctgggcctgggttctgtgcaggtggggcttggctgacacccggcttccgtgtctccacctggaaaagtgactctgtgtctctgcttaggaattccgttcctcagaatgttctgtgtctgggcgcctgtgcaaacctttgcagggaaatcctgttccccagcccacaaagttctgtctgcctcacagtggttcgtaggggggcacagagtaccccttcctcccttctcctgtcccaggaaccccaagaatcttactacttcagcctgcaactgagaggtaggggtattcgtaacagacaatggggaccactctgggcttcccagggacactggcctgacccctggacatgctgactccccc

SEQ ID NO: 32434 - DNA, 1357 bp, Artificial sequence
  DNA replication origin
cacaccgccaggctcaggcaccttctctccctgggaagctgcctggaatctctgtggcccagaggcaggtgtccctgaaagcagctcctggccccagggatgaatgacggggaggacggaccctgctcggaccctggctctggaggctgggccccgccctgctctctgccgcggggtctggcgagatgcttggctgctgctggagcctgaactagcgcgtcagactgttttatttttccttctgtgacgggcggccctgcaagtcttgtctagaaatacccgtggccggcatgcatccgcgacgcccggccgccctggccatggacctgcccgtttcctccttggcaagcctgagcccagcagccccctgctgctgcccagccagcactgagggagggactcagtccgtgcaggtctgtagggggccagctggatgcccggctgtgtcagggccggggtcctgagacgcacaggagggtaggcccccacgaagagcgggaccgagggccaaggtgttgggggacagtgtgcgtcgagcagagacaggccaggagcgaagagatgggggctgtgggaccttagctggagctgcctgccccttggaggcttctccactgtcagggatcagcctcctggggaaccgggggcattccaggtgcccttcccacccttggaccagccttggggtaggccctggggcatctgatgctgatgcaggctgggcctgggctgtgtgttgtgtcaacagaggggacattccttgtgagtgtccagctggtggaactcacttccgtccctgggctggcctgggctgggcacccatgtttgattgcagggttggctgtcgaggggcaggagaggcggacttagagatgctggggtggtaacccccgggaactgtgcgggggttccctgcagcagagagtagggctggtcctagcactgggggagggccggatgcccaccttggggctgccagcgtgtgcggcaggcatgtgcgtggaggggtacgtgtgcgtctatgagcaagtgcagccccaggttggaggcgagcgtgtgcatgggctggtgcggtgcccgcggtgtcggatggacccggcccgggcccgtggaccttgccatgtcctgggcttgtcccggaagcttacattttatgtggcctctcctaaaaataaccgtggctggcctgcatcctccttatccgtggacattcgggctcccctctcttggcgggggcggtgtcttgtgacttacagcccctgccctgtcctcacctgccacccagaatcccacgcggcagatggtgcccacatctgtctggtctcgggagtgactgtggggatggttcagggctggg

SEQ ID NO: 32435 - DNA, 1913 bp, Artificial sequence
  DNA replication origin
cactgtcccccaacaccttggccctcggtcccgctcttcgtgggggcctaccctcctgtgcgtctcaggaccccggccctgacacagccgggcatccagctggccccctacagacctgcacggactgagtccctccctcagtgctggctgggcagcagcagggggctgctgggctcaggcttgccaaggaggaaacgggcaggtccatggccagggcggccgggcgtcgcggatgcatgccggccacgggtatttctagacaagacttgcagggccgcccgtcacagaaggaaaaataaaacagtctgacgcgctagttcaggctccagcagcagccaagcatctcgccagaccccgcggcagagagcagggcggggcccagcctccagagccagggtccgagcagggtccgtcctccccgtcattcatccctggggccaggagctgctttcagggacacctgcctctgggccacagagattccaggcagcttcccagggagagaaggtgcctgagcctggcggtgtgctggtcagtgtctgcacccagctccctgggaaggaaagcggggcgtgtgccggctcctgccgcaagtgctctcacctcggcccatttcagggtggaagctgctggtgctcagccctgcacagggtcacgggaagtgaagcagcaggccacctgctcactgcgcacagacctgaggccttgtgtccaggacctgcccactgccccgagcctggctcccacaggccagctggccagggctgcccgacaccaggtacaaaccaccaaaaaatacctccaatgggcactcgcttgaggggctcagaagagctgggcaggacctggaaaggctcctgacatctttcgccacagaaaggcagacaagaccaccatgggcagcccccacatgctcacgagcccgggcgttataaaaacagcagccagcactggcgggaggggaagccatggaggcgttcgtccatggggatgggggcaaaatggcaccacctcctggaagctccctggacagtgccccacagtcacacaccagcacccctgatccctggggccgctatacacacagcgaaaacctcagggcccaaagaggacaaggccacaggaccctgcttatgagacagacgtccaggccaggggcccagagaccgagacagatcggtggctgccagggctgggggcaggggatggggagtgatgccctcgggcatggggcttctgtcaggggcagggatgctccacagctagccgtgccatggctgcactcttgggaatgcaggaaagccccagctgctcatttgacacaggtgggtccttggtatgtgagttacctctcagtaaaggggccctcactccagcgtccacgatagcagcccacgggacagcccacaactgagcatcattcacagagagcgagcgagatccccaacatggggcagctgggagggcgccggcggcctgcgagtgaccggccaggtagcagtcctgggggcagtggcggggactctcgggggctgggcgtgctgccgcgcgggtaaatccaatgcggggaagccccggacccgcaccccggaggtcagagcgcacttgtgtgtgccgtggtcactaggaagccacacgcctttttcgcagggggttcgaggaaattccacgtgggcctcacagcggagcccaaaccctaagcaagccccaccggctgcagaatccgcaggaccaagtaccaagggaacccaaggccccttgttcagagtcactaagaattcccagaagcagagcagaagggaagccagaggggccccaccgagcaccagggcctcgtcggaggatcctcacaccgaggacggcatccccagctccatcccacaacggcctcaagccacagcctcaaaccgtgg

SEQ ID NO: 32436 - DNA, 1977 bp, Artificial sequence
  DNA replication origin
gagggcagaggaggcagcgagccccgggccaggcatggcctcagtggcaggggcagggctggactcaggggctcaaggggctgagcaggaggccatgggcctgggtggtccccgggagtcctccccttggaaggtgccccacagctgacactgcccgggcaccaggtgtggagtctgtttgaaggcagctgctgcttcagtctcccagaccactcaggctcaggcagcaagcacctgccctgggaggagttacctgtcctcctctcgcccccggggtctcagaggatgccccagaggaagctgtgcccatgagttcggcccatccccctacttcctctcaggtctcaggtctcccaccgagacccttaggctgcaggtgtgcaggccgaggtgggttcttggagagggtcccatgggaaggctgtgtggacagtggccttggggagcggtcacacgcaggccgtgggccctgggcacgggtccggctcccacctaccagcatgggtgcgggcactcggggagggtgtgggtgtcggcactcggggagggggtgggtgtgaggccccacactcccaggcatgggtcagggagaacatttctctcattccggcacattctccaggaggccaggctgtgcgcttccctccatggggtggtgcagtgacccagaggaccggcccctgcagtggccaccctgtgggcccgagtgccccagagctggctggggtgggctggcagctgttgtgttgtgtggaacatgctggaaggtctgccttgtgccaccctgcatgtttgggatgcatcgactccccgccatgccctctgcctccccggctcccaaccctgaccctgcctcacgggagagttctggcgtgggctggtgtcctgggccgggccctgctgtgtgaccatggacaggtctcataacttctctgtgtctgtttcacctctgaaatggggtccggcagcacccacgctccaggaggttcctgagagaacccgggggccgtcacggcagctccagggctggtgactgttcacgtcctctctgcactcacccaccaccccggccgcctgggaactgtgctcctgcctgtgccccctggaggcatgtgctgagtggaatatgtcaccccaaacccatgcccgcccagtacctcagaatggggccttatttagaactagggtctttgcagctgtaatcaagttaagatgaggtcggaccggagtagggtgggccctgaatccaatgactggggcctgatagaaagaggaggagtggcgtgcacgcgggaaggaggccacgtgcagaggctggagtgatgcaggcccaggagcacctggggccgctgtgccggagaggcaggaaggatcccgccagcgcctcgagggagtggccctgcccatgccgtgctttcctcctccactgtccagaactgtgagcacatccattccttgccgtctgggccagcagcccgtggtcccaggacacacatctgggggtctccttgggtctgaggggtgagcacagctgcctcgagacatcaggagcctctgactccatcctgagaagagttatccttggaagaaaatgaggccacgtgctagcccccagcctcagaaccctccagggcgcttggctgggtgtgaggaggaagcaggccggggccacagctgcgtggcatcctctgcctcctcctcggtccacgggggaggcagagggtccacggagcacctcggtgtctcctcggatgtggtgtcggcggtgagcctgggaccacgctgttctgctgtcaccggcctcctgtctccagctcacggggttcttccggggtaggcttttctcgagggccacctgacccctctgtgcacgccagggcaaggctgacgggaggcccactcgaccactcctgggtgggagcctgatgcaaagcacctgccgtggggcctcggcctgcggtcctgtccctggtggca

SEQ ID NO: 32437 - DNA, 975 bp, Artificial sequence
  DNA replication origin
cccccatctccctgacactcgggagcgtggctgggggatttcttggcagctgcagccttccagcctctgtgctgtgtggcctcggactactcacccagcctctctgagatccgttctgcacatgtgaaatcttgctctggggagactagtgtgggcatggcggccaggaaaagcagggtgatgggggtgacacatgggcaggatggccgggtccaggctggcaggaagggggtggcatggccttgagcgagcagaggtcaccccttctacctgagtgccccaagggagggggctggccttgttgctcaccctccccagccttcaccttccctggtgcggcctcagggcgtcatgatttctagtcgtcctgagccctggggcctggagctgtcctaggctggaagtgggcatggggacaccgcctcgctccggcttctggagaggcgcgctcagcctgagggtgggggtcaaatgctctgcacagttaggagcaggggtttgccctggggccacctctggtttgctgaggggcccttctgtgactggctctccatgcctgttttgtcatctgtaaggtgggaatggctgtgatggccaggtctgaagggacagcagtggtgcactgagccaagggtgggtacctgggcagtgcctaccatggctgatccctgacgcagaggtgtcactgttgaccagtgggcagggcttggagtttgtggaagttctcggaacacgtggcagcctggatttgccaccccccaacccccgcctctcccctgtccctcagctcacgccctgtctcctgcccaaggtctctccctgtgtctgacctgaaccaggcgccatggggggttcctgggagaagtgcctgtgcctggccacggtgctcgctctatcagcattcatgtgaaccggacacctggcacagggctgggcaggctgggcctcaggatgagcctattgatggggagaggg

SEQ ID NO: 32438 - DNA, 874 bp, Artificial sequence
  DNA replication origin
cttggtgagcacttggctgtctgtgctggagtggtggtgctgggacagagacccccagggcccaagcttcctacagcatgtggctggctccttgccatccccgaattggagcgagctggttccttctgaggctgcttgtgtctgtgggggggcacccagaggggaggggcccacgcttgtggctctggcagttggcttgtgtgtcactcagcatctggggcagtgctagcacctgacatgggggtctcacctcagttgccaggccctgccccgctgccgggccggctccttgttcatcgcaggaactggtgccagtctccatagaggtgacggcagttgtggtggtacagggggcagagacgcccgatagtgcagggcctgagagtggaggctgtgggcacagactgtgggctgcctgggcccctgaccttccgcaccaggcagatgcgggcagggcagggggcacccggcccaggagcctgcttgagtgccaggaagagccgcctcctctggagcccagctcttcccccatctccctgacactcgggagcgtggctgggggatttcttggcagctgcagccttccagcctctgtgctgtgtggcctcggactactcacccagcctctctgagatccgttctgcacatgtgaaatcttgctctggggagactagtgtgggcatggcggccaggaaaagcagggtgatgggggtgacacatgggcaggatggccgggtccaggctggcaggaagggggtggcatggccttgagcgagcagaggtcaccccttctacctgagtgccccaagggagggggctggccttgttgctcaccctccccagccttcaccttccctggtgcggcctcagggcg

SEQ ID NO: 32439 - DNA, 2456 bp, Artificial sequence
  DNA replication origin
cggcgccagggccgggcggagcgcctcgtctgtcgccgccgcccccaccggtgcgggctctgcggctgcggcggggggcgcggggcgcgggggccggcgcgctccgcacctgcggcggccgctgggtgatgcggcggctcgggccggggccgcgggcgtcctgagcgcagcgccctcccgggatgcccgccggccgctggcccggccatgtcgtcgtccttcttcaaccccagcttcgccttcagctcgcacttcgaccccggtgagtccctggcggcccggcctgcgcgccgctgcctccctccgctgcggacgtgatgcccctgggccccacggctcccggtttgcatggaaattaaccctttccccgccccgagcccagcagcagaagcagccggaccccctggcggccccagatctcggaggggcaggccctgggccccagcacaaaccggcctccgcctgtgggctggcgtcccccgcgtggtcgtgactccgtggctgcctccagggcacaggtaactggggcacggagggcctgcgtgggcccctggtgtccaggagagttggtctcagactaagggcccttgggggtgtggggggtgtcagccagctggggttcaggctttccatggcctctcctgggtccggggccctggcgtgggaggcttcttcccaggctgggagcgattctcagagccctgcccagccaccagcagccggcgggggatgtggggggagcaggggccagtccacattacagagcccagtgggcagaggctcagaagagaggggccttggtgggtgcccagatcccctgacagtgggggcccgaggtgacgctgtcaagctggctgcaggggacctgaggccaggcctcttaccccgtatggccagtgcaccgggcagggcgagattacccatggctgcctggcctcctggctgtggtggacagctgggataggcagagggggctggggacagctggaagccccatctgtcaccaggaagcagtgggctttctaaaacctctgcttctccagatccggcccctgcttggcctgagtgggagataatccccctgccctgtgccatccatggccccagggccaagtcccacccacacgtcactggggctctggcaccaggctgagccagcccaaacaaagcctgtttgcatgtgacgtgatctcctgtgtctccttccctggagcagggcccagtgcacgcagcctggcagggaggcacgggggtccccggggcagatctcggtctgaaggcatttgctccctggaggaagggagctggtgggaggtctgtctgctgggcttagggctgtgggtgtcacttgctcagaaatgacttcctgtagtgacccctggggctcggaagtccctgtggggtgggcaggtgaaggctcagagcccaacagccacggcaacagctgtaatgtctccccggcccaagggcagggggtggaggaggcttggggcaggtcctcatcacatctccatgccaggcgtggcccacggtgcttggtcctttctgcccccagaacagagaggaccctcggcccataccctgcctcggggcccagccttgtccttggccatgagaggccctttcccccgccttcgagcagcaccggctctgcccttctctgggtaaacagctgtgatctgaataattctaatgtgtccgtttaatgacttagaggaaaagaagttgttggaggcaaggggcgtctctcctctgcaagatgctgggccagagctgcaggcacctgctgggctctggggcccacctaccaggaggggctgcccaaggtgctggtgctggtgaggaaggagaccctccttcggattaaggggctgggtctaggctctgcaccagcccccatgagagggttagggaggagagaggggtctcctgccctcccgctaaacttagcccagccttccaagcctggctgtcctgtgctgcagtccctctgcctggccttgcctctgtgaacctcggttttcccatctatgacatgggccgacagtacctgtggcaggcccgggtgggctcagtgcttggtgagcacttggctgtctgtgctggagtggtggtgctgggacagagacccccagggcccaagcttcctacagcatgtggctggctccttgccatccccgaattggagcgagctggttccttctgaggctgcttgtgtctgtgggggggcacccagaggggaggggcccacgcttgtggctctggcagttggcttgtgtgtcactcagcatctggggcagtgctagcacctgacatgggggtctcacctcagttgccaggccctgccccgctgccgggccggctccttgttcatcgcaggaactggtgccagtctccatagaggtgacggcagttgtggtggtacagggggcagagacgcccgatagtgcagggcc

SEQ ID NO: 32440 - DNA, 1156 bp, Artificial sequence
  DNA replication origin
gagcgcgcgcggagcggcgcgggggaggggggggccctccgcggccggggtggcatggggggagcacggagagggggacacggagggggagacagaggggagcacggagtgggggacacagaagggggcttggaggggggacacggaggggaggcatggaggaggggggacggggggccgtgcacggagcggggatggcacggagtggggggatggtccggagcgggaagcacggcggcctggggctgaggggggcacggaggctggcgggggggggggaaacggaagtcgtgaatggtaagtcgtgagtgggtacggagggaacgccggggtgggggagggggtactcctaggtggaaaggttcagggagacaggtgggggaacccgggagcacacccagggcgggtcttggtgctcaggggccctcgcctcacttgcaggtttcgaggcggctggcagccgcccccccaccccatgccctttgggtggcacctgtgctggtggagtgggggtggctggctttgcacacaggcctgctcctgtaccgtgctgcgacagccatgaaggaagaacctggctgagtctccacctgccgtggactgtaccaggtgcttagggcagcaggttggcctgggcgctgaggggccatcccttcccctatgtttctcccaggatcccccatccccgcccaaagtgccaccttgcagggttggggcggggcagggtccccccagcctgcccccgtgggagtcgggagagttaaagttcagtggaagctggtcccagtggctcatgcctgtaatcccagcactttgggaggccagggcaggcgggtggcttgtgctcaggggttccagaccagcctgggcaacatagcaagacactttctctacaaaaattagaaaaatgagccaggcatggtggcgctcacctgtagtctcagctacttgggaggctgaggtgggaggatcacttgagcctgggagttagaggccgcagtgagccaagatggcaccactgcactccagcccgggtgacaacaagatcttgtctcaaaaaaagtgtcctggagacttgcagttgagtttgatgcaccctcatccactcattcattcactcactcattcattcactcactcattcattcactcactc

SEQ ID NO: 32441 - DNA, 1449 bp, Artificial sequence
  DNA replication origin
agctgtaccctttaaagtggtgaacttcatggcatgtgacttatatctcaataaaattgttaaaaacagtaatcggccgggcgcagtggctcacgcctgtaatcccagcactttgggaggccaaggggggcggaccgcgaggtcaggagttcgagaccagcctggccaacatggtgaagccccgtatctactaaaaatacaaaaattaaccagacatggtggcaggcgcctgtaatcccagctactagggaagctgaggcaggagaattgcttgaaaccagaaggcggaacttgcagtgagccgagatggcgccactgcacatatgtctgtgcatatgtgtagatgtgtgtgtgtgggcggggtcgccccctccagatgctccaggggagggtccttcctgcctcttccggctactggtggccctaggccttcctgggcctgtggctgcgcagccccaacctctgcctgcatcgtcacatagtcgtgtgcgtgtgtgtgtacgtgtctatgtgtgtgtatgcatgtgtgtctgtgcatatgtgtagatgtgtgtgtcttggtatgtatatgtgtgtctgtgtgtgtctgtcttggtaggtatatgtgtgtgtgcatgttcagttgcgtgtgttggtgtgtgcatatgtgcatagaggtaggtgtgtatcggtttgtgtgtgcatgtgtgtctgcatatgtgtaggcacgtgtgtcggtgttggtatgtgtacatgtgtgtgcatgtgtgtgtgttggtgtgtctgcatgtgtatgtgcatatgtgtaggtgtgttggcatgtgtgtgcatgtgtgttggtgtgtatgtgtgtgcatatgtgtaggtgtgtgttggtttgtgtgtctgcatatgtgtaggcatgtgtgtgttggtgtggatgtgtgtgcatatgtggtgtgtgtgcatgtgtaggtgtgtgtgcatgtgtctttgcatatgtgtaggtgtgttggtatgtgtgcatgtatgtgtacacaggtgtgtgtgcatgtctgtgcatatccataggtgtgtctgtgtgtgttggtatatgtgtgtctgtgttggtatgtaggggtgtgtgcatgtgtgtgcatatgtgtaggtgcgtgtgtgtctgtgcgtgtgtgtgtgtccgtcctctcctctcgttatcaggccccagtcattgcattaggaccccctgctccagtctggcctcctcttgatcacagctgcaaggaccctacttccaactgaggtcccaattcacaggtatcagggtcaggacttgaacatattttggggggacacaattcaacccccgatgggagtgcagggcatgggagggaggagggaggcaaagtggggaacatgcagctgtcaggacaaggtcagcaccttcccaaattcttcctgcagatgtctgaatcccaattagccagttataatagcgtttctgcaagtgta

SEQ ID NO: 32442 - DNA, 960 bp, Artificial sequence
  DNA replication origin
tcgggttctctgctgttcttactcccactgggtagcccatagcagctgtagccaaagcccctcctcccggacaggccctggacagcaggaggccgcccggcgccctctcagtcccactgctgactggcagacgcccgatggggcagcctgtaccgcctgcactcacctctcagagctcccctgctctggatcttagcacccctgctttgtttgctcataataaacgcgtgcatacgccaatgtcatagcatattaggggatggggaatgctttggggaaaagacctggtctagggggatgcaggatgttggcgagggtgagtgaaatatcaaacagggcaggtaaagacgacctcattgggattcgacatttgcagaaaacatcgaagaagagagagtctgtcttgcagccggatgtctagggaagagcatgccaggctgagggctggaggtgcaaaggccccagggcaaggtggcgcctggctgaggaggcaagggggccacgtggctgcatcaggaggggcaggacctgggggtctcaggtcagagggaaagtgggagtcagagtgcctgaggcccctagagtcaccctatgtgaggggagagccctccagacaccaagatgaggaaggaccttcagagggtagaggtggagagaccaaccagggggctgtggtggttgcccaggcgagagtgaccatggccagggtggtgcgggcagtgggctctgtgtgtatttcacgacggagcctgtagttacacgcaggtgggctgtgaggatggtgtgtgaatcagcctcactcttgctgctgcgacaaatagaccctgacattgccacactcgcccctggaatggctgtgttctcactcccgtaagtccagcaagggttcccctgatgggcgggtgtcttcccttctggggtgagccgggactcaggctcccaacaccctccgtgccacca

SEQ ID NO: 32443 - DNA, 1665 bp, Artificial sequence
  DNA replication origin
tctcactgggatgggaggtccaaagccgcgcctgaacgcttggtggcagacaagggtctccaagcaggccgcactatcctgggaccgggctttggggtcgctcaggctgccacaccacagtgtcccggcgtctgcaccgggtagacccatcgcccccgagcctgtcttcctacctgcagcatggctaggacctccctggccgcagcagctgcctggggtcctgggaagccccctgtggaacagaggtgctgctggctacccaggcctgctccaacaccctgcctgaggcttgctttcccccaggaggggctggccaggcttaggtcctcgtgcccagcgccatcctgctggccaagtcactgccctggacacaaggcatgtcctggtccttacgtctttatccttccaggtggcatcgtccctggtccccttgcgggcttcggtgaccagggatgtgagtgagatgggccttgtcctgcatctggtgtgggtcccccacccggcagggggtgcagggcagtgggtccctctcgctcaccaccccccaggttcccaggtccaggcctcggggagcccaagccaggaggagctgaggacctcaggggtgaactaggaaaacgcccctaacagggacagggcccaggcaatgtggcttcaggggactgtgtgcaaatcatgcttgtggacctggggcgtggcgggaggcccaaaggtgggcatccggatgttggaatcagagctggaggctcggcctggagccgtgtgtggcactgggctcggtatccagagcacaggacagggcagtgcgggtccccggggtcgtggttggtcacgcagaaccactgctgggccttcccccttttgcagacagggccaggcctgtgtgaaggtgaaacgcacagcagggacagagcctagggggtgggaggggcggcttctgccatcccctaggtcactgtgagccctgcttgtcttgggcactcaggctcagctcaggggccaccccactcccagggcctgctcccgggccagggtgagacccaggcacctcttggtgaggctgcagagaggagccgaggatgacagccgtgtcccttatgatgagttgctgttggccaggccccatgctgaggacaaagctccggaggcctcaccaaagcctgtgtgggggcagtggcccccagggacgatggtgacactggctgcagggtgctgagagctgagtcactcagctgggctttaactccagagcttcacccaaatgtgagctcagctggccaggcgggctctgagaacgggggcctgtggatctcaagtcctgagccccacacctccgtcaccgcagctgaagcccccaggaaccggctcccaggagcagtgcagggccaagctttctgcggggaaagcaagctttctgttctggctcacattcgggtgccctggccgcagaaaaggtatttttatcattgaaatggctgcgaattactaaactaagtatgtttacaaggtctccggcaggacacacagggtgacctccacagagatggtgagaagaggcctgggacactcatggccagaaaaggagtgagaaacgggtgtggccttcagctgggggcatccccggcttcccagcccctgcttgatgggtttttcatttgctcgttc

SEQ ID NO: 32444 - DNA, 1867 bp, Artificial sequence
  DNA replication origin
agcctgagcgaccccaaagcccggtcccaggatagtgcggcctgcttggagacccttgtctgccaccaagcgttcaggcgcggctttggacctcccatcccagtgagatggcatccaacactcacttcctggtcagtgtagacggaggtggagggagggctgcccccctgaggatttggggcaggttctgaactgaccaggccaagctgacctgggctgagaaccaggctgggtgtgaagagatgctctgggccagtggtaccctctcctgcctgggaccttccccagtgcccccatcctcatgggtgggccctgtccatccccatttcttgagagctccagactgtcacaccttgacagcggggagggtagggcttcctgtccctctggagtctctccagccataggagcacgctggcagccatgggcttccagcacctgcagggccacggcggggccctcggagctcctcccagggggtgagttctgctgagttcctcctgcgcctggccaggaacggggtagggaattccctgtgcttgggacttccagggtccagggcaaggcagggaacaggaacttgggggttgggttgaatgctggggagctgagggctgagtgcaggggggctgctggctgagtgctgggggctgctggctgagtgttgagggctgctagctggggggctgatggccaagcttcgtgatttcctggtcagcctgctcaggctgcggaggggagtgggaggaagagagccaaacccacgcctggctgctctgggggtcttgggcagcctctagcccaggagagaagacaaggcagtcactcaaggcgctgaaaacaacggcctcctttactgttaaaatgcagccacaggtgcttagccgtgggcatctcaaccaccagcctctgtggggggcaggtgggcgtccctgtgggcctctgggcccacgtccagcctctgtcctctgccttccgttcttcgacagtgttcccggcatccctggtcacttggtacttggcgtgggcctcctgtgctgctccagcagctcctccaggtggtcggcccgcttcaccgcagcctgcagcacacccacagggtcaggcctgctcccagccccgaggtccagcagggctggccacagggactcacctcatgttgtgtccggaggctgctcacggcctcctccttcctcgcgagggctgtcttcaccctgtgggtagtacatggtaggcttcagtgtggcccccgccccatgtccccagagtggcctgcagtgcacagggtgcacggggcagccgcctggtcagcctggtcccagccctgctgaccacgactcctgtggctggcccagacagctgtccaggcaacccacctgctgtgagtcaggacccaacacaggccactggagtatgaccctggccacacctggggaggcctggtacccagatggggtgggacacctcgcccacacccacctctcagcctgtggcagcagatggcacaggaaggatgcaggacccccgtggagggagctcgctgggaaccttacagtgccccagctctttcagcgcctgtccacccagcccagggccccgggagctgactccctggagaactcgccaggcccagacccgacccactcgggtgccccaacagggatggccgacaccctagactaagcaccagggaggaaaacagatctaggtctcctgggccccaaacatggaacccacaccagcctctgtctacagggccctgtctctgcatctcctggccttcctcagccacagcctcctggggcttggagctgcagaggtcctgcccgctcccctgccccgcctccgtctccagccctgcagcccc

SEQ ID NO: 32445 - DNA, 1079 bp, Artificial sequence
  DNA replication origin
gtgggctgggatgtcaccgagcagccaggcaggctttggcagtggatgcctctgggcccagtagcatgctcccgacgtagccctgtggggcccagggctggacagatgaaactctgggagttttcagaggcttccaggaggctgccagcttaggctctgaatgcctgggcttgggggcccaggccccgccctcagcaacacgcaagtccaactttcccatcccatctggtagcagaaggtggcctcaggttgtcatgggctgtgggtctctgagggaggggaccgtgggctgtgcatcatgacgatctctggtacgcctatgcccacactgggtcctgacaacaggacgtagcgcacccctggacaggggtctggagagggggaaggccccttgctcccctgtggctcagagcctggagccccccaggaccccctgaggctggccctggccccgcgggccggctccgggtggcaacccccaggcagcgcatgtccccccaggaggcgtggctgctgaaccgggaacaggagctgagggaagaaatccggaaaggccgggacaaggagattgagctggtcattcaccggctggaggccgacatggcgctggccaaggaggagagtgagaaggctgccgagagccggtaaggacccgccatggctgggtcaccagctggggaggcccacgagctgaggcgcaaggacccgtgtgtgactgggctggagtgaccctgccctccccccacctccagcatcaagcgcttacgggacaagtacgaggccgagctctccgagctggagcagtcggagcggaagcttcaggagcggtgctcggagctgaagggccagcttggggaggccgagggcgagaatctgcgtctgcagggccttgtgcggcagaaggagcgggcgctggaggatgcgcaggcggtgagtgggcgggtgtcaggtgggcagtgggcacccacaggcccctcctgcatgcacgcagccagtcgctggcagccggctcactgccttctgtgcccacccaggtgaacgagcagctttctagcgagcgcagcaacctggcccaggtg

SEQ ID NO: 32446 - DNA, 1369 bp, Artificial sequence
  DNA replication origin
aacggcagcggctgtacagtgaggtggctgaggagagggagcggctgggccagcaggcagccaggtgccgcccgggggcaccacgccctctcccagggacccctcgctggctgacccctcccccccgccccctcacccgctgacctctcccatccctgactccttactcgatgacccctcacctgctgactcctccctggccgcaggcagcgggcggagctggaagagctgaggcagcagctggaggagagcagctctgcactgacccgagccctgagggctgagtttgagaagggcagggaggagcaggagcgccggcaccaggtctaccaccggagggctgtgctgggcctggccagggggctgcacggggtgggactgactggcctcttatgtccgccccccagatggagctgaataccctgaagcagcagctggagctggagaggcaggcgtgggaggccggccgcaccaggaaggaggtgggggcctgggcacccaggtgggcaggggttgggggctgccctgcgtgggcaggagttgggggctgccccaggtgggttttgctgctgctgtggcatcctgggggctcgtttctgggagtcacatctggctgcttggggttgttgtctgaactgacgctgagtgtgttgctttcagcccatcttttgcgtgggctctggaaggatcaagggtgcctggagcgcatcctctgtggtccgagaacaggcgttgcccctctcgctaggggctgctacacccctgcgccccacgaccagcccactgacactcagatgtaccgagagggacacgcacaacaggggctccccccttagcctctggggccttctgtggggggtggactctgccacggtgacagtcccacacacattctcaccacccatgcccgccgcgaggctacagtccaggctgaccgtgcccgtcacctggtttcacaccctggtgggctgggatgtcaccgagcagccaggcaggctttggcagtggatgcctctgggcccagtagcatgctcccgacgtagccctgtggggcccagggctggacagatgaaactctgggagttttcagaggcttccaggaggctgccagcttaggctctgaatgcctgggcttgggggcccaggccccgccctcagcaacacgcaagtccaactttcccatcccatctggtagcagaaggtggcctcaggttgtcatgggctgtgggtctctgagggaggggaccgtgggctgtgcatcatgacgatctctggtacgcctatgcccacactgggtcctgacaacaggacgtagcgcacccctggacaggggtctggagagggggaaggccccttgctcccctgtggc

SEQ ID NO: 32447 - DNA, 1197 bp, Artificial sequence
  DNA replication origin
ggcaggcaggcggatggggcaggaggctggtgggtgttgtggtctgaaggggcctcggacccttgggtgatgtgcagggctccccgaggcctggtcctctcgctctggacacctgccagggtgcctgggagccgtcagtggtagcaccaggagtgtcaggagccctgagccccacaggctgggagaggcgccgtggccctgtgggggtctcttccccacctcgtgggcgtcaagactcagctgtgcttcgggttggatccaaggaggccctgggtgggcggggtcccctctgggcctgagacaggctggtcttgtgccagggttggacttcccgggcccaccctagctggacgtggccctagctggtgccccgcccccaggtctggagcccgagatccagaagctgattgcaaggcacaagcaggaagtgcggaggctcaagagcctgcacgaggcggagctgctgcagtcggatgagcgggcctcgcagcgctgcctgcgccaggccgaggagctgcgggagcagctggagcgggagaaggaggcgctgggccagcaggagcgcgaacgtgctcggcagcggtgggtggtggccccaggccggtggggccaggaccctcagggcggggagtcggaatcctcgaaggctggagtggagttcccatgtagaggtgggcgagggtcttagtgcagcatgcagggaggacgcagggcccttggccctggagtggcccttgggggcccagcctcagccgggccagtgtcctcgggcttgtgtctgcagttcatgcccgccgaggtctgcaggttctgcatgggtgcacgggtgttttcccagggtcagggctgggaacccccaccagacatccactctttcacaactggccccagagcagcaacccgtggataggcggcctcgaggcccctccagctctgaccttggggcccagggacggtctctctcattcactcccttggcctggggtctgaggggtgactgctgctcttgcgtcctgagccctgggggctggggacgtgcccagtggtggtcaggatctgcgggccacagggggcagtggcagcccctcctgcactgtctgcgccaccaggacagcctggaagccaccctctcctatccaccctgttgcctgtcgtggctggtcctccccagatgcagcttggctggtcccccagtct

SEQ ID NO: 32448 - DNA, 1442 bp, Artificial sequence
  DNA replication origin
caggctctggggcggggccgtgggcctgctgtcacagatgtggacgcacagtccctgcccggccacagcacggtagccgtggacccaggagcctctgcctggtctgccccactgccaggtccttgggccatgggacctgctctctctactgaccaggtgtcggtggagcattgactccccgccccttcccgctgtgtgagctccctgggggcctcagcctccctggctatgcttcccaccagcttgggcagtgatggtcccgagcccaggttctggagtggggcttggcactggcattttaaaatccctgcacgtgactgtggctgacagccggggttgaggactgccagtcccatggaagaatgcaggctctggggccgtcccgacaggcagcagcacccctctctggggcaaggcctctgcaggctgatggctgccctcccatgtctcaggccaccaaggtgtgtggcagggtgggcctgggcctccagcctggccccgggcgctggggagggcagcagtggctctgtctcggggcagcacacccaaccatgagtgccggccttgtgctggtggacctggaagcccggccctgactgtgcccacagggtggcaaagggacgggggtgtccttcgtgtcgtttcctcctgccctgttctgctcgtaggagattaaaaaactcaaagaattaatgagcgccaccgagaaagcccgccgggagaagtggatcagtgagaaaaccaagaagatcaaggaggtcactgtccgaggtgggccctcccctcccatgagccggccaggtgtggggtgggtgctgcggccagggcttcttttgagagagccataacttcaggcattcatgtagtccgagaccttcctgggcagaggtgaacactcatgccccaaccacccccgtcacggcctccgctgcggcttctgccgtgacccggggggcaggtgggctccacacaggagcctggcccagcccccagcatctaggcagttgcctgaaacgagggggctcagtgcctcacttcctcagggttgggctaggggagattgggagtttgtggacgactgtggcacgtgggccctgccacgggaagcagagtgagccacaggaggaggcaggggcaggcaggcggatggggcaggaggctggtgggtgttgtggtctgaaggggcctcggacccttgggtgatgtgcagggctccccgaggcctggtcctctcgctctggacacctgccagggtgcctgggagccgtcagtggtagcaccaggagtgtcaggagccctgagccccacaggctgggagaggcgccgtggccctgtgggggtctcttccccacctcgtgggcgtcaagactcagctgtgcttcgggttggatccaaggaggccctgggtgggcggggtcccctctgggcctgagacaggctgg

SEQ ID NO: 32449 - DNA, 992 bp, Artificial sequence
  DNA replication origin
ccgcggctgggacaggctgctgcgccaggcggccctggaccgccgcttctgcccctaagccgccctcgcagcccaggtgaccggtttgtcctacccggggagcatcgccctcctccgccgggcccgagcccggcgtgggggttgtaggccggcaccacagcgtgaggacaccgcgacctctgcccccgggagcgcgctgaatgccaggtggggctgctgtcgcaggccgtggagccgcagccccgctgaatggcagggtcaggctgggcgtcggggtcctggcagagaccgcggcgagggccagagcaggtgcactggccgctgcacacgcgccgctaggctcccggacaccgctggcgcgcacccctggtggcagccggctcaggagccgcgggagggcggtgcccagtccccagccaagcggcagcgcgaagctccttccccgcttgggggagtgggcgtggcccaggggcccgactgccttactagtgaaaaagctggggttggagctgccacggggggaggtggggggcctaggaggctctctctggaccttctgggtgtcctcctgcgacctcaggttcttcacctgtctcagaggactgatgggctggtatggcaaggttgtttggaggattaagccagatagtcgcagtaaagccccattagcccgtctggcctctggatttttttttaaattatttttctggctttcttaggaaactttccagaatgtgtccaggtgttgaagcgggaaggctggacaccctcccttggcgttgcggttccttccagacgccccctcttcttaggctcttttcaagcgcacgcccagcaacgtgtgctctacccaagagcgcgtcacagatcttcctgtgggtctaaaaccagaaggctttcttccatgacccctgccctcatatcaccgcaacgccatgtctcttggcagagccggctacagaatcgagtgtcagtttaatgcttgttcccta

SEQ ID NO: 32450 - DNA, 1510 bp, Artificial sequence
  DNA replication origin
gtcgcggtgtcctcacgctgtggtgccggcctacaacccccacgccgggctcgggcccggcggaggagggcgatgctccccgggtaggacaaaccggtcacctgggctgcgagggcggcttaggggcagaagcggcggtccagggccgcctggcgcagcagcctgtcccagccgcggtccctgcagtccctccctggcggctgcgcagccgtcccacgacaggggccataaactctccagagcggaaagccgcaccctggtggcccggccccgcgcccagacctggcggccgctggcacctgacccgctgcatgggtctccagggagctcgctgcccacccggcgctgcaggctcggctccctcgtacactctctggtaggtgctagggacgaccctatgggccagcttgccatgcccagtccccaggccgcacccaccctggctccctgggctaggggactggctcctcctgtgagtcgtgggtctgggaggcaggggcgttaggggagagtgagggaccgagggcagcccctgctgtgtgcacagcgaggtcgtgcacaggcgtctgttgcagagcgtgcagcttcagatgagactggattgcaggtggagatgactgtgggtgcgcacacctggaggtgaaggggaggcagcctgtctacctgacccatgaaatacaggagactgtaccccagaagcagcgggttcactgctccattgattaagcaagtctgggacacacatgtagctaagctgtgagttctgtaccagcgatcccaacacccacgccctcagaaagacactggtgtggggcctgggtgcttgtcaggcctgaaagtggagagcacgggccagagacactgagtagggggaacccaccctagggctctgagggacgacgatgtggggagctggtgacagagcctgagctggcccaatgttgcacggtggggacagattcgaggtacagtggggactggtgacctcagttcccagtgtcccagcctggcctcccagtccacccagcaattagtgggtgctgccctgcaaagactctgggggtgcctcagccctcctcatcacacgtgactggtgacttctgtgtccacccgcacaataagagggatcttctctcactttcaggcaagcccaagaaagtcaggggcctatgtgagccaaagaggagagaaggtgatgcctcagcccagtgtttctgccccacctcgcttgtggccttcggaacttgatttgcaccgcaggaaaatgggcaatgaaaacccctccctaactggcttctcagtccactctgaccagcccactgcacagcgcccaccctgcagctccaggtacagaggctgggatggctctgggctgacctaagggccttctgatggctccaaccctcgggatgcctcatgctcaccctttggcacccacctgacagctcagcatctctgctctctgccatcctcaatgcctgctctagacaagcccaagtcccccaggagt

SEQ ID NO: 32451 - DNA, 805 bp, Artificial sequence
  DNA replication origin
gcgggagggcatgagcgaggggagggccgcgttcccaggagggcggtgggagaaggacgggggtcgcaccgctggcctcgtggtggtgcacgttgatgcgctccagctgcaggtggctgtccccgtggtaggtgccagcggagtcgatggcatgttcatcagagatcacctcccagaactgcaagagacgggaggggccagacaggccggggctgagtcacggaggcgccccagccgctctcccacccccacccgcacccccatccctaggccgccctgtccctggggtccaccccagccgcctcgccagccacccggttccaccgtccccggcagggagcccaggggccgcaatgcaggggcaccgctcccgccactgccaacatcttccccagccacccggcaggcccgggctgggccctcagagccctggctgccaaccttggcgccgatctggttcccgcactgcccggtctgcgtgagcacgatttccctcatggccaaggcaggattagggcggcagcagaagcgcgagaaggaggagcagacgcgcagcgacccagcccgccctccgctaacgcttaaatagccccgcgtccacctccctcagcctccgattgggctcccagaataagcaacagctttacttccacacaggtgcacccacctgtgaatcccttggcgttgaacgtctgttggagaactcaggtgtccttgctatggtcccttccacgttggggaaagctgctcagctggagaacttcttcccacgtctttagtaagactagatccctagctgagctga

SEQ ID NO: 32452 - DNA, 716 bp, Artificial sequence
  DNA replication origin
gtcaggttacaagagggagtgcaggggccatgtcaggccgaggatgtgaggaagagggtgtggggagaggggtgttgggtggggctaagcgggagggtgcttggcttctccttggagcaaaggaaagtgtgaaactgtgtaatacgacctagtttatgttttgaggaatggattgctgggaaaaggggacatgggggacctgctgggggccagtgggggccagtggggtgcccacagggagatgatttggcgtgagccagtgaaagaagtggagatagagcaaggtggagggaattgcagggtcttagggggagaaatagaggggacgtgtggctggatgagatatgagtggtgacccctgaggtggggaaatggggcacagccttgcggggaggttggcgaggtctatttgcacctgttgggttggagccccaggtgacatccttgtgggagggtcactggatccttggcagcaagtcaggtgctcagggagacactgggtggggtgggagccacagacgtgctgatggcaaagatagagttcctggaggtgtggctccctctgcgggctgaggatctagctgacaactccctgttctgaacccaccatcgtagctcatgctgtaaaggacgcgtgcctcagtataagtcagttctatgcggctgttaggcaaggaggcccagttaggtcctgccctgagagtgggttgggatgt

SEQ ID NO: 32453 - DNA, 905 bp, Artificial sequence
  DNA replication origin
agcaagagggccctgcagtgccctggccgccagcagggggcgcaaggccatgacaccgtgagcaagagggccctgcagtgcccccggccgccagcagggggcgcaaggccatgacaccgtgagcaagagggccctgcagtgccctggccgccagcagggggcgcaaggccatgacaccgtgagcaagagggccctgcagtgcccaggccgccagcagggggcgcaaggccatgacaccgtgagcaagagggccctgcagtgcccccggccgccagcagggggcgcaaggccatgacaccgtgagcaagagggccctgcagtgcccaggccgccagcagggggcgcaaggccatgacaccgtgagcaagagggccctgcagtgcccaggccgccagcagggggcgcaaggccatgacaccgtgagcaagagggccctgcagtgcccccggccgccagcagggcgtccacaccgggccgaagcgagggtgaagcccgcgtcctcctcggcacagacccggggggcaccgcctcgctttgggacaactcgaggccatggtgagtaaaatccttcctgtttgcagccctgactactgagggttagagaccagtaagcggggtcggtgtgggaaactggaaaccaaaagcccctccgaatcctgagcactgaggttctccccacccaaggcgaggcgggcgcagtgcgaggtctacaccgcggccttggaacacaaatggagcgttcctaatgcagatatgcctcccgaaatacgaatgtgacactcgcagtgctcaggtaacaaacacctgtaatgctaatgcgctgcctcaatacaaaaatgttaatatgaaaccccgtgctccccacacggccccgcagtccccgctcacaataatcaacactgaca

SEQ ID NO: 32454 - DNA, 922 bp, Artificial sequence
  DNA replication origin
tctgaactgatcatccaggagatgcaactctactccaggctttgcctagacagcgtcggaaggtggggggagagactcagccagaatttcacggacaaacaagggcacagagaggccagcgagctcccttgcacgtcagccggggtgcgcactgcgcgcaggtctagccaggaggccggcaaagacagccagaggtgtgccttcgaccgccaggcgctccgtgctggcagccgggaggccgcaggggcccgggcgggcgggcgacggtggcgcgcaggcgcagaggaggcgagccgccggagggtgtcaggcctggacgctgcgcgggcccggcgtttcgcgggacgggggtctccacccagcgcaggggacgacgcgttctccgggggtggggggtgggggtggggaggggcccaggggacgacgcgttttccgggggcggggggtgggggtggggagggggcggtcaggcggcggggtggggcggtggagaggcgggagagctctgtcccggctgctcccacagcccaggcggctgcccgcaaacccgcgcgtgcgcagtaggcggcccacctgctggtacctgggccggctctgggatccccgggatgcccaggaaagaatggcagttctccgctgtgtggagtctctcaccgggcctagacctagaaggcaggaatcccaggccggtcagcccggtggagggggcggggcggagacacgcccctccgtagccagccaggtgttccccgcgaaagagaggccaccgccctgccccgaaccacccgaccccgtcccaaccccgcgtcctaaagctcctccagcagagcccggtattcttcctcgctgaggggtgcttccagcgaggcggcctcttccgaggcctccagctcccccggggcctccgtttctgggaaagggt

SEQ ID NO: 32455 - DNA, 1125 bp, Artificial sequence
  DNA replication origin
cgccacccctccaccgccttccccctcctccctcctctcgccacctctaggccccgccccggtcctgccgcccagtctcctcgctgcagtcgctccggagctgcacgggtgttttgcgtgttgctgcgtcatcgccagtggccggtttgaatgagactcgtcgcaccgaagccgccgccaccaccgcgcctccgcctcggccgccgccgcagctgctcctggtccccgtccctttgccgccctcgtcaggcccagctctcctgcgccgccgcctcccgccgcgccccgccatgccgctctactccggtgagccctgtcctggcctcgcgcgcagcacaccggaccggcgctaggcctccgcgtaggcctggcctgcacgggcgggcacccggcatggactgggaggggccggggtggggtgcgcggggccggcggcgcggagatgacccaggcaccgtcccctctcccggctgggtcggagccctgcgtggcaggggagcgccgtccccctgagccaccgatgggtggggggagtggagatggggaagcctctcaaagtcgtgactctgcagaatagtttctgacgctgccctggtgtgcggtgaaagtgagggtgtgtcctggggcgctgggccaggctggaggtgcagggagattcctttgggcttctcagtggtcgccgtggaagggagcggggaagaaggggagggatggagcgacccttcttggggttgccaagcggcgttcgccgcccttcgtcgtccttcgcccttctcttgccccttgcctttgttcgaccgcccctttggtaccagttttagttttgtcccgaggcagattgtaaacctttttgcttcgttttcgtttcatcaaacgttgcattggatttctgtatccgaaacgtggtgtgagctttcagaagtagatgaatacacatatccccggggtgtcatttcttgattggcgtttgacaggggcttgtattgtttgcttgctgacagtccagggtactggccagggatcacttttacttagggaatggaccttgctgctccctagccttattcaaaatggcacctaaaatatgtgtggtgtctccaattggctgtaggtgtgtgattcgtt

SEQ ID NO: 32456 - DNA, 1306 bp, Artificial sequence
  DNA replication origin
gcggggcgggcgcgggagggcgcgagaggggcgtgggcgcggccgctcgctcggccgggtcgggccagggggaggggcgctgggagagcgagagcggcgcgcgcggcagccccgaggcagcagagcgcggagccgggagcgcggggagcgcgggccggcggcggcgagggaggacgggggcgcagacggccggcgcgcggcgcggctaccatgggcgtgcggtgagcagccgctcgggacgacttcctcggctgcgcggcgctcgcgcggagctccccggccggcggtgcgtccccacggtcaccatgaaaggtagggcggcggcagctccgcggggctctgggcggggggaacgggcttcggggcgcgcgggaggccacggaggtgcctcccgcgcgaaccttcccttgggctgcgggcccggggagtcggggctgccagggcgccgggttcgtgcgcggacactgggggcgcacccggctcccgggtcaggcgcggctggagacctcgaggttggggttttgaagcgcgcaagtattcccctccccatcgcgtctttgcaagtagtttgaagccctaagtcgttgtttacggattcccgtttccaactttttaattgaaaaaacctgccgaggagagtggaggcatcgccatccctcccggtcgcttttccacgccgcagcgctccccacgctcgcccagtcctctctcctcccgcctctagccgtttcccggcccgagcggtccccgcgctggcggccgggtgttttctccgggactggggatgttctccgtgcgccctcgccacatctggcaatgattaggtgcccgaggagttcagctggctcgggaagtgcatttggcatctttctccatcagattcaccgactggaaaatagttgccctcggttccgcgtcccttccacgtgcccgccttggggtgtgcccactggtgttttggggtgacacacctcagctggttagtcgccccctgcgcggtgtcctctgcaggccggtttatggaagtgtcagatgttatcgtactttagaaagaagcacgagaaggactgcagggcagccttctgtttagtggaaacacggagatttgtcagcggaatcctgatttatgtatgagataagtaaccgcagcggaggcatcaaagagtcgttcaggaatgggcccgcgtggtgtttacacaaggcttcgtgtgagagttgctggttctgtgctaggataacacagccctgcgtgggtgcgaaatgccatctgaccgcggtcaccccgcttccagccgccacagacctg

SEQ ID NO: 32457 - DNA, 1176 bp, Artificial sequence
  DNA replication origin
gaagcccgttccccccgcccagagccccgcggagctgccgccgccctacctttcatggtgaccgtggggacgcaccgccggccggggagctccgcgcgagcgccgcgcagccgaggaagtcgtcccgagcggctgctcaccgcacgcccatggtagccgcgccgcgcgccggccgtctgcgcccccgtcctccctcgccgccgccggcccgcgctccccgcgctcccggctccgcgctctgctgcctcggggctgccgcgcgcgccgctctcgctctcccagcgcccctccccctggcccgacccggccgagcgagcggccgcgcccacgcccctctcgcgccctcccgcgcccgccccgccctcggcccgcgcctgccctcgccgggcactttctcgcccgccctctcctgcgcgccctggccccactcgcgcgggctctctctttttcccgttgcaccagcgtcgggatgaagtcgggagcaaagcccttcccggggcggtccagcgttcaccttcggcgagcacctaaggtgccgctgctgctggggtcgcttctacaccccaaactacctagcaagtgttgggcgagaggatggggagctgctgtgccccgggggtggcggggggtaaggtgggcccttccccaaacggctctggggcatggagaggtacagaacgtcctccgggttcagagtttccaagtgcgtgcgctggttgacgcctgaaggagaccaagcagcagggaacactctctctgtcacccagggagagcccgagtggccagaatccgaagtcaccattagacactctctctgcgctcttggacacctccagagaaaaagccagcacatcctgccttggctggaaaagccagccttccacccagcgcccctaaaatgatcgggttgactccagttttgttacgaaaggaggccgggctgctgagaggctccctgagttcccttcgtggtcgcccgtcacattgccctgctgtatacttaataaagcccgtgtttatctttctctttagaaccccctctaagcagacccatcgctttattgctttaaaacatacactaagtggtgagtggagctggggcgagggaggtgcggagaaactttctgccacatgttgacattacagatggctactcagacgcactagtccaccaaa

SEQ ID NO: 32458 - DNA, 1234 bp, Artificial sequence
  DNA replication origin
tggtgtcctggaaccaatccactctggatagtgaaggatgatgattatatttagtattccatataatggaagctgcagcccagatgggtcccacaccttttctaaagccataatagccaagaataaggctccattaagattgctattgtgtccagaacaagtccatttcaaattgaacatgattttctaacaattgcattttttttttttttcccaaggcagaagaatttttcttagtacagaacaaaatgaaaagtctcccatgtctacctctatccacacagacccggcaaccattcgatttctcaattttttccccacccttcccgcctttctattccacaaaaccgccattgtcatcatggcccatccccaatgagccgctgggcacacctcccagatggggccgtggccgggcagaggggctcctcacttcccagtaggggcggccgggcagaggcgcccctcacctcccggacggggcggctggccgggcggagacgctcctcacttcccagacggggcggttgccaggcagagggtttcctcacttctcagacgggtcggccgggcagaggcgcccctcacctcccggacggggcggctggccgggcggagacgctcctcacttcccagacggggcggttgccaggcagagggtttcctcacttctcagacgggtcggccgggcagaggcgctcctcacttcctagatggggtggcggcggggaagagacgctcctcactttccagactgggcagccaggcagaggggctcctcacatcccagacgatgggcggccaggcagagacgctcctcacttcccagacggggtggcggccgggcagaggctgcaatctcggcactttgggcggccaaggcaggcggctgggagatggaggctgtagcgagccgagatcatgccactgcactccagcctgggcaccattgagcactgagtgaaccagactccgtctgcaatcccggcacctcgggaggccaaggctggcggatcactcgcggttaggagctggagaccagcccggccaacacagcgaaaccccgtctccaccaaaaaaatacgaaaacctgtcaggcgtggcgacgcgcgcctgcaatcgcaggcactcggcaggctgaggcaggagaatcaggcagggaggttgcagtgagcagagatggcagcagcacagtccagcttccgctcggcttgagagggagaccgtggaagga

SEQ ID NO: 32459 - DNA, 1898 bp, Artificial sequence
  DNA replication origin
gggcccggaggtctggccgaggtccgaggaggggtccggaggtctggccgaggtccgaggaggggtccggaggtctggccgaggtccgaggaggggtccggaggtctggccgaggtccgaggaggggtccggaggtctggccgaggtccgaggagggcccggaggtctggccgaggtccgaggaggggtccggaggtctggccgaggtccgaggaggggtccggaggtctggccgaggtccgaggaggggtccggaggtctggccgaggtccgaggagggcccggaggtctggccgaggtccgaggaggggtccggaggtctggccgaggtccgaggaggggtccggaggtctggccgaggtccgaggaggggtccggaggtctggccgaggtccgaggagggcccggaggtctggccgaggtccgaggagggcccggaggtctggccgaggtccgaggaggggtccggaggtctggccgaggtccgaggaggggtccggaggtctggccgaggtccgaggaggggtccggaggtctggccgaggtccgaggaggggtccggaggtctggccgaggtccgaggaggggtctggaggtctggccgaggtccgaggagggtccggaggtctgaaagcgcagactgcagggcagactactgcaggatctaggcgctgacgaacaggaaagagggtgggaagtaagagaagaacctccagggagagagagggggacactgatagatggggatggcgtgtgagcagggagagagctggcggggagcccggaatggcagacaaatgcctcttcctatgaaaataaggggaaccggtgaggccaggagctgagagagatctttgcagagagggtggagtagaggcagagcgcaggaacttgcagggattcctgctagacagcttctgttttcttcttcttcctttttttttttttttttgtgagacgaagtctcgctgtcccccaggctggagtgtgcagtggcgcgatctcgactcactgcaaccgccgcctcctgagttcaagcgattctcccgcctcagcctcccgagtagctggggttacaggcgcgcgtcaccacgcctggctgatttttgtatttttagtagagacggggtttcgccatgttggccgggctggtctcaaactcctgacctcgggtgatccgcccacctcggcctcccaaagtgctgtggttacaggcgtgagccaccgcgcccggcagataacttgtgctttcgcagaggaagaattgagatcatttgcggagagtctgagggtgggggtcgagcagggccctccataattctggaacacagtctgggctgaccatttccccagcaaccactcctagaccaggattattgaaggactgttagacgccagctgactctggaggctgcagagctagctatgatctgtgctgggactaaaacctgggttctgacttctgggtacgttccttacagctccttaaaatctaggaatctaaagttttataaagattgcattagcagggtcgggcacgatggctcatgcctataatcccagcactttgggaggcagaggcgggcagatcgcttgagcccaggagttcgagaccagcctggccagcatggtgaaaccctgtctctactgaaaatacaaaaattagacgggtgtggtggtgggagcctgtaatcccagctacacgagaggctgaggcaagagagtcgcttgaacccgggaggcaaaagttgcagtgagctgaaatcacaccagtgcactccagcctgggcaacagagcgagactctgtctcaaaaaacaaaacaagagcaacaacagaaaaaaaacaaaaaaaaattcattagccacactttctccataggagatattaagtagaacg

SEQ ID NO: 32460 - DNA, 1003 bp, Artificial sequence
  DNA replication origin
gttttaaaaaaaatcgtaagtgggtactgtgaacttcatgccagtaaatttgaagaactggatgaaggggcatggttttgaaatatctagttagcaactggatatttgtgtctggagctcggaaaagcccagacaggaaacaaaggtgaccggaaacgggcagttattcattcaggtctgggaggcagaagtgatggcagggtacgtaggagtgtcatgattttgaagcgaggcagataaagaaaagccaggaatgaaaacccaaaatgaataatcacaaagttcgtggagaaatcggagaagcgcgacgacccctaacagagggaggggagagcagaagcggagtggtcaactgggagacattaaacgcggcaagggaggagagcgcaacgtgcctgcggggccgggcggctcggcggccgcgaatgaccttcggcggagcagggtcagcgcccccgtgtggcagcgggcgcgtggccgaggtccgaggagggcccggaggtctggccgaggtccgaggaggggcccggaggtctggccgaggtccgaggaggggcccggaggtctggccgaggtccgaggaggggcccggaggtctggccgaggtccgaggaggggcccggaggtctggccgaggtccgaggaggggtccggaggtctggccgaggtccgaggaggggtccggaggtctggccgaggtccgaggaggggtccggaggtctggccgaggtccgaggaggggtccggaggtctggccgaggtccgaggagggcccggaggtctggccgaggtccgaggaggggtccggaggtctggccgaggtccgaggaggggtccggaggtctggccgaggtccgaggaggggtccggaggtctggccgaggtccgaggagggcccggaggtctggccgaggtccgaggaggggtccggaggtctggccgaggtccgaggaggggtccggaggtctggccgaggtccgaggaggggtccggaggtctggcc

SEQ ID NO: 32461 - DNA, 1216 bp, Artificial sequence
  DNA replication origin
ggaggggacctgacgggggcgtaggcgccggaaggctgggggccccggagccgggccggcgtggcccgagttccggtgagcggacggcggcgcgcgcaggtacccgcagcccccgcccccgctagaagtcagggggcggggccggggggggggggcggaggaggtggagagtgaggccgaggcgtggggagcccgggaactccctcctcctgaagtaacgcgtcccgggccggctctgccgtcgttgctgccgccgggcgccccgggacgaggaggtggaggagggagagggcccgcgggcctcgcctccgccctccgccacctcgagctgcggtagcagcgactcatgagagcgcggccggaggacaggtaaggacccggtggggccccgcgggcggagggttccacctctgcccggacagggctaggccccagcgcccggagccgccgccgccgccgccgccgcggttccccgcccccgcgggcccgagtcgggaagttgggaagaaacttctcccctcccccggatcgcccggcgggcttgtctcgttccccgcgctacctgctcgcccctgactcggtctctgccctgtccagacctgccgggtcccgcccaagtccgacctgaggttccaggggcgtggggacactccccaccccttgtctttggggtcgtgtggaccgcccggcgacggggaggagaggtttatttttgcccctacggccgaagtaggggcgagggaagcggcccctttgggtcctaaaggctgggggtctgtgtatcggccgacgccggtagcagctgtgcggggagaggagcgggtgtgtggggcgagtggatgagcctttctggctttacttggtttgattgaaaaccgcaacatgtttaaagttttcctttgttttgggttgggggttgggaaatttaccattcagcgtccacttttacggaatcatgccactccgcctcccgttgcgttcggttccctgtccacatgtgttaaagaaaattgtcttaaagtgtgtttttcttcttgataattgcttccagctttcactttattgggcatggggcagagctgttttaagaagctctttgaaaatcaagtctggtgtagggactttagtttttgttttgtaatgagtaggacttaacagttcggatttggttgaatcattttctgcataattaattgatacaggcgtggaataacat

SEQ ID NO: 32462 - DNA, 1314 bp, Artificial sequence
  DNA replication origin
gtcctccggccgcgctctcatgagtcgctgctaccgcagctcgaggtggcggagggcggaggcgaggcccgcgggccctctccctcctccacctcctcgtcccggggcgcccggcggcagcaacgacggcagagccggcccgggacgcgttacttcaggaggagggagttcccgggctccccacgcctcggcctcactctccacctcctccgccccccccccccggccccgccccctgacttctagcgggggcgggggctgcgggtacctgcgcgcgccgccgtccgctcaccggaactcgggccacgccggcccggctccggggcccccagccttccggcgcctacgcccccgtcaggtcccctccgcgggctccgggccgctttgctgtggtcaggataggcgaccggtccgtgtcacttctcccgacccaacatggcggcggggtccggggcggattcccgggggcggtgcaggccgagggggcgtgaggaggaggtgcttccctgcccggagagcaggcccgcggcgtcccttcccacccgcgaacccaccgacgctcggctgccgcggagattgaatggagcgctccgattctgcccctctgcctttctctgttccttggcccagctctcagtagtggccagggctttggggcttgcttttgtgggggaggacggggttgagtttttttggttggctgtttgcttctcagcgctacgcttccgcaccctttgtcgttggtagtaaaatctcaagcccaaccgcgtgagccgggggcgttactcacaccctcatcaccatcctgatcgccgtccaaaaaacgttcacgtcttgcctccttccgaggcagggatcctgtccctgcccccaggagcttcctgttgactgtaggtcgaaccagccttgccgggaggggaaccgaagctgagttctgtttggcgactatcccagtcatggtggctttggcttatgttgggacagcgtttttctatatgatgctggcggcagcccagtgagggaagtgcaacaagtatggttctcctgcttgtcaactgtggaaacagcgaccctgaaagtggaggagccacagctggaatcgtgtccgtctgaatacacgcacctttcctatgagccttgtaaagccagtcgttgaagaagggggaggacccggaaggatggggtgggggcgtaaagatgaaggttaatcaaggtcctcatggactgaaccttgaggcccttctgctgcagtcacttttgccctatcagacttttagagtaacttcctctctttatttcctctttggtggggtt

SEQ ID NO: 32463 - DNA, 1675 bp, Artificial sequence
  DNA replication origin
ccctcggactttgctttgttactgcttgttctggactatccgggtggggtctctctctctcctccaccctttcttttcatttcattccaattctttcccctgaagagctttctttcaagtgatccgtgttccaactgcattttgaatcccaggctgtcttggggggcgtgcggtggggagggtgttggcccggtgtgattgaggaaaagcgacttaagagagggaagaacaaggacgagactgcgaaggagggggaaaaacaggcgcaaaggaggaggaagggaaagccagcaggcaggcaggaccgggagagcagccctgcctggcccgggatggaggaaccttggcttttttcttaaccccgggtttctaaccggcaggcgcggcccaggttcccggaggcagccccagagtcgcggaccgatgtgccaggctgtggatgagccctgggtaggggagggttcgtaccagcggcgcctggggcagcgaggagcgcgcgttctgcctgcgaagctgccttctccgagccccgcccaggaacattagctctggggggccgctgatcattgatttggacggagagatgggttctgggttctgtattaggattccagcatctgggctcgaggcagggcaatatccagaaagaccccagggttcggggtacccgggccagggctgaggcgcatcgccgagcaaaggctgggtgcgaggcgtgcggaatgatgcgcttgccttgcccgggcctctccaaggatggagaaaaggcgagtgaagcagcgaagtacgactccaaccccgcccagagagtgctactagcgctggctgcacgccaagtctctccaggggtccaaagcgagagggatttgttttaacccatctctacccgtcctgtgtcaagaacggaggctgtagagggcgactgcgaagtcgccaggcactcgctggatctcggtccccctcctcgtgctctggggttgagatggggcaccgccatcgataacagatcagcgcgaactattcgtttagtggccttaaaacaccctggtttcaccctcagctattttcaagttcccgtgtgcctggcactttctccgtgcgagaagcaccggagggtgcggacgcgccacagtctgagccgccgccgaactggctaagtttaggggcatttattattcatgttcctgccagatcctcgcctgcccaaaatagaaaccgaggttctccgtgacctacatctgctcggagaagggctcccctgggctcggaggctggggtgggggtggctgaggagttggcccccgcacgccccacgcatcctctcctttgctttctgggcctccccattcgggtcttcgcgtgggtcagcgcccggtctcccagggcctttctcgtccccgcccgttgctgctttggggaggctcgggagccaggcggggaggggggcggtccttttccgtagacaggtgtgcgcgatcggcggagacgcctcggtttcccagcgcttgttgaggccgtggcccgcaggacgaccctttacccgcgaagggggggtgggcgggccgcccggcggggtaggagtggttgggtgtcgttgcctcctccttacctctgctcccacccccagtcctgggagaagagacaattctcagcggaggacttttatcacctgtga

SEQ ID NO: 32464 - DNA, 1058 bp, Artificial sequence
  DNA replication origin
tcgggagccaggcggggaggggggcggtccttttccgtagacaggtgtgcgcgatcggcggagacgcctcggtttcccagcgcttgttgaggccgtggcccgcaggacgaccctttacccgcgaagggggggtgggcgggccgcccggcggggtaggagtggttgggtgtcgttgcctcctccttacctctgctcccacccccagtcctgggagaagagacaattctcagcggaggacttttatcacctgtgaaaatccgcgcgagccccttactttggatcctcgccgagctggggaggaacttgcactgaccacaccttctgtccccggccaccccgcaggccagaggaagaggcgtacggcgaggacggaaacccgctgccagacttcgatggctcggagccgccgggcgcagggagccccgcctccgcgccgcgcgccgccgccgcctggtaccgcccggccgggagaaggtgagattcgcgcggcctcgcgcacacccgcggctgggagctcgggactgcggtgacgggaggggcagtgtggtgacccacccaggatttttttttttttcccgtgaaagtcctcaagcctgtcctctccctggcccgatcctattgcagcgacagaaaatcagcagcgggcgggtctgtgtggacctgagggccgcgtggggaccgaggggggctgtggcccaaagagtggcagtgagtggcgtcaaggaacccacactccgcatctgccactcctagagccgggactagctcccgatcctagcagttgctctcgagatcatcccgggagttattggcgagttctgggcctctggaggtttccctgtcagcctccccggccgccgagggggcgcgcgcccaacaagggggtctctagcggccacctggggacagaaacagtgaccctgggcgcgcactttgcctccccgttagagatgtcgcccacgggatccttaacgaggcctaccgcaaagtgctggaccagctgtccgccgggaagcacctgcagtcgctcgtggcccggggcgtggggtaagagtttg

SEQ ID NO: 32465 - DNA, 1166 bp, Artificial sequence
  DNA replication origin
ttttagaaaatttggaaaatataaacacgtacaaaacagataaaaatttcacttataattttatgaattaaatacaactgatggaaaagataatttaataatttattcaacaaatacttagatgatggtgacttttaaagattgggctctaaagccagacactatagttaaatcccaactcaatatatggctgactttgaagttatgtgacctttcaaaacctcaatttatatacccataaagtagaataataacttaaagttgtggggattaaatattcattatgtaatggtgagcaaagatagacccaaggcctacctctgtataatagtctaatgaggaaagagatattattaaagagatcactgtaattaatatataatcagaaactaagaaaagttctgggaaagaataaaaacattgttctcagtttaaaaaggcctgacctagtcaggggtttcagaaggcttccttaggaagtggtggttggaaggatctgaagattgagaaggaattacatgaataaagaaattgacataagtcttgttgtcgggggtattgtagacagaacagttttataatggaagagagtagaaaatacaggaaatggcattacattcaatcttggggagtcagaaaatgatttatagaagaggaggtattgagttaatttttaaggagaaggaagattttgctggacagaaatttgaggaagcaggcagtgcactccaggcagaaggaacacttcagaggctttctttccactctgtagaagtctgcctatcatttgtgtagtggaaaagggtagcagtgatatgttaaggtggagaagtaggcagacgcctgacgagggattcagaaccatgcagaatttagacttttatctgtgagcaacgggaaactatctgaaggaatcatggaggaataggaccggatttgcatttttgaaatatcactctgtagtaaatgtgaaaaatggattgggagttgaagtgagtttggaagtagagaaagcaatcaggggaataaggcaattattttgatagtccttttgagaggtgacagcatgctggcagccctcgccggctctgggtgcctcctcgccggctctgggtgcctcctcgcctcgcgcccattctggccgcacttgaggagcccttcagccc

SEQ ID NO: 32466 - DNA, 944 bp, Artificial sequence
  DNA replication origin
gtgcttgcaggccaacgcgagttccgggtgggcgtgggctgggcgggccagcactccgaactgctggccggcccgccagcctcgggcagtgaggggcttagctaaacccgggccagcagctgcgtagggtgcgccgggtcccccagcagtgccggcccactggcgctgtgctcgatttctcgccaggccttagctgcctccctgtggggcagggctcaggacctgcagccggccatgcctgagcctccccccgcccccggctgtaggctcctgcgcggccccagcctccccgacgagcgccgctccccgctccacagcgcccggtcccatccactgcccaagggctgaggagtgcgggcgcagggcacgggaccggcaggcagctccacctgtggcccctgtgcgggatccactgggtgaagccagctgggctcctgagtctggtggggacttggagaatctttatgtctagctaagggattgtgaatgcaccaatcagcactcagtgtctagctcagggtttgtaaatacaccaatagacactgtgtctagctaatctagtggggacgtggagaacttttgtgtcttgcttagggattgtaaacacaccaatcagcaccctgtcaaaacagagcaatcagctctctgtaaaacagaccaatcggctctctgtaaaatggaccaatcagcaggatgtgggtggggccagataagacaataaaagcaggctgcccgagccagcagtggcaactcggtctggtccccttccagagtgtgggagcttagttctttcggtctttgcaataaatcttgctgctgcttactctttgggtccacaccgcctttatgagctgtaacactcactgtgaaggtctgcagcttcactcctgagccagtgagaccacgaacccaccagaaggaagaaactctgaacacatccgaac

SEQ ID NO: 32467 - DNA, 1067 bp, Artificial sequence
  DNA replication origin
tgtgggtgatggcagtagcagaggctgaacaaacctcagctcccacgctgtccacactggtgctggtgttggctgtgatgggctgagagccagttcccagatcacgggcagtgggtgccagctgtggtggcagtagcaggttgggtgggcctgacctcaggcccctgacaggagtgcacaggtgacaccagtggtggactcaactgagcactgagtggcccctaggttcccagatgggacagcatgctctggcactggaggggctgagctggccaggaagacctgaccttagggccctcagtggtgcatgcaggggctctgataggcaggggcagggtgatccctaggaccaaggtgaaatgcaggggtgggggcagcagcagctgtgctgcagccctgctactcagcggggtggggttgttttcagtggcagcagccctaagcaggcagctggggaactcacactttggccctggctcttgtagcggctcctgtgggcaggggaatttgtcctcaggacatgtgaaaatgcatggcatcttcactgctgggggcagtggagtcagtagggtctttggaatggctcacgcttcagccctggctgcaatagcaccagccagtcacagcaggggctgcgggcagggaatgtggatgtgtggaggatgtgtgggggcagggctgttgagcccccaggcatgatgccctttggtgggaactggactctctgtatgcactgtgctattagggatggggttgtatccagcatgccgtcctgcgacctccaggctgtgccctatcttagtctctggatggaggggcttccctgtggctaggattgcaggagcctgtggtgagaacgtggactgctgggatctcacacttactctgtcctacattgaggagcccctccaggctcccagttgatccagcccagcaggctgcctcaattccttcttccttgctttaagtgtttcttgtcacttctctgttgaattccagtgttctctcagatgatctattcaaagtggataactactcactatgttggttcttctgtgtggaggtgg

SEQ ID NO: 32468 - DNA, 1219 bp, Artificial sequence
  DNA replication origin
aaggagaaaagacagcgacgcctgccgccgccgggctcagggctgaggtgcgcgctccgcgcggcgccttcagctccagctcccggggcggctcgaggcctcggcccggcgcgctgcagctcctcgtcagcggcggcggccgagcagcggcaggcgcgaggatcacccgggaaccgattcaaacgcgctcctgcccgtgcaccacgtcacttccgcggcccgccactcctgaggagaaggggacgcgcggcgcgctcctcaccgggcccgggcccagcgcctatcgccgcccacgcgagcctcacggtgcgacccgcgaccagcgccgccgccgggactgtggcgcaggaggaagagcggtggcgggtggcgggcggcgggcgacagcgaggggcggggcgaatccagcaggccgcgcgggcaggggcggggcttcgccgcgcgcgcgcccggggcccgccccctcggccctcgcgaagttggaaggaggctgagtctttcgcggctgcctgcgccctgcgggtagtcctcagaggccgaggcgggagagcagggctcgggggcagcgggggaatctcccgaagagctgtgttctctctgtggaaagggccccgctgccttcccgcctctccaggatcccgactgagcttgtaggtgccgcgccggctgactgagccctctctggctgggtcgcgtggacgcggcggcgggaagcttcaggccggcggtactcgccgggcgcagagtccaccaaagcgagcacgtgggtccctctgccgagaaaataggcgctacgagagccggcgcccctttttcctcctcatttcttagtagtactgggtgggctccagcgtgggcccccgaggcaaagcgggtccgtgagaacgtcagaagggcgctctgtgacgtcacagcgtccccgccccccgcaccctctgggggccctggagcgccgacggcattcggggtacgggggtgactccagcgccctagttttaacgctgcctgcgcttcgcggtctcccacgtgcgtgtaaattctgaaagaacccacgccacagttactagggttaaattagatgttcgcaaaattcttaaggcctaatacgttttcaatcaaagcctttaatcgtcgttaccgggcagcgtttcattaactatcctcatcgtgggcaggtagtgccctaactcaacaaataaaatgccattgttagaggact

SEQ ID NO: 32469 - DNA, 827 bp, Artificial sequence
  DNA replication origin
gggcgggccccgggcgcgcgcgcggcgaagccccgcccctgcccgcgcggcctgctggattcgccccgcccctcgctgtcgcccgccgcccgccacccgccaccgctcttcctcctgcgccacagtcccggcggcggcgctggtcgcgggtcgcaccgtgaggctcgcgtgggcggcgataggcgctgggcccgggcccggtgaggagcgcgccgcgcgtccccttctcctcaggagtggcgggccgcggaagtgacgtggtgcacgggcaggagcgcgtttgaatcggttcccgggtgatcctcgcgcctgccgctgctcggccgccgccgctgacgaggagctgcagcgcgccgggccgaggcctcgagccgccccgggagctggagctgaaggcgccgcgcggagcgcgcacctcagccctgagcccggcggcggcaggcgtcgctgtcttttctccttttccccaatatggcagcggcggacggcggcgggcctggtggggcctctgtggggactgaggaggatggcggaggcgtcggccacaggacggtgtacttgtttgatcggcgcgaaaaggagtccgagctcggggaccggcctctgcaggtcggggagcgctcggactacgcgggatttcgcgcgtgtgtgtgtcaggtacgcgaaggggcgaggaagggatgcgcgtgtagacttgggggcgggagggtgatgagaaactcaacttgctcactgagggcaataaacctgtcacccggtcccggtcctgcggccttggcttccctctcccgtgtgcccgccatgtccgtgacctggtggccggacgc

SEQ ID NO: 32470 - DNA, 1295 bp, Artificial sequence
  DNA replication origin
gcggcggcaggcgtcgctgtcttttctccttttccccaatatggcagcggcggacggcggcgggcctggtggggcctctgtggggactgaggaggatggcggaggcgtcggccacaggacggtgtacttgtttgatcggcgcgaaaaggagtccgagctcggggaccggcctctgcaggtcggggagcgctcggactacgcgggatttcgcgcgtgtgtgtgtcaggtacgcgaaggggcgaggaagggatgcgcgtgtagacttgggggcgggagggtgatgagaaactcaacttgctcactgagggcaataaacctgtcacccggtcccggtcctgcggccttggcttccctctcccgtgtgcccgccatgtccgtgacctggtggccggacgcctcgggcgggccctggcccgggcctcgaagtgcagggccggctcccccgtggccctccctctgcctccgctccttttacgggaggccttgccggcccgggtggagagctcagcgtttgttggccctgggcgagcttagcccggttgcggccctgcagtctagggaaagccgttggtggtgtctgtttttactttgtaacttttttaaaacgagagaagggagttaacgcccaggggctctgttgtgagtgttgcgacggtgggaagttgtgaaatgcccggagtcatctcccccaagttcattagatgatgcggggtgtccccgggttgccctgtcgaggttgcaggtccttctggggcggggcggcgggggggatccttccgcacggagacacttgtccaggtcagctctgcaggtagagctggccttctgcctgtctgagccctaacccttgggaatttccaaaccaagtcaaaggttggtatgggtggctgtggagcaccagaaaacgtacctaccccgtgtattggttcgctttgaaaatgaacgtggagggaaatccgctttaaactgtgatgtactttatagatatgaggtggtggcattgcctgagctttgaagaaggaatattgtcatgctctgaattaaccatatgaggtccctttttaagctgttaagaacacttagcgtccaagggaaaaaaagaactttgaagccgtgttttgtcgtgaggctgataggtttagaaatgttctagaccatataactgtatggttgctgaaataattgaaatcgtgatccgtagaatgaaaacgattggagaagtaaggactttcttttgttcacagctgtagtcccagcgtctagaactgtgcctgcgacattgtaaatgcccagat

SEQ ID NO: 32471 - DNA, 1588 bp, Artificial sequence
  DNA replication origin
gatgtccttacatggtataatgttctgcttggcccttgtagtttctacttagggacttctctttctttcatctgcaaatcaaaaggtccaacaacaccatcaaagaatattagaaacaaaatagaccaatggcttcatttagtaaagtaggaacatagcaaacgtttttattttttattttttgcgacagattttcactctttttgcccaggctggagtgcagtggtgagatcccggctcactgcaacctccatctctctggttcaagcgattctcctgcctcagcctcccaagtagctgggattacaggcatgtgccaccgtgcccggcaaattttttttttttttttgtacttttagtagagacggggtttctccatgttggtcaggctggtcttgaactcccgacgtcaggtgatccacccgcctcgacctcccaaagtgctgggattacaggcgtgagccaccccgcctggcccatagcaaagctttattcacttaacgagtcatggccaacagcgtctggttagctcacagaggccacagttttatctgtggagtctggtaaccacgccactcacgaccctgtacattgattagatgcagcaggtcatctcaaacacacagctctctccaacaccccttagaatacaacacttgggtggtgattttacttaacattctggtacttcatcccaaaaagacatcggtagagattagtgtaactcaacaacaggcagaaaacatacaagaaagtttaagacggatgtctagcagtgcctgaactgttaagaagcaaacgtgagtaaatgccttagtttcaatagaaaaagaaagttcacagtgggacctcagaagcagaggctgtgagatcacctttcaagaattggaggagaattgcagtaagtgatagagccggacgctgagctgcagcagcctctgggaattggcggggctgtggcttgtcctgtcctgccgccccccgcgtggcctcggaaactgtcagatggtgcctaaggcagagttgggcaaagaaagaaccagcgttcgtttcctcctggactctctaggtccatggagctggtgggggaacggccctgtcttgcccgaggaggaaattcgagtcgagcccccactcctctccccgcgggactgataaacatgtccctcattcgccccgggaggctggcacccaggcacgacgcgaggacggccagactcgccgacggcggccgcgtcccggggggccgggagcgagcctgtcggaaggtgggaggcggagtcgctcggcatctgggaagagaccaaaggaatgagtcattggaaatgctgtaacgtagacccttatcccaaaccctttcgcccctccaccccgagccccctgccgagaagcgaagggactggagacggggagacttggtggggggagagtcacgtttcggagagggaagtgaaataaagagggcggcacccggggggacctgtgcgtcattgagggaccggggagaagcgcagggcgcacggggctgcagaaggagaagtaggaacgagaagccggagggggcggccgcggagcactggttggagcg

SEQ ID NO: 32472 - DNA, 1427 bp, Artificial sequence
  DNA replication origin
ttctttcccgtcttggtcgggtccaggcgcgcgctctccagaggcgcacccgggcaccctccggcgtctgctcggtgaagctcccgcctccgcagagggcgacgggcccccccgaccctcgctcggtctggtgccgcagtcccctctcccctggcctcattgttctccgggtttaccccgtgcccctctccctctctctcctgcaccccaggaactggtgcgcctacatcgtgaacaagaatgtgagctgctccgtgctggagggaagtgagagttttattcaggctcagtacaactgtgcctggaaccagatgccctgtccgtcggcgctggtgtaagtcctggagccggggagcgggcggggcgcgcccgggccggggcggtgggggtggggtggggttgctgcgctgggctccagtccctccggtaaatcccttccagatccggtgaaaagcccgcagcggaaaagcgctccgagcgctcgcggggcaccggccacgctgggctatttagggagtgggtgctgcccgagtgagtggggaggatgcgcgcgcctcgggagtgtggggtcgcgggggcgtaggagaggatgaacaaagctcccactcccacttctgttttctccctttcaatgtttgtttgtaacataaggcagctgaatctaattggatccatattgtgtgttctggggcacacagaagattccaaaatgtatactgctaaagactattccgtataggattcgctgagaggtttggctaagtagtgttctaaaacgagtgagttctgtccgtatgtccccataaaacggaatcttccagttttgtagatgtctaagctaaaacctcaggaacactttgcttaaaagtgtggctccccagcatccctccccgcaacttagatttggagattctctagagattgtgggagagaatggccgttaaagacagggggaagaattaatcatctttttgcttataaagatttccccatcttaaaaaaaaaaaaaaacaggaagcaatgcaataaagtacaaatgccgttaaatacatgacactcattcaattgtcatcaggcaagtctttgggggttttgtatcagtctgataccggaagatgggccagtgtgaataaatggctgttgaggaacacatgtgatggctgaaattaattgttttccactaagaataagttgtttgtcttagagcacagttgtcattacagcagagaatagtcagtaggcggatctgtctttggcaaaaccaagggacagactggaacttgtactccaggaaaccttattccagagaacagtagatgagcctgtagtcttatgggaagtggtcgctgggtccaccccacgtgggcttctggaggagctgccaacagggttcagctaattcctgctcggcaaaaacaaagtaaaac

SEQ ID NO: 32473 - DNA, 897 bp, Artificial sequence
  DNA replication origin
gaaagtgaggagcgcctcttccccgccgccatcccatctaggaagtgaggagcgtctctgcctggccgcccatcgtctgagatgtggggagcgcctctgccccgccgccccatctgggatgtgaggagcgtctctgcccagccaccccgtctgagaagtgaggagaccctctgcctggcaaccgccccatctgagaagtcaggagtccctccacccggcagccgctccatctgagaagtgaggagccccgtccagcagccaccccgtctgggaagtgaggagcatctccgcccggcagccaccccgtccgggagggaggtgggggggtcagccccctgcccggccagccgccccgtccgggaggtgaggggcgcctctgcccggccgcccctactgggaagtgaggagcccctctgcccggccaccacccactctgggaggtgtacccaacagctcattgagaacgggccatgatgacaatggcggttttgtggaatagagaggagggaaaggtggggaaaagactgagaaatcggatggttgccgtgtctgtgtagaaagaagtagacatgggagactttttgttttgttctgtactaagaaaagttattctgccttgggatcctgttgatctgtgaccttacccccaaccctgtgctctctgaaacatgtgctgtgtccactcagggttaaatggattaagggcggtgcaagatgtgctttgttaaacagatgcttgaaggcagcatgctcgttgagagtcatcaccactccctaatcttaagtacccagggacacaaacactgcggaaggccgcagggtcctctgcctaggaaagccagagacctttgttcacttgtttatctgctgaccttccctccactattgtcctatgac

SEQ ID NO: 32474 - DNA, 1167 bp, Artificial sequence
  DNA replication origin
caacgagcatgctgccttcaagcatctgtttaacaaagcacatcttgcaccgcccttaatccatttaaccctgagtggacacagcacatgtttcagagagcacagggttgggggtaaggtcacagatcaacaggatcccaaggcagaataacttttcttagtacagaacaaaacaaaaagtctcccatgtctacttctttctacacagacacggcaaccatccgatttctcagtcttttccccacctttccctcctctctattccacaaaaccgccattgtcatcatggcccgttctcaatgagctgttgggtacacctcccagagtgggtggtggccgggcagaggggctcctcacttcccagtaggggcggccgggcagaggcgcccctcacctcccggacggggcggctggccgggcagggggctgacccccccacctccctcccggacggggtggctgccgggcggagatgctcctcacttcccagacggggtggctgctggacggggctcctcacttctcagatggagcggctgccgggtggagggactcctgacttctcagatggggcggttgccaggcagagggtctcctcacttctcagacggggtggctgggcagagacgctcctcacatcccagatggggcggcggggcagaggcgctccccacatctcagacgatgggcggccaggcagagacgctcctcacttcctagatgggatggcggcggggaagaggcgctcctcactttccagactgggcagccaggcagaggggctcctcacatcccagacgatgggcggccacgcagagacactcctcacttccccgacagggtggcggctgggcagagactgcaatctcggctctttgggaggccaaggcaggcggctgggaggtggttgcagccagccaagatcacaccactgcactccagcctgggcaccattgagcactgagtgaacgaggctccctctgcaatcccggcacctcgggaggccgaggctggcggatcactcgcggttaggagctggagaccagcccggccaacacagcgaaaccccgtctccaccaaaaaaatacgaaaaccagtcaggcgtgggggcgcgcgcctgcaatcgcaggcactcggcaggctgaggcaggagaatcaggcagggag

SEQ ID NO: 32475 - DNA, 1659 bp, Artificial sequence
  DNA replication origin
acgtcgcaggggtggccgcagagtcctcacggggaccccgctcgccgggactcatggaggggaccctgacggggcagtcagggctgaggtttcctaatcccgtgtgtttctttctccccgacgcccggcagaggcgccctcgcccccgccgcccgcagaggccccgaaggagccgctgcagcccgagcccgccccgccgaggcccagcggccccgcaaccgcagaggaccctgggcgacggcccgtcctgccccagcggccccccgaggagaggccgccccagccgccaggctccaccggggtcatcgcggagacgggccaggccgggccccccgcaggcgcaggcgtgtctgggcggggtctgccgcggggcgtggacggccagaccgggagcggcaccgtccccggcgcagaaggcttcgcgggcgcaccaggtgaggcccggggctgcgcggggaggagcgcggggctctcccggaacttccgcctgagcctcggggtctgctgaggggcgtggcggttcggggtccagccttcgggggggcaagttccgaaatgcagctttggaaggatgccgaggcccgagggaccgctcatgctagtccagcacacggaggccggggcacctcagggacagtgcagtcgtctgtacttagacatactgagtggccccgccggttggagtacgagtgccacacgggcagctcattgattcccagcaggaaggatcttggaagccagaagggtattgggagcttgggtagcagcaaagcaggtggcacagcagcgtggctaggcaggagggctgtctaccacgggcttcgggacttggggcagcttcctgagctctctgagctgcagttccttcaaccacaaaatgaggagagtgcaggacctcagaggcttactgtgaggatggagaaaagcccagttcagtgccccactgggaagtgctccccatgagttgtgaatgtctgcaccattactgtcgtggtgacagtgggggtggtgtcagagtagagacaggagaaggaagtgagcatttgtgggatacccaccacgtgccagggactgaaccctatctggatctcctgcagccctcccaatggcactgtgaagccagtgttgttttacagatgaggaaactgagatttgtggctataacagataaacagatgaccctgaatggggcaggtcatgtcatctgccatagatacatgcatagaacaatgcaaaccagtcagtcccctctgagtcagaccaggctgaccatcagggacatgcagacactggcagggctggggttgttccccatcggtgatagcctggtgcccccatggcccctgatgcccacggctgtctggaaggctgggtcactgctgagaagacaaggagacattttctctcaccagctttcttttttctattccttcttagacacctgagctgcggtgatcacagctcttaagcagatgtcctgcattttctaagataacacttatcttctgttagttccatgtatcatggatgcttaggctctcttgggctatttgttccctcatttgtccatccacgcacccttccgtgcatgcagcactcacccatgcatctatccgtgtatcccttccatccacccttccatccagccacccacccaca

SEQ ID NO: 32476 - DNA, 1157 bp, Artificial sequence
  DNA replication origin
acagcctaacgctcttcgctgtcgtttgtggtctcgcgcagggcggccccggttctggtgtttggcgtcgggtgagtcgcgctcgactctgctcgcgagacccctcgggccgccgtctccgtacccccgcgccccctcccgtcgcgcgcctgcggccggaccccgccccagggcggccaggcggcggcaggacctgtcagactggctgagaagggggcgcggggccggaggtggagggaggagggttggcggcgggaggagggttggtggcgaggccctggcccggacgtccaggggccgggaggctgcaggcgatggagccggtatggggagacgccctgctggagaagtggccgggtcccggccgtgcgtgggccggccctgcgccacctgggtgacctcagacacctgggccttggacggcccggctgcccggcggccaacgcctgccctcccggcgccgcggcgggtcctggcggtggattggggccgacccgggcgtgttcgtgtggagcacctgccctgtgcccaacactatcctagatgctttggagggtggaggagcctcctgttgcacggtcttgcctaaggtgaagcctccaaggaagccattagcatgccggtaaccgagtgtgtggttgatacgggctcaaatgtgatgatttacatagagttgtaattcgctcagtgtgtcttgcatcttgtaaaggtttagtttattcgtgttgattgaagaaaggaccattaacagaaatagggaaaggttacttggaaaagagtcgtgacctcactgaaggccttggattcaaccttaagagggagaacttagcgtttccggctagatgtgtgggaggtggtaacgagcaaaactcaaaagctgggaattgtgtcctgtgaaaagcaggccgtggggacaccggcgggtatggaacagaactgtaatgactaatagtcggaaataagggtagataggtaagtaggaccttcttatggatgtcttgaaaacttaggagaaagaaaagattatctaagaagccatagagagtaattttggagtcttcactaacggagtaataagaaagggatgtttagaggattcgtttggccgctttagtttaaggtagatttggaatggtcttttggtaagagaagaatca

SEQ ID NO: 32477 - DNA, 1125 bp, Artificial sequence
  DNA replication origin
tggaccgagcgcggcggccgctgtcactcgtccctcgggggcggcggtgcggacgcggggggtggccgggtccagaaacacgatcctttccgcctgccgcgcacggaccgcccgcatccctcgcccggcggtgggggcaccagccgagcgccccaggtttctcccttgggcctttcttcccggggctggcgagggtgcgtttggttcggaaactgcaacagatggaaaaaaggacacctccctccttccctcctccacccccgggaagaaaagcctccccgtctcgtttttgacagctgccccgaactctactggccctgctctagccgcacgagacagccgcctctgattcaaggggcggggcacgggaggaaaagtattcgagacaagaaccaacttcttccagaatgcgcggctgccattgacacgcgggcgcggcgcggcgcacccttctcctcccggggctcttcctccagcagcgacagtgggaggtcggcgggggtggggcgggggggaatgatgagacacagcctaaacgaacgtctgttcccccgggctaaagctgcgagttccggactggattgcaaggcagtttcgaaatctgacacgttgcggacagacacttgtcacgctcacatgctctttaaacgtctctgcccggggacggccgggcgcgcgcctgcctcaccaagactccgcctgacaccccgagtcgccgaaccccggcagcggccacttttatagctaaggggtgaccacgccgtgcctgctcgtctgtttcggtcaacagtgtctactcttcggattggaaccctgctaggggatccctcctcccatttcaaacagaaactagccattaagtaaacacccgttcctgttggcttattttggtccacagttaggagggatccaacaggagtttcttgatgaaattgcgctttcaaagaccagatgctgtttggctgacttgaagaaacgcatgccccctcctctggttctagttttcgcgtggttacgtcctgttgttttgaagcaaacgaactgtcacatgccacacaatgagacttcccccatcactttaaaaaaaggaaagaaaagccctaaacgtaaataagcctagcagag

SEQ ID NO: 32478 - DNA, 908 bp, Artificial sequence
  DNA replication origin
cgcccgcgtgtcaatggcagccgcgcattctggaagaagttggttcttgtctcgaatacttttcctcccgtgccccgccccttgaatcagaggcggctgtctcgtgcggctagagcagggccagtagagttcggggcagctgtcaaaaacgagacggggaggcttttcttcccgggggtggaggagggaaggagggaggtgtccttttttccatctgttgcagtttccgaaccaaacgcaccctcgccagccccgggaagaaaggcccaagggagaaacctggggcgctcggctggtgcccccaccgccgggcgagggatgcgggcggtccgtgcgcggcaggcggaaaggatcgtgtttctggacccggccaccccccgcgtccgcaccgccgcccccgagggacgagtgacagcggccgccgcgctcggtccagtcttcccggctggaaggtgcgggggaggggcggaggagcggcggggcgggagggggacggggcgggcggctgggggcggaggcaggacctcctgtaccttccctcctcgcctctctcactctgacagcgccgaggtgcgccgagcaggagcagggaacaaaggagcggagaggggaggggagagagttgggcgagggagagcccccggccggctgccagaagatcccggcgggaggaagcccaagtgtcacttgaattccacccaaggagcgggcgcctgggatcagagcgtcctgtttagcaataacggctggagcacgtcctacaagttacgggagagtcggctgtgaaggagacgttcgcttatcccctgtgtccccgctcctggcccctccagacccccgccttgcctcgcgctgggaggggagatccagaatgaaaggcaagaaaggtaaggcggccgcgggctgcg

SEQ ID NO: 32479 - DNA, 856 bp, Artificial sequence
  DNA replication origin
ggtccagtcttcccggctggaaggtgcgggggaggggcggaggagcggcggggcgggagggggacggggcgggcggctgggggcggaggcaggacctcctgtaccttccctcctcgcctctctcactctgacagcgccgaggtgcgccgagcaggagcagggaacaaaggagcggagaggggaggggagagagttgggcgagggagagcccccggccggctgccagaagatcccggcgggaggaagcccaagtgtcacttgaattccacccaaggagcgggcgcctgggatcagagcgtcctgtttagcaataacggctggagcacgtcctacaagttacgggagagtcggctgtgaaggagacgttcgcttatcccctgtgtccccgctcctggcccctccagacccccgccttgcctcgcgctgggaggggagatccagaatgaaaggcaagaaaggtaaggcggccgcgggctgcgcgcaccagaagacgcgagtccggggaaacgtgctggccgggccgcgccgcgcggagtcacttggtggacttttccgcccaggggctctcatgctggagtggcggccgtgctctttgttgaggctgcgtctgaaacggcagcggctgttttcctgctagacacaacacgaggggctgttgtggggcgagcctctccacgctgctggcacgttgtcaagaaacacgctcagcgccttgtttgtgcgcctgcaagtttcattgtctccgccgacaccccacgctcggcccagccgccgcgtggcttctcgctctttctcgcgtgctggggatatggggtccgagtagggaggacccagcccctcgtttttcccgatccgg

SEQ ID NO: 32480 - DNA, 1034 bp, Artificial sequence
  DNA replication origin
aaggcggccgcgggctgcgcgcaccagaagacgcgagtccggggaaacgtgctggccgggccgcgccgcgcggagtcacttggtggacttttccgcccaggggctctcatgctggagtggcggccgtgctctttgttgaggctgcgtctgaaacggcagcggctgttttcctgctagacacaacacgaggggctgttgtggggcgagcctctccacgctgctggcacgttgtcaagaaacacgctcagcgccttgtttgtgcgcctgcaagtttcattgtctccgccgacaccccacgctcggcccagccgccgcgtggcttctcgctctttctcgcgtgctggggatatggggtccgagtagggaggacccagcccctcgtttttcccgatccggacccaggcggccggggccgcgggaccgccgcggctttgtctgaaagttccactcctaggctccccccgcccccgcccccgccgcccccctactcccagccgggccctagcactgttctttagggatgtggtgtttttacgatcgaaggaatgcgattctggaccccctcatcgccctcgggtgtaaacagctttggaaagctagacttttacaaatccccagtctctaaaagttttcccacgatgaattttggggcaggaggaagagttagcacccagggccagcagcttcaagcggcatgcagtcaaaatgcgtccaaatgtgacaagcaggcttggttgtaagtgcaaagagcaaggctgtcattgtttccacgaagtgttctggaagctttacaactaaaacttgccgtcagtttggtttaaaaacaaaatacaccggagggggacggggggtggagaaaccacacaaaacaccccgaaaggtcagagtgtgaagtcccttttgaagttaacaaaaattgagtccctggctgggaggtcccccgagtgttccgctgtgggctggaggtggcgtttctgtcgtgatttatgtggagtggttcaaaacagaagttaatcactcgggaagcggacggg

SEQ ID NO: 32481 - DNA, 975 bp, Artificial sequence
  DNA replication origin
gtaaaaaactgtgtgttctaactactgacctatcccagtttttcccaagcttgtcctgagaagctgtgtaatgtcctgaaccttctgctttgatcaggagagaagggcccctcctccagtgccaaagaagccggcgaagggccccgcgccgctgatccgggagcgctcgctggagagctcgcagcgccaggaggcccgcaagcgcctgatggccgccaagcgcgccgcgtccgtccgccagaactcggccaccgagagcgccgagagcatcgagatctacatccccgaggcgcagacccggctctgagcgccccgcagcccggccgccgccgccaagcatctgtcccctcctcccccggccgctcctctgccggctgcctctccccctccgagcccgtccgctcccgagctcggtgacttccactgtcgcggtgtagttgtccacctcgcaggagccgccccccgggcccccctcagccccccacttcccgtacccgtttgcccatctccttcttcaccgagcttcgccccctgtcctgatgccgtcgccctgcctcatactgagatccaaccctttattttctgggcaaagccaaacccacctgtgtagaagtgatgcctttaggtcacccgccgtcctcagttctctcgagctagtctgttcagcaatataaaaccatagggtatttcagaaatccagtatcacagggtgatcctttgggacttaccgtcttccacgtgaaagaaactaggcctccgattccctttatttcccctaaatggttattcttttaaaaaagcagatggagcactttattcccaacctcagaaatcacaccatctcactggaatccatgagggacacagagagaggggaccaagcctggcctgggggtgggggacctggatgtgtagcaaggatgggagaagcgaaatctgcaggtgctgggggcacctgcacactcacagctgcac

SEQ ID NO: 32482 - DNA, 1103 bp, Artificial sequence
  DNA replication origin
tagtttggaagacactgtgatcatcaaggtgagaattaatgttactgatggtgatggtgaccatagtggtgatgttggtgtgttggtgataatgatggcagtgatggtgatgatggcgatggtggtgatggtgatggtggtagcagtgatgatagtgatggtgatggtggtgatgttggtgatggtgttggtagtgatggtggtggtaattatggtgatggcagtggtagtggtagtgatagtaatggtgatggtaatggtgatggtagtggcagtgatgatggtgatggtggtgacagtgatggtaatagtaatggcagtggtgattgtgatgatggtgatggtggtggtgatggtgatgtggtggtggtggtggtggtggtggtgatggtggtggtggtggtggtgatgtgatgtggtggtggtggtggtggtgatggtgatgtggtggtggtgattgtggtggtgatggtgatggtggtggtggtgatggtgatgtggtggtggtggtggtgatttggtggtggtggtggtggtggtggtgatgtggtggtgatggtggtggtgatggtgatggtgatgtggtggtggtggtgatggtggtggtgatggtgatggtggtggtggtgatggtgatggtggtggtggtggtggtggtgatggtggtggtggtgaggtgatggtggtggtggtggtggtgatggtggtggtggtggtgaggtgatggtggtggtggtggtgatgtgatggtggtggtggtggtgacagtggtggcagtggtggtgatgaccatggtggtggtggtgttggtaatgggtggcagtggtggttgtgatggtgacggtggtggcggtggtggtcgtgatggtggtggtgatgattatggtaatagcaatggtgacagtggtggcggtggtggttatgatggtggttgtgattgtggtgatagtgatggtgacagtggtggtggtggtggtcgtgattgtgatggtggtagcagtgacagtggtgatagtgatgctatggtgtggtgctggtatagatgaaaacaaggtattcagaaaaaattatgaaatggtaggctgatcactgaaacatctgtc

SEQ ID NO: 32483 - DNA, 1084 bp, Artificial sequence
  DNA replication origin
ggcgagcgctgcgcttcgggcgccgcaatctccaggacacggcctcgcggacaccttccgcctcggggaatcggcagcataggcggcgcgaacggccgccgccgcctcggctcctctctcgagtccttcccgtcacctcgctgagagccggtcctggtcgcggggacatctctctccttcctccgaggctcgtgggaccaacggacggacgcagccagcgagggccggactgcgggacgcggccaggtaacgccgggctgcgccgcggggctggggcgtgcgcggcggcggcggtcgcggcgcgctgggtggctcctggctgctgcctgccgcgcggtcgccgcttccctcgcccgcggaggggctgcgggctgggctcccccggccgctggctcgagagtccgcgctccttaccctttcagccgcccggggtgcactcccgggccctccgggtaacctgggatctcgggggcgagcgcgtcctctccggccatgcggtcctcgcggctccccacggggacccaggcaggggaaggatttctaattgcgacagggtcccggaagggggaggggaggagaacaccggtcccctgtcccggtcatgtccaccggtcaaattcgcacccccaccccacccccgatgcaccttgcaggggaggagggggctgctccccgcagggctttctcggcaggctcctgggtcgtttgcaaagcaagttgttgcactagctttttgggtgacattttggcattgtggaaaaggaccaactcccccgtgcgtttgtaagagaaagccaaagaaacagagacacaaagacaggcacagagagagagagagagagagaaatggggtccaaggaggaggtcactggagagtcgccccctgcccgcggccaaggccaattcccggagaatcgcggggcgggccgggagacccgacattcagcgaattgaatgagccgggctggaaccaaggccaaacagggacctctcctctgggctgggcgagataacacattgcactttcattgaggggcggctgcagctgggagaggcaccttcggagggcccgcggcgatgaaga

SEQ ID NO: 32484 - DNA, 1079 bp, Artificial sequence
  DNA replication origin
gcctcggaggaaggagagagatgtccccgcgaccaggaccggctctcagcgaggtgacgggaaggactcgagagaggagccgaggcggcggcggccgttcgcgccgcctatgctgccgattccccgaggcggaaggtgtccgcgaggccgtgtcctggagattgcggcgcccgaagcgcagcgctcgcctctggagcggaggctgagcgccgggacgcggcgggctggggctgcaaggctgggctggtgacccgcccctgggtgcatgttaatacggtggggaggaggagtcccgcgcttcctccgcccaaccaccggagccggcgggcgggcggcggccgcggcccggagccagccgctcccacccgccccagctactacggcgcggcgcgaccgcgggctccggccccagcccaggcacgtgcgcccaggccgcggggaggcgccggcgcctcccggaacgcgctcctggcctgcgagtgctgcccgctcagtctccgggtgggaagtgcgctcgccccggaccgaggggaaagcccaacatccccgggatggaacagagaggcggccacccgtgagtgggcgtgacccattggttcccttgcgcagcatctgtggagaattaagctttcccctcctctcttgccagccgttgttcctaatcttgtcttttttaagggaggaaagcaggagaactcatgacactttgtatcacaggaaatcaagttggtggacagagggtttgctgacctctcccgtccctcctcagggtccctaggagaatttttgaagaagtaatcggcagcaaggagatgggggcaatagagagtctcagactcgcagggacccatgttcgtccccagcgccactactttcaaaccgttatccctcagagctgtttcctcacctccacaacaactctcccgggttcgatgacactatatatcccaccagttcatcttggtacaggccaaaaggtaattcaaaaagcgaaacgaatctcatctcctgacctgtgccctcggtaaagtccccaggttccaccccaagtacacttggaagccaggcccctccacaca

SEQ ID NO: 32485 - DNA, 1235 bp, Artificial sequence
  DNA replication origin
caccacaccaccacactaccaccacatcaccacacaccaccaccacaccaccacactaccaccacaccaccacacaccaccacaccaccacacaccaccaccacaccaccaccacaccaccaccacaccaccacactaccaccacacaccaccacctcaccacaccaccaccaccacaccaccaccaccacaccaccaccacaccaccacacaccacacaccaccacaccaccacacaccacacaccaccacaccaccacacaccaccacactaccaccacagcaccacctcaccacaccaccacaccaccacgaaggttgctttaaagatcaattcttgttcagagaaggatttgctaggtttgcaattgggcattagcatcacgacccacgagggccctgcccacctatgtgtcccacagggcaccttgactcttcaaaccaaaattccttaaaagggcacagccgagccttgtctgaaacctcaggggcctaggatttctgtggcacttcctgaactctaggttgccacagacaatggggtctgagactagtcagaaggaggggctcttcccacagagaccagctggtctctgcctaggaccttccctcccgcccagccagtgggcggcatcccaagcagtgaaccgagctcgtggactgacccggggctgggcctcaccagccaggagaatgagaaccacacggcggggctgggtcaggtagctcctccagggccattcagatcccaagcatcaggaaatcacagaggtactttcatttttatttttttattttattttattttatttttgagatggagttaagctcttgtcgcccacgctggagtgcaatggtgcaatctcggctcactgcaacctccacctcctgggttcaagccagtctcctgcctcagacgccagagtagctgggattacagacgcacaccaccacgtccggctaatttttgtatttttagtagagacgtggtttcaccattttggtcaggctggtctcgaactcctgatctccggtgatccacccacctcggcctcccaaagtgctgggactagaagcgtgagccactgcgcctggctgctgagatactttttaagaagtgtaaataattttcagttgttttctaatcctacctttttcttttccccacgaattcacatcagtgatccgttcacatcaggtaagtcttgaaaaagccttgatgcccctccccgctc

SEQ ID NO: 32486 - DNA, 917 bp, Artificial sequence
  DNA replication origin
agccgagattgcaccattgcactccagcgtgggcgacaagagcttaactccatctcaaaaataaaataaaataaaataaaaaaataaaaatgaaagtacctctgtgatttcctgatgcttgggatctgaatggccctggaggagctacctgacccagccccgccgtgtggttctcattctcctggctggtgaggcccagccccgggtcagtccacgagctcggttcactgcttgggatgccgcccactggctgggcgggagggaaggtcctaggcagagaccagctggtctctgtgggaagagcccctccttctgactagtctcagaccccattgtctgtggcaacctagagttcaggaagtgccacagaaatcctaggcccctgaggtttcagacaaggctcggctgtgcccttttaaggaattttggtttgaagagtcaaggtgccctgtgggacacataggtgggcagggccctcgtgggtcgtgatgctaatgcccaattgcaaacctagcaaatccttctctgaacaagaattgatctttaaagcaaccttcgtggtggtgtggtggtgtggtgaggtggtgctgtggtggtagtgtggtggtgtgtggtggtgtggtggtgtgtggtgtgtggtggtgtggtggtgtgtggtgtgtggtggtgtggtggtggtgtggtggtggtggtgtggtggtggtggtgtggtgaggtggtggtgtgtggtggtagtgtggtggtgtggtggtggtgtggtggtggtgtggtggtggtgtgtggtggtgtggtggtgtgtggtggtgtggtggtagtgtggtggtgtggtggtggtgtgtggtgatgtggtggtagtgtggtggtgtggtggtgtgtggtggtgatgtggtggtgtggtggtgagggtggggagatga

SEQ ID NO: 32487 - DNA, 1537 bp, Artificial sequence
  DNA replication origin
cctcggcggccgagttcatggccgcccccgctcgcaccgccgcagtgcaccgcggtgggggtggggacggcccgaacccagcgcggagcgcggcccgccgggcgccgcccctccgagccgcgggccccgccgcgccgcctacagccgccggcggaggagggggccgggacccagcgcacgcactcccgggtgcgcccgcggagcttgggttagccggccgcgcgccgcccccgcccccggccgcgggagggcgggggagggcccggcgcgagctggccggggagtgcgcggggcgcgagctccgggctcgcgggcggagcggggcgcggcgcggcgcggggctgcggagccggccgcacgcccgctcccgctcgtcgcgccgccggggccgccgcgggccgcagtccctccctgcgcgctccgagccgcggtcccaagcctgcgctcgacgtctgattatgaaagggaaagtggccctttcaccacctggctcccaggctgggagcttttgtctgggaaggagtgcaaacggcctcctccactccccacctcccaggcccaaagaaattgagagggaggactcgatacgccttgagggcttcttgggtctgcgcttggctccctgcttcctcccgactccgaagttgcaagcttgcaacaaggaagtcgtgcagccgccattgtcgggctgcccggggcaggggaggcggctgcagctgcttatgtaagtttttggctttgcgggaagcccggctccctgcactgtaacgcggcttagcgcgcccgcagtttggagagcaattaggaaggggcagccttattatgaaggtggtgttggggctacgtcttttcctacacctgcctacacagatgctggcaacagctgtcttccagttttgactcacctgaactgagcaattggacatctcaatggcaaggggggcggggcggggaggaggcggctttggacacacatggtctctcttccaggtctcatacatcttgagagagagaggggagaggggcgagtggccaagtacacactagccaaaacaacaacaacacattgatatgttgtcatagctagtctaaggccactcctctctctggtcccatgcacttttatcccacaagccctaggacgagttagtgacaacagtagtaagtgtcacagtgtaaggtttttgctgggctgcctagcctctggatgattacaggcctgggtgcttctagggaatagagaggcagaaacacgtagaatgatcaagtcagaatcatcttttggaaatgttgcctaacctcaaacttcagatgagacatcccgcttctacgctgggtagctcggtgtgttcacttttctttagaaggagcttattatgggtttcaaggtgttggtctccaggttggagtcttgttccatggtttttgtgtaagactgttacagcccagtcctttgctcctaccacaccaaacaacttatctgtgtggtcactgttcagtagaggaaactttttgtttttcaggatatgggtctgca

SEQ ID NO: 32488 - DNA, 969 bp, Artificial sequence
  DNA replication origin
aggcacggaacccgaccgggtctctaagtgggcgagcaaagaaagggttaatccgggcccttgccgacgctttcgttggagactacggggccgcccccggagggccctggcctgcgcacgcgcgcgcacgcgcgcggcttggggcgcgcggagcccgcgcgcgggagaaggagtgggcggggcaagggcggggcttcgggagccagggaacttaagcacgagcgctgctcgcggacacccgccccgcctcaagctccctcccgccctggttcgtgggcttccgcccgcgcccggcgccggcgcagcgccggggacgcgggagccagcgctcccgtgcgtgtgcatgtgcgtgggccagagcctcccccgggcgcgcgcaggccgggcgctgaggctgcggggctctgccgcgtctcggagcgggcgccccggccactttcgccctccgcgcacaccggccgacaccgggaggcgcgcccacgggtctgcggtcttgcctcttgccgccggcacattgagtttgtgggggagtggacggtgcacaataaacacttgcagaacaaatggaaaaagcgacgtcttcgatttgtagtgtaaagcgcaaccccagttgcccagcagaaagggatcacccatagggcttcggagctagtaggtccgcgcccggacactccaaggaaaagtccaggggctggaggcggcgacccgtctgtggcagtccagaccctggactcgattcggagagctctgataacttggctctgtccttaacatccctgctcagcgccagtaatggctccgttgctgttgaaccacgtcgccttccctctgacgcggcggctgtgcctgtgtctggcgtcgggagctgggaagtccctcccgctcccgcgttttctgctcaccgagatgcaggaggccggacagcaatgccgcgccgccttagagtcgctcatgttgctttacctcaca

SEQ ID NO: 32489 - DNA, 1945 bp, Artificial sequence
  DNA replication origin
aacagaggggatatgataactaaaaatcccccacttcctggggcttagagcctctgatgggaggagacagtaaaaaccaaagtaagcagctgaagtaggtagcgtattggactagtgatgggtattagggagaaaagggggcaggaaacggggacagagccaggaggggtagacagggaaggcctcgctgagaaggagaatctgagcaaagacttgaacacagtgggtgaataagccaaggaagacatatgttccaggcaagaatagcaaatgtagaggcctcgggtgggaggagtggtggggaggacgctgagaagggaacagaagtagatgatgagggcgttggagtagcgctctttcaggccagcgtatccagacagtggagcttactctaagggaaatgcagagtcattggaggattttgagccaagacgtgacatgtttttatttatattgtaaaaggatcaacctggctgttgtgtgaaaaacacagtacagagagtgcagaggtagggagaccagttgggaggtacactggagtaactgggcaagcagttactggatggtgaggtggtaggcgaggagaaggcgtgatggctagtggtggaagtaatgtggcggggtaggctggggcagaggtgagggtgtggcagggaggggtggaggtgaagttacggctagtagtgttggaagtgaaggtatgcagagaaggggtggagatgaaggtatggtagggagggtaagaggtgaaggtgtggagggtggggatggaggtgaaggtgtggagggtaggggtggaggtgaaggtgtggaaggtaggggtggaggtgaaggtgtggagggaaggggtggaggtgaaggtgtagagggaaggggtggaggtgaaggtgtggagggaaggggtggaggtgaaggtgtggagggaaggggtggaggtgaaggtgtggatggtaggggtggaggtgaaggtgtggagggaaggggtggaggtgaaggagtggagagtaggggtggaggtgaaggtgtggatggtaggggtggaggtgaaggtgtggaccatagaggtggaggtgaaggtgtggagagtaggggtggaggtgaaggtatggtggggagggtaagagctgaaggtgtggagggtaggggtggaggtgaaagtgtggagggtaggggtggagatgaaggtgtggagggcagaggaggagatgtaggtgtggggaggcaggggtttaggtggaggtctggtgaagggggacagaggcgaaagcgtggaggtgatgagatgatcacattctggagatattctgaaggtagagccacaggatttgctgaaggaccatgtggtgcatgaggaaaagttacttcttgatgtttttgttggtttgtattttctttggcgtcagactctgggaggatggattgattgactgttctggaagactcagggatgccctggtttggggagaaacttcaagtgttcacttttggacatcataggtttgatgtagacttttagtcaacagaaaagaaaatcccgcacttgtccttaagactcttaggtctggtggcagaatgacagatgcatggtcatagggatacatatgcctgcactggatggaggagaccgtttcatggggcagagggaacttgggcaagactgctgagtgaaggtggtgttggagcgagctttgaagtatagggttaaggagtgcttggggaaatgggtggactgggggcttctaaacacagaagcagcacagcacgttcaagggcactggagacttagaagctcactcagcacctggagcactgcaggtcattgggtcattcatgactgttgaagctcgtgtggtgaggatgaagatgaggcttgggaatcaggagtagcggaggacacctgtggttgcctttactgttgtatgaaggagaagtcagtgatggggga

SEQ ID NO: 32490 - DNA, 1057 bp, Artificial sequence
  DNA replication origin
cccccgcccggggcgccatgttttaagttgcccctcgggctgggggcgagcgcgggccggcccctcccccggggaggtgcgggggacagggggcgacactgcggcgccgcccgggcgggtggcggctggcgggccgcgggaggggccctgcgctcagcgcgcggcggcagcgggctcgtcccgggtgcaggcgcgggcgggcgcagcgcggggccgataaggtgcgctccgcacaaagcatccccgctgggcaggggggccggccgcttttatataacttgcctcgttccccaaactggggcagcggcccccggccggtgggggaggaggagggagcgtccaagcggggttgccctgggcctgggcacctgccggggcccctcgcctctggcacccgggcgcgggagcacgggcgggccgggggcgcctgggtcggcctgccgtggcccgggggctcggggcggcgcgactcacctggcgccctcggggccgcgattctcctcgggaggtgtctgcgaaggcggctctgccgcggtgggggtggggaggctagggcttcggaccgctggagttggggtcgcagccagttcctggcgagtgtttcctggctgctgccgcaggggcttgctttttcggatttcccctctaatctcgccggacttcttccccttcccccccacgcccgccaagttcatggcttctgcaatgcggtgggtgtggttacctagtaaattgtaactgtggtcccttgcaatgagagtattcttttcaattttctttttatattacggatctgaagttttctagggtttttccgttagttgcagcccagggttaaagttggtagagattgttgcggaacagaacaaatagaatgataaaggaaacatgtggtgttaattacttgtggaggttgggctgggaggtcctgagagggccgggcagtcctgctaatgcagtgcttccattgcgtgtttaagttgtttcagcttttttacattagtctcgcggaattgcttttgcagataccctgcctgtcctttttgttgaggggggg

SEQ ID NO: 32491 - DNA, 1068 bp, Artificial sequence
  DNA replication origin
gatttgtgcaaattggcggagaagggacgcggggaccgagtcgccccttcggccagggatcccagggaggcccccaggccggaggccggggctcaggctctgcgcgccggcccagccactactgcgccgcggcgggcggagcgggcggggggcgcggcgcgcaggctcggcccggtgggggtcccggcgagcgggagggcggttggggaccccggccgcgccgggcgcggggctcgggattcgggagaccgcgcggcgccgaagccacgcgtcagccccactgtcccgcgcgcctcgccccaggcctcgggctcttcctccgcacctcgtaaagccgagaccccctcgcagtcccccactccgagaggcggaaaagttacctgggatcagcagggagcccgggcgcgccgcggcgtggggactaggctcgggcgcgcgtcctcggcggcggtgcgcaggagactcgggcgtggggaggaagccgcagcccagggctgctcgccgctgttccccccgccccctgttgcaggagacaccgaggctccgcggagctgcggcgggggcccacgcccagagaccgtgcgaggaaagccaacctcgtcctgcctgccctcccagccgcgggggagggggccaccgcagtacttcaggacagttacatgggcacagcctcctccgtcctggcgcagggtcaggctccgcggacgacgcctggagacagctgccaatgccaatagctttagccctttattcccacttagatgatggcctggcctctccagacccctctcccctcccagacatcccctgtgagaaaggagggagagggtgttcctgaccttcaggtgagttatttattggctagggactgcagtattttttttttctttttggaaagaaaataaaatcaagttggtggtgtcttcaagtcatgttaatagagaagatctgaattaatgcttgataagagaagtcgcccatttttcagcaactcagctactccgtcctctccagtatctataaagctttccaccgaaatttaccttgattttaaagagcggaggtggc

SEQ ID NO: 32492 - DNA, 1646 bp, Artificial sequence
  DNA replication origin
ccttcgctcccgggaggatttcgcctccagcacctcaggcttttctggcgcaaaggtcgccagcccgagcgagcccaggcggcggcttcacttctgcagagggaaagcgaaagacgcggccggcgggccgagggggcggccgaacgcgccgcgtggttgctgctcccgaatccgcagcggcggcgccagggcggtcaccgagccctgcggaccccggctcaacttccagcgccactcgggtgccccgagcccgccgcagctcccggcgcgccctccagccgcggcacgcagcccctgacgcgcccggggcgccctcccgcagcaccagccaggccaccccacctcccgcgccgcgcttccccgccagccgccggccaggagctccccggcttctgagcaggacgcgccaaagggagttgggaggctcagcagcccccagcgtcgccttctcgggtgacgtgacgctctctctggagcgcgggcccgcctccgccaagcctccaccgcaggtccttacagccgagccacgggaagatgcaacgccgggcgaggggcgcctcccggattttgaaaaacagcctcattcgcctcgggaacgcctcgatcccccacccgcaccctttggccagatgattttaatcctgggattccgcgttggtcgtgggggtaccgggagctggagctggaggagaggagccggcagcgcggagttgccggggtgcagctgcgcgcagctggcggcgaggggaggcggtccctgcggctccgccgggctgggggaactggctcctgcgcctctgcctcccggaggatcgcactcgctcatccttacacaccacacacacacacacacacacacacacacacacactgccgctagcgccccccacgccacaagccggaatgcggaggtcagagccactgtccacttgaaagcaggaaagcaggggctgaaacgctgagatggaggcggaggctctggcctcatctgcgaggttcgcaccttcccggaaggcccccccctcccccgcgtttccccagggcgagcaaggtctagcttctgagactccgctctctgggctagcggttcgagctgcaggggggcggggacggattcggagggagcactagagagagagcccgcgctcactcctgccctcctcgcaaagaactggccagccccactcgcgtccagcccacaactaggctgccgggaccggggagccagaccccaggtcgctccaactccggcgagggcggggaggggagtgacagcagcaactagcgcgcgctggcaaaagcacagagtctcggaataggctaaacggccggcgcggaggggtggaggcaagagggggcggaggaggagttgcccgagcggagagggatgacgtcctccagggccttgggctccgaggaaccgaagactggtgcgctcgccgggccccgcgcactagctctggggttcgcagaggcgccgcgcccggcttccgcggcagctccaacacagcgcgcaggcggtcgatcccggtcagcttaaaccgggcgcaagccctctgtccccctcaaagcacctctctgctcgtccctagtctccaggtgcccgtctgagagtccctgtcgcctccgggcggacccggccaggc

SEQ ID NO: 32493 - DNA, 1282 bp, Artificial sequence
  DNA replication origin
gagtggccagagtaagcacttggctgcagggaaaaaagtttgcttttaatttccaaagtggacccaagatgatagggtctcatggaacaaaatctttgctttgatgcaaggaaccagtggtatatagcggtcttccaagttacttagcaacagttgacaaggtgtggcttcttgactggtgccaactgtttccaatatgcccttgtataaagccacctctgacatcctatagaaagtctctttcctctgcctcagcctgctgaggattgcacaaaacacaggtagatgtgagctgcatgtgcacactccagtctcacttaacagtgcaacacctgcactctcaaaacatagacatttccctaatgggctataaaatgtgctatttgggcagttaattttgaaatgttattaaactaataggcacttggcaatgtacctctttcacatagatacacccaagagtcagacgtttctggttgattggatggctttccagacttgtgattgtcatattttatagcttttcctcctccagaaggctttaccaaatcagttttccagaaagcacacctctaggagctactaggaggcagagtgagtgaagagtggcctgagtgcccagggacagactgtgcagtgaactcttgtccaggtctttggggcagaagtggaagggaaaagaaagataatgttccttttgtttacttagaaggtccaagagttgtagaaagcacagatctcgtttgtgtgtgcacgggcatacattctgatggcctggactcacaggccacagaatcaagcaaacacgcatgtgacacgctgagccttcaggcctggaaatcccgtgggcaccagtggggatggctttgcaggccctggaacgccagggtcctccgctgcaggggtgcaggctgggtgagaaaacggtgcaagctgcgtctacacactgctcttcatattttggcgcttcatgtgaagttggaagatgcttaaatgaaacagcctccaagccactttctggcctacatccctagactgccgctgtgaagttaactcttttcagagattgcaaaaatttaataccagcaaaagaaaccaagttaccaggtccccttaaggcacacgaagggacatttatcatagcctctcccttccctccactccctatctacacaaaattgtgtgcgtgtgtgtgtgtgtgtgtgtgtgtgtgtgtaattctatccctgcttgcagagcccgctggctataaagcccagggaggaggcctgtaaggagaccc

SEQ ID NO: 32494 - DNA, 1542 bp, Artificial sequence
  DNA replication origin
tcgcggcccccttgcaagggcagcagcgcgaaggcgctcagcgaggagtccacgaaggagctggccgtgctctggcgcccccagctctcgggtgggctgcagggcgccggactgctgcagctgctagcggctgcggcggcggtggcagcggcggcccggcgactgcctgccacgcccgagcgctcgcggtagacgctgtacacggcctcggccaggctcgggggctcccgcggacagcgcggggaagaggccaggtccggcggggacgcggcgccccgagggcggccgccgctcggcgccgcggggtgaggaggccacgagcccttggccagcatcgccgccgctccgaaggcgtccccggagccaccgcagcccccgggcttcagctccaggccccgcgactgcacgtagctgaggaagccgttgagcggtatggccccggggggcgccgcggcgggggcagacgacgacgaagaggcggcggcggccgcggcggcggccgcggcggccgccaggtctttggcgcggaggctgtgcacgtcgatgacggtggagtagaggtcccgcaggttgatgattttggtcttcttgtcccggttctcgtggaggaccgcgtttgcgcagatgaagaggaagatgccgatgcccatgatgaggggcccgaagaccttgagcttgtcagagtgcaggtagccagagaagatgcggaagaagaagcccacggacgtggaggaggaggacggggaggcggctcgtgctggaggcgtgctcctgggcgcgcccgcggaactggagttgacaccccctggagccctagggtggctcctggaccggtttttgctgccactgctactgctgttggccgtggttgggacccggtggctgctgcccgcaggcggcagctgcttacccccctcccgattggtcccggtggccttgggccagtagcccaccaccgccatggctatgcccaccagcagcaccaggatcccacagagggcgatgagccctgagatggagcacagcttcagcttgcctttcaccaccaccacgtcgttcttgcgcctcttcttggctttccgcttgcgcttgggtatctggcttggggggcggagtggatcctgctttctggcggaaatccttagcaggccgccggtggcgatcatggcgagctcctggagtgcaggactagcctctgggatggaggcttgcacagggagggcgccaactgcccactagctgctcagccacctcctcctgctgcaaagcagaggaagacagtcagagggtgtcagcttggctgcagtgacatctcacgctgcagctgccctactcccagatcccactccgtgtgtgccccccaccccagggcctttatccactaactgaaacaaggccgtgtacagaggctggagccaggtagacactagggaagggaaacgttgttgcaacaactaataggtggttataaaacattgcaataactaatatgtggtgataaaaccatctgagaatatgccttcttctcctcgctccccaccc

SEQ ID NO: 32495 - DNA, 1299 bp, Artificial sequence
  DNA replication origin
ggagggggtggggcggggggcgggggcgggggcgccccccgactccgccgagccgggcgggccccgaccgccaccctgccgcaatttccctgtgtcatggctccggtctcttagcaacagccgccagtccggccgccccgagccgccgccgcgggctcaactccacccggcggagcccggcgcgccgcagccacacaaaagaggcgcgagggccggcggcgcggccgcaggggcccgcccgggagcgccgcgctaggggacgccgggagctggaggatgagcggcggagaggagggctccgaggcgggatgcgggatgcgggatgcggaggacctgacacttcttggaaactcttggaaatggctcccgccacagcgccggcggggactgcgagcctggggcgggcgctcgcccccgcggggctgctgagtcgcgctcggatgcggggccccggggcgctgtccctgcgctccgccgtcggctcgggctgaaaaagtttctccatggttcctttgtgtcgcccgagcgcccgttcgccggccccgacctccctcggtctccctgggtaagtgagcgatcttgcgtgcggagagtgctgccattttgagcaattctgccagtccccagcccttgggggcccctccccgcccctcgggtccccgagtccccgcgccccgggctggtgttcggtgagaggctttttcccgggctggctacacgggatgcgctgcccagaaaaagctagttcaggattgccctcacttggctcctgcctgtcttctttccagaggcggactcccagctgctgcactcatgtgactccagctaacatcaataagcagaccaaagccaggggccagggggtcgccgccctgccagtgaggggccggggtcgaggacctgggttgggtaccgggcacagcacagcgctcccagcctgtgggatccgagcctccgagcctcagagtggggcttaatccatcttgagcggagaacttgaatgtctctcttggaagcagttgtatttttagacatccctcctttgcttcccccatcctccattctttaaccacggtaagaccagctccaggcagtaaattgcgagggcagccaagcttgactgctaagtttgttttctttcattaggtataaaggaaaacctcaaaggtgggtctcccgtggcatctgacctttgtctgtatttcgtgtcagatgatgatacattaaaagggagtacagccttcaacagagctgaaggaataataaacgagggagttaattactagctattaaactcat

SEQ ID NO: 32496 - DNA, 854 bp, Artificial sequence
  DNA replication origin
ccaaagtaggcgacaagtgaggcagcgcctctcgcggggagcccggcgcgcgccccggcggcgaaagagaaagagaaagagcctgggccgggaccggggctatccccaaccgccaccgcccccaccggcccggccctcgccgcgggagtcgtgcaggcccctctacctgcccggggatggggccaccccgcgcggcggcggccgtgggcacccacgcgggctcgcgaccatcccacgcgggcggcggcgtccttcttacccccagcggagcggcgcctgcccgcaacgccgaccgagctacaggcggggggcgagtcggagcgcgaggttccgccagcccaggctgcggcgccgctgccccgcggtgcccggcgggaggggcgcgagggtgcacgcgcggggtgggggcgcgggagccgccccctgcccgccccgcgcgcatgctcccgccgcacctgcctcgctcagtgttccacaccccggggagccgggtggcgctgggcccgccgaggtcggggctttcccatgggagggaggtggctgcggcggaattttcagatgcgtccttctctgtattcgttccctgggaaggattcccccaaatcttggctacttcctgcctgccagcttgctccctggcagcgaagtcccagtagctcacccatgcttcatcccagctcttggggttcaccgtctgaaggctctctcctccggatccctctcggtcctgctgctcgctccgattttgcaacctcccccactcccctttcctgctcttgactttgctactcacgagtacctggataccatttccaaataaaagaatactctttccaagtggcaagcagtgttta

SEQ ID NO: 32497 - DNA, 921 bp, Artificial sequence
  DNA replication origin
atccaggagggaggtggggggggggtcagcccccctgccggccagccgccccgtctcggagggaggtgggggtcagccccccacccagccagtcgccccgtccgggagggaggtgggggggtcagccccccgcccggtcagccgccccgtccgggaggtgaggggcgcctctgcccggccgcccctactgggaagtgaggagcccctctgcccggccagccgccccgtccgggagggaggtgggggggtcaacccccctcccggccagccgccccatctcggagggaggtgggggggtcaaccctccgcccagccagccgccccgtccgggagggaggtggagggttcagccccccgcccggccagccgccccgtccgggaggtgaggggcgcctcagcccggccgcccctactgggaagtgaggagcccctctgcccggccaccaccctgtctgggaggtgtactcaacagctcattgagaacaggccatgatgacaatggcggttttgtggaatagaaagcggggaaaggtggggaagagactgagaaatcggatggttgccgtgtctgtgtagaaagaggtagacacgggagacttttcattttgttctgtactaagataaattcttctgccttgggatcctgttgatctgtgaccttacccccaaccctgtgctctctgaaacatgtgttgtgtccactcatggttaaatggattaagggtggtgcaagatgtgctttgttaaacagatgcttgaaggcagagtgctcgttgagagtcatcaccactccctaatctcaagtacccagggacacaaacactgcggaaggccgcagggtcctctgcctaggaaaaccagagacctttgttcacttgtttatctgctgaccttccctccactattgtcctatgacccggc

SEQ ID NO: 32498 - DNA, 1179 bp, Artificial sequence
  DNA replication origin
tgttgagtacacctcccagacagggtggtggccgggcagaggggctcctcacttcccagtaggggcggccgggctgaggcgcccctcacctcccggacggggcggctggccgggcggggggctgaaccctccacctccctcccggacggggcggctggctgggcggagggttgacccccccacctccctccgagatggggcggctggccgggaggggggttgacccccccacctccctcccggacggggcggctggccgggcagaggggctcctcacttcccagtaggggcggccgggcagaggcgcccctcacctcccggacggggcggctgaccgggcggggggctgacccccccacctccctcccggacggggcgactggctgggtggggggctgacccccacctccctccgagacggggcggctggccggcaggggggctgaccccccccccacctccctcctggatggggcggctggctgggcggagacgcttctcacttcccagacggtgtggttgccgggtggaggggctcctcatttctcagatggggcggttgccaggcggagggtctcctcacttctcagacggggcggccgggcagagacgctcctcacttcctagatggggtcgcggccggacagaggcactccccacatctcagacgatgggcggccgggaagaggcgctcctcacttcctagatgggatggcggccgggcagagacgctcctcacttcccagacggggtggcggccgggcagaggctgcaatctcggcactttgggaggccaaggcaggctgctgggaggtggaggttgtagcgagccgagatcacgccactgcactccagcctgggcaccattgagcactgagttaacgagactccgtctgcaatcccggcaccttgggaggccgaggctggcagatcactcgcggttaggagctggagaccagcccggccaacacagtgaaaccccgtctccaccaaaaaaatacgaaaaccagtcaggcgtggcggcacgcgcctgcaatcgcaggcactcggcaggcccaggcaggagaatcaggcagggaggttgcagtgagccgagatggcagcagtacagtccagcttcggctcggcatcagagggagaccgtggaaagagagggagagggagaccgtggggagaggg

SEQ ID NO: 32499 - DNA, 838 bp, Artificial sequence
  DNA replication origin
aacgacagtcccgatgttgttcattagatcttttgatttgttcctcctacatacttgctactctgtatcctttgacctaaaaggggacgcgtgctaacctggagacagcataattattgctcagtttagcaagtattcccttttaaacattccaatttagcacgtttcaaactggatttttaaatctttatgcccaaatccgttccacccacattaaaaaaaaaaaaaatctcagttaacagtggctttttcagtttctcaagtcagaaatcttggagtccccttgacgactttcttcttgtcacatcccacaccagccccttagcaagtgcggggtgacccagttcaaggcactgtcatgaacacaggatgaccaggttcttctggcttgcacttgcaaacctttagacgatcactttttgcctcttaaacagctttcttactatatattctgctttcccggtattcgtcgctagacggcagcagaggattttgattggattccaaactggttggttaaagcagcctgagcagctcagagggaggttgtggttgtgtgttgtggtgctggtgtgtggttgtggttgtggtgttgtgtggttgtggttatgtgtggttgtgtgtggttctggtgtgtggtggtggtgtgtggttgtgtgtggttgtggcagtgtggggttggtggtgtgtggttgtggaggtgtgtggtgtggttgtggtagtgtgtggtggtggtggcgtgtggttgtggcggtgtgtggttgtgtcgtccttgctgttgccttacttgtcttggaactcttcagcaggcagaggagagagaggttcttcagaccgt

SEQ ID NO: 32500 - DNA, 1204 bp, Artificial sequence
  DNA replication origin
atgtactgaaaagcaataataatgaaaataattctttacgtttctggagtttcaggggtatagaaagagttctagaattttcacaagtgctcttacatagaccatctcattttgccatgatgatcctgtgcagccggcagagcaggtgtgggtatagagcaccagcccctgtatcaggtgctaaggatccgatcctaagctgaacaggcatttgcccaccctcacagggagtggagtaagtgagatatagattaagttttaaaaatgtatcaaaactatatgtgggggacaaaacacagcagacatctggtacacatggctgcaggggtaacagctgccaggagccaaagaagacctcagcccgagctggggtgcctggctgtggaagtggtggttcttggggcgggcagagtagacccgctgcgaaggggtggggccgtggagccggaagagagaacggcgggggcggggccagacgcagttggcgtgtctgttggtgaggtgggcggggtcagcctgcggtggaggggaagggccctagagccgtggggagaggcagcccgtggcctggagcagtggttggtgacctttggagtggcggttgggcggttgggcggttgcatggggcggcctgggactcgggggcggggtcagtcatataaggctgtgcccagcgcttttggaagcagtaagtccagcccgaggctaaggtgagagcgtctgccgggacagtgtggctggacccacgtggcaggtgcgaggcagggtcactgcggatgggagagaaggcgtagaggcctcaggccttgtggggtgtcacctagagatgccccaggagggctggggggccggggtgtttccagtgaagccagttggcatcctggccgctctctccgagtggaaggcagagggaaataattgtattcacgcagggtggatcgggcggaggccgtcaagctagccggaaggggctgtgctgtcaaccagcgagcgcaggtggcctggtgtagaccccgggaggctgggcggggacgctgggcggggacctggttgaggacctgggcggggacactgggtggaaaccctgggtgggcacgctgggcggggactctacagggctctccctctgggtagtcacattcacttgttgagttgggtgtccatctcctctgcatgtggattttactgacttcttataattgtc

SEQ ID NO: 32501 - DNA, 1209 bp, Artificial sequence
  DNA replication origin
caaggcagaagaatttatcttagtacagaacaaaatgaaaagtctcccatgtctacttctttctacacagacacggcaaccatccgatttctcaatcttttccccgcctttcccccctttctattccacaaaaccaccattgtcatcatggcctgttctcaatgagctgttgagtacacctcccagacggggtggtggccgggcagaggggctcctcacttcccagtaggggcggccgggcagaggcgcccctcacctcccggacggggcggctggccgggcggggggctgacccccccacctccctcccggacggggcggtggccgggcagaggggctcctcacttcccagtaggggtggccgggcagaggcgcccctcacctcctggacggggtggctggccgggcggggggctgacccccccacctccctcccggatggggtggctgccgggcggagacgctcctcacttcccagactgggtggctgccggtcggagaggctcctcacttctcagacggggcggttgccgggcagagggtctcctcacttctcagacggggcggccgggcagagatgctcctcacctcccagacggggtcgcagccgggcagaggtgctcctcacatcccagacggggcggcggggcagaggcgctccccacatcttagacgatgggcggccgggcagggacgctcctcacttcctagatgtgatggcggccgggaagaggtgctcctcacttcctaggtgggatggcggccgggcggagacgctcctcactttccagactgggcagccaggcagaggggctcctcacatcccagacgatgggcggccaggcagagacactcctcacttcccagacggggtggcagccgggcagaggctgcaatctcggcactttgggaggccaaggcaggcggctgggaggtggaggttgtagcgagccgagatcacgccactgcactccagcctgggcaccattgagcactgagtgaaggagactccgtctgcaatcccggcacctcgggaggctgaggctggcggattacttgcggttaggggctggagaccggcctggccaacacagcgaaaccccgtctccaccaaaaccagtcaggcgtggcggcgcgagcctgcaatcgcaggcactaggcaggctgagtcaggagaatcaggcagggaggttgcagtgagccgagatg

SEQ ID NO: 32502 - DNA, 885 bp, Artificial sequence
  DNA replication origin
tgggatgtgaggagcacctctgcccggctgcgaccccgtctgggaggtgaggagcatctctgcccggccgccccgtctgagaagtgaggagaccctctgcccggcaaccgccccgtctgagaagtgaggagcctctccgaccggcagccacccagtctgggaagtgaggagcgtctccgcccggcagccaccccatccgggagggaggtgggggggtcagccccccgcccggccagccaccccgtccaggaggtgaggggcgcctctgcccggccacccctactgggaagtgaggagcccctctgcccggccaccgccccgtccgggagggaggtgggggggtcagccccccgcccggccagccgccccgtccgggaggtgaggggcgcctctgcccggccgcccctactgggaagtgaggagcccctctgcccggccaccaccccgtctgggaggtgtactcaacagctcattgagaacaggccatgatgacaatggtggttttgtggaatagaaaggggggaaaggcggggaaaagattgagaaatcggatggttgccgtgtctgtgtagaaagaagtagacatgggagacttttcattttgttctgtactaagataaattcttctgccttgggatcctgttgatctgtgaccttacccccaaccctgtgctctctgaaacatgtgctgtgtccactcagggttaaatggattaagggcggtgcaagatgtgctttgttaaacagatgcttgaaggcagcatgctcgttaagagtcatcaccactccctaatctcaagtacccagggacacaaacactgcggaaggccgcagggtcctctgcctaggaaaaccagagacctttgttcacttgtttatatgctg

SEQ ID NO: 32503 - DNA, 1030 bp, Artificial sequence
  DNA replication origin
gggattgaccgtgggcgcgccggggcgagggaccagcggagaagggagcaccttgcatgcgcgttgcaaggattgagaagagaaactcagagcgaattttcattttctgtttttgcgggcgggcggaaagagagagagagagaagaaagaaagagagagagaaagagaaaagaaagagagagaaagaaagaaaaagaaagaaagaattcttttcccttttgggggacaaccctagtcacccacgccacccctagagctgtcttcgcagcgtggcttcgtgttggctaggcagtcacaaatatttgttgaaaacatcttaatgtatgcagcacatgacaatgggcgtattcccacgaatataaacttcattaaaaaaaaattcgagtcaaaagtagtgggcggaatttgcagtgccctcgtgggaaacgtgtgtttgggcattgtgctgagttgtgagctctgcagaaacgcgaccatctcattcattcaagcattcatgatggaagcactggaccggagctggaaacgcagcattgaatagctgcgagtctgctgcgcagagccaggctgggaagagggaatttacatagttatcagccagaagaaaggagcctttggggagggagaggagccttaaaggattgcgaggggactcctgtctatcaggctgctgaaggtgaacaagtcccggtttcccacagggtagagaaagagcagcttgcctcagcttattgttccccgaaattgaaagtcttagactgaggagatggcctgaaggttgtcctggcccctcggggctcggcacttggcctggcggttatgagtggtttttggagaaagtgggacctcatggggctttcctgctttgagatgctgcggaaaacctcccagggcaggagccctttaatgtttcatatcgcattccctgtttgcctttttgccttccgcaccccaccaaccctcacccttcctaactagcctccttgagcagttttgattttttttttttgcagtctccgggctgcaggca

SEQ ID NO: 32504 - DNA, 884 bp, Artificial sequence
  DNA replication origin
cttccgcagtgtttgtgtccctgggtacttgagattagggagtggtgatgactcttaacgagcatgctgccttcaagcctctgtttaacaaagcacgtcttgcaccgcccttaatccatttaacccttagtggacacagcacatgtttcagagagcacggggttgggggtaaggtcacagatcaacaggatcccaaggcagaagaatttttcttagtacagaacaaaatggagtctcctatgtctacttctctccacacagacacagtaacaatccgatctctctttcttttccccacacttcccccctttctattcgacaaaaccgccatcgtcatcatggcccgttctcaatgagctgttgggtacacatcccagacggtggggtggccgggcagaggcgccccccacctcccggacggggcggctgccgggcggagacgctcctcacatcccagacggggcggcggggcagaggcgctcctcacttcccagacgggatgacggcggggcagaggctgcaatctcggcactttgggaggccaaggcaggctgctgggaggtggaggttgtagcgagtgagatcacgccactgcactccagcctgggcaccattgagcactgagtgagcgagactccgtctgcaatcccggcacctcgggaggccgaggctggcagatcactcgcggtcaggagctggagaccagcccggccaacacggcgaaaccccgtctccaccaaaaaatacaaaaaccagtcaggcgtggcggcgcgcgcctgcaatcccaggcactgggcaggctgaggcaggagaatcaggcagggaggttgcagtgagccgagatggcagcagtacagtccagcctcagctaggcatcagaggga

SEQ ID NO: 32505 - DNA, 1402 bp, Artificial sequence
  DNA replication origin
ggtagctggctctggggagggtgactgtggaagaggctgcgccgccgccagaagtttgtcccgggtcacgagccgcgagtagtttgtgagcgcggccgggcgggaccagcggcctgcgaccccgcgggcgcggccaggcggcttcgagcctggcgccggacggcgatgtcaccgcacagggccagctgcacccggagtcgccgggcctgcgctgctcggcggctgcgggaaaagcgagccaggagatcgctgaggctccggagggctgcgagcttctctacgccgcgggcggagcgaagttggcgggcgccgggagatggcgcgggagccgggagcgccgagccccgcgatcgccagcccgctcccggccgggcccgccgggtacacgccgctggccccgagcactggcgcccgggaagcagggcgcgcttctgctgttctgcgtcctcatcatgcctcggtgtcccgtgtgggcccgaagcgagccgcaggcagtacacggaaggcggtggtcacaccaaaaccagggtttggacataacccgtggtttctgtatctggtgcaaagtgctgagaaacaggggagaaagagaagtggggggtgaatcaagtaatgtcttgaaatattttagttttacgattttgggtctgagtgaattaaaaaaaccttacaatgcttcagcaaaaaataatttttttattttaattgtaaatttttttgtaagtgatccttctatcttccagggaataagcacattgagccagcaccaaccagacagctgtaagctcctggcctagctaactgaacgcaatagaaggcttgggaagaggttaaattaggaaccaaagtaactgagtgacagggttctagcaatgattctggctagaaggcaaaccggtgatacagaggcacccaggagctctcctgcactttttccgcaagaggggtcctctgcttagtgctcactgctttctagtgcttataaacacgtaaaaaaataaatggattccacactcatcttgaccctgttctccactgtacaccagaaccaagaaagatacagctgtcatcctcccaaggcaaatttggggactagaagacttgcctttagtgtggcaaccaacactcctcttacttcaggaagtccacttactagatacttaccagacctgctctttagaagtctctatattaatcatttgcttgttaatatgagcttacattgtcctgccacttctcccaactatgtgcttatggaaccttatctttaattgtgaaatgaacattgaaatctcagaaaggaagcaatgtcttcaagatcagcaagtgaggatggtcaaatctgcaacctgggctttccattttgatgtacttgtgttctatactgcagttcaaatttgct

SEQ ID NO: 32506 - DNA, 863 bp, Artificial sequence
  DNA replication origin
tcttccacagtcaccctccccagagccagctaccaaaatagaagacgcggccggggcgaggaggtgggcggggggagcccggtggccgctcctccccgcgcggctgacgcccgcttcggcggcggtagtggctgtggccgcggggccgcccccagccgagctcccggaggcgctcgggcgcgggccggcggggcacgggcgctcacgccctctagcgggccgcggcggcgccgggcggccgtgacgtgagcgctcccttcagccggcctgcggggcaccgccagtcagtcggggagcaagagccccgcgcgcagccggcgcgggctcggtcatcggcgcgccgccgcccggggctgggcttggggctgcctgtggagaggcggcgggcggaacgcgcgcggccacggccacggccaccgccacggccacggccggcagctcgggtcccgggtcccgggcaggggaaggggagaggcggcgagctcagcaaccggaaccgagggaagattttggctccgcgggctcgccctccgctccctctgccagcggcgccagacgccgagtggggccagggacaggggaggaggacccaggaccctgtgcccgcgcccctggagccgctggagttcggacttctgcaactgttggcactttgggggcttggcttagcgctctgctgtttacccgtctctcctcgctgcctcggaaccaaagctcccggccccctccgccctcgcgcgcccacccaccgccgccggggagcggcccggcccgcactcagcaccatgaggggacttgggacttgcctggcgactttggccggacttttgctaactgcggcgggcgagacgttctcaggtaag

SEQ ID NO: 32507 - DNA, 1299 bp, Artificial sequence
  DNA replication origin
gcggccgggcccaggccgctggtgttcggctgcgcccgcagcgatcgccgggaactggcggccgctccggcggcggcgatctcccggtgccctgccctccctgtcgccccctgcccggcgcggctggcgaccccgggaggtccccgcggtcgtgcagcgtctgcggagaggctggggggagttcctcgccggtcccagcggtagggcttggcggccgcggagggaagcgggcaggtccccaggccctggccacggccctgcgccccgctgggctccccctccccaccctcgtccccctagcggagcgccgcggccagctgcaacttgttcatccagcccggctgcccgggggtcccaggtgggaaggagaggcactggcggtgtgcgagcaagcgtgtgagtgtgtgcgcgtgtgtgcctgcacgcgcgcgcgggggcgttctaagcccagaggaacccctcacggagaggatctgtggatcggagtcgggggtccggcgtgggggcgaacccggcacgctgtcacaggggtttacaaccaggatgacctttattacctgggtgacacaggtggatagacggcaaatgctggcccatttgcacaccttctttctagtgtttattagattagtttcattaaggtccacatgcagtgggggcggtgggctttctttttctttaataaaaaagcctgctctttggtcttaaacttggtttttgcaaaataggtctctgcgtttgggaacaagtgagttgaatgagtaagttgggctttttaagaatttaatgaagaggactttcataaacagtaaagagcatattttaagcagtaaaaacctttggtcctccggtgcgtggaaacctttttattttcttggggtccaggaccattggctgctggagctctggactcacaggcacattagttgtgtcttgtgtgttgctgatctgcaggacccttgatcacagttggcctcagagaaggagtggaacgtgtaggttttgaaacccaaagcatcaacttcaatacagaaatatcctttctccaagttttgtgtttccctaactgcctggtaattgcacgtgctccagaggatttaacacaatgatgcactgtcgtctgattataaaactgatgcagaatttggtctgtgttcttattagtgaataatagagtagaatttgagagccttgtaactcattagtattagaagccaagtatgagagccctagtgatggttttctctttattaacatccatgactcccttcttgggatttgtttaaagttaagctgtgt

SEQ ID NO: 32508 - DNA, 1250 bp, Artificial sequence
  DNA replication origin
caggcactgtgccaaaccacagtcattctttcaacagatatttgctgagtgcctgttatacaccaggcactattctaggtgtcagcgagagagcagggaacaaagcagacaggatgctatgctggtgtcgtgctgcaccttcttgtggggaagacaggagcaattgctgagtgcagggtgtcaacacccatgttaggaggtgagcacccagcaaggaaaatgaagcagggaatggagattggtcagggtgggtgatgtttttagactgtggtcaagaaaagcctcccagaggggatgagatgccaaccaggacttgaaacaggtgagaagacggaggagtgtggccgcccaggtggccggtacagcagggaaggctgtgctgccggagcagcgggagtggggtaggggcagaggtgggagatgcagggactctggggtgaccacaggagcaagagctgacagggcacctgccctcctgaagctgatggtcctggaagatttcgtgggggagaagggggtgatgtaaatgattacaaaataaaattcaagttaagggcacagaaggagttaacatggtaccatgagaactcacaacgtggggactgagtgaggaggtatgggaaggcctccctgaggatgggacatggaaaacaactgaacaagaggggacggagcagggaggatgctgcagaattgggaggggttcatgtgaacagaccctgtcatgccggggagccccttgggtctgaagaactaaaggaaggctgggtggctggagctggaaggacaggggttgggcaagagaaggagggaggtggaagccagacctacagagccttctggggcaggttgaggacttttgtctttattataagaataacggaaacttcattaaaggggttgggggggtgttaataaaatttcattggaaaatttagatctgactgcagagaaagtaggttcgaaagggacagctgttgaggaatttccagtagcccgagtgtgacacgatgatgatgttggctagaaagaaaataagtagatgaattcagaagaagtaatggacccaaccgaaagatggatgggagacagggtgaggaagacagaagagccagagatgactcctgcgtttccgacttactggaggatgaatggttagatggatgatgggcagttgaacaggtagacacatggaaggatggatgggccattcccttccagtattatccaggatggataatactggaagg

SEQ ID NO: 32509 - DNA, 833 bp, Artificial sequence
  DNA replication origin
tgtgcgttatttacctttctaggtgctagcagaaaaactgtgaaccgttcaaaccaaaaccaaaaaaacctctgacccagtggagctgctgttctaattaggagaaatgggcaataaattaaaaagttaattctgtatggtcaattagaaagttgtatgtactgcagagaaaactaaagccgtaaagggggactcggagcgccagacctggaggccctgatggcaattttgaatcgagtggctcagtcccactgagaaggtagcaagtgagcaaggaagacaaggggttgagctatatagatacctggaagaagagcattctgggctgagaaacggcccaagcaaaggccttgttgtggaatttgtgcctggcgattttgaagaaaagcaagcaggcaatcattggcatggtgtatgggggcctgcggagttccatgatatggggagaggtcatgggccaggtcaggtccacagttgtaaggactttggcttttactgtgagtgagatgggcagtcgttagaggtatctgagtaaagccgtgatctggctgctgggagggaagtgaactgcacttggccaggagaggaagcagagaagcctgctatgtggctgtgggaatcatcagagaggtggcagtggaggtgagaaatggcgagacccttgagctgcattgaaggtagagccagtaggatttgctggcagattggctacggggttcaggagggagagaggggtcaaggatgctgaggagaagatggtgtgtggaacagattcaggtaggggttagggaggaaatgaggagttcagtcttaggtgtgtgaagctttaaata

SEQ ID NO: 32510 - DNA, 2080 bp, Artificial sequence
  DNA replication origin
cactgtcccagccccgcccgggctgcgccccgcgctcccgccgtccccgccccccgcaccccggccccgaggattcccgcggggctcgccgccgccgcgctcgcccctcgctgaggtcaccgcggatcgagttctcccggctcagcagcgcggcggctcccggccgctcgcatccccggacctcgcgctccgggctcgcggtcaccggtgccgcggcggcgctggcggcgcgcgcccggctcccgcgtcccgctccccgcccaccgccggcccgctgctgcccgtgcccgcccccgccgctcccggctgagagaagccgcacgcgcgcgccccacctccccgccgcccagcgccctcgcccaggcccgtgcgcatgccccgcctccagccagccggcgccgtgcaggggaggggcgagggaaggggcgggggcttgcgctccccggggggcgggcgcccggcaggggcgggacctgcgcgcccttgggagcaggcgcaggctggatccatggggcctcgctgcccggggaccctccttgctttttgaggccctagagacgctgccaggagctagggaggaagggaagaggcggaggtgaagtggtggcaaggggcggcgccggccacttggggaaggcgtgtgccgcggctgacaacacccctctcatgcctctccatccaccgcccgcctccccgaggccagtcacctccctcgctgtcctctccaagctgtgcccctggtccccgagctcctttaaggatcgctggtacccgacgcagctctcgcgtctaaacggcacggcgggcgctccacagttggcacccccgtggcctcgggagctcaggaggagctgctgcccaaacaggaggagccctcgccaaacctgggggtcagaaagggaactcacatttatagttccggctgcgagccaggcctgctggccacttactgagcagtgttttatttaagcctcaccacagtcccagattggaattgctgtcttcggtgaagactagggcaccggcgctgggaggtgaagtcacttgcctgcgatgcctcacccagtccctagctgagcgggtttaaacccaggtcttcaggattccgagtcctgcaggctttccgctcagagcccggagcccggccaccggttctaccacttgagtctcccatgcgcaaggcactagacctttctgagccccagttccctcgcctgtatcattaaaacgtactgccacctgagcatgtgtgaagatttagcaaataccagaacacaccgtgcaaactgtaaagtacagttcacataccattgggtgcagtttatgtcccaggcgttggatgttggccagtgcccataggaataggggccagcctgtcctccagccctggcgttgcaggaggcagagggtcaggtaataattacaaggaggagggcgggagcataaccctgcctggtgaggctcgcattttcctggaaggacgggttggtctctcagctgagggcccaggacacagtagagcctgcagagagcagggcccctgggcggggaggcaggtaggttagggattagaggggagactggagggtgtgtggcaccaaatatcctaccaaggccgttgggcattatcctagaggcggtagccacggggtattctgagcaagatgatctgatgtgctcaaaaagaccccgggggcagcaacctggaggagagggaggtgggccacgggagctgcgagcggctgtggcagtatgcgcggtgagggggccttgggagcagggacagagaagagggggccgactcgcaaaaataggaggaaaaaatcgactccaaagtctgtgatcttaaccacagatttaccctacttagccatctccttcaaaaaatgcaggatgaacccttttgttgtaatccctacgtcaggagagccctgccccgaagtcgtcctgcctcgccctggctgagctctgggggcactgagacctcgcctgctctgctgctgttgtggtctttgtgagtcgtttttctgggaatgcctctgaatgggagacagcacgcacgaaatccaatctctacgaa

SEQ ID NO: 32511 - DNA, 927 bp, Artificial sequence
  DNA replication origin
gctcgcgcatcagccacacggacagcagctccgacctctctgactgcccctccgaacccctgtccgacgagcagcgcctgctccctgccgccagcagcgacgccgaatccggcacgggctccagcgaccgtgaacccccacgaggagcgccgacgccgagccccgcagcccgaggagcgccgccgggcagccccgagcccccagcgctcctcgccgcgcccctcgccgcgggcgcctgtcccgggggccggagcatcccgagcggggtttcggggggtttcgcggggcccggcgtggcggaggatgtccgggggcgctcgccaccggagcgaccagtccccgggacccccaaggagcccagcctgggcgagcagtctcggctcgtgccagcggcggaggaagaagagctgctgcgggagatggaggagctgcgctcggagaacgactatctcaaggtgagccgcgcctcggccgcaggtgtcccggggcgcccccggagggcctggctgcggcggggacccgccaacccctccttcccgggcctgtccagcgccttctccctcctgctctccacggtcctacccccgcattgtcaggcattggcaacttaagcccaaacttctggaaggagaagcaagacctgtgggaccccgccagttcgcaacccacttctcttttctcgcgtctagaactcttgcgtctcttcgctgatacttttacttttgttgacctgttggggcagaggaggctgtaatcgttttggggacatcagcggacgcccccatccccgctcagaacgtgccagcctcacctgtaggaacaggtgatccttcgccagggagctctagccgggccacgtgcgggcgtggcggttcaggataatgccactggagggcccccggctacggacccgcttgccccttctcc

SEQ ID NO: 32512 - DNA, 947 bp, Artificial sequence
  DNA replication origin
cgcccccggagggcctggctgcggcggggacccgccaacccctccttcccgggcctgtccagcgccttctccctcctgctctccacggtcctacccccgcattgtcaggcattggcaacttaagcccaaacttctggaaggagaagcaagacctgtgggaccccgccagttcgcaacccacttctcttttctcgcgtctagaactcttgcgtctcttcgctgatacttttacttttgttgacctgttggggcagaggaggctgtaatcgttttggggacatcagcggacgcccccatccccgctcagaacgtgccagcctcacctgtaggaacaggtgatccttcgccagggagctctagccgggccacgtgcgggcgtggcggttcaggataatgccactggagggcccccggctacggacccgcttgccccttctcctgcaattacggaaagagctgggggctctcagggtctcctgggctccgacatcccgggtagagggggccgcgccgttttcggtgagcaagctgaagctcagtagaggtccttggagtgtggcccgggttgaggagcaacggtgttgcgcgggccagtcctttgtaagcatccaggagccggctttctgtgtcaggagaggccacgccagcactttctaaggaatcgcggcgcctgctgcactctctgagtattttccggcagggcctgcgggcagtggcgtcttagtcgccttagcactgggtgcttaatccggctccatcttttctccacggagggggcctggtgctgcagacggggttcccggggtcaggacgatccaggtgacttgagagaaaataaggggagttgtattgacaccaactgttttatttattgtgatcttcaggttagtaaacaactccagtggcatcaatctgtgtatctgttaagtcttaatgagcagccaacc

SEQ ID NO: 32513 - DNA, 892 bp, Artificial sequence
  DNA replication origin
gggactgggcgccgtggagcgggggtggcgctcgtcgaggaggctcgggcggcacaggaccccacggaggtggtgggaggttcaggcatggcgggctgcaggtcccaagccctgccccgcgggaaggcagctaaggcccggcgagaaatcaagcacagtgccggtgggccggcactgctgggggactcagtacaccctccgcagccactggccagggtgctaagtcccccatagcccggggctagcagggctggccggctgctccgagtgtggggcccaccaagcccacgcccacccggaactccagctggcccacaagcgcggcgcgcagccccggttcccgctcgtgcctctccctccacacctccctgcaagctgagggagtgggctccggccttggccagcccagaaaggggctcccacagtgcagtggggggctgaagggctcctcaaatgccaccaaagtgggagcccaggcaggggaggtgccgagagcaagcgagggctctgaggactgccagcacgctgtcacctctcaaaaggaaaacagatctctctaatgagagagaggggctcctgagaggaaaaaggctggctggtgggggagtccgttagattttacaggcaggcttgaggaggcagtgtctgatttacgtagaacccacagattggttccatcagatgtgatatataaacagcgcatggggaaggctggccactccaccctgatcttattattgcaaatgggctttccagttgactggcaccatcttgtctgcttcttactgtacaagtggctggtaaagggcgaagggaagatggagccgccattttgaacatgcctaatcccaagtagcttttcctgccagcattcacccgtgcaagcttccag

SEQ ID NO: 32514 - DNA, 1015 bp, Artificial sequence
  DNA replication origin
gtgggcgccccagggactgcccctcctttggcaggagcctggtttgtgtttatttttggttgtgccagagggaaactgcactttgaggaagaaaaacaattgctggttgtttaggaggagcagtctaatccgagacggccttgtcttctgcagaaaacaagcggggcgcaaatcaacccaggcgcagccaaggggccgcggtcgcgctgagtcacagcccgctcagagctcagcgtgactcagggctggccgcctccctgaggcatctgtgagtgatcccagccgcaggaggcggcatctctttcgtctacggctcctccagactcatttccttcctctggaggttcaggtgtccctgtggggcgtggttgggggtacgaggcacctctgcgtgcagttcccagagagcgcccacccggcagggccctgggcctcacggcctggctgaggggctaggcctgcctggccccgcctccgccacaggctgtgccctcagaccttgccagcatctttccaacacacccattagtctcaaggtcaagtcgggtgagagggcctggagggattataacaatagaaatgtaagacaaagtagcaaatgtaagaagccacgtgcctcctttctgcctgcagtagaatttcacaaagccccagacccctggcaacttgcagctctggggaaagacgctttgaggacaaaacaggctacagcacacgacccccaactctcttgcctgagtcactatattccttaaaacataaatgaggccaggagcagtggctcacgcctgtaatcccagcactttgggactccgaggccggatgattacttgagcccacgagtttaagaccaatcagcctgggtgacaaagtgagatccctgctccaatctctatgaaaaattagccagccacggtggcccatacctgtggttccagctactcgggaggctgaggcaagaggatcgcttgagcccaggaggttgaggctgcagtgagatatgtttgtgccaccg

SEQ ID NO: 32515 - DNA, 1457 bp, Artificial sequence
  DNA replication origin
cgggacccctgcagcggcccgtaggacacctccctttccgagcacggactggtccccgcccctcccccgggaagtctccgcccacagggccccagcagcccccgcgcgccctcgctccctcccgtcagcccccgcccctcggcgaagggagcggcgtgccgtccgggtcgcctaggcctggggtcgggagcgcgcacgctgtgcgccctgggcgcgctcgggattctcgcctggcgcggctggggaaggtgaacagtgtggcccgccatgttcttctccgcggcgctccgggcccgggcggctggcctcaccgcccactgggtaaggaggctcaagctgagcccggcgctgccgccgcccttctcttgctctccgtgtctcccttagttttgggcgcaggagagccctgggctctgcacgggcctgcaggcggcggcaaggacactgcggccttagccctcttagggaggccgctgcagccccaccgtgagaagccccgagggagggttgccatactgggaagtgtactcctagtttggtcgaggaggacagaaaagaggggctgcttggtgatatatatatatatgtttgtttgtttttgctgttttgctgtagcgcagaatctaggcctgctctggccagatcagtttcgaagaccgtcgctccgaaggaggcacctctcgtttcaagcctagtgacctcgatgcttttaggttgcagcatactggagagctctggcttgcttcgtgaaggcttagggagaacttcattagggctggaaaagggtggccaatgtttgatttactgcagttgtgctttgcatatcggaaatgctggctaaataaacggtatcaaactaactctgaaagaacggcgccgcaaataacagcacccaattaaagaaccacaggattttagagattaaatgatctttttgagatccaagtacatctcatggtaggcaaggaaattgaattgcagagaagttgaaacactccttcacgttaatctaaaaatgcagatttccagaaatgtcgattataacaacagggcctgttacacaagtaatactggaaagaagccttagttttgtttgttttctaagagtgaaataggttaagtcagttctcagcaagagggagctagtgtatattcattgagaatgaattcagggctttagagttagactcgagtttggatgttagcttaactgccttttgtggctctatgactttgtgctgttaatcttcctcagtttcttcagttgtaaaatgggaatattcctttttgcagagttcagtctttcaataaacatttgaagtcttactgtacgtcatgcactgctgagctctagttaacagtgtggataataatgatagtcatttgataactgttttctgtatgccaagcaccgagttaaatatctacattccacatctcatttttgaggctggtat

SEQ ID NO: 32516 - DNA, 1108 bp, Artificial sequence
  DNA replication origin
ctcccgttccccctccccagagcaaggtaggggacgcgccctgcccgccccccccggtcccgacgcgccgcccgcccagcctggcccgagccgtagctcgcctgacagtgacaggccgttagtgccccccggcgcgggtccgccggggccccgcccgccgccgcccctcccggcgtcgcgaggagccgcggcgcaggtgggagccgccaactgggcgggggcgctgcgcggggcggggcgggggccgggcggagggccgcgagctggcctcgtcgcgggcgcccctcaccgcggctggcggggctgggctgccgccgcctcccggaacatggcggggccggaggagcgtgtgcgtgcgagtgtgagtgtgcgcggccgagagggcgccgctggcgtgcggcggtcggacccgcgggggcgggggcgcgcccggcccgccgcgcgttcccgccgccagccgccgagcgtgcgccgacgccggggagtctgccgcggccgctcgggccgggagcgtcggaggtacccgggtcctgggagaggtggatgaaatcaagaaggggaaattgctgctttagtagtgtccggggaaagagcagccactctacagttctgtcttaaatgccagtgtaaaataaccttgccgcattggacaggcagttcccgtcatcgtttttcaagtacccacttgtgatgcttcaagacccctggagcacgtcaggttcttagatctcgttttgaggagtgatgtggagtgacgcatccttacagatcccaaagcgttgaataaacggttgtacaaagaggtatgcgaagcttagctgacagctgttttagtaataacagtaagacgctgtctgggataggaagttactgttgcactcgttgaaaccttaggaaacatttaaagcagtgtagtcaccgggattgtaatttccactggacacccgtggttaaactgcgaactaaggtgaagtgtgttgcagatccagtgctgtgtatgtaatggttcggaattacctctaatcctaaagttgaaatgagcctgcatctgcagtcatgtatttcgttttcattttagaatggtttatgtaaattataaagaaaggct

SEQ ID NO: 32517 - DNA, 1832 bp, Artificial sequence
  DNA replication origin
ggacacaggtgacctttaggatccgaacaaccctagctaacagtcagccaggcaacagtgacttcagtcctacaactgcaaggagctgaataactgctaacaagaaggaggttggaaatggagttttcctaggagcctccagaccaggctcattcagctaggtggactccttgattccagtctcaagattcctgagagatctcagagaacacagccatgctgtgccagactttggcctccagaagagttttttttttttttagttgagacagggtctcactctgtcacccaggctgaagtgcagtggtgaaatgacagctcattgcagcctcaacctcctgggctgaagcaatcctgccacctcagcctcccgagtagctgggactaccagcatgcaccaccaagtccagctaatttttgtatttttgtagagacagggttttgccatgttgctcaggctggtcttgaactcctgggctcaggcaatcctccttgagcccatctgcctttgcctcccaaaatgctggtgtgtccggaattggtggattcttggtctcgctgacttcaagaatgaagccgtggaccctcgcggtgagtgttacagttcttaatgatgatgtgtctggactttgttccttcagatgttcagatgtgtctggagtttcttccttctggtgggttcatggtcttgttggcttcaggagtaaagctgcagaccttcgcagtgagtgtcacagttcttaaaagcagcgcatctggagttgtttgttgctcctgtctggagttgttcgtccctcccggtgggtttgtggtctcgctggcttcaagagtgaagctgcagaccttcacagtgagtgttacagctcataaaggcggtgtggacccaaagagtgaacagcagcaagatttagtgcaaaaagcaaaagaacacagcttctgcagtgtggaagcagacctgagcgggttgccgttggggctggggcagcctgcttttattcccttatggagccccacccacatcctgctgattggtccattttacagagagctgattgatccgttttccagagagctgattggtccattttgacagggtgctgattggtgcgtttacaatcctctagctagacacagagtgttgattggtgcatttacaatcctctagctagacattaaagttctccaagtccccactagattggctagacacagagcaccaattggtgcatttacaaacctttagctagacacagagtgctgattggtgtatttacaaacctttagctagacataaaagttctccaagtccccactggattagctggatacagggtgctgattggtgcatccacaaaccctgagctagacacagagtgctgattggtgcatatacaatcctcccactagacagaaaaggtctccaagtccccacctgattcaggagcccagctggcttcccctagtggatcacctgcccaccagggccacaggcggagcagcccaccagtcctgtgccccgtgcctgcactcctcagccctcgggcagtcgatgggacggggccgcggagcaggggtggcacccgtcggggaggctcaggctgcgagggagcccacagggcaggggttggggggctcaggcatgtcgggcttcagatcccgagccctgccccacggggaggcagctgaggcccggcgagaattccagtgcggcgtgggccggcgggcagtgctgaggaacccggtgcaccctctgcatctgctggcccgggtgctaatcccctcactgcctggggccagtggcaccagccggccgctctgagtgtggggcccac

SEQ ID NO: 32518 - DNA, 1127 bp, Artificial sequence
  DNA replication origin
gcccgccccgcgcgcgcgcccccgccagcccggccctcctcctccccgccgcccctcccgcgcgcgtccaccggctccccggctcgcgccgctccatgtagccccggctccccgggcggccgcggaggagggggcgaccacaagatggcgggtacgtggccccctgttctccgggcggcggcggctcctcgagcccacccgccctccgccgcagccctgagtggctgccgggccggggccggcgtggggtcccggcgcgggaaggcgcccccggggcgggggggaggcgggcggggggggggcgtcgcgccgggccccggggcgctgaccgggcctttcttctctcccctcggcgcagacctctcgctgcttcaggaggacctgcaggaggacgcagacggatgtgagtggcccggcctcgcggtggcctggcagtccgcggggagcggccggggagggcgggcggcggcgaggcctgggccgggccctggctggctgaggggacggtgggcgagggcggccccaggcgggctggggtggcgatcgggggggaaaatctcgcgtccgtgaggaaacggcgcgcccaggttccgctgggggagggagacgcccggagtaacgcccaagttcgctttccgcccttcgctctcttctcccggcgcccccgaatcgcctgcgggctcagcagtggcgcggctgttttggaaggagaagcggtggggcaggatttgaagtggggtttgggtgtgtttctgcccctggtgtccccttcccccgtcactctaggaaggaagaggctcgcgcgggaggtgtgtttccttagagtcgctcttccaggagcgcccgggggtcagcctgggccccggctagccgtctgggctccccgacccggttttggattgtttgaggatgacatacctgtcattttactttggctggtagcagttttcagatgctcccgatttgattagtggattacgagaaggttagaaggtgtggcctccgcaggaattactaggtttggagagcatatttctttaatgcggatgttcagaaatcacccagccctccttcagtgttaacagtgcagctttcctttgaggtactgaagtttttaaagagttgac

SEQ ID NO: 32519 - DNA, 998 bp, Artificial sequence
  DNA replication origin
tcccgggcgaccggcgctcccgcctcccgcctttcccgctgcttgccgggtcccggcccggcgacgcgcgctcacaccctcctcccgagccgccctcacgccgagcgctgcggacgggggcgcgcaacctgccgccggccgggaccctgcggcgagtgccggaacccggccgggcggggcctcccgcggcccggccgctttattgggtcaccggcctcgcccaccgccctgccagccgcagccatctcggcgggcgcgccgctcgcagccagcgccccatccccaggcctgcacgtacgtcgtcggcgatccggggccgggggcggctccgaggtcgtcggggccggggtcccacctcctcttggaggaagcgccgcctccccacccgcccggggccctcgccaagtggctgctaacaaagcccagggcccggctgcgggatggttgactgacaaagtcatgcctgcctagccagcttcctcgtgcagcacggtgaaggctggggcgccgggtttttactcccacgtcctgccaactcgagctgacaaggcgggcaatccaccagcgggagcgttggcaggcccggggtcagatcctgattcagccagttaattggtaggagtggggcccatttgtagaatgaaggtgataactgcctcgtggggttattggcattaaatgaagaatgtagggaacctagcatggttcttgatgtctaggaggtgctcggtgaagggtgcctatgattcgctttgtcttctaaatacttttggcagcacttgaggtgttaaagtctgtatcccagactttattagtcttgttgttttacgtgacttaagcgattagctcaaacgcccaagtacaaaatggggctaaacccaggttttccgacacgattctacctccatggctctatctccagctccacccaaggcctccaaaatggtgttctcctaaagtgaccaacaaaacaccaagctgtgtcatggtgccacttt

SEQ ID NO: 32520 - DNA, 1119 bp, Artificial sequence
  DNA replication origin
tgagcgcgcagggaataggggagcgaaggggcgcgagagcgcgggccggggtccgccggcgggtggcggccaggactcaccccgagaaggcacactttgagctcccgtatcgccatcatgtgctcgcagccaggcagtgccggggctcagcagcatcctccggggccgccgcgcccgcgccccgccggcgtctctcgcctctgcccctcgctcgcgccgcccgcgggcggaaccgccgccgctgctatttctgggccgccggccccgccgcggtgggtcacgtggccgccggccggctcctcccgggcgcgtcgggtccagcctcgccggcccccagctcccaggaacgcccccggacggcgtcagccacccgggacctgcggcgtcgccggcggattgcctccgccctcggaccagccccgcgcgggtcggcctcccccagcgccctccggcatccgcccctcccggccccgcctggccgcagggcccgggtgggtaggaaggactggaccggccctgtggagacctggccccactaccagcgggtccctgaagatgccattctcatctggaaagcgaatgctctcggccgaggccgtttgcgtggcagcgcgtggaggtctgcgggggtcccatcctcaagcgacattctgggtcccacgcagaaaaagtcaggccactgaaggggccgctgtgaggacaggggtgaggagaagggggctaacttttcggcctgcctttctcgacgttcctaatacccgagcttccgtttaacatatgtgtggctcttcagctcagccaagttcatttttctgtatgcagctgaaaatgattctagaagcaaaactcgctgtccgtgtctgaaacgggaaacttgctttctggagcaaaagtctttttctcagtagagcaaatcctgcaactcgtgtgggcagaaacccagtcctcagaggtacaggtagaaacgtggagatcccagcagacccctgcatcgttcctaactgggaaatgagcagagtctgtggccgcacacagtcggggaggcttgggtaactgtgttctcttctccatgtatggcctagagcacctcatccactcggatgacttcattcgttgctg

SEQ ID NO: 32521 - DNA, 943 bp, Artificial sequence
  DNA replication origin
taagagatcatctggtgtagtcctctgcctaaagggggaacatgttattatgcccatttcatagatgaggccactgagttgctttgctaaaacgacacagctctttggtgggaaagaacgagagcctaggtttcctgcctcttgacacagggttcttgccacctgatcagtgtcctggtaggaggacatagagacctgtccctaaacaccgaaactgaaaataaggggtcctgtgacacggcagggcttggaccacctcagtaaaagtcaagagaaaagagttgcagaaaaaaaggcaaaaatatgtcctatttcacctttcccaaggccagtcctgacaaacacggcacatcaaggctgcctcttcattccttggaacacgacattccttctaagtctctgaaggcctttcctgaggctgaaatggcccctcaagagggaagcatgggattcctggaatttatgtctggaaatattagagggcctggggaacaggaaaacccactcctgccacacaaaaaggtcaacagagaaagaccagactagatcctggctgtggctgagcaagtcgggggaggtggggatctgtgcggatctgtgccaggggctagcagggagggcagggccttcccagatcctctggaattctaagccaaccggacaatcgagttagcgtaagggatggttttggaagaggccggtgatgggagccgatgatgggagcctgccggaggttccacaagagcctagaggaagcctagagacgctggcacaattcagtcctcaccgaaatcatttcctctttctacagttcttgtacccccatcttgacagatcagttcgcacaagaatgcgaccctttcgctgcccttttttaggaaatggttttcatgagaccagctttgccaatgacacgggcgggtacaccagatgctaatggctg

SEQ ID NO: 32522 - DNA, 1005 bp, Artificial sequence
  DNA replication origin
gttttctgtgtgctgttatttgaaaaataaataaaagtatatcctgtatcttccaggtcatcatcctgtcacagaattctgtgtgacaacgttaacgtcattaatactggctaaggagaaaataaccgatgtagagttagtatacaaataattggggtcgaccggggacagtggctcatgcctgtagtaatcccagcacttcgggaggccaaggcaggcagatcacttgaggtcaggagttccagaccagcctggccaacatggtgaaaccctgtctctaccaaaaaatataaaaaattagctgggtgtggtggtgcatgcctgtaatcccagctactcaggaggctgaggcaggagaattgttttaacatgggaggtggaggttgcagtgagctgagattgcgccactgcactccaacctggctgacagagcgagactccatctaaaaaaaaaaaaaaagaaataactggggccatgtgaagaccatgtgattctgcagcacatgcagcaggtgtttactgagtgcctgctgtataccaggcagtttctaggggttgggggaatagcaggtaacaacatggactgtccctgacctcatggagctgatattctagtaggggtgacaggcggtgcacaaataccgagtgtggcagatggtgaggggtgctgtggagaaaaggaaagtgaggaagggccctgggcatgctggttgggaggagtgtggtttcaggtaggggcttgagaaggcatttctgaaaggaggcatctgagtgaagatcaaagagacagtactcagggcagccatgtgtgccaccagacagagaggtctgtgaggctggagcagggtggatgtgcctggtgagtctgaggaacagcaggcgagcagtgtgactggggcaggaaagagaagggagggagaggagggtgtagaagggggttaggtcagggaggtttggggctggatcaggcgcggtcttgcgggctggtgtaggaactttggcatt

SEQ ID NO: 32523 - DNA, 1268 bp, Artificial sequence
  DNA replication origin
cacgtgacggcctctgcgtgcctacgtgcgcgcccccggccgggagcttctagcgcttgtcccgccctccaggccggcctagcgcggcgcggggctgctgcgcctgcgcgctcgcggcttgccgcggcccggagcgcagcccagctgtcaagggaacgggtgtggaaggaggcggggcaaaggtccgcgggaccgacgcgatgcgcagcgcagggctggaagcgcagtcctctgtcaccttgagctccgagtacggaactagagaaactgctctggcagcgcatcacactcttccaagtgggaatgcccagtggaagggacaagtagtagtagggaagcgcccactcactacaactcccggcatgccccctgcggggcggggccttcgccgagggcctggccctttgcggccctgcgcggtgcttgctgggaactgtagtaacggctgtttgagggtggaaaggagagctaggtctgttggaggcaatggggtggggttcgcggacgctaattttggctctcagagcgcgtctagtttgcgctaaaaaagaaaaaacttgaagactgaaacgaggccccaatgttagaaatatattaataaaatctgccctgtggagaacaggcgtggggggatgtgtccgtttgctctaattctatccagtcctctgttggcagggctgcattccccgtggtatccaattcagcctctcctgcttcctgagttctctccagtgatgcaaaatcagataaggaaacacacctcgtctaggaagcaaggggaaatatgacaaagcacacagaaactagaaataaaagtcaaaaatctacaccatcgaacccaaataatcttcttcagttttaatgatggacccaaaccaaaacagttctcacgttcacatgttagaaactaactccatctgcatcacttacgataggctgtagtaaactgaaccaaataagaaaaatcccagcagcaaacttgctgacaaaactttagccgattgccagggtagtccggtacaggaacgtcaaatgaaaccaatgtgctgtaaataaacctttattgtattttgtgatacggtttgaatttaaatccctaggtagcgccacgaaacaaaagacatattgatgctactgccatggagcagcacagtttgtctagaaaataaacgagacgaaacagcagtctagaagtaggcaccaaatccaagttttcatgtgcgatccaggtattagggtccatccaggaacagcctgctggaattgct

SEQ ID NO: 32524 - DNA, 861 bp, Artificial sequence
  DNA replication origin
ctccggcccgcttcatcccctcccgcccgccctcgctgcggtgcgcgcgccggccggggcgaggcggaggggagcccggccctggcgccgccgccgccgccatcttgcggtcccgcgggggcgcctcctgggcgtccggtcccgcccgcgccgcggtccgcctgggcccgcgtccttggccccagaggccgacggcgtgcttcggcggggcgtgggcggctgggcacccgagggcgtgcgctctgggctgcggcggggagtgggctctggaggtggcgcaagctgcgtctgtcgcccgctcccggctgtcagcggcgcggggaggctagggcacggcgcgggaccccttgggagtgagagccgccccccgacccctgccccggcccggggagagctcgctgcagccggccctcgggttccgcggagggcgtcgcttgtcacctttccgccaggtttagaactcggccgtcaggtgtaggacgcgccggggaggtggagagtccttggaggtgcctggcgagggctgcccggtgctgttggcacggacccaggtgcgtgcgggcaggagcgatgcgtcagccgcaaacggagagttgtaggttcatagtagcggggcttcctgccttctacgacatttcagtgtgccacccgcgtgcttttatttagccctttagttgagctcctctgctgagaaaccttcagtgcgtgtgacttttttgcttttacgtttgcggtttccgacagatcctgagaaggctgataaggtgtcacccagctctggaactttgtaggtttttgtagtactgcctgtgataagttttttagtctgacttggtgatcctggaagaatcccaggggctt

SEQ ID NO: 32525 - DNA, 1668 bp, Artificial sequence
  DNA replication origin
atacatgtaaagaaataacacatacacatggataactaaatgggataagtcagcctgtgaaagtaccaaaagaataatgccctttgatgataaatcaaccatcttcgtggaatgcctgtgagggaacatgggagctaaacaagggcttaaggccagagtggcagaaggctccatttacacttgcacccccccgaccagaacgcacctcacacataattgtacctatttacttctttgacgataaggtcccatgtagtttttgctcaatatcgtagccagaggtatttcagacatcctggtcaatagtaggtatatagccaatattggatggatggatggatggatggatggatggatggatggatgggtgaatgggtgggtgagtggagtagatgggtgagtggatgggagtgtaggtagatagatgggtgggtgggtgcatgggtgggtggatggataggtggatggttagattggtggaaagagtgggtggatgggtaggtgggtaggtgggtggatggatgggtgaatgggtgggttgataggtgggttgtgtagatagtatggttgggtggatgaataggtggatagatgggtgggtgggtgggtagatagatgaaaagatgggtgggtggatagacagatgggtggatggatgggtaggtgagtgagtgagtggctgaataggtgggtggatgggtggatgaataggtgagtggatggttggatggatggataggtggttaggtgactggatggatgtatatgtgggtggatgaggtagatggataggtgggtagataggtgggtcggtatgtggatggatggatggaaaggtggatggaaggattagtggatgatgcgtgtctacattttgggttggatgcatggttggatggaaggatggacatgagaactgcacgagcaaattttgttcattgtaggcatcaagatagatcgttgctcactttccttgatatttttccaaaactgcttatctattaaacattccttggggagtatagatgtaacaaagtaaacaaaatagtaatcactaaagttccttttcattgagagcaccacgtaatgagaaatgcaaataaggtagaagggacagacagaataaaaggcagcagctggagggtctacatgccaagtgattacatgggcaagaatgatggtaaacaaagttatggacagattcagtctagaattgcttggggacagtgtggcataggggaaagccctggattagcgtctaagtatctgggttcgagtctgccacttacttgctctcatacaaagggcaactcactcaatctccttggtgctttagttgcttcatctataaaagggcgacaataataataatatttagttagtcttcctggtggataagacagcatgaagatggaagctctctgtcaactggcaagcaccttacaaaggctgatactcattatcaaacctttagccaacctgtggacacacaaatgtcacaaacagcatcctccttacccatttccagatgaagagctgagacacagggcatcagctaagttaccttgggttgatgccagggaaagctgtgaagggctggccatctcctcgcccctgaccatcatactgtgccccaatgctgcctggagcatcagtggaaggaggcag

SEQ ID NO: 32526 - DNA, 960 bp, Artificial sequence
  DNA replication origin
tgggcccccagggcctcgctggcggccacttgggggcagcaggcggcagcagacgcccaccctgccggggaggtggggcccgcaggccccaggaccgctctaggagcccggaaggcctgcgcaggtggggggcaccgtgttccggaagcctggccccgagcgctgtgcggggcgcccggggacgctcagcgagtgtctgtcccagccctgagctcagtgaaagattgcagagtcctgggcccacgagggggtctccgctgtgtccagacgcccttcagagcaaaggagccacaggcgggcgctctcccagtgtctctcgggaagcgtgacctcgacttcatgcccgggagaagcggccaaggccgggccgcgcctgtccagggaagcctgaacggccgccctggggtgtgaagggtgcgggtgggggtgaagttcctgaaggtgaggagggactcacgctcggtcagatctgacgggggttaggaaggcaaagagttatttttaaagctcaagaaaaagagaaatgaacttcatttcctttttgtttggctccaattccgtgcctgactattcttttatgctcagggttgctcagcagacactgaggctgtgttttgttccaagggactgagatcaaatattagtttagcgagggtgagaaacatgctctgagtaacgttcattcctgctgcagtaaatctatgagtgcccgatgtgggaaaatcagaccccgagcccagctgcccagacgagcctctagcgttttgcctgtttatggacctgctgatacatttaatgtcgggaagcccggggagggcaaggctaacacccatgcagcctttctaacctcttgtggaactaggaaaacagtgtgagcttccaggagtgtgtatttgggaggggacacatatgcctccacacataacaaaatccgtgtgcatgcttgtgtgtaccgtttac

SEQ ID NO: 32527 - DNA, 957 bp, Artificial sequence
  DNA replication origin
gcagctcactgccagggacacctgttggcacagagggagcttggagtggactgaaagggaatgtgagatggagaagtggacaaagggcctttgtactgtcctgaggaacaggaagaaaatgaggactgtaccttatgcttctgtgccctagtgtctccctcttcaggtttcaagcaggatgcctaacatatcaagaagcatttagcaatcttcctaataaatgcacaccactgaagaaaattaagcaggtgagcctgtcaggttgcaaaccttcctctgcctagacctagagactggctgacaaggagagagggtggggacaggggattaggggacagggaggccatagaaacaaaaggccatgggaacaggggggccttggggacagggcagccatggggacaggacgccatggtgaccagcggccatggggacaggaggccatagtgaccaggggccatggggacaggaagtcatggggaaaggaggccatggggacaggaggtcatgaggaaaggaggtcatggggacaggaggccatgaggacagggggtcatggggacgtggctcatgcctggtgcagaccagaggggtgctgattgaattgtatttactggagagaagctgtgggatccgtatctgttgagatgctggacatgagagtaagggaggactctaggctgcccccagtttctagcaggaatgatttggacacagttcagagggacagcaatcagaaagaggatgaggattctgcaggaaggggatggaatgacctggagcgtgttgagtttggtgtcagagaggattgtgctgcaactgtctgcagaaaggttcaggcagacgttagaagttggtgcacaagcaaaaagcaacaggggagtctcacagcaagatgtaccatatgacagagaaaaagtgcaaggacaggactcttggaagcacagccctgaggag

SEQ ID NO: 32528 - DNA, 1449 bp, Artificial sequence
  DNA replication origin
tcctgctctggggcctcccgcacgccgcgctccgatttggtgcccgggcaactgggcgcgcgctctgccctccgcctccggccgggtgcggccgggccaggccggggcttcaggcggctgccgcgcgccccatgcccggcgggctaggcgcggggctgcggggcgcgcgctctctgggcgccgtcgggcggctgtgggcgccccggcccggtccgcgtcccggcctctctgccgcccgccccgacttctccgcgcccggccccgcgtcccgccccggccgccgcgtgcgccgctctgagctgcagtggccgccaccgccaccgcagctgcagcgtctcttcatatttccagcgcgccgccggccgggcagcctggccgcggcacggaggaggggccctggagggggcggtcgggggaggcgacgccgagccaccgcccccgggcagccgccgccgggggggagcgcggagacttgaaagggcgcgtcgggcaacgcctcccctcctcccactccgggcgcccctcctccccccgctcccctcccgcttccctccttcccctctctcgcctacccctcctcttccagcttcctaccccttccatcctcccctcctcctctcctccctccaggcccctctgcctccctctggctctgcgcacccctttctctcctccccgtcccccattccgggcgcgcttcctccttggagggggtgggagcctttggccccgcaccccgcccgcaaggaaagagaatgcgcgggtcacccttccgcctccgcccactcccctggggaaaggtgttcaaagggggtgcgggcggcgaggctggaggcctggcgtgggatccaagcaaagcggcctgctgagccggggtgtgtgccagcgcgcagccatgggagagaggggagaccaaagagagagtcctggagggttgctgggggtgaggatgcgtcagtgctgggccccctcgtgggtgcggtgcaggtcttcactacaaatcgcctaccccggcccagtgcctggctcctctggggagcacggagaaccttgtcataggccccaacctgggaagggcacggtgtaggaggcaggagcccgttcactttttcctcccccttccactaggcaaatgacttgttgaaacgggagaaatctccgagaaacgctccctgtcagtctaagaacgtgcacttaggccccttcgccgagtcctcttctcttccagagcaaattgaatcaccacaatcaaagctgattttatttgtgttcgcggtcttgtgggggaggggggactacatgggcgtttgagacccaaaggcaggaagagtttcccctggggtccttcgttctccaatgcgggtacaaggcagtggccatctgatttacctggaaggtccctcctctgccaagggcctgcttgagcccttcccctcttccagcagtttt

SEQ ID NO: 32529 - DNA, 1562 bp, Artificial sequence
  DNA replication origin
ggcgggacgcggggccgggcgcggagaagtcggggcgggcggcagagaggccgggacgcggaccgggccggggcgcccacagccgcccgacggcgcccagagagcgcgcgccccgcagccccgcgcctagcccgccgggcatggggcgcgcggcagccgcctgaagccccggcctggcccggccgcacccggccggaggcggagggcagagcgcgcgcccagttgcccgggcaccaaatcggagcgcggcgtgcgggaggccccagagcaggactggaaatgtcctggccgcgccgcctcctgctcagatacctgttcccggccctcctgcttcacggtgagttcccgagggccactcgagcgctcccagccggcggaggcagcccgggcgccgcggagcccgcggaggcgtcgggtctggatcgcggcacggcctacactgtccccttggcggggcgggtccgaggggagccccgcgcctgccgtctcagccctgggagagggggctctgcccactttccgaggcttgggaccgctctcccccagggcgcccggagctctttgctgcgggactgttctttttggaagggtggaagctctcccacgcagacaccttttatgtccagaatccgttgcatccagtccgagggaaactttcgtccgctctgctggattttccaactgtacactgccatgaaatcgccggctctgcgagcctttttccaaaatgccagaatgcagcaggctcttgatgtgttccaagcgtttaggagagtggaaagagaaactgatcatttgggaaagacacgtctgtctgccttctgaaaactagtgtttgttgtctgcctgcactttgcctcgcgattgaggcggggttgtggggttttctcccaagtggactgttgcgttctctgggtgtaattttaagaaacaggggacccctattagccaagatttaatcattattaccagtctcccaatgtgcaccccaacttgacgtcccatttcctgggcttccagtgccacttttccccaggggttctagtaaacctttagctagagaacatcagccctttcagcgggttccagaaattgcgctgaaaacaccaagacagaatttctttggggtggacaaggcaggttttatggcgcgtcgggttcataatcctgacaagccgtggcagatcacgtcgtgttgatgtggatgtcctgagcaaactgtccctaatggtcagacacctgacgtttcaacagcatgacttcacggctctccttcctcaacacccaccacagccaccccaaacctgtagcgggctccggcttcagaatgcatggtagccaggactgaaagtcaggctgaggaccttccctccggaggatcaaggaaagggaagaattgttaacccacaagccaccgggatgctgttttctttgtagtcctgccccaggtggatggctcgcatagctccacaggctttgtgaacttgtctggctgggccagacctgtccagttgccaaggtgtactcagagccccagtgatcccagaattttaacagtcggg

SEQ ID NO: 32530 - DNA, 1149 bp, Artificial sequence
  DNA replication origin
ccactttcactctcttgaaattctgctgccttcctataaaggaagcccaggctagacaaccaaatgaagaggggtcttgtgtgtgggtactaaataagaaagtgaggatagagaaaaaaatccaaggccagttcacctgttggcactagaaaaaatgcaaaatattgattggcaaatagatgcaggaagatcgatcgattgtgtggtgaggccaaagggaagaactcttcgaatagttatttcatattcaacaataagtgagagttggcaggcaagcagagattgtgtaggagttttgagaaggaaggtgtgaacagccctccaagtgagtgggtgagtgatttgaccatggaaacataggagagttgctcagcagcaccaaaggtcggcttaatgtttatgatcattaaaatgagtaatgttagcatcctcgtttgtttttttccagtcaaattcacttgctcaagagcagttccagagtaggtggagagctggggtttttcctggcttggagaaaggagggagagggagccaaggccgttgagagtatacgcactaaaatgatgggacatgaatttatgctgggaaaagaaggacgtgtaagagcagagggatagggaaaggtgaggaatctggtgaaggttaagtaattactagcactaggaggtatgagctggaatggaaaggggaagtaaagtgagctgtttgaaactgacactacggagggtacacagttatgagtaaggtcaagggtgtgatcccaggaatgtgtggctgcgctagtgtgggaaagatcacaggaggttggaagctgagaggctgtatagtcattgcaggaatcatccatgtggatattgaaatcaccatgaattatgaatgaagccaactgtattactggttactatttttaccagaccactgtacgcgactttagatccctcaacttcccatttagagcacttatcacggcttgaaatattagagcgattatttgggttgggcgcggattatttgacagtaatcagggtttacaagtctgtttcgtttcttgactgacatacaattaatacccaaaaggcagaatggatagaagaatactattctatctgtcatacagagaaacttcagatgtaataaattataaagcca

SEQ ID NO: 32531 - DNA, 860 bp, Artificial sequence
  DNA replication origin
cctggccaccctgcacagcgtgctgctccgcaagcagccgttcctgtggcgcgctgcgctgctctgctctgctacaccagccgccacgctgtgcgtctgtccttccgccagctcttccaggacctggcgcgctacgtgcgggacgccgacgtgcgctgggagtactgcgcgcgcgccaagcgcggccagacagacacctcgctgccaagttaattcagcaaggaccaggtgtacctgaacggcatcctgtgcattctgggacatcgccagaccatcgatttcccgctgctgacctcactgggcaaggtgtcctatgaggatgtggaccacctgcggccccatggggtgctggataatacccggatgccccaccttatgcaggacttggcacgctaccggcagcagctgaagcacatcatggccaccaaccggctggatgtggcggagctgggtcgcctgctgcccgactgatgtaggttgagggctgcagacagaggccctggacagaagctccagataggcccccagaacatgaagctgtttgctctgtgcttccacggtctgggtgtttcttggggggtgttgggagggcaggagcattccttgagaaggagtggcaacatcaaagggtttgtgtcccttgctagcctccctggggcctggggatctgcagcagcatgtctggcaaactgagtcgccctcctgcctccagctctgtgttgagcagagggaaggcatgggggcaggaagggagctgagcattgatggggatgagggtggtttgggaatagaaacttgttcttgcataagatggctttggttgtcccggtactccagtctctcccttccctcacctgtcc

SEQ ID NO: 32532 - DNA, 3247 bp, Artificial sequence
  DNA replication origin
gatcttcaccctaaggcaacactttagaagtggggataagatgggttcttcagataccaacaccaggcagaagatgatccacaccatgtaaacaggaatctctggaagatcggaagctggagagagactccatgtgtggggtcggctggcttgggtactatcagtgacctatctccacatggatggcatgtgtgctgtgactgcatgagcttctcactgcaacctcatatggctcaatagggcagacactaatcagtgaggatcagaggttaggaaattagtcccatgatatacagctaataagggggtatgaaaagtcacagcagcttcctcagacagctgactatagtgggcagctgagtggaatgttacaggcattgaaagactgaagatctgactgcagaggcacagtgggcctgccctccatgaagtgggccttgggtgacaaaaatctcaatacggaaacccagggaatgcagaaatggtgaatgcatggtgagaggtcgagcacggtttaagcacaaatactgtgagggaaacatggcccagatcagctgtcatgaggctgggcagaatggtggaggacagaaaagctgctagggagcccttgcatggccacaggggagacactgctcaggaagagcacaggcacagggtggaatctagggagccacccctcctcagtgcccagtgaatacaagaagtgaggatgaggaccaagggatgaggaggagagatgggagatgaggaagacgaatggaggatgaggaggcaggatggggaataaggatgagggatagagggtgaggaggagggatgggggataaggatgagggatggaggatgaagaggagagctaggggatgaggaggaaagatggaggatgaggaggagggatggagaatgaggaggagggatggggataaggaggagggatgcaggatgaagaggagggatggggataaggataaaggatggaggatgaagaggagagataggggatgaggaggaaagatggaggatgaggaggagggatggaggatgagaaagaaatggaagagaaggagggatgaggatgaggcagaggcaaaggggataaggaggagggatgggagacaaggataagctatgaagatgagggataaaggatgagaatgagggatggagatgaagaggagggatgcaggatgagaaggagaaatggaggatgaagaggaaggatggggatgagtagtagaaatggggaataagaatgagctatggggatgtagataaaggatgaaagatgaggaggacggatggaagaggagaaggatggatggaagatgaggaggaggggtggtgatgaagaaaagctatgaggatgaggaggagggatgcaggatgagaaggagaaatggaggatgaggaggaaggaaggatgaggatgagtaggagaaatgagggataagaatgagctatagggatgcagataaaggatgaaagatgaggaggagggatggaggagaaggatagatggaggatgaggaggaggggtggggatgaggatgagctatgaggatgaggaggagggatgcaggatgagaaggagaaatggaggatgaggagggatggggataaagatgagctatggggatgtggatgaaggatgaaacattaggaggagagatgaaagattaggaggggggatggagaatgaggaggaggaatggggataaggatgaggaatggggattaaggatgaaggatgagaatgagggatggagatgaggaggaaggatgcaggataaaaaggaggaatggggatacggatgagggatggaggaggagaagcagggatgaagaggaggaatgggaatgaagatgagctatggagatgagaaggaggaatgcaggatgagaagaagaaatggaggataaggaggaatggggataaaatgagctatggggatgtggttgaaggatgaaagatgaggaggaggaatggaggatggggaggagaaatggggataaggatgagggttggggataaagttgagggatggagaatatggataagctatgtggatacgaatgagggatagaggatgaggaggaggggtggaggatgaggatgagagggaggaaagggggatgaggatgtgctatggggatgaatatgagggatggaggatggatgaggagtaagaatggggatgagggattaaggatgagtgggagggatggaggatgagaagaggaatggagggtgatgaggagggatggggataagaatgagagatgggggatgagaataagtgatgaagatgaggaagaaggctggagggtgaggaggaagggtggggataagaatgagctatggggatgaagatgaaaaatggaggatgagtaggagagacagaagatgaggaggagggatggggatgaggatgagctatggggatgaggatgagctatggggatgaggatgagggatgaaagataaggaagaaagatgggggatgaggaagagggaggaaagatgaggatgagctatggggatgcagaggagggataagagatgagcaggaggaccctccactggagagctggtattactggcacaagtcagttttggtatgaagaagaggaggagaactgaggccataaagaggcggtttacattgacaaaagcaggtgcagtgctataattcagaggctcagcctccaggctgctgaaccacattgtccagcatttattaacttcagtgtatacaattcagcagatctgtttcccaagtatagcagagaaagtatagaggagcaatgtaatggaaatgcacacatcaaagtggcttttagcaaatgtgaagctcttgttacctgcagtgaataaaatctggcacagggttatgttggctgaaggaggccgcatcaaggttcatgcagatctcgacattgtcacctgccatgattcgcactgcagccttgttctcatcctcaaaaatctgccgttgtaaggaggcacacagaagcagcatgaagtcatctaacaagacagaggtgagatcattaagccgcctcatcctcttctgatttacataatgcaacacacagtcatcacacagcaacagccattccccagctcctaagtgagttgtgttcccaaagttcatagtaaaattcatcctggagtccaatgtcggggccaagtcacaccttctccaccttgcagggcatagagtgaccacagacactccaggagctt

SEQ ID NO: 32533 - DNA, 1250 bp, Artificial sequence
  DNA replication origin
gggcagcggagacgaggccgggcaaaggagacgcggtggcttcagaggggcttccaagtagaaaactccccggccgcccccaaacgacgccccgggagccaggcgggagcacagcacgcccttcttgccccctttgctcgccgcgccgcctcccaggaccctcccaaagcgtccctctccaaggccccggcatcagctacccctgaagaagccgccgccgctgccggatccaggattcacactaaatgggccggccgcagggggccgggcgccgggctaggtggccgccaagagcctggtgaggggctacccagagcccggtgggcgaggggcggccaagagccccgggagcgtgccctcggggcggagagcgtcgcggcccgcgccgaggcgatgctcgggtggctgcgagctgccggcggcgagaggccatagacgggcatgggccttgcgtcccaccacccctagggaccctcgagcctcgcccctctgctccgactcgccggaccgacgcgatggcctcagaagtggtgtgcgggctcatcttcaggctgctgctgcccatctgcctggcagtaggtgagtctggtccgctttccgagggcacttgaggaggacgaggggggcgcctgggtgggggacttcttaacaaagtgaagggctctggtgctctggggttcgattcgggaggccagcggcgtcagacgcgcgctgtccctggtgcacagcctggctctctcacttcccactctggggcgcgcgatcggggtatctcttaacaggatgctcgggacgggcatgtgctggaaactgtttatgttgaatttagttacacgtggattttctttcgtggagtactgacttgtgtactaaggatggccattgctgtggctggaaggcggatgcgtccccatcgtaggtacagtcaggctcctacctgagcccctcgccccagtgaccctgcaagcacagcatgctgtgcctccagacggcccagaggccatctctcccagaccccaaatcccagcaaccgtgaaggaagaagtgaaggactccggtcattcaaaaaagaaaaagagggacgaggtacagggagacagtgccttgacgtttcttacttattttttaaaacctccacaaaagcccctactacaaaagtactggatgctaaggctatagacccccaacacctagtcccgcctcccagcggccgccctctccagattttaaagggttagaaagcagggttg

SEQ ID NO: 32534 - DNA, 1549 bp, Artificial sequence
  DNA replication origin
cagagcgcatatcgggtgagtgggtctcccactccctcctccaccgcctcaatttaaaactcaagagaaaaaccagcgccgtcccgtcgcccagcgcgaccaccgcctgccgccttgcagcctcgccctcgcggcgcagccggggctccccggcggcgcgcgcttctccaccttcaatgaaactttcgaagccctcactcggggacgggcgtgtcccccggccaatgggatggcggctccggggcctgcgcgcgcggagcccgcccctgagcggctggggaagtgagagccttgcaccggcgcggagggcaagcccccacccgcggctcccgcgcctgggagagacccggcctggcctgccagtgggctgcgcgccttggctcgccctccgcgggcactcctgccccactggctcccgcagccccgcggctctgcgtggttctgtcattccggtggtgcaccctggcatccagtccacccggccgggccctgagcttgcccaaacccagggaaccgtttaaggtccgagggaaacgcacaggcccggcaggagagaagccaggggcttggagagtcctgtgcgaccccgacttctgctgggtccacaggtgcacactggcattaagaagaatagagctgaattcatctacaccgttgaccctgcccatatttcacatagcaagaacttgccattctgaatagactctgggaaatcccgggtcttccccaacagataatgcacccactttgtgcatttgggggaactctccgttttcacctcagttttgctccttgcttgtcgtggctctggggaaagagagcgttggcactgagaatattctccctttctcctagtgcactgctttttgcctgttctaggcaagatctagagaaatctggctctagctgggagactgcagtgtgcctgggtcttttatttaactgttatccgagagtggaggagatttgctagagcacagtaggggtctttccggacatggaggaagaggctgttagcatctgtagagaggactgttcaggactggcattccatcaggaggacacactgggaaggacctggcttcccttccgcacctacattcctggcttgcattagttggaggggatagagcagtgagctgatgaaaaacaggcaaacccccgtctttttagccatttgaaacgcttttgtggacatcccttttttgagacagggtaagcttgtggtttgagctcaggtgccttcacgaattctctgagaattacagaaaaactatgaaccattgctttttgaatgaagactcaagacagttggcatatggtgaagacaccctgaaacttaaaccacccatgtgctctgccatcctcaagaagcttagatagcacctaaacccgggcgtagtcatgagctcaacagcagacctacaggagacgatagaacttaaattagcatccagtcaccaagaaatgctatcaagaaatggtttgtgtagcctgtttgtagaagcctgatataaatctaccactaattttgatgttcataagtctg

SEQ ID NO: 32535 - DNA, 1176 bp, Artificial sequence
  DNA replication origin
gcacgtgctggattttatatgactggcagcacagtaggttagtttatatcaacagcaccacaaacgagtgaagtaatgtgtcgcactatgaccttaccaaggctacgacatcgctaattcataggaatttttcagctccattataattttatgggaccatctcatggtaacctcaaatcaaaaacatacaaaggataagcaaaaagtaaaaagcaaaaaaatcacatcatattagagaaaatcactttcactaagaggaagacaggaaaaaaaaaaggaagagaaggccacaatgcaaccaaaaaacaaacaagatagtaagagccgggagtgcagggaggtgtggggggcgggattcggtggtggctatccggggccagacagcccatgaatagaggccaggttgggtgcactatcgggggctacacagcctgtggcaagaaggggtttggggcgatacccatcgcagggtggtggggtgggttctgggcaccatcgggggctgcactgccgtcagcgggggctagttaggggcactatcagctgctgcattgcctgtggcgggggtcgggtttgttgcgctattgggactacactgctgacagtgggatactgcttaggggcgctgtcaggggccacactgcccgcggtggggtgcaggttgggtgcactaactggggcgtcattccccacggttagggaaaggttggggttgctatccgctatccggggctgctccccatcgtggggagcggattgggggccttaaggatccgtggctgcactattcactgtggggagcaggctgtagcgctctctgagacgtcactgctggggtgtcactgccttcagcggggggctggttaggagtcctatccatggctgcatgggtcaccgcagggagagggttgggggcgctatccggggctgcgctgcccacagcaagagcaggttggggcgctatctggtgctgtaatgtcggaggcagggatgtgttggggtgctatgggctactacactgcgtggcgaggaggtggggtgttaggggcgctatcgggctgccctgccaacaggggcagaggttgcagcaacagcagtggtctccaagaaaggaggcttcctcctctccccagactccagactctagagggcgacctcctcctgctcctgctccag

SEQ ID NO: 32536 - DNA, 881 bp, Artificial sequence
  DNA replication origin
ctgtgccgcgcccacatgggtctgtgctacagtctgcggccgctgcttttcgggggcccaggggacgacccctgcgcggcctcggagccgccggtggaggacgcgcagcccgccccggccccggccctggccccagtccgggcggccgcaagggacacggcccggaccctgctccctcggggcggcgaagggagcccggcatgcgctcggcccaaagcagacaagccgaaggagaagcggcagcgcaccgagcagctgagtgccgaggagcgcgaggcggccaaggagcgcgaggcggtcaaggaggcgaggaaagtgagccggggcatcgaccgcatgctgcgcgaccagaagcgcgacctgcagcagacgcaccggctcctgctgctcggtaggtcccggccgcgaggtcggctgacgccccggggacagcgcgccgggcccgcgggggcggcgggcaccggggagcggtggcgggcaccggggagcggcggcgggaggggctcctgaatcccgggactggacccggacgggcggcgggcgcggacgggctacagagcgtttaaactgtgggtggaatggttcccctgacctagccgggaggacactacgggctgattctgcccctcccagtgccttgagcttactgccgctcgctctctctaattaatgagcctctctgggaagtctccccctcgattgatcaccttccacagggtcgaatccccggggatgtctaccctagcctctcacttcctgctacacgaggaggctggcagtttgttttaagaacacagatgaaaggagatttataaggccttttagcttgaccgcaaagcttttattccaatcacagtgttgtgggtgggtgtggcctgctg

SEQ ID NO: 32537 - DNA, 1284 bp, Artificial sequence
  DNA replication origin
gaatatatgtctttacacactcataagatgtgagctgtggaaactgtgctaaacagtctccttccacagaacttcaacttttagcctagctcagaatggagtctgacagtgtatgtttgcttctgcctgtctagaaaagtaattcattgcattttttaaatgtatttttattttcagtaagaatatttattgaaaagtactatattgaacaaatattttttacgtgtggtcatgaaattcctttgatgagaattcacactttgagctggagttatctttcgctttcatgacgtcattcattcccttgacaaatattcccagcgcatctcctctgggtcaggcactgaaccaggtaccggtgccgcaggtacaaggataggctcagcctccgccctcaaggagtccacagtctagtggagttttgaggacacagttaaaccataacaatgcaaggtgatgggtgagaccagcggagaatctggtgctcccttagggcttgagaaggtgtggcctaacccccaatgtgagggaggcagtgaggcccagcttgaggctggaaggataactaggggggttgacccagaaaagagagtccccaggtattcccaagacacaagcagcacatgcacccgaccagcctgttcaggaactgagagtgttaggagggatggggtaagccctaagaaggggagagtttatactaaccccaccagaaggaccaggcccaggtccttagatgatggggacagtgatgtggctggatttgtattatcgcagtgggagcattgtgcaaggtgcactgaaatgagacagcaggcagtggaaaccgtccggaggcctctgaaatccagctctctgttagtaatctaagaccacagcagtggcagacgccacggaaagaacaggacagatactcaggaaacggacccaacgggatgcggtaactgttggggtttgtaagaaaatggaatctggcataactcccaccgttctggtttggaaaattaggggcccttattccagagaaagaactgagaaaggagcaggtagaaggcgtgagggtggcacggggcatgagctcaatccttggcaaggtgaattccagacacctgcggcaccgtgggggcggtgtgtctggggacggtggtggtcagcaggatgggctgggctagggatccgcggtgggcacggtgagagctgagtgggcagagtatggaggatgcagtcagcccgtcaggaacgtgtgtgggttgagaggctgtgctgtggggacggctcctcgga

SEQ ID NO: 32538 - DNA, 1504 bp, Artificial sequence
  DNA replication origin
ccacggaaagaacaggacagatactcaggaaacggacccaacgggatgcggtaactgttggggtttgtaagaaaatggaatctggcataactcccaccgttctggtttggaaaattaggggcccttattccagagaaagaactgagaaaggagcaggtagaaggcgtgagggtggcacggggcatgagctcaatccttggcaaggtgaattccagacacctgcggcaccgtgggggcggtgtgtctggggacggtggtggtcagcaggatgggctgggctagggatccgcggtgggcacggtgagagctgagtgggcagagtatggaggatgcagtcagcccgtcaggaacgtgtgtgggttgagaggctgtgctgtggggacggctcctcggacccctgggtggaggagcccggatgcaccggccagagggacagcctgaaacccaatgcagtctctaggagggatcaaagcaggagccacagagacggaaagaaaataaagaccaaaattcatggatgagacttggcccctggggggccctagatgaccttgatgagagtattttccctatggggtgaatgtggaagccaggctgccaggtactgaggtgggagcagcaggaggggaatacaggcggagtcagacgacctttctaactcttggctgcggtgggcaggaggaaaactggtggaactaacaaggggcgtgagatgaaaggtgttgtgtggttcaggtgggacagagttgaatgtgttcgcttgcttgagggaaaccagccggtagcaggagaggttgaagcaagagtggagaggggaaggtgcgctgggtgaggggcgaaggtccacagggcagcggcgggcctgagggtaggggaagcgccgcctggggagccggggcgggctggggtctgttctcctgaagaaggccagctccgcagtgaagaagaccgtgtaggtttcttggaaggtggaggcactcgacgacagagctgagcaaaggcaagttagacagcgcagcgccaagcccgagacggtcaactgggagccgccacacacaaggaacagtgatttctccacgcccacggctggtgtccacgacttcggcccggccccctcttctgacctccttcccccaagtacaacactgcaaacgccaagctgccggctctggccctattggaggggtctcagtaacggagggcaggtgccagtctcgcgccctagttcgttcctctgctacaacgccaagttcgaggccacagtgccttctggaagagttgttgtgctgcttgggagcactgcacaggagaaacgggggctggaggtaaagacaggaggctcgggaggcggcgacgtgggcgagctggaatagtctagaagctgagcagaacaaaggcggtgtgactggtgagcctcggagggatcctcctccctgctagaatatgcatgatcctccgcgagtcttcgcccgccaggagcagggacgcgtccgagccaacacgg

SEQ ID NO: 32539 - DNA, 926 bp, Artificial sequence
  DNA replication origin
aggcggccgcggcgcagcggaggggctgcgggcccggaacccaggccggtcagcgtgtaagcgccccagccggccgggctccgtggggggtcagctccctgacccctacagcgcggtagcgcctctccgagagctccgggaccagcggcccggccgcccccaaagccagcctccctctcccttccccgcaccgggatcccagaccagggagggggcgcacgtccgacggctgaggaatagcagggcgcgagccggcccggcaggtgcccatcgtcgccctctgggaccccggtggcgcgctctgtcctccgcgccacgctcagccaccaccccggctgtttgggacccggcacccagccgagcgcgccgccccctcggggacccgctgggcggggctgagcgaggcttggagtgcgggcgaagggacgtggggcgaacccggggcgctgcgccacctcggctgtctccagcggagaccggcgccctcgccccccgtctccgttcattgtgctgtattcatccagcagattttgaaacaattctcgtgtaaaaaggcattttactccgcgcgtcttccttacagccatttagttgggagtttgcggtgggcagggggagggagaagaaacgcctgctctgaatcggaaaacaccgaagagaccagaccatctctttcagcagcaggaaagagaggagccgtcgcaggagccgcacacgtctccaactctctattgctttttgcgcacattcctaacttcctgacgtccatcccagcgggcaggcatggggtgtttgggcggcaacagcaagacgacggaagaccagggcgtcgatgaaaaagaacgacgcgaggccaacaaaaagatcgagaagcagttgcagaaagagcgcctggcttacaaggctacccaccgcctgctgctcct

SEQ ID NO: 32540 - DNA, 1772 bp, Artificial sequence
  DNA replication origin
acggagatactgtgtagtggtgaagtacaggtgcagtttggatggaacacggagatactgtgtagtggtgaagtacaggtgcagtttggatggaacacggagatactgtgtagtggtgaagtacaggtgcagtttgagtggaacatggagattctgtgtagtggtgaagtacaggtgcagtttggatggaacacggagatactatgtagtggtgaagtacaggtgcagtttggatggaacacggagatactgtgtagtggtgaagtacaggagcagtttgagtggaacacggagatactgtgtagtggtgaagtacaggtgaagtttggaacacggagatactgtgtagtggtgaagtacaggagcagtttgagtggaacacggagatactgtgtagtggtgaagtacaggtgcagtttggatggaacacggagatactgtgtagtggtgaagtacaggtgcggtttggatggaacacggagatactgtgtagtggtgaagtacaggtgcggtttggatggaacacggagatactgtgtagtggtgaagtacaggtgcggtttggatggaacacggagatactgtgtagtggtgaagtacaggtgcggtttggatggaacacggagatactgtgtagtggtgaagtacaggtgcggtttggatggaacacggagatactgtgtagtggtgaagtacaggtgcggtttggatggaacacggagatactgtgtagtggtgaagtacaggtgcggtttggatggaacacggagatactgtgtagtggtgaagtacaggtgcggtttggatggaacacggagatactgtgtagtggtgaagtacaggtgcggtttggatggaacacggagatactgtgtagtggtgaagtacaggtgcggtttggatggaacacggagatactgtgtagtggtgaagtacaggtgcggtttggatggaacacggagatactgtgtagtggtgaagtacaggagcggtttgagtgggacacggagatactgtgtagtggtgaagtacaggtgcagtttgagtggaacacggagatactgtgtagtggtgaagtacaggtgcagtttgagtggaacacggagatactgtgtagtggtgaagtacaggtgcagtttgggtggaacacggagatactgtgtagtggtgcagtacaggtgcagtttgggtggaacacggagatactgtgtagtggtgaagtacaggtgcagtttgagtggaacatggagatactgtgtagtggtgaagtacagatgcagtttgaatggaacatggagatactgtgtagtggtgaagtacaggtgcaatttgagtggaacatggagatactgtgtagtgaagtacaggtgcaatttgagtggaacatggagatattgtgtagtggtgaagtacaggtgcaatttgagtggaacatggagatactgtgtagtggtgaagtacaggtgcaatttgagtggaacatggagatactgtgtagtggtgaagtacaggtgcagtttgagtggaacatggagatattgtgtagtggtgaagtacaggtgcaatttgaatggaacatggagatactgtgtagtggtgaggtacacgtgcaatttggatggaacatggaggtattctgtactggtaaagtacaggtgcagcttgggtggaacatggagatattgtgtagtggtgaagtctgagtttttagtatatccatcacccaaataatgtacgttgtacccattaagtaatttttcatcatctacccc

SEQ ID NO: 32541 - DNA, 1423 bp, Artificial sequence
  DNA replication origin
gtattttcatcagggaaaaaagattcaaagaatcacgactttagtctttgcttccagacaagcctctaagttatctgacaaaaattctccttggaacatcaagcttgaattatgtaacattttagggtattactcttattcttggtctttttagtcactccgtatcctttctgttttacctgttgagaagcaaaatggagaaaggagattccttttttgggggaacaaggttaaatttaaagcaaatatctgtaaaggtgggcttgctatattcttgctgacagtgactatagaattaaatatatttttctgttggcaaattttagtgtaaaacacaccgtttctaatgagaaggcatgaaataatgtttatggcaatttgagcatagattttggtatctgagtgctggggttcgaatcccggctggggtgggtgggttcttagctccgactgctgacagttaacagttttaacagtttcctcgcctggtccaagggataatccagtattcctgggcagaggctggtgctaaggccaggactgaccagttcacagctcacaggggaaggtgggtggggcagaaaggaggagagtctgtgaggggcaaggggcaggaggacatggtgaaagaggctggaaagacaaaggagaagcgagtgggggtgcggggatgtggtgtcagggaggacaagcacagccgtggggcagtcaagagtgtggcgatcagccgtggggagggctgcgctggggccgtgggacggtccaggaggctcctttggcggctttgggtgcaaggaaggcacccaggaatgtggcgttgtggcttttgggaaatgtggcaaggcccggatttcaatggtggggcaggggagcaacacatggtaagtaaaggaaattctagaaacatctacagaacacctgcatgtggagagcaccacattaagtcctggtgcagaagagagaagggggcacaggttctgagctgcaggaggggctgtgctcagatcataagcacggcggggtgtggggggcggcccaagggcactgcattcagaactgagcttcaaccacacccacagattcctggatttgctctcagccttcagacccttcaggaacggcccaagaaaatgtgacttgtccaggccaatgcacttatagccagcgtggatggaacagaagggcaacagatgactaggaaaaatatgccacagggaagaaaaggggtagcagaatactgccataaacaacgtgagatgcagctctgaaatgtacctgaggggctgcatgctgtaaaccaagcctcaatcctctgtggggtaaggggatgctagtgacccaccactggacagcccctccctgcaggctccgggctgagttttccaggtgacgagctgggactggtccagccatattcagcccc

SEQ ID NO: 32542 - DNA, 1441 bp, Artificial sequence
  DNA replication origin
attctattgctattagaaaataatggtccttagaacaatgttaaattattaagaagttctagatatgtttgctgttttgataattaaaaattgtagttgactagttgttttatgtaaagctgtggatagcaagaaatgaaaaattttacattttaaatctctaaactctaaaaattcatatacatagaagagattccatagcataaaatctgggaattcatagtatttggaaccaatcagtggagctgcattgtgaatgttgatttccaggagggagtggttgtgttggcccaagctcctgcttactaggttctacttccactcaccatcccccatgggatgggcctgaagcacccagcgaagcccagagagccaggctccaaggggcccatggcaagggccagaggaggaggaggagcggggagggggaaggaagaggaggaggaggagcggggagggggaaggaagaggaggaggaggagcggggagcgggaaggaagaggaggaggaggagcggggagggggaaggaagaggaggaggaggaggaggaggagacactaagcatggctggggaaagaaagagtgctcataaagaagtgagggaggtcagtggggccagacacccccagggctgaagaccacagcaaggaacttgggttttctttcagctacagcaaccagccatcccagccataggctccaagcatgtggttgtcagggaaagtagattgcagaaggcagagaccctgtggggtgccttgggttgggctggggtagccatgcaggtgagtgctggaaactgaagggcagaactagctggtggacttaatgaggaaagggatccaggagggtacagggtgaaccacggtgccatttactgcaaaggggacatctaggagacttagggaagagatccagctctgatttggagaagttgagtttgagatgccaaatggagagccatgtggaggcatcgagcagtcagtctgttgtcagagcctggagctcggaagagaggcagatggccccagtgtaccggtcatcagctactgatggtatgcagagcctgggaatccagagcacacgaggagtgcccgcagagaggcaagggctctgggcctgagaaagttcagcttcagacaaggaagagcctcacagcacatctgggagagagggagtgcccagcagagggcacaggtcgtccgggccagatgctggagagacccggaaggaggagggctgatggtcctagtaagattgtacttaacctccttcttaccttgtccaaggacaggatgtcccatgctcagtccgcaggcatgtggtgagcgcgcttggcaaggcaaagtatagtaaagcatcgagaatggagcgcacacctgctgcaaacaccctcagaggaccgtagaaagggttagccacctccattatacactaaag

SEQ ID NO: 32543 - DNA, 1327 bp, Artificial sequence
  DNA replication origin
taaccctgagtggacacagcacatgtttcagagagcacagggttgggggtaaggtcatagatcaataggatcccaaggcagaagaatttttcttagtacagaacaaaatgaaaagtctcccatgtctactactttctacacagacacagcaaccgtccgatttctcaatcttttccccaccttgcccccttttctattccacaaaaccgccattgtcatcatggcccgttctcaatgagctgttgggtacacctcccagacggggtggtggccaggcagaggggctcctcacttcccagtaggggcggccgggcagaggcgcccctcacctcccggatggggcggctggccgggcggggggctgaccccctcacctccctcccggacggggcggctggcctggcgggggctgaccccgacctccctcccgggcggggtggctgccgggcggagacgctcctcacttcccagatggggtggcagccgggcggaggggctcctcacttctcagacggggcggttgcgaggcggagggtctcctcacttctcagacggggctgccaggcagagacgctcctcacctcccagatggggtcgcggccgggccgaggcgctcctcacatcccagacggggtggcagggcagaggcgctccccacatctcagacgatgggcggccgggcagagacgctcttcacttcctagatgggatggcggccgggaagagacgctcctcacttcccaggtgggatggcggccaggcagagacgctcctcacttcccagactgggcagccaggcagaggggctcctcacatcccagacgatgggcggccaggcagagacgctcctcacttcccagactgggcagccaggcagaggggctcctcacatcccagacgatgggcggccaggcagagacgctcctcacttcccagacggggtggcagccgggcagaggctgcaatctcggcactttgggaggccaaggcaggcggctgggaggtggaggttgtagtgagccgagatcacgccactgcactccagcctgggcaccattgagcactgagttaacgagactccatctgcaatcccggcacatcgggaggccgaggctggcagatcactcgcggttaggagctggagaccagcccggccaacacagcgaaaccccgtttccaccaaaaaaatacgaaaaccagtcaggcgtggcggcgcgcgcctgcaatcgcaggcactctgcaggctgaggcaggacaatcaggcagggaggttgcagtgagccgagatggcagcaggacagtccagctttggctcggcatgagaggg

SEQ ID NO: 32544 - DNA, 970 bp, Artificial sequence
  DNA replication origin
ccatcccacctgggaagtgaggagcgtctcttcccggccgccatcccatctaggaagtgaagagcgtctctgcccggccgcccatcgtctgagatgtggggagcgcctctgccctgccaccccgtctgggatgtgaggagcgcctcggcccggccgcgaccccatctgggaggtgaggagcgtctctgcctggcagccccgtctgagaagtgaggagaccctccgcctcgcaaccgccccgtctgagaagtgaggagcccctccgcccggctgccaccccatctgggaagtgaggagcgtctccgcccggcagccaccccgcccgggagggaggtcggggtcagcccccgccaggccagccgccccgtccgggagggaggtgagggggtcagccccccgcccggccagccgccccatccgggaggtgaggggcgcctctgcccggccgcccctactgggaagtgaggagcccctctgcctggccaccaccccgtctgggaggtgtacccaacagctcattgagaacgggccatgatgacaatggcggttttgtggaatagaaaagggggcaaggtggggaaaagattgagaaatcggacggttgctgtgtctgtgtagaaagtagtagacatgggagacttttcattttgttctgtactaagaaaaattcttctgccttgggatcctattgatctatgaccttacccccaaccctgtgctctctgaaacatgtgctgtgtccactcagggttaaatggattaagggcggtgcaagatgtgctttgttaaacagatgcttgaaggcagcatgctcgttaagagtcatcaccactccctaatctcaagtacccagggacacaaacactctgcctaggaaaaccggagacctttggtcacttgtttgtctgctgaccttccctccactattgtcctatgaccctgccaaatcccctctgcgagaaacacccaa

SEQ ID NO: 32545 - DNA, 1182 bp, Artificial sequence
  DNA replication origin
agccccgcccctgtggtgcagcatcaccctccccgctcgaggcggacccaaccctgctccgccgtgccccgtcccgcagcgcgcagagcgggctccaactcctctgagcctcgagccccgcctccctcaagttgagccgggcccgtgtccaagccccgccccaccgccgcgcgctgagacaggccccacccccggctcgtgcagaactccgtactgttctgggtcaagcgcgcggagggcggcttgggccaccgcagagctgggagggaggagctaggagcggctgttttgggggcccggggcagctactgtctgggtgggaccgtgcggtgccggcccagccccggaggtgccggggagcgtcccgtccgcggatccccgcgcacgtggtgccgggcgtcccttcatggtctgtggccggattcgggctcgagcgccaggggcggctgggccagcaccttccgaccggtcgctttttgttcgcggaggccgctgggcgctaggcgtcgttctcggcctcgcaggagctcagaccgccgagcgcacaaggccgcagtgttcctgcaagcggccgccccgcgcggcaagtttggtcgcaaacaagctctccctccgctaaccccaaacactgcgaggacagcggctggactttataaactcttcacacccaaaactcgaatttggagacggaactgtgattgcgatgagcctctgtagtgaggaatgacctttccaaccttggattctcttgctggcccatgtaaacataaataggaggcatttcccgaaagagtggccgcgtggtttccaaggttaatttcataagccgctctgcctgcccgttttataaaagatgctaacccacgtaaaattattctggagtgccacttcggagtctgggagaataatgggagtttgtacaagaaccttgatggggcattttttacacacttaacctaataatgaaattaaacgtttttagtttttgagtactttatgctgaaacaccttgtggagaaactttaagtgtaccgtataagagacaaaaagtacaaacaggaggaattacaaacaggaaatacaaacacgcagatatgggtacaactttagggactctggcctcacccagagccctaatcctacggctcagaaaactagaccaattgccctgcctcccaccac

SEQ ID NO: 32546 - DNA, 1118 bp, Artificial sequence
  DNA replication origin
gcggggagcggggcggggagctgggctgggctcggcacggggcggggcggagggtggggagcggaaagcaggacgcacggctcccgcggcccgctggctgcccttcccgccagcgcaggtgtgggacgggcggcggactaggcacagagctgcgggagcaggcacagggagtgtggagcctggcggcgggacggcgggatccggtgggagccggagtcccgccgaggggggctggaggtggaggggcccggcgaggccgcgatgaagccgagcggcgaggaccaggcggcgctggcggccggcccctgggaggagtgcttccaggcggccgtgcagctggcgctgcgggcaggacaggtgagcgccacggctgggctcggaagtccgggcggagcagaagcgcgtgggccttgggagccgcctggagtggcggggtcctggcgcgcagccggcgggcgcccagggtccgcacccgagggcgcggggcgcggagcggtgaaaggagcctttgtgctggtgtcctggacacacctcccgcgcccttctccaactcccggagccctggcggcgagcccctctgctttggagttcagcggctaacgtgacctttgcgtttgagtgagtggtcagaatgtagaaatctctccaggggtagcgtacggggctgttgatttttaaggacctatgaacggattcagctcgcggtaggaagcccggggctaagccccagccgcgtggggatctggctgggctgccgtttgattgtcctggctgcagcatcctcaacccaaacttactctgacccacaccctgaaagtggctcagctccgcgacggccacggactcagagttcaggaggaacttgttacactgcccggaaggatgaaaaccgagccgcagagctaccgaaaaccagcgagcagagtttaaaatggagtgcagttcctctcttctctttttcatttttgtgattgttccttccactttcctcagtacctttagcagtgcctgacacaccgacggtagtggtaggcaagcgagtgttggttctcccaggactgtaagatggcttactccatgtttgtctcttaggatgtgattgtgggccgggcgcagtg

SEQ ID NO: 32547 - DNA, 1022 bp, Artificial sequence
  DNA replication origin
ctagtgagatacaggccccctcctcgagctttaggggtggaggaaggcaggagctcaaaggcatggggagctgagacattgagaaggagaggggagttccggagtctaggcccctccctctctcctggcctcctcctgggcccagtggagacaggagcctggagcctggtttgcgtcttctctcttctgtgggagtgagggaaggctttggtctctaggctgagccagtctcaggatcctgtgtccgttgtcccagctctgccctagcctgccatgagcgctgcaggaggccttctgcaggctggcgccctgcccctgggctcacctttcatgtgagagatggaggaggtgcagacctggccagtcactgcagtgtgcaggcggactgggaggccatcccagcacctgggatgtggacagcttcctggaagaagtcacagctgagtgtgtctttagaaaaaaagcaggagtcagctaggaaggttaggtgatgggcttggggaggggagagagaagaggaggggtcggggccaatagagaagatgaaagcagaaggggcaaaagagaacatagcaccaaggacctccaagaaatgcactttggctaaagtttgaggtgggagaggtcaggacttgggggccccgtgtggagggcagaattgcaggtgggtgtcctgctcgaactgatggggtgtggcccttgggggctgtgagttggggtggacttgatgagtcgtacattgaaggagacataggaataaaggacttctgggtttctggctcatgcagctggctggctctcattgcttttgagagaaatgtgagctggagagggattaggaagtaatcaattgtgacggctccagccgtggggtcggctctgtttagcgatggtggacttggactgtggtgctgggaaccccttccctataccttacagctgcagggccttgggcaactttctccatttctttttgcctccgtttcctcatctttaacgtggagaataatttttgctgtcct

SEQ ID NO: 32548 - DNA, 838 bp, Artificial sequence
  DNA replication origin
gtggggggttggttgggggtcctatccatggttgcatggcccacagcaacgagcgggttgggggcactatcgggctgcattgcccatggcagggggcaggttggtggcactatctggtgctgcagtgtccgaggttgggggctctatcaggtgctacactgtggcagcgagtagggagcgggggcgttaggggcaatatcccggggctatactgttggcagcaggcagcaggttagaggcactatcaggggctgccctgctggtggcagcaaaggttgcagcaacagcagtagcctccaaggaaggagtcttcctcctctccccggactccagactctggaaggtgacctcctcctgctcctgctcgagcagggcaaatgcacactgtttcttcaggaatcctgagcatggcagggcccccacacccgtggtggttcctgggcctgcaccctcttactctgtgttatggagactgcctgggacccctgggcctgcaggacagggagtagcagacaccacagggggatggggctctgtgggtggaggcaccaggatcgggaaccagcacttgggtgggagggctggctgggtctgagttgctgctggttctcctccccaaggacaatagctctggggagcccagcagttccagtggagtggggagttgggcaatgcgttgtttccagtccccagttcctggccagcttgggccaaaaggagaggctggactttggagggtgggtatgagtgccttcaatgaaaccggcccctgccacccagtggccagcatgataaggtgaggctctaacgctaccactccctgcatcctcctctaggc

SEQ ID NO: 32549 - DNA, 1939 bp, Artificial sequence
  DNA replication origin
ccccctgagtcccatcaagtcccagtgtcactggcaggcctcaggcatgtgcaggtccggcagggaggcagggagagctagaagtactgagttggccattagtagaactcttactgccatgccaggaacctagatggagactgcagagtggatggaacggtaggaggcagctggcagtgagagctgctccatgcctggctacaggaagggaagaaggaggagtcacttgccacaggctggaggctggaagctggaggctggagcctgcggcaccactgctcacctcgctgtggttggtggcaaagactgagactgcagccagccagagcgtagaagggcaacagggtatgtgcgctatccggggctgctggttgggggtgttattctgggcgtcactactttaggtgtgctatctggggctgcgctgcctgcatgctacggggagtgggggtggttgggggcactattaccctctatacagctgggggctgcggggctggccgcttgagggcgctatccggggttgcacggcccttggcagggagcagattgaggaagctctcctgggctgcactgccttcattggaggtcgggttgggggtgctatcctaggctgtattgctggcagcagtggggcaggttgaaagtgctactgagcaggttgggggcactattggggttacactgccggtggtgtgggggttggggggactggtggggcactgactggtctggctgcattgcccatggtggggagcgaggtgggggtgctatctggggctgcactgcccacgacggggggcttgttgggtgcactatccatggctgcactgcccatggtggggggtggcttggcagcactactaggactgcaatgcccgtggcaggggataggttaggggcagtatcttatggtgctacactgccagtgggggacggggggggtgcagagatgtgtaggggggttttcgggtgctactgggggccaaactgcccatgatagagggtggattgggtgccctatagggggctacacagcccatggcaaggggcagtttaggggcaatacccacagccggtggcaggcagggtggtggggtgggttgtgggcaccatcagtgactgcatggaagtcagtgtgggcaagtgaggggtgctatcagctgctgcactgcctgtggcggggatcgggtttggtgcactatcaaggactacactgctggcagcagcatatgggttagaggcacttttgggagctacactgcccatggtggggtgtgggttgggtgcgctatccagggtgtcattccccaaggctgggggatggttgggggtgctatccactatctggggctgcactgcccatggtggggtgtgggttgggtgcgctatccagggtgtcgttccccaaggctgggggatggttgggggtgctatccactatctggggctgcactgcccatcatggggagtgggttgggggccttaaggatctgtgactgcactattcatggtggggagcaggttacaacactttctggggcatcactgcccatagtggggggttggttgggggtcctatccatggttgcatggcccacagcaacgagcgggttgggggcactatcgggctgcattgcccatggcagggggcaggttggtggcactatctggtgctgcagtgtccgaggttgggggctctatcaggtgctacactgtggcagcgagtagggagcgggggcgttaggggcaatatcccggggctatactgttggcagcaggcagcaggttagaggcactatcaggggctgccctgctggtggcagcaaaggttgcagcaacagcagtagcctccaaggaaggagtcttcctcctctccccggactccagactctggaaggtgacctcctcctgctcctgctcgagcagggcaaatgca

SEQ ID NO: 32550 - DNA, 2083 bp, Artificial sequence
  DNA replication origin
ataacctcagtatataatgcatgctaagggggagtcccgccgtagcaggctgttctttgtcaacctgtccagccactcagtttgcagcttagagaaggtggaagtggactcccctgccacactctggaggctggagcctgtggcaccagggcttgcatctgcatggtgtgtgacggtgatggagattgcagagcgtatggagtggtaggaggcagctggcagcgagagctacttccatgcctggctaaaggaagagaggaaggaggcacctactgcaggctggaggctagagcctacgggactgcgggtggcctcactgactcacctcactggctcgcctagctggggttggtggcagcaatgcacactgcagccggccagagtatagaaaggcaatggggtaagtgcactatccggggctacactgcccacggccgggatctggttggggtgttattccaggcagcaccactttaggtgtattagggtgttatcctgggcgtcactactttaggtgtgctatctggggctgcactgcccactgcggggggcggtgggggggtggttgtcagcactatcctgggctgtattgccggcagcagtagagctggttgggggcactatgggtgctacacttcctgcaacagggagcaggttggggccactattgtggttacactggcagcggtgtaggggtgtggggactggtcggtcggggctctgactgatccggcttctttgcccacagcggggtggggatgctatctggggctgcactgtccatggtggggggcttattgggggcgctatctggggctgcaaggccaatggcagggcataggttaggggcagtatcgcatgctacatggctggtggcgggggtggggatggagaggttggggggtgcagggaggtgcttggtggggggttttccagcgctatcagggccagactgcccatgatagagggtgggttggctgcactattgggcgattcactgcccatggcaaggggtagtttgggggtatcctgccagtggcaggcggggtggtgaggtgggttgtgggcactggagggggactgcactgcagtcagtgggggtgaattaggggcactatcagcgttgcactgcctgtggtgggggttgaatttggtgcgcagttggggactacactgccggcagttggggactacactgccggcagcggcatatgggataggggcgctatcaggggctacgttgcctgtggtggggtgcgggttgggtgtgctatccagggcgtcattccccgtggctgggggatggttggtggtgccatccactatctggggctgcactgcctatcgcagggagtgggttgggggccttaaggatctgtggctgcactgttcatggcggggagcaggggcgtcactacctgcagcggtggggggtggtgttgtctgggggtcctatccgtggctgcatggcccatgggagggggcaggttgggggagttatctggtgctgcaacgtccgaggcggggatgggttggaggcactgttgggtgctaaactgcagtggtgaaggccgggtgtcaggggtgctatcctggggccaacagtggggtggcgggttaggggtactatcaggggctgccctgctggtggtggcagaggttgcagcaacagcagtggcctccaaggaaggagccttcctcctctccccggactccagactctcgagggtgacctcctcctgctcctgctcgagcacagggagtgcatagcgtttccatgggaatcctgaacatggcagggcctccatacccgctgtggttctgatggcctggggctgctgctcacctcgcaatggttggtggtggctacggagactgcagtgcgccagagtggtaggaggactgctggctgcagccgtggcagggttggggctgcggcggtggccaggtggtaggagctttgtagctcgggccagtgcattgaggacaacagtagcgatggttgtactgacattagtgctggtggggacagcagcagcaagtctaggggccgggaaggggcagtaagagcactgcagggcct

SEQ ID NO: 32551 - DNA, 1985 bp, Artificial sequence
  DNA replication origin
cccctactcctcctcatcccctggcagctacacgggacccccaggaggaggtgggccccctggaacacctcatcatgcctagccctggagattctaccaactccagtgaaaacatgtacactatcatgaaccccatcgggccgggtgccggcagggctaatttcccgctcggccctggcccggagggccccatggccgccatgagcgcgatggagcctcaccacgtaagcggatccctgggctcgggcgacatggacgggttgccgaagagctcccccggcgccgtggccggcctgagcaacgccccgggcaccccgcgggacgacggcgagatggcggccgccgggaccttcctgcacctgtttccaagcgaaagcgtaagcgactgcttcgactctcccccctccagggcggtgtcaggcgggaggggcctggcgggcaggccccggcggggcggccggggggccagagcaagaccgtgacagcggcgggccagtactcgccagggatgaccatgagtgtgtgatggggcggcagccccgggcctctgcgggcctaggcttctgcccagcctccctgctcagggtgaggggctgaggtcacaccttgggcacctggactcctggccagtcaaggcttgcccagctgggaggccccacacgaaagattcttaccattttattagaaacgcaaggacctcagagacgttcttttctgtatggaccctttctgccatttgtattttgtcccagagagaaaggctctttggggggcccctctccccaggacgtcagggggtggggcccatcgataaatggaagctggttttggttttttggtaaaaaaaaaaaaaaaaaaaaaaaagtgatgagaaaactcagacacagccttcatgcaattttgctgaaaatatagtgaacatgctcttacaactcattcatacccaggtttccatgacttcaagttttgtgttctttttctgctacttcagtaagagtatttagagacacaagatggccaatcatagaatctgggggaaattaacaatatttaaagagcagatcaagaaagaggaactacttaagacaacaaaaggaggtatgagaatgtgcaggccaggcacggtggctcaggcctgaaatcccagcagtctgggaggccgagggggagcggagcacctgaggtcaggaattcgagaccagcctggccaacatgatgaaaccctgtctctactaaaaatacaaaaattagcctgacgtggtggtgggcacctgtaattctagctgctcgggagaccgaggcaggagaattgcttgaacctgggaggcagaggttgcagtgagccaagatcctgccattgcactccagcctggacaacaagagtgaaactccatctcaacaaacaaacaaagaagcaaacaaaagatgtgcatggaggagttttaagaaagagggagtcaaatctagtagaggccagctttgattagaggtgatcattcatcacaggacttttggagaaaattggtgacgtgtatcaaaaaagtttcagtggaattgtggaaaagataagtgtgatggagcagtgagttgtgaactaaatgaaaggtagagaaggggagacaatgaggacagacttctcttttaaaaagccagaaaaaaaacggagatggaaagggatgagaatgcaggtggaggtgagacagacaaagagatgaggtgaggccaaaggacaaggtggccctttagcgcaagactcatgggagtccttataaactaaagggtaggaaccaggggctgagcagaggctgacaacacagaggaaaggacgtttcaagattccttagtagctgagtgagaagaccctgagcactggtggaggagcatggcatgaacagacagaggactctgagagcagacgaaacagaagacgactatcctggggccagatgtgcagcaggggatgggcaggaaggcggggagttcag

SEQ ID NO: 32552 - DNA, 781 bp, Artificial sequence
  DNA replication origin
ttgcggccagaagagcctcttctccaaaatgacccagaggctgggcagaggggacagtcatctttgtggaggggtggggcatcccaagtcagcttctcgcgggcctggctgtcggagggcacggccgaacccttgcccctcttggcgtacgtgctgctccgcgccgccgccgccgccggggcccacacctgtcaggcggcgccgcgggccgcgctcgccgacgccatagctaccccgggccccaggcctcacagcccagagccccgggcgggcaccgcgggcatcgtccgcgcgggggagctccagacggcggctccagctccggccccggccgcagggtggctttttttcttctcatcacattttatcaaaaatctaattttaatgtcacatactacccactatatttaaatagcatatataaacattttataattactgcatagttaggctatttccggtgttcatgttggatattgccaggaattttcagtccctaactgttccgataactttttgctgacgagtgccgtatctcctaaaagacactgggctgtgggggttggcttctttctttctatgattcccaacaaacacgctatgcacacactctcttaccgcccaattgccccgttgtttctgagagtgggactagatgtagaaagataatagaagtcaggggaaggtggggtgatcataataatgataagagcaagagtctggctttctcagaaggaggcttctattcaggaaggacacagttgcccagtttctatttagt

SEQ ID NO: 32553 - DNA, 1321 bp, Artificial sequence
  DNA replication origin
tagtgagggcagggcaaaagccaaggcagggtcagggcaggtccagggaggggccagcgccaggcagggccagggcacaaccagggcagggtaaggcagggcaacagtaccaatgggccatggcagggtgaggtcagcgccaggagaggacagaacaggcagggccatggtgtggccagggcaggaaagagccaaagcagggccaggacaaatcagggcgaggacatgtccaaggccagctcagggccagaacaggaccaggaccgtgaccattggcaggaccagggtcacgacaagagacagggccagagccaaggcagggccagtgcaggttcagggaaggtcctggccagggcagggcaggaccgggacaggccaggtaatggtagggcaggtccagggcagggccaggctgaaggccaaggccttgcccagagcagagccaaggcagaggcagggccacggcatggcagagccaaggtagcacagggccaagaaaaagccagggcagttaggagccagggcagggccaggacattgccaataccagggcagggccagggaatggccagggcagagccaggaccatcaccatggcaggggcaggaccaggtttggggcaggagcaaaacacgggcaaggacagtgcaggttcatggtacaaccagggtccagaacaggggcagggcagggccaaggaagggtctgggccacggcaagaccagtgacagggctggggctaggacggtgacagggccagaatcaggggaagggccaagcagtgcaaggccagggtggggccaggcatttcagggtcagggccagggcagaaccagggtaaggtttcaagcagggaagggccagggccaggacaggagcagggtctggggtagggcaagggtagggccagaacaagggcagggccagagcagggtaagggtcagggccaaggccagggtagggacaggatgagaaatatggcaggaccaggggtaaggccaaggccagggctgagtcagggcagggaagggcgtggtatggccagtgcaggacaggaccagagctggtccatagacagggcagggcccatgatgccaaggcagggccaggctagtgccagggctgaggcagtgtccgaggatgtccagggcacagccaggtccagagccaagccagggaacagccaagtcagggtagggcagggcaatggcaaggctgggtcactgccgggacagggcagaacagggcaaggtgatggtaggggcagggcagggataggccaaggcagggccaggtcacttcagggccaggacatctccaa

SEQ ID NO: 32554 - DNA, 1228 bp, Artificial sequence
  DNA replication origin
ggtgagggcagtgggcacaggggctcctcattctcagcatagatgtcagcactagccttcagaaggagggtgagggttggggactccagtccagctgccaggtgcaggggtgtgtttcccacaaaggtgtgagcattcccattggcccgaagcttggtgaccagatgggtgaccaaccccagctcctccatctctgtggctagatgcaaggctgtttggccccctgctactctgtggcctccacttcagccccactgtccaccagcagatccaggcacttggggctttgggcttgggccgccaggtgtactgcaaagtcaggcatgtgcaacagccgaggcacagcgggagctccactccaaagcagtgcatgcagcagctcagaggcaccagggcctgcctgcagtgccaggtgcatggctgagtctccatgccaatcagcagtgctgggtctgcatccacctgaagcagaaagctcaccaccctcatctgcctggtgatcactgccaggtgcaggggtgtctggtgcaggtggttggtgaggttgacgatgccaaggtgctgggtgtggtagatgacatgggctatgtgcttgatgaccctggtcggcccatggatgatggacaggtatagtggcgtgtctctgttctcgtcctgctccagcaggtggcattgtcccgccagcagtgtgctggcgtccgtggtgacaccatagttgagtagggcctgggcgctgcgctgtgccgtgccacaccaggctgaagagcgttgtactctcgggctcactgcagcatctccagggcctgcagctggcactggggaggggtcctggagggggctagggctatggccgtgcggggccaaggctagggctagggccaggtctgcactagggccagtgtgagggccaaagcaggatcagggcagagccaaaggcagggcagggcagggcagggtagaacaggcccagggtagcacagggcaaagttagggcagaaccaaccaaggcagatctatggctctgcggcttcctcctgagtccctgccgggcactaaaagcctggctctttttttttttttttccagacggagtctcgctttgtcacccaggctggagtgcagtggcgtgatctcggttccctgcaagctccgcctcccaggttcacgccattctcctgcctcagcctcccaagtagctgggactacaggcgcccggcaccacgaccgg

SEQ ID NO: 32555 - DNA, 1050 bp, Artificial sequence
  DNA replication origin
gcctggctctttttttttttttttccagacggagtctcgctttgtcacccaggctggagtgcagtggcgtgatctcggttccctgcaagctccgcctcccaggttcacgccattctcctgcctcagcctcccaagtagctgggactacaggcgcccggcaccacgaccggctaattttttgtatttttagtagagacggggtttcaccgtgttagccaggatggtctcgatcttttgacctcgtgatccgcctgcctcggcctcccaaagtgctggaatcacaggcgtgagccagccagcaggcggcgctcgcgagagtgcgcagctcccgcgaagggcctcgcgggcaggctgaggtgcgcatgtgccctggtgcctaagggttctggccggggaggcggggggcggtgggaggtggggggagggcgggtgcgccaccacgtggcgcccgcgaatggagggcgcgaggctcagggctgtttctccgcggatggcctcgtgggccggctgaggtgcacatgcgcgctggtgcctaacggctctgctgggctaggtgctcctccgagcagctggagactggagtgtccctgacggaggttgcggctggacctggttacgtgctggtgctgcgctccagagaggcagaaaacgagtgggagctgaggtgtcttaaagccgttcctcagcctgggagaagatctctggcttcaggatggaggtcagggggtcgttcctggcggcctgcaggagacgcatggctacctggaggaagaatcgtgacaaggatggcttctcaaatcccgggtaccgagtccggcagaaggatctgggcatgatccacaaagctgccatcgcaggtgatgtgaacaaggtgatggagagcatcttgctcaggctgaatgacttgaacgacagggacaagaagaacaggtaaggggaacaggaagccgggaggaggcctggggatatgggagaagcccctgttcctggtttcggggtaggggagatacggtgtggggtgaaggcgtgggtggggtggaagtcaggtga

SEQ ID NO: 32556 - DNA, 1152 bp, Artificial sequence
  DNA replication origin
gatggagagcatcttgctcaggctgaatgacttgaacgacagggacaagaagaacaggtaaggggaacaggaagccgggaggaggcctggggatatgggagaagcccctgttcctggtttcggggtaggggagatacggtgtggggtgaaggcgtgggtggggtggaagtcaggtgagggtgggtggggtgggggactgtggtggggagtggctggggggcgttggatgtgatgggggactgtggtgggggtagagttgggtgggggactgtggtaggaagtggagttgggtgggggttggaaggggtggaggactgtggtggggggtgggatgggttgggggactggtggggagtggctggggggcgttggatgtgatgggggactgtggtgggggtagagttgggtgagggactgtggtggggagtggagtgagggtgggttggggtggaggactggtggggggtgggatggggtgggggactgtggtggggagtggctgggggcgttggatgttggggggactgtggtgggggtagagttgggtgggagactggtgggaagtggagttgggtgggggttggatggagtgcaggactggtgtgggggtgggtggggttggggactgtggtggggggtagagttgggtgagggactgtggtggggagtcgagtggagtgagggttggctggggtgggggttggatggagtgaggggactggttgggggtagagttgggtaggatgtgggtacgatgcaagggtgggggtgggggtggggtgagtgttgtcaccaagggcactgggctttctaccctggcagcctcagcagcacctgggatgtggaaaccttgcctttcttcacaagaaaagtaactatttgttctgaaggcagagggataacatactattggatgtttacaattgcatgcgtcgttgtatgttttgggactgtgcactacaattgcctaaagcgacctctcattctcacaggactgctctacttttggcgtgtgcccatggccgtccaggagtggtagctgacctggtggccagaaaatgccagcttaacctcactgacagtgaaaacaggacagctctgatcaaggtatatggtagccaactctttcagcatgggatggatttaatttaa

SEQ ID NO: 32557 - DNA, 1056 bp, Artificial sequence
  DNA replication origin
ccccgcgaaggcctgactggcgcaggggaggacgttttggcacgagctctccaccgccgaggatcgcgacttcgcgctctgggagcccccggtcgtcctggctcccgcagcctggagccgcgcgtccttcgctgccttgggccgtaccgaggaccttggaagcccagatgctccccgggtctcttttggtcacttgccagcctgttcgttttgcacttctgggggtcggggcagttggggtcataaccaatcctggcagcatcactttggccgcggaaagacgggtatgtggattttaaacccaggccacgggtggggcaggtgaggagacggatgtgagcgccacttgcctccagctctggagtcccccagagcccagccccaggctcagcgagccgctggttccctgcagggatgcggaagctgccgcagacaccgggacctgcagcccttcaggttctccgaggcgcctgggcttcctgcccgctgcgctgctctcaaggccatgtcatgagcatttggggacagtgagaagggcatgcagaacgggaggggaaaggagcctttggactgcatgaattgccttttagctgtagtaagggaccctcgcagagtgaggaggcaaagagtgaaccccgctggggctgggggacttccgtccacaccctgctctcatggttgttcccatcggaagacgcaattagggcctctgagacctccgaggaaggcgggcagttacaaggggttcccagaacccctcactacaggactgaagaggtgggctcagtgttgaggggtgggactcgggcagtaagaggtgtaactttctgggatggaggcttgctaggatatcctctcgtgcccaactgctgactgccgcctggaaacagcgtttcgggagctgcagcgggaccctcgccggctcctcctgagcccacctggtttgagcagactgacctgatctcttaagacctgaccctatgcccgccctcttcctccgctggctctcagaaagggtcaccgtggtcaacaagccttgtgacttgcaggactgtt

SEQ ID NO: 32558 - DNA, 961 bp, Artificial sequence
  DNA replication origin
catccgccccactggtgcccaagccgtccagccgcgcccgcgggcagagcccaatcccgtcccgcgcctcctcaccctcttgcagctgggcacaggtaccaggtgtggctcttgcgaggtgcgcgggcgtctgcaaaccaggtgacagctggcgagtggctgcatgcatctctggccgctgctgcagtcgcgggcgcagaagagggtccggtcccaggaaccccgagcaaagcttccgcgatgcgaggggaccgggcttctgggggtcctggaaatcacaacgggagctgggcgcgggaggggcccaggcttggcccctcctggaagcgcgggctctggtctccgaggggaggccccaaccgtccggcggagccctccaggttggtggtgctgggagaagcgctcctccttgcctccgggtccaagggcggagacgctgcctggggagcaggggggacaaggggcgggtggaccctgaggagtcttccctgcgcttcgcacccgctcgtggtcgaacaggcagcattggctattttcctgcttgggttaatattcatatcccaacagacccaagccaattcttggtaaaatcctaagtcattgcgtggcagcaactgtaaagtaaggtctaagagggagatcgtgtttctctgaagatcaagtacctggaaaaggatagagaaccatttgcgggcttgaaggtgcaggcgttcagcggcgccgggtcccactgtgtgtgctacgtgtggcgggcagagagactacatgtgtgaaagggagcggtccggctacgaaacgcaatctatgagcttccaatcccgggttcttaaatgggagctgttgtagacactgcaggttagaagcatctttctctttaaaaataagcccacagtacaagtcggggcggtggcagggggacgctgagaaacacctgcttcgtgtatggtcattaacacgctta

SEQ ID NO: 32559 - DNA, 632 bp, Artificial sequence
  DNA replication origin
ctccacctccagggttcaagtaattctcctgcctcagcctcccgagtagctgggattacaggcgcccaccaccacgcccggctaatttttgtattattagtagagacggggtttcgccatgttggccaggctggtctcaaactcctgacctcaggcgatccacccacctcggcctcccaccgtgctaggattacaggcgtgagcccaggcggccggacagacgcccctgtcttaatcctcagccgtggcagatgggattaagtgaaggttactggggcggggttggggtggggtttgtcctggatcatctgggtagaggccgaagtcttcacaagggtccttatgagagggaggcaggtgagcatgaaggccagaggcagaggaggaggagagatgtggggtacccaccaaggcaggcgcccaagaagccgggaaaagcgaggggccgggcctgccccgcagcccccacggcggccctgcgccctggctttgactctgacctcggcagtgggacagcattggtgtgtgggtttcatgccactgaggttctggtcgtttgttacagcagcagtaggagatgggaaaggcgggtttgtttttctaaaggagacactcagctaacagggaggagt

SEQ ID NO: 32560 - DNA, 1282 bp, Artificial sequence
  DNA replication origin
cgccaggcccaccttggtgccgatctggttcccgcactggcccgcctggatgtgcacgatctccctcatggcgggcgcggctctgcgctaggaactggctctgcggacgacagcggcaactgcgggccggctgcgcgcgtcccggggccgaccctccgcgcccccgcccccgccccgccgctcgccaatggctgcgggccccgccccgccgcccccgctcgacgccgcggcccggcctgcagcagccgagggaggacgcgcgggcgccagtcgggggacccttgccgggagccgggcggaaaaggacgggcccggagctggcggggaggagacgggaaggagcgcggcgcccgcccccaccaccgtttcgctgccccttgtggtgccccgccagagggagacgcgagtcgggccctggcgtcggggcagcggagccgacgtggcccgcggggtcccagcgccgcgcccgggagcattgcagccgcccgcgcccagtccagccaagccgggacactgccctggggttcggcggtggagcttttcagggtctctgccccctgccccccaccccccggtcgcaccccgggcacacgttcttagggcctcttcgtcctggtgtttccgtctccggagatacagaggccattcctctccgacgactcccacccctttggaaccgggtttagctaaagtgactacagggctggatccgaaaatgaacacctcctgcgccgggtctatgcagcctactcctcgcgcgttagcgaagaaatgcgcttcggcctgggagggcgcgccagagtccgtcttcctggccagttttgtgtggtggaaaggaatgactgctgatgccggccgggtgacttggattttaattctagctgttttcagttagctctgcgcttcagcggactcctctgttaacggaaaaggttatcctaggggagcctttcagcctccaaaatgcgggatgctctggcctctgcagtcagaatgtgcatgcatcagggcttttgcggaagtttcctcacgtgaacgctgcaggctgggaccaccggggtagcctctgcgtcccctcccaggcccgtagaaacgccgcacatgaggaagcgacgatgttctgtaatttgcactggcactttctttttagacagatgaaaactttgggaaattcctaattgtgtgtgtgcatgtttgtacgtttggaagggagtggagaacttttaaaagtttttcttctggagttttgcaaatgtttccaaattgaggaattttttttttt

SEQ ID NO: 32561 - DNA, 1084 bp, Artificial sequence
  DNA replication origin
gggtttttttggttgttgaattgtaagagttctttttttttttttttaattttttttgagatggagtcttgctctgtcgcccaggctggagtgcagcggcataacctctgcctcccgggttcaagtgattctgcctcagcctccctagtagctgggattgcaggcacccaccaccatgcccagctaatttttgtatttttagtagagatggggtttcactatgttggccaggctggtattgaactcctcacttcaggtgatgcaccccctgccttgccctcctaaagtgctgggattacaggcgtgagccaccttgtccggcctcaccttcacatctatttcacactttgctgttgttgtgcagataagtcatagaaaaatagggaatgagggggagttgggtgttaatgatgatgggccatgagatataaagtggatggggggaaattgaagacaggagaggagctgtggggggtggtggggaagggtgggcctggtgggttgcagagctgagaagtggtaaagagttggcgtgagatacctgagtgtgtctgtgggtccagatgataggagggggtgctcagagagtagatgacttgaagatggtggtttaaaaggcaaccttggcagtgctggtcttgtcagagtgaagtaaaaggtgaatgaaggggtggtcagggaactgagagaccgagagccacatggatggaaatcactgaggacatcatgcctagtggcagtcaggctgggggagacccatggcacagtggggtggagtgcctgccacaaggcctgagcctcagcaagcaggggcttttccagcagttattttggcagcagcagtggggtgtgaggtggaccccagctccagttagcctgtaggggaagatgcagactcctgcttaaggcttgctggaatggctgagttcctgttcatgccgggatgggatggatgtactatgaaggtgtgggtctgtaggtcacagatctggaattcagaggggaggctggagaaggataccagttattttaggggatgtgttcagagcagtgtaggaatgaacatccagaaatccaggcagga

SEQ ID NO: 32562 - DNA, 1525 bp, Artificial sequence
  DNA replication origin
ccggggcggggctggcggcaggagacgccgcgttgagagcttgggctcctccgtgagccgccggcgcgcttcgctgcctggcggcctttccccgagccgagcccgcttcccgaggccgccagtcgtcgcctgcccgcgcctgcgcagcgtcccgggccgagagggccacggcggcggccatggcgcaccgctgtttgcggctgtggggccggggcggctgctggccccgcggcctacagcagctcctcgtgcctggcggcgtgggcccgggcgagcagccctgcctccggacggtgagtcctacctgggcgcccggcgccctccaccctgcctcgggcccacttccggctcgggagagcggacgtcaaggtcactggcccccgccctccggccgcacgcgggccgtccctgccgagggcctgggcgccctgcgctgtctctcagccggccccgggagcgccgattcgcgctcagccctgcctgtgggattcaagttttgaaaacgcgcagcttcagtagagccgggttttcgcgcttcaccggggcggttgaagcctcgaaggtcatgttggcttggtggccgtccttgtccccgctttcgtgtccccggagcacggaacgaaggcgtctgtaattttgagtcagcagcacgagcacgatgtagtcgcaaggacgggttttggagtcgggctgcctaacctctccgagtctccgtgttcccgtctgttgaatggggccattgcgggcattccaggactggcagtattagctattattattaagaatgtcaccttttcatagcagggactctgtgttcgttgcatatcagggcctgctctcagcaggaggctctttctctgttggtagccatccctctagatacacacacgggacctgatacgtgtttctgacataatgatagagtgttgacagaaccatggccgtgatcagtctcaatgaaaggttcacgtgtcgaatagtcgctctcactgtttaagtgacacggttcctcagccttgcactggtgtacgggtggtggttgaggtccccgggtcggccacgggaacctggcttggcctcctgctatcccagcgcccttgtagtcagctcaacgtcttcactgtaaggggagataggctagtgccggggctcacgcctgcgatcccagcacttagggaggccgaggcgggagaatcgcttgactccaggagttggaaaccagcttgggtagggtagcagaccctccgatctacgatttttatttttatttttattttttaagagacggggttttgcttcttcgcccaggccggagtgcagcggcgcaaacacagctcactgcagccccaaactcaagcgatcctcccgcctcagcctccggagtatctgggactacagcaccgtggttgatttttaaaaagtttctggagaggccaggcgcggtagctcacggctgtaatcccagcaggcgggtggatcacgaggtcagaaaatcgagatcatcctggctaacacggtgaaaccc

SEQ ID NO: 32563 - DNA, 1598 bp, Artificial sequence
  DNA replication origin
ggcgggggccagtgaccttgacgtccgctctcccgagccggaagtgggcccgaggcagggtggagggcgccgggcgcccaggtaggactcaccgtccggaggcagggctgctcgcccgggcccacgccgccaggcacgaggagctgctgtaggccgcggggccagcagccgccccggccccacagccgcaaacagcggtgcgccatggccgccgccgtggccctctcggcccgggacgctgcgcaggcgcgggcaggcgacgactggcggcctcgggaagcgggctcggctcggggaaaggccgccaggcagcgaagcgcgccggcggctcacggaggagcccaagctctcaacgcggcgtctcctgccgccagccccgccccggcgcgctgacgtcggcgtctcctctccgaggcccgccgcgacctccgccagtgcagaagacaggaccaaatgggaggagcatgggggcgggaccggaggcgggggccgacggagcagcgttgggggcgcggcaggaggcggggccgagaaggaccctggagggcaagggggagctagaggcggggaccgggccgagggaggactcgggagggcgagcgagagctgggggcggggctgatggcgcacgtggggggcgtggctggaggtggggccgaggaaggactaggagagcgagcaggagctggaggcggggccgacggaggggtgtggggggcgtggctggaggcggggactaaggggagacgcgtgactgggatcctgggcttccgagcctgggcagccgggtgggccagccagtaggagcgagggggaagtagcgaaggccccagcggcggcagatggaaggaccctccgagcgccagctgagtcatggggtggtgctaggctctggagacaccgaagcacacattcctgacccctgggagggcgatgcgaagattcacaagcagcagggaatgttggggctgtgccgtgcagcctgcgctctaggaaccctgtcggggaactggttctcggagagcaagtcgagtcttccaggtagtggaaactacacattgtttcctgtaccgtgacagcggaggaaaaaggagaggtctttgaactgaggtgggggacttgggggtttttctgagacgggctctcgctctgtcgcccaggctggcgacgctggacctcaggcaaaggacagtaatccttgagagacaggagacaaaaccaggtgagtcctgtgattaccccagtggcagtaaaacaataacaaaaagatataccagatacaccatcataccatgctcacacaaaagaaaactgagtagacaaatagattttagggcaaggaaattccaaagaaaattaattgcagggaaaagaatatcactaaggatgaagaggatcgggtttcttttccagagacagggtctcagtctgtcacttaggctggaatgccatggtgcaatcgtagctcactgcagcctctaactcctgggctcaagggatcctcctgcctcagcctcccaagtagctgggaccacacacgctcgaccacactcgactttttttattttgtgtagagttgaagtctcactttgttgccc

SEQ ID NO: 32564 - DNA, 1244 bp, Artificial sequence
  DNA replication origin
cccgccctggctgtcgaccaccagcggggcctctgtgcctgcagccaggcccctgcgcacgccgggggagaggccgtacccggcgcagagcctcgcccagaccgcggtcccggggaagcgcgcgtgccctctccgggacgccgaagttgcggtctgggaacggccggcgcggggcggggatctccgcgaggcccgctgtgaggtccggcctttcctggaccgctccagccgggctcgggagcaggagccggcgtctggacggccccaccgcggccctcagcccggcctcacccaaacacgtgctccgagctccagatcttcattgccgccggcgcagggcgcgggctctgcgatccgggccgggtgcttcgggccgcgcggctccgggcgcggcgtgggcggggcctcgatgggcggggcgcccttggatgccgcccaccccgtctggtggctaggctggctgcagcggctaaaaatagctctgcgggcgcggctgtggcgcagccccagacctgcgctgctaccctggggtgcgcgatgcgcgcttgctgcagatgccgcgggcgtaggaggcgacgctcgtccttactcccactgtccaaattctcccaaggccctgtccagctacgccggtttgtactgtcggggacgtgtgatgaaaaacaaacctgccaaccctcaaaactccactgcagtttgggtcttgaacaaacattaaaccagcatgtgaggccgggcgcggtggctcacgcctgtaatcccagcactttgggaggccgaggcgggcggatcacgaggtcaggagatcaagaccatcctggctaacacggtgaaaccccgtctctactaaaaatacaaaaaattagccgggcgtggtggcgggcgcctgtagtaccagctgctcgggaggctgaggcaggagaatggcgtgaacccgggaggcggagcttgcagtgagccgagatcccgccactgcactccagcctgggcaacagagcgagactccgtctcaaacaaaacaaaacaaaacaaaacaaaacaaaacaaaaccagcatgtgatgtgcatcacaagcaatccgccaaataggctgcaaagacagaaatctcagcctgtatcaaacagccgggaggatgcaacctaccccacgcatgctcccgaggtaaacgagacagccctccggggaggggactccactacaccatttgtcgcagagttcatcctaaattcgcctgatgatggagt

SEQ ID NO: 32565 - DNA, 1020 bp, Artificial sequence
  DNA replication origin
ggcatccaagggcgccccgcccatcgaggccccgcccacgccgcgcccggagccgcgcggcccgaagcacccggcccggatcgcagagcccgcgccctgcgccggcggcaatgaagatctggagctcggagcacgtgtttgggtgaggccgggctgagggccgcggtggggccgtccagacgccggctcctgctcccgagcccggctggagcggtccaggaaaggccggacctcacagcgggcctcgcggagatccccgccccgcgccggccgttcccagaccgcaacttcggcgtcccggagagggcacgcgcgcttccccgggaccgcggtctgggcgaggctctgcgccgggtacggcctctcccccggcgtgcgcaggggcctggctgcaggcacagaggccccgctggtggtcgacagccagggcgggggcagccggagcgggggcggccggggcgggggcggccggagccgggggggcggccgggggcctggcgctcgctgctctccttggggtcgggagcagggcaggggagaggcctgcaagctggcgcctttgctgagattgtcataaaccttccgcgcgtttcacggagggcccacggcgggctgtgagctctggaggaagctaaaggggcagaaggcatttcgggggccctggctctgaactcacttgtaggcatggaaggcctccaagctagcgtggaaaacctcgaactgtttaaaaatgctcccccggcacacggatggaagtggaggtcattatcttaagtgaagccaggcccagaaagacaagtatcgcatgttcccactcctaagtgggtgcttaagaatgtgttcacatggatgtggagagtggaacgtcagatgatggagactctgaagggtgagggggtgggtgcagggaggataatgagaattgcttaatgggtgcaagacaccttcccgggtaatgcataccctagaagtcctgacttgaccactacgaaatttatgcatgtaacgaaattgcacata

SEQ ID NO: 32566 - DNA, 1408 bp, Artificial sequence
  DNA replication origin
ccaggcggccatgcgcaagtacccgaacccgatgaacccgagcgtgctgggcgtggatgtgctacagcgccgcgtggacggccgcggccgcctgcacagcttgcgcctgctcagcaccgagtgggggctgcccagcctcgtgagagcggtgagcggggcgggggctgcggctccgaacgcgcccgactcccccactcccgcccccgccctctcccgcgtccctcctcccctcatcagtgcctctgctgctttggctgccatcggggtgggagggcggcggggggcctttcctgagatcagggggcgcggggtgggggtggcggtggggggaacttccccgagatcagggggcacgggctggggggctggtgggagggttttcctcgagatcggggggcgtggggtggggggtcggtggggggggatcttcctcgagatcgggggtcacggggtggggggacggtgggggggtcttcctcgagatcgggggtcgcgggaggctctgcctggcgcgtggcgtctggcatccccatctgtcctcccaaagggcccgggcctgctggattagcactgccaggcgcccctcctcctggtttaaccgcctctaaagcccagcgtccgcagccagccgcatcctagggcaccgggattaggcttcaccatggttcagccccccgtggcctcttcctcagagccagggaggtcgctggaaatgcaaatctgagcacggctcaccccaacccggcccctggatctcgcctccacctgcagtccacaccctggcctggcgcaggcctctcagtcagcccagctcctgctgcaggggcctgcacctgctgcccccagcctgacacccccaccccagcactatggtggtaccttcctctttggggctctgcccagactccgcccggcagaggggcctcctagctccactgcccgcagcctgttttattttgccgggagcatagtgctgctgcacgctccactctgttggaattcatttctttgctcagtggctcacctgctggagcggaagcgccctggacacaggggttttgtctctgtcccttgctgcatcccatgatatcatttcttgaatagtgaactaattagtaaatgcaatggtattcggtggtgatatgaagtagaatttttaacgttccactatgctagttttgctttgttttctagattttgggaaccagtaggacattgacatacatccgagaacattctgtggtggatccagtggaaaagaaaatggaactttgttctaccaatgtaagcaatggcctcagatgagaaacgggctcagtgtgtctgggtggtggtgcgtaaggccttcgtttaattctatttccagcccacctttggtctaggtgttgcttatttttaacagaaaggc

SEQ ID NO: 32567 - DNA, 1615 bp, Artificial sequence
  DNA replication origin
agagttggcgcgagtggccaggcctgtcctgacagggcgctgtcctttgggtgcatctgcatctgctgctgtgagcgaggtcctgtgcccacctcttcacttgccccaagccagtacatggccacacggctgcagccggccatttccttttagcagtggaagcctttctggcgtttccttgagcttcacgaacattccctggcttcttgtggcatcagcagctggacttctagtggccctgccccgacggccagcggccaccagggcctgatccccggggaggacgcgcctcccaccagaggctgtgctgcgctgctctgggctgctcgtccccatctgtcccccgtgtgtgtgggttcggggatccttaagaacttcgtgctgattttgcctgagtcactgaagccacactttgctctccttgaacccaagccaggggtggccatgggcctcgcctccttcatggccgcaccctgagttcagtgcctgtaaggagcttccttgcctggcatcctgtatctgtgtggtgtgtggtgtgtgctgtgtggtgagtatctatgtgtgtgtggtgagtgcggtgtgtggagtgtgtgctgtgcgtggtatgtatatatgtgtgtgtggtgtgtgtgtgtgtgcagcgtgtatggtgtgcatgtgctgtctgtgatgtgttgcatgtttgtgtgctgtgtgtgctgtatgttgtgtgtgtgctgtgtgtatatatgtggtgtgtgtgtgtggtgtgtatgctggtgtgtgatgtgcgtgtgtggggtgtgtgtgatgtgtatatgtgtgtggtatgtggagtgtgtgtgtgacatgtgtgctgtgtgatgtgtatatgtgtggtgtgtgtgtgctctgtgtatgtgatgtgtatatgtgtgtggtatgtgtcgtgtgtgcatgtttgtatgatgtgtatgtgattggtgtgtgctgtgtgtgaatgtgtgtatagtgtgtgctctgtgtaatgtgtatgtgtgtggtgtgtgtgcatgtgtgtgatgtgtgtgcatgcgtgtatgatgtgcatgtgtgtgatgtgtgtgtgctatgggatgtgtatgtgtgtggtatgggtgcatgtgtgtgaggtgtgtgatgtgtatgtgtgctctgtgatgtgtatgtatgtggtgtgtgtgcatgtgtctatgatgtgcatgtgtgtgatgtgtattgtgtgctgtgtgtgatttgtgcatgtctgtatgatgtgcatgtgtgtaatgtgtatgtgtgatgtgtatgtgtgtggtgtgtgcatgtaagatatgcatgtgtgtgatgtgtatgtgcggtgtgtgtcatgagtgtggtttatgtcttgagtgtggtgtgtggtgcgccctctgctcctctgcaacccgacccctggtgtctctgcagatgcttcccagaagaaaggaaagaaggaggtgaggagaggacgagcaaggacgggacggaaaagcacgtctggctgcgagggcacacagggccggggaggaggattaggctggactgatcgcgggtcgcaggtgaccccgggaccagatgtccctcccctcatgagcgtgcaacagggagcagccccagccagccccaccgccgccgtctg

SEQ ID NO: 32568 - DNA, 1725 bp, Artificial sequence
  DNA replication origin
gatctcctccaggctcagcgcgtcccgggagcccccggccgcgccgccggctgccccgggctcccgcggcccctcgccgcccactgcctcagtccgcggctccccgccgcccgccgggccagccgcctgagccatcccgcgggtgggcgctgcgctcggcagtcgcgccgtgtgccggcgtctcctcagctccggagcatcgtcgtcgcgcgccgccgcctcaccatccccggaaccgccgccgcccaacgcggccgcgcgcgccgccgccgggaccaggcgagtgcccgggaggcgtgggcaagaggagggcggcgaggacacggctgcagtcccggtcagacagccgccggccggtagcgacgcgatggcgtccggcgccccgccccgccccgccccgcctcgcgccgtccagcgccgcccagcgcccgccccttagggggccgcacgggccgggggatgcacgctctggaggtgaggaccaggcaggagggcctcgcctcgaggcgagatggccgcacggtctctagcccgcagggctctcagagtcgcaggcggtgacgcccggtcggggggcccggtcgcaagggacacacagctgggggcgcaatggtgagggcggcgacgcacggtccggaggggatgcgcggccgggtagggcgtgcagggttgtggggcgtgggggacacgcggggccgggcgcgcggtcggggggcgcaggggcaagagggtgtcgcatttatcagggaagtccccggccgactctggcggggaactgggcgcgccaacccgggtcaccgccctgcacagcgggagaagtcacccgcattgacgttccctaggcgctggatcgccgaaggtctggttgaaaacttgaacccgcctggagcggatgcctaagaaaatgcaggcccgctgaagcctccccgccgggccctgggccctgaaagcctccggcagtttcccgtgaccccgcggccgctctgcgcgttttccgatttcttgctggttgaatacctccctctccactcccatcttcagggtaagcaccgtaaagacggggatctttacgggttttcctcactgacttctcccaaaagctaaaccagcgcctggaatataaacatgtacataatttgcaggtgttagttttagcgtccttccggattcatttgtaacattggtcccttccctcactaaggtaatgtctcaagtaccacactcatcagagcatgtggaatgaatatcacagtggtaaaattgaactgagggcaattagccgtagaaagaaagaattccgcccccccaacctattaaatatgcaataaaacagataattcttaatcacccattggtagattaatttaatcgataaaattccactgaggctagtcctgtgtgaaagccctacagagtgttgaaagcatcaaccaaataggcaatgtatattaagttccagtaaaccttttacggcagttttatgtaaaatgttagaaatcacgctctcaacaattgcatcttgcggtagaaactacaacagtctatttaaataacaacagtctattaaaatgagataccatcttacatacagctgggaatggggaggagggagaaaagcaacaggacgaaaaggaaaattaagaaattgaaagagggccgtgcgcagtggcttaggcctgtaatcccagcactttgggaggctgaggcgggcagatcactgaggtc

SEQ ID NO: 32569 - DNA, 1324 bp, Artificial sequence
  DNA replication origin
gctgaaccccccacctccctcccggacggggcggctggccgggcggggagctgacccccccccaccttcctcccggacggggcggctggccgggcagaggggctcctcacttcccagtaggggcggccgggcagaggcgcccctcacctcccggacgaggcggcaggccgggcgggggctgatccccccacctccctcccggaaggggctcctcacttcccagtaggggcggccgggcagaggcgcccctcacctcccagacggggcggctggccaagcggggggctgacccccccacctccctcccggacggggcggctggccgggcggggggctgaaccccccacctccctcccggacggggcggctggccgggcggggggctgaccccccaacctccctcccagatggggcggctcgcctggcgggggctgacccccacctccctcctggacggggcggctgccaggtggagacgctcctcacttcccagacagggtggctgccgggcggaggggctcctcacttctcagacggggcggctgccgggcggagggtctcctcacttctcagacggggcggttgccaggtggagggtctcctcccttctcagatggggcggctgggcagagacgctcctcacctcccagacggggtcgcgaccgggcagaggcgctcctcacatcccagacggggcggcggggcaaaggcactccccacatctcagacgatgggcagccgggcagagacgctcctcacttcctagatgggatggcggccgggcagagatgctcatcactttccagactgggcagccaggcagaggggctcctaacatcccagacgatgggtggccaggcagagacgctcctcacttcctagacggggtggcggccaggcagaggctgcactctgggcactttgggaggccaaggcaggcggctgggaggtggaggttgtagcgagccgagatcacgccactgcactccagcctgggcaccattgagcactgagtgaaccagacaccgtctgcaatcccggcacctccggaggccgaggctggcggatcactcgcggttaggagctggaggccagcccggccaacacagcgaaaccccgtctcccccaaaaaaatacgaaaaccagtcaggcatggcggcgcgcacctgcactcgcaggcactctgcaggctgaggcaggagaatcaggcagggaggttgcagtgagccgagatggcagcagtacagtccagcttcggctcggcatcagagggagactgtggaaagagagggagagggagaccgtggggagacggagaccgtgg

SEQ ID NO: 32570 - DNA, 962 bp, Artificial sequence
  DNA replication origin
ggggggtcagccccccgcttggccagccgccccgtctgggaggtgaggggcgcctctgcccggccgcccctactgggaagtgaggagccccttccgggagggaggtggggggatcagcccccgcccggcctgccgcctcgtccgggaggtgaggggcgcctctgcccggccgcccctactgggaagtgaggagcccctctgcccggccagccgccccgtccgggaggaaggtgggggggggtcagctccccgcccggccagccgccccgtccgggagggaggtggggggttcagccccccgcccggccagccgccccgtccgggagggaggtgggggggtcagccccccgcccggccagccgccccgtccgggagggaggtgggggggtcaacccctcgcccggccagccgccccacccgggaggtgaggggcgcctctgcccggccgcccctactgggaagtgaggagcccctctgcccggccaccaccctgtctgggaggtgtgcccaacagctcattgagaacaggccatgatgacaatggtggttttgtggaatagaaagcagggaaaggtggggaaaagattgagaaatcggatggttgccgtgtctgtgtggaaagaagtagacatgggagacttttcattttgttctgtactaagaaaaattcttctgccttgggatcctgttgatctgtgaccttaccccccaaccctgtgctctctgaaacatgtgctgtgtccactcagggttaaatggattaagggcagtgcaagatgtgctttgttaaacagatgcttgaaggcagcatgctcgttaacagtcatcaccactccctaatctcaagtacccagggacacaaacactgcggaaggcctcagggtcctctgcctaggaaaaccagagacctttgttcacttgtttatctgctgaccttcccttcactattgtcctatgaccct

SEQ ID NO: 32571 - DNA, 1266 bp, Artificial sequence
  DNA replication origin
cttgtggtccgccgcgatgctgcgagccacaaacatggtttccgtcgggcccgcgcctccgaagaggacagtggcggcggcagcggcggcggcgcgtggcccgtagcctagccagacctcgcagcccgggagcgcacggcttgtgctgcccacgcccccgcaccgcccctgcctatcaagccccgcccacacaccctccggtccttcaagccccgccccacccaccggcccgtcaggccccacacagtcccctggcccctcaagccctgcccacgccccggcccgtcatgactcgccccaccttccggtccctcaagccccgccccgcccccaggcccgtcaagccccgcctaccctcccaccagagccgtcatgcctcgccccaccctcccgccccctcaagccccgccctgttcccggctcgtcaatcctcgtcccgcccccggcccgtcatgccctacgatcctggtgcgggttcctccaggctctgaccgttcggcggcggagggtgctctgcaaaaggcgagttacctgtgctgagaagtagtaagagcttattggtatactgtgcaaatgaagaaagatgaaaaagtgaagactgcctctcacggtcctcggccctgaatcatttaagtcgacgtttggatgtgtttccccccagacacatgcgaggcgcgcggagcaggtggagaagacgaaccgtgggtttggtcaggagccgcgctccgtcgggacggctgaagagcagggagggccggggagacgcctgaggggatgacaagcagtccaggctcggcagcctaagagcgaaggctggacggggaggaaaggatcagaagtagtagtttaaatgtgtcaagattttacaggtagaacaggcctgggggtgctaggagccaccacgggggtagggaaatagtatgaattagaagagtccgcctgtagaaacgtgtcatcccgggggaaggaagcggccggggaagtgggctgcttgctacccgggagccagagtcctccggggaaaaggaagtgaagagggccagagcccctgggaagaggcctggctcagatcaaggattctgccaaaaccggaaagtggaggagccaacgactcggggggttttgcttatcaggaaaaggcattctagagggcgtagtggtaaagttaggatgggagacagtggaagcttgcgtcaggggagcgaaagtacagaaaaaaaaaaaatgaggctgcagaagggacttgccctttggattttggccagg

SEQ ID NO: 32572 - DNA, 900 bp, Artificial sequence
  DNA replication origin
gcgccgccgccgctgccgccgccactgtcctcttcggaggcgcgggcccgacggaaaccatgtttgtggctcgcagcatcgcggcggaccacaaggatctcatccacgatgtctctttcgacttccacgggcggcggatggcaacctgctccagcgatcagagcgttaaggtgcgcgcggcgcttgcgggcggggccgaccccggaaggaaggaaggggagtgggtgggcggcgcggggaacggggctgtgtcttggttcagtgacgccgctggaagctgtggggtggcgggcgagccctggctggactgagcggaagccctccccgcccgcgtattgtggggtcacggcggcctcgcgggccgccctcccgtgcgcctgcgcagctggtgccacgtgcgcgctcccgcccgcagggtacgccgggccctctcccaggccgcgctgccggggctgcgggcgggaacccaggggcatcccaccgtcagcctcggcgtcgtgggtcttgcccgcgctgttcacccgacgacctgcagtgggacctggtgggagactttgcctggctggcgctgcgtcgagttctgtgccccgccggtgttctctcaccagggcacatggttttctccgtgggttcagagcagaagctcactttgttacgccgaggaagaaaaatacaaaccatttacatccaatgatttccctgcttgctgcccaggaatcggagggtttgtttcttgaagttcccgtaaacgtctgtagacacttccgacaagcagaatttcttttctttttttttttttttttttgagaccgagtctcactctgtcacccaggctggagtgcaatggcacgatctcggctcactgcaacgtccgcctcccgctttcaggcgattatcctg

SEQ ID NO: 32573 - DNA, 942 bp, Artificial sequence
  DNA replication origin
ccccgcccggccagccgccccgtccaggagggaggtgggggggtcagccgcccgtccgggagggaggtgggggggtcagccccgcgcccggccagccgccccgtccgggaggtgaggggcacctctgcccggccgcccctactgggaagtgaggagcccctctgcccggccagccgccccgtccgcgaaggaggtgggggggtcagccccccgcccggccagccgccccattcgggaggtgaggggtgcctctgcccggccgcccctactgggaagtgaggagcccctctgcccggacagccgccccgtccgggagggaggtgggggggtcagccccccgcccggccagccgccccgtccgggagggaggtgggggggtcagccccccgcccagccagccaccccgtccgggaggtgaggggcgcctctgcccggccgcccctactgggaagtgaggagcccctctgcccagccaccaccccgtctgggaggtgtactcaacagctcattgagaacaggccatgatgacaatggtggttttgtggaatagaaagcggggaaaggtggggaaaagattgagaaatcggatggttgccgtgtctgtgtagaaagaagtagacatgggagacttttcattttgttctatactaagaaaaattcttctgccttgggatcctgttgatctgtgaccttacccccaaccctgtgctctctgaaacatgtgctgtgtccactcagggttgaatggattaagggtggtgcaagatgtgctttgttaaacagatgcttgaaggcagcatgctcgttaagagtcatcgccactccctaatctcaagtacccagggacacaaacactgcagaaggccgcagggtcctctgcctaggaaaaccagagacctttgttcacttgtttatctgctgaccttccctccactattgtcc

SEQ ID NO: 32574 - DNA, 1069 bp, Artificial sequence
  DNA replication origin
tcccggacggggcggctggccgggcggggggctgacccccccacctccctcccggacggggcggctggccgggcggggggctgacccccccacctccctcccggacggggcagctggccgggcagaggggctcctctcttcccagtaggggcggccgggcagaggcgcccctcacctcccagacagggtggctggcagggcggggggctgacaccccccacttccctcccggacggggcggctggccgggcagaggggctcctcacttcccagtaggggcggccgggcagaggcgcccctcacctcccggacggggcggctggccgggcggggggctgacccccccacttcccttccggacggggcggctggccgggcggggggctgaccccccccacctcccttccggacggggcggctggccgggcggggggctgacccccacctccctcccggacggggtggctgccgggcggagatgctcctcacttcccagacggggtggctgccgggcggaggggctcctcacttctcagacggtgtggctgccgggcggaggggcttctcacttctcagacggggcggttgccaggcagagggtctcctcacttctcagacagggcggccgggcagagatgctccccacatctcagatgatgggcggccgggcagagacgctcctcacttcctagatgggatggcggccgggcagagacgctcctcactttccagactgggcagccaggcagagaggctcctcacatcccagacgatgggtggccaggcagagacgctcctcacttcccagacggggtggcggccgggcagaggctgcaatctcggcactttggggggccaaggcaggcagctgggaggtggaggttgtagcgagccgagatcacgccactgcactccagcctgggcaccattgagcactgagtgaatgcaactccgtctgccatcccggcacctcgggaggccgaggctggcggatcactcgcggttaggagctggagaccagcccggccaacacctacagttacttttaaattaatgtcatttttgaaga

SEQ ID NO: 32575 - DNA, 1947 bp, Artificial sequence
  DNA replication origin
gtttatggaaatcaagaagagagaatagttggaaatatcaaagagaagaaaatgctggggcatgatctgagagcagagtgcttatatgatggtgatgaatttgctgtatattgacataatttgaaaatttttattcattcattcactcaagtttattgagcgtctcgtgccagcactgttctagctgggaatgcagtggcaaaccaaatgggcaaagttcctgccctcatagagcttacattctaatgtggggagaaaaagagataacaagtgagttacatagcatgcaggtggtggtcagtactatagaacagagaaagcagggaaaggaggttgggaagtgccctgttcaaatctgtaggttgaggaggcaaggcctgacagctaagtgaacatttgcacaaagaactgaaagaagtgaaggtacaaaatgtgtgaatagctggagcatcaggggctgggcagaggtcagagctagggtggaggtcctggagcggagctggcttagcatgtttcaggaacagcagggaggttaggatgactggaatggagtgagcaagggagaagagtagaggagacgaagtcacagattatctgggccctggttggccatcttaaagactgccttttactctgaataagatggggaaccagtggagggagggtttgagctaaggagtgaggacgtttcagtaatgttatagggtgactttcgtgtgtggagagtagactaggggaggcagagaggaggcctggagaccaaaggctattgcagtgagtgtccaggcaggaagtggtggtggcctgaccaaggtcatagcagggttggggggtaggttggggggatgcagcaaggtcctgggcaggttgttaatgtataactctagagatttgcatagggattgcacgtgatggggtgtgagagggatctcagagatgactacggtttttggcctaagcagctaggtgttggagttgtcattttcgctggtggggaaggctgaagggcaggcatttcttgaggggatgggaattaattggaatcaagattcaaatgtaggtgcttgttagacatctaagtggaagtgttgtggaggcggttgaatacctgaggttcggggaaaggcccaagatggaggtgtacattttacgtgatattttaagctttgaaattgaaggcaatcacccagagagggtgagttgatggaagaagttgaagatcaagccctggaggcttccactctgtggaggtctaggagataaggaggaactggccaaggagaagggaaagcagcagcttggtggagttggaggagaaccagacagctgtgtctgagaaatgaagccaagaaagtatttccccaaggaaggagtaatcacctgaatgttaggctacagaagaaggaccggaggtagattatagtatgctacggcttggcaacagggagatcagggctgatgctgacaagcatttttttggtggtgtggtgggatgaaggccagagtggggtgcgttcaggagaggatgggagtggaactggatgccagtcatgattcctctggaagcctgtgataaagggagcatggataggtgtggtggcagttcagggggataatgggggtgtgaggtagaggaaggctttttttaaaaggtgggagaaataacagcatgcccagcgtgggagggcttgcacagacagaagactcgatcatgttatggaagggggccgattggtagagtggttgtcagtgcagtgaggggttgggatcgagtgcaaagtgaagaggtgggcttcagacaggggcatggacacttcataaactgttgtgggataatttaggaatcagaccgaggggttgaggaggatatattatttaggtgcaccggcccagtcggattaacatccaaaaagtctgagccctgaacaagtctgagccctgaacaaa

SEQ ID NO: 32576 - DNA, 877 bp, Artificial sequence
  DNA replication origin
cggccgccatcccatctaggaagtgaggagcatctctgcccggccgcccatcgtctgagatgtggggagcgcctctgccccgccgcccagtctgggatgtgaggagcgcctctgcccggccgcgaccccatctgggaggtgaggagcgtctctgcccagccgccccgtctgagaagtgaggagaccctccgcccggcagccgccccgtctgagaagtgaggagcccctccgcccggcagccgccccgtctgggaagtgaggagtgtctccgcctggcagccaccctgtccgggagggaggtgggggtcagcccccgccaggccagccgccccatccaggagggaggtggggggtcagcccccgcctggccagccgtcccgtccgggaggtgaggggtgcctctgcccggccgcccctactgggaagtgaggagcccgtctgcctggccaccaccccgtctgggaggtgtacccaacagctcatcgagaacgggctatgatgacaatggcggttttgtggaatagaaaagggggaaaggtggggaaaagattgagaaatcggatggttgctgtgtctgtgtagaaagaagtagacatgggagacttttcattttgttctgtactaagaaaaattcttctgccttgggatcctgttgatctatgaccttacccccaaccctgtgttctctgaaacatgtgctgtgtccactcagggttgaatggattaagggtggtgcaagatgtgctttgctaaacagatgcttgaaggcagcatgttcgttaagagtcatcgccactccctaatctcaagtacccagggacacaaacactgcggaaggcctcagggtcctctgcctaggaaaaccagagacctttgt

SEQ ID NO: 32577 - DNA, 1165 bp, Artificial sequence
  DNA replication origin
aggcagaagaatttttcttagtacagaacaaaatgaaaagtctcccatgtctacttctttctacacagacacagcaaccatccgatttctcaatcttttccccacctttcccccttttctattccacaaaaccgccattgtcatcatagcccgttctcgatgagctgttgggtacacctcccagacggggtggtggccaggcagacgggctcctcacttcccagtaggggcggccgggcagaggcacccctcacctcccggacgggacggctggccaggcgggggctgaccccccacctccctcctggatggggcggctggcctggcgggggctgacccccacctccctcccggacagggtggctgccaggcggagacactcctcacttcccagacggggcggctgccgggcggaggggctcctcacttctcagacggggcggctgccgggcggagggtctcctcacttctcagacggggcggctgggcagagacgctcctcacctcccagatggggtcgcggccgggcagaggcgctcctcacatcccagactgggcggcggggcagaggcgctccccacatctcagacgatgggcggccgggcagagatgctcctcacttcctagatgggatggcggccgggaagaggcgctcctcccttcctagatggaatggcggccaggcagagacgctcctcactttccagactgggcagccaggcagaggggcccctcacatcccagatgatgggcggccaggcagagacgctcctcacttcccagacggggtggcggccgggcagaggctgcagtctcggcactttgagaggccaaggcaggcggctgggaggtggaggttgtagcgagccgaaatcacgccactgcactccagcctgggcaccattgagcactgagtgaacgagactccgtctacaatcccggcacctcgggaggctgaggctggcagatcacttgtgtttaggagctggagaccagcctggccaacacagcgaaaccccgtctccaccaaaaaaatacgaaaaccagtcaggcgtggcagcgcgcgcctgcaatcgcaggcactcggcaggctgaggcaggagaatcaggcagggaggttgcagtgagccgagatggcagcagtacagtccagcttcggctcggc

SEQ ID NO: 32578 - DNA, 1250 bp, Artificial sequence
  DNA replication origin
actgaatacaggaatttgcttatttattttattaaaaaaatttttttgagacaaggtctcactgtattgctcagcctggctcaaactcctgaccttaagtgttcctcctgactcagcctcttgagtagctaagactagagtcatgcgccacagcacccaactctggaattaattttaaatccaactttgctacctgattgtatgacctttggcaaaatgctcgcttagtttaagccttactacctgtaaaatgggaatgtgtacctttatgaagattaaatctatatatgtacacacacacacacataacatctgttacatggcagacactgcattaataatacagtaggtaatattactgttaatcggagtagtattacagtttcttgtgtcttgctggtgtatttttctcagtgacagacagaaaagatccaaagaaaaggaaacccagataattttggctacagtggatgttttataataagctgtttttaaactacatcttgtcatatttaagcaacgtagtcaatcatacaatatgatccctaaaatttgtggggtgtggttgtagttgagggttgtgtgggagatgatgatggtagttgtcagtggtggtggtggtggtggtagctgtgtggggtgtggttgtaattgaacattgtgcagaagatgaccgtagttgtaagtgggagtggtggcggtggtggtggtacctgtgtggggtatggttgtagttgagggttgtgtgggaaatggtgacagcagtggtgagtggtagtggtggtggtggtagctgtgtggggtgtggttgttattgagggttgtgtgggagatgggggaggtggtggtggtggtggtggtggtggtaggaaatggtgatggcagtggtgagtagtggtagtggtggtggtagttctgtggggtgtggttgtaattgagggttgtgtgggaaatggtgatggcagtggtgagtggtagtagtggtggtgatggtggtggtagctgtgtggggtgtggctgtcactgaacattgtgcagaagatgatggtagttgtgagtgggagtggtagtggtggtggtagttgtgtggggtgttgtagttgaaggttgtgtgggagacggtgatggtagtgatgagtggtagtagtaatgggggatcatagttgtatatatttggttgaggtgtgggaaaaatatgagcagaggtaattattctatagtataaagtcaggtagcatgatgcctccaga

SEQ ID NO: 32579 - DNA, 1364 bp, Artificial sequence
  DNA replication origin
tgccagaaaatgcccagaggagcggggcggccccagagcctcctttcggggcgcgaggcccggcgcgtgtgtacggagtccagtccccccagggagtggggtgcccgcaccttcccctccgcgctcggagccacaggggaggcccgggcagaagcgaaccgtcgccaccctggcggggcctcgtgactgcgggtgcagaactgggggtccccgccggcgcgtgtttcaggggtcctgaggcgcgcgtctgcggggttcccaggcagcaccaagaggcgccggcctaggagaaatccggatcgagacaactgctgtggcggctgggccgaggctgcggtcgcggtgggaggcggcgctgctggcgagtccacgcggggcggacggaggcgaaaacagcccgctttcgcggcgcaggcaaaagcaggaatggcgacccctctgcggggggacctcaggaggaaacgtctggcttggggagtccgcgctcggcgcgagctgtgggggcggccgggcgctctgggggcagttcggtgctccgagctcagcctcgtcttgcttttcaggggttggaggcggaagggggcaacggagcgagcccacttccgatgcacagaagcgcaggtggggaggaggcccggctggggaggctggtccccgccgcagccccgctgcccctataccttggctccagcgccagagctccgccgctgcgcccctggctttttgcctctaccccctaccctctgccgtccctctcctcctaaagccagtccttcctgtttctcctgggggcttccccagggtgctcatatatgtcccggcacccccgctctggcgtaaagaaagggcaccgccgcagggcggcctgagtttaagggtctgtccaccagactcatggtactttaccgctctgtgcctcagtttcctcatctgaaaagtagagctcatattagccctggggccttgtaggtggtgaacatcaaatgaactcatacaagggaaggggtcgtgttaccggtagagggtcctaactgcaagttgtccaggttggcgttttgaacaaagaattggacaaaacgtgctgcaaagcaaggaaaaaaggaagcaactaaagcagggatttattgaaaacgaaagtagtctccacagtgtgggagcggcctgagcaggctcaagggctgcgttatacaatcttctcggtccaaatacccgctagaggtttcccattggccactcatgtgctcccttcatgtaaataaagtggtggcccataatcggtctgattggttgcggaaagcagccaaccagaggctgaagtgaagttacaaaggtcacactcctgcgcaaacatctgattggttgca

SEQ ID NO: 32580 - DNA, 1048 bp, Artificial sequence
  DNA replication origin
gcgcggggagagaggggacgcggcgctgcggccgccggggaggtgtcccgcctccagtcgccggaggggggagtgtcccgcctcccgccgccgtcgccgccgtctgtctccagccgtgactgcgcgccgcggctgtgtctgtctccaactcctccagtctctcctcctccttcccactccgcggtggggacccggcgcgcggccaggccgcgggtaccggggccgccgtggcgggggctcaggggtccccggctcacaggctgcgccgacccctgcggggggcgggcccggaggccgggggtgggcagtgggggaggcgcgcgggcgccgaggccgcgggacccggggccgcactcccgcccagggctcgggcccgcgtggcgcgcgcccaccgccggccgcacggggaactccaagccgagcgcagagtacgctgcaggggcgcccggaggagccggctcgctgcccgcaggccgggggcggtttcgggaggctgggggcgcgttccagcacagagtacctcgcgggctgcgtgtgcaccacgggccgcgggacctcgggcagccgcctagagacgtgcagtcgggcggcaggacacttagtaggacggagcagtgctcggcgagccttgaggagcttgaggcgcccccggaccccacctggtcgcccccttagtatcctgccctctttaaaggaaatggctcctgcctagaaggtcagatggattcttcgcgctgtgaccctttctccttgaaggacctacacctcctgtgaagaccatttcggacttgacctccacctgagtgcagactttgttcagaagtacacgcattgcctccagccacccctaccatgtttgatgggggattggttactgccagagcatatgagcattttaacccaattttattgcagtcaccaaaattagttcgcctctgccaaaattaacccccctgcagacatatcaaaatactacactaagcaggggtttcaggctgggtttaagatagatgcagctgattaaaggagtgaacattttcaactgtcc

SEQ ID NO: 32581 - DNA, 828 bp, Artificial sequence
  DNA replication origin
gagccgtggcgggcagggactggaggtcagcgggaagcgggaagatcctgcaggacctgaccggggagtttgcgggaaggagggggcgggccaagccccgcagcccctcagtcccgcatcctgcaccgcgcgctccccggccccggcccctcgggcccgcttcacccggcgtccccccgggtccccccgcgcgcgttgacgtcggtcgcgggaccgcccggagctcccggcattggctgggaagtcgattgtctggggctgctgctgttgcacttaggctgggtctccgagccccggaggaagcaggcgtgtgttgaatttctctctgcccctcaccttggaataaacaggaagcgacaagcacccagcccggcccggcacttgcctttgtgaaggggtctgccctgcacagcctttaggaagcttcctcgggaccccttcccggtgcgccgccccgggtgggcctgggggcgcgccctgtgagtacaccggtggaagacagtgggttcggtttaggttaaatcgctatcgtggcggagagggcatttgcttgtttaaacttttttttttttttttttaattggaaaaggagaaggtttcccgatgaggcagaggttttcaggacgacagggacgcatggtgggtgggcggcactgggggaaggcgcatccgagagtacagcgttcttgggtcacctacctggagggacacctcgtcgccagtcagggcagctagaagctctttaaagcaagcaggactccttagctctgcccaggcacaggaatggttgctgtgtgcccatagccgcatgaactagcatgatttttg

SEQ ID NO: 32582 - DNA, 1415 bp, Artificial sequence
  DNA replication origin
tgcagatgaatgagtagatcagtgggtggatgttaggacagatgggtggatgaatggatgggtgggtaggtggattcgtgggttggatgggtggatgaatgggtgcatgaatggatgaatagatggatgggtgggtagatggatggatagaagaatgagtgggtgagtggacaggaggtagatggattaatggatgggtaggtggatggatggatgaatggatggtggattggtgagtggatgaatggatggatagaggaaagaatgggtgggtgggtgggtgggtgagttcatggtggatagatgaatggatggatgggtagatggtggttggggagatgatggatggatggaggaatgggtggatgggtatatggatggatgggtaaatggatagatggatgtgtgggtgcatgagtgggtgggtgggtgggtggatggatggatgaatggatggatgggtgggtgggtggatggatagagaaatgggtgcataggtgcatggatggatggagagatgaatgagtgggtgggcgggtggatgtgtgggtgggtgagtgagtacatggtggatagatggatgggtggatgggtaggtggtagctggggagatgatagatggatgggtagacggatggatgggtaaattgatggatggatgtgcgggtgcatgggtgggtcgctgggtgggtggatgggtggatgggtaggtggtggctggggagatgatagatggatgggtagacggatggatgggtaaatcgatggatgaatgtgcgggtgcgtgggtggctggatggtggatggatgggtgggtggatggatagaggaatgggtgggtaggtgcatggatggatggacagatgaatgagtggatggatggatgatggatgggtgggtgaatggatagaggaacgggtgggtaggtgcacggatggaaggacagatgaacgagtgggtggctgggtgggtgtacaggtggctagatggatggataggtgggtgggtggatgggtggatgctgatataaagtttcaaatgctgttcccacattttgtctcattaatcctcctcataggttgagagatattccagtgtccactctacagaagttagtgacgtgcccaaggctaagagctggaagtggaagaggccggggacaactcagctccttggctctcacctccaaggggccctgcctcccacaccatgctgcccatggaaaggtggcctactcccttggaaagtccagctgtaaaacactcccaaagaaaacatggcctgactggaaaactaagatcagctggagtcagacataaagcctttaagtgcttccagcatacaaaacagccccaagacactcagctgctgcagaactgagatgtggaaatgaaggcacaggggcagagcaggcg

SEQ ID NO: 32583 - DNA, 1536 bp, Artificial sequence
  DNA replication origin
tgcctgggacagagcgatttcagcaaatgtttacagaaatcccagtttagttcaagttgtgagctgagaatccttgctgttggttttaggtttccagcctcaggccttcagaacctttgggggttgtatccctaacctcagccgtaccctagaggccaggtcagcagagtgagtgataagcgcactcgttccatcaaccgtgcggttagaaacgtagaggttgtcattagaaagtgcagtctttctatcctacttttgaatttcagggaggagcttcaggatttgtaaagacttcatctatattgaagactgcccaagagttatggcttacccggctgcaggcagcatgccacctgtatgcagtacctgtgctgtgtctaaggaggaagggcgacttggtggtgggggcgggggagaggcaggactgcgagtgccaccagagcttgagagagcaaagaggaacagaggagatgggggtggagctgtgcagagcagggcacatgtgcggctctgtgtgtagaaaatgagtcccgtgtggctctgtgtgtggaaactgagtcccgtggggctctgtgcgtgggggctgagtcccgtgtggctctgtgcatggaaactgagtcccgtgcggctctgtgcgtggaaactgagtcccgtgtggctctgtgtgtggaaactgagtcccgtgcagctctgtgcgtggaaactgagtcccgtgcggctctgtgcgtgggggctgagtcccgtgtggccctgtgcatggaaactgagtcccgtgtggctctgtgtgcctgggggatgagtcctgtgtggctctgtgtgtgtggaaactgagtcccgtgtggccctgtgcgtggaaactgagtcccgtgtggctctgtgtgtgtggaaactgagtcccgtgcggctctgtgcgtgggggctgagtcccgtgcggccctgtgcgtggaaactgagtcccgtgtggctctgtgcgtgggggctgagtcccgtgtggccctgtgcgtggaaactgagtcccgtgcggctctgtgcgtgggggctgagtcccgtgcggccctgtgcgtggaaactgagtcccgtgcggccctgtgcgtggaaactgagtcccgtgcggctctgtgcgtggaaactgagtcccgtgcggctccgtgcgttggggctgagtcccgtgcggccctgtgcgtggaaactgagtcccgtgcggctccgtgcgttggggctgagtcccgtgcggccctgtgcgtggaaactgagtcccgtgcggccctgtgtgtggaaactgagtcccgtgcggctccgtgcgttggggctgagtcccgtgcggccctgtgcgtgggggctgagtcccgtgcggctctgtgcgtggaaactgagtcccgtgcggctccgtgcgttggggctgagtcccgtgcggctccgtgcgttggggctgagtcccgtgcggccctgtgcgtgggggctgagtcccgtgcggccctgtgcgtgggggctgagtcccgtgcggccctgtgcgtgggggctgagtcccgtgcggct

SEQ ID NO: 32584 - DNA, 1745 bp, Artificial sequence
  DNA replication origin
ggtgtcacacagaacagtcctgttgctgtccacagggaagtcctgtggctgtgggaaggaggttttgcaatcccctccagccccactccgttacaaccagtggaggtggaacttggaatctttgaaataaactcctcagatgattttggttcacacagagtcagaaccgctgtggcagcgtgagggagttttgtcaggtggtgtgattggcaggtggggcagaggggcctgggagatgaggtcccgctgtgcagaacacacggggactggcaggcaggaaagggggcgagggggtctcaggcattgaactgcgtggggcactccatggggcagaaaagagcctggcaggttttggaggtgcactgtatgctcaggaaggattcagtgcacaccaggcagcttccgtccaggcggagagccagggcccgggtgctgcagcaaggcggctgtggcagtgccaagcgagtggacagagggtctgcaggccactcagtggctgagagggtgggcaagcagctgcagggccaggtagccccatctgctgtcaaggagtgtgccgagaggggacagccgggcacgggggcacacgttgtcaagggatataccgagaggagacagccgagcccggggggcatgcactgtcaaggtgtttgctgagaggggacagcggggcctgggggcacgtgctttcaggggatgtactgagagagaggggacagtggggtgtgggggtgtgctatcaaggggtgtatcgagaggggacgactgggcatgggggcgtgtgcctgtggtcacagctactcaggaggctgaggcaggagttttgcttgagcctgagaagtcgaggctgcagtgagccatgacggcaccactgcagtcctgcccaggtgacagagtgagacctgagaccctgtctcataaaataaaataaggaacagatgtgggaggaagggtctgtttttggcttcttagacctgggtatatctgggggtggtgcgagtgagcctttctaggaggcagctagcagataaaggtgtggagcccaggggatgcttcctgcaccaggcgacaggtttggtggcattggcgcacggttggcgtggaagccaagtttctagagggagccgacaagaagctgagtgtgggactttgggggatgagctaaggaggaagaaggaacaagagaggaagaacagaagagtcgggggccctgcagagaacgggggcctgggtgtctgaagagcaggcgtgggctcagcactgtgggcatgtgaggtgtgcactgccccggcctgtctcagggatgcctgctttctgtgtagggagctgcagttatgcacagccttgcctacaccagaacttcatatttaaagtgaacacatactaaaatcataggcataaagcagctttcccaccgaaagcaactctgattttatccatccattactctacctgtccatctcccctgggggtgagcctgctgtgtgtcggatgcccttccagggactcacagagtgcctcctgcacctgcgtcattgagatttctccagtcacttttatgtgggtttgggggaccaggttgtttgggagcatcttcagttttggaggatgctcatggccaaaggctcacctgaactttgtgtaggctgtttgatgactagcttaatttgcactcttcctgaattccttcttccatacactttggcactctgataggtttcaagtcccatctttgttacctgggg

SEQ ID NO: 32585 - DNA, 1229 bp, Artificial sequence
  DNA replication origin
gtggcagggctgaagttcagctaaaagccctatcaaaccggatataaggaaccagaggggatgtcttgtgctggagattgattcccacgagcagagggccccgggagctaagctaaaatcctcaacctctgcagcccatgcccccacccccacgccagctccccaccccacgccaacttccgcccccacgccagctcccgcccccacgccagctccccacccaacgccaactcccgcccccacgccagctcctgcccccacgccagctccccacccaacgccaactcccgcccccacgccaactcccgcccccacgccaactcccgcccccacgccagctcccgctcccacgccagctcctgcccccacaacaactcccgccccccaacagctccaaccccaacagctcccacccccacaacagctcccaccctgccagcccccacccccacgccagcccccacctccacacctgcatgtgatgtcatcagagctatggcagctaactgtgcagatcgtgatgacactcagactgtacactcctgggacagaagtatggcatgacaactattaaatatttattaaatgaacccctgatttttatgaggcctttctgtatagtcaacttcaagaagactatgaaagaagacggggaagaacatttatcgagcaccactataagccagactgtgttttggtactttacaaatgttatttcacttaatctttatacagaacctactcactggccattatctctacctcagtgtggtaaagagtgcacttcagagaggtcagctgatctatcagtgtcacagagcaggaactggggcgtgaccggggcaggctgctcctcctggaagcaatgccttccccagcctctgagctcatctgccaacagagagcacaggagaatccagtattaaggactccagagacatccatacactaacagaggaagaggctaggacccaagaaactacaagaggccacgtatggaagcagtcacctgctttctgcacatgtttgatttctccagagctaagtggctccatttcagggataactacaacatccaagtttcagatgtacaatgaacaaaagcccccattttccaaagaacctaatgagacatgcaagttgctttgatcctggatactcagtggcagaggattcatctcaaacaatgctcatacttactgacagtagagccagcattcaaactggtc

SEQ ID NO: 32586 - DNA, 1456 bp, Artificial sequence
  DNA replication origin
acacagtctggcttatagtggtgctcgataaatgttcttccccgtcttctttcatagtcttcttgaagttgactatacagaaaggcctcataaaaatcaggggttcatttaataaatatttaatagttgtcatgccatacttctgtcccaggagtgtacagtctgagtgtcatcacgatctgcacagttagctgccatagctctgatgacatcacatgcaggtgtggaggtgggggctggcgtgggggtgggggctggcagggtgggagctgttgtgggggtgggagctgttggggttggagctgttggggggcgggagttgttgtgggggcaggagctggcgtgggagcgggagctggcgtgggggcgggagttggcgtgggggcgggagttggcgtgggggcgggagttggcgttgggtggggagctggcgtgggggcaggagctggcgtgggggcgggagttggcgttgggtggggagctggcgtgggggcgggagctggcgtgggggcggaagttggcgtggggtggggagctggcgtgggggtgggggcatgggctgcagaggttgaggattttagcttagctcccggggccctctgctcgtgggaatcaatctccagcacaagacatcccctctggttccttatatccggtttgatagggcttttagctgaacttcagccctgccacctgcctgtgctgggctgataatcgcctctcttccagagtctcatggagtcgtcacaggccaagggtcttcaaacttggctagaagtcaagtcccgggtctctgtgttttttcaggatactatgtttaaatgggggaacccagaaatgggatgcaaaaataaacaagtgtaacgtctgggtagtggtttatggttccgttaaaattttttaaccaataatagtccgtatgggagtatggactctttttcctctcaatttatgttggcatttgtagaatactccagggtggtgtgagaaagacatctcctggttcaagatttcctaggggcaaaaaaagaatacaaaataataacgtggtgccctagctgggcgtgtaattctgtgctctgttagcacaatcagccttgctgtcctttgtggatgctcaagtccctgatataaaatgatggtgcatatacttagaacacacagacatccactcatagactttacatcatctctagattacttatgataccacatacaatataaatgttgtgtaaatagttgttatactatattttaaaaatttgtattgttttttattttttagacagggtcttgctgtgtcacccaggctggaatgcagtggcgccatcgtagctcactgcagtctcaacctcctgggctcaagtgatcctcccgtcttggcctcttgagtagcttggactacaggcacatgccaccacatctggctaattgtttattttttgtagagacggag

SEQ ID NO: 32587 - DNA, 1110 bp, Artificial sequence
  DNA replication origin
caaggcctagtaccttgcaagtggaagcagggattgaaaatatccacgtgatgctggcagcctgcatgagaagacaaaggaaaagactacataaggctggtgcccacaaactgcctgtccttcccatgtgtgtttagactgccataaacacccaaaccaaccaaagtagaagcctactctggtaagcatttattctgggaccagcagtgtgataggcttttactgtgcgtgtgaccagtcagggcttcccagtgctgcagccctggagggacagacctttggcctctaaatatccatctgctgtgtaggaaggaccagtcctgccaagcacagaggaaatgtggagtgcttctggccggccctaaagacatgtaagtgtgtgagcaggtgtgagtctgtgtgtgtatgcatgagatgtgagtatgccagagtgtgtgggactgtgtgtggtatttgtgcacaagtatgtgtgagaatgtgtagttgtgtgcacaagtgtgtgggtgtcagagagtgtgtgtgagtctggtgtgtgcatgcatgtgactccatgtggtgtgtgcatgcatgcgtgggtgtgccatgggtggagtgtgtatgcaggtgtatgaatatgtccatgtgtgtgagggtgagtctgtggtgcgtttgtgcatgaatgtgcacgtgtgtgtataagagtgcatctgtgtacatgtctatgtgtgtgtttgtgcatgtgtgtgtgtatgcgtgagggtctatggtacatgtattcatgagtgtgtgtgcgtgtgtgtgtgagagagtctgatgcatttgtgcatgagtgtgtttgcgtgtgtgtgcatgtatgtgtgtaggtgagggtgtgtgatgcatgtgtgtgtgagaatgtgtaggtgcatgtatgtgtgtgggtgtgtgcatgtgtgggtgtgtgtgtgtgtgaggttgagtctctggtgcatatgtgcatgagtgtgtgtgtctgtgtgtgagggtgaggctgtgtggtgcatgtgtgcatgagtgtgtcacctggagtcaccaccactcactgcctgtggctttaggcaagttgttcagcctctgtgtacctcgattttctcatttataaaatgaggataa

SEQ ID NO: 32588 - DNA, 1041 bp, Artificial sequence
  DNA replication origin
ttcgtttgcaaatcctccgtggagacccagggagagactgcaggagttgcttcttatttcttgaccagggtttccgctcccatcaccgtggctttttggggagccttgctggtgtgttcctgggatggctgtggcctgccactgtgtcctcttacacaggagtcagccctggatgagacctgcagccctgtggccttggactcccacctttcccccaggctgggtccctcaggcatggccctttcccccagtgtccccttaggcatggcccagtttgcttggtagggcctgacactcttcagatggtgaagtcagaaagaaaggaaagtctaaaggagagaagcagctcagagaagggagaagagggtttgggaggaaagggaaagaggtgttgagaggttatgacgcccaggagaggtgaatgcagggagggaatggaggggcccaaggagtgacaggcagacggggtctctgatccgggggtgctgggcctgccctgcaatctgagtcacaaaagccagtggggaaagacaaggcaggcattgggtgtgcgagtgggtgtgcatgtgtgtggctgcgtgtgtgggggtgtgcacgtgtgtggctgtgcatgtgtatgggtgtgcatgtgtgtgagtgtgcatgtgtgtgactgcatgtgtgtgggtgtgcatgtgtgggtgtgagtgtgcatgtgtgtgactgcatgtgcgtgggtgtgcatgtgtgggtgtgcgtgggtgtgggtacgcatgtgcgtatatggagtacgggggaaggagatgtgggtaagggtttgtgtatgggagggtgtgtgggtataagtgtgtgcatgtgagggggataggtgtgtatatatgtgtgtgcatatggagtgtgggggagataggggtgtatgtgcgtgtgttggtatgtgtatgtggggggtaagtgtgtgtgtgtgcgtgtgcgtgtatgtgcacgtgttgtgtgtgtgcgcctgcacacggagagcccactcatacgtagcagaaaatcaaatggccccaaatcagaaacatg

SEQ ID NO: 32589 - DNA, 744 bp, Artificial sequence
  DNA replication origin
ggtctggtctgggactctgccttgggaacagtttccccagtgactcctgcctcctctgctcatccagccattcagtggacactccgcaggagccaggcactgagtaggagggggaaacagtggccatgccccgcctccgccaccagcagcacctgcagtcccctggcggaggccaagaccccgctgccattctctccatcttcctaggggaggctaggggtctggctggccgattgtgcctttgggatgggggagtgtcaggcgtgggagctgtaggaggtgtttggggcaggtatgaggacctgtgtctcctccgtccccatgcctggcctggcccatgtgcagttggcgagggcagttccaagttccccgccttccccatccctaggtgaccacctgtgtcaggaagccccctcccaaggggcttggaaggggctgggaaggcacggctggctggtcagcatggcagggagggccctgtgccccctggcagagcctggcagtcctctgtctcctgggctccctgtgctgctgtgcaggcctgtgctccagggcaaggcggctggggaggatgagtgtgtctgggcagatgctgccatcctcatggcttctttccagttatcagggcccctgcaagcccctaagcacctcttcctttctcagcaccaatgtccgaggcctttctcctgcagcacccgaggccctgggagtccaggccctggcggcggctcagcaccctccagt

SEQ ID NO: 32590 - DNA, 899 bp, Artificial sequence
  DNA replication origin
ctagttttcattttcatccagaaatcactacttccaccacattcaggcccagtaacatccattccttgggcccccctgggacacacagtgtctaccgcatggcgacaaaggttgactggctttgggacacccatcacgttcatgcagcatgcactgtcccaggccaagggacatgggaggaaggtgccagtgtcaggaggatgctggtagaggggaggaggttgctggtggagggaggagggctctggtggggggaggagggctctggcggggggaggagggcgccggctgaggggaggagggtgctggcggggggaggagggtggtggcagggggaggagggctctggtggggggaggagggtgctggcagggggaggaggcctctggcggggggaggagggcgccggctgcggctcctcacctgcacctgcacaggagcacaccctatgggacagggaccagaactggctgagctgggcactccctcaggaaggggccagagaaggcagcggggcagtcaccacttctcagaacgggactctccgcaagaagcagagaagccagggccacagtgatgctgtctggttaagcttggtctggcccttccttgtggtcaaagtggaaaacctgtagaggaggcgaggggccgctcatagcagggcgggaagcttcctcagccaagtaaggctgctggcctgctcatcctcctcctccaaaccaaaactcactcccatcctattgccccaagctatgtttccacctccactctccaggcttccagcagaaagacgtaacagtaagtttaatcagagtgtgaagcctaatcacctagaagttggttaattcaatgcccagcacttctcacaccaggtttaaatagaacatcattttctaatg

SEQ ID NO: 32591 - DNA, 2278 bp, Artificial sequence
  DNA replication origin
ttacagctgagttccagctcagatatatcggtaaattatgcaattatactaaacatcatatcgagctgtgttaaaaactcacggggcaagctagctgccgccccgctcacttccacatgcagcggaagcgcgattttgcatttattctcaggatctcaaggagatagaaagttgtggctatttaccggtgctcctcctcgcgggccgcggcgctcagcccgggcccccggcgtccccgggatccgacggccgtgcggcgctcagagccagccccggacgggcctctcccccagctaggcggctgcggctctgcggggctttaagcctcctgcctgcccgcgccgggcccgcctccgcaccgccggctgtcgctccgggcggcctccgctgccacctagtggcccagcacggcacagcggccagagaaccgcgtcagccccgagcgaaaatccccccgaacacactcttgaatggttggatggttgcttggttggttggttggtcggtcgggtcggtgggtcggtcggtcggtcggtcggtcggttgaatggttggttgggtgagtggttgcttggttgggtagttggttggttgagtgggtgggtgggtggttgcttgtttggtgattggttggttgggtgagcaggtggttgcttgcttggttggttgggtggttacgggttagttagttgggtaggtgggtggttgcctgattggttgattggttgattggttaggtgagtggatggttacttggttgcttggctggttgggtggggggttcgttgattgggtaggtgggtggttccttggttggttgattggttggttgggtaggtgggtggttgcttggttggttgattggttggttgggtaggtgggtggttgcttggttgagtgagtagatggttacttggttgcttgctcgcttgctcgcttgcttgggtgggtggggggtagttggttgggtaggtgggtggttgcttggttcgttgattggttgcttgggtgggtgggtggttggttgggtgagtggatggttgcttggttggttgattgggtaagtgggggttggttgggtaggtgggtggttgcttggttggttggttgggtcagtgggtgggtgggtggtgggtggttgcttggttggttggttgggtcagtgggtgggtgggtgggtcgttgggtgggtggttgcttggttggttggttgggtcagtgggtgggtggatgggtggttgggagggtggttggttggttggttggttggctgggtcagtgggtggatggatgggtggttgggtgagtggttgctaggttggttgggtcagtgggtgggtggatgggtggttgggtgggtggttgcttggtttggttggttgggtcagtgggttgggtggatgggtggttgtgtgggtggttggttggttggttggttgggtcggtgggtggatggataggtggttgggtgggggagtggttggttgggtcagtgggtgggtggatgggtggttgggtgggtagctgcttggttgtttttctggctggttgcactttttgtttcttttctcttcctcttgagcactgattaaaatgctcccgagctcaaagagggcttgtcaccccgtttctcctggacagtggtctctgggatgtcctgatgattgttctttgggaaggaggcccagtgcctgggagccctcatctgtggccctaccacgcccctctttgcccaaggctctcacccctcctccaggactacacatgccatgccaggctttatcaaccacacaggctttccttactccagcaaaaaagaacaaaggatgtcctctcaccaaatatcctggcctttcgcaatagtttctggaccccactccttctctgacacctaaaactgaccttcaacccccaaaagaatcattatactcacaataagcagaagtgccactgccctgcaagccagggcaggatgcacggggccatatcactaccagagctttccttgggctttgcagatgatcacaaccttccagtatttcaagtgtggggaccacagtctggctggcctcacgccactggagtcccaagccgtgctgggagccacagggtggaattctagaaggaggttctgaatgttgagaatacatattgggaatgtggtgtgagggagggaacccatttccgtgtgttgaaaacatcagcagggtcaagcactcccacatatagtcctcacatccaagatcagatcagagagggctctgcaaaaggtcctggt

SEQ ID NO: 32592 - DNA, 915 bp, Artificial sequence
  DNA replication origin
gtcagccccccgccaggccagctgccccgtctgggagggaggtgggggcgtcagccccccacccggccagccgccccgtccaggaggtgaggggcgcctctgcccggccgcccctactgggaagtgaggagcccctctgcccggccagtcgccccgtccgggagggaggttggggggtcagtcccccccccggccagccaccccgtcctggagggaggtgggggggtcagccccccacccagccagccgccccgtccgggagggaggtgggggggtcagccacccacccggccagctgccccatccaggaggtgaggggcgcctctgtccagccgcccctactgggaggtgaggagcccctctgcccggccagccgccccgtctgggagggaggtgggggggtcagccccccgcctggccagccgcctcatccgggaggtgaggggtgcctctgcccggccgcccctactgggaagtgaggagcccctctgcccggccaccaccccgtctggggggtgtgcccatcagctcattgagaacgggccaggatgacaatggcggctttgtggaatagaaaggggggaaaggtggggaaaagattgagaaatcggatggttgccgcgtctgtgtagaaagaagtagacatgggagacttttcattttgttctgtactaagaaaaattcttctgccttgggatcctgttgatctgtgaccttacccccaaccctgtgctctctgaaacatgtgctgtgtccactcagagttaaatggattaagggcggtgcaagatgtgctttgttaaacagatgcttgaaggcagcatgctccttaagagtcatcaccactccctaatctcaagtacccagggacacaaacgctgcggaaggccgcagggtcctctgcctaggaaaacc

SEQ ID NO: 32593 - DNA, 1258 bp, Artificial sequence
  DNA replication origin
ctcccagtaggggcggctggacagaggcgcccctcacctcctggatggggcagctggccgggtgggtggctgacccccccacctccctcccggacggggcggctggctgggtggggggctgacccccccacctccctccaggacggggtggctggccgggggggggactgaccccccaacctccctcccggacggggcgactggccgggcagaggggctcctcacttcccagtaggggcggccgggcagaggcgcccctcacctcctggacggggcggctggccgggtggggggctgacgcccccacctccctcccagacggggcagctggcctggcggggggctgaccccccccaactccctcccggacggggtggctgccgggcggagactctcctcacttcccagacggggtggctgccgggcggagcggctcctcacttctcagatggggcggctgccgggctgagggtctcctcacttctcagacggggcagccgggcagagacgctcctcacctcccagacggggtggcggccgggcagaggcgctcctcacatcccagacagggcggcggggcagaggcgctccccacatcccagacgatgggcggccaggcagagacgctcctcacttcctagatgtgatggcggctgggaagaggcgctcctcacttcccagatgggatggcggccgggcggagacgctcctcactttccagactgggcagccaggcagaggggctcctcacatcccagacgatgggcggccaggcagagacgctcctcacttcccagatgcggtggtggccgggcagaggctgcaatctcggcacttcgggaggccaaggcaggcggctgggaggtggaggttgtagcgagccgagatcacgccactgcactccagcctgggcgccattgagcactgagtgaaccagactccgtctgcaatcccggcacctcgggaggccgaggctggcggatcactcgtggttaggagctggagaccagcccggccaacacagcgaaaccccgtctccaccaaaaaaatacgaaaaccagtcaggcgtggcggcgcgtgcctgcaattgcaggcactcagcaggctgaggcaggagaatcaggcagggaggttgcagtgagccgagatggcagcagtatagtccagcttcggcttggcatgagagggagaccgtggaaagagagggagagggagaccatggggagagggagaccatggggagaaggagagggagagg

SEQ ID NO: 32594 - DNA, 1553 bp, Artificial sequence
  DNA replication origin
ggagacaggcggctggcagcgagagctgcttcttgcctggatacaggaagggaaagaggaggcacctaccacaggctggaggctagagtctgtgggactgcggctggcctcgctggctcgcctcgctgcggtgggtggcagcagcggacactgcagccggccagagcgtagaaaggcgattgggtaggtgcgctatccggggctatactgcccgaggccgggggccggtaggggtgttattccgggcgtcactactttaggtgtgctatgccgggctgcgctgcccgcagcagcggtgggggcgggttgggggcactatcctgggctgtattgccagcagcagtagggctggttgggggccctattgtgtgctacactgcccgccacaggggacgggttagggccgctactgtggttacactgccggcggcgccggggtggggggattggtcggggtgctgactggggtggggggtggtttgggggctgcaccgcccgcggcgggggacttgttgggggcgctatctggggctgcaatgccccccgcaggggataggttaggggcctccggtggtacactgcaggtggggggggcgggaaagggggagtacagggaggtgattggacggggtggtttcgggcgctatcgcgggccggactgctcatgatagaggggggcgttgggtgctctattgggggctacactgccagcggcaaggggcagtttgggggcgataccccaccggtggcaggtggggaggtgtggtgggttgtggacatcattagggggctgtactgtggtcagtgggagcgagttaggggagctatcagctgctgcactgcctgtggcgggggtcaggtttggtgcgctatcgggaccatattctcggtagtggcatacgggttaggggagctgtcgggggctaagctgtccacgggggactgcgggttgggtgcgctatccagggcatcataccccgcggctgggggatggttgggggtgctatccgctatctgggacggcactgcccatcgtggggagcgggttgggggccttaaggatccttggctgcactattcacacggcggggatcaggttgcagtgctttctggggcgtcactgcccgcggcgggggggttggttgggggtccaatccgtggctgcatggcccacggcagggggcaggttgggggagttatctggtgctgcaacgtctgaggcggggacgggttgggggcgctattgggtttctacactgcagctgtgaggggagggtgttaggggcgctatcccgggtccaacagctggcggcgggttaggggcgctatcagggggtgccctgcaggtggcggcagaggtttcagcaacaccagtggcctacaaagaaggagccttcctcctctccccagactccagactctagagggcgacctcctcctgctcctgctcctggagcgcagcgagcgcacagcgtttccgcaggaatcctgagaatggcaaggcccccatacccgcggtggttcccaggcccgccccctctcgcagctgcagc

SEQ ID NO: 32595 - DNA, 808 bp, Artificial sequence
  DNA replication origin
gctgcatggcccacggcagggggcaggttgggggagttatctggtgctgcaacgtctgaggcggggacgggttgggggcgctattgggtttctacactgcagctgtgaggggagggtgttaggggcgctatcccgggtccaacagctggcggcgggttaggggcgctatcagggggtgccctgcaggtggcggcagaggtttcagcaacaccagtggcctacaaagaaggagccttcctcctctccccagactccagactctagagggcgacctcctcctgctcctgctcctggagcgcagcgagcgcacagcgtttccgcaggaatcctgagaatggcaaggcccccatacccgcggtggttcccaggcccgccccctctcgcagctgcagccccacctgccagcgcgtgccacctccgagcgacttccgggacccgggcggccaccgcggtgcaggcgcgcgcccaacggctttgcgaggctcactcggtctgagaggtcggaggctgcgagtgtcgctgctgaaggctgtggtggactgggctggatcgcggattttggattagataatagatttgggatcgcggattgggggttggatcgcggatttggggttggatcggggatttggggttggataggggatttggggctgggtcggcgggggcgtggggggaggtgaaaaggtaacagggagctgccccctctcaagagccggtagttgggagtctgagaagtcaccaccatgaagttgttcggcttcaggagccgcaggggccagacggtcctgggctccatagaccacct

SEQ ID NO: 32596 - DNA, 1805 bp, Artificial sequence
  DNA replication origin
gatggatgactggcctgctgggcttttgacttgcagggagtttctaaatcccatctgtattttgtgcttctttctagcaaatgtcttctttttggccgtaaatgcttacccaatgcctgtacaatcattgtaccttggaagtagttaatttgctgtgtatttcagagtctcagggtagaagggactgcagccttgtctcagaagagactttgggctttggatatttgagtaaatgctggaatgagttaagatttggggactctagggaatgcatcattgcattttgcagtatgaaaaacacatgagatttgggggaccagggacagaataatatgttttggctgtgtgtctctaccaaaactcatgtgggattttaatgtgaaacgttaaaggtgggggctggtggaaggtgatttaatcatggtggagcttggagggtggatgctgggggtggtggggagggttggggctacaggcgggtgaggagggttgggggattgtggtgcagttggggctgaaagccaggggtggggggtggatccttcacaaatggacatttgagtaaatgctggaatgagttcagacattgggggactataagaatgcatcattgtattttgcagtataagacggacatgagattggggaccaaggggagaataatatgatttggctctgtgtccctaccaaaactcatgtggaattgtaatggggaatgttaaattggggcttggtagaaggtgatttaatcatggtagagattgggggttggaaggtggatgtgggagaatgggggtgcaaggtatgagtgggggcgaaacgtggggatgggtggcagatccttcacaaatgtttaaatactatctccttaatgcagtctgtgcgatagtgagttctcatgataaatgaatgctgtcctgctgagttttggactcggatttggcctgtgtcccaatgtgttatttttcagggaaaatcttccctttggattgagaaagcttacccagtgcctgtgccatcgttgtaactggaaagaaaagaattgtcttttacattcagggactcataggcagaagggattccaaccttgtcttggatgagacttgaacttactacatttgaattactgctggaatgagttaagacttttggaaacttttgaaaaggtatgtttgtatttttctgtgtgagaaggacatgagatttgggggtgtcagggtgagaacaatatggtttgactctgtttccctacaaaaactcaaggggtattgtattcctgactgttgtaggtggggcctggtgggaggagaaattaattggtagaggtggaagtgaaaacaagtgggtagggtgaggaggagtaggctggcagtagggtggtgagagggtggtgggcagtaggaagagggagtagcctgctgcagaggcagagcctcatggaaaacctctaccagggcagtgcacctgtggctttgcagggtgtagcccccatggctgccctcgtgggctgggctggtgttgagtgcctgtagcttttccatactgagaatgcaagctgttggtgggtctatgaatctggggtctggaggatggtaacctcctgctttgggcttccaagcccatatattttttctgcactgccgtagtagaggttttccaagaggctctgcctctgcctgaggcttctgcctggaaacagtgggttgtgggggtggtagggggcagatctttcaccaatggttaagcaacatcttcttgatgctgacgttgtaatacggagttctcaggaaatctgtttgtataac

SEQ ID NO: 32597 - DNA, 1067 bp, Artificial sequence
  DNA replication origin
gacttgcatggggtgtgaaagtcccatctgtgttttgtgtttctttctggcaaattttttccctttgggtgggaatgcttacccaactcctgtgtaatcattgcaccttggaagtagtaaacttgctttatatacaattcagtggctcatggtcagaagggactgtagacttgtctcagatgagactctgggctttgagcatttgagtaaatgctggaatgagttaagatatgagagactctagggaaggcatcattgcattttgcaatgtgagaaagacatgaacatcgggggaccagggacagaataatatgttttggctctctgtctctaccaaagctcatgtggaatgttaatgggaaatgttaaaggcgggggctcgtggaaggtgatttaatcatgatggagagaggaggttggatggttgggggttggggagggttgggggtgattgggtggtgaggagggttggaggggattgtggtggggttggggagtgttgggggtgattgggtggtgaggagggttggaggagattgtggtgcagttgggggtgtaaggcaggggtgggggtgcatccttcacaagtggttaaacatcatctccttaatgctgtccttctgatagtgagttctcttcatgattttggagctgtgagattgaatgaacactgacctgtgggattctggatgtctattgggcctgtggtcccatttgtgttattgttcttggaaatttcttccctttggattgagaaagcttacccaatacgtgtaccatcattgtaccttgaaagaaacgaacacccttttaacttcagggactcataggcagaagagactgtagccttgtctcagatgagactttcaactttttacatttgagttaatgtgggaatgagttaaggcttttggaaactttgaaaaggcacgattgtattttcttctgtgagaaggatatgacatttggggggggtcaaggttcgcataataaaatttggctgtgtgcccctggaaaatctcatgtggaattgtaatcccaaatgttggaggtggggcctggtggga

SEQ ID NO: 32598 - DNA, 1206 bp, Artificial sequence
  DNA replication origin
tgattttggagctgtgagattgaatgaacactgacctgtgggattctggatgtctattgggcctgtggtcccatttgtgttattgttcttggaaatttcttccctttggattgagaaagcttacccaatacgtgtaccatcattgtaccttgaaagaaacgaacacccttttaacttcagggactcataggcagaagagactgtagccttgtctcagatgagactttcaactttttacatttgagttaatgtgggaatgagttaaggcttttggaaactttgaaaaggcacgattgtattttcttctgtgagaaggatatgacatttggggggggtcaaggttcgcataataaaatttggctgtgtgcccctggaaaatctcatgtggaattgtaatcccaaatgttggaggtggggcctggtgggagattatttaatcatggatgggaggggtagcggtggaagaaaaaaggggtgggtagggtggggaagagtaggctggctgtagggtggtgggagggtggtgggtagtaggaagggagagtagcctgctgcagaggcagcggctcatggaaaacctctaccagggcagtgcgcctgtggctttgcaggctttagcccccatggctgctctcatgggctgggctgctgttgagtgcctatcacttttccatactgagggtgtgaacttttggtaggtctatgaatccggggtctagaggaaggtggcctcctgcatagtcactcaaagcccttattttccgtctgcactgccatagtacaggatttccaagagcctctgcctctgcagcaggcttatgtttggaatggtaggggttggagctgtgctgggggggcgaatcctttaccaatggttaagcaccatcttcttgatactgacgtgtagtgatagtgagttctcatgagatctggttataggacggtgtggcacctctttcctctctcagccttgctgctactcctgctgtatgaaacatttcattgctgttttcctactggtatgattgggaggcttcctgagtcctcccagaagcagaagccactgtgctttctttacagcctgcagaaccatgagccaattaaaccccttttcattatgatcatacagaaaataaagtactgcgaagtggagctatgaaatatcttcaattacatttccccatcgtcttggctattaacattgga

SEQ ID NO: 32599 - DNA, 1030 bp, Artificial sequence
  DNA replication origin
ctttttggctgggaatgcttacccaatacctgtacaaccattgtaccttggaagtggttaacttgctttgtatttcagaggctcggggcaaaagatatggcagccttgtctcagaagagactttgggctttggatatttgagtaaatgctgggatgagttaagacttgggggactgtagggaaggcatcattgcattttgcaatgtgagaaagacatgaactttgggggaccagggacagaataatatgttttggctctgtgtctctaccaaaactcatgtggaattttaatgggaaatgctaaaggtgggggctggtggaaggtgatttaatcatggtggagagtggaggttggatggttgggagggtggggagtgttggggggattgtggggtggggtgggttagggggattgtggtggtggggaggtgggggattggggggtgggaaggcttggggcaattgtggtggggttgggggtgaaaggcaggggtgggggccgatccttcacaaatggacatttgagtaaatgctggaatgagttcagacattgggggactgtagagaatgcatcattgtattttgcagtatgagaaggatatgagattggggggccaaagggagaataatatgatttggctctgtgtccctaccaaaacacatgtgggattgtaatggggaatgttaaatgtggggcttggtagaaggtgatttaatcatggtagagaatgaggattggaaggcagatgtgggagaatggaggttcatggtgtgggtgagggtgaaacatggggatgggtggtagatccttcacaaatggttaaatactatctccttaatgcagtctgtgtgatagtgagttctcatgataaatgaatgctgtcctgctgggttttggactcggattgggcctgtgtcccatttgtgttatttttctgggaaaatcttccctttggtttgagaaagcttacccagtgcctgtgccatcattgtaacttgaaagaaaagaattgtcttttacattcaggaa

SEQ ID NO: 32600 - DNA, 1102 bp, Artificial sequence
  DNA replication origin
gaaggtgatttaatcatggtagagaatgaggattggaaggcagatgtgggagaatggaggttcatggtgtgggtgagggtgaaacatggggatgggtggtagatccttcacaaatggttaaatactatctccttaatgcagtctgtgtgatagtgagttctcatgataaatgaatgctgtcctgctgggttttggactcggattgggcctgtgtcccatttgtgttatttttctgggaaaatcttccctttggtttgagaaagcttacccagtgcctgtgccatcattgtaacttgaaagaaaagaattgtcttttacattcaggaactcataggcagaagagattgcagccttctcttggttgagacttgaatttactacatttgagttactgctggagtgagttaagacattttgaaacttttgaaaatgcatgtttgtatttttttgtgtgagaaggacatgagatgtgggggtgtcagggtcagagtaatatggtttggctgtgtttccctacaaatctcatggggaattgtaatcctgactgttgtaggtggggcctagtgggaggcgatttaaccacaaagggcagagtggtaggggtgaagagaaaacaagtgggtagggtggggaggaataggctggcagtagcgtggtgagagggtggtggaccgtaggaagggggagtagcctgctgccgaggcagagctcatggaaaacctctaaacaagggcagtgcacctgtggctttgaaggctttagcccccatgtttgctctcatgggttgggctggtgttgagtgcctgtagcttttccatactgagagtacaagctgctggtgggtctatgaatctggggtctggaggttggtgacctcctgtgtggggcctccaggcccatatattttttctgcactgccgtagcagaggttttcctagtggctctgcctctgcctgaggcttctgcctggaaacagtggggggtggggatggtagggggcagatctttcaccaatggttaagcaacatcttcttgatgctgaccttgtgatagtgagttctcaggaaatctggttgtataacaggtttatacaacatgtggc

SEQ ID NO: 32601 - DNA, 1656 bp, Artificial sequence
  DNA replication origin
tgcttctttctggccaatttcttctctttggctgggagggcttacccaatgcctgtacaaccattgtaccttggaagtggttaacttgctttgtatttcagaggctcggggcaaaagatatggcagccttgtctcagaagagactttgggctttggacatttgagtaaatgctgggatgagttaagacttgggggactctagggaaggcatcattgcattttgcaatgtgagaaacacatgaactttgggggaccaggacagaataatatgttttggctctgtgtctctgccaaaactcatgtggaattttaatgggaaatgttaaaggtgggggctggtggaaggtgatttaatcatggtggagagtggaggttggatggttgggagggtggggagggttggggtgattgtggtggtggggaggtgggggattggggggtggggaggttggggggattgtggtggggttgggggtgaaagggagtggtgggggcggatccttcacaaatagacatttgagtaaacgctggaatgagttcagacattggagtactgtaaagaatgcatcattgtattttgcaatatgagacggacatgagattgggggccaaagggagaataatatggtttggctctgtgtccctaccaaaattcctgtgggattgtaatggggaatgttaaatgtggggcttggtggaacgtgatttaatcatggtagagaatgggggttggaagggggatgtgggagaatggaggttcatggtgtgggtgaggatgaaacatggggatgggtggcagatccttcacaaatggttaaatactatctccttaatgcagtctgtgtgatagtgagttctcatgataaatgaatgctgtcctgctgggttttagactcggattgggcctgtgtcccatttgtgttatttttctgggaaaatcttccctttggtttgagaaagcttacccagtgcctgtgccatcattgtaacttgaaagaaaagaattgtcttttacattcaggaactcataggcagaagggattgcagccttctcttggttgagacttgaacttactacatttgagttactgctggagtgagttaagacttttcaaaacttttgaaaatgcatgtttgtatttttctgtgtgagaaggacatgagatttgggggtgtcagggtcagaataatatggtttggctgtgtttccctacaaaatctcatgcggaattgtattcctgactgttgtaggtcgagcctggtgggaggtaatttaatcacaaacggcagagtggtaggggtggaagggaaaacaagtgggtagtgtggggaggagtaggctggcagtagggtggtgagatgctggtgggcagtagaaagggggagtagcctgctgcagaagcaaaggctcatggaaagcctctataccagggcagtgcacctgtggctttgcaggctttagcacccatggttgctctcatgggctgggctggtgttgagtgcctgtagcttttccatactgagagtgcaagctgctggtgggtctatgaatctggggtctggaggttggtaacctcctgtgtggggcctccaagcccatatattttttctgtactgccctagtagaagttttcctagtggctctgcctctgcttc

SEQ ID NO: 32602 - DNA, 862 bp, Artificial sequence
  DNA replication origin
gaaagtgaggagcgtctctgcccggccgccatcccatctgggaagtgaggagcgtctctgcccagccgcccatcgtctgagatgtggggagcacctctgccctgccaccccgtccgggatgtgaggagcgtctctgcccggccgccccgtctgagaagtgaggagaccctctgcctggcaaccgccccgtctgagaagtgaggagcccctccgcccggcagccaccccgtctgagaagtgagaagcccctccgcccaggagccaccccgtctgggaagtgaggaacgtctctgcccggcagccaccttgtccggcagggaggtgggggggtcagccccccggccagccagcctccccgtccgggaggtgaggggtgcctctgcccggccgcccctactgggaagtgaggagcccctctgcccggccaacaccccgtctgggaggtgtacccaacagctcattgagaacgagccatgatgacaatggcggttttgtggaatagaaaggggggaagggtgaggaaaagattgagaaatcggatggttgccgtgtctgtgtagaaagaggtagacgtgggagacttttcattttgttctgtactaagaaaaattcttctgccttgggatcctgttgatctgtgaccttacccccaaccctgtgctctctgaaacatgtgctgtgtccactcagggttgaatggattaagggcggtgcaagatgtgctttgttaaacagatgcttgaaggcagcatgctccttaagagtcatcaccactccctaatctcaagtacccagggacacaaacactgcggaaggccgcagggtcctctgcctaggaaaaccagagacctttgttcacttg

SEQ ID NO: 32603 - DNA, 1029 bp, Artificial sequence
  DNA replication origin
ttcaaccctgagtggacacagcacatgtttcagagagcacagggttgggggtaaggtcacagatcaacaggatcccaaggcagaagaatttttcttagtacagaacaaaatgaaaagtctcccacgtctacctctttctacacagacacggcaaccatccgatttctcaatcttttcctcacccttcccccctttctattccacaaaaccgccattgtcatcatggctcgttctcaatgagctgttgggtacacctcccagacggggtgttggccgggcagaggggctcctcacttcccagtaggggcggccgggcagaggcacccctcacctcccggacggggaggctggctggccggggggctgacccccccacctccctgccggacaaggtggctgccgggcagagacgttcctcacttcccagacggggtggctcctgggcggaggggcttctcacttctcagacggggtggctgccgggcggaggggctcctcacttctcagacggggcggttgccaggcagagggtctcctcacttctcagacggggcggccgggcagagacgctcctcacatcccggacggggtggcagggcagaggtgctccccacatctcagacgatgggcggctgggcagagacgctcctcacttcccagatgggatggcggccgggcagagacgctcctcactttccagactgggcagccaggcagagaggctcctcacatcccagacgatgggcggccgggcagagacgctcctcacttcccagacggggtggcggccgggcagaggctgcaatctcggcactttgggaggccaaggcaggcagctgggaggtggaggttgtagcgagccgagatcacggcacctcgggaggccgaggctggtggatcactcgcggttaggagctggagaccagcccagccaacacagcgaaaccccgtctccaccaaaaaaatacgaaaaccagtcaggcgtggcggcgcacgcctgcaatcgcaggcagtcagcaggctgaggca

SEQ ID NO: 32604 - DNA, 2487 bp, Artificial sequence
  DNA replication origin
gtggagtggcctgtagttttaactcaggcactatggcaatgcagacccaaaccaattgtgccagttcttgctgggtggcaaagtgttgtcaggctttgtggtcactcctgatttctgtttggaagcacagttctctttccaatgagaatggaaaattggaaaggcctgtaaaaggccgtagagtggagatgtataaaaatgtatggtcacccatgttttaggggtcgacaccatggacttttatctcgctcaccaacttcctcacacatacagctcactccctgtggcctcagccatctcaggcactacaaaatcctcactgcttgaaattcacttatggagtccaacaaacaactttctttaaaaaaaaaaaaggcagtaaaatctcagaatttctgtgcaatgcttgcaaccttcccacttattaaataaacagaacaccaaactaaccaaaagctatgcaagtggcaggctgccctgagcagagccctgcctgtctgccagggactacggtggcacaggagcaggtcgtgatcatgctggaagaaatgagaggtggtttcattccctgactttcaaactctcatctcgggagcccccagtcctaacactgtattcagccgctggagttacctggccatgtaaaaggacaagggaaggcagaccatcctcaacttcttcctgtgtttctagcagggaaggaaagcaatggctttagtccctccgcctctaggtaacaaggcaaaggcctccgtaacccaggcagacaggatgtggggaaggtcttgtgacttttcctaactcagaatttctgagtcagtgggctcccggagaaagactgtcctcttggcatgtgaccctgaaggcttctagcaccaaaggctcgctaacacctcagagcctgtcttcaggtaaaggggatgggaggcagaacccttctcctgattggtgcctgaaggaggcaagaacgagcatctgctataccccaggctgatttcccccgtctcagcaggagaggggagaggtgagggtgcagatgttctgggcaggtcagtgcagttcgatgaatgcctctagatcttccgggatgaagcccttgtaagggatcttgttcttacccagggcctgggctgcaaggcactgcagggtcacatagctgaagggctgcatggtacccctggccagcagcttctcttccagcagcgtgtaggccgtcttcttgaaggcgttggtggcgtccatgtgggcccctgcttcaatcagggcattcacgatggccgggcagttgttctgggctgctatgtgtagcggggtgttgttgtcaaaatccctgctgtcccggtcggccccgcagtcgaacagcactttgaccacgtgcaaggaggggaatctgcccacggagtagcggcccacgtttgtggtgtccttgtccacagccatgtgcagaggggtgaagccgttcttgcccttgggtgcgcacttgagcggcggtagatagtctggtgcttcaggtgctcctggctgggggtgcactccactttctccagcaggtagagcaggtggaggatgatgaccagcgccttgttgaactgggtcgagtctctaggctccctgagcagctgcagggcccattccacttcccggacccctttggtgaggacccccatgaggtctgcaaagccgatctggctgcccaggctgcctttggcagcccggtcctgcagcacgtaggagaagagttcggcgaaggagaggaagctgctggcggtcatggggctcagaggctccaggttgctctgttgcatgtccagggcatacttccacaagcggatgtagcactcgatattgcccgagtcggcgtacacggcgcccctgtaacggatacaataggaagtgtcggggtgcgagggactgaggatgcgctcccggatcaacagggcctgcatacgcatctcatcggggtcggtgatcagcgcctccagctcctcggtggtgttgacctccctggaatagtcataggccaggaccagctatgggggctccagtttgggcaggtactcacccccctggtgacgcagctccatggcccgcctccagtgtttaagggccccaagcagatctcgtttcttatccacatacgtagatcccagcaatttcaaggcttccacggcagcttcccagctggtgggacagcagctttggtaagattcccccgttcagtacctcaggggagaagatgcagcacggagccccctgaggctgcgtacacccctggctggtggaggagccttcttggggcagcccaggctgagcctctacccctgtgacccgctcctggccgggctgctcttggatgaggtactccacgatgttggtgtggcccgtcacgctggccgggagcaacggggtcatgccgtagctatcacgttccatgctggccttgcaccccagcagcagctgcaggatctccaggctgctggtctcggc

SEQ ID NO: 32605 - DNA, 790 bp, Artificial sequence
  DNA replication origin
gtcagaggccacatgcaacccactggttttgtcttttctaggatgctgataagtttcccgcggcccccggagcagctctgtaaggccctgtagttgcctttcattcccttctgctctattgaggagtgggaggatgacaaagtgtttttgctcaacctgaaggaaaatgcacatggaaggacacactgggttattatttgagtagcccaggcaagagaccagcggtctgcttcagccatgagaccacctcaggccaaaatagccttgtggttgttttacttcttttcaccaaatgggtctttttggggtttgtggcgtgtcccatgtaaggatgatctcttggttcccctttctcattcacacccggggagctgaggtggggtgggggggggggggggtgaaggggagtggccacctgcgccaggtgtgagagaagccacacctgagaccagcccctctgtcctcctgcctatgcatgcagcgtccctgcaggaggcagaaggggtgaaaagtagcctcgatgtgaaagtgcttgtgtgtccctgaggggggaggcaagtcacagtcagggcactggttcctgtcattgggtgcagcacaaagaaggaccccaggacatgcagtgcagacgggagcacagagagggtgggtgctactggggtgcacaggcagcttgaggaggatggagatggcaaacttccctttgtcacaccaggtccacgttcagggccggaggaccaccagatccccaaagcctccggtgcttccgaggcagaggagaggcaaggcc

SEQ ID NO: 32606 - DNA, 877 bp, Artificial sequence
  DNA replication origin
tcacggcgttgtggggtcggggtccttcggtgacttagtccagggcgtaccagggcgggggtccacagttgccatagtgaggatcttggaggagggtggttcctgccttgctgtagtccggggagcagggggcaggggtcctctcttgtcagagtctctggcgcggggtgggggtggaggtgagggttttcctatgcgatagcccacaggtcggtgaagccgggtcctcccatgcctttgtccagggcgcaggggggcgagggtcttcggtggtggagtccgcggagcggcaggacgggggtcctccagtgccatattccagggcacggcggagtgggggacctgtcctgcagtggtccagggcatgtgggagtggtggtcctgctgtgcctcagtccagtgcgcggtgggacggcggtcctgctgtgctgtagtgcaggacgcggtggcgcaggggtagtccagagagcgccgtggcagggggtcctccagtgctggaatccagtgcaaggcgggtcaggggtcttaccgtgccgaagtcggtggcaagggtcctcccgtgccatagtctagggggcgacggggcagggttctctagtgcaagtgtccagggtgtggcggggcaggagtcctcttgtgcaggagtccaggacgtagccgaggagtcctccaatgccagagtccagggctctgcggggccgggttcccccatgccagagtgtagggcgtgttcaggtgagggtcttggcgtgcagtagtccagggtgcggtggggcaggggtagtccagacctccatggcgggcgtccctctgtgcaggagcccagtgcctggcggatcgggggtccttccgtgctgtagtccagggcactgcaggg

SEQ ID NO: 32607 - DNA, 967 bp, Artificial sequence
  DNA replication origin
ggccaggcgcggtggctcacacctgtagtcccagcactttgggaggccaaggcgggcagatcacgagggcaggagatcgagaccatcctggctagcaaggtgaaaccccgtctgtactaaaaacacccaaaaggcggccgggcttggtggcgggctcctgtagtcccagctactcgggaggctgaggcgggagagtggcgtgaacccgggaggcggagcttgcagtgagccgagatcgcgccactgcagtccagcctgggggacagagcgagactacgcctcagaaaaaaaaaattttgccttcactatatgcctaagtaatttctctattagagcccagagtcgtggggcccacaccgccagctgacacatgaaaatgtggcaacgatgtggtggtgtctctgtgtggcagcgtggtggtgtgtctgtgtagtggtgtgtccgtgtggcagagtggctgtgtggtgctatgtccatgtggtggtgtgttcatgtatctgcatggtgatgtctccgtgtgacaatgtgtttgtgtatccatgtgacaatgtctgtgtgtccttgtgtccacatggcagtgtctgtgtggtggtgtctgacagtgtggaggtgtgtccatgtgacagtgtggcggtgtgtctgtgtgtggcagtgtccatgtggcagtgtgtttgtgtgttcgtgtgatggtgtgtccatgtgacagtgatgtctcttgtgtgtctgtgtgtccctgtgatagtgtggtggtgtgtccatgtggtgatgtctccgtgtgtgtgtccctgtgatagtgtggtggtgtgtccgtgtggatttctccgtatgtctgtgtgtccgtccatgtgaatgtgccagtgtgtccatgtgacggtgtgtccgtgtggtaatgtctccgtgtgtctgtacatgtgacagtgtggtggtgtgtccgtgtaacaatgtggcggtgttcccttcccggctt

SEQ ID NO: 32608 - DNA, 2231 bp, Artificial sequence
  DNA replication origin
tgaccttgatagtgctcctatccagggtagtgcatccctggatagctcacctaccctgccacctttctaccatgctggccaagctgcaacctccgtcacctccaccaaccgcagtgaggcgagcctagatgccacaggctcaagcctccagctcggggtacgtggctcccacttcctgttctctaagctgagctcccagcttcgattctgattgtatgagagcaagtcttaggacaaccaatcacagcatgaaaataaagtccaatcagaataggcctagaagttttctctcatccaatcagaatatgtagtccaggaacctcatttgcataacctcacatataaaggatgcagaaagggcgtcaggccattccagactcgtgtgtggctgcttgcgcagctgctccgtgccaggcttggaggaccaggagaaggggtagtcacttgccacagctggaggctggagcgtgtggcaccacggctcgcctcgctgtggtgggtgctggcgacagagacggcagctcggctggactggtaggagggggtaaatagtttttgggtagatggagggataaagagggtggttagcggcaaggggaaaagaggatggcaaacaggagaaggcattgcaaaaagatggtggggaaaagatggttaaaaaaagtttttgggtagcaggcgggtaaaaaagggtggcatgtagaaggaggaaagagagggtggtgagggggggaaaacggggacaagtaggaaggagagaaggtttacaaaaagacggtggggagaaacacggtgaagacaacagaaagacattggggaaagaaaagatgtgtaaaaagattttgggtagatggaggtggaaaagggtggcacgcgggaggaagaaagagggtgcagagagtggggggaagagagagaaggtggtgagcagaagggagagaagattttgtgaaaagtcgatggggacaagatggtggggaaatattttttttcagtagatggagaaaaaaagggtggtgagcaggagaagaaaaaagggtgccgagtaggaggaaggagaaggttttgcaaaaagacggtgggaagaaaagacagtggggagaaaaaactgtgggagaagtttttgggtagatggaggagagaaagggtggcaagcgggagagtggaaggacgattgggaaaacgacgatggaaaaatagttttggggtaaatggagggcgacaggaaggtggcatgtaagaggaggggcaggaatggggaaaagagggtggtgagcagaaggctttgcgaagagatggtgaggggggaaagacagtgaggaagaaagtttttgggtagatggagggggtaaagagcgtggtgagcaggagggacaaaagagggtggcaagtagagggagacaaggttttgccaaaagaccgtaaggaaaagacagtggggagagaaaagtttttcggtacatggagggggaaaagagggtggcaagcgggagaggggaaaagagggtggcaagcgggagaggggaagagagggtggcaagcgggagaggggaagagagggcggcaagcgggagaggggaagagagggtggcaagcgggagaacgaaaaagaggatggcgagtgggagggagacgaggttttgtgaaaaagatgggtagaaaagacagatgatggggaaagaaaagatagacggtgggtaaaatgtgggtagatgcagcgggaaaagagggtggcaattgggaggataaaagagggtggcgagagggaggagggaaagagttgggaaaaagacgatggggaaaatagttttggggtagatggagggcaaaaggaggatggtaaggatagtggaaagaagagggcgtttttggggagatggaggttggaaaagcgggtggcgagcagcaggaatggggagaaggctttgggaaaatatgagggaaaagtttttgggtagatggaggaacaaaaggggaatgagagcagaagggagaaaaagagggtatccagtgaggggggaaaagttttcgggtagatggttggcgaaaagggtggtgagcaggagagtagagaaggctttgcgaaatgacagtggggaaaaatagtgggagaaatgttttggggtagatgaagaaaaagggtggcgagagggagggggccaaaggtggttgagaaaagaaggttggggacaaagtttttgggtagaactttttctgagttttaaatcaaa

SEQ ID NO: 32609 - DNA, 1781 bp, Artificial sequence
  DNA replication origin
tcctggtcctctaagccgggaacagagtagcttggctggagatactggagagcctaaactggcatgaggcctcctcagcatgcacgtggggttacgcacatggtttctggactacatgttccgattgggtgagagaaaacctctaggccttctctgattggactttattttcatactctgattggttgtcctaagactttctttcatccaatcagaacatgataacaaagtccaatcagagtaggcctccgggctttctcttatccaatcctggaacgtgtagtccaggaaaggcatattcataacctcagtacataaatggtgctgaagaagagtcaggctattccaggttcttctgtatctgctcaccgagctgctctgagcccggcttagaggaccaggacagactggaggctgtagcctgtggcaccatggctggcctccctgcagttggtggtgacagagactgtagtgtggctggagcggtaggaaagggaaaatagttttgggatagatgaaagggtaaagagggtggttagtgccaaaaggaaaaaaggatggtgagctggagaaggcattgcataaagatggtgaggaaaagatgttgggaaaaaaaaaactgggggtagatggagggggaaaaacagggtggtgaacaggagggacggaaggtttcacagaaagacggtagtgaaaaagtttttgggtagatggaagggggtaagagagggtcgtgagtggggaacggggatgagcaggaaggagagaaggtttgcaaaaatacggtggggagagaagaaagggaaagaagactgtaggtaaaaagattttgagtagatggaggggggaaaagggtgacaagtggaaggagaaaagagggtgcagagagggagggggaagagagagtggcaagcaggagggagagaaggttttgtgaaaagacagtgaggagagaagcttttaggtagatggagagggaaaagagggtggccagtgggagaaggataaagagggtggcgaggaggaaagtgaaaaggttttgcgaaaagacgataggcagaaaagaaagtgtagaaagaaaagacagtgggtaaaaagtgtttgggtagatggagggggagaagagggtggcaagtgggaggagaatagaaagtgtggccagagggagtggggaaagaggactgggaaaaaggcgatggggaaaatagttcggggtagatggaaggcaaaaagagggtggcaagcaggacagaggaaagaagagggtgagcgggaagcggggaaggctttgtgagaaggtggcagggaaaaattggggaggtagatgggttaaaagagcgtggtgagcaggaggagagaagaggctttgcaaaaagacggcgggaaaatgtttttggtagatggagaagggaaagggtggcaaggaggatgggagaaaaagatgatagggaaacagtttttgggtagatggaaggggaaagagagggtggcgagcagcaggagtggggagaaggctttgggaaaagatgagggaaatgtttttgggagttgaaggagcaaaagaggatgatgagagcaggaggtggaaaaaaggctggccagggagagggagaaaagacgttggggaaaagttttggggtagatgggtggggaaaatggaagtgagcggtaaagtatagaaggctttgcaaaaagacagtggggaaaaaatggtggggaaaaagttttggggtagatggaggaagaaaaagggtggtgagagagggagccaaagacggtca

SEQ ID NO: 32610 - DNA, 2189 bp, Artificial sequence
  DNA replication origin
gaaaccatgtgcgtaaccccacgtgcatgctgaggaggcctcatgccagtttaggctctccagtatctccagccaagctactctgttcccggcttagaggaccaggagaagggggagctggaggctggagcctgtaacactgtggctcgtctcactctagatggtggtggcaacagagatggcagtgtggctggagtgttaggagggtggcctgagtggtaggagggtggcctgagtggtaggaggggggctggagcagtaagatcatggccggagtggtaggcgggaggctggagcagtaagatggcagccggggcggtaggagtgcagcctgagctgtaggagggtggctggcagctggagctgctcttgaccagctagaggtctaggagaaggtggggaccgtgcccaacgctggcagctggagccttggccaccatggctcgcctggttgcggttggtggtggcaacggagactgcatctctgttagagtagtagaaagatggcagggtaggtgcgctctctgcagctgcactgcccgcttgtggggtggtggtggggtgggttgggtgtgcttttggggctgcactgcctgccgcagggggctagtgggtggcgctatcgggcgttgaattgctggcagtggggcaggttcactgcgctatcagggtctacactgcctaaggtggcaggcggttggaggcaggttgtgtgcgctgtcgtgcactaccagcggcgggtggcagggggttaggggaattagctgctgcactggccaatgcagggggcaggttgggttagctaccatgagctacaatgtcagcaacaatgccaactggcaggcagtccgggggtgctttaggggagctgtcaaatgttgcattgtccgtgggggaaaggggaaggtggggtcggggggttggttgggtgcagtaccccgggcgttcactgcctgtgacaggagcagattgggggcgctatctggggctgtgctgcttgtggtccgggtggggggcgggtttgatggggcactatttggtgctgcaacacccgtggcagggatgggttgtggacactatcgagtgtccaccacgggtggtttgggggtgctatcagggtaacactgcctgcagcagtctctgggtgtgttgtgggcacaatctgggggctaagcttgtggggagggggggcaggttaggggtggtatggggggaggctgcactgctgctgccagcagcaggttgtggaggtggccatgacagtggtggcctctgaggaaggggcccttctcctcttcctggactcaaggttctagagggtgaacaacttctgctcgtgttggagcgcagagggtgcacagagttttcacggcaatcctctgaccaccgcagggccttcgcacccaccatggttacccggcccttgccctcttgctctgtgttgtggagaccatctgggagccccaggcatggagtagtgggcaccacgggggctcagggtcctgtgggtggaggagtcaggaatgggaactggtacttgggtggggaggactggctgggtctgagtttctgctattcttgctccccagggagccccgggcactgtggtgtctccagtccccaccccaggtcaggaggccagcttggtctaggaggagaggctggactttggagggtgggtgtgagagccttcgccaaaactggccccagccacccagtggccagcatgacaaggtgaggctctaacactgtcactttctgcatcctgttgtaggtttttctggcattgtctgcccagctgctccaagccaggctgatgaaggaggtgtcccctgtggtgagctggaggttggagcctgaatatggcacagctctgtgattcatctcctatggttgtggcagccatggtgatggagacggcagctcaacaggagcggtaggagggtacctgtggaggccaagtggtaggagccttggagggtgggcaggtgcatggagggtgacagcagcgctggttcctttggcgtcagtgctaatggtggcagcagcagcaagtctaggggccaggaagggggagtaggagggctttggggcctggcccagcctgggatgtgtaagaagctgctggttctgtaccacaggcctcagtgatggtggaggtgcagccagggcaaggaggagtcctcccc

SEQ ID NO: 32611 - DNA, 1528 bp, Artificial sequence
  DNA replication origin
agtcctgtggtggactaacccaggggcaatggtcactgtcccctctggtgcattctttgtccccatcagcctagtaagctccaggggctggcagctggcacagagtacgaggctgcactccttgacctttctatgctgcacacagtcctgtgcccatcctgtcctcagatctgctgggaccatgaccaacctgccaagagcgtgggaattggtatgtgacccagctctaggaggaggtggagcaagcgaatgtaggggaagctgctcacccagtaggtttagagggagggtggggtgggggtgcagcaggaccaggcaggtgagggtgtgcgggtgagggtgtgccggtgtgggtaggggtgtgtgggtgggggtgtgtgggtgagggtgtgtgggtgagagtgtgtgggtgagggtgtgcgggtgagggtgggggtctgtgggtgggggtgtgtgggtgggggtgtgtgggtgggggtgtgggtgagggtgtgtgggtaggggtgtgtgggtgggggtgggcgggtgagagtgtgtgggttagggtgtgagtgcctgtttggctcttctgggtggggctggatgaatgtttgggcgggggcagcagctgtcacatggcctggctgcaggtttgggacagaagccaggcaggtgggctgtgtcaggcacagctacaaactgtgccaaggaagcggaccagagcaggggccaagggaaacctctgccttagcagaagatactggggagatgggatcaatcagggaggtctttcaaggcacatggtgcttcatggagccagggcccaggacagggagggctgtaaccctggcttgcctgattggctgagcacagacagatagaagagggtgtaggcagcccactaggtggatgcctaagtgaggaaggaatgggtggccaggtgactgagacccccaagaccaggaccccactgtcaggtctgtggcttccaaacgcctgtgggaagtgttcccctttggacactgaggccatcagcttcagcttcacacacttttccagacaaagtcccgtgggtaacctcaaaagtcacttctggccttccccagaggggaaaggagaggggtgcctgtgggcaggtgaccctcagtgctggtggagggcacagcagagagactgcctgcatgtgggaggcccccagcaaaccttgcccagacgtcaccacccatttgaggcaaactgtaaaattattacaatttaggccaggcgcagtggcccatgcctgtaatctcagcactttgggaggccatggcagaaggattgtctgagcctgcagtgagctatgactacacccctgcacttcaacctggtcaacagaggaagacactgtatctaaaataaataggcttcgcgtggtggctcactcctgtaatcccaacactttgggaggccgaggcaggtggatcacctgaggtgaggagttcgagaccggcatgatcaatatggtgaaacctcatctctactaaaaacacaaaacttagcaggtcgtggt

SEQ ID NO: 32612 - DNA, 1026 bp, Artificial sequence
  DNA replication origin
gcctgggcgacagagtgagactccgtctcaaaaacaacaacaacaacaaaaagatagagataggggagaggaacccactgttctccagctccctgggccaaaggcagccctggaggccactgccacagccttcaggagcaggactcagacctgacgccaggcaggagccccccaccccacctcccaggtctgggatgaggcacaaggggctgggaggctgggccgacagagaaggatggtgacctgggcctgaattctatcagtgaaatgtaccctgaagaaaatatgtgctaaatatctcagaagccccacaagggcagggcagtgagtgtgcaggagggaggtggggtggggcgcctgggacagagcaggagggaggtgggaggtggggtggggggcctgggacagtacaggagggaggaaggaggagggaggtggggtggggggcccgggacagagcaggagggaggtggggtggggggcctgggacagagggcctcctctgaagttgaactaatgccactgctctgccctcaaatggtttcaggccagagtcttctctgttcaggactccatccctgtaagaaaactgaggagctggattgagagaggagggagggtgtggaacgtgaattctgagctatcaaaaggggctgtacttcgcctaaggccatggatgctgtgtgcgctgtggggcacacaccacactcctgttgtccagctgcctattttatgttccatgcgcagggagcactgaggcccttcctggagcctcccacacccacacaacacactgtagcctcctctgtcagttcagggagggcagctccgccttacactgctagagctaaggtcagcacagggggatgcctgctgaaacagcatgtgaggtcaaaagcctagtgggtttccatgtgacggaaagtctgggcattgaggaggggtggaggtgaccaggaattaaggggttaccagatgctgggaacagaaatgggtgtttgacatgcagagttttccagatcactg

SEQ ID NO: 32613 - DNA, 1028 bp, Artificial sequence
  DNA replication origin
tgcttagcgtggccgtggccgtgggacccagcaccgcgcccctggggacatccgccctgcccgtgcccacgccacccagcgatgggccaacagtgtgcaagttagccaaggtagcgctggcagccggcagcccctcgtggccgcccctggcgcggagtggcaagcccgacatggagacgctgatcctgacaccactgccggacacccacattttccagtatctttatacagtatcctatgtgtggtaccaatttattgtattagttcattttcacactgctgtcaagaaatgcctgagactcggtaatttataaagaagagggatttaattgactgagttcggcatggctggggacacctcaggaaacttacaatcatggcagaaggagaagcacgcacgtcttacatggcagcaagcgagagagagagagagagagagagagagagagagagagagggagggggagggggagggggagggggagggggagggggagggggagggggagagagaggggagagagagagagagagagagagagagagagagagagagagagagaagagagaggagcaagcaagggaaatgccagatagctataaaactatgagatcccatgagaactcactcagtatgatgaaaacagcatggggaaactgcccccgtgatccaatcacctcccaccaggtcctttcctcaacatatggggattaagaggattgcaattcaggatgagatttgggtggggacacagccaaaccgtatcagcatacctaggttactagctcatatctggagccagcaatggggtttgtcccaccagaatcactcaagcgtagagtgatatggttccccaaaggaaaactaaggtgttatttctagacaaaaaggattcaatgctgggaaggcaaaagcagtctatctattccacagtaggatgtgagtcatcagtacacaggagatagtaagaaggctaggagtagtggttgacacctgtaatcccagcattttgggaggccaaggcagg

SEQ ID NO: 32614 - DNA, 1723 bp, Artificial sequence
  DNA replication origin
gcttgttgaaaggcgcgggctcagcaggccgagccagggatcgctcacatggcgagcgcttggacgcgggtcccggggtcgccaccttgatgtcctggtacacggtcgacaccagcaggtccggagcgtccgtatgggtcatcttaaaagaggtcctcaggctggcggctccagctcacactgccttgcggggcttttgccctggggggagacgcgggtcagggcagccccatccgcagcccaggccccgcttctcccccacgctggcccggcttacctggggcgcagcgggcgtagcagccctggctgcgggcctgggccgagaatgcaggcgcttcctccatgccggagtcagaagcacctgcgggaggaacccagctgtccaggcgcccgtcctgcccctcccccgtcctctccctgcgatggggcgggcgggccagaaaggcttagcggtggctgtggttcccgcagcgggagctcccgcgtgaagctccagggcctcccctcccccgactagtgaccgcagggccggctcgggtggacccctttccgggtggggtaggggagtgggggcgtggtcctggggctgcgccctctggtgtccgcagcttgaaggacgggccgcatttgggccttatttataggtgttgccccacgagacgtcagtgactgcgcccccgtcacagcgcccactgcagagcgacccctccgatcgtgcacagtcgaaggcgagtccctgggcctcagccttagccggctctgcaccaagtgggtgacaccaaccaccccacctgctggccgggccgagcacagagccccgcccccagcactgcaaggacccacgcctaggtgccctcaacttcccgtgagccccaggccagaaaaatgcccccagagagcatacctgggccctaaatctccctttcctctgccgacaccttttctgaccctaagtatgtttgggtggttgaaacaaggccccagctttgtgtaaacgcacaggacacccccctagggtttgcacggcagtcccaaaccatcgagccacgaactcgtggcagcccctctcctctgagctgcgcagcaggcccggaagctgcccactgggggtgggcagggcggagggtgggggaagccccactgctttgcaggagagggccctccccatttcgctcagaaggttccatggaaacctgcgtttcttaggcccccacgctgcaggctggccagggttcagatgtgggttgccaacccctctgtggtcccagagccagctggggggtgagtcagagagtggccacaggcctggtctctgcacacccaacacctggtctggggggggtctaccccagagtgagctggggaaagcgggtacctggccaggccccttgcagggcagaacctcaggtggataggcctctcagggtctggccgggtcccccctctgtgtcccaggtgtgcaggggcttcctgctggcagggctgtttttctgggtcagggccacgagtcccgggctttgtgcccatcccagcctcccccacccaccccatctcccccctccaccccacccgtggcaggactgtctaccctctttctccctctttcaccctaagctcaaggccaggccagaatccggctggatgacagggtgtgaggctccaccccagggaggtgacagtcggccttgctggctgcggctgtcggtgacaccccctcccgtgg

SEQ ID NO: 32615 - DNA, 1737 bp, Artificial sequence
  DNA replication origin
aaggcagcatgtgaggcctctcctgggagtgggggttgtgtttcccacagtggcctcagctgcgcccccgctcaggtgagcccacaggcaggatctgggaggcactcctcccaaacactccactcagaccataaagcactcctgtttcactctgcatgtctgttcttctccctgcacctctgctcccgctgccccggcccaggctgccatgggttggcagggaagtcctctgaggcaggaggctgcccagcagtggtgtgaggacgtcccaccaagtctggccacaccctgggtacatcccagcccacctgtgccagggctcagcagctgcacccagcacacttggggacctcagccccaggaggtggaagtccactctgcaaggctcccaggcagccgcctgcagccctgcccccccacccctgccttcaggcccctgcccactccagctgtcagcagcacccagcctccacccccacagctactgttgccatgagaaccctgcagggcgggcaggaagagtgtgccagtgaaggggaggaggtggccaagctggaggctcctgtgcctgggagctttgtggccccagggtgtggggcaatcactgcagtccctgagcaggtgctgtggcccacagcaagcttaggagcctggccccttagcccacagcccatgaggtcagggccgggttcaggggttctcctggtgtggggatgggtcaacagtatgtgaacttgccaggatcgcaccatggatggctatgttggggtttcagtgggccctgctttgagcagctcagaatggggtaggtcctgcccttcagagccaagggcattggctccccacccctctgccaagatagaacgttcccaggcccaatgcctttgggaggggctggcagagtgggacgaggacattaccaggcaggtatggtaggtcacgtgcaggccttcccaggctggcagggacaccggatgcaggagtggcctcacccagagaggatggcatcttggggacacaagagacttcaggggccatctggccccaggaacccgccaagattttggcattggcagccttgaagccaataggggctggggagaggccagtggggcagagagtagcccacctgctcctgcctcacccgacaggagatgcgaattccaagatgcccctgaccaatctctgcagcccaggccagggcttgggcccctcctctcagtcaagtatgttggggtgacactggcgggactggcaggctgttccgggccacaggactcctgcttagacactgaggtctgtgtcttgggggtgctgcagggaccctgtgctctgcacagccccaaattggaaccagtgcagctcaggatccccagctccaccgtgcagcccccactgggtgcggcccctttaagtacagccccttcagctgccatcgggggcaacactgagcagccaggccaggatccacgctgctgcctggaaacttctgccggtgccggggacgcagcagtgccagggacacggaggagtcgacctgggggtagcacagcccaccagggcacagctggagcagcacccaggtaaggggctaggggccgagttgctgagtgtgtcactgtcatgggcgggggaggctgccttagggcggccgaaaggatggggagtccccgtccccaggcaacaccggctgtatcccttgaagggccgctcgagccagggcagggcaaggcaagg

SEQ ID NO: 32616 - DNA, 1433 bp, Artificial sequence
  DNA replication origin
tccgcggctttttgcagctttttacccccgctgccgctgctttttgcggctttttgtcagcgccaccgctgctttttgcccccgccgccccggctttttgcccccgccgccgcggctttttgctcccagccgtcacggctttttgccgccgcggctttttgcgtcttttcgccccctactctgcggctttttgccgccgcgactttttccacggccgccgcggcttcttcccccgccgccgctcctttttgcccccgccgccgcacctttttcccgccgcggctttttgcccccgccgcccaggatttttgtccccgccgccgcggctctgagggcgggagcggcagactcggctgccagctctactggcgtcctggcaagggcccctggtccagctctcctggctcaggggttccttgcctaggcgcctgcgccccgggctccctgcctaggccgctgtggcctgcatagagtggcgctgcgcgcggaggcgatgggagagaagaaggagggcggtggtgggggtgatgcgggagctgcggagggtggctcaggggtcgctcccagccgggtgctgcagcagtgcgggcagctccagaagctcattgtcatcttcattggcagcctgtgcgggctgtgcaccaagtgcgctgtgtccaatgacctcacccagcaggagatacggaccctggaggtaaggggttcggggacccaggctgggctccaggagtggcctggacacctccctcagggccccagttcactcctggctgagttgcatccttgagcccgcgtcacccccttggaggcttcccctccctcctgcactcgctgatgcagcagccagaggacccaggaccagccctcaccttgggcaggatttgtggggcgggtgcgtggtgggaactgggatggaggctccagggtcccgtgggggcgggggtgggctgcgcgcggatatccccttaccccctgaatttccatctgatccagccctctcatcttgtaaggtgaggaaactgaaggcctgagggagaactgacttgccaggaacccctgttaaggagaattaacaaagtgtggttattaaagaagaactgagttgggagtcagacctggaggcccgcacccttggttaagacattataccaccgtgagtatggcctgttgactgagggtgagccactccatcctcgtctgattgtggggtcttgacctcaaggggttccctgcaggaagaagcaaatgggtttgctttcctagctctgtccagtaccttagggaccctgaggactgaagagattcttggagagccatctggtgtatgtcatgggtgggccttttttgaaggtcagtctgcccagtgggctggctcagcccaaatgaactgtcttgaatctttgcagttgtctgtgtacttttaagggcttctc

SEQ ID NO: 32617 - DNA, 950 bp, Artificial sequence
  DNA replication origin
cccctgagccaggagagctggaccaggggcccttgccaggacgccagtagagctggcagccgagtctgccgctcccgccctcagagccgcggcggcggggacaaaaatcctgggcggcgggggcaaaaagccgcggcgggaaaaaggtgcggcggcgggggcaaaaaggagcggcggcgggggaagaagccgcggcggccgtggaaaaagtcgcggcggcaaaaagccgcagagtagggggcgaaaagacgcaaaaagccgcggcggcaaaaagccgtgacggctgggagcaaaaagccgcggcggcgggggcaaaaagccggggcggcgggggcaaaaagcagcggtggcgctgacaaaaagccgcaaaaagcagcggcagcgggggtaaaaagctgcaaaaagccgcggaggcgcgggcgataagccgcggcggcgtggagcaaaaagccgcggcggcggggagcaaaaagccgcggcggcgggggcaaaatagtggaaatggggtagaaggcccgcacagcttggcattgctggggtgtgatgtgataggaacagtgaagctgaagacaaaaaaaaaaaagatgtaagtaggcttgactcagtgcagctaagaacccagatgttatcttgagggtattaactaataagcagtttaaatcagaatggcacattctgatttgttttttgtatgttcacatttggcaggcatagatactgtttgaagagaggaaagtcagtagatagaggtaacaaagttaaatatgtgccaagtctagaaacaagagactaggggtataaggacctttcaaaataaaatgcaaggtttgaaaactgattggctgggggatgaggaaaaggcaggtctttaaggtcaatccgtgttttgctttaagttgttagcgggtggttttatcacatattgtagaatatgtcatttcagttttgaa

SEQ ID NO: 32618 - DNA, 937 bp, Artificial sequence
  DNA replication origin
gccccgcgtccccggctctactcggcccggcccgacgcaccgatcagtctcggccacgagctggtccacgcaggacagcctcactctcccattttgtcccgtcgctgctggggctgctgctacggtgtccggtggggcagggcgaggtcgatgcccgatggagacttagcagaggaaaggctggagagcgggcgaagaggaagacgatagttgggtcccggcggctgctgatgggggagcttctgggaggggctgcggtcccagccggggaaagggcgagtcgcggcggcgaatgcctggggggtggggcgaggggggctgagagggactaatatgtccgccttcctgttcaaacaaacggagaccgccggggcagactgcgcatgcggggcgcggacgctcggaaggggaaccagccgggaccccgcgcgcgcgcgcgcactctgtcgcctccgcagggtggggtggggcggggcggtgaggtgggcggggccttgcgggcaggcggtggagaaggcggaccgctgggaggagccgagtgcgggtaagcagctgccggcaaggttctcgccttggccggctctgaggagccatgcagggctctggagcggccttggaggtccggacggaggcggagctctggctgcttctgatcgctgtcccggcagatgccccagctctgtttcctctgggttgcagccagtccagagacttctgacgaggagagagtgcttgttctccttgttgctgttagggtggggcaataggttcttttttaggcaagaagccttttcgtcggcaggtaccagcattgagcaccagtggcgtttggttttcagtggtactccatggacagccctccgcgagccccggcgttgaacccatttacgattcactgggaaagttccgaagcgctgcagcgctcagccctcccacg

SEQ ID NO: 32619 - DNA, 1172 bp, Artificial sequence
  DNA replication origin
gaccagcccggccgagccgagggccaccccctggtcctctgccctcgcgccccgctagggccaggtgagcggccgcggggactccggggcgcgggcaggaggtgagaggtcgcgaaccgggcgcgggagctcgcctgtgaccggcaggagctgccctttggcgggctggacgccctggccgcgcggggaagcgccgcagcggacttttccggagggatgggaagctcagcgggggtgtgagcggagcgcgtgcgggtggcgagggagcgccagtgccaacctgggagccgtgcctgccttccctgccgcctcgcgtcgcccaccgaagggacccggccgtgctgtccgcgcccagaggccgaaggcctgtcaccgggctctactcgctgcctttgtggcgggagcgagacggcccgggggtgggacgagggagctgcggcgcgccgagtagcgcggggtcccccggcggaggcggcgagggggcacctggttcgtctccccgagcccaggggcagtgagggggtgccgggcaggcgggcgggcgacaggtagggcgccgcggaggtggcggggagaggatggatggagttcagcctgggaaagttgagaacgtccagaggtggctgggcgctcgctcggcgtctgtgggtttttttcctcaacaccaaatgtcacttcgtcacgagcgggcgcgcgtgtcttccggccagcatgtccatttttctgtgcatggctgaggaccactcttattccgaatgagacacaaagagttgtgttgacagctgaccctgacacaagcagacagcgagtgaggtgcgccctggccggggagggtgagggagactcgttaaaggaaatccattcccgccgtccctcttcccagctccattaagaggaaactccatgtggagattcagtgcgtggggtttctcagttacatgagtccaaggaacgtccccgaacgcgactcgtttgcccggaactgccgctgcctctaaccgaggctgcgggtcctggagaaactcctcagtcttgcccctttctccggtgaacgtgacggttccaaggtccttatcctccccacccactcctctggccccggctgagaggatagaaaccacattttaatttctgcttttcacaccgtaaggtgtttttttccgcctcccccc

SEQ ID NO: 32620 - DNA, 850 bp, Artificial sequence
  DNA replication origin
cccgtccgggagggaggtgggggggtcagcctcccgccccaccagccgccccgtccgggagggaggtggggggtcagccccccgcccggccagccgccctgtccaggaggtgaggggcgcctctgcccggccgcccctactgggaagtgaggagcctctctgcccggccagccgccccatccgggagggaggtgggggggtcagccccccgcccggccagccgccccatctgggagggaggtggggggggtcagtcccccgcccggccagccgcctcgtccgggaggtgaggggcgcctctgcccggccgcccctactgggaagtgaggagcccctctgcccggccagctgccccgtccaggaggtgaggggcgcctctgcccggccgcccctactgggaagtgaggagcccctctgcccggccaccaccccgtctgggaggtgtgcccaacagcttattgagaacgggccatgatgacaatggtggttttgtggaatagaaagccgggaaaggtggggaaaagattgagaaatcggatggttgccatgtctgtgtggaaagaagtagacatgggagacttttcattttgttctttactaagaaaaattcttctgccttgggatcctgttgatctgtgaccttaccccccaaccctgtgctctctgaaacatgtgctgtgtccactcagggttaaatggattaagggcagtgcaagatgtgctttgttaaacagatgcttgaaggcagcatgctcgttaagagtcatcaccactccctaatctcaagtacccagggacacaaacactgcggaaggccgcagggccctctgcctaggaaaaccagagacct

SEQ ID NO: 32621 - DNA, 1250 bp, Artificial sequence
  DNA replication origin
agaggggctcctcacttcccagtaggggcggccgggcagaggcgcccctcacctcccggacgaggcggctggccgggcgggggactgaccccccccacctccctcccagatggggcggctggccgggcggggggctgacccccccacctccctcccggatggggcggctggccgggcagagaggctcctcacttcccagtaggggcggccgggcagaggcgcccctcacctcctggacagggcggctggccgggcggggggctgaccccccacctccctcccggacggggcggctggtggggcgggaggctgacccccccacctccctcccggacggggcggctggcctggcgcgggctgacccccacctccctcccggacggggcagctgccgggcggagacgctcctcacttcccagacggggtggctgccgggcggaggggctcctcacttctcagacggggcggctgccgggcggaggggctcctcacttctcagacggggcggctgccgggcggaggggctcctcacttctcagacggggcggttgccgggcagagggtctcctcccttctcagatggggcggctgggcagagacgctcctcacctcccagacggggtcgcggctgggaagaggcgctcctcacatcccagacggggcggcagggcagaggcgctccccacatctcagacgatgggcggccgggcagagacgctcctcacttcctagatgggatggcggccgggaagaggcgctcctcacttcctagatgggatggcggccgggcagagacgctcctcactttccagactgggcagccaggcagaggggctcctcacatcccagacgatgggtggccaggcagagacgctcctcacttcctagacggggtggcagccgggcagaggctgcactctgggcactttgggaggccaaggcaggcggctgggaggtggaggttgtagcgagccgagatcacgccactgcactccagcctgggcaccattgagcactgagtgaaccagacaccgtctgcaatcccggcacctctggaggcgaggctggtggatcactcgcggttaggagctggagaccagcccagccaacacagcgaaaccccgtctccaccaaaaaaatacgaaaaccagtcaggcgtggcggcgcgcgcctgcaatcgcaggcactcggcaggctgaggcaggagaatcaggcagggaggttgcagtgagccgagatggcagcagtac

SEQ ID NO: 32622 - DNA, 1156 bp, Artificial sequence
  DNA replication origin
ggcagaaaggccggcagttaagcttgctccccgccgcccccctcgggctagcctcccccggccccctgcgctcctcgcgctgccggccgggggagagcgtggtttccttgcggccgtcgctgtagcctggccggggagcccggaggaagcgggagagtccccgcccacggccccctcccctctgcccgctctccgccgccgcctccgagcagccgcgggccgccctccactccgagcggggggcgcggcggcgacagctgggcagcggctttgggctccgcggggaccgcgccgccgcccccgtgagttattctcacgtcccccggggctcgctgccgcccccgccgacgcctagagtccggcccgggcccaactccctcacgggccccccggcggcagcggcggcggcggcggcggcagcggcggagcccaccgcccgggccccgatgagtaactcccggaataaccgggtgatggtggaaggggttggcgctcgggtagtgcgcggcccggactggaagtgggggaagcaggacggcggcgagggccatgtgggcaccgtccggagcttcgagagccccgaggaggtggtggtagtgtgggacaacggcacagctgccaactaccgctgctccggggcttacgacctccgcatcctggacagcgcgcccaccggtaagccgcggccacctggccagggcttgcgcgcgcggggggaaggggcgagctgcggtgggcgtcggtgtcgcggggagaggtctgcagtgggacacctggtgggcagcgcccggctggagcgagcggaaaggcaaagcgccaaaggaattctaggttccgaacgggtgaacaaacactttcagaaaagaccctctacccccaagggaaatgatggcagcaccatcaccgggatgctttcaagcctggaagacacaaagcaccgggaagagaacagacacaggtcccccaacccgactcctcctcttgggaaggggtctggagaggcctatctaataagccattgaaattaatcagccaccaagtgataactgtctgaagggaggcttgctttgccatatggtgctcagctgaccgtttataattgccaaggggccttggtacctcggatttgtggagatgccttttttttttttttttt

SEQ ID NO: 32623 - DNA, 996 bp, Artificial sequence
  DNA replication origin
ctttttttgtttgtttctttgtttgttttttaaaaagaaaaaaagacatagaaaaaagatgagaggctgagcatggtggctcacatctgtaactccagcactttgagaggccgaggtgggagcatcacttgaagccaggagttcacatcagtctgggcaacagagggagaccctgtctcaggagaaagaaaaggaaagaaagaaagaaagaaagaaagaaagaaagaaagaaagaaagaaagaaagaaagagagagagagagagagagggagggagggagggagggagggagggagggagggagggagggagggaggaaggaaggaaggaaggaaaggaaggaagggaaagaaagaaagaaaagaaaaagaaagaaagaaagaaagaaaggaagaaagaaagagaaaggagaaaggaagggaaggggagaaaggaaggaagaaaggaagagagagaaagaaagggaagggaaaggggaaggggaaggggaggcaagggaagggaagggaagagggagggagggaggaaggaaggggaaaaaagtgacgaagaaagatgaattgaaaggaggtccctagagttctgtgtcacagcacttaggatgttcaatctgatgagctcagtccttcccccagggcagcagtcctactggaaagccccatggaaaggggttctgtctgcatgtgagtgtgcattggaaggggtagggcaggattactggaatacaatatcccagcttctgggaggaggaaaggggttgctcctgagccttgggtctgctctctgcacacatgcctgccagcacatctgcccaaggaagccttgaattagtatgttggagagcaaaaatctgagatctagaactcttcccactcaattcctcaatacacagctagcaggtgtgcaaatcctgccccttggaagtggccactggtgataccacagcaaggcatctggctccataagtgggtctctgtaggtctctaagccttattt

SEQ ID NO: 32624 - DNA, 936 bp, Artificial sequence
  DNA replication origin
gtgccaggctgtgggtcggaactgcgctcagcgagcagctgggcgctggaggtgaagaggaggaggagggatcgaggggaggagagaaaagagggtggggaggggacggcgaggggggaggggagcgcgccgcccaggcagacaatgagagccgcgctgcctgcgggcgtgggctgagccgcaagccctgtccccggagtgggggcgagtccacccggggggcaccgagcccagggaccccgggggaggggcggaggccacagaacgcctgacctggctagcgacccgcacccatccagcggcggtgcaccctcccgctcccgcagtcgcacacacacacccacacgagggagggggagggagccttggcacgggaggagttggcagtgcacagtcccgcgccgccgccgcggcgggaggggcgctccagaccttgggtcagcacgcccccagaaggaagggggaacgtgctctgcgcccccccgccccccaacccccgcctagccccttcacagcaaatgcgctttttgccctgaagttgtgtgagaccgaccttaaactttctccgaccctatctcgggatgctacggctcaggtcgtggtggtttcgggaacctcaagacaacattccccagctgacctttgggaactttaactcgggtcgtcatgtacggaaaggtagtctatggggtacgcagaatggaaaagggcttccacatcagtcgtgtccgaggacgctctccaacttttgatgtccctggagagtttctgatatttccctggagagtttcaggtaagtcacagataagtcactgcgaagagggggtgtcaccttccctggacccagcgctaaatgctgcttccccacccccacgttcatatacacaccccctcttcgctccctccaaacagttatcacaactctgtacaaactga

SEQ ID NO: 32625 - DNA, 906 bp, Artificial sequence
  DNA replication origin
ggctttccttccgccctaaagtgtctcccccgggctgatgacacacaaaagaatttaagtagctgtgcgtgtcggcaccgccgcatcccgcctctctgcggatgcccctctcccgaaatgcctcggggtgagggttccccacgggaaaacccttcgcgtaaggaaggcaacctgtccccgaaaacgaaaccgccgcgttctcctatattggctctcccagagcttcccggactgcgctgaccagcccgaacgcgagccccagagagaaatgcaactcggcccagggaaagtgggacgccagggcgggggcagcagtctgggtccttcccagcagaggcaatgcggagagcttgtggggcgggaatcgccagccccaccggcgtccccgcggcgccgcacaccttagacacggcccgcgcctgcagccaccagcgtgcgcgctcacgccggccgggccacccggcccaccccgcggtcatctccagcagcagaaacgccggaccgttccggaatcggacgtagcggggtggagcggagagcagagaaaaggagggggaacgcaacgggctggggaggggggagcgtgagaccgccccagagccgaggcgaccccaaatgggagagcaggaagaatgacagggagactcggagcgagtgggggagggaggtgaaatgcagccgggctggcctcctccaggctgctcttccaaatcgcctcggctcatcggagattaccacactaaaattaatgcccacacacagacctggctagatagcaagaaagaagtttctctgcctgcctaactaccggctcccgcccctttgcgccgagataactcggagataaggctgcgcgcagataagcgcttcgaggagagaaaaagagactagaagttggtccgcggt

SEQ ID NO: 32626 - DNA, 1305 bp, Artificial sequence
  DNA replication origin
ccgccgccgcggctgctgccgccgcggccgcagagtgcacgaagccgccgggcgcgccgtcgtaggcggccggaccctggctggagagagcggcgagggtctggtacatctcctccggctgctcgggtgcgaaggggctcagcttggcgccgcggctggaccacagcagcttgctggcggtcgcggcttggtcgaggtcagtgaacagcagcaagtcctcccagctcgacaggttgcccccggggcccgcgaccccaggcgccgaaggtccgtggggagccccgaagggatgcgaagcgtaggaactgagcagcagcgagcgggccgggggtccggccgccgcctccgtgtcgagctgaggcgtcccgcagttgctggcgccgccggggccccgctctccgccccgggagcaggaggaggacgaggaagagatgggggaaggcggcgtggagggctcccgcgctggaaaggctctggagtcgctggcgtccgcacccgcggccccgaagcgcttcggcaagcaccagccgccgtcagtcaaggccatccacggtccggcgccgctccaagctgacgtctagctcctgaggtggggtgggggagacgggtatggtaggagatcgacgggttaacaagagcgtaggctgcacgctacctcgcctccactcctttttctagttcaaatgggatctgacttctcaaagatcccatttgagacttctcaaagatcctatttctgccccgggcgtggagatcaataagggaggggaagggagcctgcgcagccgccacagggccctggaagggctgggataccagccctccctcaaaggcaccgctccggtccccgcgtcctccccgcccaccccctcggccgcatcctttctccgtgcgcgcgccagatcccaggggtgatctgcagaagctggctgaggctttccttccgccctaaagtgtctcccccgggctgatgacacacaaaagaatttaagtagctgtgcgtgtcggcaccgccgcatcccgcctctctgcggatgcccctctcccgaaatgcctcggggtgagggttccccacgggaaaacccttcgcgtaaggaaggcaacctgtccccgaaaacgaaaccgccgcgttctcctatattggctctcccagagcttcccggactgcgctgaccagcccgaacgcgagccccagagagaaatgcaactcggcccagggaaagtgggacgccagggcgggggcagcagtctgggtccttcccagcagaggcaatgcggagagcttgtggggcgggaatcgccagc

SEQ ID NO: 32627 - DNA, 1308 bp, Artificial sequence
  DNA replication origin
gcgcgcaccccggctggcctcaggcctcggccgacagccctccatacggcagcggaggcggcgcggctggcggcggggccgcggggcctggcggcgctggctcagccgcggcgcacgtctcggcgcgcttcccctactctcccagcccgcccatggccaacggcgccgcgcgggagccgggaggctacgcggcggcgggcagtgggggcgcgggaggcgtgagcggcggcggcagtagcctggcggccatgggcggccgcgagccccagtacagctcgctgtcggccgcgcggccgctgaacgggacgtaccaccaccaccaccaccaccaccaccaccatccgagcccctactcgccctacgtgggggcgccactgacgcctgcctggcccgccggacccttcgagaccccggtgctgcacagcctgcagagccgcgccggagccccgctcccggtgccccggggtcccagtgcaggtaagggtcgcgcctcaggttcggggtgcgggtccaaagcgctggggcgcacgggggacgtggagcagctgctccactcgggccctgttttcaggactttctcgtccgggtgcgcggaggtcggcctggtcccaggaaggatttgcaggcctgtggctgggtaacccagagtccggtagcgctgaggcgagttgtgccaagacttgagtctgttgtgccaagttcctttccacggatgagactaaatgcacatctgtaccttcgtgccttggggaagctcagggccttgatgagtagtgaatggcatctgctattggggaaaaacgaggctgggagggaactaacagcgcttgagccccatcgcagaccctactttgggtgagtggaagaaattccacgatgggagtaagtttgggagagtggcgggcacttgatccacccccaaacagacacacaagcacatgcaggctcacccagtttaactctccaaagggtgcgtgtttgtgttttcctagagaagggtatttagaagagcacaacagaagaacctagatgttcctagggaagctagttggcgtctcctctcccacaagggagagagggaaagaagagagggcacctggagtggtcagacttgtgacttcatggtgaaggagagctggtggataggcccttgggcttggcatcagctgggccttggtctggggctgctgctcacatggccaggctgcaactcagggatcctggagctggggcacctattctcccttcgaagtttagcccgccaatttttcagtttccaatttgactcattttttcctgtatctggga

SEQ ID NO: 32628 - DNA, 934 bp, Artificial sequence
  DNA replication origin
tgttgtgtagctgtctgagtagagggttccaggccataaaaccaacaccatttacccatttcctttgaagcaaagtaactgttcaacgtaaagcggaaagaatctttgggacaagtttatcgctatgatcagcctattagtctaacatgctgtcatccttcccgcactatttactcaggcacactaagtgcttcttggttaaccctgcccagtactgatcatctccagtggcggggggctacatgttttttgtaggttgtttttatatagaatgtgaaggatacacgattaccttgtgcaagggacaaaaagaatatagcggtgtcggttccaaaagcttttcccatgttttcattcccagcaaataccatgttcttccatctttcagcagctcatgtaggggaatgaacaaaatgttctgccacgaacttgttccaaaatttctactagggcagcagtttgagggatttagcaggagaagcgtggggtgtgttattctggtcatgcgtaagaaacttggaaaacagaatcagaaaatgagggcggtggggagtggtggcagagataacttggcagtaaaacaaaagtgaaccaacaaaaacaacacaacctaaaagggagttgaggaggccagtggagaaagagggcatcacattgacaacttggccagaaatctggacactgtaagggaggatttagtgctgggtcgtgccctgggctgaatttatcgctgcttgccttgttaactcgcctcatgtttaaagtcaaaactgccataggctctgagggatttccatctttgtcatttgtatgatctgcctcaaaatacaacctcccaagtaaggagcatgattcccctcctgccaggaagaagaaagcagagaattgagggatgccgaaatcgatttttaaagggtttgggtttggggcggtt

SEQ ID NO: 32629 - DNA, 1100 bp, Artificial sequence
  DNA replication origin
gtggggggaggttggaaaaatatgggacgcctagagctaattcctctgattaaaaatgcattagtttggaggtgtcagggacacgcagctgttttcaaggaaagcctggctccaagaggtcctccccggccgggccgcctggcggctccatcccgggtgggtgtcagcgagcgcgcagcccccgacgcttgtcctctccctgacagggccctggccaatgtcctgctgctgcgggtcgtggtaatttacatcctctctgtgtacattaacttatctgcagccgcgctggctgcgctccttcagtcagcctgtctcctgcgcagcctgggagccttccccgacccagcgacccaccgggcggccgggggcgactggggaaccctgggaatcacaacaaccgcccggttccgacccggcccggacgcccgcgggggcgggggactctgtggggccaggcgtggagggccggcgagcccggctcgggcagggcagaggcgggcggccgggggctggcggcgaacacttagtggctaattcatgactcatgactcatgcgcaggctcctcttcagtgacagccgggacagttcctggttatttgtagccccccggctttcatttcgctgtaattaagcagtcatttgagggtcatttcatccccgttataggtttctctgttttaatcatgctttgagttccagtgggggcagcagggagtggaaggggaggttgggaaggaggcgtggagggcaagagggtaatcgtctctgagaacgcgtgcacttttcataactcttcccgtgacaggccctggtgcaggctccgcagacgccgacgcccggcgctccgctccggggcgcgggccagatcctcttccctgacacccgcggtcttccctgagaagaggtctggccctttttgagtcagatgttggattttctgctttcccctctggcaccacactaatcattctctttaatcgctgtagctttttaatgaggccaagtaggtatttatggagccgtctactctccaaacgctgatgcttgataagtcatttataacttatcggtgggctttgcataggccaaacccagaaga

SEQ ID NO: 32630 - DNA, 1237 bp, Artificial sequence
  DNA replication origin
gcggcttccgggggggttcgggcggcggctgggccggcgcggcggccgcgggctgaggctggggctgcggcggcggctgctgcaatccgctggcgcccgcggcgtcggtgccggcgctgccgctgctgcaggcggccgtggtggcggccgccgccgccgccgccattgtgtccgtctgcggcgggatttccgcgatgcccggagaagcgagcggcgcccgagcgctaagcggcgggcgcgagcggcggcgacccgggctgggtagggcgcggggatcgggcggcgtgcgcggcggtccagcccccccgcgggcgggccatgctcgcccctcggtgctggggatgggggcgccgccgccccggcccacgcgcacgcctcgctacctagctcggctagttcggctcgctggctggccgcccgccggtcgcctggccgctggctcgcgggctccggggccgggtgtccgtatttataggtgcgcgcgccccgcgctcgcgctccaaagccctctttgcaataacacggaatcacgtgtggggaatgcgacctgggaggaaaacaaagccgcaggcggcggccgcagaggcagacggcgggaggcaaggggccacgggaggaggaagaggaggacgcgagagccgagcgggtggtggggcgggggatcggcccggctgtccgggttgtcggagctgcctgctgggagagttggcgactcccggggccgcggaagccaggtgcgggaggcgagcacgtttcccccgcgcgctcgcactgggaattgggtgagcgagcagaacccggtgggttaggtcctggggctgtgctcctgggagagttgtgggtctacaggacggttatgtggagcgttgcagagttttggactgcgagcgagttacttggaccccgcaaggccgttggtccccgagaagtaaatagatccttttcataataacacgggtaagtccacagcccctatggagactgtcccaccgtaaagctatcgctaacaaccattgcagttgggtctattcattcccaggccaaggatgcagcccccgggataaatgcacgccttgggatgcataagagcccagaagcacgaacatcttacatgtggccaacgaactcacgcatccccaatccatggtattgtcacttttcatctctctcttagcaaaggacaacgcaaattttttactttggctctgaaatgtgctccattttctgtgaagaccca

SEQ ID NO: 32631 - DNA, 1718 bp, Artificial sequence
  DNA replication origin
cgccgcagccccagcctcagcccgcggccgccgcgccggcccagccgccgcccgaacccccccggaagccgcgcatggacccgcggcgccgccaggctgccctctccttcctcaccaacatctcgctggacggccggctgccgccgcaggacgcggagtggggcggtggcgaggagggcggcgcggccaagccgggcgccggcggcgcctgcggcgcgaggactcggttcagcttgctcgccgctgccgagcggggcggctgcatcgcgctcgccgcgccgggcacgccggctgcggggttagccgctgggtccggcccctgcctcccacagccctcgtcgctgccgcccttgattcctggcggccatgcgaccgtgtccggccccggggtggcgcgggggttcgcgagtcccctgggcgccggccgggcgtcgggggagcagtggcagccgccccggccggcgcctctcgccgcctgtgcccaactgcagctgctcgacgggtccggggccgccgggcaggaggagttggaggaggacgatgcctttatcagcgtgcaggtgccggcggccgcctttttgggctccgggacccccgggagtgggagcggcagtcggggacgcctcaactcgttcactcagggaatcctgcccatcgccttctccaggccgacttcgcagaactactgctccctggagcagccaggccagggcggcagcaccagcgccttcgagcagctgcagaggtcccggtgagtatccgggatgcgacgcgcacccaaccctgcgtcccgcccggcgctcccagcctccccgcggtctctgggctacgggacacgggttgctcccattttcccgcgccctgccggatcctgtgctccgggcccgaatcccaaaccacgagggcacccaaaagagggggcgtccccagggagtgcggggttacacgtgtttgcacgagcccagcattcgcagaggagcaccgcgcttgtgcagtgggtcgggaattgggagttgcaggagcccagtagaaagcggcgtccgagcctccccacacgagatcacaaacttcctgaaacccggtccagacccggaggcgcactcttccccgcgtggggcgagactcggccgggcgcagagtggagcagtgcaggccggcagctgagcggcgcgtgtgagcctgaacttgtagcagacacgcgtgaccctccggagaagttcttgcctgcgctccaagtcttcttgcggcccggggaaacttggctttttccatttgctttcctgagcaatggaaagtccttcttacattgcctccaactaggcctaggggggtggggaacaaagaggaaatagggcttgagggatttttttcctattccaagatgaatttgcttgagttcgttaaacgcttgttttacttgtttgttagctgaagttatctggcggcattaggcgtcttagcaaaaacatgaaacgctggacgtttgcttattgttcaggaaatagagtttgtcaccatgtattattctaaggggcagtcggaggttgggactgtgtgaactgaagcttgcaaaagaagtaggcgagtaggcgggaacaggtggggaaatgcagatccgttcctagggagtgccctcccttgttggttaataaggcctcttgtgaagttagcaatagcatagaccctaccttgacaaagttgttttaacttcttggggc

SEQ ID NO: 32632 - DNA, 1456 bp, Artificial sequence
  DNA replication origin
gtttaggtgtttggaagttcttgtgtgctggagatgtggctggggtttgtctcacagtggaggcaaggaattgcaactcagaaatatgtttctgtttggctgcctctattattgtacacttgaaggcgaggttaattaagtcctgttgtagggtttgagggccagaatttaatttttggagttttatttaatgttgagagcagattgggtaataaaatgtatattgagaataagacggccttttgaccttttagggtctagggctgtaaagcgtctcagggttgctgccaaacgagccatgaacggggctggatttttatatttgatgaaaaagagcctaaacgccgtctgatttgggataaagaaaaaggagcattaaccttgactatgcctttagctccagccacctttttaagaggaaattgctgggcgggtgggggagggctagtcatggaatgaaaccgtaagccggacccggtgtgaggaggggaggtgataaaaggattatagggtggagaagcggaggctgaggaagaattgggacttagcctggggaggaggggagaggtcagataggtctgtagaaaaggaagattagaaagactcagcgacgtttggggttgggactgaggggacaggcggaagggaaagaaggaagatttgggacaagttgcattgggaacagagactagggacggcctgatgtgtaaaagaaagcctggacgtcatgcacctcagaccatttgcccattttacgacaagaattatttagaacttgtaggatggaaaaattgaaagtgccgttttctggctatttggaactactgtccagtttgtctcggggtcaagcggcatttcagaagaaaataagacgcttagattttaggtcaggcgagagttgaagaggttttaagttcttaagaacacaggctaagggagaagaaggaggaatggaaggtggaaggttgcctatagtgaaggaggcaagtttaaagagaagggtagagacatggagggaaggggttcaggggttcttaccctccagaaaagcaggacaggggtcggggcatggaaataaggggttggggcacagataagaggtcggggtgcggaaataagggatcggggcacagagataagaggtcagggctcctgcccctcccccagaaaagcaggacttgccactaagggtgaagtctggatgtgtgcaggtcacaggggatatgatggcttagcttaggctcagaggtctgacagtatcagtatcattttgttgaggagacagacacaggaggtcagcaccttcctgaaggtccttggctggctagaggggccacctgcccacgcatcccctgcctcttaactctcacagcattctgcctccccaacaggaggctggggtttggaaaggctgagtagacaggaccaagtcagaggtggagaagaccaatcatgt

SEQ ID NO: 32633 - DNA, 1071 bp, Artificial sequence
  DNA replication origin
tgatttgactaataaaggccggtctgctatcggactgtataaaggtgggaaggccataccgaggaattatgtctgacagagggaagaaatgaccgtggtggccttcttagaccctgtgggaaaggcctctacctatccagtggaagtgtctacctagaccaagaggtattttagtttcctgactcggggcatgttgagtaaagctaatttgccagtcctggggcgggggggcaaatccctgagcttgatgcgtagggaagggagggggcctgaataatccttgaggagtagtagaatggcaaatttgccagtcctgggcaggggcaaatccctgggcttgatgtgtagggaagggacggggcctgaataatccttgagtagtagaatagcagatggaacactgagaagttatttccttgaggatagatttccacgatggaaaggaaatgagaggttctaagaggcgggctagtggcttgtactatagcatagcctgcctttgctggtgtgtggcgattaggcctggtggaactgccatcgataaaccaggtgtgatcagggtgaggaacaggaaagaaggaaatgtggggaaatggggtgaacgtcaggtggatcaaagagatgcagtcatgagggtcaggtgtggtatcaggaataatgtgggaggccagattgaagtccaggccaggaacaatagtaattgtgggagactcaacaaagagtgagtacagctgaaggagcaggggagcagaaagtatatgcttcaggtgtgaggaagaaaatatactttggaaattatgagagctgtagagggtgagttgagcatagtttgtgattttaagggcctctaagagtattagcggggcagcagccgctgcatggagacatgatggccagcctaaaacagtaaggtcaagttgtttggacaaaaaggctacaggacgcgaccccggtccttgtgtaagaattctgactgcacagctctgcacttcggctgtgtgtaatgaaaagggttgcgatgagtcagggagagctagggtgggggcagtctctaaagctgtcttcaaggaa

SEQ ID NO: 32634 - DNA, 936 bp, Artificial sequence
  DNA replication origin
cagagaaaggtgtccatccagggaaccctccaactgcacagagatcagcccaagtgccgagaggcctccacctcccagctttggccgtgggactgccaaatagaaaatgacaactgtctaagcccagggctgctcactccaggccctgcctaagggctcaggggatcgagctctttttcctcagtcccagcaaggcagcctggagaagatgaggactgaactagggcggcagcagctgtgagggtagaggaggcacagacttggtaataggctggatgtggtggggaggggatactggggagtccaaggggcctccagggtttctgacttcggtgatgatgaccaggattggggctaccaagtgagaagcaggtctggagaaacagatcagttccatttcagatgtccggggagaaccataggacagcaagccccagggctctgcaggggagctgagctcagcaggaggtatgggctggagatggagatttgggggtcctctgtgagcagcaggtggctggcacaatgggtgtggatgagattttccagaaagtatgtggcatgaggacagaggctcctaagaaacagcccagggaaaccctgaagaggcagacaaaggaaaaggaagagaaagatggatgaaggaaaagcccaagacacaggaagggaaccaagcagggagggggcatgaaggccacgggggcctggagaggccagaggagaaagcggggggaatggtggaaacagacacgatgagtcgcacagacgaagccaccagtgccttcagccaggacagtttcaggggaacggcgggggcagaagcaggagcagcagaaggtgacagggacaagagggcatggacaacaccaagcccagccctgaggcctgtggcatgggaggggagagaagggatgaggcagagtgggaggtgcacgg

SEQ ID NO: 32635 - DNA, 1029 bp, Artificial sequence
  DNA replication origin
cgggcccagagccgcagccgcagccgccgctacagtccgggccgggctccaccgcgcatcctgctccactctggcgaccgcccccggggcccccgccgcgggcgcggcgcccgccatgggcgaggaggactactatctggagctgtgcgagcggccggtgcagttcgagaaggcgaaccctgtcaactgcgtcttcttcgatgaggccaacaagcaggtccggcgcgcccgcgcttcctcccccgcgcggccctgccggggtcgtgggcgcgccaaggccggtcccgcgcgaccaggcccgagcgtcccctcctgtcctgtcccgtcccgtcccagcgcgggaggcggcgcgcgctccttccttgttgggtgggctcagccgcggccaggtgtcctcgcaggtgacctcggggctggacccccgagccagctgcgcggatgcagtggccccgtggccagtgtctcaattgttggcgcgcccgtcttatctaggcttcttttgttgtgtttgtcattagttacactcgtagtcaagggtttagacgtcgagattttcattttccttgaaattttgtaaagggggaaaagactgtacttcaggcgtatcagcggcgccgatgcgcgaaccggtgttagaacttggagcctcgggaacccgacccggtgtcacggtggcatccttttcgctctctgctcttggtttttaaaattcacctgagcagccaaacatctgtaccttgatatgtgccgtgttactttagttgaacccagggtggtgtataacagaaataatcgcttgcgggttggcttctgagtttagatcctttcagagttcaggctgttaaccttgctgcttttccctctcaggtttttgctgttcgatctggtggagctactggcgtggtagttaaaggcccagatgataggaatcccatctcatttaggtaatggtatagacactttcagatcattttgtcatgtaaacagaatgatgtttttctaattcaaatggttttttataattttgtc

SEQ ID NO: 32636 - DNA, 1143 bp, Artificial sequence
  DNA replication origin
tgtatacaggtcagctgctcccccaagccttcaaagcaaggttcccacgcatctttccatgaagtctgtaccaccctttttggtaaaagatccagccacaaaatggatgattttataagccaaaatttgaatactggcaattattcaagtagcccaggctcagccacgtgccgtctgcgtccgtgggctacacacaccccctcttttctcactgcctcctgggcggtgtggatcagctgcagagtgtgatctgcggtcagggagtgccttcccggagttttcgctttcagacccctggtgttaaagacgttctgtgagcgggtggggccgggcgccccagtcacggcggccgccgcctcctcttcccgcaggacgggacagcgcccctgtggatcgcgtcccagatgggccacagcgaggtggtgcgggtgatgctgctgcgcggagccgaccgcgacgctgcgcggaacgtgagtgcccgagtcgcgcggccaaagagcgaagcctcccggcgcgcctgtgtggagaaaacgggtcttgactgagtctgcagcccacatgggtttcctcccaacctccttccttgagcaggaaaacaaagtcaaggtctgattcggtgctgctcggtctctctcctcctccacccgagatgaccttgggacgcactagagagggtggaatcttagccttaggcctgagggcggtagagacggggcctcccgcctgtcctgggggcctcccgcctgtcctgggggcctcccggctgtcctggggcgtgtcctagggggatcccctggctggtgctgcgcctcctgcaggccctgcctcttgcccctcctccctggagctgcagaccccttgcaccccgtcccctgttggcccgccgtcatccactggcctctgctggtgccacctaatactgcctttgtgtgctgcacagcaggcccttttccccataaggaaggcttgaagagaacctgaccacctatgctgtttgctttttgtgttttactgtggcctttgtataacccttgcttacgtaacccaccttcccctctccaagtctaagctccaaaaaagggaaatcaccagacgcgttcgccaccatttcactgccctctctctcactcttcttcttcccac

SEQ ID NO: 32637 - DNA, 765 bp, Artificial sequence
  DNA replication origin
ttgactttgttttcctgctcaaggaaggaggttgggaggaaacccatgtgggctgcagactcagtcaagacccgttttctccacacaggcgcgccgggaggcttcgctctttggccgcgcgactcgggcactcacgttccgcgcagcgtcgcggtcggctccgcgcagcagcatcacccgcaccacctcgctgtggcccatctgggacgcgatccacaggggcgctgtcccgtcctgcgggaagaggaggcggcggccgccgtgactggggcgcccggccccacccgctcacagaacgtctttaacaccaggggtctgaaagcgaaaactccgggaaggcactccctgaccgcagatcacactctgcagctgatccacaccgcccaggaggcagtgagaaaagagggggtgtgtgtagcccacggacgcagacggcacgtggctgagcctgggctacttgaataattgccagtattcaaattttggcttataaaatcatccattttgtggctggatcttttaccaaaaagggtggtacagacttcatggaaagatgcgtgggaaccttgctttgaaggcttgggggagcagctgacctgtatacatacaccacagcagaaccaaattccacaaacccagagagaagccggcctattcccccaagactgtccatttctttgctttcccagtgggtcacaccttaatgttcacaaaatacacccttcattcccatagaacgcaggcagttttctttgaggtggggtc

SEQ ID NO: 32638 - DNA, 962 bp, Artificial sequence
  DNA replication origin
gacgagtgagtgtggaagtgtggacgtgtgtggaaagtgcacagtgcgtgcggagtttggggtgtttgtgcacgcgcgtgtgtggcaggtcctggagcgcgtccacgcgacaccccatgtgtagtgtgcgcgcgcgcgcgcccccgcgccgccccttcggcccggccctgtgtgcggcggctgctgccgggccgggcggcgggagcgcgcggcgtcggaggccgcccctctgcggaacgccgagagccccgggagagtgaagggccggggaggacaaggcgccccgggcccaaagcgcgccggctcccgctcgggcggccgcggacatgtgcaggatgtccttcaaggtgagcgaccgggactccggggtcagggctggggccgggctcgggcggccgggcccgcggggtcgggtggggtgggatggggtgggatggggtgggcgctgcccgctgcccgccgcctcctccttcctctctcctccagctgcgggcgaggcccgggaggaagcggcggggctgggtgcgccctgtgggtttgcggtttgcctgcctgccctgcctgagaggcttcgcactcatggctgtggatcggctgagtctgtgcccggcgacggggcggcggggactgtcgccgggtaacaggtcgggggcgggtaagaagcctggggtcagcgctgtcctgcagcagaaggagtccccgaccctgaccctctgggtcctcatgcaggagtaccagctgcacccacggatgcctcctccccggaggggtggccagcacccagggaggcttcagggtccaaaggtgtcttgtctcaaaagagttgattaaagtcattccatctaatccccacattttaggatgaaagaggttgatttgcctcgattgaaagggtttaataaaaatagcagttaaaatgtattaaacagttcaaatgtgcctgactctgaaccaaggacatg

SEQ ID NO: 32639 - DNA, 1096 bp, Artificial sequence
  DNA replication origin
cggggaggcttggaggggactgaggaggcaaccaccactgggagcacatggttgccacgtggttggggaaggactgggtgcaggcgccccatccagggctccctgagtcttggcactcccgagcctgggatgccgtggctcaggtgaagtgtgctggtagcaccaggattctggagttcttcgtccggcccttacaacatctactgtgatggcagctctcagttttggagcccctttcctgtctcactgcggtagatggaacttgccccactttgcagatgacgatactggtgctcagagataaactcacttgacaaaggccgtgattgtaggcagagactaaatctaaaccaagatgcttgactccgtagctggtgcttcctgaatatcgtgaatatgaaagaggctttgggtttgggttgtggggtttttttgggttttttttggcgggggggtgggggcgggggaagcggcgggggtgtccccgcatgccgtcgtttgtgcggcattgagcaaacagcttttttttttttttaaatatgagagacgtgcagtgttcggtttgagtcaaataaagacccgagactattaaaagaacaacagcaaaatgccttgtctaagaaggctcttggctgtgcctgtagggattccatcaactctactctaagggaaggtggcgtggcatatattcagttttattcccaagagagggtgtcatccctctccacactcaactgcctgttaaagcacatggacatagatctacctggcagcacagaacaagtggcatccaaatgggcccttgttggagaggcaatttcagctcattgccaattaaacatttgacattagctagactacaagattatttagggaagactgcttcaagaatatgtagtccaactccacacatagggggattaaaattgagcatagcaaaaaaaggagctgggtacccatctgagtcccattggcactgccaaatcactgcttttcctctgttgcagcccagactgatggttaataatacacctgctgtaaatatgttatttaaagatgtcattgattagagaattcccttcgtgatgaccactct

SEQ ID NO: 32640 - DNA, 886 bp, Artificial sequence
  DNA replication origin
caagcaggctggaggcctgagggaagtgggaagagctgctggatctggaaggatgggagccacgaggcagccgggggcatgaaggggtgggaagacggcctgaagcctcaggagcgtgagccaggcgaggcccagggcctgaggtaaggtggaaccagcctgccgaaagttcgggttgcttggagctgggtagtggttgttttcctaggagcgtgcgtcaggtgggcgtcctaggcttctaattccgggctgggttggtccaggaggctgggtttgcggggaagcacgcgcctccctgttggaggagggcacagacgcccagcctggcgttgttctccagtccccaggcctcagagtctggggctcctggacccagaattcaccctggtgcttcagccagttactggggcggggcggggcggggcgggggaagggagtggggggcgggggcagggaacggggagcggggaggcttggaggggactgaggaggcaaccaccactgggagcacatggttgccacgtggttggggaaggactgggtgcaggcgccccatccagggctccctgagtcttggcactcccgagcctgggatgccgtggctcaggtgaagtgtgctggtagcaccaggattctggagttcttcgtccggcccttacaacatctactgtgatggcagctctcagttttggagcccctttcctgtctcactgcggtagatggaacttgccccactttgcagatgacgatactggtgctcagagataaactcacttgacaaaggccgtgattgtaggcagagactaaatctaaaccaagatgcttgactccgtagctggtgcttcctgaatatcgtgaatatgaaagaggctttgggtttgggttg

SEQ ID NO: 32641 - DNA, 892 bp, Artificial sequence
  DNA replication origin
caattcaaggaccagctgctaataagatcccagagggctctgcttccagaggctgcgccagctccatcatggggccaaaagctgagaccactcagagaagcaaagggttaaaagtctcatttcaaaagggtgtacatctgccttaacattccaagttaaaatgaaattgtttcagccttggctttgggttggaactccaagctttgagctccctccttccgtacttgaaagaggattcaaaaccattgtccagccctggtgtgattccgtcttgcgcagctgtctgtggagcaggagtcgttcctctttgtctgccttctctctctcacctaagatcgcgccaccactccacagaagattcgatggatgagccccctgaggcctcagaactatctttttggcaactgctggggggagctggagcgaggccaagaagggtctagtggcagtgagggtgggggctggggaggggactggggaggaggaggggctggagaggaggaaggggaggggaagggttagaggtgggaatccggctgcatcccgggctgctggagagcgccaagcaggctggaggcctgagggaagtgggaagagctgctggatctggaaggatgggagccacgaggcagccgggggcatgaaggggtgggaagacggcctgaagcctcaggagcgtgagccaggcgaggcccagggcctgaggtaaggtggaaccagcctgccgaaagttcgggttgcttggagctgggtagtggttgttttcctaggagcgtgcgtcaggtgggcgtcctaggcttctaattccgggctgggttggtccaggaggctgggtttgcggggaagcacgcgcctccctgttggaggagggcacagacgcccagcctggcgt

SEQ ID NO: 32642 - DNA, 771 bp, Artificial sequence
  DNA replication origin
cgtcccgccgccgcggccgctgctgctccgagccggccatgggcgtgcgaggccctgcgctgggccgaggcgagatcgggagcagctgctgcggccccgcgcgcgcccggagcccggctctacctgcccggagccaagcggagccgggaggggaggggaggggaggggagaagacgggagggaagaggagggaaggaccgcggagggaggagccgcggcccggctgcggcgcggcgtgggaggtgggcgtccggccgccgccgcggggattactcagcagcacccgcccgctcctctcgcgccctccgaagcacccaactcgcgcgggccccgaagcggaatccgtttccgggtgtctctcaccccgccaagccggtccccgagcggcggccgcctccacttcctgcagcccccgcgccccggcccctcccgggtccccaagccgcgccttcgcccaccgcccaggactgctcggacacacgcacgcgagacccggagacccgagcgccccaccctcccccgaaggggccggacccaggagtcgggaggagggcaaggcgcggagggagaacgagcgtgcggatgtggaaggaaagggaaagggaaggggaactccgcccgggccgctatgctagcgcgcggcgctttgtccacgagtaactgaaactccacgagtaactgaaaccccacgcagcccgcgcccgcgaccccagacttcatcccgaccctggggccgccccctaggaccagggcagccaattcccgaggagg

SEQ ID NO: 32643 - DNA, 1307 bp, Artificial sequence
  DNA replication origin
ctcccaggtattgaaataaataaaaatgtcccctctacatctacgaatactctcagtggaagggggatactactaccccttgagaaccagtgtgccattagtggtttatcacctggggctgggtacattgctgccactaatctagctaagattatcttagcgaagaataagggagggaatgtctgctattccacccaccctgctttaattctttgcccttaagtgaagttgggagagatgaggtttggtaaaaatgtggggagggaggatgtgttgggagtgatggtgtgtctggaattggtgggttcttggtctcactgactttaagaatgaagccgcggaccctcacggtgagttacagctcctaaggtggcacgtctggagtttgctccttctgacgttcggatgtgttcggagtttcttccttctggtgggttcgtggtctcgctggctcaggagtgaagctgcagaccttcatggtgagtgttacagctcttaaggcagcacgtctggagttgtttgttcctcccggtgggctcgtggtcttgctggcttcaggagtgaagctgcagaccttcgaggtgagtgttacagctcataaaagcagtgtggacccaaagagtgagcagtggcaaaatttattgcaaagaggaaaaacaaagcttccacagtgtggaaggggacttgagcgggttgccactgctggctcgaacagcctgcttttattgtcttatctggccccacccacatcctgctgattggtagagcggagtagtctgttttgacagggtgctgattggtgcgtttacaatccctgagctagacataaaggttctccatgtccccaccagattagatagatacagagtgtggacacaaaggttctccaaggccccaccagagtagctagatacagagtgtcgattggtgcattcacaaaccctgagctagacacagggtgctgattggtgcgtttacaaaccttgagctagatacagagtgccgattggtgtatttacaatccctgagctagacataaaggttctctacggccccaccagagtatctagatacagagtgttgattggtgcattcacagaccctgagctagacacagggtgctgattggtgtttacaaaccttgagctagatagagagtgccgattggtgtacttacaatccctgggctagacataaaggttctccacgtccccaccagactcaggagtccagctggcttcacccagtggatcctgcactggggactgcaggtggagctgcctgccagtcctggtgccgtgcgcctg

SEQ ID NO: 32644 - DNA, 961 bp, Artificial sequence
  DNA replication origin
gggtgctgtggagcagggggcggtgctcatcggggaggctcgggccgcacaggagtccacggagtgggtgggaggctcaggcatggcgggctgcaggtcccgagccctgccccgcaggaaggcagctaaggcccggcgagaaatcaagcacagcgccggtgggctggcactgctgggggacccagtacaccctatgcagccactggcctgggtgctaagcccctcattgcccggggctggcagggccggcccgctgctcggaatgcggggcccgccaagcccatgcccactcggaactccagctggcccgcaagcgcggcgcgcagccccggttcccgctggcgcctctccctccacacctgcctgcaagctgagggagccggctctggccttggccagcccagaaaggggctcccacagtgcagcggtgggctgaagggctcaagtgccgccaaagtgggagcccaggcagaggaggcgccaagagcgagcaagggctctgaggactgcagcacgctgtcacttctcaatggggtgagggagacagaaatagacccggaagagaagagggaaggacaaagccaaagagatgccaaactgcatttggtgttgctcactgtggcccagagaagtttgatggcagtgctggagaaccaagaggagaagcaaggcaaaggggcatggcgtgggagagattacctaggataggctgaatggctgttctccctcaaactggccatgccctcttttgctttccacctcctacagtccaaattactagccactttcacacgttttccttatttctaaagcttaaccaaaattacctaaaagccactgtaccccatacatatttcagtcactgtgctgactacattgtcatataatcaatcatctgcctgtatccttaatcagaatgagatctttaggaagtcttattcctctttgatagatggtgcaa

SEQ ID NO: 32645 - DNA, 922 bp, Artificial sequence
  DNA replication origin
tgctgcccggccggagccaggggcaggctgcgcaaaggtgacttagggagaccttgcgggccgccctgggtcgcgcctcccggatcggctcgcctcggctcgactggaggggaggaggaggagcaggccgagcgcattcgcgctggagcttgcgaggagcgcagggtggagcgcgccagccggggtcctcggatctggcccaggtaggtgggtgtatttgcagctcggtggctttgcggggcagcctggggccacggaggacgccgggggacggagcggggagggcggccagacttgatccagggatgtgagtagatccaagaatagttggacgtgtgtgtgcagagtggggtgcagccgcgggcgcgtggggaggggcgcaccagccgggagaccctgctctcttcccagtgcgggtctccctgccgtggggttcctgcaggaagagcccctggggaaaaagcccgtggactgatgtgtttctcagttgaatattggtattaggtcaagaagggctggagtgggaggagtaagacagtgaaagacattattgtcctaaataaccttccaagttagtgatttttcgcatggctgtgctccggctgacattgagatgaacttaccatccgctcttcagaggccgctgaaattccaagaatacgagaagtgcatgagcggattaaggagagaaagggaaattctatttgtgttggggaatggggaggtggcttttaactttaatgttttgattaaggatttttgattactcacaggctttctttgtagcctaaaccagcggggaatcacgtttcctagcattcagagcatgtggctagttgttttgtgctttctgttgtgctggatttttctgggtttggagagagggtggtaaggagaggaagatgccagagaagagcttagt

SEQ ID NO: 32646 - DNA, 959 bp, Artificial sequence
  DNA replication origin
aggagagtcacgtggcggcctcctcctcctcctcggccgcctcctccaccttcgcgagcctccttccgaggaaatcgggggcgggcggccgaggggagccgcgaggtccggcgctccgaggcggagagcggggagggcgggcggcggagcgcgagggccggaggaggggcgcgcgggcaggacggggaaccggggcgagggccagggggccagcgctggaggcggccgcggcccccgcgacccggaggcggaggacaaagggcggctggtgcgcccgcccgggcccgctgggtcccgccgaggtccgcgcggcccggccccgccctctggtccccggcggcgcagcatcctcttcctcctggctgccgggccgcggcgccccgtggccccggttcccgcaccagcttcccgactcgccgccggcccggggaaaaggggtgggcagggcccggcgccccacgcctcccggcccccggccgctgtgcatttttgaactcgatgaacggagccctcaccgcacacacaaagccctttctttcttctcctgggaagggacggggtgggggagggcctcgcagattggaacgcttgcttttttcctaaagcgcagaagttttagttcgggaacgaggtgaatcattggcatgtgtctccacacagtgtgtctggtggtttccgtcacatgggcccctcatttttctgggggaaacctagacccagggcctgaaagatccaagtgtcgacagtgaaaaaagaaacgccacgggcgtgcgcgggtgtcagggtaacggtggaccaggctcgcgccggcgagacttgcccgagaccccggctttcttgaaagtaacgctgagcgaagtaccaggacaaacctcttcctagtcacttggaaagaagaactttccgagttgaagtaggatagcggttagtgcctgtccggtggaaagggctccaagaag

SEQ ID NO: 32647 - DNA, 875 bp, Artificial sequence
  DNA replication origin
atcactcccgctgcgattcagaaggtgaaaccgcgcggggttgcggatgccaggcccttaccgcctctgggagagacagacgcggggggaagggccgggcccggagtcgaccgggccgaggcggaggcgggcctgctgggaatcagcagtgtttgggaacacggactgctggctgtgcctgagtgggtggcggaagagggtgaaccggtttttctcggagtctttcacgcatttacgcgtttttctacagacacaaaagcccaaacagccgccgcctgatttctctagggatggggcggcgttcgggctgcggggcgcgtgcgcccggcggcggccgctcagggaagggcgtgtgtcggaccggcggccccgcgcgttgctccggagttactttggcgtcgccccgccccgcgtgccgcggctgcttcgtgcggaccccaccgcgggtcgcggcaggcagaggggaagtcggtgcgctggtcgccgccctgcaaactcagccgagtttgggagctcgcaggaggacttggggaacgctggagggaaccttagtatagagtttgaggagcgggcaaggaaggtccccatggactctggggttgtccccagagcctcttcttcccttctgcatcgccgcctattcatttattctgcagcaaatatttattgagcgcctattttaggcgctgaggctactgtggtgagtcatggtccttgccttcctggagcttacagtctaatggtggagactgtcgtgaccagttaatgtaagtcgtgataaatacacagggagctgcctcctttttaaaggatagagctgctgcagtcgctgctgtgttactgccagtcggaacacaaaggttctttattgtcct

SEQ ID NO: 32648 - DNA, 906 bp, Artificial sequence
  DNA replication origin
ttctgaatcgcagcgggagtgatctcccccttgcctcgctgcctcggggccgcgaaagccacagacatgttgccgccgtcaccactatcggcaagtcccgagcgctccgggtgaacggcaaactgggggagagacgccggcctctcgggctgaaccacctcgggaatgcggggaggggggatgctccggggccaagcggacgggcggcggggcaggcctgaaggaggcactctggccagggatgtctcgcttctgcgcactctgggggacccctagccctggccgaactttcttgaccgtccctgcatcccccgagctctccttatgggcaccccctggccctttgcgctaatggtagagtcgcgccctagtcctccctccgcttcagcgattcaggaaatggtcccgccgccgcgggagaaggagaggctggggcagcccctgtcacaggaaatgcgagcggcccaagccggcccgcccccttcgcgccgtggcaacttgcctccctctccggccctctgaagcgtctccccgactgtgttgcagagcgtgccctagacctagttcagtttttccaacttcatccttacttacgcctcctggcaagagtggccgccccgagttgtcccggcagcccggagaggggagggaggtcaagactcgggagttcgtgcaaatccgtggagcatctgccgagatagggcagaggtggaaggacaaggtgaacgcggattcgctggtttaaatggctcggctacgccccaaatgcgcacctccgagtccacagtctcgcacgcacgcacaaagtcgtgcctaacaattggaaagtaaccctgacccgaaaccgggacaccaaggttgtgtccagtgctcaggggcaatcggccagcttggctggagcggaca

SEQ ID NO: 32649 - DNA, 993 bp, Artificial sequence
  DNA replication origin
aagtggagggaggatgaaagtggagggaggatgaaagtggagggggtatgaaagtggaggaggtatgaaagtggagggaggatgacagtggagggggtatgaaagcggagggaggatgaaagcggagggaggatgaaagtggagggagtatgaaagtggagggagtatgaaagtggagggggtatgaaagtggagggggtatgaaagtggagggggtatgaaagtggagggagtatgaaagtggagggagtatgaaagtggagggggtatgaaagtggagggggtatgaaagtggagggagtatgaaagtggagggggtatgaaagtggagcgggtatgaaagtggaggaagaaaaggaaataaagaagaaggagaagtaggtagaaaatatgcattaccaaatataaaacttcttttgaaattatagtaaattaaactgtatgctattggaaattttaaaattaaccaataaaatgaaatagagataaaaaagattaactattgattagaggcattttaaaaaaagaaagattaaaaaaaagagaagatccatatatatatgacataggagacattacagatcactgaggaaggacaaattattcaataatgctgctagaacaagtggtttcctatatggggaaaaacgaatcaggatctctaaacctccaaaccatagcaaaaacaaaaaccaaattttaactcctgaagacaaaaagatattcaaataggctgggcatgatggctcacacctgtaatcccagcactttgggaggatgcggcaggaggatcacttgaggccaccagtttgaaaccagcctggacaacaaagcgagatcctcatctctacaaaaaatttaaaaactagccaattgttatggcgtgtacctgttgtcttagctactctggaggcttgtttgagtccaggaatttgaggttgcagtgaggcatgatagtgccactcaatgcactccagcctaggtgacagagac

SEQ ID NO: 32650 - DNA, 949 bp, Artificial sequence
  DNA replication origin
gtttatcacctcttctcactttctgagtttaattctgttactattaggacatagcacatgctctgttaggaaatattagtgactattgtcactaatcctgttttactttttacttttatgggatttggtcatggatcccatttgtccttttgatcattcacaactgcagaaattaaaatcagtattctcaaagttatttaatatcatttggaaatttgtattctgttaggcacaacctccttgggttacattttattttaaatgtaaagaatgtggtctgagaggacaaagtacagttaataaaaggagatgaacttacctgtttttctttcttggcacttttcttcaacggttagtttctcttggttcttcttttcctttgggatttactctgttttaacttctgggggtgcagagagagcaacagagagaaggattttggactaagagatgtggtagacagaaatgtacatgagcaaaggccctgatacaggaaggaacatggaacattccagaatattctagaaaagaaagttcacgggcttgtagcctagagaggatagggaagtggcgggagagaaagctgaagagttcaaggtgcaagtgccaaggccatttaaaggtttcaagcctcatcttataggcagggcagtcatggaagggttttgagtggagggggagatgcggaccatggattgcagagggatcagagcaaggggagaggtcattgtgtctgaggactaggatggcagtagtgggtgaacagaagtagatattgacatgctagtgctgtgtgtggaaacagaggccactgcaggggagtacaagaggctgtgatgggtctgctttagaagcattgggcttgaggggcttatggtgtgactaggtggaaatgttggataagcaggtagatacacaggtttggcaaaggtgtgggctggaggactaa

SEQ ID NO: 32651 - DNA, 1475 bp, Artificial sequence
  DNA replication origin
aaagcaccaagagagttaacttctaagggtgaaacgaaatccgattcagtacattacctactttttaaaacttcccccctacccagagctgcattagcacaaaagttagtcccgaagtggtaccaaagaaacatttcatgcatagagtttggtttggttacctgggtgggggaaacaatagcaggtgaaactattgtgggagaattggtgcttctgtgcccattggcttctggaagaagaggcagggggtcgtgtttcacggaaaccaccaccaccgcatccacaggctccgaggggcggatacaaagtcttttgggggaagtggggccgcagatttcccccgacccgaacacagactcgtacagggcgcgcttgggcgcagcctcggatttcacgtcgggcccgacctggctgtctttggggaggatgtaagtgttccccagcgagggcggctgggggcggtggtggtgggagggatgggtgggggggtggtgggagtggtgccgtgccgccccgttcagagcctcggcgtagcagccctgcggggcgggcgagcccagcttggtgccaatgcccgcgatgctgttgagcgtggcgatggagacggcgccgatgcagtggttggtgtaggtcttggagagcttggccgccttggagagcatctgcatccgagtgcctagcaagttcttgccgatggctttgttctcgtaccaggtcacatcgccctcgctgcagtggtcccggggccgctggaagaacgccttgcagagagggttgcgtttcgacaggtacttgacgaagctggcgtaggggcagaactcggtgcccgtctcatacatgcggggcaagttctcctcgtcgctgctctcggcgcgcttcttgctccacgacgacgagcgcgacttgtggtagggcccgagggacttgaagtagacgaacttgcgaccgtcctcgtccatggccagcccaaaagagtcctcctccaactcacgctggttctcgcggccgcgggtacagaagtacatgcacgtctcgaaccagaccttgttgagcagcccgaagggcgtgttggtgctgaagacgctggaggtgtacagcttgcgcaggtcggcgcgcgtgatggcttgcttctgcaccaccggcccggcgccctgctcctcgagcttgcggatgaccgcggccagcgtcaggttggcgctgcgcagctcggggtccttggtgaggtcgagcgtgcggcagtacgggggctcattgaggtagcggttgagggagctgcggatgctgatgagcgacgacttgctgtagagctggccgcttttggagcgggcctcggcatagaaggagcgcagcacgcggcacagcgcccccttgtccatggtctcgaagtccgggctctgcgccttctcgctcaggtactcccggaagatgcgcacggcgtagcgggtggccagccgggtgttctcgctcagccgggc

SEQ ID NO: 32652 - DNA, 865 bp, Artificial sequence
  DNA replication origin
ggagcgcagccccgggcgccgccgccccctgcgcgccccgcagagatgtgcgcttggctctgggcgcccccgcggcgctgggcgctctcggcggggccggtttgcgggcgcggagctttgcgccggggaagaaagggacgcgcggggctcgggggaggagggaggggctcggggagggcgggggagagccgcggcggagcggccgcggggaggctggcgcgcggagcggcgggcgggcggctctggcacgggctcccagagccacggcggctcctctccgagatccggaacccggcccagagatccggaaacccggcccccggccgcggcccctgctggccgcacccgctcctcctgcccgctctgctccgccctgctctcgccagctcccactggaggaagaaagccgagaaccgggagcggcagccccggaggaggcggcggcccctgccccgccgcgggtccaagcggattcctagtcgcccgccgcggcgggcggcgtgtgtgcgagtgtgccgcgctctcgccccatgcctggcacatgcgtaaaagcgagttgcgcccaaagtcccagccataccctccttagcaaataataacaaacccaaaccgtcagatcttacctgaaacattgaagcacaaagtctctctccaagtccccttttccttttcctctccccccttttccgatttctctcccagcgatctgctcggctcgccacaccagagagaaatgcaatagcttggctaaggtagacagaacaaaatacagagaagagttgctccagggctttgaaacccctcaaggcaaggatcaggatacaattagctcatgcctctacctctagtctaaatcaatctccaa

SEQ ID NO: 32653 - DNA, 1068 bp, Artificial sequence
  DNA replication origin
ggtcgtcttttctagctttgcatttgattgctttgaaatggcattctgaaaatctccccctccccccagactctggattagggggaagccttctaggaaaccagggtgctgaaggctgtcttttgagaaagtgaactcattgaggggagaggagcttctggtgactagcaagggcgatgggaacaggcagggcctcagctgggacagcgacactccctccctctcctttgcgccaggaacgagcaggctgccagcgggaggagtccgggagctgagcctgcccaagggacacgcgcaccgcccagatctgggagcgcggcacggggacgtgtaaacctccgtccccagggagcctggagcacctctcagagggcggagcagcggccattcccggcccgtggcaggctcccgggcggcggccaggtgcacacgcagaagcggccccgcgagctcgcccgcctgcccgccggcccggtgcatcctggccgctggaggtggggagagatgggagtgggggatgcttttaggggaggaaggacagcctctcctcgtgcccgaccctctctcaccccttgaccctgaccgtacaatgcagataaacctgccaaagggagcctggaggctggggtgtgccagcaatgccccggtacctttcctgccttcatggtgcagagctcgggaagtcaggaaaagcgggtgtggttagggaaactgtgggcccctgagcagaaggctctatggaaaacggcttttctctacggtctttttgatggctttctgttacatgggcctataggacagtgtgtctcaccttgtggagcttctctggggagggtggtgggcagggagtctgggagagggaggacgccttctcctcccgtctatatccctcttgctgtcattagatctttggagcagagaaggggtggtttgacgatattgatgccaactgctcattctggcaggaaatggctaggattccccttttggggggggggggcaattaccccagttaccctatcatctaagacttttgcccttgtcctttgcctgtgatagtcatgagag

SEQ ID NO: 32654 - DNA, 887 bp, Artificial sequence
  DNA replication origin
gcagagatgatggcgcgctgctgggtacccgcgccgggagcgggctctggtgggcggggacgtgcgccctcacctttccaggtgcttcgccgctggagatgcgggaggcttcttcctttttctatctcccctacctccagtattccaacccacttcccttcacttcagtggacgcatggcgggaggtggggggcgggagcaggaggggatcctgactttgagggggcgctggagaaggacggccgcctgaacttgtcagctacctgagtttccttcctgcgccccggcggggcaccctggactccaggattccggggtcagacccctcttggggcatgcagaggttggaaagaggacggcaggaacagtctttagtttctgctgccagtctgtcgggtcctccagggtgtgtggcagaaagacgagcatctctgctgcgggggtgcctcctttgcgtcagtctcaaactccgcgacctggctcaggctcaggcgcaggctgcgggagaggtgggagggaagttagggggaccgggaggccaggtgcgatcgtggccagagcagaggggttgggaggggcgatctgaggaggggctccaagtgggttgcggggagaaggaatggtgtgtttgtttctgctgctgttactttcacagggttgcctgctccctcttctgccccgtttgaacatcctgcctatcagcatgtttctgttagaaggtgttatggttgatgtctgtcaggagttatttccaactaagttcacaggtgctaagtctagagctgcaggccttcctcctttctctctctctgcggtccacccccagctccctcccacaaacatactgtgcctgaataatccccagcgttttgaaagcgatggcaagt

SEQ ID NO: 32655 - DNA, 1120 bp, Artificial sequence
  DNA replication origin
catcagctcgctctccattggcggggagcggagagcagcgaagaagggggtggggaggggaggggaagggaagggggtggaaactgcctggagccgtttctccgcgccgctgttggtgctgccgctgcctcctcctcctccgccgccgccgccgccgccgccgcctcctccggctcttcgctcggcccctctccgcctccatgtgccggatagcgggagcgctgcggaccctgctgccgctgctggcggccctgcttcaggtacgcggcggtccccgcgggccgggccacgggcggggtggggcgggcggcgccgggtccctttgttccccgcgccgctgcggggccgggctgcgcacccgggaagggaggtgccacgccgcgccgcgccgcgccgcgcggccggtagctgcgcaggcatcgggctccgtccgggcgccggggcagggttgccggggccagtaggtctctcgcgcctttcctggcggggctctaggggctggattgcgggtcccctctgctccttcttcggggccgagcaagctcgcggggggtgtccccaggcagcaggagggtgaggcaggataactcccaggttttgcagttttctgtgcctttcgcccctcgcatagtactttgctccaatttttttgtttatttctgcagggatgggtcgcgagtttacagtaggaattctcactctggtgtcttagttacgggacttgcctccaccttaccccaccctgcacccgtgcgcctcccggtgctcaagggctctactgtcctattgtctttatcccagtctggagttgcctccttttcttcttctcttgccctcacaatattctgtgttcgtcccacctggaaagaaaatctggccctcttgcccggaggagtctctgccggtcagcgcctgcctgtagaacgagtctggcctctcacgcctagtatctcccccgggcgagaagttccgttacgcggctgctcctttctctgtccggctgcctgtgccctatatgcgccccgggggcgcctttgcctggagccttccgtacttttcataccctcgggagagagccagcgagccttttcatttaatctctactaagaggctcctccgc

SEQ ID NO: 32656 - DNA, 795 bp, Artificial sequence
  DNA replication origin
cttctcggctcctctttccggtcccccggcgagttggagactgttctccggcctcggccgcaagggggtgaggcgaggggccggcgcggtctctcccgccgcggctccgtcccgcgcagctgctgccgcagccgcccctgctgcccgcgcaccggcacccgcccgccggtcctcgccctgcgccgctcactcgcgcgcgccgccctccgtcgccgaccgcgcaccccgctcggcctccgctgcgcgacctgggcgagccgccgccgctctccccgcgctcgccccacgcgctgcctggctgcgcggcccgctcccctctcctattcctcccgccgccgccgccgccctcgcccccgcctccctcctccgccgagcctccccgcccgcgtcgtggccaatcggaggccaccaagctgcggctgtagccggccggatccgcggcagccgcccgcccccgccccgccgaagcgccccgtattttgctgcagcccgcggggggtcgccggagggaagcctagagtgcgccgagcaccgccccggcaggtggaggggctgcgggaaataaaataacttgggcaggaacttgattggtagcaggttcatctttggtccgcggtagggaatctaatggagatgaagaatggtggggaagggggggcggtgtctccttgggagcctaacgtacgcttctttattttgtcattctttggagatgggtaatctttcctggcaggggcagacacagcaaactaaggacgcaggccaagctcatcctagctattgttgtctgaggcg

SEQ ID NO: 32657 - DNA, 1310 bp, Artificial sequence
  DNA replication origin
tttattattgtacaccttgaaggtgaggttaattaagtcctgttgtggggtttgagggccagattccaactttgggagttttatttaatgtcgggagcggattgggtaataaaatatatattgagaataagatggccttttgaccttttagggtctagggctgtaaagcgtctcagggttgctgccgaatgagccatgaactgggctgggtttttatatttgatgaaaaagagcctaaacgcttctgatttggaataaagaaaaaggagcattaaccttgactatgcctttggctccagccacgtttttaagagtaaattgctgggcaggtgggggagggatactcatggaacgaaattgtaagctggaccaggtgtgaggaggggaggcgataaaaagattatagggtggaggagcggaggctgaggaagaatcgggacctagcttggcctggtgaggaggggagaggtcagatgggtctgtagaaaaggaagattagaaagactcagcgacgcttggggttgggactgaggggacaggcgggagggaaagaaggaagatttgggatgagttgcactgggcacagagactaggaagggactgatgtgtgaaagaatgcctggatgtcagccacctcagaccatttgcccattttacaacaagaattatttagatcttgtaggatggaaaaattgaaagtgctgttttccggctatttggaactactgtcgagtttgtattggggtcaagcggcattgcagaagaaaataagacacttagattttaggtgaggtgacagttgaagacgttttaagttcttaagaacacaggctaagggagaaggaggaatggaaggtggaagcttgcccatagtgaaggaggcaagcccagagaaaagagtagagacacagagaaggggtgggggtttcttgtcctccagaaaagcagagaaggggtcagggcgcagagatacgaggtcagggtgtggaaataagggatcggggtgcagagatatgaggttggggtacttgcctctcctccagaaaagcagagaaggggtagagacacggagagaaggggttggggtacttgcccctcccctagaaaagcgggacttgccactgaggggaaggagaaggggttgaggggttcttgcccttgccccagaaaatcagagaaggggtagagacacggagagaaggggttggggtacttgcccctcctccagaaaagcgggacttgccgctaagggtgaaggagaaggggttgaggggtacttgcccctcccccagaaaagcaggacttgccgc

SEQ ID NO: 32658 - DNA, 1953 bp, Artificial sequence
  DNA replication origin
ccgcggggcagccgaggggcgtgggagaactggcagagggtgcgccagagaccgctttcccgagcgcgaacgcccgggtggctgctggggagcagaggggcaggctcgggcagctcctcagccgcgccggcgatgataaaacttgagaaataacaaggagtggcctctccgcgtcctctgggtccaatccggtttcagaagtgaagttgctcccgggcaggcaagcctgagagaggccaaatacacttaaaaacaagcagcggcgagaaaagcacctcccgcgccctgcacctcggcaggtctcgctctcggcaccctcccggcgcccgcgttctcctggccctgcccggcatcccgatggccgccgctgggccccggcgctccgtgcgcggagccgtctgcctgcatctgctgctgaccctcgtggtaagccagatctcgccggatagggctggggtggggacgggggtggatccgccctggacgctgcacggagctggggacaaagcgggccgaaacgtgacaaccgcggctcagatcaatgctgcgggtctggtagcagccccaagttcgggcctgcaggagtgaggagagaaaacgtgtgtttgcgggtcgactctggactgagctttttgttttgagacaaggtgttcgattgttggaattctgagtcgcgctcaggcttcgctgcgctctggcgggcgccgtcgcgggttgggcagggggttgggattcacgcttctccccaggtggtggagctggtggtgatggtggttggagggcgcctttgggtggagaggatccctgagagctcaaagcacagacttgaaaagggatttaggggctgccccctccccagctctgggtcgcagttgacccggattggttcgttagtgagtggagccggggctgtgtccctgggtcccttggtggggctgcccctgagaagtgggtttctcggtatctcccctaaagggtattcagaagctcacccaagcggtccacccccgccagccacccagctgggggcgggatgtgccgggggcgcgaaagtgtgggaagaccgggccagaatgggggttggggtcgtgttgtgttttggggatgctgccgaggtgtggaggcgggtagagggtgacagtggtgggggatgatggatgcggtggggttgcgtcgtacttactccggctccggggaggactgcgcggccggagcacagcctggggtttcgagtctacggaaacctgccgcccaggacgaaatcctctaggagaggaagttagagacgatgctctgagaacacgggagacttgaagtgttcggaactctggcggcgcggttacacgcgaagcttcaggcttcaacagagtttcattccgcacgcccagaaaggagccgcggacccgcgacttacccgcatccatggatgcgcatggggtccgatgggagcgaggtctatacccgcgtcggcagtgagccgagtctggtctcgcggattcttactgcttcctggccctccaccctggcaagtgggagtgggtccaagggttgtcctcccttaaggtcagcgaggtatgaatatgggattggtagttatgatctacgatatgtttatggagaaggaattggacaaataagcgcatccatttgcccgggaactgttccaacaaagtatctgagcttatgaagtgactacaaatggaaacggcttagagaatgtgttcttttgtaatatatttaaaagcattttcagcttttcagtttacaagcatgcatttggggttttgtgtttcctttgcgaagggattgaggatggggaacgaaactacgggtgctgctctcagaatttctcgcattcgctcgaggctcccagaggccatggaagaccaggagctttcccggcaaggcatgggtgggggtgtcgagctgtggcaaggaagaaggtgcgcgtaa

SEQ ID NO: 32659 - DNA, 947 bp, Artificial sequence
  DNA replication origin
gggtgcagaggaaaactaggggaacggggataggtgggggtggcgggaaaagctggggtgaaggggcctctgggtggctagaaaatggagttggcgggggtgggggagggcagataggaagaggatcgcgacctgagagttgggatccccaagggaagggaaggtgtctccggtagatgtaatcagcgcactcaaggagaggcgggagcgggccgctttcgcccagccaaaatcgtggcccctgggtacgcgccggggagcagggtgcgccggggcgggagtgcgccggggtcggagtgcgccggggcgggagtgcgccggggcgggagtgcgccggggccgtccagctggcctctggcaccttccccgggaacgtgcggctccctgtgcctcgggaacgtgcggctccctgtgcctcgggaacgtgcggctccctgtgcctcagcgcctgcccaggccacggaaaggggaaccgctgggcggccgggacggagagcgagtgtccttgggtgaaaaagggaactgctcgcctttctgggaattgtttactctgagagaagggcggggggaagtggcgggtgggggaggggatcttgaccctttgctcctgaggactgtcgaccggcgagccctaggtgagcatttgtacagtttcagtggtttcttaacgtgcgaggcttcagttccctaaatcttcggaggaaggaagggtctttctgatttcttgtccccagaggcgactcgatttttctgctcaccacccgccccccgcgccaccgccccttgccccaggttctttctttctttaaagagcactacagcaatgaccctaccccttcccagagctgggagcctaagtggttggccttatttggggcgggacagcccctttcccaggcttgaccgatgggatctcgttggggagcctgaagacgcaaaaagccaat

SEQ ID NO: 32660 - DNA, 1283 bp, Artificial sequence
  DNA replication origin
gcctccccccggcccggccaccctctccctccccgccccgagggctgtcttcccgtggcggttgcgcggcccagcccagcccaacccaaaggcgcggctccaggtgtggccgccgcgagaaaatggagccgggggccggcccgggccgcttttacagaggtggggagttcagcagaggagggaggcgcggggtggactcccgcccgctcgcactcgcacctgggaccgtgacgtccttgggttggggactgtgggtggcaggccccgccccgccgttctctccttcccgaccccctactctctggagaatggcgggaggagggagcctcctggcggggctcgacctgggtagcgcgggtcgcagggccccggcccaaggacaaaagctccacggagcagagtcctgcgggaccaaccggcccagtggctgcggggccaggccgcccagcaccgcccaaaggtcccgcactttgtgattgtgctttgggcccggagcgcaggtgtcgctagtgacatggggacccgtgtcctcaggaaagctgcgaccgcggtgcgttcggcccgctctcctggagcggaggttgtggagcagaatttcaggtggctgtctccccaaaggctgctcttccctatggcccttcactgcttccaacaggtttgcagcttatctggctcaaggagaaacaatcaccagaggtcaaaaaggacaattcttgggctaggagaaaactctagggtgttacgggaaatatatatattctttgaaatgatttacaatttctattacaccactagctagatcagaggccccgctccaagagtgactagctgagtggcctggactagcctctctgggccccagtttccagatctgtcaaatggagttaatagcgaccaacgcacggggaagttttgagaacgaaattggaaaatcttaggtaaagcattctgcagtgtctagaacttaagggttcaataaataattgttaaaattagaacaacgtgattgcgaggtgagatgttaaattgacatcttgaaaagcagaaacttagtatgggcatccaaacactagaatcagcaccggattacgaaacttccaagaaatgtaacgactgaaagtaatggacgagcctattgttctgtgcgagaaaggcgcaaggggagaagaaaagacacacacaccatacttttaagggtaaacaacctttatcccaattaaatggcaacgcggatataataagcaaatgatataataagcaaattgcaatgggaaggggagaag

SEQ ID NO: 32661 - DNA, 876 bp, Artificial sequence
  DNA replication origin
ggcggggcggggcctgccacccacagtccccaacccaaggacgtcacggtcccaggtgcgagtgcgagcgggcgggagtccaccccgcgcctccctcctctgctgaactccccacctctgtaaaagcggcccgggccggcccccggctccattttctcgcggcggccacacctggagccgcgcctttgggttgggctgggctgggccgcgcaaccgccacgggaagacagccctcggggcggggagggagagggtggccgggccggggggaggccggggccagggaggagccgagtgcgcgctcggggcaggcggcggcgcggagcggtgcggcggcgggaggcggaggcgagggtgcgatggcgcggagcccgggacgcgcgtacgccctgctgcttctcctggtaagtgccgcaagcgggacaggggagccaccgccggggagggcgtcggtaggcgaggtctagacctcgcgaccagacttgcccgccgcccttgtgcgcgttacctgcccggcgctccttcctgctgcccgaggggggaaaagggccgggcaggctgcggcgagatccgacctggggcttcggaaaatcctcttggctggagccaggagagtaagttgcgacctatcgaagttgtgttttccttcccgcgtcacccaggccccagcgcccttttctgtggtgtgtgggtgtagtgagccctggggcggggaacaccattgctgggggtcggaggctttgttgagagtctctgggacgagaaacgtggaggcaatagggaacaacctcgcgcttcttccacgttccttaaatttccctaggattccccagctcctctagccgccgacacaagccagtgaactggggaaaccag

SEQ ID NO: 32662 - DNA, 1502 bp, Artificial sequence
  DNA replication origin
gcggtaatgccgctgccgcccttgcggccaggcaggcagctggcggcggccggagtcggagcgcgttcgtcgctggccgggacgccgccctggcctgtgctcagctcccgcggcggccgcggggcgccggggcccggcgcggcatgaggaggcggctcggtgcaggcgagcgcccagctcctcggccccgagggcccccgcgggcccccgcgcgtggcgcgcgctggttgcggccccggcgcccacgctagccccgcgcaggcaggagacgccgcggcccggagtaggaggcggcgcagggcctgccgagcggacgcgggcggcccggaccttaagcacggggcttcgcggcgggaccccgccgggcgcgggcagcggagccgggcgtgctgcagttagctgcccctctccgcaggggcgccgcggcgcgcagcctgcgcctcctcccacctgcagcccctcctcccgccgctgcttggcggagaaaacgctcctcctcgcccttccccggctttcttccgtcctgccgtccccgggcccctagcccccagtcccctctcccccctccacctcttgtccctcggcctccgcgcctcccctcccccgactctctggcctcccattcattccgtccgctccctcccatttcctcttttccgctcgggccctctccccagagcctccccgcgcggaccccgctgcagtctcggggttctcagcacatttatggaagtttagggcctggacagtggccccgagtccggcctgagagcgcagcctgggctgctggcagggaagaggaagatgtctgtgctcaggcggatgatgcgggtttccaatcgctctctcctcgccttcatcttcttcttctccctctcttcgtcctgtctgtacttcatctatgtggccccaggcatcggtaagcaccgagacacaccctcgcttcccctggtcacaccacagccagcgcaggctgttatccgatgttacttctgggatttggaagctgttcaaacaggggcccgcagaaaagcgttttgttttaaatgttatttcagacgtgtcaaactgcttcagggcatggctttggtatgtgagttttgttaatgcatgcattttgttaatgcatgtttgttaataacgtaaaagattgcattaaatagacgtagcaaaattagtgtgatggcccgggatgccctagtcgctttcttgagtgttcatgacagctttatccatttaatgttaagtctttaagcctaaactgagtgcttaatcgtagttttattcaaacactctcgggtataataactggttgtaaaaatatggaggagccagcagcagggaatgtgattgagtccaacaatgtgtgttttctagggtcctaggtcgcttttttagaatggggtcagtggaccccattctttttgtgccatacttggggaattttaaggcgatgagttgtcttgtaaaaacaatgctccattattttagtctgcttgggt

SEQ ID NO: 32663 - DNA, 1396 bp, Artificial sequence
  DNA replication origin
gccagcgacgaacgcgctccgactccggccgccgccagctgcctgcctggccgcaagggcggcagcggcattaccgccgcgcgcccggggtgaggcgcccccgccgggcccgcggacaccaggcgaagagcaaccgggcgacgcgcgctgcgggcagagccggggagccggaagagcagaggccgagcgccgtcggagccgcgtctggttggagaaagaggcggacgtgaaggggcgggggagccgcggaggaaaaccgggaccggcgggaacgtctcgagacccctgcgcgcttcgcgcgctcgctcggaactcggcaggcggcgctgcgccgggccccgaggaaacctggaggtccccgccctccccgcgcccgaaacaccgcgcgtcctgataggcccgcgcccagcagccccctccccgcgcccgccgcaccggggccccaccgcctcctgcgtcaccgccgcccccgcccgcccggggaccccgcggtgaccgcgctgctgggggttgagggacgcgttgcgagccccggatacattgtaccctgggggtacataatgaaggatgctgtacctgaaaggaaaagggcatctccaaaaggggacttcgcgggtggaatttccttccaaaatcctcgaggaacaaggtgtatttccgacctggattaatgaatcccccctcctatcccgcacttcctgtggaaacagtgtcaggatgtggcgcggacctatgtgcgtcccttataccaggacttgccttcaacgctgaaggtgaaccctgggtcatcctcgctgtattcaggcggcgctgcaaaggcttctgggcagccaataggcccttgagcgcctcagccccatcttgcttcagtaggcaaacggacgggtgtcttcatccacctcctaggccgtggtctacccttcgttcaaatgtttcttcctgctagctgactgtccaggtccttagctgtatcacattgttcaaatgtgtgtgcgcaggtgtttctttttcaactaatcatgcaggaagtggcgggatgccttactgccattatttgctgagtatttccagatggaactgtagttgatagccaataaatttggtacgtttttatcgggatgcgcatgccatagatcgtccctgagataatgctttgcaatgtggaacctgaaacacctatgtataagcccaagcctttcattaatattaactgtgagacccctggaagctactactttgtgtgagcctgttttctccgccctcaaacagtggatataatacccccttgcaaggctgtgagattaaatggataactgtgcataatgctaagcatggtgtctgggacgtaagaggttccttatatcccattagttcactaggtgggatcaccaagttg

SEQ ID NO: 32664 - DNA, 1937 bp, Artificial sequence
  DNA replication origin
aacagacgccgccgcttcggtttctggggcacaatccactgaccccccccttcccgtcaccgccgcttctcagcgctcgtccccgcgtgctcgcattccaccccgataggtggagacgccgacagtcaccacttagtccttcggacggcaaaaccttggtcactgcccggccggaaccgccatgttgaggccgaaccctgaccaaccggcagtactactcccagctgcccccgcgcgcgtccctcacgtgactgtgttaaaggagacggtaggggcaagggaagagagctgaggagagggaagtgaaaaacgacggaggccggttgggaggctggagccggaagtgttgtgacggaagctccctgggcggggcggggctacaagtgcggtgggcgggggcgggggcgggggcgggggcggggggaggtgcacaactgtaggccgggttctcaagctcgcccttagcagagcagagctgagagccacctactagcggcaggtggagcctcgagacgggtgctgtcgtggtgatggaggcgcacgctcgcttcccacgcagtttggcctttttgacgtccctggctgttgtgggcaaccgatttggttggtcgcgctgcttcctacgctcgccggcggagcagctagtggcacctgctcggagagagggagtggatctctcggaagtgcttggggtttcgctgaagcggacctgaacagaccatgtgtcctttaaatacagccatgcttttagaaacggactgtcactttatgtggactcaaccattgaacagaatgtgtgcttttgtgagtgctgcaattccttcaagtgtaattgcgctactgcatttttgttggtcgcagggaaggggtgtgcctgcaaatgtccgcgtggttcgtcctcagcctcttcctttttacactgtgctaggatgtttacttgcttgtggtggaggtaggggaagccagtatttgtgtactgtgtactgtcctgaaccggctttcattcctaacttttcaaagattgctttaaaggggggggggcgcgggtcaaatattgttttaaagggggggacggggtgaggtcaatggtgtgtgccttgtaagtagaaatgaatgaaaggaattttactaatgtgtcactcaattgtttgagctccttctgttttgcatgccaaaaatataaggcaaggaaaaatgtatcattctatcatgattttatggtgctctaattaaaggtgtcttccccaacgtcaatgtctcaaatttttcgacttcttgacaccctcaggttttcactaaggtaataatttatgacaagtaagatgtgtgcttctcatgtaagttgataaatgggaggtaggaaggcacagtaggacatattgatgacatgccttggctacagattaatttataagagagtccatcactttaggagatttatttgccgaagttaagtacgagcccaggaaacaggtctatgcctttcttcgaagatgattttgagtgctccaaatttaaaggggaaagggcgggatattgagaagcacaccgttttcatgtaagggggcggtaggagaaaatagtaattcttgcctttctctggctcagtgaatctgcattttttacataagatgacataaaatgggcagaggaagaatgtgggagtctgcatttttcataagataacagacaaaatggggtaggggaacaatcagataggcatttgtgtctggcgggctggggtggccacctgtaaagataagctatcaatttgcattgccatgaagttttaacagcacactaagaatttccttgtgggcaaaatacgggggagagatgtagcttttcatcttgcagcaatcttatttaggaaccaaaagggggaggcagatttgcgtgaccagtcccagcgtgacttttccctttggctaaatcag

SEQ ID NO: 32665 - DNA, 1304 bp, Artificial sequence
  DNA replication origin
cggctggccgggtggggggctgacccccccacctccctcccggacggggcggctagccgggcggggggctgactcccccacctccctcccggacggtgcggctggccgggcagaggggctcctcacttcccagtaggggcggccgggcagaggcgcccctcacctcccggacgaggcggctggccgggcggggggctgacccccccacctccctcccggacggggcggctggccgggcagaggggctcctcacttcccagtaggggcggccgggcagaggcgcccctaacctcccggacgaggcggctggccgggcggggggctgaccccccacctccctcccggacggggcggctggccgggcggggggctgacccccccacctccctcccggacggggcggctggccgggcgggggctgacccccacctccctcccggacggggcagctgccgggcagagacgctcctcacttcccagacggggtggctgccgggcagaggggctcctcacttctcagacggggcggctgccgggcggagggtctcctcacttctcagatggggcggttgccaggcggagggtctcctcccttctcagatggggcggctgggcagagacgctcctcacctcccagacggggtcgcgaccgggcagaggcgctcctcacatcccagacggggcggcggggcaaaggcactccccacatctcagacgatggccggccggccagagacgctcctcacttcctagatgggatggcggccgggaagaggcgctcctcacttcctagatgggatggcagccgagcagagacgctcctcactttccagactgggcagccaggcagaggggctcctaacatcccagacgatgggcggccaggcagagacgctcctcacttcctagacggggtggcggccgggcagaggctgcactctgggcactttgggaggccaaggcaggcggctgggaggtggaggttgtagcgagccgagatcacgccactgcactccagcctgggcaccattgagcactgagtgaaccagacaccgtctgcaatcctggcacctccggaggccgaggctggcggatcactagcggttaggagctggaggccagcccggccaacacagcgaaaccccgtctccaccaaaaaaatacgaaaaccagtcaggcgtggcggcacgcgcctgcaattgcaggcactcggcaggctgaggcaggagaatcaggcagggaggttgcagtgagccaagatggcagcagtacagtccagcttcagctcggcatcagagggagac

SEQ ID NO: 32666 - DNA, 936 bp, Artificial sequence
  DNA replication origin
cccgtccgggagggaggtgggggggtcagccccccgcccggccagccgcctcgtccgggaggtgaggggcgcctctgcccggccgcccctactgggaagtgaggagcccctctgcccggccagccgcaccgtccgggagggaggtgggggagtcagccccccgcccggctagccgccccgtccgggagggaggtgggggggtcagccccccacccggccagccgccccgtccgggaggtgaggggcgcctctgcccggccgcccctactgggaagtgaggagcccctctgcccggccagccacctcatccgggaggggggtgggggggtcagccccccgcccggccagccgcccccttccgggagggaggtgggggggtcagccccttgcccggccagccgccccacccgggaggtgaggggcgcctctgcccggccgcccctactgggaagtgaggagcccctctgcccggccaccaccccatctgggaggtgtgcccaacagctcattgagaacgggccatgatgacaatggtggttttgtggaatagaaagctgggaaaggtggggaaaagattgagaaatcagatggttgccgtgtctgtgtggaaagaagtagacatgggagacttttcattttgttctgtactaagaaaaattcttctgccttgggatcctgttgatctgtgaccttacccccgaaccctgtgctctctgaaacatgtgctgtgtccactcagggttaaatggattaagggcagtgcaagatgtgttttgttaaacagatgcttgaaggcagcatgctcattaagagtcatcaccactccctaatctcaagtacccagggacacaaacactgtggaaggcctcagggtcctctgcctaggaaaaccagagacctttgttcacttgtttatctgctgaccttccctccgct

SEQ ID NO: 32667 - DNA, 924 bp, Artificial sequence
  DNA replication origin
gcggggcgccccagccatgccccgcagcggcagctgagccgggcgccggccccctccctccgggccgccccagtcgccgcgcccccccggctgcccgcggccggagctgcccggcgcctcccgcgcgccccagaccgcgagcgcgagcagcggcggccgccgaggcgcgggtggtgccggtggcggcggcgggggagcgcgggacaggaggcttcggggaagatggacccggcgccctcgctgggctgcagcctcaaggatgtgaagtggagctcggtggccgtgccgctcgacctcctggtcagcacttaccggctgccccagatcgcgcgcctggacaacggtgagtcccagctggggcgcggggcagacgggcgaggacagccgtctccacgcgggtgtgcgcgcgtgtgctggagagggtgggacccgcggggagtgggctgcccgcccctgagcgccggagttggcccgagcggctgccgcagccctggcgcgttgctctcaactccccccagcagcagacaaggaggtggaaatcagagtccttgcagtataattaaaaaggacgccctaaaaaaaaagtcaacatagggagacctctgcagatcgtaatcttggacgccagatatccctccccaccctcctgcaagaattactcaaccagggaaaccctgaagagttatcttaggcaactttcttgagaatatcattgtgctccgggtggcatcttaatttgggtgctctcctccctatctcccccatcccccgccaaacagatttaaaggaaaagctcctgggtgaccattgaaaaggatcacatttctcagagaccttgtattacagcttgtctgttttgtttaacccaactgaaagtaatttggggctgtgtgtagaaaatgttttcagcagaagtgatggcat

SEQ ID NO: 32668 - DNA, 1140 bp, Artificial sequence
  DNA replication origin
ccgcccgctccgcccccagctcggcctccgcctcccgcagctcccgcggcccggcaggctcgcgtcagctccccggccggggccgccagcgcccgcggctcggcgcgctccgcaagctttagctctcgctcccccgtccgaccactcgggcgccctgcagtctcgccgggtgctgctgcgcgccccggctccttccccgcccaggcccgtccccggagcccgggaattgccgagcgagctcaggtatcgctccctgagtcgtggtgtcgggcaccgtccgcctccactcccatcctggcaatgcggtggctaaatacaaggcacaaaagatacctttagtggcgctccctcttgcttcccggtgacccagactttggtcagaagagtaccacagcccaacggggctgcggacggcaggcgtggagcacgccttggcgtttcccctcaaccctactcctctaccatcggagctggaaatgactcccaacagtctcagctttggctactagataagataaaaagggcaaagcaccgaaaagcggaaaggtggtgggtgatgagtacccacatacaggaaggtggccattcggtctaggaccttcactgagtgaacgagctgctggaggcgacgggagttgatgaggccaccaaacaccgtagacacggagatgggaagggaaaactaggttactgggaggctgctggggtcagctgttctcacccgcttttcccattcagttctcttctcatcttaaaggttgggatcattctcgttttctaggtatatgtaccaagacattaggtagtttggcaagattttataactcgtagatggccgtgctgggattcaaacctacagtttgctttgcatgatcaatcattctctgtctctcccgatgtttgacacggcctgctcactgtggacagagctcagaatataaaggtggcatgtcctgccttgtatgctaatctgctttctttctttctgtctttctttctctttctttcgcttgcttaacattttgttaaaatagcagaggtgagtggttgctaaggttgcgtatctgctctgttttcaacacgtattcaatgttcagtgcttgataaggtacagcaagtacccgcttcgccagcccaagg

SEQ ID NO: 32669 - DNA, 982 bp, Artificial sequence
  DNA replication origin
cacagcaggttgaggccgtgcagcaggttgtcgctgtggctggggtcgaaggtggaggtcctgtccccggatctggacatggcgagctgactcggtgcacctggctttaaaccctcctccaacctggcagacaggggtgggggatgggagggaggggagcagggtggtggagcgggtggggtgtggtcggggtggggaagggtgtggaggggaggggagggcgaagaacaagaatcaaggctcagcttgactccctcctggcgcgctccggaccccgaccctaggaggaaagtccgaagacgctggatccgtgagcgccaccagaagggccctgtctggggtcccggcgccggttctgcgccctgcggctcctctcgccacctcccacacacttcgtccctcactttcctaaaaccaaccacctcagctcggctgttggcagcaacagcagtggcagcagcgacggcaaagtggcggctgaggccgaggcacctcgtgggctcgtgtccatgccgggccagatgaagggaaaggccgggaagtggggagccgggggtgccctgaaagctcagaggcgaccgacggcgaaggttccaggtcaacttgtgcccgaagctttgcttttcgcagttggcccagtttgggggagggggtaggaacaggggcccgaccagcgtgcggggtgtgcgaatcttagctctccaaaagctgggacccccttcgattatccatgctgccccgagaaactcctaggctaatagtctgagggaggagataaagccctttcttctcccgggaaagtgcagcggagcgcggtgaggacccgctcagtggaatcggcagaggcgggagctgtccttatcaattcgagctcatttccctcaacctggccctgcccgcttccccgcttcgcaaactgttggcttccccgtcaccactcagtttggctaattttccagagatggctttaaacctggcagga

SEQ ID NO: 32670 - DNA, 1530 bp, Artificial sequence
  DNA replication origin
aggcaagggctagtgtctttcaggacagacccaaaccccaaataccaaaacagaataaagtagtgtcttagcatactttgagatcagactgtttctgcatttcacagtgctgggggtgggggggaggtgtggggggaagggaaaagcagcataccaatgtagtgaaatctggaaacaacagcatatatacagacacaaaaaaagtttgcatattgcacagagcacttgaagatcataaatctatgcatgagaaagatgtagtggaaattttgggggggattagagtttatttttgtcatctctgtgagacagctactcattcatccagatcacagctaagaaaaaagctggtcacagaaattagcagtttcagctcagcagcgaagtcgccagcctgtgaaggcagagagaaattgactaattagcaatgcgcactaaaacttgacggttctttatagagagagagaagagagagggagagagagggagagggagggagggggggctcgctttttccccttctttcttccaaagatgtttgaaatcgcagtcatttacgctcgacaatttttacaatagccttgagccataattttgcgagtctctccagcatccatccccctgtatggtctctctctactggccaagcacgaccgtttctctccccaaccgtggatttcctattactctcgttacgactcactgagccccaggcccaaggataatgatgtgttgtttcttggtagcataatttgtcacacgtacattttttcttcttcttctcttgcagaaagctctgctccctctctctctccctctctctttctctcttttctccctctcctacattttcttgctgttgctaattcatggtgatcaaatgatgtacgacaaaataaattgtaaagagtgactgcctggagttgggaaccagaaggtgttttccccctcccaaggagacagcaaacctttaaaaaggaaggacaattgatttttggggggagcttaagtgagccttgactttgcagctggttgagaacaggtaagtttctggccttgtgtctgccttgtgtgtattttgttctgtcttttggattgttggagggggaagggccggggagggagtctttcagaggggttggcgggggggtagttgtatggcaaacgctcataaagaaaaaactcctattgcaagaaataagcagatgaggaggaaaggcaagggagaagaacaagaaggaaggggaataggaaaagatggggcggggggagacaacgaagcggagagagctagagagaggtatgaccgggtcctcttaaagggagagagactctgtaagatgtttcaggcaagccagagctttgggggcgggcgtgggggtgctgccggcggagggagcgcgagggagggtagggtccacctggaacgggatggtaaagtgagtcgaaaggagcccagtccggtataaataggaagccggcgatccaggaccggcgccaggcagggcagagtgagccgcagtggaaggg

SEQ ID NO: 32671 - DNA, 735 bp, Artificial sequence
  DNA replication origin
cacagtgtttgtgtccctgggtacttgagattagggagtggtgatgactcctaacgagcatgctgccttcaagcatctgtttaacaaagcacatcttgcaccacccttaatccatttaaccctgagtggacacagcacatgtttcagagagcacggggtttggggcaaggttatagattaacagcatcccaaggcacaagaatttttcttagtacagaacaaaatggagtctcctacgtctacttccctctacatagacacagcaacaatctgatttctctatcttttccccacatttcccttttctattcgacaaaactgccattgtcatcatggcccgttctcaatgagctgttgggtacacctcccagacggggtggctgccgggcagaggggctcctcacttcccagacggggcggccaggcagaggcgcccccacctcccggacggggcggcggccgggcaggggctgccccccacctccctcccggacggggcggctggccgggcagaggctgcaatctcggcactttgggaggccaaggcaggcggctgggaggtggaggttgtagcgagccgagatcatgccactgcactccagcctgggcaacattgagcactgagtgagtgagactccgtctgcaatcctggcacctcgggaggccgaggctggcagatcactcgcggttaggagctggagaccagcccggccaacacagccaaaccccgtctcc

SEQ ID NO: 32672 - DNA, 917 bp, Artificial sequence
  DNA replication origin
cgcgcccgaaccccgagcaccccgtggaatcccccacgtcatcatcagaaccatcaatgagatgcaaacatgaaagacaagaggaagaagaaggaccgcacctgggccgaggctgcccgcctggtacgtaccgccccccacacgccgcccgcgcctcccgccggccccgccgctcgccccgcgccggtccgcggcggcggagacggccacttccagcccgagccgccgcccgctcgccgggctcctgctctttgttattctgcgggagtgggctcgcccgggggcccctgtgtgtgtgcgtgcgcgcgcggaggggcgcagcgattatctccgggagccccgcgtccgggaccgcccgggacacttctccccgtacttcgctctcggggctctgctgtgccttctccacgggtgaatttccgagcgctcggcgcagctcgacttccctctctgccgctccggagacctttgtgtggcaattaccactccctcccggcccctccaccccccggaatttcatcaataactctgtgcacagtctgtgtgtatgttcggcgtttgtgagttcaaacattttacacgtgcatgcatggtgtgtgtccgacacggacttgtggggcgtgtgcatgtgggctaggtggttgcgtgtctgtgtgccatgtcgtgtgcattatgtgtgcacactgatacgtgcatgttttgtgtggctccagttcgtttgtgtttgtaggtattgtgctctgctcgatgtttgtgtgtacattctgtgcacgtgtgtgcaatttgtgagtgtgtttcgggtgtgtgtgtgtttggtgaagttgggtcagtgtcatttgtagtgggaggttattaagagtgtacagctaggtgtattttactgctggcttcctgggcggtgttacttggctgctttt

SEQ ID NO: 32673 - DNA, 895 bp, Artificial sequence
  DNA replication origin
aggccttcgagggcgggggagatttacctgcgcggccccgcgcccccgggccggacatcctgcagcagccgctaccgccgccccgcgggcctgaggcgccgcccgccgcccggggaggcgccgcgccgcagtcctggctgcggcgcccggcacatgcttcgcgctagccgcggccggcgccggcgcacaggtgggaaccccgtgagtgggcgttgaggcgaatccctgcccccgccggcgctctccgcccgcttccactcttgactttgctcggtgcgcggcgcctgcccttgctccagcgccgagccgcctgtgtccgcgccccggcgccgtgggcggctgcggtccctgcgcagccggggctgcgcgtcatgtgcacctcccgccccgcggcgggctcctctgcaccgggcggccgggggcagcgcggcagcccggcctcgcgcccactcctcgcccggcacacggaccccctccacccccgcgccctcccccactccggagctgtcaaagaagaaaacgccgtgcacacaccttggaatggacgggcgcttcagtcactgactcgccaaactcttagaaggtgtccattggtctgcagggaggtttgagcctggagtaggagccgctttcttattatttaataatgttggaagtgccgggtccgctgccagagttgtgggtcatgtgggcacagcagaggctggctgctgccagtaccagggtttcctgaggatcctgaaactatgatctcatcctcctcatccgcctcccccgcccctctctccgcgggcgcgcacgcacagcacacacacacacactcacacacacactcatgctgaatgcactatcttccttcctggaccgaaatattcctctagggaaatagtgggca

SEQ ID NO: 32674 - DNA, 955 bp, Artificial sequence
  DNA replication origin
agcgcgaagcatgtgccgggcgccgcagccaggactgcggcgcggcgcctccccgggcggcgggcggcgcctcaggcccgcggggcggcggtagcggctgctgcaggatgtccggcccgggggcgcggggccgcgcaggtaaatctcccccgccctcgaaggccttcgcagcgccgcagcccctgctgctgccgcggcgccgctcggggggtggctatggcagccggctccttcgcgtcgcgggttgagttgttttcgttgtggtcgctgccctcttggtcatcctctcgggctgagctggtgggaggtggagtgtctacctccattagggatgatactcacgtcggggaacagtctgaggggtactgactgggacatccgcgttgggttcctttgcagccagcggcgtcctttcgtgttgcagtgcactgcggtgcccgggccgatgcctgggtgggagtgggctccgggccccggggacggggggcggcgggggcgggtgggcacgggggtgagtgtcttcggcttttatagcctgttgcccacttcgaagttttctgctggacagagggcaggcgggaggttcgttctggtatccggagtgggagttgaagagaggtgtctgtcaaaagaccaaagccaaagagagaagaggggtggcgacggcgaggctgggactcagtggtaccactcctgggacttgaaggtaaaactttgctgtttagtaggcttggggtatggctttggaaagataactgtagaacttggccgtgaggggcgcagggggagggggcaggggaggcgcaaatattggatgtgccttgcagtgaagcttaccatgctttacatttattcttattctaaaaaaattgtcttttgagttgatgcttatgttttcctgttatatgtcatcacttggcatttaatgtgtttgtatttccttttgaacctcaga

SEQ ID NO: 32675 - DNA, 1011 bp, Artificial sequence
  DNA replication origin
ttcgttctggtatccggagtgggagttgaagagaggtgtctgtcaaaagaccaaagccaaagagagaagaggggtggcgacggcgaggctgggactcagtggtaccactcctgggacttgaaggtaaaactttgctgtttagtaggcttggggtatggctttggaaagataactgtagaacttggccgtgaggggcgcagggggagggggcaggggaggcgcaaatattggatgtgccttgcagtgaagcttaccatgctttacatttattcttattctaaaaaaattgtcttttgagttgatgcttatgttttcctgttatatgtcatcacttggcatttaatgtgtttgtatttccttttgaacctcagagatacttgtattgttgaagtgtacagttactgatttctttaaaaaataatggttttttttttcttttgcttattccaaaggtggaaactttaggaaaaaagtgttccacatgttccacggttctatatggcttagatttattcactgtcttaattcttagaccaccaagggagtaggtaatgttattaaacaacttttgcaggtgagaaaatccgggcacagagagataaaataacttacccaaggtcatacatttattaagtgttaggagtctagttgggcttttcatgcgcccctaatcaactcattatacctaaagtcttctatactgaccacatctttctatgaagatgaaccttaataggtatgtgctgcatgttcagaacaattaactctttttctactttttcttcttctaactttcaatactaaaattatggcaaataacgtttgagtagtttcctttcagcacaattaaccaagtgtcctacagtaattaaagttgcatgtcctacaatgattaaagttgcatttcaccataaagttgagattttcagccgttaagatgtatcagcaaagtaaattattataaagcaaatggctaaagctatatgtttgtttgcacttaattttaaattt

SEQ ID NO: 32676 - DNA, 1278 bp, Artificial sequence
  DNA replication origin
gctccgagccccgcgggctgcagacctcagcggcaggaggaggcgcagccagcccctggcctgggagggactgcttcagtgcagggggtgtcggggtgcgccagggcggtaccgctttaaatgcacttgactcacctgctccggcgctgtcgcctccttcctctgctgacagctgggggctttgttttctccacccacccggccgccgtgctccgcctcctctgtcgcacgtgactcgcagtctgccaccgccgccgccgccgccgctccgggagtccacccgagagagtccggccagcgccgccccttcccgcgggtgcgggtgcgggtgcgggtgcaggtgggcgccccactgggcaggtccgagccgacccgcctgaagacgctgtctcaggccaaaggaagccaggctgaattcgtgacagggaagaaagtgccagcgggtgaaataaactaagtggtttgaccccgctcgagagggaggaggccggcgcggcttgcagagggggcttgaaaaggcgccgccacactgtgaattaattacctgcaaacgggggcttgcacaccaactggggtgcatctgctttttacacccagtgtttgtactcctacctggagcacgattgatgataaggggcaaactagttttgtcatgaatattactaattaaactaggcaattctaatacaattaacaatttaataatagcgtgtttttggggggtttcaaatctgcttgttgatgctgttgatatttgggttctatttggaaaatggagtgcaggctggagaagcgaactccagaagtctactgatgtgggcgcttgtccatttggaacagcagctatttttaatgaaatgagaaaatgttctggcttcaagacccagctcaagatctgctgcttttggaagtggtcccgaccggtgctgatcgcagtgatctctagtgtttgaaacagcaaggatttgtctgaatccttctgttagcccttggaaaacgcattatataccttccctcctgtgccctacacattgctactcaggggaaagattgtccatgtctcccccagcgttcgttaaagccaagtcttcgtagtggagtgatttagcacagtgcttctcaaagtttaagagggatcacctggggatattgttgaagccaaatttgagcgtgtcgagagttaggcctgagattctgcatttctagcaaactcccagttaatggcattgctgctagtttgaggaccacactttcagtagagaggtgttgatcgccgct

SEQ ID NO: 32677 - DNA, 1134 bp, Artificial sequence
  DNA replication origin
gcgccggaagtgggagagtgcccctctaggagcccggaggaccgcagctctgtggcaggcgcgggtcgtgtctcgcaggaggggcgcgggtccggctcagacctggcgggggcatcgcagagtacaagcggttgacgcgctgctgaaagggtggggagcataagatacatattaaatataattatatattctatatattttaatacataaaaatatacgtatatattcaaacatatttttcctcgttatgtcgcgggctggtataccatcgagaaaataaaaaccgagaacccatgatctctacattttgagaggaagaggagctgaccacgctcaccgcggacgtgctgactgcgaagacgacagtcctaggagctgcggaagggctggggcggggacgggtcctgcccacgaatgccgaggacgccaggtgctgcggaggggtcgggatggggggcaggagaagctgtaaagatttcctggtggactctgccctcgagctgcccgtggccgcgtgctggatgctgacacagcaggaggaggagcgccacgggtttcccgcgtaggaagcgacaggagccagggcacagcggggcggggttcagggcacgctcggaattggcccggcatcttagctggccagaaactaggccaaggggttggttagagtgagttaggttgtggagagtgtcaaataccaggctcaggtgttagaaatgcattgaatcatcagtgcagggtattcacatataacatggctggaacagtgttcagggcggtgtctgtaccgtatagagtggattaaaggacaaaagagatgaaagaatacaggtgacccatgaatttagcaaaatgtaataatctgtgaaagtatgattgaaaatagggcaagggatgacatcgccaagggaggtcttttggaaaataaacgggattgtgaaataccaacgttttggaatggggaagaaaaggagttcgagaagaggagctacttagggagcgcccagatggttcaaacatcataaaaacaacagtgtttcaggagacggaacactgttgctttgctgcagagagccgaaagagggtgagaactaagctgatggtggaatttgggggaatgacagaggagggcaa

SEQ ID NO: 32678 - DNA, 870 bp, Artificial sequence
  DNA replication origin
tgggccggctctgggagggctggcttccgaccatctcccgacctcccgcgcccaccgcgccgcgccgcgcgcctcccaggctgggaaccgccggggcgaagcggcaggtggcgcgggttcacctggcagggcaggcgcccggggtccgccggggaaggacgaggggaaggggtgcgcggactcaggggcaggcagcggaggggaggggcctggggatctgggacggtgtaagggtgctgcacttgcgcgcgaagggaggggtggcgacgagtccgcggccgcctctccgcgtcccccttccaccacccggggaccaccgcctctgaccgcagcctgggggccctaaagaggcctcgggtctcacctcccgacgccgtcggggagaaaccggggaactgccagctgcgcaacaacttccggttctggtggcgggtcggggcggggcccggaacgcggggacgttgccatggagaagagccgctgtggccgcgcacttgggacagggaaagagaaccgggaggctcgaccggtgggaatccagctgctctgctcagtgttccgttcaataaactagcattgttgcttcgcaaagtgcttttgcttacattattcatttactccggtaactcagtaaggttattcccattttacagaaaataaactcaaatgtcctgtgacttgccaaggattacagagaggggcgaatgctgtgctgtctaccgctgagtacaatccctaataccattcccactcccgaagtggttacaccccaagtactgacgttttaagggacaagtttgacatccgcaaccccatgctttcacaggagaacacaatggcccttgaaaaagtgagaactgacccacataa

SEQ ID NO: 32679 - DNA, 985 bp, Artificial sequence
  DNA replication origin
ctggccgcgggaccggccgcgaccgccgcggccggcccggaggacgcctgccgccgccgccgccgcgcgcctagcgaggtgagtgtatcgcccgcggctgggcagtcccggagccgcagcgctgcgcgcgggtcggaggtggagaaagaggccccgccgcggccgcgtccccggtccctttgtggccggcgctgcctggggccggggcgcgggcacgctcggcgcgggttcgggtctgggaccccggtgccgttggacacgcggcgtctctggttggcagctttggcgagcagcgagtttccgtcctagtttgacattgagttagaaccgtttttctttagaagacggaagtttgttttattgacaaaaataaagctaaatatggcttctgggttcggccgtgtggtacttgcaaccgcggtgccagcctgaccctcgcggcgccacgggggaggggaagacacgccggcagcgggggagggggcttcccggcccgctgcccccgaggaggacccggacctaaattagcaaatgtttgtggttgggaagtagcgggctttaggtaatgtagtagcttttccgcttttcctggaagaatgaatgaatgagatgtcatttactcatccataatcaatacgttgcccatttaagcatttaccaggaattgggatgatttgcattgtcattgcttctcttatctggtcagccttgctagatgaggttcccttactccccagatttgtgaccttgtcctcattctcaaagccactgagctaaccaacccgtctaccaaactcacttggcatttttttggtcaagtgggcaataggcaaagtagtctttctgaactgtttctggagggcagagaatgtcactttgatcatatcttatgtttaatacattgctttataatcgtgtcaagaacgctgagagttaggaggtcttgtcatttcacagatgaaatagtgaaggccctaagaagttg

SEQ ID NO: 32680 - DNA, 1126 bp, Artificial sequence
  DNA replication origin
caggcccccaaagtctcagccctagctccagctccaatagggaaaaatgggctgagaaatgcactgggagatccccagcctggctctcctggggaaaccaaaaaggctgcaagtcacagggtgcctctcagaagtccagtctgccgctgtggaggcacagggatctgcatgtgcttctgctgttgctaacgatccttacaataactcataaagaacctggggttctcccagcctccgtacatgagtctcccccgggcctccccagccctaatgcgggatggagatgacagattcgcagagggacttggccaaggtcacacagctcacatgtggaggcagagctagaatctgagcctcgggggttataaacattttgctaaaacttaggctttgggagaacggagtggggccctgcaaaactgtgcccacaggttgttatggctggtgggtgggccagcccttccctctgtggtaaacagggaaggcccatggggtggaggcgggggtgggggtgggggtgcagtgcttgggtaggtttgaggtggagaatgaagcaggaaataaatgaggggagggagcaggggacaggaaaaggatggaggacaaggtggggtgaccatccacggccccccagtccccaggcccagctcaagcctggggtaaagaatgagcctcggcctttggggggcctcacttgtatcagtagaggggatcagaggccccatctggccaggcactgcccacaacgtgctatgacaccttctgtcaatcacctgccgcccaggcttcagtctgctcctcagttaaataaaggatgtggccataaaagatctcgaaggcagtcccctgccctgacaggcagagggctctgggtggcctctgtcagatggcaggttggggacttcctcattcatttgttcagcaaatatttaccaagcacctactgtgtgccaggcagcagggtgcagctgggctttctatctctgcttataccgaggagactccaggtgcaggggtgtgtgcagcatgttaggctgtgacttcctcagagtctgacatgcacagaggtgaaacaagccagtgctcacaccgaccacacattttaaaagccagcccagcactgagg

SEQ ID NO: 32681 - DNA, 940 bp, Artificial sequence
  DNA replication origin
ctccgcctggcaaccgccccatctgagaagtgaggagcccctccgcccggcagccgccccatctgagaagtgaggagcccctccgcccggcagccgccccatctgagaagtgaggagcccctccgcccggcaaccaccccgtctgggaagtgaggagcatttctgcccggcagccaccccatccgggagggaggtgggggtcagcccccgccaggccagccgccccgtccgggagggaggtggggggtcagccccccgcccggccagccgccccgtctgggagggaggtgggggggtcagccccccgcccggccagcctccccgtctgggaggtgaggggcgcctctgccaggccgcccctactgggaagtgaggagcccctctgcccggccagccgccccgtccgggagggaggtgggtgggtcagccccccgcctgaccagccgccccatccgggaggtgaggagcccctctgcccggccgccaccccgtctgggaggtgtacccaacagctcattgagaatgggccatgatgacaatggcggttttgtggaatagaaaggggggaaaggtggggaaaagattgagaaatcggatggttgccgtgtctgtgtagaaagaagtagacataggagacttttcattttgttctgtactaagaaaaattcttctgccttgggatcctgttgatctgtgaccttacccccaaccctgtgctctctgaaacatgtgctgtgtccactcagggttaaatggattaagggcggtgcaagatgtgcttcgttaaacagatgtttgaaggcagcatgctcgttaagagtcatcaccactccctaatctcaagtacccagggacacaaacactggggaaggccgcagggtcctctgcctaggaaaaccagagacctttgttcacttgtttatctgctgaccttccctcc

SEQ ID NO: 32682 - DNA, 1270 bp, Artificial sequence
  DNA replication origin
ttttccccacctttcccccctttctattccacaaaaccgccattgtcatcatggcccattctcaatgagctgttgggtacacctcccagacggggtggcggccgggcagaggggctcctcacctcccggatggggcggctggtcaggcggggggctgacccacccacctccctcccggacggggcggctggccgggcagaggggctcctcacttcccagtaggggcggcctggcagaggcgcccctcacctcccagacggggaggctggccgggcggggggctgacccccccacctccctcccagacggggcggctggccgggcggggggctgaccccccacctccctcccggacggggcggctggcctggcgggggctgacccccacctccctcccggatggggtggctgccgggcagaaatgctcctcacttcccagacggggtggttgccgggcggaggggctcctcacttctcagatggggcggctgccgggcggaggggctcctcacttctcagatggggcggctgccgggcggaggggctcctcacttctcagatggggcggttgccaggcggagggtctcctcccttctcagacggggcggcagggcagagacgctcctcacctcccagatggggttgcggccgggcagaggtgctcctcacatcccagacggggcggcggggcagaggcgctccccacatctcagacgatgggtggccgggcagagacgctcctcacttcctagatgggatggcggccgggaagaggtgctcctcacttcctagatgggatggcagccgggcagagacgctcctcactttccagactgggcagccaggcagaggggctcctcacgtcccagacgatgggcggccaggcagagatgctcctcacttcccagacagggtggcagctgggcagaggctgcactctcggcactttgggaggccaaggcaggcggctgggaggtggaggttgtagcaagccgagatcacgccactgcactccagcctgggcaccattgagcacttagtgaaccagactccgtctgcaatcccggcacctagggaggccgaggctggcggatcactcgcggttaggagctggagaccagcccggccaacacagcgaaaccccgtctccaccaaaaaaatacgaaaaccagtcaggcatggcggcgcgcgcctgcaatcgcaggcactcggcaggctgaggcaggagaatcaggcagggaggttgcagtgagccgagatggcagcagta

SEQ ID NO: 32683 - DNA, 1219 bp, Artificial sequence
  DNA replication origin
gtcctgtgatgccatctgtcttcaggtctcccagctgtagatacctgcacctgctctggtggaggtgataggggagagaagtagactctgtgagagtccttgcttgtagatgtgtttagtatgttggctttctcaaaagctggttatgctagcagtgaagttgtcacatggacagactcaagatcaccagttgccaggatgttggaggcagtggaattagctgttgttttctccttccttggagcaggttcattcagtcatgagttgctgtaacgtcctgagttggttggcctttagacaggaggtagcgctttcaagagaccaccagctgcaatagtagaagggggatatcggcttgtcctaaattggccaggttaagtattcaggtttctcaagcaatgggtggggtcataaaactcccaagagtttgtcttttgtgatcagctaccagggcaggtagagaaataccatcaagtggggggggcaaggttaggtgggtctaagctcagactctccttgagtggggtttgctgcagccactgtgggagatggggaaggcggttcttggaccaatggggttatgttccagaggggattatggctgcctctatcaccagggaagtgggggaaagctggtagcaatagacctcacccagctcccatccagttggcaaggctgttctcactctcaacatacccaactaacagtgcaagtttatctccaggcagcctgtgcacaggactcagacctagtcccaagctttaagtttcacccgctaagaaagtaagcatggctttcagccatacccctccccatccgccctcactgtcagctgtgactcctgctctcctttctgcagtagttcccatttgccctggattctgctcaagagagtttgtgcccagtcaaagttattataaagtttagccggaaactactttcaccctgtgacccctcccaaattccactggctgcatttcccgagggcctctgtgagatatagtcagggatggcttccctgggctcaagcgggagaatggaagtgcctacaaggctcttctcactactttcatatttcacactaagtctgtttcaggtttaagtaagggtaaatccttctcccataatctggactttcgggttccccagtggggatgtgtgttcagaggcagcttttcccccttctcaccttaagaactcacagtttttctcctgtct

SEQ ID NO: 32684 - DNA, 1645 bp, Artificial sequence
  DNA replication origin
gtctactaggaggacgcgtggacacgtccctcctggagtttcgattcaaaatgcgcccgaatgaggtagcgccgctctcactaggagcaaaagatccgtccacgtcggttccagaaacctcgtgtcccccaagcctgcccgcccgcctcacctgccaggcggctgaactcgcgcgcccgcagctcgcgcaggctgcccgggccgtagccgtaggctagccgcggtgcgctcgggtcccgggaacccgcgaaggtccacagctcccgccctgactccgccgccgcgccggccatggccccggctagtccatccaggccggccgggcccgggaagtgcgcgaagccggcccccggcgactccgcccccgccacgcctcccaggcctccagcctcccagtctctcggaatccgcagcctaggtgtggcgccccgaccggactttcacttctggccagccctttccccacctgggcgcgggagcgggtgccagtctttaaacaacctctcgatgggtcccacgaagatgtttccagacccttggaatgccaagttcaagtttagctatgtctcgcggagaggccggtggaagaagcaacgaggtgatctttcctgcttggcatcggcatcctggaaccccgcgaccctcctcctcgcaggggtctcgggaccctcaccctctcaagcgggaaccggcgtctggcgggggcgggggtgggggcgttctcgggttgctgctacccagcggggcgtgtgcttgccgtttgttagaatgcggctgaccaaagggtagaaaaggggaaagattagggatccacgaggctaataaattctcagtggctgcacactttcggaaccgggaagctcgggggcttcccccggagcgggccctgcagctgggatccaagtgagctgagcttccccgccctcccaaccgcgtcctgggccctacttcctgcccttgcctccccaaccctgcatcccgccccgcacttcccgcacgtgggtgtggccgggccctctctattaaagcaagagtgccctaggacaaagccgcccctgtcccggacagagtggaataagagcgcctccttcaatccccactcgcgcctgcacccagagcacctgggacacagcggctctgtcttggagaacaggtgcctcaatagggagggcctggccaaacctatgcgcgggaagtgcggagcgggatgcaggggtggggcggcaggtgcaggtagtagagcccaggcatgcggttggggggtggggggaaatctcacgtgcgatcccaggtgcggaacccgctgctgggaatggggtggaagcaaaacaggtactgcacgcacaggcgaggtgcctcgtgggggaatcgaatgtcagggatggtggacagtgcggatgggcggcaggtgctggggctcaggggagataactcagaggcaggctcggtggagaacccaaggccggcgaccaggtgcaggcggcccacaggccctggaggcatacagcggggggacaaggtgggaaggaggcctatgccccaagagctcaacctgtgctgcatccaggccagctgccacccagggtatgggccgcagatgccctaggatccttgctgatgcatgatgcataccggtgcccagcgt

SEQ ID NO: 32685 - DNA, 863 bp, Artificial sequence
  DNA replication origin
caagactcccagcagtgggaggggcgtcagattagtgcacaaatgtctgctttaaccgtaatgtagaggaaatacaaggaacttgcattaaataaaagatgcccacaacactaccagacatacagtaagtggtaacgagttctgagggccagcctggctgacacatcccaattttgcatttgaggggaaaagtactgttctctgagggacaagagtgaaaccaggaggggaccagaacatagctctactttcccagggtagcattgaggggagaggttggccaatagtgggcgtgagagatcacagctggaggagatttaggggattaaggaggtgcggtgctgatataattactcaggtagccttgaagagttgcttcaaagaatggagagcctccctccccagcacctgtaggcattcatagtacccctctatttctgagtggtaggaaatttccataattaatagttgagagagagagagagagagagaatacgaaagaagggtgaggagctgtctccagcaggtgaccctgcgagagggaaggatgaggagtgaatagagaggttggcagaaggcacccccgtctccctcctgactctccctacttaggaagccagaggagacacacaggaggaggccacagttctcacagcccccaaagggaaaacacagttaccctccacaacaccaggaagtgacccgaagcgctgaaatcagctacccgagtagtgaaacctaagtcatggttgctgttctgcccccagaaggggagcagtcaccagttgttcatcgcgacagagcagatacactcaaaccccggtgccctgtgccaagacgtgcccacttcacctgcacaccct

SEQ ID NO: 32686 - DNA, 870 bp, Artificial sequence
  DNA replication origin
aaaatgccgggactccttaaaaaagtatttaaaaaattcaagacaacaacagctaaacattaaaccaatttgggaccctttaaagtgcagagccctgtgtggcttcaagagttgcacatcaggaagcaggccctggttctcagggtaaggggccaggggaggaaggtggaagtgagtggatcagtgatagagccccaggcaagagcaagtgggatgaaagggacccagggtccaggtgggggcagagccttgaatgggaggaaaagtatgactttggtcaccttctgagaagtgggagatggaagatggagaggagatggaaaataagatgaaagatgaagaggagagggtgctagaagtcattctggagaaattatttaccttattgactaatttctgagtcgaggaaaggggcagaagcttgcagcagcatcagtggagtaagaggctgaggggctttggggtggaagtggggcactgagtggtcccactagcagcaggcacttggtagatggggcagaagcaagccaggtacccaaaggacaggtgggactgaaggaggggtgtggagaggaggcccctgagaggatgggctgggatccgggttggaaaagtgataggaaatgaggtggccaggactggagggctctctcagtgaggagggaggtggacgtgaaggtggaagtgcaggcggcccatctcagaggggaagaattcgtgcgtttagtattctggctgtgaggagatgcggaagttggtggagatccagtctagatcaggggtccctaaccccgcggccgcagaccggtactggtccgtagcctgttaggaaccgggccacacagcaggtgagcggccagtgagcgagca

SEQ ID NO: 32687 - DNA, 1042 bp, Artificial sequence
  DNA replication origin
tctctcagtgaggagggaggtggacgtgaaggtggaagtgcaggcggcccatctcagaggggaagaattcgtgcgtttagtattctggctgtgaggagatgcggaagttggtggagatccagtctagatcaggggtccctaaccccgcggccgcagaccggtactggtccgtagcctgttaggaaccgggccacacagcaggtgagcggccagtgagcgagcattaccgcctgagctccgcctcctgtcagatcagcggaggcattagattctcatgccagagagagccctattctgaactgcgcatgcgagggatctaggtagcgcgctcgtatgagaatctaattcttgatgatctgaggtggaacagtttcattctgaaaccatctgcccttcctcccccaaacgccccccacccccaccccaccactgtccgtggaaaaatcgtcttccacaaaaccggtccctggtgccaaaaagattggggacggctaatctagaggattcattcaaagagttaaataacaaagaaagtagagctagaagttcgtctggaaggagcggaagtgtcgtggaattattattttaagatcaggcataagtgtgtatgtgtggcagggagggagatcacggagagggagaggttaaagatgtgggtgaggctgctaaatagggataagggtttcttttcccttgaaaccagaggaaagggagatagacgcgttatagagtcgccttgaaaacactcggatgttaagagagactgggtgttatgagggcgatctatataaggggggaggaaccaggaacttggctgtggcctgggaatagggagaaccgtgaatttttcttgaaaacgaagggggtcgcccgtgagcagcgaggagagcggtgggaggcagcgccgagtcttgccgctcccgcctggcaggggcgggcaggacgcaaaccttccttcccagtccctcggttaccagggcatccccggctctctgcaattcgggaaccttgccagaagggctcccacctccccaagcccccg

SEQ ID NO: 32688 - DNA, 941 bp, Artificial sequence
  DNA replication origin
cctcaggctcatgaaatcagaactcaggggtgggcccaggcagaggtgattttcaaagcttccaggtgatttcagtgtgcagtcaaagttgagaaccactgcgtgagaaagacggcattcctgaaaaggctgcagtaagtcaggcaagaatgaagtaactcccatgctgaatggacactggaatcaaaggttctaaatgcctttaaatgcaaggatgtatgagggtaaagatgacatcaggtaggtatgtgggttggagtcagacagaagaaaaatgacctgcaaagagagcccccacagaactccttaagtgatgagggggctatgtgggggtgagtgggaagaacttggagtgggaggccttgatcagatgtaaccccctggggggacaagcagggagtggcctaatgaacctaaacctggtagccgaggaaggtgagtggattggggcctcacccagggttggggagggagggggctgggaatctggagccatggtgccagctcgtgtagagggacacaagagaatggaatggacatgtggcattaggggaatagtgcacagaatggtggactagttagggaaatagtgaggtgatacagtggaggcaattttgaaaaggggaggaggggtttatacctgttagtctgaggttatggcaagccacacacaaggtgtggggtggctagtgagaaatgttggctggggacccaggtgagaaggctggaatactggagaggctaggggtgattccttggagggagctacagagtctggaggtcgtgtcctggagggccagccataggatgcaggtgaggagaggaccagtccctggctgtagggaaaatgaaagttagcagtcacccaggtggcagcacccagatgatccattgaaaccataacccaggtgttgtccatcagtaagagactcaggtttagc

SEQ ID NO: 32689 - DNA, 1211 bp, Artificial sequence
  DNA replication origin
atgagaatttctctgatctgaaggatgaggtcagtcctgtgatgactggttccaggtggctttcaggcagaaggaataaccagtgagaagacgctgaatcatggatgaactctgctgtgtgaaaaacgctcacacaactgtagagcttagcatgtgaagtgcactgggccggagagggggtgtcaagaaaggagatcagagggcttggcggaggccagcacagaaagcctgctgggacaggcagcaccctgagcatgatggggagtgattgaggcttgagagaaggagggtgcagtgttcactctggctgcggtttggagaatggacttcagaaggaccaggccagagcacttaggctcttccagcactggtgggtggatttgctgtggagatggggtgagggaagtgcaggcaaacccttcccagtgcttagggtggtggggctttgtcctaaggtgggggctttggagggagcaggctgggagtggtaggtggaagggggtaagcatgaatgaaaattgagagttctgttttggccacagtgaatctgttagcatctgagtggagatgtcaggagattatatgatgcctgctcaggagtttggtcaggcctggagtgcaatatttagcatctgatcttagatggactttcaaaccagggcactggatgaactcacctagagagtgtggaaagagagaggaggagagtaaagaggagtgaactcagaggtcttcccacactgagagactgagcacccaaaaagaaccaatgaaaaaggagccactcaggagactttggttgcccagaggcagaggaagttgtttttggagagagcagttagttgtcacatggtgctgagagttgagcaaaaatgggcagagaagtaaccactggatttgataccatggaggccactggacaagtaatcccagtggtggtgatggaagtcctatcatattggggtgatgagtcagtgggaagttaggaggtggagccaggggctgtagcacctctttgaagaagtttcctcatataggggagctgagcacctgggcactggctggagagagatgtggaattgaggaaaagacaaatggtgtgcttggtaggtatgacagcagaggagagggaagcaagggggtaaaggggttgcatgaatgtggatgaatgacttggggtgagtggtgtttttaagctattccctgtggac

SEQ ID NO: 32690 - DNA, 1253 bp, Artificial sequence
  DNA replication origin
gcttctcttcgtgatgatctcctttataatgtgagtgacaagttgttttattcacctgcccactcactcattccaccaacactcatggagaaactagcatacaccagtctctaagccaggcattgaacataaacacaaatgctgaataagacaacttcctgttctcaaggaggctaactgtacccacaggtgattcccaaactctgaaggacacacagaccccaccaggctcgtgtgtgtgcctgtgtgtgggtgagggttgccagcagatgcacatcacacatgcaagggacagatgtaacagagtgctggctgtgtattcagggacgtgcagacaggctggattgcctgaaggagactgagatgaggttttctaaggtgatgattttatagaatttccagactaaaaattacataaatcagagagatttttagtcatgaaaaaaatacatcagagggccacatttaacaaagggatggggaaagaaattgtgaaggacaggagcggaggaagaaataggtaagtgggtgtgctgaaaggaggggactgaggtggatggaaagtagctaagatgggaaaggctgtgtccagcaagcaaaagtcagagcagcaggaggtgcgcggggttgagcacgaggtgcgtggagggtgtggcggggatgagcgggaggtacacgggggtcagcaggaagtgagcggagggtgcaggtggggggatgagtggcaggtgcatggagggtgtggcggggggtgagcgggaggtgcacagagggtacggggtcgggaggggctgagcgggagatgcgtggaggtgagcaggggcgcggaggtaagccgttgctacttaggggccactgacagaggcaacgagcagggccttctgaagcccacaggggacttgctggagtgacttcagacctccaggcccacccttagaaggacaatgaaggggaaagagttcgcaaaggtggattctgtgaggatctgtggcaccaacaggataaagacacgcagtgtcgtgtctggtgtgaggcagggaggcatgcaagacaccgtatgtactgggcttcctgatgctattgcatcagaaagagaaggcgagtttaggcaaagccctgggattcaggtatgcagggtttcatggcactttggggaaaatgatttgtctgaaaccaaaggaatcctgagtccagataggaaaggcttcgctttctcatgatacaatgaggcttagaaaaaaattctgataggc

SEQ ID NO: 32691 - DNA, 1105 bp, Artificial sequence
  DNA replication origin
cgccccctgtcaggcgggcaaaggatacagtcccggctccagaacgccgcggcactggggcgggaggggcccgccacgtccgccatcttgaaacaaccgccactcggggcgtcgcgcctgggccgccacgcctcggcctgcaggctcggtccccattggccgcaccacgcagaggcccgcccccgcctgcgcggccggcccctgcggggcgagagggtgggggcgaaggggaagctacgtcccggaggtgcggtgtggggcaccgggcggggccgcgggaaccggcgccccacggagctgctgctgtcagaccaaccccgggcccccatcatcactgcgccgcgctttcaggcgccgagaactaccgttcccggcatgccatgaaattggcctcggcgctgaggcggggtccggccctccacccgctcccgccgcgcgcgaatcgcggtcgcgagccatggaggaggaggcatcgtccccggggctgggctgcagcaagccgcacctggagaagctgaccctgggcatcacgcgcatcctaggtgaggaaagggggcacggtgccgagagggtgtggaggagaaggaaggaggagcggagggatgaggtgcggggtgagcggtgcgacgctggccccagaacaggagtggacatcgctgctgggacttccgttgttacagaggaaagtgggggacctgggtttgtgattaggccttgaaagtgtttgccaggagtgttcggaggcagagctgggaagcctgaagtttcccccactcaccgccaaccaaggtcccacccaggaaggacgggcagagacgtgcaaagggaacacagcaagcacctgacggttgggaagttggatctccccctaggaggcattctcagccagggcattatccccgaaacccaagacctttctctgggggaagtaatgcacccgacctcccagggcgacaactacgtcgggtctgaaaggaatccaaccttgcaccactgaatgactcagagtttttcttttatcgaacatttctttgtttgcttgcttgtttgtattttgagacagagttttgctcttgttgcccaggctggagtgcaatggcgcgat

SEQ ID NO: 32692 - DNA, 1369 bp, Artificial sequence
  DNA replication origin
ccaatttcatggcatgccgggaacggtagttctcggcgcctgaaagcgcggcgcagtgatgatgggggcccggggttggtctgacagcagcagctccgtggggcgccggttcccgcggccccgcccggtgccccacaccgcacctccgggacgtagcttccccttcgcccccaccctctcgccccgcaggggccggccgcgcaggcgggggcgggcctctgcgtggtgcggccaatggggaccgagcctgcaggccgaggcgtggcggcccaggcgcgacgccccgagtggcggttgtttcaagatggcggacgtggcgggcccctcccgccccagtgccgcggcgttctggagccgggactgtatcctttgcccgcctgacagggggcgccggcgccctccacgggacggcgaggggcgagccgtcgcgtggcagtccgagagcggaggagaagctccgaactaaccccggggatggggacgtgctgctcggccccagtctaggtgctgggctctccccttgcttgggtgttaggtggccgagagactggtactgtctgcaggtgtggggacacggctcagatgcttcccagcgctcactaccggtgagctcgagaaagatagccttgagtccaggctcagtccagggctgagatggccctccgaggtccctctgcccaccctgtcagagtgcccccaggctgacttgagtgtgcggagctagctcgaagttgagggaggagtcggtgttggctggacagggagcctttttgttttgatttaggattgtctttagtctgcattgctaggagcaagtcaggacctttcggacttaaaaggccctccagtgatgatgtattttaatactggggttttaggagaggtgtggagcttggttactgggatgtggtctggtggtgctggttactgcgtaagatgggaatcattgtgcctggaagtattgttgacttacttgtggagtgcgggtcactggcagtcattgaagttcttggatcgttgtgaggtggagaagcagtggaactttttagtccagtggtagtattaccagttcagcagcagtgatgagatgtttgtgtgacaggagtgtttctttccttggagtaggtagactcttctcgcttgagctttggtcctgataatttacttcacgttccttagaggggttacttgaaagagggacggcaatctgtgttactgagtgcttgcagaggcagctctttttgtgtttgctaggattggtgatggcattaattgaggcgttgctgttacctttggcagaatcactgggcattcttcttagctcccagtgaaacttacaaaactgtgttatcaactcctttgttgagtt

SEQ ID NO: 32693 - DNA, 2003 bp, Artificial sequence
  DNA replication origin
cccaggccctcgtccctcgtgtctcgccaggcttcgtgagcttcgacaacccggccagcgcgcagaccgccatccaggccatgaacggcttccagatcggcatgaagaggctcaaggtgcagctgaagcggcccaaagacgccaatcgcccgtactgagcgccggcgggagcgtcccccgggggagaccaggactcgcacaggtaaccgggggcggccggggcgcggggacgggggttgggagggaaccagacggacccgccgcctcctccggcctccgtgggccggaccctcactggtgccttggacccgctgcgcccggctcaacctgctcctcgccctgctcctcgggccaggcgcagagctgccgtcaccccggcagaaatgggcctggccatttccctgtggcagggccaccaggggcaggagtgagggagccactccgggcgggtgaggcgagccctgggcctgcgcctccgggtctacattggcagtcctgttggccagagaaccctggggtgaacaggtggcaagctcaggctgagggaggttgggggcagaacaggctctacccagaagagctgcagccgcccgcggggcctgctcccagacccccggctctctcctccccagttcttccaggagggctggtagcctttagacacttgacccctgcacccctgtctttccccatagctcagtgaagagaggaaggacaggatctttcaaagggaactttactaagaaacaaagcaggatgggatgaaagctgaggagggtgatggtacagcactgagatcccgggccctgcctgccccacacgggtcatgatgagtggtcgttgttaccttttctgctgggctgggtcctgcctaggagctgaagacacagtcagccacgcctcttccagcccacgtgttcccctgagcaaagttcttcctgcagaaagaatggggggagattccccaggacatcaaaagtcaaccttcagaatggtttcccccagtgctgtggctcttgcagcctcggcttcttcacagagcagaggtgaaggctcctttcgggcctttccagctcagcaccctgctgccctctgaccgcccctccctgcccatgttcctccatttattcagcagtattgtgtgccagctactgtgttaggtacttggggttcagcagtgagcaagattgagaaggtggagacagacaataaacaatgacgtgtgatcaaagaatatgatctagtatgtcgagattgttggctacagttaaaccacatggtcagtgtagatctcactgaggaagtgaattggagcatagaaggtgagggaagcagccatgcccccgcctctgagggaacagtcagtatggaggctgcaaggtggggctgcagagtggagtaggaacagcaagagactgggttgctgggagagtgaggagggccacctggtgtggggccttgaaggccactgcgtggactttggtctcttctctgaaatgggagatggagagagcattggagagttctgaataggagagtgatgggtaacttgcatttcagtggggtcaccctggcttctgtgttgacaatagcttgtagggggccaaagcataggtctactgcactgaccactcagtccagtgtcacagcagttgatgagatgtgaaggaattaatttctaggtgtattttgaaagaggagccaaggatgagtcccaggcttttggcccaagtcactggaagaacagagggattgggagaaagatcaggcatgtgaaaaatacacatttgagtttcacagtccagagtttgggagggaggtctccagcttcccagtctcccctcaaatcttccacccagtgctggggtacagataccagcagaacacccttcctccacccagaagtagcaactctcaccctcagagagcaggggccttctctctgggggagtgcttgtgcctccactctctgcaatcctggaaaagcaaaaccagtctttcct

SEQ ID NO: 32694 - DNA, 1462 bp, Artificial sequence
  DNA replication origin
ccagtctgcaggggagggaccctgctcagactgctagccagttactaacagttcaagggaagaaaaattcccttgaccctggactgcttctcaactctcgggcttccgaggacctctaaactcttccaggaaggctgggcttctgccctcctccagaacttcctctctgccctccccacacagtggttctgcctgccgctacgcctgtgccctagacagctcctccagccctttttatcttctttcccctcccttctttgagctcaggtggatgatgagaagaatgaggggcagcatgtcccccatagtcaggctaccttgtcctggcagggacaggcttttgtccagccaccttccttattctggggaaagcagtatcaacacacaattcacatatttgaaaactgctctggtttactaagtacttgacttttacttgacgtaacttgactttagtgattagacatacaggtcagcggaggtggggacgggccaggaggggctgaggggagctggtggaaatatggctggaggcgaatctcgtatggatcagctgaaattctccctatttattctggtatctatatttatacagaggttagttttgttgctctgggcccagctctgaccaattgttgcgcttgttcggctgtaggagcaaacttgagcaaggcaggaaggagaggagagaaagaaagagacgatggaggcagcatctggggcagagggaaagagggaaaaagaaccagcaggtagggaaagtgaggaagggctctctttcttggagagaagtcccaaggcaggcccgaggtaccacagacaataaactgagaagacggcttctacttcactcccgggtggctgtgcatctctgtcttatacctaatggccatttggggaccattacgcaacgggcacgttcatgggaacgcctcagtatctcgccaagctttcatatattttgcaggatctaagtcctttttacaggagaaaaggcctctaaagtcgaatgaattcaaggaaatactagattaaacaaagctataaaggttcatttactacaactcggtgagggaggggacgttatttgttgatatgctgcactggcccagtgggcctggctctaaacctcctgaccacacaagccctttctcgaggagcacctattagggccagtttgggaaatgctgatgtaaaatgttgtctgtatgaagagatgcattcagagttccccaaaggtgacttctgacctcattttgggaacatgacctgtgcccatctgggacctgcgcggttgggcctgggagccgcaaggttctgcatgccatctgggcacaggagtgaacgcgtgggaagcgcttctgcacggagggctgtggcctgatttgcactgatggtcttgtgacttgttatggacatatcagctggtgcgtgcttagtccacggcgcagggcgtggagaa

SEQ ID NO: 32695 - DNA, 655 bp, Artificial sequence
  DNA replication origin
gcccctgggagcagccagtctggttggagagaaaaacctctagacataaaagagaaagagccccaccccagaggatgaagtgtggattcgggcatgagcagggagaggctggaggttctttcagagagggagggtatggggagctgggggccaccaagggcacattcacagggcatgaaccagtgggaagacagcatggttggaggggacagggtgaggggagggccaccagagctcgggggtatccagcaccaggaacccctggaagggggtgagggagcatgtttgtgcccggttctgaatgcgccgtcccccagcaggatgcctgggagccagcagtccagggaggggaggccgaagggctggggtgggcagagggcacagggcgagcaccaaggagggaggaagccagtggctccttgggcagctttaggggttggggaaatttttgttctaggctgtggaccttgagggaatagagatagatggagaaaaggaggagagtggaaggtagaggagcagaagagaaggtgcagagtctctaaatcgaacctttactccagaactgggttgtctggcagcctcatggctcccagagaacaaggacggttggctctggcgtgaaagccatgcagcggcccatgttggtgcctta

SEQ ID NO: 32696 - DNA, 689 bp, Artificial sequence
  DNA replication origin
tctgtctctgcagctccgcttcaccatttctcagaaggctgggctggaccacattggtctctaaagtcctgccagctctgccatctgcatgttctgtaatctgtgaatgagggagtgcagaagggcttggcggtagctggagttagacagcgtgtgggctcactgtccaggggaagggactagagctgctgccctggcttcttcgtcaggcctgggctagagagtcatccctggggctccgccacacaccgcgcatgtgggattgagcctgcgggccctgtctgtgaaggctccttatctctaaggagaacagatgtagcttccacataaagcagcttgcagaacttgaactcagagccagggccccaagtcaaggcaggtgtcagcatgggctggagcagtcagggcctggaagagtgaggatgggaggaggaagggaggtgtggggggggctggagggggctgggcaggaggacacaagaaggagcatgcccctgggagcagccagtctggttggagagaaaaacctctagacataaaagagaaagagccccaccccagaggatgaagtgtggattcgggcatgagcagggagaggctggaggttctttcagagagggagggtatggggagctgggggccaccaagggcacattcacagggcatgaaccagtgggaagacagcatgg

SEQ ID NO: 32697 - DNA, 1746 bp, Artificial sequence
  DNA replication origin
tcatgtcaatttctttccaggtctcttgttggtaaacatcaagatacattgtttcctgataaggttaaacagcttgagagaaatccaccccaccctgaaatcacacggtagactgcatgggtcccatatctcatcttcccttggatccccatggattagaacatttttgagacaaactgccagaaggcaagtcctctcgggcccagacactatgtgcttttgccacagaatggtccgctggtagctgaaattaggtcccagcctggggccagctgttctcccaccgggccagaccgcgtgttggcacctgccagctcacctgaggttggggtcataggtgcggccgccaggccattcatgttgagggccgccatctgctgcatctgggcggcagcgaaggcagccatggggttcaggtagccgccctgcgcgactgatgccatcagggccgcttgctgctgcatcagctggggcagagggagtggaaaaaatatcacgtgcttccagggggcatccctccccgacaggggcctcagctcctggagaccaatctcccaggctctgagccccagaagctcccaactaccactccagaaagccctgatgcctctcccattcttgccctgtacctcaacagctattagagtccaccaccctgagagatgactgtatttaaaagtaatgctagggtctttggaactccaaagttgttgctaggggcagaggaggagactggctctgtgggtgctagtcagccctgtgtacagcctgtcattcgtggggaagtgacatccaaagcactagagacatgctggatgagcctctgcagaactcacttagcacaggtttctgtccagaatggttttaatttggagtctgttggtagaagtgacaggagaattatgaatagaaccccaggcacccctagtgttgtcacaaaggtgagtgcggacaggggaggctgcggaatgtggccaaggcggacagtactgcagaagtgaggtaagcttgcattttcagacccagaaccgtggcctgcctcagtgccacccacatgggagctgtggttaccagtctgcaggcagctccgggagaggctgacagagtgggcccccatgtggaagaaagaagtaggtgggccagaggcctgaggggatatcagaagtgtgggtgtgtagggctttagggcacctcacaggagccctgccaggagagaccagaaggcctgaagtcaccgttccatggagtaggggtggtttgcaaccaatgacctgaacctcaccctctcatctgtgcttcctggggttcaacgttgatctggctgagaggaaaaggctcagggtaacccacttttctgtggggcctctctcagctctgccccttagaactaagacagcagcccacctcctcctggcagccaccccaactgggccagccttctttcaaacccttctgaagttaaaccccccaggttcatgggttcattcccggcccctcctcactctggagggagagggcaagggatagagtagtattttcggtttcatgtcccgctctctgaggctcccaggggagtgagcttgagaaccgctgcccgtgcgcgctgccacttactgcctgagcgtaggcgccgtaggccccgaaagggatggccatggggttgaacatgcccatctggccagccatctgctgcattcgccgcatcgtgcgctccttgtcggtgtcggcgaacttgaccaccagact

SEQ ID NO: 32698 - DNA, 756 bp, Artificial sequence
  DNA replication origin
acatgcccatctggccagccatctgctgcattcgccgcatcgtgcgctccttgtcggtgtcggcgaacttgaccaccagactggacgaggctccctgcggccggggcggcgcgtgagacccacctgctccagagcctccgcccgcagctgtcggtgcctctggcctgcgcccaccccgcccgctcctcggggcgctttggaggaggcggcatcggcgctcgcccaggggaatgaggtgtgaaccccaccgcgggcattttccacctgggtaacctcaggccagttccttaacatccctgggcttccgcgtccttgtctgaggcccggaataagggtcatgctttcctgtctcttggggagactggacagccggcggggcgtggcgggtgctggggtctcggcccgccgctgccctcgcccccgccccaaggggccagcactcaccggcatggtctggctgccgtgtagcgcgttgatggcggcctgcgcctcggcgtgggaggagtacttcacaaaggcgcaccctgcgaggacgcgagaggccgagctgggacccagaagcagggccagggaggggccgggaggagagggcgcatcccaggtgaacgcagacgggtgaggcagagattgagaaagagacaccaagaagcccagagacagacggcgatggccccggagactcagaggagccctctggtctccctccgcctcgcccctccctccggggcatccctcccggccccgccccgcgcaccc

SEQ ID NO: 32699 - DNA, 1083 bp, Artificial sequence
  DNA replication origin
acgcagacgggtgaggcagagattgagaaagagacaccaagaagcccagagacagacggcgatggccccggagactcagaggagccctctggtctccctccgcctcgcccctccctccggggcatccctcccggccccgccccgcgcacccttgctgttgccgtcgggcccgcgcaggatggtgcactcctcgatgttcccaaaggcctcgaaaaggcggcgcacgtcgtcctcggactgttgcttgttgagcatgcccacgaagagttttctatcttctagaacaaaattaggagatgcttacccgggccagggaccgggctgcgcgggagcagggcaaggccggagggggagagcggcagggaaagggaggagccggggaggcggggcgggggctcggagccggcgggggagaggtgcgggggagggggacgggggcggggcttagtcggagcgggaggggcgagggagagaagtaggtggggtaggagcgcacagtcgcgggacaggtgcggagagagctgtggcaggcaggagctggatcgcagcgactcggcctcctcccgcctgcagggcaggctgcaccctgaggagcagagaccctgggctgacccctcactagagcacacgggcagcctgcgttcccctcctccttcgtctcacatgctatcctctacaggctccaaaatgaatcacaactggcgggtctgacttcgggcctttgcagatgctgttcccctgcctggagcgcacttatcacaaggtccagtcctcttcttctaggtctcagtttgagtattgcctcctcacccatgccccttcttatccctcccttactctgtctcaggcccccatccctgtggccggaatgtcaaaggacaatgactactttgtgggtttccgtatagctctcctttcccacccattccctgggatgctcactggggaaagagaccaggcctctctgctgaagcagcagtgcctggagcacaggaggccctccatttagtgatgaggtgaataaagaatgaatgactgcctgtcctgtgccatcccagggcacacctccttggtatgtcacat

SEQ ID NO: 32700 - DNA, 1304 bp, Artificial sequence
  DNA replication origin
tggcgcttgctttcctccccaggctgcgccttcctcacctactgcgagcgtgagtcagcgctgaaggcccagagcgcgctgcacgagcagaagactctgcccggggtaagtggcgcccgccgtggcgcaagcggccgacgcgccgacagggggcgacttcgggaggccgggcggcggcgcggcgcgcggggagaggacggcagggcgcccgccgccccgcctgagctcgggagcccgcgcgcccccccaaatccctgggctctcggccgtccgggcccaacgggatccgggacaggggccccacttggccgtggccgtgaagttcctgcgcgggcagcctggggcgggggagcggcgcgtcccgggtccccggagcgggagctgcctccgccgggcccgcgggccgcgtgcgcgatcgagtccgcccatcgagtcgacgcgggccgctctagtgggggaggagggggccggcgtgggagggggcgccgcaagtgagatcaccgcggtttatttaaggagccagccctcgtctttgataaactatcgcgcctcggccctggtttatagcttctgtgcgggggagaagagaattatttatggcccccctaactgggtgtgatatcagccatggctattatcgaggctagttcatcaccataaaataagaagtattcttcgggtcaagggtctgcgcggtctctcctgtgggttcagagagatggggcggtggtgaggggggagagatatacggctgctgagtatctaaggataaatggaaagatgtgtgtttgtgggcataatttaaagattttctaaatatagtgttgacgcttatacaatggacactgcagggaagcacatgtgttctataagtatgcacacccatgcttacacatgcatgtttacattcttaccaagccaaccgtatgtaaacacacgtttccatttctaccccacagcgggaaaggttaaccaggtagacggagagaaaatgcaaccccgggcgggggcagccttcctttgcatcgaagatctttctttactcgtttaggggtggggagagctgaattacacagggccttccttccattaagacagcctttgtattgtattttggtatttgtgattgcaaagcacggggctgagtcatcttaataacatacccacagatgcaaatatatggaaatcgagcaccgcacagattttgtgtgaagcccagctctggcagggtggccattccccagttgttttttcagttgcgcggctacatgcacatatattatagtaattactttctgggtgcc

SEQ ID NO: 32701 - DNA, 1833 bp, Artificial sequence
  DNA replication origin
ccaggagggaggaggacgggagagggaggaggagtgatctggggtctggaggaagggagacatgagacagagagggagagagatttctccgaagcttctccaagcctgaggcaggagttggaggtggggaaggcagagggggcactgggagctgagagtttctgtctcccaggcttttctccctgtttccttctttcatctccgttcctttcacaaatacattccctttccacctcctctctgaagccagaaagggaagggaggcaggaatttctacattggaaggggaggaaaggggttttcactgggtacaggctggttggtggaagagtcaggagctgcagaggacaccgggagcattctgtggccggcaaccagagtctaaagcaagcctggtgacaagggctgacataggtaccatactggcaccagcagcctgtgggcctcatgagaggagggcttgggccacgaggtctggcacagagcctggcacagagcgagcactcaggaaataaatggccatggcaatgaccaaatggctggctgtggagactggctggggatggactagaccagccaaggagggctgcctggagtaggtagaacttgatcagattcttgaaagatcaatgggtttcggagaagtgaacatggggaagaggggtataccaggtgaggaggtggtgagagcagaggaatgcgggggcagaagggaacacaggttgttggggatgtggccttggataagatcacgtgagagagagaggaacaagagaggcagccattccacagggtgccttctctggggccatgggtggcttgaaaaggtctgaggtgactgttcaccagaacattcaagcctgcttccgccatagtgagcttttgggctttccccatggttttgagccttgcaggcctcccaagccaccttcagccacatctgcaggcagagaaagaaggcctgacactgggcatgctggacagcttatgggaactcccagaaagactcccccatccccactctcttggccttgtcaccacacctaaaggacagcactgaaaagtcaccccttgagtatattcttctgtcaaatccggattccctggcgaggaggtggggtgtggcccagttagaattaatcagtgggagagctagactgagccttctcagttcgcaggtggggagactgaggccagaaagaggatgtgatttgttaaggtcacctagggaattaaaggcagagcaagggtggtctagtgctgtaagtcggtggcctggatatgccctagaagccctctgacttggaggggtgtgaagaccatctgtcactgcaaatcaaacaacaggggttgggacaggggacacagggtacgtttattttattaggagggcctggcttggggtcctccttacagactgagcctttatttgtaaggcttagaggagccctccaccatccctgagggagcagcgcccagcactcctaccggccagaaagacagcccatggtcaagtgtggctagaggtgctgggggtgaggggtggaagctgccccttctaggaagcgtaggggctggcgctgaaacagggcagagaggtctgaggcaccagggtacggggtaaggagagaaccgtaaggagaggggggtgtggtggggggaagatgcagggtggggagactccgcggagggagcaaaatagaaaagcaaagggaggtacgagaggcagacagccgggaacaccgagaggcagagaagctccgagaacagtgcacgggagagaaagagaggtggggacagggaccgagcggcagggaggggcgggagcctgga

SEQ ID NO: 32702 - DNA, 879 bp, Artificial sequence
  DNA replication origin
tgcacctggggggctaagaagtagtgaggggaccagtgagtggggccaggggaagactggaaggagataaattcagggggtggagacggcagggggaggtcacccaaggtctggaggatcctgaaagattttggttcacaataaagttgtgagctctctcaaaaactgtggcagaaattcctggaagctggacaaaagcaacagattctttttcctctggaatccttttcttgttatcttgggccatggaaacaatatggtcatttcctcctcctactcctcctcctcttcctccctcccctcatcctcctcccctcaaacctgcccctgaccttgtcccaagctggcttgcctgcgtacagcagaggcagtggccacctcctggttgcaggcagaggacaaggccaacaaggggacgggaggaaagacgcccccgggagaagcaggcggcagcacgagggacgacgtcacgggggcctctgaccgctattcatttcagtccccgggtgtctccatcaataacagtctgccagtgaccaggagggaggaggacgggagagggaggaggagtgatctggggtctggaggaagggagacatgagacagagagggagagagatttctccgaagcttctccaagcctgaggcaggagttggaggtggggaaggcagagggggcactgggagctgagagtttctgtctcccaggcttttctccctgtttccttctttcatctccgttcctttcacaaatacattccctttccacctcctctctgaagccagaaagggaagggaggcaggaatttctacattggaaggggaggaaaggggttttcactgggtacaggctggttggtggaagagtcaggagctgca

SEQ ID NO: 32703 - DNA, 956 bp, Artificial sequence
  DNA replication origin
ggaaagagaggtggttaacaaaggagaagggaggagggcaggcggagagagaagaaagggagggccgagggcgagacgcttcagggagaggaagcggggctcaaagagcgaagcgggaaaccgagctcgggactggggcgcagccgccgcgacccccgcgccccagcccagcccggctgcgccccattctcctgctgggcgctgcggtcgctgccgggagccgcggccggggcgcggagggcgtagagcgcagctgcgcaccccagcggcctgcggctcgggggatgttcggctggggagcaggggctgtgggccgctccctccgcgttcccgcccttaatggctcggtaattgattggccccgcgtcttattttcaccgcgggcggacggcgccagaggtcggctaatatcaatatttcctacggctgctccgcggtgtggatcttcccgctccggggctgccccgccggccgaaaatttacctttggtttaacaagaagtgggagctgagtcagggattagggcgcgtcaagtcaacacaaataaaaaaagcggggaggtgggaacaggggagaacattcgtcaccgcggggccatcaagacagcctggagttaattgtgggagagaggaggaggcaaacagagacagggattttaaaagaccctggactccttattcctcgggttggcattcgaagccatctgaaatcggccattttccttcttccaccttgtcaccctcatcctaccacccacccgccagcaccaacatcacaggcctctttacagcctgactggcttccctgccttccctccccgaggtggatatctggtcctattttatttaagtggccttttctctccaaccagatatgactcattcaaggcggggagaagaactaacatttatggaggtctcgctgtatgccaggcactgtgcctggtgacagtcaaa

SEQ ID NO: 32704 - DNA, 934 bp, Artificial sequence
  DNA replication origin
cttctaccctaggcagaaggccttctcccacaaacaccatcaggattgaataattcactcattcacaaacagttactgatcacccactctgtgccactgctggagtcacaacgatgaccatggcacagaaacctctggatctcctggagctcacattttcatgaggaagtcagatgatacattaaaaattaaaattaaaaacctgatcataagtgttgtgctgagaattaaaacatatggatgaggcatgactggggccgctgtatacgtgtcagtggggagggctcctctgaggaactgacagtgaagccaagatccaaacaacaagcagacatggcgggagaaagcacttccagcagagagaacagcaggtgcaaaggcccggaggcaggaatgggctttgtgtgttcaagagacaggaggaagagcagtgtgacaggcgtgtcctggggtaatggggagaattaggtgggaggggctggtgggggcaggttgtatcaggcctggcaggggtgtctgaattgttttctaaggttagcaagaagtgttggaagagccatgttccgatgtatgtttcacagagatctttcggctgctgtgtggagccagctgctataggagagcagacacggaggggggcagccagaggagcaatggtggggcatggattaagaagggcagtgaaggtgcgagaaacagacggggtcaggatgtgtttgggagataggggtcccaggacttgttggtggattgggtgtgatgtggggagaaagagaggcgcccaggacgaatagaggcactcagtgctgagtggggccgtttactgggaaggaacatgttttagggatggatgatcaaaattctgatttggccttgctgagagcgggaggcctgttagatgtccaaggagaggcattaggaaggcaggtggaat

SEQ ID NO: 32705 - DNA, 973 bp, Artificial sequence
  DNA replication origin
gacggactcgcgggctcctggccggccgaggaccgagggtgctgtccatcgccgtggtgctgaaaatactaaaggaggtggtctcctcatcctttgctccgggctagagtagcaggagcgcagccgtctaaaagggagagaggtgacaaattcaaagagaaatttttatttaaatgtaacagtaaactctccctgtcgagctgtgtgcctcaataatctgattgtggtgtgaatggtggtgtgtgttgggggtgggggggttggatgtttgaaggaaccagtgataaaacctaaggcaagaattagcaaggaaccagccatcccctgggtggagtggggggtctggcaagcctggatagtccccttcccaggaaagcggggctttgggaaaaaaatatgtgtgtgcgagatttgcattttgaaaggtgtaccctaatttatcccaaactcaccatgcagagagctttatagtacattatttctcccttgaagcgatcattgccagtgagtgcttgggggagggggagacagaataatcaaagaattaaaacacagcaactttttaggaaagtggtcatgggaattgtccgcagcctgcctgttttctccttgttttattatctttaaagcagagccccaaacgtgttcagttgtagaatgtgtgtgggtggctggtgggtgacgaaattagcccagtgctccgcttcctaacagtaatatataggatgtgcagcgggaatgaatcggtgctggatctatgtgggcaagttaaatgctttctgagagagattgatcgccaggcagggaaggagcacggggctaaggaagttgtaggggatgtgtatggatgttccgtttttaataaacagtagtgtggagagccgccgaagatgctgttacagctggtggttttaaagatgaaaacacacgcacacccacccccacatagagagcagcctcatccttggccaca

SEQ ID NO: 32706 - DNA, 713 bp, Artificial sequence
  DNA replication origin
gtgtgagcgcgagcgagcgagagagaggagcgagagagtgtgagcgagaaagaataaaaggaaagaagattttctctatgtatataaagatggccacgttagcaaacggacaggctgacaacgcaagcctcagtaccaacgggctcggcagcagcccgggcagtgccgggcacatgaacggattaagccacagcccggggaacccgtcgaccattcccatgaaggaccacgatgccatcaagctgttcattgggcagatcccccgcaacctggatgagaaggacctcaagcccctcttcgaggagtttggcaaaatctacgagcttacggttctgaaggacaggttcacaggcatgcacaaaggtgagtacacctttccctcccaactttgccggggagcaggagcgggctggcgggccgaccggccggccggcgactgacgagcggcggactaagcgagaggaagcctcgggcgggcgcggtggagggaggcgctcgggcagcggagaccagagctggggtgcgtggggagctgttcgctggggcaagactgggttttgggcgaggtgctgataggaacgatgccatggagagagcagcgggcgccgatgaagagaaagagagaggggatcgaggagacggggcttggatttttgggtacagcgacctgaaagatggggatggggaaggctgcaccggtcgagcccaggacg

SEQ ID NO: 32707 - DNA, 943 bp, Artificial sequence
  DNA replication origin
cgaagagccatgcgcctggcgctatttatagccgggggccgtctcggactgtaccatcgccacggcgcggggccgccgacgggggaggcgcggtggccgccgccccacgccgccctgcccccggccgccgcccgccgtggcgcgggcccccacagcgcgcccattcccggccccccgcgccctcctccgcgcgcgcacactcgccacccccacccctggtctggctgggaacttgaaccggtccagcctgtttaaacggaaaggacagagatcctgtctgttcaatgtaaaaaaaaaaaaaaaaaaaaaaaaaagaaaaaaagaaaaaaaaaatcagatcagaccgagagagagaggagagagggagagagagagggagagagagagggagagagagaggagagggagggagggagagagagaggggggagagcagagagagagcgcgagcgcgagcgagcgagagaagaggagaaagagagagagcagagagcgagcggagagcgaggtgtagagaaaccgagggggagagaacccgagtgtgtgtatgcgtgtgcgtgtgtgagcgcgagcgagcgagagagaggagcgagagagtgtgagcgagaaagaataaaaggaaagaagattttctctatgtatataaagatggccacgttagcaaacggacaggctgacaacgcaagcctcagtaccaacgggctcggcagcagcccgggcagtgccgggcacatgaacggattaagccacagcccggggaacccgtcgaccattcccatgaaggaccacgatgccatcaagctgttcattgggcagatcccccgcaacctggatgagaaggacctcaagcccctcttcgaggagtttggcaaaatctacgagcttacggttctgaaggacaggttcacaggcatgcacaaaggtgagtacacctttccctccc

SEQ ID NO: 32708 - DNA, 1897 bp, Artificial sequence
  DNA replication origin
gaatcaaaagaaaaaatcagattcaagagagcccatgcatgtatgtgtgggtctatttttctgctatgctttgaatatgtctccttaatttcacgtgttgggaacttaatcccaaaattaacatgttgattggaggtggggcctttgggaagtaattaagattagacaaatcatcagagtggagaccccatgatggaactgggggttttataagaagagaaagaggcctcagtggacacgcatgcatgcacgctccctcattcttgctatgtcataccttccaccatgttataatacagcacaaaggccctccacagacgccgatgccatgctgttagatttcccattctccagaaccatgagtttaataaacttctcctcttcataaatttctgtgtagcaacagaaaatgaactaagacagcctttatgtgtgtatgtgtctgtatggttgtgggtgcgcgctgtctagtgtgtacatatgtaatgtgagtcctgtgtgtaaatctatgaggtttgtgtgtccatgtgggttctctgtctttgtcggcagtgtgtgcatatgtgtgagctttgtgtgtataccgtcaatgtgtgtgcaagagatctgtgtgtcagtggtaatgtgtgtgaagtacatgtgtgtactgtatgtgtgtgctttgtgtgtataccgtcaatgtgtgtgcaagagatctgtgtgtcagtggtaatgtgtgtgaagtacatgtgtgtactgtatgtgtgtgcattctgtgagtgtctgtgggttgtctgtctgcaatgtatgcatatgagttctgtgtatgtgtggtatatttgcatgtgtgttctaggtgcatgtgtggtatatttataagttctgcatgtgtggtatatttatatgggagttctgtgtatgtgtatgtgtatatgtgtgtgtgtctctacagggtgcactgcgagttctgtctgggggaatgtattttcatgtgagttctatgtgcatgtgtggtatatttgtgtgtgagttctgtgtagtggtgtatttatgtgggagttctgtgtgtgtgtgtatgtgtgtctatagggtgcattgtgagttctgtggagggatgtatttacatgtgagttctgtgtgtgtgtctgtggggtgcatatatgagctctgcagagcagtgtatgtgtgtgtgagctgtgtgtgtctgtggagtgcatgtgtgagctctgtggggtggtgtgtgtgtgagttctgcgtgtgtctgtggggtgcatgtgtgagctctgtgggtagtgtatgtgtgagttctgtgtgtggttgtggggtatgtgtgtgagctctgtgggtggtgtatgtgtgtgtgtgtctgtggggtacatgtgtgagccctgtggggtggtgtgtgtgtgtgtgtctgtggggtgcatgtgtgagctctgtgttgtgtgtgtgtgtctgtggggtatatgtgtgagttctgtgtggtggagtatgtgatccctgtggggtggtgtatgtgtgtgtgagctctgtgtatgtctgtttggtgcatgtgtgagctctatggggcagcatatgaatgtgtgagttctgtggggtggtgtgtgtgtgtgagctctgtgtgtgtgtctgtggggtgagtgtgtgagctctgtggggcagtgtatgtctgtgtgagttctgtgtgtgtgtctgtggggtgcgtgtgtgaactctgtggggtggtgtatgtgtgtgagttgtgtgtgtctgggggtgcatgtgtgaactctgtggggtggtgtatgtttgtgagttctgtgtgtgtgtctgtggggtgcatgtatgaactctgtggggtggcgtatgtgtgtgagttctgtgtgtctgtggggtgcatgtgtgaactctgcggagtggtgtgtgtgagttctatgtg

SEQ ID NO: 32709 - DNA, 973 bp, Artificial sequence
  DNA replication origin
taagtcctgttgtggggtttgagggccggaatttaatttttggagctttatttcatgtcgggaacagattaggtaataaaataaaatgcatattgagaataagacggccttctgacctttcagggtctagggctgtaaagcgtctcagggttgctgccaaatgagccatgaactgggctgggtttttcatatttgatgaaaagagcctaaacactaactgattttgggagaggttggataaagaaaaaggagaattaaccttgactatgcctttagctccagccacctttttaagaggaaatttctgggcaggtgggggaaagctagtcaaggaatgaaactgtaagctggaccaggtgtgaggaggggaggtgataacaggattatagggtgggggagccgaggctgaggaataattgagacctggctcagcctggcaaggaggggagaggtcagatgggtctgtagaaaaagaagattagaaagactcagcgacgcttggggttgagactgaggggataggcgggagggaaggaaggaggatttgggacgagtcgcattgggaacagagactaggaagggaacaatgtgtaaaagaatgcctggatgtcaggcacctcagaccgtttgcccattttatgatgagaattatctagatcttgtaggatggaaaaatcgaaaatgcaactttttggctatttggaaccactgtctagtttgtattggggtcaagtggcattgtagaagaaaataaggcatttaggttttaggtcagtgtgagttgaagaggttttaagttcttgagaacacaggctaagggagaagatggaggagtggagggtggaagcttgcccatagtgaaggaggcaagcccagagagagagtagagacacagagagaaggggtttgggggttcttaccctccagaaaagtgggaaaggtgttgaggagtggaaataaggggttggggcac

SEQ ID NO: 32710 - DNA, 996 bp, Artificial sequence
  DNA replication origin
tcgctacttggctgcctctactctattattgtacaccttgaaggtgaggttaattaagtcctgttgtggggtttgagggctggaatttaatttttggagttttatttaatgtcaggagtggattgggtaataaaatgtatattgagaataagacggccttttgacatttcagggtctagggctgtaaagcgtctcagggttgctgccgaacgagccatgaactgggctgggtttttcatatttgatgaaagagcctaaatgctaactgatttgggagaggttggataaagaaaaaggagcattaatcttgactatgcctttagcttcagccacttttttaagagaaaattgctgggcaggttggggagggctagtcgcggaatgaaactataagcctgaccgggtgtaggggggaggtggtaaaaagattatagggtggaagggtggaggctgaggaagaactgggacctagctcggcctggtgaggagcagcctggggaggaggggagaggtcagatgggtctgtagaaaaggaagattagaaagactcagtgacgcttggggttgggactgaggggacaggcgggagggaaagaagatttgggacgagtggcattgggcacagagactagggaggaactgatgtgtaaaagaatgcctggacatcaggcacctcagacggtttgcccattttacaagaattatttagatcttgcaggatggaaaaattgaaagtgccattttctggctatttggaaccactgtcaagtttgtattagggccaagcggcattgcagaagaaaatatggcatttaggttttaggtcaggtgtgagttgaagaggttttaagttcttgagagcacaggctaagggagaagaaggaggaatggagggtggaagattgcccatagtgaaggaggcaaatttaaagagaagggtctgatacctctgaaacttgggtgaaaatcagagaggcgtccctgcaatgattaaac

SEQ ID NO: 32711 - DNA, 1102 bp, Artificial sequence
  DNA replication origin
tgtaagaattctgaccacactaatcatgcctaggaaggaaaggagttgttgttttgtaagggattgaggtttgggagattaatcagatatgatcagcagggagagcacgtgtgtttttatgagaattatgccgagataggtaacagatgaggataaaatttgggcttgactaaagtaatgggggctatctgtgaagccttgcagcagtacacctcaggtaatttgctgagcctaatgggtgtcagggtcagtctaagtgaaagcgaagagaggctgggatgaagggtgcaaaggaatagtaaagaagcatgtttgagatccagaacagaataatgggttgtagagggaggtactgaggttaggagagtatatgggtttggcaccatggggtggataggcaaaacaatttggttgataaggcgcagattctgaactaacctgtaggccttggctggttttaggacaggtgaaatgggggaattgtaaggggagtttataggctttaaaaggcaatgctgtagcaggtgagtgataacaggctttaatctttttaaagcatgctgtgggatgggatattggcattgaggggggtaagggtgattaggttttaatgagattgtaaggggtgcatgatcggtcgccaaggagagagtagaggtatcttatacttgtgggttaaggtggcaggatacgagaggaggatgcaaaggaggctttgagctggggaaaagggcagcaatgaggtgtggctgtagtccaggaacagtcagggaagcagataatttagttaaaatgtcttggcctaatcagggaattgggcaggtggggataactaaaaaggagtgcttaaaaaagtattgtctaagatggcaccagagttggggatttttaagaggtttagaagcctggccgtcaatacccacaacagttatggaagcaagggaaacaggcctttaaaaataaggtaatgtggggtgggtaccctcgtattgattaagaaggggatggacttactttccactgtgagagttacccagagcatctgtaatggttttggaggcttccgaggcaatcaggcagtgtcagtcttcagctgctaagc

SEQ ID NO: 32712 - DNA, 893 bp, Artificial sequence
  DNA replication origin
atgtgattactccaggactcctcgggctccggagacgccattttcccccttgatatctctctccataaatcggtggcgcggcggaggcggcagagtcgggcgggaagcgcggggccggccggggcgcccgccgctcgccgccgcctccgcgcgcccgggggccccggcgccccccgagctagggcggccagctcgcggctcgccgtttgacagatgctcatcgccatggagttgccgcagcagcacctttgggggctcgggcgagcgacgggagccgggatctgagcgagcgccggggccagcggagccggagccgccgggacatgggtgagcacgcgcggcgaccttggcccgggagcccgggcgcccagcctccctccgcgccgcgggcccccgcactcccggaaccgggggcgacgtgtgtgccctgcatgcaaaagttcacgtcgccttgctgggtctttgactttgcacccggcgggaagggggagaccgggccgagggggcgggatgccggtccgggcgaggttgcaggagatgggcgcgattccggcgggccggcgggtgggcggcgatgctggctcaattggagtggctcgttggtggcggcgatggtggaagctttgggctggagggctgggagcttattgagtttcgcctaatctgatctaccccccctccgccccccgccttttgcaccctccctcggtcctgcagccggctggcggggctggcgggtttggcgttggtggagtggactcgggagggggagggggtaaggaaaggggtgggaaggcaggattttttttttctctctttgtaacttgcaggttaagtggagctagagagctacattgtaacctagttggatttttttggggggggaatgtatc

SEQ ID NO: 32713 - DNA, 1087 bp, Artificial sequence
  DNA replication origin
ggtaaggaaaggggtgggaaggcaggattttttttttctctctttgtaacttgcaggttaagtggagctagagagctacattgtaacctagttggatttttttggggggggaatgtatcagaatctaacgtgtcgttaatagaaagaagaacaggcaagaagtggtccagccggcgaaggttggtgtgtgcttgtgttgtgcctgtgtgttagtctttttcttaaaaatcttaatcaatggatttgagtctctttcttgtgctctctggttttgggactctgaaaagataggaattcccttaaaagcagacgaatgcctttttgaaagcacgcattgtgtgcgtttctagaggagccgtgggcttgggaatgaacggcaggcttccccgttcggtggtttccagtgggaaatcactccggaaagggaacccttcggtatcgatttattgtttttgtcttccaaaccattatctctttgaccgaaatactgtctgagaagttccgcagggacaaagtcaggtaaactggaccgggcagatctttggcaagatggtgataacggggatgctgttttcagtgtctgtttgtgatggaagcattgttgggtaatagcaatttctgatcggtagagcatgctggttctaaaaaaataagttaactgccgaaatactgtcttccagcccccctcccctgcacagtacagcacctattccccccgcccccccatccagaccgcttactacaagtctgaaatcggatccaactggaaatattttcattggagattgaaagttgtgcaattggaaatagatgaggctagaggtattgagagtgtggaaggggagttcttattgccccctaatgctgcatttattctttatgtgtgtctgtgttggattctcagggtgtgtatctgtctaaaaggactgttgtgggaaggatttccgattcgtttccgtttcaaataaactgtcctgataatctcacggttgacatctaacgctaaaagggcaatttgtgtgtctctttatccctgcagaaactctcctccaaaagggcagtttattctggaattctacagcagata

SEQ ID NO: 32714 - DNA, 856 bp, Artificial sequence
  DNA replication origin
cggtgaagctcagacaagcttcttctgaaggtgtctccctgctttgctttcccaagagctcctgatggctcagccccgtcgtctggccggattctgcctgcccggcttctggagagaagggcgtgggtgtccctgcagcgggggattccgcccccgccccggctcactgcgcttcccacgtgtcagttccctaggccccaggtgcagacgcccagacccgccctagggaaggacctcgctctcactccctcgggacttcctctgccttttggctttcacctcctcttcctggggaaggggctgctgcgggggcgactgctgtgggggctgagcgggggcctgcggtttgtgtttcctctttccgcctcggggggtcttgggtagagggggtggcgggggcaggggtggtggcggcggtggcggcaggggcggcggcggtggcgggggcaggggcggcgcctcccgggccatgtggatgaccgcctcgatggtggccatgatggtgtcttggctggcggcgggctccagcaccagcgggctcaggctgggcttctggcctcttttgctgggcaggtcgatgcatttttccagcaccggcatttggtctctggagtcctcatcgaactgggtgggctgcttcctgggacgcccgcgcctcttcttcacgaagttgttgcctgtttttgattgtctctgcagccgcttggccttcaggatcttgttcacgtggtccaggttcttcttggtggacaggatcttggtgtagttgcacatcttccgcacttcgcactggatggcttcgatctcccgccgcttgaacctcttcttcagggaggagccgactgcgggaggggaa

SEQ ID NO: 32715 - DNA, 1178 bp, Artificial sequence
  DNA replication origin
agaggaaagcgccacgatgcatagggcaaaaaaaccgacattctggcagtgccagggggtcagccaggtggtcttatctaagagcagagagccccggcccggcccctcgcggccacccgtgtctggggcgcacccacctgggcggcggcgggcagcgcgggcggccaggaccccgagcagcagcagcgccttgaagccgagagcgccgagcaggagggcgaccgtcgaggccccgctggcgccatggaagcggaacaggtagacgctggcctcggagcggcccaggctgttggcggccgtacacgtgtagcggccgtcatgggtcagtgcgggcagttcggcggtcactaggtggccgtgaccctcacgcgggctccgcacggctgccaagctgttgcccagggccgggccggaccaggcgagggcgggcggcggctccccttcggcagtgcagagcgcgcggaaggcgtgagccggactgggcagcaccgagatgttgacgatccgcggcgcggctgcaggggagaaggcgggtgactgtcacaagggcacccctccccttagccctttggacgccagagccggaggggtgggggctggtcagaagggaggaatgggcacttgggtgccaggctgcccccgtcccaatacagatgtggccttgggcgaaagattctatcatctctgcttctgcttctccatgtgtaaagtgaggatcatgatagcagttgccttaagaggttgctgaaaagatttggcaaattcatgcttgtgggtgcttggactaggtcccggctccctagcaaatgctaagtggccattattgtcgcagagcagggtgggggctagagtggagagccactgctctagggacgggaccctggttcaggcatctttgtatatcagggtctggcaaagtgctaggcactacttggtgggctgtctgtgcacccctgggtagaggggctgcgagtgtctttccgggctggtagcacacaccacattgcacctcttggcatatttaggattgccattcacttgtctttctcgcctcttcgtctgagagccactggggacagtcactctacgagagtcacggcaatgcctattcccgggcccacctcagcccttcctgggacctggattctgcatttgtgtcaagctcccaggtggtccta

SEQ ID NO: 32716 - DNA, 916 bp, Artificial sequence
  DNA replication origin
aaagggctaaggggaggggtgcccttgtgacagtcacccgccttctcccctgcagccgcgccgcggatcgtcaacatctcggtgctgcccagtccggctcacgccttccgcgcgctctgcactgccgaaggggagccgccgcccgccctcgcctggtccggcccggccctgggcaacagcttggcagccgtgcggagcccgcgtgagggtcacggccacctagtgaccgccgaactgcccgcactgacccatgacggccgctacacgtgtacggccgccaacagcctgggccgctccgaggccagcgtctacctgttccgcttccatggcgccagcggggcctcgacggtcgccctcctgctcggcgctctcggcttcaaggcgctgctgctgctcggggtcctggccgcccgcgctgcccgccgccgcccaggtgggtgcgccccagacacgggtggccgcgaggggccgggccggggctctctgctcttagataagaccacctggctgaccccctggcactgccagaatgtcggtttttttgccctatgcatcgtggcgctttcctctctttgcatgaagcccagcaggtgtaaccagcacgaaaaaatcccattttgcaataaggaagctgaggctcagagaggttaagtaacctgccttttgatagcagcacagagatatagagacccagacccggttaactctagagccgtccctttgctaccacccggtaaacgattcctctggaggggctctgactacagaccttcctaaatagcaccgttcctgaggacctactatgtgctgtgtgggtgctaggaatacactgatgaatatggcatggtcccctgccctgcagtgcgtgctgagcggtagacagatcattgcaatgtgctatgagaagggctctcct

SEQ ID NO: 32717 - DNA, 1479 bp, Artificial sequence
  DNA replication origin
acctttctttctcaatgttaggtccaatgtttaaaaagaaagtgataccctcctttgcctacttcaccaaatatgatgagggtgagagatgcaataactcccagtgctcagagtcctgggggccttgtaagctcagcacaactcggatgagtttcttttgccatctgagaccagcctgtgggtgtatctgcgagccaccttcctgtctagtttctgacccaggtctctcccttctgttgcagacaaagcatacatgctgcacatcggcaccctggataaggtccgagaagagtggcagagtgagcacatcaaggcctgcgaggtacccgtaaccggaagctgctcaggactggggtgggtgggtgggggtgtgtgtaacaggaagctgctcaggacgggggggggaggggaggagggggaggggagggagggaagggggagtggggccgggggttgggggaggacgagggggcgggaggtgggtcttctgcccagaacctggagagtctacttttgtagaaatgatctgcccggattctcatagggttacagagcttgagggcaaattagaaatcagaaatttggccaggcacggtggcccatgcctgtaatcccagcactttgggaggccgaggtgggtggatcacctgaggtcaggagttcaagaccatctggccaacatggtgaaaccctgtctctactaaaaatacaaaaattagccgggtgtggtggcgcacacctgtaatcccagctattctagaggctgaggcaggagtatagcttgaacctgggaggcggaagttgcagtgagccaagatagtgccattgcactccagcctgggcgacagaacaagactccgtctccaagaaaacaaacaaacaaaaaaagaaatcagaaatttaagtgaagaatggaaggaactggaatagttttccccaaaccttgtctgcctcatccccatcctgaccatgctgtccaacagttcaaattttagtctaatgttgggttagcacaagcatagaatagctgaatcagttaatggtcgattaagtaattatctttggagagcccggcctcaataggctctaaagggaatgccaacagcaagtgagtaggctttggagatttgtttgtttgctttttgttttgagtctgggtctcactctgtcgcccaggctggagtgcagtggcatgatcagagctcactgcagcctgaaaccccatgagctcaagtgaagtagatgggactacaggcgtgcaccaccacgccttgttaattatttattatttattttatttttaaagagacagggacttgctctgttgcccaggctggtcttgagctcctgggtctcaagcaatccttccacctttgcctcctgagttgccagggttacaggcatgagccaccatgcctggctggagggttttcttttttttttttactctcctcataccttcaatttcaccactgctcc

SEQ ID NO: 32718 - DNA, 1402 bp, Artificial sequence
  DNA replication origin
tccgtccaggccccatagcggggctgatggtgtgggagaccctataagctggagggggtaccccacccagcccggtagggccagcccagcctggagggagcaggtctgcctgtccccctcctctgtctagtcctcttccctctgtcctctcactccccaggtgcccctcaaggtccatgccccctcattcagaggagctgtcctcatccctttaagacaggagcaggaggctgcaaacctcaaagttgaccgcagctgccaaggggccctgactccttactggggctcctgcttgcctccccccaccacccacccaggtagcttcacagctgcctagatggtccctctaccccacgtgggctgcagggtagagaaacctggctggggacctcagggacacagttgagactgtgcctgtgagtcccttcactggagtttgtgaggtccttctggggcactactcaccctagggtgcagggtggtggcagcctcacagaggaaccaagggcaccacagatggctctcacgggaggcttgcgagtttttcaggtagaatggaggactgggggatcccatggcaggcactgtgggaaaaaggctctgtataatacaaactggagaatgagatgtgggccccagaaataaggaagtcagcagaggaactggttcgtggagacataaggagaaggaggcagacgtgatactaacagtatttagttcaggcacagtggctcatgcctgtgatcccagcacgttgggaggccgaggtaggaggattgcttgaggccaggagttcgagaccaccctgggcaacatagtgagactctgtctgtctctacaaaaaaatcttaaaaattagctgggcatggtggtgcatgcctgtagatatagttacttgggaggctgaggcaagaggattgcttgaggccaggagtttgaggttgcagtgagctatgatcacatcactgcactccagcctggacgacagagtgatttgtgtttgtctcaaaaacgaacaaacaaacaaacccaaccaaacaacacaatcctcagtatttagccacagttttagcactggcaaggctaaggccaggcgggcgctaagcccctccccaccagcctccacccctcagccccatgccagggatgctggatacggggaggtcttagcggagagggtgacagggtgaagacagggttccaggccacagagtttgcagtattttaatatcttcacagccagtacaaacatgtcagtgagtactctctaatgtctggtgggtgacatgcagggtttgaggggctggtggagatggccccgccccttgggaagatgtccagttttgagagcttaccgaacagcatgaagcctctgaggtgggctgcccgggcttgaatccag

SEQ ID NO: 32719 - DNA, 1114 bp, Artificial sequence
  DNA replication origin
gttgcccagggtggtctcgaactcctggcctcaagcaatcctcctacctcggcctcccaacgtgctgggatcacaggcatgagccactgtgcctgaactaaatactgttagtatcacgtctgcctccttctccttatgtctccacgaaccagttcctctgctgacttccttatttctggggcccacatctcattctccagtttgtattatacagagcctttttcccacagtgcctgccatgggatcccccagtcctccattctacctgaaaaactcgcaagcctcccgtgagagccatctgtggtgcccttggttcctctgtgaggctgccaccaccctgcaccctagggtgagtagtgccccagaaggacctcacaaactccagtgaagggactcacaggcacagtctcaactgtgtccctgaggtccccagccaggtttctctaccctgcagcccacgtggggtagagggaccatctaggcagctgtgaagctacctgggtgggtggtggggggaggcaagcaggagccccagtaaggagtcagggccccttggcagctgcggtcaactttgaggtttgcagcctcctgctcctgtcttaaagggatgaggacagctcctctgaatgagggggcatggaccttgaggggcacctggggagtgagaggacagagggaagaggactagacagaggagggggacaggcagacctgctccctccaggctgggctggccctaccgggctgggtggggtaccccctccagcttatagggtctcccacaccatcagccccgctatggggcctggacggaagggctggggcaatggcctggggagggggctcgggaaacaaggctgtagaacagggaaagctccagcaaagggaagccctctatgctgtacgtttcctggaaaggacgatcccggggggcagctgctgctgtcaacccggtaaagctcacaagcccccacaccagatccccccagatcctctcacggctcagctccagggaccggcagagactctccccggacgggtctcgcctccctaagggtctctgcttcgcctgtgagaggaggggttgatgtcctgactctaaggtgtctcggct

SEQ ID NO: 32720 - DNA, 1064 bp, Artificial sequence
  DNA replication origin
gtccgctccaagtctgcccctcgagcagtggggctggggccccgatcccttcacgcgcgagctccgccaagcccccgggcgcgcggtcaccgagtggcgccggagctggggagccccccacgcccgccgcgttggcctcccgcccgggccgggtcctgagccccgcgatccgctgtcggccccacgacttacccaaaagtttcccttgaacagtgagcgcgtcatcgcagcgcgagtgggggcgcggaggagagccgggccgcaggtagcacagagcggggaggcctgactgccactgcccgcggctccgcagactcaacttctgcgttccacactcgcgcagggaagccgcccccgggtcctaaaccactcccgattgcgacggccgccgtcggcgctctgcgctccctgcgcgagacctgggcgggaccctcggcgctcacccggccaggggctgcagcccgcacccggacccaggcccatttaaagccccacagcgtcgggccacgatcaatatatcagcccgaagctagctgcctccttctggaagtctttgggtattggaaataactggtcctggcttgggttcctgcccacaaggccccctggacagcacgaaatccaggctctgcggggtgatagacgggatctgatcagatggtcgcgaggacccggtttaagctacagaaggcctggggccgacaactcccgcagacgccttggcttcacggcgggccccaccggcacctgctgcagatcaggccctgggggacggttcattttttattttactttttgttgttgcaggtgtttttaatgaatggggtcacgttttagtctaaaatgtcatggagaggtcatctctgctgtttccccttgactctagtcacttggtggtgtcctaacagggcttccaggagctcagccgctctctgactccctttccattctcaaaaggcaagacccttccctgcccattccaccccagcaagaggggcccaagattccttcttctccctccactcttccaccctcacaaataaaaccccagggcaggtcagacc

SEQ ID NO: 32721 - DNA, 1609 bp, Artificial sequence
  DNA replication origin
tctcgggcctcgggcgccagtctccagaggtctccggcgcagctgcctctctagccggccgacgcgggctctgtgtttccgggcggaagtgaggcgcccagcggaacggcctctggtgacattttcttgggggcggcgcggacgactgaagggacttggtggtagaggctgcggaggcggcgaggttcactttggtcccggcaggggctctgaccgcgacccactgctcgctgccggggcttgttccgaggaggagaaggcggcggtggccgtcgcgtcctgagtcaccgcagcggggaagagtcccggccgggggttcggtgcgtgccccgacggggcgcgcgcgaagcgagcgagaaggcacggagtcgccgcggagcgcaggtgaggcgggaaggggcgcagggccgcggcctggctactggtcgagttggggggcccgggttgcgtcccagggaggggtcggggcgaatcggagggctgcgggccgcggtgagggctctgcggcgtccggacgctggggtcctagcgggcctggctggtgggcgccgggaactcgcagcctggattgccggctgacgctggggcatcgcacctctccgacctccttgctcgtccgccgttggtgaccctagcgtcctcccggcccggcggagttggctccggcactccaagcccccagacgctggggccgggttgaggcgagtccttttccgggggtgctgaggggaggctggaggtgccgcagtccccgggctgcggggggaagcgacttcacggccctggagttgtcttcacgcaactttccggctcctaggcccgcgggggaagcagtggcggcaactccgccagctccgagagtagggggtctggcgccgacacctgcccctgcagcggagagctccggcgccgcggccgcagtggccttggtggagggagaaaaggctttcttataggcttggcgccgcctgcctctcggcgcttccactaccttcggtcggcaggcgcctccagtcaatgcgagagatgtgtcagtctccaaaatagaccgcttctggggagtttgtcaactttatttcaaaaccggcgaggatgtacactgacgaacccgtgttaaagactatcgcctttacgcaagccattcattctcactttaaaattgtccacccccccgccccgacccccgtccccggcagcccccatcacaaaattgatgctcacaggttgaagtagagaacatcggtacgagccctaccagatccttgagcagtttctgtttggatgggtttttcgttttttgcctgaccttttgctttctgaatcctcttacccagtagaattaaaatcctactgatgatacttcgtcaaggttggacctcttaattacaaaaacatctgccaattttgcttaggcttttattgtgtagtattgggtacatgctaacagaatcactccctttcttctcttgggatattttaaggatggaagctattaactttctaatgtagttttgctgatcttggcaatctagattcctccagtaatcagagcattgccttttggtttaacaagcatttttagaggcctacaattgatagttactgcctg

SEQ ID NO: 32722 - DNA, 1595 bp, Artificial sequence
  DNA replication origin
ctggctcctcgcgcggcggcggcggcggcggctgcgcgcgggccctttgtggcgcggctccggggcgcgggcgcgggcggcggcggggctgcgggagccgccggggcgggaggcggagcgcggggcgcgggcggcggtggggcggcggctggcggggagacagatggcccatggaaaggctcccttcccggcccctctcgacattcaaaggcgctggggccgcagctgccgccacacaaaggcgcgcgcagccaatgggagcggagcgcagcgcggcgcggcctcgccggaaccgcgggggacagcggggaccgcgggcgcgcgggtggcggagggagggaggggtgacggctggaagggggccggcggccaatcgctgcggcccgctgcggggcgcgagggaggggtcagccccacgggaagcgtggagcccagcgcgggtccctggccgcccgcgggccggagagggcgcgcgtgaagcgcccctgcacagacatgggcggcgtgaacacggaacgtgcacacatggagagggacgtgcactcagacatgtggaggtgcgttccttagtgcagagagacgggcacgagcgcccttagtgcacacgaccctgaggtccctgcacaccgcgcacgggtcactcggggacgtgcgctcggaggctggcgcacgtgtagagcctgactgcgggcacaagggaagctggaatgcgaacaagcagccgcaaacaggacccaggcactgtcacacagacatgcacacaccaaacgccttgttaacgcaggacgcgtgccaagaacgcattctcagagacacacagagggaacacacgatgcagacacaggtaagacacgcacactccccaggctctctgcctggcgcaccgcgtcgttgctcttggagagcacaaagctcacaataattatttgctgaattgaaattcactcattcactgaggtctttgccaacagtctacacagagacacactgcccagaaaacccagggccactcatctaccttttgccctgatctgagacaggtacacccagccatgtgcacagacacgcccacttccacagccagcaggcggatatgtaacatcaggctctgaggctcctgcaaattcacacgtggaggcgcagccaccgtgtcacatgtgccctgtgacagtccagctggggacaagcaagacccaatcaaagagccttcaccgcaagctttgttgccaggaggacgactgaggcggtgttcttgcatgctcagctgaccttctgtgaaaactcccaaggcaaccctacgcctacaatcaggctcacagttcacacactaaggccagagaatgcttcaggggcccacccacgggcagaaagacagaggacattccctacattgggacttgtcttcaaagcccagtggtttctttctttaatgagtctgataaataggagatggtaaaaatcacagtatgtggagctggaaagaatctaatccaaccccaacctgccctcaccttggaaaaggagggtcattcatttaatccatgctgtgttgagcaagggcatagggaggtgatcccgatctgcccaagatccca

SEQ ID NO: 32723 - DNA, 1090 bp, Artificial sequence
  DNA replication origin
aactgagcctcagtgttcttatctgtaaaatgggaataattacagcaagtcccccggcagggtgatagtgaggctcagatttgatcatggatttgttcagctcatctaacacatacccactgagcacctgtgttggaccaggccccgtgcaggcatgggggacacaaggataataataataaccataagggcagtagcagatgctcacgtagcacttactctgtgccaggcaccctcctaagcactttgcctgccttaaaaatactgaacctcgtgggaaacagacagacgcaggaacagcatggccctaaggtatgtgctgggtgttctcttagcctgcggcagacatcctggggagggcaatgcctgggggagctgatgcctgggtgagtcttaaaggaactggttgcccaggaaggggtggggtgagggcgttgtgggccaaggggctggggggggtgaggggaggggaagggcaggctgagaaggagagtcatgcagaggggtcactgggacagggagctgggggactgatggcatgcagggaagctaaggctttgttggccctcctggtcaacatggcagctttgcctattggccagcgttgctggtggttgattgtcttttgtcaagaataaagtgcacagaacctctgtgtgtcctgagctaagggctgagggtacaagaaagtgaggtaggagtttcaacaaaccctggtgaagaaatgctgggacagttacctccacaggaagaggtaccatgggctactgctgggagggtgggaaacttcagagaaaagagcagagtggtgtggtatctgggagacctcctggaagacacaggggtgggactgatccttgaagtaggggcttagggcagcattttccacagtgtccaagcaagcactggggcctcttgagctgttaaaagttgtttctgcagaaaggttacatattccaacaatttggaaatactacacactatatcccagtcttggagagtcggtgtgcgtattagcaaattaaagtccctggtaagtcctgcaaccaagagagccctttggttttgctttagcagcatttcccaaaac

SEQ ID NO: 32724 - DNA, 1486 bp, Artificial sequence
  DNA replication origin
tccaactggctcagttcagtcacatccagctgtgcctgggcagcctggggggttcccctttcctttgcaagcccaatcgctctggaagggtggcctatggctcccttctacctcagtgctggctgtgcgagcgtggcccagattcttagaagcaggaagctttcttctgtcaggagtccgtgaggttggcttcccctgggcccggcctggaacccaggcttggtgttgtctgggagggccctgccggaggcgtcccctctttctgcactccaacttggaggaggagggttggccttaggtagatgtcatgcctctctctcttccctccttcagcctttcctagggtcaggagtgaggactgggggtgggaggggaagtgagattccttccagatcaggaaatacaagaccagtgtatgtggtttctcagtaggtgacagagcagagattatatcagtcactaggaacagggaagggtgcctgtgtgtgtgtgtggtcatgctgaggtgtgagggtgtgtgtgcatgtggtgtgtgtgtgtggtcatgctgaggtgtgagggggtgtgtgtgtgtgtgtggtcatgctgaggtgtgagggtgtgtgtgtgtgtgtggtcatgctgaggtgtgaggtggtgtgtgtgtggggtcatgctggggtgtgagggtgtgtgtgtgtgtgtggtcatgctggggtgtgagggtgtgtgtgtgtgtgtggtcatgctgaggtgtgagggtgtgtgtgtgtgtggggtcatgctggggcagaattgtgtgtgtgtgtgtgtgtggttatgctggggtgtgagggtgtgtgtgcatgtggtgtgtgtgtgtgatcatgctgaggtgtgagggtgtgtgtgcatgtggtgtgtgtgtgtgatcatgctgaggtgtgagggtgtgtgtgcatgtggtgtgtgtgtgtggtcatgctggggtaggagggtgtgtgtgcatgtggtgcgtatgtgtgtgtgtgatcatgctgaggtgtgagggggtgtgtgcatgtggtgtgtgtgtgatgatgctggggtgcgagggtgtgtgtgcatgtggggtgtgtgtgtgtggtcatgcggaggtgtgagggtgtgtgtgcatgtggtatgtgtgtgtggtcatgtggaggtgtgagggtgtgtgtacctgtggtgtgtgtgtgtggtcatgctgacgtgtgagggtgtgtgcgcatgtggtgtgtgtgtgagatcatgctggggtgggaaggtgtgtgtgtggccatgcagaggtgtgagggtgtgtgtgcatgtggtgtatgtgtgtggtcatgcagaagtgtgagggtgtgtgtgcctgtggtgtgtgtgtggggtcatgcggaggtgtgagggtgtgtgtgcatgtggtgtgtgtgtgagtgtgtgtgttcacagtgaggccgcagggcaggaagaaggaagcaggtagggagggggagcgacaccaggcgagcaggtgttggatggcaag

SEQ ID NO: 32725 - DNA, 1152 bp, Artificial sequence
  DNA replication origin
tgaaaaaggcagaactggataggcaggctaggcccaagagctcccgctgggatctcttttgatcctcacaccagccctgtgagatgggcgaggcaggcatcttcatttccatttcacagattagtgaaaccaaagcctagggaggtactgaccacaggaaactaaatgaggccatatgaagtgcaaggtctactctgcctgatcttagccctgagccctttacccacagaccacaccctgccacgctgcccctttccactcctccagtgcccactcctactcccctcagcagaaccagcttccagtccagcaggttccctttcattccccataaagccagagtgtgaataggagctgcgaagagaggggagctgttgatctgccagggagccaggacacaagaaggccagggcacaagaaggccagggcacaagggagtcagggcatggggtgttgatatacagaggagctgggtcatgtggaagccagggcacaggggagccaggatataagggggccaggacacaggagagtcagggcatgggggttgatacacaagaaagccaggtcatatggaatccggagcgcaggggagccaggatataagggggccagggcaccgaaaagtcagggtataggaggttgagaacacaggggagctaggtcatatggaagccggggcacaggggagccagcatataagggggccagggcacaggggagtcagggcatagggggctgataacagagaatagaagctgggaagagaggggagctgttgatctgccagggagccaggacacaagaaggccagggcacaagggagtcagggcatgggggattgatacacaggtgagctgggtcatgtggaagccggggcacaggggagccaaggatacaggggagccaggccatgtagcagccagggcacaggggaccgcaggcctcagaccaccactggcactcaataggcgcaagggagtccgtcttctttcacttaccatctgtgtggaggaggagtttctgggaaagtggtgcattcgaggagtggctaggtaatgctgatagtgctgagggatgggccgcacctggaactgagcaggactcaagccagcatccacactgagatccctgcagggaaacagcctcagt

SEQ ID NO: 32726 - DNA, 1415 bp, Artificial sequence
  DNA replication origin
cctctcaaggtcaccttcactcttcctctcctccttccaccttcctggacatgagagtgagaagatctcctggcagggacaagttagggaaacaattgtgcagaccaaacaccagactactaagtgacattctccatcatccccactcctggttgctttgggtctcaccattggcctctggctggctgccctggttcttgggaggatggggctgatggccatgtggggaggggtaggtcttaccccactgagtgttccctggcccttcccagacagacaccttcaccatctatgccattgacctgggggccctgaccaagattcggattcgccacgacaacacaggcaacagagcaggctggttcctggacagaatagacattactgacatgaacaacgagatcacgtgagtgtgggggcagtgggcagggaggggtgttgctctgagggaggccatgtctgccacagaggtagtcctggaagaagactgggggtgggccggctgtgacggtggagggtgagggtgggctgggtgacacctaagggtgaggtgtactggccgtgacatccaaaagtaagggtggactggggtgcactgagaatgagggtgggcgggtatgagggtaagggcgggctgggggtgatgtctgaggctgagggtgagctgggttatgtctgagggtgcaggtgggctgggtgtgacattggagggtgagggtggactggctgtgacgtcgaaaagtaagggtggactgggtgacatctgaaaatgagagtgggtgagtatgagggtgagggtgggctggtggtgatgtctgaggctgagggtgagctggatgacattggagggtgagggtgggctggctgtgacactggaaggtcagagtggctgtgacgtcacagggtgagggtggactgggtgacatctgagaatgagggtgggtgtgtgtgagggtgagggtgggctggctgtgatgtctgagactgagggtgggctgggtgacgttggaggatgagagtgggctggctgtgacactggaggatgagggcgagctggctgtgacatccgagggtgagggtggactggatgacatctgagaatgagggtgggcaggtatgaggatgagggtgggctggttgtgatgtctgaggctgagagtgggctgcgtgacatctgagggtgagggtgggctggctgtgttgcctgtcatggccaccagagcaggtttgcccacgttgcaggctggatgggcattgcctctctccctcttctctcattggcagcccctagtgtcacctgccctgtgagatgacagtccaatagatcccccagaccagcaactcttgaggtccatctgtttagagagacaggatttccaatccctgtcagaccttccttggtccagtttccatgc

SEQ ID NO: 32727 - DNA, 1822 bp, Artificial sequence
  DNA replication origin
ggcgagggctttgggcccagctggttcgtggacaccgtgtggctgcggcacctggtggtgcgggaggtggacctcacgccggaggaggaggcccggaagaagaaggagaaggacaagctgcggcagctgctcaagaaggagcggctgaaggccaagctgcagaggaagaagaagaagaggaagggcagcgacgaagaggacgagggggaggaagaggagtcgtcctcatcagaggagtcctcgtcagaggaggaggagatggaagaagaggaggaagaggaggagtttgggccggggatgcaggaggtgattgagcagcacaagttcgaagcccaccgctggctggcccggggcaaggaggacaacgaacttgtcgtggagttggtgccagctggcaagccgggtcctgagcgtaagtgggtcgtggggggtgggggtggggagggagtggccagacagttcccctaaagggggcccactgggggcagggggcctagatccccctcacgtggaggccaaataggtgggcacccatcatggttcccaaatagctctcttgacctgtgtgtgaaatgccaccattgacactgctgtttggggataagcatggcgcttgttctgaggttctcaggaagaattgatgactttgggaggagccctgatatgactcaatacaactgactgaggggtcatgaggtaggagggctgcctgctggcttcatggtaaaggagtcttgggttgggagtgtgggcagtttcagtcccaggttagtgtagatgcatctgaagatccctctgttctaggatctggctggatctgagaggctgtgcctcaggtccaaacaccccatggccatgaggccctccacactgcatctttctgtgtctacaggaaacacctatgaggttcaggtggtcacggggaatgtgcccaaggccggcactgatgctaacgtctacctaaccatctacggcgaggagtatggagacacgggcgaacgacccctgaagaagtcagacaagtccaacaaatttgagcaggggcaggtagggtgagggtctctggcccctgggtgggggctgtgggtttggtgccctctgagattcccatggcagcccatcgcagcacaatggctgctgtgtttggcagtgtgacttgttcatcccaccaggtttcatggcagtacctcttcagtaacactgatactttgtggaggggttatgagagaattgcaggcagggccccagcacctagagcccatgggccagctgacccacaggaacaaacagagaatggcgttgagtggcagatgctgaggcacttggtagggatgcgggggttcaagaggaagtcctcgccgcaagatggtgtcttgggggaaaactagggggagggagcaacttaaactgggccttggcaggtgagtatggtgtagacatataaaggcaacagtggaagatgttctcagaagatggaaccacatgagcaaagatatggaggtggaaatgggggaggccagtttaggacagtgtgtcttccagctgagctgtggtcggtgctaagccccagtggataagcttggataagaacaatttagggtgtggggtgggtggggtcatgagaggcttaagagacaagctgagaagccagaactgtatcctaatgcagtgggaatccatgaaaagaaatacacataccttactcttccaggtgtagtgggaaagtcatgaaaaataaagccgtcatctttgcccttcaagattttataatatcccctggctagaaaactatctcttatctcacccttcccattcctgcctc

SEQ ID NO: 32728 - DNA, 1126 bp, Artificial sequence
  DNA replication origin
aggagattttggggagttgatgacggcatgtgttcatgttccagggctgtaacaaagtgcacagactgggtggcttaaatgacagaaacataatgtctcacagtttcggaggccagaagtccaaaatcaaggtgtcagccaggctgcacccctcagaaggcgctagggaaggatctgacccgggcctatgtcctcaccccagcagcctccagagttcactggcttgtgattggccaccttctctctgcgcctcctcacagcatcttcctctatatatatctgtgtccaaattttcccttttcataaggataccagtcagattagatgaggggtcaccctaatgaccttattttaatttggttacatttgcaatgaccctatttccaaataaggtcacattctgaggtaccggaggttaggacttaaatgtatgaatggggtggggtggggggacacaattcagttcaccacatagcagcttggcccttagtggtggcagtgaaggtggtgagacggggcttattgtacaccagagaggaccctggagggacagttcatgggccttgcccataagagacagagaaagggccagaactgaaagccccaggcttttgcctttgataggtgggttgaaggtcatgccctttactgaaatggggatcctggggagggagagctgaggggtggggacgaggttggactctggaggtctagttgggatgtgtttggttttcaatgcagagttaggccttgagaaatgaattcagagaataagagcatagagctagaatttaaagccagggaactgcaggggatcctttagggagagtgtggataaagaaaacagtgagggccgagccctggggcaggccaggagaaggagcctggaaaggggaagaggaagaagttggtgtgtgcacactgcattgtcacatgcatggtgctgggggagctgggaaccagaagtctagccgtccacctgctgtgtgactttgacccaatcccttgtctggtcttctgcaccttcctggccagcatgtgtcttatggtgaggttgagggtattgtactttgaaaggagcccattaaagacacagtggtgctgatgatgctgatggctgggcgga

SEQ ID NO: 32729 - DNA, 765 bp, Artificial sequence
  DNA replication origin
ggaaggaagtcagcctgccctcagcgccatgaataagtgatgaggcccaaagagaagccccggggcaggtacagaggaggaggaggtggctcaccagagggtggtgggaggggacagggacaggaggttcagagataaggcactgaggttcagctcaggagccagagaaggcagagggaacagcaccttgggcacggggaagccaagaaaacggggcactctggcccacccaggcctgagctataggagggccgtgggcgccagagctcagggaggaggtctcaggttcccgcaggtgtgaggaggcggcacagtgagcctgcgagcgctgggagaaggcagccgacagaatgatgccccagaagaaaaggcggaggaagaaggacatcgacttcctggccctgtacgaagcggagctgctgaactacgcctcggaggacgacgagggggagctggaacacgagtactacaaggccagaggtgcggggtcccagcctgcggggggcgggtggtgcagctggctgcggtgggcaggggtctgttcctgtctatggggagtcattctaagatttcggagcaagcccttcctcactgattatcccatgtgtctgttccatatcccctcggagtaagaaggcaggcattatgcagggatggtggggtccctgttgtacagacaggtggagcaacttgcctttagcccccgattctcagtggaacagaatagactagagccacagtgcccccatggccccatgttctcca

SEQ ID NO: 32730 - DNA, 808 bp, Artificial sequence
  DNA replication origin
gtcggaggcggagctcccgcgccgttcacgtgacgggcccggctgtagcggcggcggccgcggcgtcttaagcggcgcccagtgcaggatggtgctggaggcggcggcggccgtggtggcggcagcgtcgttggcggcagcgggagtgggtgcggcggcagcggcggcggcgcccgcgggtggtataaaatggcggatttcgaagagttgagggtaagcgggagtggagagcggaggccgcgggggaggggatgggagaggaggtggggaaaccgcaacgtcgccggccgccgcctgctcgtgcctctggggccggttggcggagccctgagccccggcccgcggacgaacgggcgccgagggcgcgggggaggggagcgggccggcggagggcacgcgggcggcgcgggggcggcgggcctgggccgcggcgagccggctcctgagtgctgccagtggtccgcacacctggcgcggggggtcggggcgccctccaggaggggcacatggggacccgacatcccggttcgcagtgagggccgatgtgggaagcaacgtttgatcttgcaccttcaccggggtgtacgtgtctgtggctattcacaagtctgcatgctactcacttggtggaggactgttttctgaaagctgaagttgcgtttaggaatctctcctcttcttatggctgatgctaccgtttagtcaggtctgtcacgagaaaaggccccttctcccacccttgcctcctaacatcttcgaggaacctaatgtttggggatccctgccttcaataatcggccttaaacct

SEQ ID NO: 32731 - DNA, 1371 bp, Artificial sequence
  DNA replication origin
cagggtttcaccatgttggcctggctggtctgcaactcccgacctcaagtgatccacctgcctcggcttcctaaagtgctgggattacaggcatgagccactgcacctggccaaaacaatatgtgtgtgtgttgtgtatatatacacaacacacacacacacacacacacacatatatatatatacacgcacacacatatatatcaaataaacaattacacaaatacctacataattaccatggagacatctcaggaagaaaaagttcagggtcctaggagaggtcataacaggggaatttgaattaaaatgtgggatgtgggtgagggatggtcttcctgaggaagtgacacttaaagtgaaacctgaaggatgaacaggagttaggaacaaagaagagagtgggaaattattcttggttcaaggatcaacatttagaagccttaaaacttgaggggaggccgggtgcagtggctcacgcctgtaatctcagtactttgggaggccgaggcgggcggatcacctgaggtccggagttggagaccagcctgaccaacttggagaaacctcgtttctaccaaaaatacaatcgcagctactcgggaggcggaggtaggagaatcgcttgaacccgggaggcagacattgcggtgagccgagatcgtgccattgcactccagcctgggcaacaagagcaaaactccgtctcaaaaaaacaaaacttgcggggtgcgggggcaggggagtggaaggaagacctggaagtgcagtgcggatgaaacgaggggtagtgggaagaggcggtaggtaggaggctgattaaacagggccttaaaagttacattgttttaaagacctctcgtgtgtgggttccacccaattcttcaaggaaattgaaccctggacaccgtccagcgatttttctggccatcttgactcagcatcttccttcatcctatatcagcacattacgggggggccatcaagcttccttctatctacttactctgccttggcgtttgactccttcctagctatcagatttccccgactttttagcatggcccttctgagcgctcttatttcacttctccccgcccccaaccccaccgcctaactctcccaactctgcagtccgtgaccttcaggtgcccttcaaggtcagaaaaactcggcaaggttggtacttgcaggacattagcaattcaaagaggtgtcacacaacctcaccattagatgggaacaatagcttacccaacacccatatttagattattccgccacaactactctgggggatggttttatttgcggcggctttctccgtccataggcaccgcgtgaagggcaccgtaagaatcttcccgaatg

SEQ ID NO: 32732 - DNA, 904 bp, Artificial sequence
  DNA replication origin
ccgatgcccgagggccctgagcccgctgtgcccggggagcaacccggaagaggccacgctcacgccgctcagggcgggcctctgctgggtcaaggctgccagggccaaccccagggggaagcggtggggagccacagcaaggggcacaaatcgtcccgcggggcttcggctcagaaatcgcctcctgtccaggaaagccagtcagagaggctgcaggcggccgtcgctgattccgccgggccgaaaacggtgcccagccatgtcttctcggagctctgggacccctcagaggcctggatgcaggccaactacgatctgctgtccgcttttgaggccatgacctcccaggcaaacccagaagcactctccgcgccaacgctccaggaggaagctgctttccctggacgcagagtgaacgctaagatgccggtgtactcgggctccaggcctgcctgccagctccaggtgccgacgctgcgccagcagtgcctccgggtgcctaggaacaatccggacgccctcggcgacgtggaaggggtcccctactcggctcttgaacccgttctggaagggtggacgcccgatcagccgtaccgcacagagaaagacaatgccgcactcgctcgagagacagatgaattatggaggattcattgcctccaggacttcaaggaagaaaagccacaggagcacgagtcttggcgggagctgtacctgcggcttcgggacgcccgagagcagcggctgcgagtagtgaccacgaaaatccgatccgcacgtgaaaacaaacccagcggccgacagacaaagatgatctgtttcaactctgtggccaagacgccttatgatgcttccaggaggcaagagaagtctgcaggagccgctgaccccggaaatggagaga

SEQ ID NO: 32733 - DNA, 1486 bp, Artificial sequence
  DNA replication origin
ttcctgcgggcttgggggctggctccatctctccatttccggggtcagcggctcctgcagacttctcttgcctcctggaagcatcataaggcgtcttggccacagagttgaaacagatcatctttgtctgtcggccgctgggtttgttttcacgtgcggatcggattttcgtggtcactactcgcagccgctgctctcgggcgtcccgaagccgcaggtacagctcccgccaagactcgtgctcctgtggcttttcttccttgaagtcctggaggcaatgaatcctccataattcatctgtctctcgagcgagtgcggcattgtctttctctgtgcggtacggctgatcgggcgtccacccttccagaacgggttcaagagccgagtaggggaccccttccacgtcgccgagggcgtccggattgttcctaggcacccggaggcactgctggcgcagcgtcggcacctggagctggcaggcaggcctggagcccgagtacaccggcatcttagcgttcactctgcgtccagggaaagcagcttcctcctggagcgttggcgcggagagtgcttctgggtttgcctgggaggtcatggcctcaaaagcggacagcagatcgtagttggcctgcatccaggcctctgaggggtcccagagctccgagaagacatggctgggcaccgttttcggcccggcggaatcagcgacggccgcctgcagcctctctgactggctttcctggacaggaggcgatttctgagccgaagccccgcgggacgatttgtgccccttgctgtggctccccaccgcttccccctggggttggccctggcagccttgacccagcagaggcccgccctgagcggcgtgagcgtggcctcttccgggttgctccccgggcacagcgggctcagggccctcgggcatcgggaggggagcggtgcgcgttggagggtcccgatgggggccggaatcagctggggccattctggggcgctttctctcggctctgggctcgcgactgggagacctcgggtgaggtctctgttgccccggaggtgttctgcgtgctgtccgtctgtgctcagggctgtgagatgggctcctgggggccgtcgcgttttctgggaagccccaggccttttcccgctcctgaagagcctccccgaagcgctgtcgggaagcgctctcctcagggtcctgcgggtcaggcccggtgtttcggtccacgagcaccagcttcttccaccgggccgctaagtctctggcaaagtcgcccacgtgctggtgcttccgcaggcgcttcaccgtctttctgattccagtctccgccaggatgtctgcggtcatgggcaaggcggagagtttctgcaaatatttctctagctttttcggctccgtcttagtggccagacgcacctgcagcttccccactgcgcgcagcgtagtggaccctgccgccatctcgccagagctgtgcaggcg

SEQ ID NO: 32734 - DNA, 1230 bp, Artificial sequence
  DNA replication origin
tgagatgggctcctgggggccgtcgcgttttctgggaagccccaggccttttcccgctcctgaagagcctccccgaagcgctgtcgggaagcgctctcctcagggtcctgcgggtcaggcccggtgtttcggtccacgagcaccagcttcttccaccgggccgctaagtctctggcaaagtcgcccacgtgctggtgcttccgcaggcgcttcaccgtctttctgattccagtctccgccaggatgtctgcggtcatgggcaaggcggagagtttctgcaaatatttctctagctttttcggctccgtcttagtggccagacgcacctgcagcttccccactgcgcgcagcgtagtggaccctgccgccatctcgccagagctgtgcaggcgtcgctgtcctcgcggtcgcggctctgtccgagctcggggcggcggcacaggcagtctggggtggccggtcctcgctgcccggtcgccaggcggcgacctcgggatgtggagtcacagcctggagcgagctgggtcctcggagcagcgggccacttggtctggaacgccggtccttgcagacagctgagcaggcccgcttctgttcctcgggatgtgcggccgcagcctggagtgtgacctgtgcggtgcgccgtccaaggcggagtgaagctccgctgccagagcccggccttatatagccagccccgggcccacccagggctcaagccctgacccccctgggcccctgggctgccccgccccgataggaattcattccgtcagcccaacgcagccaatcggggcggtccacgccaggtggactgctgtgccccgcggggtcattaggttaattgcagcctggacacaccccactgagttctaccgttggccctccatgtacccagcttccacatctgtggattccaaaagacacagagagaatcttcttgggagtaaaagcgaaaataacaacaccgcaagacagaatcgtaggaagaagaaccaacagaggatgacaactctttacctgggattgacgttgtgtgaggggacttggaaacattggtagaaaagtgggattaagggagagagaggaaacaggcgtattttactcctcaacctcggctccatcagcatcaagacccttctggaagcagtgtcttttccccgccgtctagcccatcccttaaagcccccagggtcctgggaatttaactatttccatgcaatctttttt

SEQ ID NO: 32735 - DNA, 754 bp, Artificial sequence
  DNA replication origin
aagcgcctgcggaagcaccagcacgtgggcgactttgccagagacttagcggcccggtggaagaagctggtgctcgtggaccgaaacaccgggcctgacccgcaggaccctgaggagagcgcttcccgacagcgcttcggggaggctcttcaggagcgggaaaaggcctggggcttcccagaaaacgcgacggcccccaggagcccatctcacagccctgagcacagacggacagcacgcagaacacctccggggcaacagagacctcacccgaggtctcccagtcgcgagcccagagccgagagaaagcgccccagaatggccccagctgattccggcccccatcgggaccctccaacgcgcaccgctcccctcccgatgcccgagggccctgagcccgctgtgcccggggagcaacccggaagaggccacgctcacgccgctcagggcgggcctctgctgggtcaaggctgccagggccaaccccagggggaagcggtggggagccacagcaaggggcacaaatcgtcccgcggggcttcggctcagaaatcgcctcctgtccaggaaagccagtcagagaggctgcaggcggccggcgctgattccgccgggccgaaaacggtgcccagccatgtcttctcggagctctgggacccctcagaggcctggatgcaggccaactacgatctgctgtccgcttttgaggccatgacctcccaggcaaacccagaagcactctgcgcgccagcgc

SEQ ID NO: 32736 - DNA, 1093 bp, Artificial sequence
  DNA replication origin
gtaggggaccccttccacgtcgccgagggcgtccggattgttcctaggcacccggaggcactgctggcgcagcgtcggcacctggagctggcaggcaggcctggagcccgagtacaccggcatcttagcgttcactctgcgtccagggaaagcagcttcctcctggagcgctggcgcgcagagtgcttctgggtttgcctgggaggtcatggcctcaaaagcggacagcagatcgtagttggcctgcatccaggcctctgaggggtcccagagctccgagaagacatggctgggcaccgttttcggcccggcggaatcagcgccggccgcctgcagcctctctgactggctttcctggacaggaggcgatttctgagccgaagccccgcgggacgatttgtgccccttgctgtggctccccaccgcttccccctggggttggccctggcagccttgacccagcagaggcccgccctgagcggcgtgagcgtggcctcttccgggttgctccccgggcacagcgggctcagggccctcgggcatcgggaggggagcggtgcgcgttggagggtcccgatgggggccggaatcagctggggccattctggggcgctttctctcggctctgggctcgcgactgggagacctcgggtgaggtctctgttgccccggaggtgttctgcgtgctgtccgtctgtgctcagggctgtgagatgggctcctgggggccgtcgcgttttctgggaagccccaggccttttcccgctcctgaagagcctccccgaagcgctgtcgggaagcgctctcctcagggtcctgcgggtcaggcccggtgtttcggtccacgagcaccagcttcttccaccgggccgctaagtctctggcaaagtcgcccacgtgctggtgcttccgcaggcgcttcaccgtctttctgattccagtctccgccaggatgtctgcggtcatgggcaaggcggagagtttctgcaaatatttctctagctttttcggctccgtcttagtggccagacgcacctgcagcttccccactgcgcgcagcgtagtggaccctgccgccatctcgccagagctg

SEQ ID NO: 32737 - DNA, 1485 bp, Artificial sequence
  DNA replication origin
atgggctcctgggggccgtcgcgttttctgggaagccccaggccttttcccgctcctgaagagcctccccgaagcgctgtcgggaagcgctctcctcagggtcctgcgggtcaggcccggtgtttcggtccacgagcaccagcttcttccaccgggccgctaagtctctggcaaagtcgcccacgtgctggtgcttccgcaggcgcttcaccgtctttctgattccagtctccgccaggatgtctgcggtcatgggcaaggcggagagtttctgcaaatatttctctagctttttcggctccgtcttagtggccagacgcacctgcagcttccccactgcgcgcagcgtagtggaccctgccgccatctcgccagagctgtgcaggcgtcgctgtcctcgcggtcgcggctctgtccgagctcggggcggcggcacaggcagtctggggtggccggtcctcgctgcccggtcgccaggcggcgacctcgggatgtggagtcacagcctggagcgagctgggtcctcggagcagcgggccacttggtctggaacgccggtccttgcagacagctgagcaggcccgcttctgttcctcgggatgtgcggccgcagcctggagtgtgacctgtgcggtgcgccgtccaaggcggagtgaagctccgctgccagagcccggccttatatagccagccccgggcccacccagggctcaagccctgacccccctgggcccctgggctgccccgccccgataggaattcattccgtcagcccaacgcagccaatcggggcggtccacgccaggtggactgctgtgccccgcggggtcattaggttaattgcagcctggacacaccccactgagttctaccgttggccctccatgtacccagcttccacatctgtggattccaaaagacacagagagaatcttcttgggagtaaaagcgaaaataacaacaccgcaagacagaatcgtaggaagaagaaccaacagaggatgacaactctttacctggcattgacgttgtgtgaggggacttggaaacattggtagaaaagtgggattaagggagaaagaggaaaaaggcgtattttactcctcaacctcggctccatcagcatcaagacccttctggaagcagtgtcttttccccgccgtctagcccatcccttaaagcccccagggtcctgggaatttaactatttccatgcaatcttttttccattgttaactgaagaaaactgggtgccccttacaggttttccaagacaaggaaacaaagagaagtcagcaggcgccaaatcaggattgtcaggtggacgcctcacggtttcccatggcaagtcttgcccagctgcccttgttcgaagaaaggcatgatcaggaacactgtcgtggtggagaagaagtctctggtggggaccttcttcgctccagctttggctaactttctgaaaacgctctgctagcgagcagatgt

SEQ ID NO: 32738 - DNA, 1486 bp, Artificial sequence
  DNA replication origin
cgggcttgggggctggctccatctctccatttccggggtcagcggctcctgcagacttctcttgcctcctggaagcatcataaggcgtcttggccacagagttgaaacagatcatctttgtctgtcggccgctgggtttgttttcacgtgcggatcggattttcgtggtcactactcgcagccgctgctctcgggcgtcccgaagccgcaggtacagctcccgccaagactcgtgctcctgtggcttttcttccttgaagtcctggaggcaatgaatcctccataattcatctgtctctcgagcgagtgcggcattgtctttctctgtgcggtacagctgatcgggcgtccacccttccagaacgggttcaagaaccgagtaggggaccccttccacgtcgccgagggcgtccggattgttcctaggcacccggaggcactgctggcgcagcgtcggcacctggagctggcaggcaggcctggagcccgagtacaccggcatcttagcgttcactctgcgtccagggaaagcagcttcctcctggagcgctggcgcggagagtgcttctgggtttgcctgggaggtcatggcctcaaaagcggacagcagatcgtagttggcctgcatccaggcctctgaggggtcccagagctccgagaagacatggctgggcaccgttttcggcccggcggaatcagcgccggccgcctgcagcctctctgactggctttcctggacaggaggcgatttctgagccgaagccccgcgggacgatttgtgccccttgctgtggctccccaccgcttccccctggggttggccctggcagccttgacccagcagaggcccgccctgagcggcgtgagcgtggcctcttccgggttgctccccgggcacagcgggctcagggccctcgggcatcgggaggggagcggtgcgcgttggagggtcccgatgggggccggaatcagctggggccattctggggcgctttctctcggctctgggctcgcgactgggagacctcgggtgaggtctctgttgccccggaggtgttctgcgtgctgtccgtctgtgctcagggctgtgagatgggctcctgggggccgtcgcgttttctgggaagccccaggccttttcccgctcctgaagagcctccccgaagcgctgtcgggaagcgctctcctcagggtcctgcgggtcaggcccggtgtttcggtccacgagcaccagcttcttccaccgggccgctaagtctctggcaaagtcgcccacgtgctggtgcttccgcaggcgcttcaccgtctttctgattccagtctccgccaggatgtctgcggtcatgggcaaggcggagagtttctgcaaatatttctctagctttttcggctccgtcttagtggccagacgcacctgcagcttccccactgcgcgcagcgtagtggaccctgccgccatctcgccagagctgtgcaggcgtcgctg

SEQ ID NO: 32739 - DNA, 1523 bp, Artificial sequence
  DNA replication origin
gatgggctcctgggggccgtcgcgttttctgggaagccccaggccttttcccgctcctgaagagcctccccgaagcgctgtcgggaagcgctctcctcagggtcctgcgggtcaggcccggtgtttcggtccacgagcaccagcttcttccaccgggccgctaagtctctggcaaagtcgcccacgtgctggtgcttccgcaggcgcttcaccgtctttctgattccagtctccgccaggatgtctgcggtcatgggcaaggcggagagtttctgcaaatatttctctagctttttcggctccgtcttagtggccagacgcacctgcagcttccccactgcgcgcagcgtagtggaccctgccgccatctcgccagagctgtgcaggcgtcgctgtcctcgcggtcgcggctctgtccgagctcggggcggcggcacaggcagtctggggtggccggtcctcgctgcccggtcgccaggcggcgacctcgggatgtggagtcacagcctggagcgagctgggtcctcggagcagcgggccacttggtctggaacgccggtccttgcagacagctgagcaggcccgcttctgttcctcgggatgtgcggccgcagcctggagtgtgacctgtgcggtgcgccgtccaaggcggagtgaagctccgctgccagagcccggccttatatagccagccccgggcccacccagggctcaagccctgacccccctgggcccctgggctgccccgccccgataggaattcattccgtcagcccaacgcagccaatcggggcggtccacgccaggtggactgctgtgccccgcggggtcattaggttaattgcagcctggacacaccccactgagttctaccgttggccctccatgtacccagcttccacatctgtggattccaaaagacacagagagaatcttcttgggagtaaaagcgaaaataacaacaccgcaagacagaatcgtaggaagaagaaccaacagaggatgacaactctttacctggcattgacgttgtgtgaggggacttggaaacattggtagaaaagtgggattaagggagaaagaggaaaaaggcgtattttactcctcaacctcggctccatcagcatcaagacccttctggaagcagtgtcttttccccgccgtctagcccatcccttaaagcccccagggtcctgggaatttaactatttccatgcaatcttttttccattgttaactgaagaaaactgggtgccccttacaggttttccaagacaaggaaacaaagagaagtcagcaggcgccaaatcaggattgtcaggtggacgcctcacggtttcccatggcaagtcttgcccagctgcccttgttcgaagaaaggcatgatcaggaacactgtcgtggtggagaagaagtctctggtggggaccttcttcgctccagctttggctaactttctgaaaacgctctgctagcgagcagatgtgatcagggtttggccctgcagaaagtcaaccagcaga

SEQ ID NO: 32740 - DNA, 1230 bp, Artificial sequence
  DNA replication origin
atgacggcagacatcctggcggagactggaatcagaaagacggtgaagcgcctgcggaagcaccagcacgtgggcgactttgccagagacttagcggcccggtggaagaagctggtgctcgtggaccgaaacacccggcctggcccacaggaccctgaggagagcgcttcccgacagcgcttcggggaggctcttcaggaccaggaaaaggcctggggcttcccagaaaacgcgacggcccccaggagcccatctcacagccctgagcacagacggacagcacgcagaacacctccggggcaacagagacctcacccgaggtctcacagtcgcgagcccagagctgagagaaagtgccccagaatagccccagctgattccggccgctatcgggcctctccaacgcgcacagctcccctccggatgcccgagggccctgagcccgctgcgcccgggaagcaacccggaagaggccacactcacgcggctcagggcgggcctctgctgtgtccaggctgccagggccaaccccaggggaaagccgttgtgagccacagcaaggggcacaaatcgtctcgccaggaaaaacgccccttgtgtgcccagggagattggcactcccctactttgatcagggagaaatcatgcggggcctgcttaagagaggaaaccccaaggatgccctcctgggcaagtgccagggacaggcagccttcggacttcaagacagacaaggaaggggggcaagctggcagcggccagcgtgtccctgccttggaggaggctccagacagtcaccagaagaggcctcagcacagtcactcgaacaagaagaggcccagtctagacggccgggacccaggaaatgggacacacggcctgtcgcccgaggagaaagagcagctttccaacgaccgagagactcaagaggggaagccaccgactgctcatttggacagaacgtccgtgagctccctctctgaggtggaggaggtagatatggctgaggaattcgagcagcccactctgtcatgtgaaaaatacctcacctacgatcagttgcggaagcaaaagaaaaagactggaaaatctgccaccactgcacttggagataaacaaaggaaagcaaacgaatccaagggcactcgtgagtcctgggattcggctaagaaattgcctcctgtccaggaaagccagtcagagaggctgcaggcggccggcgctgattcc

SEQ ID NO: 32741 - DNA, 973 bp, Artificial sequence
  DNA replication origin
tttctcctcgggcgacaggccgtgtgtcccatttcctgggtcccggccgtctagactgggcctcttcttgttcgagtgactgtgctgaggcctcttctggtgactgtctggagcctcctccaaggcagggacacgctggccgctgccagcttgccccccttccttgtctgtcttgaagtccgaaggctgcctgtccctggcacttgcccaggagggcatccttggggtttcctctcttaagcaggccccgcatgatttctccctgatcaaagtaggggagtgccaatctccctgggcacacaaggggcgtttttcctggcgagacgatttgtgccccttgctgtggctcacaacggctttcccctggggttggccctggcagcctggacacagcagaggcccgccctgagccgcgtgagtgtggcctcttccgggttgcttcccgggcgcagcgggctcagggccctcgggcatccggaggggagctgtgcgcgttggagaggcccgatagcggccggaatcagctggggctattctggggcactttctctcagctctgggctcgcgactgtgagacctcgggtgaggtctctgttgccccggaggtgttctgcgtgctgtccgtctgtgctcagggctgtgagatgggctcctgggggccgtcgcgttttctgggaagccccaggccttttcctggtcctgaagagcctccccgaagcgctgtcgggaagcgctctcctcagggtcctgtgggccaggccgggtgtttcggtccacgagcaccagcttcttccaccgggccgctaagtctctggcaaagtcgcccacgtgctggtgcttccgcaggcgcttcaccgtctttctgattccagtctccgccaggatgtctgccgtcatgggcaaggcggagagtttctgcaaatatttctctagctttttcggctccgtcttagtggccagacgcacctgcagc

SEQ ID NO: 32742 - DNA, 1100 bp, Artificial sequence
  DNA replication origin
ccatctcaaaaaaaaaaaaattattgggatattcttcatccttgttccagttccaagtgtgtgaaatccggtgtgtattttgcacctgcagcactggccacatcagagcattgattgcacatcaccggtctagacaagcggcaggacttgcagtcttcagcgaggggcggttcttagccagatggaggcggggcttcccggagagttcgttttgggccccatcggcttccgtaggaaggcgccggccgtggaggcgccacgtcccttgcggcggcgggagagaaatcgcttggacttcggggcggcctcggacggccatggcctttaccctgtactcactgctgcaggcagccctgctctgcgtcaacgccatcgcagtgctgcacgaggagcgattcctcaagaacagtgagtgggaccgcggggcgcgggctggggcggcggcggagtccccgggggcgcgtaacctaatggggccgcgtgaggggacaccaagggccgggacagaagaacagcggaaggctcggcttggagtggaagccgagcctttcctctcatcaggtttgggctcaacagccgggagaatattcaacagacacccgctgtgcagggcccagggggttggggtggagggatatagaagtcagtcagggacgcctctgcttgcgattacttcaggtcagtaatttaattcagttttctgtgactacttttttttttgagggggagtctcgctcttttgcccaggctgaagtgcagtgtcgcggtcctgtgactacttttaatagtcgaaaacccggggtctgagtttcgggctaagagttgggggtgtggggccgggcgcggtggctcccgcctgtaatcccagcactttggcaggccgaggccggcggatcatgatgtcaggagtttgggaccagcctggccaacatggtaaaaccccgtctctactaaaaatacaaagattagccggacgtggtggtggaaatacaaaaattagccgggcgggaggctgaggcaggagaatcacttaaacctgggaggcagaggttgcagtgagccgagattgcgccattgcactccagcctgggcaatagagt

SEQ ID NO: 32743 - DNA, 1105 bp, Artificial sequence
  DNA replication origin
gacgagccgggttccgagcgccaccacccggccccgccgccgccgccgccgccgcccccgccgccccctctggcccagcacccgcaccaccgaggccttctgtctcccgggggaaccagctgctgctaccccagcgaggacagctccgaggacgaggacgacgaggaagaagagcaggaggtggacgtggagggccacaagccccccgagggcgaggaagaggaggaaggtcgagaccctgacgacgacgaggaagaggacgaggagacggaggtcctactcggcgaccccttagtcgggggcggccggttcctccagggccgagggccgtcggagaaggggagcagccgggaccgcgcgccggccgtcgcgggcgcgttcccgctcggcctgaactcctccaggctgctgcaggaagacgggaaactcggggaccccggctcggacctgcccccgcccccgccgccgcccctggccccccagaaggcgagtggcggcggcagcagcagcccgggcagcccagttcaccatccatcactggaggagcagccctcctacaaagatgtaaatatcccctttaggctccttcaagctaattattattatttaaatgcacctttaggctgaatcggttacatatgcgcaggaaagatgaatcaccagatttccccacagaaatgaaatattcagtgtgtttaggagggcttctttcctgccagtggtcctccgtaaaaatgtggtttctggtccctttcttgataacgcctttcaaaggctttggggccgcctttccctcttatatttcagctggctgcttgtggaagttggaaaagaccctttaattgacctggtccttcctctaatccaacaatcccctttgccctccaactgagcacatttgttcccctaaaaggagcaagaccacaacaccggagcagcctgaatcaccctaccccttttcttctctatagttcagtacctcccctccaccatgaccaaaagtaaaaaatgcattggcttcaaaagttaaatgcagttttaactgctttaatcagttttagccagaatggacacaactgttgtgtccagtgaaacaaaagacagg

SEQ ID NO: 32744 - DNA, 760 bp, Artificial sequence
  DNA replication origin
gcgccggctctcgcgacgcgctcttcgagtcgcccccgggcggcagcggcggggactgcagcgcgggctccacgccgcccgcggactctgtggcagctgccggggcaggggccgcggccgccgggtctggccccgcgggctcccgggttccggcgccccaccatccgcaccttctggaggggcgcaaagcgggcggtggcagctaccaccattccagcgccttccggccagtgggcggcaaggacgacgcggagagcctggccaagctgcacggggcgtcggcgggcgcgccccactcggcccagacgcatccccaccaccatcaccaccctcaccaccaccaccaccaccaccaccccccgcagccgccgtcgccgcttctgctgctgcccccgcagcccgacgagccgggttccgagcgccaccacccggccccgccgccgccgccgccgccgcccccgccgccccctctggcccagcacccgcaccaccgaggccttctgtctcccgggggaaccagctgctgctaccccagcgaggacagctccgaggacgaggacgacgaggaagaagagcaggaggtggacgtggagggccacaagccccccgagggcgaggaagaggaggaaggtcgagaccctgacgacgacgaggaagaggacgaggagacggaggtcctactcggcgaccccttagtcgggggcggccggttcctccagggccgagggccgtcggagaaggggagcagccgggaccgcgc

SEQ ID NO: 32745 - DNA, 1083 bp, Artificial sequence
  DNA replication origin
cccgggaacttctgcaggacgcccccgaacgagcccttgctgggcaccgggatgactgggtagctgcgcgggcctttggcccctgccccggcacccgcccccgcgcccgcgcccacgcccacgccggccacacagccacccccagcgccgcccccaccagtccccgcgccgcccgaagcagcagccacagagaggctggcggctgcggccgagaggctggcggcggccactacggcggcctcctgcaaggagtcgtcgtcgtcgtcgaagcgcggccgcttgtgatgggcgtgcggggcaccagccagctctgccaagggcggcggtggcggcggcggcggcgggggcgcacccagcaggtgggggcccagcagacccccgcctccggccaccgcggccgcggcggccacggcggccgccttcacagagctgagcgggtggcaggcggggtgcgcgcccggctggggcagtgcgcgcttgcggctgccgccgttgaacatggccttgacgtcctcccaggcgaagaccagctcgtcctggggactcttgtcggtgagcttgagatgacggcgccacgagttgaagttggctgcgtctggctgagtgtacttggcgtcgggcgtgcggtgggagtggaaaatgaacttgttgggcgagaagtacatgttgcagtagctgcatttgatgcacttggcgcgcgagctgttgtagcgcgcgggaatgaagctgccgcggcagccccaggcgcactcgtgtgacacgtcgaaggcgaaattgtctggcagcttgggcggcctgttttcgcccaggaacgacttgcacagacgctcggcctcgcgtttggtgatcatgccgcagcggcgcgatgagatgggcatggccccggcacgccgcaggatctccagttgcaccggcgtgcactgcacacacgtgatgcccagtgccacgcgacggttgtggatctcgttgtagctgaagttcttgagcagagtgttggagatctgcgccaggcacaggcgctcttgcccgtcgatcaccaacgacacgatgggaatgccgtagaggatcacctggcccacctgg

SEQ ID NO: 32746 - DNA, 1247 bp, Artificial sequence
  DNA replication origin
tctgcctcccgcggcgcctgccgcctcccctgcgcggatcagccgccgccgcccgccgcccgccgtcctctgcgttcctgctcgcgatccggcccttcgccgcgaccctgtcctgtcccacccctccccttctcggcggttcctgcagcggctcagctcttcctactctcctcctgggcaagtttgtaagtttagggtgagggtcggtctctcctcgcgccctgcttctcggcttagcttgctcagatccgcacccccccactccccacctcagacctctctgacgccgcctgttggtcaggcagggcagggcgaggagcgcagcgccagccccagccccatcaccccacccttcacccctccatgcccagtggtcgaaggaggacagatatgaggcgagggctggaggcctagtaattgaagtaggaccaggggcaggagggagcaatccgccctgggggcgcgcagcctgggccggcagcttgaactcccttgccagaagggttgtcccaggacgcgcaggtgcgcttctcctgtgccgccctagggcagtccactaggagggggcaccatttccacactttcccggggaacgaccacctgaggtgagatgagaacctattgtgcgtctccaggaggggagctgggaagattggatacggaagactgagcccttctcagcatctccaggaaggaaagctttagggccaaacataggctgctttaaaaaaaaaaaaaaaaaaaaaaagttagtcgaatccgtctcataacgaagtgtcagactgcgtgtcagggagaccgcgggccaggggttccagttggagcccagcgttccaggaggggatgaagaccgagttcggtaaaacagcgtggtattacaaagtttgcctttcaggctccggcctagctccttccttggcaactttgcaagtgccggcaaccctcactggatcatcctacccttggaacttcttgggaagcctcggtttagccttgggtccaccaagacttcggcgaaatggaggcgttccatccccctccccatcctcgtcctgtctttttcattgaaagaactgatggactgtttctgccctgctccctccttctctcataaacgcttcccatagattattcgacacagagaaggaaggcggctgcttaaaaaacaaaaagccatagccctaatgagttcaattacaatgtggtaaacacattgcctctacgctttaattaagcctgctgcccaa

SEQ ID NO: 32747 - DNA, 3174 bp, Artificial sequence
  DNA replication origin
catttgtccccccaaccacggtccctgcccaatcacctgcaactgagttgccacttttctctgacctttccagagacagatggcagtccataaaatacatcattagcaaagtgtcatttcgtcttgctgctttttcttcacgtgaaaggtgtttcattcaacaaaagattctgcagttgcattcaccccagctcacactacttctttgctggaggtgtagatgttggaaaccaatgcttcctctctcctcgggggtgtccctgagccctcttggaatagaggcatttgagcagtgacatagagcagactgcaggtagggaagagctgagatgagggtgcaagtatcaaaaacacatcagatgtcaaaaagacagggccagggagtgcagggatgcgttcagacccaggcagtctcctgggtgactttcctcagtctgtgttgggtggttatctcagcatgtcctgagtgtgtgtggtggtgggaagatgattgtggaaaggcacagtgcggtggccccggtgggaggatgattgtggaaaggcacagtgtggtggccccagtgggaggatgattgtggaaaggcacagtgcggtggccccaggtgggaggatgattgtggaaaggcacagtgcggtggccccggtgggaggatgactgtggaaaggcacagtgtggtggccctgggtagaaggatgattgtggaaaggcacagtgtggtggccccgggtgggaagatgattgtggaaaggcacagtgcggtggccccggctgggaagatgactgtggaaaggcacagtgcggtggccccggctgggaggatgattgtggaaaggcacagtgcggtggccccgggtgggaggatgattgtggaaagtcacagtgcggtggccccgggtgggaggatgattgtggaaagtcacagtgcggtggccccgggtgggaggatgattgtggaaaggcacagtgtggtggccctgggtgggagggtgattttggaaaggcacagtgtggtggccctgggtgggaggatgattgtcgaaaggcacagtgtggtggccctgggtgggagggtgattttggaaaggcacagtgcggtggccccgggtgggaggatgattgtggaaaggcacagtgcggtggccccggtgggaggatgactgtggaaaggcacagtgtggtggccctgggtgggagggtgattttggaaaggcacagtgtggtggccccagtgggaggatgactgtggaaaggcacagtgtggtggccccgggtgggaagatgattgtggaaaggcacagtgcggtggccccgggtgggaagatgattgtggaaagtcacagtgcggtggccccgggtgggaagatgattgtggaaagtcacagtgcggtggccccgggtgggaggatgattgtggaaaggcacagtgcggtggccccgggtgggaagatgattgtggaaagtcacagtgcggtggccccgggtgggaggatgattgtggaaaggcacagtgtggtggccctgggtgggaggatgattgtgaaaaggcacagtgcagtggccccgggtgggaagatgattgtggaaaggcacagtgcggtggccccgggtgggaggatgattgtggaaaggcacagtgtggtggccccagtgggaggatgattgtggaaaggcacagtgtggtggcgctgggtgggaggatgattgtggaaaggcacagtgcggtggccccgggtgggaggatggttgtggaaaggcacagtgcggtggccccgggtgggaggatgattgtggaaagtcacagtgcggtggccccgggtgggaggatgattgcggaaaggcacagtgtggtggccccagtgggaggatgattgtggaaaggcacagtgtggtggccctgggtgggaggatgattgtgaaaaggcagtgtggtggccccggtgggaggatgattgtggaaaggcacagtgcggtggccctgggtgggaggatgattgtggaaaggcacagtgtggtggccccgggtgggaggatggttgtggaaagacaaagtgtggtagccctgggtgggaggatgattgtggaaaggcacagtgtggtggccccaatgggaggatggttgtggaaaggcacagtgtggtagccctgggtgggaggatggttgtggaaaggcacagtgtggtggcactgggtgggaggatgattgtggaaaggcacagtgtggtggccctgggtgggagggtgattgtggaaaggcacagtgcggtggccccggtgggaggatgactgtggaaaggcacagtgtggtggccctgggtagaaggatgattgtggagaggcacagtgtggtggccccgggtgggaagatgattgtggaaaggcacagtgtggtggccccagtgggaggatgattgtggaaaggcacagtgtggtggacccagtgggaggatgattgtggaaaggcacagtgtggtggccctgggtgggaggatgattgtggaaaggcacagtgtggtggccccgggtgggaggatggttgtggaaagacaaagtgtggtagccctgggtgggaggatgattgtggaaaggcacagtgtggtggccccaatgggaggatggttgtggaaaggcacagtgtggtagccctgggtgggaggatggttgtggaaaggcacagtgtggtggcactgggtgggaggatgattgtggaaaggcacagtgtggtggccctgggtgggagggtgattgtggaaaggcacagtgtggtggccctgggtgggaggatgattgtggaaagtcacagtgtggtggccccgggtgggaggatgactgtggaaaggcacagtgtgatggccctgggtgggaagatgattgtggaaaggcacagtgtggtggccccgggtgggaggatgattgtgggaaggcacagtgtggtggcctcgggtgggaagatgactgtggaaaggcacagtgtggtggccctgggtgggaggatgattgtggaaaggcacagtgctgctgaatgcatgctgttgggactgcactcaagattcagcccttcacacagttgggtagcattgttaccccatttcaaggaaaaactcacaagtgaaggatggggttgggcataggcttcctccttcctaacagaaggctagaaacagctagaatgtggg

SEQ ID NO: 32748 - DNA, 2472 bp, Artificial sequence
  DNA replication origin
aacaacttaaatggatgatgttggtttgttgaaactgagctactgctttggtgtgaataaggcgttgaccaccagcacaatttatttcaaatgctgcaattacctctgctaggtagggtgcccatcactgttcttcattttaacttttgcaaaagcttctttcctaatgtgggtcttcatttggctgggaatgaagacttgacattttacttcgcctctatttctcattagttgctacaagtaaagtgggtcatctttgttccaatgtgatggtcaatacaaaagcaaatgtaggtgtggagttagaagccttttagccatccaaatgatctaaaatatgtaagtagaaatttaagcgtcccattgagaagactcaaattttggagaatctgtaggtggaccacggtttgaaaaatattgctgtagaccagggggtaaggtggggagggatgttgagagattttgagcagatctgcatgttggaatgactgctcttttcgcagcgtgggtggctagaggcatgaatccaggtgagcaatgacaagggtaaggacctgggcaatggagaggggataggaatgggggcagcctgagaattgttgaggaggacctcaacaattaaattgttttgaattgttgataggacctagggactgagggaacgtgagggctgaggaggagggaggattgtgaaagactgccaggtgtttgccttgaatgcttagcagataatgatagcatcatgagggggaattccagaagaggagtgggttctgtgggggctaatggctttagccttggacattctgaacttagatgtccatggggtaactaggagaagcctcccggtaaactgtaggatctagaaatcaggaggggacatcagatctggagtgaccagaggaatttgagtgtgcacacacataaaccagatgttcttggttccccaaaggtgaaagcatgggccttaggaggttgttgaatcccttgatatttatgcagaaatttgagtatggttagtgtatttttctggggagagggtcctcagctttcatccaattctccaaatggtgtatggtcatttgaaaggaggaaggctgaagaaagaggcctggggaacagcagcacatctggggaagagcagcaattggagcctctgcagatggcaggagggtgtgagcagtggttggggaggtaggcactaggagagcaacaggaaccttgcagaggagagggcagacaggacacagaggtgagggtcaagaggaagggtgggcagggagcagaggagagggcagacagggcacagagaagagggtgggcagggcgcagaggagagggcggagagggtgcagaagagagggcacacagaatgcagaggagagggcaggcagggcgcagaggagagggcgggcagggcacataggacagggcagagagagcgtagaggaaagggcagacaggacgcagaggagagggcgggcaggacgcagaggaggggtgggcagggtgccgaggagagggtgggcagggcacagaggagagggcagacagggcaaagaggagggggtgggtggggtgctaaggagagggtgggcagggtgccaaggagagggtgggcagggcacagaggagacagtgaagaggagtgggtggacagtggtgtcatatgcagtggcctggtccagtgagctggagatgtgccatatggtttagccataaagaatcagtgccttttgccaggacagttctagtggagcagaggttggaggggctggatgactgaatggaggaggaggcagacagtacacacaagcctttgggaaacttgattggaaagggcaggggagataggagtgagcagaggttaaaatgttctaaatgcaggggagcaacctgagcatgtttgtgtcctggggaacagcagagagagaggcagaacatacgcgtggggagaaggtactgaggcatctgtcagacagggaggggtggtggtggtttaaaatacagtgtagtaagagaaaatttgaggtgtagtaaggccaacagatcaggaggtgattgtcattgagaagacaatttgttacccaatattcccaagaggagagggggcatggcatgccacagaggccccagggttggtcaggaggcagagggaaagagggagttggggggactgtgtgcaagagcctttgttgcagtttctgcaggaacaaacaggtgagacagggtgtgcccggttaggattgggtagtttgaatctcggtgggctctgggacattgacaataacagctttttcaaaatgtaacaagcaggtgtcttttgaacacccactgcatgctggacgttgtgtagcggggtttatgtttgaataaaatataacctcaggaatcaagaacaaagattctcacattctatgtctcacattaaatctctgataggcttaagatgcacctggaggagtattgtta

SEQ ID NO: 32749 - DNA, 1223 bp, Artificial sequence
  DNA replication origin
gtaaggttatagattaacagcatcccaaggcagaagaatttttcctagtacagaacaaaatggagtctcctatgtctacttctttctacacagacacagcaacaatctgatctctctttcctttccccacatttcccccttttctattcgacaaaaccgccatcgtcatcatggcccgctctcaatgagctgttgggtacacctcccagacagggtggcggccgggcagaggggctcctcacttcccagacggggcggctgggcagaggcgcccccccacctcccggacggggtggatgctggccgggggctgccccccacctcccgaacggggcagctggccgggcgggggttgccccccacctcccggacggggcggctggccgagcaggggctgccccccacctccctcccagacggggcggctgctgggcggagacgctccttacttcccggacggggtggttgctgggcggaggggctcctcacttctcagacggggcggccgggcagagacgctcctcacctcccagacggggtggcggtcgggcagagacactcctcacatcccagacggggcggcggggcagaggcgctccccacatctcagacgatgggcggccgggaagaggcgctcctcacttcccagactgggcggccgggctgaggggctcctcacatcccagacgatgggcagccaggcagagatgctcctcacttcccagacggggtggcggccgggcagaggctgcaatctccgcactttgggaggccaaggcaggcggctgggaggtggaggttgtagcgagccgagatcgtgccactgcactccagcctgggcaacattgagcactgagtgagcgagactccatctgcaatcccagcacctcgggaggcccaggcgggcagatcatgcgcggtcaggagctggagaccagcctggccaacacggcgaaaccccgtctccaccaaaaaatacaaaaaccagtcaggcgtggcggcgcgcgtctgcaatcccaggcactcggcaggctgaggcaggagaatcaggcagggaggttgcagtgagccgagatggcggcagtacagtccagccttggctcggcatcagagggagacggtggaaagtgggagaccgtagaaagtgggagacggggggagacgggagagggagagggatgtgctttttttctaaccgttattgccaccaagtaataatgtct

SEQ ID NO: 32750 - DNA, 1057 bp, Artificial sequence
  DNA replication origin
gcgcgcgcctgaggggaggaggggcagcgcgggcgcgcgcgtcctcaccccctccttccccgcgggcggcggccaggctccctcccctccccttccctctcctcccctcccctcccctctcttcccctaccctcccgcgcgcccgggccgccggccgggcccgggcctgggggcggggcgggaagacggcggccgggagtgttttcagttccgcctccaatcgcccattcccctcttcccctcccagccccctccatcccatcggaagaggaaggaacaaaaggtcccggaccccccggatctgacggggcgggacctggcgccaccttgcaggtaaagcctgggcgcccgcgggcctccagctagggaagtgtttgcgtgcgtccgcggccggggcgatgggccgtgtcacatggccgctgcgggtgggggctggggtgtggtgagttcgggggctgtgggtgcgccggcccgggcgtgcgggttcggggccggagagccgggaagggacggggctcggttgcactgcgctgccgcccaggctgacgggggcgggggctgcctgcgtcccttcccctcgctgctctcacactccatagtttgtggttctgatttttaaagccgaagggccagagctcttgtttcaggagttgtggggaagccttgttagggacgcgtaatactttgcctccactttttttttttggtctcgtaacctttgttaacagtggtagtctcgggttttccatggcttgtgtgtactcacaaacacgcacacagctgataactctgtgatcatccttcactcacttgtgaaagttgttctgcgggtggagcctattagtttttatcacacgcctttggaaagccctcgaagtgatttctcgtatttcaaacttggtttttaaaattgcaacttactttgttctcttggagggggatattgtctttgggtcaggtacttttgtcttttacttatccttaaaatgtccttttgatcctaaacagaaaaagaatgcctgggttggttttgttattcctttctcttgacccttta

SEQ ID NO: 32751 - DNA, 1480 bp, Artificial sequence
  DNA replication origin
ggccaccgcctccccacctccctttgcctacggcccgccccgcctcccggccggaccggcggcgcccgcagccaatcagcacgagggaagctcggggtgtgagccgcgcatcgggggcctcgaatcggaagggagacgtcgctcgctgattggtcccgcctccccagtctagcgtgaggcgaggcggggcgcggccgggcggggcgggacgcccgcggtttcgcttgagttgggcgccggcgcgctcccaccggggctcacgggcggagagggagaggcccgcgccttgccgcgcattaagacgattcccggtgaccgcccgatccctcgccagcgtcgtgggtggggcctgtaggggcctgccgcctcgtccaccgtccgtcgtgaggccggcagcggacacgtgctcatcccacggggaggccccgcgcagcgcggaggacgcgcctgagagagaaaaggggttcgggagaagcccgaggacccggcccgtgactgggcgcgccctatgcaaatgagcgggcggggccctcgtgttgctgaacgagggcgggttcgcgatgtaaataagcccagaggtggggtctttggagagcacttagggcccgggtaggggatgccaggtataagtgtttaacctaaattttggttccgtcttcagtaaaaatgatatcaataatccatgtcccgaagggtctttgtgaagtctaaaagaaacatctgtcacgatgtcccttaatggctgggatatcttcccttccccttttctccactgttgcgacgattaggccccaacttgcacatctgccctacaggaggcagcaaggccctaaacttacggctgcccagaacataactgcacccagggaaaaccttgttgcggttacccttaggaacacccaagcctctgctgacaaaatattgagcccaactaatcacatcaggtgtttactatgcacccactgtgacacaggcagggagtaccgtagaactaaagttgaaaagaaacttaggtttcacacaggtgccagagacaagactagaacacagtttttttttggctgcctgtccagtaattcattctcatgtgtggcttagtttatagatttaattggggacttcaaataagcgggaaagaagcactagcaatacaaatcggtaatcaggaagtaccaaatgagcactccaaacagtaagagtttttgaagtatacgctttcttctgagaaatgaacgtgtcccagaggagggtgccttcagatggaccttaagagagatgtggccatcccctgagtcatacaagttttccagatgtcctttcaaaatctctgtcctttccaccgtctctgtcctcacacatagaggaacttttctcacgggaaggttgcgatgaagagcataaacccaggagtcaggcacgttgtagctttgagtacgactctgttccagatctgtaatctttggcaaatggaactcacctg

SEQ ID NO: 32752 - DNA, 1338 bp, Artificial sequence
  DNA replication origin
taaagaacggacgagtgcttacacacagtcattcaacagacatttactaagtgcctacgacgcgtctgtatttctacaggaccactaagcgtgaagcaggtagagtgagacttaggaccccgggagaaaaaccgcccctggagggcgcgccacgggtgtgcggtgtagacgcgggcgggccggcggcggaggaggaggtcccggcgccgacccctggagcggaggcagcagccgggcgcagcgagacaagtaggctgggctggcctggccggccaggtgcggggaggaggctcacagactgcggctaagcctgagtccgagcccagctgcgaggcgggggccggggcatgggaggaggagcggggaggagccgggaggggcgggggaggtggcccgggggcgcgccccacccccagccctggcccccgcccccggcccagcgcccccgcgtggccgccgctcgcagtgcgcagcgcagggaacaaagcccgcggcggggcggggtcggttcggcggctgggtccgggcaccgggattctgggaagcaccgacgcccgaaacaaaagcagctgtgcttctaggcacgctgttggagattattccgaggagcgcaagctgggagggaatgaggcgctgtgacacccccttcccattggcaaaggttgcttccccagccccacaaagctccattccgagcgctgggctggcagagacccgactcccggccgagatggactggagaggggaagagcacagggctagggagcggaagcttcgggtcactctacaaagtcccgcagaatggtgcttgcggagagcacagaggggatggccccagaagccccactctcggaggctgtgatgtggactgaagttagtagtggggcagaaaagcacatggaggagcgtccgggcccccaggctcgcggacctgcagtcagctggagagggtcagaacaagggagtctctctgctctgagacccctcagcacccctcactctgctgggtcccatggtccctgccatctcctgcccgcagaggctacctttactcagcaccaccctcctcatgggcaggggaggagatgccactttcccctataaaacatcccagagctgcctaaggtggcaaaggaaggagaccctggtgaggacaggccctcagtgccactcctgctccagtgccctggcccgaagctgagcatggacctcagcctgaacccaggtgtttggctgaaacccggccggagcatccactaacacctcaacgggggtcaagaatgatggggggaaacagaggcagaccctcctgaatccagaccaagcttgtccaacccg

SEQ ID NO: 32753 - DNA, 1801 bp, Artificial sequence
  DNA replication origin
gggactcccaagcaggggggcctttgtgggggtagcaaggacatagcaaaatgtgccactgtggacatccagggaacacaagggttcactacttgacatcctcctccagaccgagagctcctgtcagctggaaagtatttgggaggctcccacactcccagtctcagttcaggtttagccttccaccctggggggtgctggcagactgacccagtgcttctgtcagggtaagagtcccagtgtcactcagtgttctggcttagcctcttcttcactcataaaaaggaggtgacaacacctacctggaaagtccccgtggggtttgggtgggacatgcgcaacactggcccttcctgccactcagtaggtgcctgaaagtgtgggtgtcttttcctttttaacatcaataacatttaaagtaattatacctattgatctttccttccccttttcctttgcttttcttgtgttcttaaaatggaaaaaagaagaaagggagggaggggaggaaagagaagggaggggaggaagggagtcaggttagaagggagtagaggagggagaggaggagaggaggaggagaaggggtagaagggaggagaggaaggaggggagtcaggctagaaaggaggagaggagggaggggaggaggggagttggagtagaagggaggagaggagggaggggagtcaggttagaagggaggagaggagggaatggaggaagggagtcaggttagaagggagaagaggagcgaggggaggataggagtcgggccagacaggaggagaggaggcaggagaggaggggagttggggtagaagggaggacaggaggaagtggggaggggagttgagatagaagggaggaggggagtcaggttagaagggaggagaggagggagggtaggaggggagtcaggttagaagggaggagcggggaggagcggagtcaggttagaagggaggagaggagggaggggaggaggggaatcaggttagaagggaggagacgagggggaggaggggagtcgggttgaagagaggagaggagggaggggaggaggggagttggggtagaagggaggacaggatggaggggaggagggagcctgcttacagtgcacctgcaggagcctctaccccagatcctgctcctgagggcagactgctactggagtcttcaacccgaagctgaggcacagacaagggtggctgtttgctggggatgtacaggacgaagccaagggtggagagggaagatgatggctgcaggctaagggctgtagactggtgctgccccctatccccaagatgactttctggcccagaattcagaagaccctgaagattggaactagaacctggctttccaggtctttctgaaggtctgcttgccaaggtaggaggatagaacacagtttaatgaacagcttgttagcttggcttgtatgtttaaatatgtagccctgtgatatgtggacctctggtattcttgctcaggccctgcaagtgttggtgaaggactgacactgggaaccaggacccggaggttccgtaagttctatttaggaaagatgtgatgtgtggaagtctggatggaggaggggtgggctggaggctgcatttgcattttgacttcatgtgattaaaggagctgacctctgtaggcggccggcaagaagtgtcctcatcttcccaccacttcccttcaccccactctgctggttctcccttctccaactctctacacttctagaggattccataccttttcaggtcactcacatgcaggtataaga

SEQ ID NO: 32754 - DNA, 1278 bp, Artificial sequence
  DNA replication origin
ctggagggagaaggactggagggctggtgggctggagccgacagggaccagcctagttgttggcttcggacatggaggccacgtggttgaggccggcgagcccagggaggccggccaggccggcggcccaagggtcgggcagcgggaagtagggccgcgccgccgccacgttctcggccagcgcgaaggccaggaggccccccgcgttcctctcagcctccagctgcgcgcgcccgaacagcttcatctgtgtctcctcgaactgccgctccagctcttgcaggctcagggcgcccttgggcgctgccaggaagtgcttggcggggctggggcccgggaggcacacagctgcgccgcccaggtggccgcccacctcgcccagcgcagggggcatcacgaaggccgccttgtcgggggccgggccgccgggcccgaagagcaggctggcggccctccacgcagcaggcttgcggccgcgtcggggccgtgccatgcggcagctctggcgcttgatgtggcggtgcaggtggtcagagcgcgtgaagctcttgtagcagaactcgcactggtagggccgcacgcccgtgtggatgcgcatgtggttcttgaggtcgtagttgtgcacgaacttggcgttgcagtggatgcacaggtagggccgctcccctgtgtgcttccgcatgtggattttcagcttgtcctgcctgcaatgcagagactgggggtcagtcccgcagggaacaccaggagccattcctaaccttttgctccccctttctccagaaccagccgaggctccctactgccatggagtcaaaccccagaaataggtctcatgctagatctaccctcaactgctgccccaccttagacaggtatggttactcacctggattaaagggatgcggaaaaagcagtgtcctgaaagccccactcccccaaactccttttatacccgagctcagagtcatgaaactcccactctattaggggtttatctcacatactgggaagatacttcgccagaagtcagcatttctgaccttagtcctcggatagtgcagcgacttctgctgatactggactgcactttaatctcatacccactctctccaggcaaccttatgctttccctccagttcatctatatgctttggcccaaagtccctggtcccatcccagcccccgggctattgagatctgtctgtgtttggcactaatctgggaggctatagaagcttgggcacaccttgttcaaacctcctgcatggtggtttc

SEQ ID NO: 32755 - DNA, 1334 bp, Artificial sequence
  DNA replication origin
tccagcatctcatcttcagcaagcccctgacaagctccttcagccccagtagtatagacttaatgtttgcctcctcctaggggaatgtgcatttccaaaagtggcaagaaaaaaaaaaaaagaaaaaggcaatatttaactgaaagaatccaagacatgtatacaggctaggggcagctgtaaagcaaaacaaaggacccaaaccctattataatgaatgaaagttggtagagaagatggtacaagcaaaaaaacaaaaactcaaaaggagaagtgtatttaaaactattccccatgttatgggtggggagtcagaggaggggcaggaggtaacttgaggggtgctgtatttgttcactatctaattgttgaaatggttttatgagtatctacaagtgtcaaaacctatcaaactacactctaaatatgggaggttcattctacatcagtcatgcctcaataaagctgctaaaaaaataacccccaggcaaactgtgaacatgggtatttggctcaattcagagagaaccaccagcttgcaataaaaccatcttagcattggaaagaaccagggaagaagggggttctgcagcggggtggggaatggggtggggatgggacctctttggcttcccatctgcaaactgcagggaaggggctgggagagggggaaaggaggttctatataccaggctcagcaagctcaggctgcccagaattgtctgtttgcaaggatgaaggtgatataattggaatgagagcctcagctgaaccaggaaacgagtggaggtttaaatatcaggatgcggagtttaccacagggataggacagagggagggaaggagggaggaaaggagagaggggaggagagaggggaagagagaggggaggtggagaatgtggggaggggcattggagagaagggcagaaccgtcaggagagggaggaagggaggtcaggagggaggaggattgagaaggaggggagaaggtggaggaggggttaggaaggttcaggaggaagggaggcggagagcaggggtagaggaagattgaggaggagtgaggagggatgggaggagggtgaaaggcaatgggaaaagggctgaaaaagcagggtccagaaggaggaggggagaggagaggtgggagaagggcccaggaagaagaaagagggaagaagaggaagaggagagggaggagggctgggaccagccaggggacaggcactaacacagcactgccaggcacacagcaggctggaaagaagattcctggaggtcaccgacatctccaggcagcctggagggaaaaggaacctggagatgtttctg

SEQ ID NO: 32756 - DNA, 936 bp, Artificial sequence
  DNA replication origin
tcgagctatagtctctcagctccggagacggcccggtgtgggtggcgcaaaaggactgaccccgtgcgtccccactcccgcgggcgcccgggccggcgtcacccactggagcgcctgagttcctgcaggcgggcgcagcggccgcggggctggcctgggaaggacgatggagagagcttccccctaacccagcacccacgcccccctgcccgccgcccaccccgcgcggagcatccagcgtcgggtcccccacgccgtgctctgtggtgagggctccagggtcgctcctttctgttcctggcttccgttgtcctggctgtgtctgtgccggcaggcgggtgggcagcgggcggctgccttctttcttttaatagctggtacccagcttcgcgcagaaggaagccccactccagcgacttattggtcggctagtggcagaccacttccagttcttctaaatgcggaattttgaaaatagaaaggaagtgattgaaacaatcgagcagtttctccagatgagatagaagattttttggaagggggaggggcgcgctggcttggaggtggtaaaggctctgccaggttcaagtttcagctccactccctccgttccccttctttcacccagttaaatcctctctgggcttagaaaggctcaggaacccccgctgggtgaaactccaggaaagaaaagtagccccagtgccggtcctccccccttaaggcacaacctgggctgcatagaaaaagaacccactctcccaaaaaagactcatattaggccacatcagatatgaatcattagccccactttgcagatggggaaactgaggcccaaatgggttaaatacattgtccaggtagtagcagaggcaggattgaaagccactcattgtaccccacgtcttttagaatcttacactttaactgcagaga

SEQ ID NO: 32757 - DNA, 902 bp, Artificial sequence
  DNA replication origin
ctctaaaactgtaaatacccaccgctgcaggcaggggagcaggcatttccacaatagactagaatgcatctgtcaaaccctccatgctgtggaaagagggctgtggactgctgcgtgaggggagagagaggctgggcagccaggatgtggtggggagaggctgctaggtcagggaattgggtgctgaagggaagaagcaggggtgcttcatcagagcaggtggacagtttccaagattggatgactccatagctttttatcaaaaaccaggtactcccggaacacccaagacaaagactgagaagtcaaatccctttgtccacaaaggcactagttaaatatccaatgaagcattaactccacactccactcccagaccccaggaggtaaaggtgccaacacatgacctggatggaatcagtatgaatccagaagtgtttgctgtgtgcccgtaaagggtttgcctcagcggcctgggtggaggtggggtgggtgcagtggggtgccaacctcggagcctctcttcttgtggggcagataaagcacaggcggactggagagtggggcaaggtgcatccagcaccctgtgggtgcataaggaacagggcagtgcttttgcagagcagttagtaaggcaggctcacagggacagggctacaggaggagtggggctgggcaggcctggaagatggtgctgcagggagcaggagaggagggcatgtcaggtgcgggagtggaggcaggagggggagtcactggggaaagccagcagctggcctggttcagagggttcactcagtagttaagaaaacaggagggggtctatgaggtagagccagtttatgggtgcagcttctggctgaaaggagagagtgcagggcagagccttgtttggagaggag

SEQ ID NO: 32758 - DNA, 1009 bp, Artificial sequence
  DNA replication origin
agctgataactacagccgggtctggcacgaagccctgcctggaggtgggcggcctgcggcggcggggggtctggctctgcgttcgcccctctcagccccgcctcgccccctgcggggtcagtgcgggtcccgcccgcccgggcaggcgccggcctctcaggcggtaaccgggtaaccgtgggcaggggcggtgccgcgccgggccgcggcctcccggggaggcgggcgggtggggaggtcgagctggagcgatgtgagaatgcggaggagaggcccgggaaacaggctgcggccgcggggaggggcgcccgggaggagggcgatggctcccgcaggaggagagagaggccgcgggggcgcagagtggagggagagggcggggcgcccgggaaggggcggggatagaggaggggcctccggagcggggcggggctggggcggggcgcccgggccgggccgggccgggcagccgagtgaacgctgcaggaagggggctgcgggcaggcacggagtccggggcgcttgtggccgggcggagcggctgtggttgcttcatgtcccggattctgctttctcagaggtcaggcgagtggggccggcagggagagaaaggtgggcgaaccagtctgaacaggccgggcaactggaggagcgtgggcccggcgaactggggtgctgcccagcaccctctaccctcaccacgctcgggaatttttcgtgaatccgccccgttggttttacagtttcctctcatcccggccccaccctgtctcctgacccgccctcccttcctcccctctctgagctggctcttccaagggatcggttagccaaagggaggcaccagctctttccctggactctcccactcccagccctcctggagaactcaaatcttgcacgtgctctttctctttccctgcccccgtcccccaggccctctgggtcttggtgaaggagaccttgagtcagcccaggaggccctccctcccccacagccccctttagg

SEQ ID NO: 32759 - DNA, 888 bp, Artificial sequence
  DNA replication origin
ctcaaggaaatggatggaaggaaggaaggagggaaggaaaggaaggaaggaaggaaggagaaatatcttccttgcagggaagggaggaaggaaggaagggagggagggagggaaagaaggaaggaaggaaggaaggaaggaaggaaggaaaggaaggaaggaaaggaaggaaggggaaatatcttccttgcaaggaaggtacggagggagggaaggaaggaagcagggaaggaaggaaggaaggaaggggaaatatcttccttgtaaggaaggaagggagggagggaaggaaggaagcaaggaaggaagcagggaaggaaggaaggaagcagggaaggaaggaaggaagggaggaaggaaggagaaatatcttccttgcaggaaggaagggagggagggaaggaaggaaggaaggagaaatatcttccttgaagggaagggaggaaggaaggaaataaggaaggaagggagggagggagagaaggagaaatatcttccttgcagtgaagggaggaaggaagggagagagagagggagggagggatatcttcctcgcagggaaggaaggaaggaaggaaggaaggaaggagagagaaatatcttctttgcagtcgagggcattccagcctgacttctgaccactcccccaacagatgctcctttcctgtccctcccgagatggtctcccaccctggcttccaagctggtcactcacattcctcccggctcttcccttttctctctccttcctggtgcttaaccacctgtctgatcccaccagccctgggaagcccacccagcccccaggaatctctgcctccttgagcacctgaagcccccacattccccacatccagcataggagagtctttctccacagctggctgg

SEQ ID NO: 32760 - DNA, 1901 bp, Artificial sequence
  DNA replication origin
tgagcggcttcgcgcgccgggctcgggcgccggctgccggggtcgcgatctccacagcacctcggcagccgaggcagttcgggaggtcgcggggcggcgggcgggtggctttgcttgggctgcgccggaaagcgattgcgggggccgttgctaggaggccggcggtccgcgcgccttggggcgccggctggagcaggggcgccctccgcgcggtgggcaggaggcggggggctgcggtggctattcaggggctccgtgcggcagccatgcaacggaggaggcgggaggagggagggagggaaggagggaggggagagccagcggagagcgagccagcgagcgggcgccgcgcctcctggctggcaccgcggcccggagcgaagtggcgcgcggggctggaaaggaacttctgcgggcgcgtgcggcccggggctcggcggcgcctgcgggcccgagcggggcgggcccgtcggcagccacaggtggtttctgccaaaagttttaccgcacttctgcctggaaggcgcgggagcgttttggtgagtgacgttttcctgggacttttgcagtctcacttcgcgctgtcttttcttgaaaattggaaaatgagctggaaaggctgggatccagcacctctcgatgagatctgagcagagtacagtccttgcccgaggtgtcgctcatgcaggactcaaagatccttgctgctgtcaagtcgggaagctgggggaaatgggcgcacgcacacagttcctccaagcctcggacaagtgaagccgagcctggcccggtgcctgtcgccgcgcggggtagtgcgaggtctgttcccagcgacacgcacgggaactgcgtgcgtcttctctcaaggtgtgtacgtctcttgctccgttgaaagcgaattgtctctggccgctgtgctgctttgtttttccggttgcttgtctggttttactaggatgaaggccaggaggagccaaagaaaagcgaagcggcagctcccgttatctttgcaatctgcaaagctgtggaggctggtacccaaccttccgcggcgcgggcgcaaggccgaggggagctgggggtgggtggcgtgcgctgcctgtatgggaagtctcgctggaccatgcgcaaggctagagccggagtttctggtgcttctaggacagaaagaggagtgggagtgggaagggaagaccccttaaaagaagatatactgtgcccagacctgggagagaggctccgagaagtccggtggcttggccctgttcttcattggcggggttgaggaatccagggcagcgaggtagaaacacctcggtaggtcgtcctgggctgaaagaaatcattattcccagagcgggccagatacccgggtgttgaaactaggtacaaaactgcgtgagaggtggaaactctcagtccttcattctccttggtccggtggctcccgctccctgcccccacaagtacatgagcaaaaagcatgccctttgctttatagaaggtcataggattttgaagttgaaagagaccctagagatattaggagcactcattttacagatgagcaaactcaggcccaaggaaggaaagtgacctgctacagtggctagaggcccagtgagactagaaatgacatcagccttccaggcaagggtggagagacttccctgggcaaggcctggtagggcttgagatcagaaatgccacccccacaccccaagcccatcatggcctctttatctggtactttctaaatccatgcttgccagcgaatgtggtatatttcccgtcccgtgcccttggcttaaaaaaaccaggactgtcactgcaaagtccagtctgacactatcccaacttttcctgctccctcattatcccaaattcctcaaactcctttt

SEQ ID NO: 32761 - DNA, 722 bp, Artificial sequence
  DNA replication origin
tgctgcctccgatgtactaccaaggagggcgagggttcctatgtctgtctggagcgcagaggggtggactgcaaaaaggtaggaggcaaagccagctcgagtttccccggcccgtagctggagggaacatctgcccaagtgtcgcctcgcccgagaacgctcacgccctctccagggccaggacccttcctcctcccctcgcactggcccttcgtggcttccagcaccgctgagcactcggcgtcccagcgagattctcctgccccgacagactccgagggggcggggcccggcgggacggggcggggacaagccctccccgggcccgcccgttggcattgttgcgcggtgattggacgcttcggaaggccgccttccaggccgacccggggagtgacgggcggccagcggctgctccccggcgtgtggggtgcggagtgcggggcccaaggctccagaggggtggggactccgggccgcagcgccgccgagcgcgattgcccgctgagattcggcgccccggggtgcggcaagcttgcggtttcaggtgctggctaggcgtcttggtgcgctcgctggagtgccgagagcatttgggaaacttaacttctcgcccccactccttgctcccgactttcgggtagaaaagcagttgccgagttgttttatttcctcccccatcggactctgtaaaaatagccgtgcgccggggcggcagagcc

SEQ ID NO: 32762 - DNA, 809 bp, Artificial sequence
  DNA replication origin
ggggcagcggtgcggcagagatgggctctgccgccccggcgcacggctatttttacagagtccgatgggggaggaaataaaacaactcggcaactgcttttctacccgaaagtcgggagcaaggagtgggggcgagaagttaagtttcccaaatgctctcggcactccagcgagcgcaccaagacgcctagccagcacctgaaaccgcaagcttgccgcaccccggggcgccgaatctcagcgggcaatcgcgctcggcggcgctgcggcccggagtccccacccctctggagccttgggccccgcactccgcaccccacacgccggggagcagccgctggccgcccgtcactccccgggtcggcctggaaggcggccttccgaagcgtccaatcaccgcgcaacaatgccaacgggcgggcccggggagggcttgtccccgccccgtcccgccgggccccgccccctcggagtctgtcggggcaggagaatctcgctgggacgccgagtgctcagcggtgctggaagccacgaagggccagtgcgaggggaggaggaagggtcctggccctggagagggcgtgagcgttctcgggcgaggcgacacttgggcagatgttccctccagctacgggccggggaaactcgagctggctttgcctcctacctttttgcagtccacccctctgcgctccagacagacataggaaccctcgccctccttggtagtacatcggaggcagcaccctcgcacgtcagcgggtcctctccggggctcctccctcagaagcgggaaagtttgtcgtcct

SEQ ID NO: 32763 - DNA, 917 bp, Artificial sequence
  DNA replication origin
aagcccgagtcgggggtgggggaagggggcagggaaggggaagggagggacgaggctccggagagccgactcctgcctcgagttcggagcgtcccagctgcggaggggatcgggcgccccagcgcacagacccagcagagaggggagggagggagggaagggaaacagggagggaggggcgggtaggggggagggagtagaggaaggaaaaaaaatgatccctgatctgacacagggaaagagaatgtaggagagtgacgttcaggccccgccctcccctccggccacgtgcaaagacttgaaaggaaagagggcggctggaggcctgctgggtaatgtagttcgcctttcttttccaggatggcgggccctggagagcagggtggccccaggacgctcgggatgtcgccttagctgccaagacagcccagtctagcgacgccaaaacccgccgcccagcgaccccacggcgctggcgcagccctgggtgggggcctctgcggtgggagaactgggggcttaggcgcagtccaggcttacagggaaacgttggttttagagtccgaaaggctttaaggatgagaacgtccgtgccgaaagtgcaaagtctgtgctaatggcagatgaaaaggagctttgtgtatgcactggggggcccaagtggcgtgattaatgctgcactaaatgccaccgtcggttattgagatgcatatgttataattaacatttgagcatctctgtgtcgggggctggctgttgtaattagatacgcactttgcaaccaattaattttccttcggccaagctaagggctgggacggggtggttgggagaattcaacgtagtggataattcagtaatgacttaaccagatcaccaatgttttggttaaaactgagcttggcacagagaggcct

SEQ ID NO: 32764 - DNA, 1015 bp, Artificial sequence
  DNA replication origin
ccgtagggtcgcgtgtgctggtcttcggtgcaggagtcccaggtccgctgtgcggccggagtcacacagcccctccctccgcgtccgcgacgccccgtgacccggcagactgggggtccacccggcggcgcggggggttggtttggctgcgccgcccccagtccacgctggggtgaccccgcaccgaggcgttctatgggtgtgcgtgcccgcgctcgccgccgctgccttcgcagaccggggagagagtcagcgactgccaaccgcagccccggctcttcagtctggggacagtgggagcccaagcccagcgcgccccagcccggcccaggccgccgcccgcccggcgctgtgtctctgcggcccgaggattatcccccagtccaggggcccgcgcgaccaaggaggaagccgctggagccgccggctcggccgcggctagagcctccgtagggcgaaagtgacacagcgcgagagagcgccgccgctgctggagccagggccgagaggaaggagccgcccagagcgcagggaggggccgccggctgtccgttcccagttcctcctgcccagggcccgatctgggctgaaaacctcaggaatccaggctcctagcaggctcgggctgcgcgaggagatggcctggctttcaagaaaacccaattatacgtgaacagaatgcaccgaacagacgctagaggatggccaggacacgctcaggttgtctggggaaactcctgagtgtttgacacaggattcgatttacacacagatcacctcatctgtgtcaagtatctgtcctggataatggatgctcagaggcagcaattttgtaacacattctagggcacagtgtcatcagtgattaacagcttgctagaataataatatgtttgtatgaccttacagggcaggttttcttcccccagaacctcccccctcccccgccagatatcatagcatttattaagagggtcctgtgaggtaggagagtattagccccattttacggatg

SEQ ID NO: 32765 - DNA, 939 bp, Artificial sequence
  DNA replication origin
tgggctggatttgctccgacatgcagcccaagggtcttggatctacttaacctctggaggattatgggagacaggggcgccgggtacatgtagagagggaggggaaagggaaaagtccggtgccctcagccactgtgtggctgaggaggtggcagaacaatcagagggaaaagtctgaccttgatcaaggataagtccagttcagctgcgcaagcctgcattgggcccctcctgagatggggaagggtaaagagacagcagtgactcccgcagggagcccgccacaggacagcggtgttctttgttttaaatttggatcaaagcaataaaggaagactgggagcaggagagactgtaggaggccagacctcagaagatgcagccaggagaaggaaggacggatgtggagcgagccgggcaggggcaggacagacaggtcagggagggtgggggcaggggtcaggagaggcaggatgccatgtgtttgggggatcagctaggtgacaggaaagccagacagggactgtggatgaggatcgcgagctagatttgggaccacatggtctgagacatctgaggtccagaggtccctaaggcagccaagtgggagctggattgggctcagaagacaggcctggtgtggagcacacaggtgccaggcagggccacctgagagggccagagggtctaggaagagagcaagtggagaagtggctgggatgaaaccccacctttgacaggccacagagaatgggttctggggaatgctggaaagcatgaaaggcctggggtggtagagaaagtggaatcagggagagtgggctggggggtgtcctctgtgggagaggccatgaggatgcgagcaaggaagaatgcccatggagctgccacttaggagggtcccagtaattcccggctccccacaaggcacagaggtcc

SEQ ID NO: 32766 - DNA, 1004 bp, Artificial sequence
  DNA replication origin
ttttggctttgctggaactcagaccaggagtcactctgggaaatgctgaagccacagtaatcccatgccctgtccccactgggaagcaggggacagaaaatagtcctgagggagaaaaaaaaaaatagatgtgatgctttctttagtgtccttgaggttctaaaatcacaagtaatgcaagcttataatttgtttgttattcaatccatgagtgtttaacaagcttctattctgtgccaggcactattctaggactcgtatctaggattgagcaaaaaagccctgccctcatggactgtgtattctactcgtggatgatcattgcgatggagaaaagtaaagcggaaaatggaacggggagtgaggaggagcaggaggggcttgcagttttaagtagcgtagtcagggaagctggcatggaggggagggaggggtgggtagtggagatatccggataggaacatctgggcagaaggaccagcctgtgccagggctgggctggaagaagagtccgggcccagccaggaggccagggtgctggagcagaggatgagggagggagagctgcggagatgagtcagagggatgatgaggactgtgtcgtcaggaggtgcgagtcctgagccctggagtggccccacatgaggaagaaagaatgtgaggagaagtgagcctagagaccagtgaggcaggagggaaccaggctgctcctggagcccaggaggggagtcgagggagtgggatggggagactgccttgcgggccactgccaggccaggtaagaggggctgagaatggctgactgagcagggggccgtgacggggaagtttccactgagcggtgaaggcagaagcctgcctgtggccagctcaaggaacagaaggagatggcctggagactaggagaatagtacaactgttttgaggagtttagctgtaaaggggagagacatgtggtggtatttgggggaaataaggtcaaaataggagcattgacctgtgtg

SEQ ID NO: 32767 - DNA, 1053 bp, Artificial sequence
  DNA replication origin
aaccaggctgctcctggagcccaggaggggagtcgagggagtgggatggggagactgccttgcgggccactgccaggccaggtaagaggggctgagaatggctgactgagcagggggccgtgacggggaagtttccactgagcggtgaaggcagaagcctgcctgtggccagctcaaggaacagaaggagatggcctggagactaggagaatagtacaactgttttgaggagtttagctgtaaaggggagagacatgtggtggtatttgggggaaataaggtcaaaataggagcattgacctgtgtgttcaatccaggggcaagtcaggggttgctggagccctggcctatccccagcccccagcggttcatccacaatgacaggagggagtggcaggtgtggggccgcgcatctaaaatggctcctgcagcacagctgtggtttctctccagcggcttgcggccacgaaggtgcagaggcagagttacaaagatgactttaaccagggtggaggtttctccagggaatacagtggaggagagaggggtgagggaggcacaggagtgatgatggtgagtcacctggatgctgagccaggccaggacgggagtgggtacctgaggtggttgtggaggctgacaggtggtagggtcagtggattggaggccacccaaagaattgtaatcctggtagcaaagagactgagctagaaagatggtgggggtgtggcgtgtgtccaggagtggggtgtttgaaatcagaggtggaggaatgcagtcatgggtcaggagagggctgggtgtgagcatgggagtgtgtgggggagagggagaggccaggaggagagcgggtcgtgaaactcagatccatcttcatggatcttgaaatcaccaagaaaggacaaaaggatgtgggaaagggtggctgtgatacaggagaaaagtccttgaggaatgtgggagcaaggtggtggctgggtggcctggcggtctacagctgaccgcatggagggtcttgtctggtggtgcattaacttatttgcataatccttt

SEQ ID NO: 32768 - DNA, 1173 bp, Artificial sequence
  DNA replication origin
cagggaaagacagacaatagagggagaaggaaatgggatgttagaaggtgatgaatgcatgagggaggcaggaagtgagtggggaaggctcgcttaggagtgaggatttgggcaaggtgactcacgcctgtaatcccagcactttagaaatctgagacaggtggatcacttgagcccaggagttcgaggccagcctgggcaacatggtgaaactcagtctctactataaatacaaaaattagctgggcatgatggtgcatgcctgtgatcccagctactggggaggctgaggtgggaggatcacctgagcccaggacccagaggttgcagtgagctgagatcacaccccttcactccagcctgggcaagagagtgagaccctgtctcaaaacaaacaaacaaaaaacagaaagaaagaaaaagaaagaagacagggttgggggggagggtggggaggaaggaagggagggagggagggagtgaggatttgaaggaggtgagagtgaggccacctgggaaagggtatccaggcagagggagtggccagggcaaaactctggtgtggggcataccacacagtcaaacgggatccctctgaatgctatgtagagaataggctatggtagggggtcagcaagagaggaagcagagaccaggaagccgtctccttgctgcaggggagaggcaatggagactggggccgtgtggtcactggaggtgatgagatgccttcagagtctaggtatgcttggaaagtgctgacactgtgattgaccctgaagattttagcctgagcaaataggatagactttgcagaaatgagctatgcaagaccctggaagagcagctctggggggcaaaggtcaagagtcccgtttgggcatgaaaggtttaagatagtattagtcaccttagaggagatgttggtccaccagttcgatgcacattggtggtgttcagaggaggataatgagctgggtgctgctttaagcccagggggtgaggaagtttacaggagaggatcaaagattgagccttgacttaagaagttggggagatgaggaggaagtaacaaaggagactgtttgcattgtttctcacatgttaactcatttagtcttgaagatgttgttattattaccatcttacaagggaggaaactgaagcacagag

SEQ ID NO: 32769 - DNA, 650 bp, Artificial sequence
  DNA replication origin
cacttctgtgcccggctctggacagggtctgggacccaggtgtaaacagtgcacacaactgcccctctcggtgtctggcgggataatcaccccccacagtagagcagcaagtgccccgctggggacaagggatcgttgcaggaaccccaaggagcagcgtctagaactgtcttgggcgaggggcaggaggaaggtgagaggtgagctggccaagcacagggaatttgggaggatgtcccaggctgacacggcgcaggcaaaggcctagagttaggagcatgtgtggtgccagtttgctgtggctagagcatgttaggggtcagggtgcaaggggtaggcaaggggcatggtggagctggggtggggaatggtgtgcaaggtataacaggcatgaaggaaaagaaaaagtttcccccggcccccggctgtccccacaactgtgatgtgctggggctacaggtgagcaggtggagaaaggcccggaacatccaaacatctcttaactcatcaatctgcctggtgcagacaggctggcctgtgaaagcaccaactgcgtgtagtcttctgtgttctgcacccgcctgggccataggggaggagggcactggggacttggcttgactagaatggctgataccacctccccagtg

SEQ ID NO: 32770 - DNA, 1197 bp, Artificial sequence
  DNA replication origin
ataatcgcccaggcctttggagttgaggtgtgagaagctggagggcctgccccatacgcatcttagggggcagcagggtggtggaggggtcccctagatgccagtggtgaccccactgtcctccaggcagagcaagcagggcccacacagcccttagaatcaggccttgaaaaagaccaggctgagcatggggaccctgaagggcagcccagggcctctctgggggctgctggctgtgctcaagagggggcacctgatgggaccacgtcagctccaggagaagcacagaatatactttttaactctgactttgttgctgggatcttgaatgctccagagcacagtgggagctgcctctttagagaagcagctgctgggggaggagggaggtggggcctggaggtgggtgggctccaaggcagtggctcctagggcgggggtatgcatttgtgccttcctgcagcaaatgttcatgggctagagggcctggggccatggggaccaaacagcccggtgcctgtccccaggccacctacagtggggggcagaggggtagaatgacaaatgcaaacagggagctgggagggagccccctttggatggatgaggtgatcagggcaggcttctctgcagaggaaacccaaaggttgagtagggggcagccaagtcaggggtgagggcaggtggggggcttggtgggaagggaccatgaccgacagctcccacacagtcccctctccacacctggcctgacatgtcctacttgatcctcacatagtcccatcactgctttatggaccacgccagaggggggagatcagatgatctccagtgtgcccaaggccactcatgggggtcagggagctgattctcaaatccaggaatatgccttgaaagtctggggctcccttctgcactgtgcttatagatgtgggatccttagctttcttgggagcatggatccctttgaggatctcgatgaaaaatctgcacctctcccagaaaaatgcacctctgcacaggttcacagatgtctgcatacaatttcagggttctcagaccctgaaggccaccaagggacccaagtacatgagccttacacagcacaacctaaatcgtcaatggcaatgtctcaggagtgtaggacagtgactgcctctgtaagaccatcagcacagccatggccacacatgttgt

SEQ ID NO: 32771 - DNA, 1059 bp, Artificial sequence
  DNA replication origin
aatatgtggcctttgccttctttataagcacattccacccccagcaccatatattttaggcatcttgaaatacttattcatcattgtactctgctagtgcacattttttgcttttttacatctttctcatgccatatgcctggagttctccaccaccgctattccttcttatgctgcaatgccatatacctagcaagtctcttgctttccccctactagactataaattataagtcttattgttcctcttgttatccctgtacttacgtagcatttaacacaccatagatatttcataaatgttgccgagtggatggatggatggatagatgagtagatgggtagatagatggatgaaaggatagatggatggatggatggatggatggatggatggatggatggataggtgaatagacagatgaatgaaaggatggatgggtaggtgggtgggtgggtggatgaatggatggatggatggatgagtaggtgagtagatagatggatgaaagaatggatgggtgggtggatggatggatggatgaataggtgagtagatagatggatgaaaggatggatagatgggcggatggatggatggatggatggatgagtaggtgagtagatggatgaaaggatgaatggatggatggatggatagatacatggatgaaaggatggatggatggatagatagatgaatgaaagaatggatgggtggatggatggatggatggatgagtaggcaagtagacagatggataaaagggtggatgagtggatggagggataggtagtggccaatacagacaaagaataggtaaaatcagttcaattttgtgaaggctcaggttgacctgtcaccagtcaacacaattaaaaattatgagctccagccggacatggtggctcacacctgtaataccagcactttgggaggctgaggcaggcaaatcacgaggtcaagagatggagaccatcccggccaacatggtgaaaccccatctctactaaaaatacaaaaattagctggtcgtggtggtgcgtgcctgtagtccc

SEQ ID NO: 32772 - DNA, 1123 bp, Artificial sequence
  DNA replication origin
agatggcagatgcctgctgaggatgagcgtgacttcgtcccctctgtctccccagcactaagccagggcctggccccagcaggtgccccataagcatgtgggggatgaagggaatggtccaggtactaagggactgaggggcttggggagggaagagccagctgtgcctggagccacatactcgaggcagggcactcagggccagggaggaatacagggtggggcacgggcagggccttccagtggggagggctgggggtcctcaggggcctgatgtctcactgtctagagaggcctggaggtgggtggggagtgctctgtggtcatgggtgccagagtcttagccagtgcggagggcaccttcgtgccagttaggaggtgcccttcctccaggtgcccagccctgccccagaaccctgggagctgcctcagacccacagctgggcacccttgtgtaggacacaacctgggcgctgcatgtgagactctctgggtgtggagtgtgactgtgttgtgtgggggtgcgggatgtggtatatacgcacacacgcagggagcggggtatgtgtggttggagagggttgcgttgtgtgttgtgtggggtgcgggatgtggtatatacgcacacacgcagggagcgaggtatgtgtggttggagagggttgcgttgtgtgttgtgtggggtgcgggatgtagtatatacgcacacatgcagggagtggggtatgtgtggttggagagggttgcgttgtgtgttgtgtgggggtgggggatgtggtatatacgcacacgtgcagggagcggggtatgtgtggttggagagggttgcgttgtgtgttgtgtggggtgcgggatgtggtatatacgcacacatgcagggagcggggtatgtgtggttggagagggttgcgttgtgtgttgtgtggggtgcgggatgtggtatatacgcacacgtgcagggagcggggtatgtgtggttggagagggttgtgttgtgtgttgtgtgggggtgggggatgtggtatatacgcacgcacgcagggagcggggtatgtgtggttggagagggttgcgttgtgtgtacatggtgtgagaatggagaattagtgtggtatgcgtgtgg

SEQ ID NO: 32773 - DNA, 1258 bp, Artificial sequence
  DNA replication origin
gagcagtgaaaactgaggagtttctccctcctcctccttgaaataacctctctgagcctctttcacaggccctgtgtgctgttttccttcctgtcctgccctggctgagagcgggcttaatgaatggggctcagtttagggtgggaggaaggtcggcagcaggagccagggcttgattctcttggcaagggaagaagggaaagaaaaaacagccgaatgtgaaaatgtggtgcctcggaggtgggggtggggtgtgctcaaaggccggtcctctcctgaaatgcaggggtgactccaaggctggcccttccctttcctgcgcccttgcaaactgcccgggaggaaggggagtgggcgggtaggagcccgggggcggggctgctggctgcaggttggaattccagcattgcagctttgttttgggggggtgtgggggggtgggtagacgacaggcctggtcgttagggacttgcagtgaaacacaccccacccttgcaagtttcctcggtctgggaaaatgggacatttttagaaggcagtgacttgcttccaggagattgtactttcatttttgacagctggctctctgagacagatggattgctgggtgcaagcttgtgtgtgtatgcgtgtgtgtgtgttgtgggggtgggtgtgtgggtgggtgggttttgccgcagacgtacagatagacaatcccgtgcgcaaacacatgagagcgtgcggatgcccacaggcaggctctgggatagggtgggtccctgtcgctggggtgggttgatgtcagggcggcctctccaagaggttgtggacttgtggggtggagtttgtggattgattctgctttgtgatttggcagtctgtgcctgactctctgggatgggtgtcttttgaaaggcatgcaactccagaacaggtccttgctgctgcttggacatggatgtgtcatggctcaggaagatcacctgggagaggtctgatgtagctgggaagcctctaggctcagctccgtcgtggagatggaaaggatttgctcccagagctttccggggatcactgggaatgcagagcatgtgttggaagctatcatctttgcagcctccatctggagtttctgtctgggggctttcattttgcctgtctgctgtcctggtttgagtgggttgagggagcagcatctcccttgtgagttgtaggttattcagctgcagactcatcttctagcctcctcctttatatatgaatgtctggagctggc

SEQ ID NO: 32774 - DNA, 917 bp, Artificial sequence
  DNA replication origin
taaaacaatcattaactccttcccctcacccctccaggtaattgtagacacagatattaataaggagctgccaggaagaagcagtgactctctgaagggcagtgtggcttcagaagactgcagagagaagagggggccttccacatggcaagagcatttgttttgaatttcagctcttgatttactaattccaaaggcttcaaagtttgagctccttcttctttccgttcagagttggtgcagtgtattcataatgggccatggtggggagggtacactgttttgggggttgatgtcaccggcttgggggcgtctggaggggaggtgatgggcacggagaaaacctagggctgtcctctttgtagcgagaatgccttccaaaagggaactttattggcccctgtccagggcagagagttttgtaaatggagaaagcccaaacctcctccttttcaagaagttgatcgttccatggggggtggcctgggtgtgtctgccttgctgtggatgaggccagtgactggatgtggcagggctggatgggggaaggggcatagcagacactgaggttggggggtgggagcctggcagcaaggtggggagcagtgaaaactgaggagtttctccctcctcctccttgaaataacctctctgagcctctttcacaggccctgtgtgctgttttccttcctgtcctgccctggctgagagcgggcttaatgaatggggctcagtttagggtgggaggaaggtcggcagcaggagccagggcttgattctcttggcaagggaagaagggaaagaaaaaacagccgaatgtgaaaatgtggtgcctcggaggtgggggtggggtgtgctcaaaggccggtcctctcctgaaatgcaggggtgactccaaggctggcccttccctttcc

SEQ ID NO: 32775 - DNA, 1302 bp, Artificial sequence
  DNA replication origin
caggcaaacgacttttctcctcgcctcctcgccccgcatgttcaggaccaaacgatctgcgctcgtccggcgtctctggaggagccgtgcgcccggcggcgaggacgaggaggagggcgcagggggaggtggaggaggaggcgagctgcggggagaaggggcgacggacagccgagcgcatggggccggtggcggcggcccgggcagggctggatgctgcctgggcaaggcggtgcgaggtgccaaaggtcaccaccatccccacccgccagccgcgggcgccggcgcggccgggggcgccgaggcggatctgaaggcgctcacgcactcggtgctcaagaaactgaaggagcggcagctggagctgctgctccaggccgtggagtcccgcggcgggacgcgcaccgcgtgcctcctgctgcccggccgcctggactgcaggctgggcccgggggcgcccgccggcgcgcagcctgcgcagccgccctcgtcctactcgctccccctcctgctgtgcaaagtgttcaggtggccggatctcaggcattcctcggaagtcaagaggctgtgttgctgtgaatcttacgggaagatcaaccccgagctggtgtgctgcaacccccatcaccttagccgactctgcgaactaggtgagaagttgtccccctacccccaacattttccggagcgccagtgctggaagaaaagcccctagggcagtgcgtttgtgcagccatccctccagggggagtgtgcataccctcctgggagagtgtgcataccctcctgggagagtgtgcataccctcctgggaagagactgggggctgaaagtagagaagggacaaggggaaactcaaagggcattccctgggggttcccttccaggttttctcctgtgttgccccgaaggggtctacgggcactgctcctgcagtctgcggttaaaaattagacgccttcatttccggatcaacaagggggtgcagagggaggtgggggggtcacgcctccccgcacccggaaagacgttgaggtgtgtggccgagttggatttggtccaggcccgccaaggaaggctgggagaggcgtgctataaaggctggaaggtctccgtatttactcctttagtaaatacggagaatcacgtcgaacaccagtggcccagatactgtcgtggccgcgcacctttggagttttggggcaaagagagttggatggaaggccgaactgggtatctgtctcctttcaactctgccagccccagggtgcagaggaacaaacaggcaggagaagttgggtg

SEQ ID NO: 32776 - DNA, 781 bp, Artificial sequence
  DNA replication origin
cgcttctcccgaggccgcggggtcccggttgcgcgcccggcccgcccgccccttccccctgcctccccggcctcgcgtcgccacccggctgagtcacgggccgcgcacactgcacgtctgactgcacgggcccctcgggcctgcacctccgcggcccggaagggacggaagccccgcgtccccacccccaccccgggagggtccctgcggcagttacgggggagcagcgatagctgccctggaggtcgcattcccacccggcccccgagttctccgggagaactcccccgcagcctcggcggcatcgcctcctccaatctccccaggaatcgtgtttcccccaaccctgcctccgtgcgcgccggggtggcggcgggatcccggtgccgccacccctcggcccctccgccgccgtgcgggaccgcgatgggggaggggacaggcccggtttcggtgagggggctggggtcggccacgccctcttccctggccccagggtgggggccgcgaggatggcggggtcaccgggctgaactcgcgcctgtctgacctgcgggggtgtaggcggtgtggactgtggactggaagacgtccttaaatttttaaaaatagtcttgccgtatggagaagaacactggaacctttaagtccgcatcccctcgcccgattcggctcgtcttagtccagagtgtaactccaaacatacttattaagaaactgttgctttattttgactcgtttacataaaatttccactttgggggggatggcggtgggcttg

SEQ ID NO: 32777 - DNA, 923 bp, Artificial sequence
  DNA replication origin
gcgggcgggccgggcgcgcaaccgggaccccgcggcctcgggagaagcgaggtgcgcgcgcccaggagtggggggcggggcggcgggcgcgcgcgcagcggaggcgccgggcggcggcgagggccgggccgtatgccgtcttcccggcgccgcgctcccagagctcgcgccgcctcccggggcgccgcgcgggtggcgcaggtagaggccgggcgggggtggcagccaccccggggctcaggttccagccgccaggcttggccctcagcgggcgctgtcagagggcgggcccgcgggagcggggcggcggcggcggcggcagaggagcgcagggcgggcggagaccgtcggggtcacctctccagccccccgcggtggccgagccacccgcagttgcgctcgaggcgccgaggcggggtggccgagcgagacccgggccgggcgcggctcgggccgcacagccgcggcggcggctgcagacctgtaaaccttaatgacagcaatcttgcccgtctgcgcctctgactcacgtggtgacccagcctccagtcacccggcggccgccctccggcctcagtttcccccgccgccgaacaatgaagccactgtgtcgccgttcatttctgagcgccgtttcacacgcggagcgccgccgcctccctggggaagggaccgaggcgtccggcttttaattatccccggtgggcgggcgtggggaggccgcgctctgctggataattgaaccctgggactattccctcgtcagcccaagctctttatcttaagccgtcctttcctcttcatcgtatttaaattttaccccttcctctccacgctggtgggactgcttgaaaaacaatgaaatgggccggttaggtggctcacgcctgtaatcgcagcactttgggaggcccaggctgggg

SEQ ID NO: 32778 - DNA, 601 bp, Artificial sequence
  DNA replication origin
tgagtgtgactttgtcccctctggctccccagcactgagccagggcctggcaccagcaggtgccccataagcatgtgggggatgaagggaatggtccaggtactaagagactgaggggcttggagagagaagagccagttgtgcctggagccaggtactcactagtggggtacccagggccagggaggaatggtggagtggggcatggggcaggcccttccagtagggagggctgggggtcctcaggggcctgatgtctcaccgtccagagaggactggagttgggtggggagtgctctgtggtcatgggtgccagagtctcagccagtgcacagggcaccttcatgccagttaggaggcacccttcctccctccaggtgcccagccctgccccaggaccctgggagctgcctcagaccctcagctgggcacccttgtgtaggacacaacctgggtgctacatgtgagactctctgggtatagagtgtgactgtgttgtgtgggggtgcgggatgtggtatatacgcacacgtgcagggagcggggtatgtgtggttggagagggttgtgttgtgtgttgtgtgggggtgggggatgtggt

SEQ ID NO: 32779 - DNA, 892 bp, Artificial sequence
  DNA replication origin
agaggtggtggattctggccatattttgaaggcagagccaatagtatttcctgatggattggacactcggtaggagaaagagagaggccaagggtgactgcaaagtttttggcctgagtaatacgaagctgccatgagcccaactggggaatccttcaggaagaacagtttggggaggagaagctcaggaggtcggctttgttgagttcaggagagaggtctgggcgggagagtgaatgtggatgttgtcagccaacaggtaagattggatgagaccatcaaggagacagggagccaaaggggcagggtggagttcaaggaccaagttccgggcatctaacccaagagggcagggaggagaggaaggagtctaggaggaggcaggggaggagggagaggaggtgggggaggaggggggaggaagggggaggggaaaagggaggaggatggagagaagggaaggaggaggacgaggaagaagggaggaggtggaagggaaaatggaggagggggaagggaaaaaggaaggggacaggtagaaggggaggaagagggggaggaggggaaggagcctgtgtgaggagggaaaggcaggagggttatgcctggaaatgaagaaagtgagtcaagggggaggacatccctgcgaatgctgctgatagatcagacacatcaggccaggtgacgactcagacgccaccgctgggctcgatatcatgggttatttgggttcctgtcattccttcaggttcgtgactgactcagtcgtgcattcattcgggcatctgctgagcaccagctccgggccaggctatgttccaggcagtgtcagggccatggagaaatggcagccccttcctacccttgaggcaggttcaggggcaccctggtg

SEQ ID NO: 32780 - DNA, 1735 bp, Artificial sequence
  DNA replication origin
tgcacacttcaggcaaatgcccgcctccatgccttttctgacaggtctctttatagctaggatgtccttcccaccacacttccatttcctacagtgctggtgcggatgcttccctccctccagagtcttaagtggtcctctccagtgcccagtatctgcctgcttacagcattacctgtatatttcctacaaagtgcctggctggacatgggtttggatagtttccattcactactggacataaatgatttgaaggtaggctctctgtgtgccatgcagccccaggtcaggcattgctgagtgaggaacagtaccctctgccacagggtggcttagagaagggaggggggagagagggggagagggggagagggggagaggaggagaggggaagggaggggggaggggggagagacggagggggagagagggaggtggggggagagagggagagggagaaggagggagagagagagagagagggggagagagggagagggagaaggagggagagagagagagaccgtgaaaagtacagtcaggggatgctggcaagatagttcacctggggtggtcctgatggagaggagagaagtgtaaggcactgcctagtcagggaaattgttcagaagcctggctgagaaaaagatttgaaccatccctttctgagcagttcctgggtagtgaggggggcatgaacaaaaaagtccataataaaaacctgatcatgttactctgtgcttaaaaaaatctcaatggcttctcaatggaaaccactgccacagaagataccaaaaagtagaggcagcgcctccgaaccatggtgttcataatctagacatggagataaaacatgtacaaaaataactatcagacaagataggaggtgataatatcatctgaagtgtgcaaataagtgtaatctgtggggatccagggaagggagaaattaaactggaagcatcaagaaaggcttcaaggaggagaaggcacctaggtggtctgtaaacaaagggtaggatttgggcatgtggaggtggggggaagggcatcccaggcagaggaataatagaagcacagacagggagacagaaaagcacaagggtgcccacggaccagccggtgtgtttgagaataagagggggaatgtgaaaatagcttggaaggcaggtttatggagatctgctgagactgagcctagacttttctgcatacaaagtggggccactccacgcacctgagcaaagctgtgcccaggacctcagcgtgctcttgggagactacttgggaaacaatgtggtccctctggatgggagggaagcagcccttggaggggagcagctgggggactagtgcagggtctaggcgatgggggctgagggccaggacccaaagatgacagtgggaacagaggagagctggcagtgccaccagggtgagtgggcagagagacttggcagctcttcacagctgcctctccccagaaagggaaggaaatcagggctgggaaggaagagatctagaaatgaatccaagagcttcctctgtaaatagtcaaacttcatatgtttagagtccagtgacctgtgttgcttttgtttttccctagaaacaaaagagcacacaaataaaattctgtttccatcctccatctggctccatcctaataagtctttatttttctgatacggtctctctttgagccagtttgcctctgggaaagggtctctgtgca

SEQ ID NO: 32781 - DNA, 935 bp, Artificial sequence
  DNA replication origin
ggggctcagcccctcgcccggccagccaccccgtccgggagggagttggggggggtcagccccccgcccggccagccaccccgtccgggaggtgaggggcgcctctgccccgccgcccctactgggaagtgaggagcccctctgcccggccagccgccccgtccgagagggaggttggggggtcagccccccacccggccagacgccccgtccgggagggaggtgggggggtcagcccccccccggccagccgccccgtccgggagggaggtgggggggtcagccccccgcccggccagccgccccgtccgggaggtgaggggcgcctctgcccggccacccctactaggaagtgaggcacccctctgcccagccagccgccccgtccgggaggtgaggggcgcctctgcccggccgcccctactgggaagtgaggagcccctctgcccggccaccaccccgtctgggaggtgtacccaacagctcattgagaacgggccgggatgacaatggcggttttgtggaatagaaagggggggaaggtggggaaaagattgagaaatcggatggttgccgtgtttgtgtagaaagaagtagacatgggagacttttcattttgttctgtactaagataaattcttctgccttgggatcctgttgatcggtgaccttacccccaaccctgtgctctctgaaacatgtgctgtgtccactcagggttaaatggattaagggcggtgcaagatgtgctttgttaaacagatgcttgaaggcagcatgctcgttaagagtcatcaccactccctaatctcaagtacccagggacacaaacactgcggaaggccgcagggtcctctgcctaggaaaaccagagacctttgttcacttgtttatctgcccaccttccctccactattgtcctatgaccctgccaa

SEQ ID NO: 32782 - DNA, 1240 bp, Artificial sequence
  DNA replication origin
ccagtaggggcggcggggcagaggcgcccctcacctcccggacggggtggctggccgggcggggggctgaccccccccaactccctcccggacggggtggctggccgggcgaggggctgagccccccacctccctcccggacggggtggctggcccggcagaggggctcctcacttcccagtaggggcggctgggcagaggcgcccctcacctcccggacggggcggctggccgggcagaggggctcctcacttcccagtaggggcggccgggcagaggcgcccctcacctcccggacggggcggctggccgggcgggggctgacccccccacctccctcctggacggggcggctggccgggcggggggctgaccccccccacctccctcccggacggggcggctgccgggcagagacgctcctcacttcccagacggggtggctgccgggcagaggggctcctcacttctcagacggggcagctccgggcggaggggctcctcacttctcagacggggcggatgccgggcggagggtctcctcacttctcagacggggcggctgggcagagacgctcctcacctcccagacggggtggcggccgggcagaggcgctccccacatctcagacgatgggcggccgagcagagacgctcctcacttcccagatgggatggctgcggggaagaggtgctcctcacttcctagatgggatggcggccgggcagagacgctcctcactttccagactgggcagccaggcagaggggctcctcacgtcccagacgatgggcggccaggcagagacgctcctcacttcccagacggggtggcggccgggcagaggctgcaatctcggcactttgggaggccaaggcaggcggctgggagatggaggttgtagcgagctgagatcacgccagtgcactccagcctgggcaccattgagcactgagtgaaccagactccgtctgcaatcccggcacctcgggaggccgaggctggcggatcactcatggttaggagctggagaccagcccggccaacacagcgaaaccccgtctccaccaaaaaagtacgaaaaccagtcaggcgtggtggcgcgtgcctgcaatcgcaggcactcagcaggctgaggcaggagaatcaggcagggaggtcgccgtgagccgagatggcagcagtacagtccagctttggctcggcatcagagggagaccgtggaaagagagggagagg

SEQ ID NO: 32783 - DNA, 1688 bp, Artificial sequence
  DNA replication origin
cagacggggtggtggccgggcagaggggctcctcacttcccagtaggggcggccgggcagaggcgcccctcacctcctggacggggcggctggccgggcagggggggctgaccccccccacctccctcccagacggggtggctggccgggcggggggctgaccccccaacctccctcccggacggggcggctggccgggcagaggggctcctcacatcccagtaggggcagccgggcagaggcgcccctcacctcccggacggggcggctggccgggcggagggctgaccccccaacctccctcccggacggcacggccggccaggcggggggctgacccccccacctccctcccggatggcacggctggccgggcgggggggctgacccctcacctccctcccggatggggcggctggccaggcggggggctgaccccccccaacctccctcccggacggggtggctgccgggcggagacgctcctcacttcccagatggggtggctgccgggcggagaggctcctcacttctcagacggggcagctgccgggcggaggggctcctcacttctcagacggggtggttgccaggcagagggtctcctcacttctcagacggggcggccaggcatagacgctcctcacctcccagacggggtctcggccgggcagaggcgctcctcacatcccagatggggcggcggggcagaggcgctccccacatctcagacaatgggcggccgggcagagacgctcctcacttcctagatgtgatggcggctgggaagaggcgctcctcacttcctagatgggatggcggccgggcggagacgctcctcactttccagactgggcagccaggcagaggggctcctcacatcccagacgatgggcggccaggcagagacactcctcacttcccagacggggtggcggccgggcagaggctgcaatctcggcactttgggaggccaaggcaggcggctgggaggtgtaggttgtagtgagccgagatcacgccactgcactcccctagagttcttttctgttgtgttccaccaccccctgtgtgttgctctgaccaaaaggtcgcgaatggctcaccacaagctctgcatttcagatagtagaagagtgaaagggactagggttggatgtacatttccattttaagggcatcacacatccctttggccaaaagtttgtcataggactacccaacgtgcgtggtgagctggaaagaaagttttcggctaagtgaccctgtggcctgctaagtattctgctgttgggtaagaagggaagatggttatggggacaactaacagtctctgccatacaatagagagttcctgtcctgactaattaacaaatgcttattcagtgattaccgtgtgattagtcctgtgccaaacagcaaatggggttcatggtgaagacagaaaaataataccattgggaaaaaatcattaccttgtactgttagttaaatataaaattagtaacatataaaaagcgatctcttctgacaggagaatctgaagtagtctgaaacaggattatctgcgcagtaactaagaatagataatgtgctattagcagagtaggcatggaaaactcaagtccagaagttcacatatagaagagcacatgacatatgctaaggcagtaataggatgtttggca

SEQ ID NO: 32784 - DNA, 922 bp, Artificial sequence
  DNA replication origin
aggagcgtctccgcccggcagccaccccgtccgggagggaggttggggggggtcagccccccgcctggccagccgccccatccgggagggaggtgaggggtcagcccccccgcccggccagccgtgccatccgggagggaggtgggggggtcagccccccgcctggccggccgtgccgtccgggagggaggttggggggtcagccctccgcccggccagccgccccgtccgggaggtgaggggcgcctctgcccggctgcccctactgggatgtgaggagcccctctgcccggccagccgccccgtccgggagggaggttggggggtcagccccccgcccggccagccaccccgtctgggagggaggtggggggggtcagccccccctgcccggccagccgccccgtccaggaggtgaggggcgcctctgcccggccgcccctactgggaagtgaggagcccctctgcccggccaccaccccgtctgggaggtgtgcccaacagctcattgagaacgggccaggatgacaatggcggctttgtggaatagaaaggcgggaaaggtggggaaaagattgagaaatcggatggttgccgtgtctgtgtgaaagaagtagacatgggagacttttcattttgttctgcactaagaaaaattcctctgccttgggatcctgttgatctgtgaccttacccccaaccctgtgctctctgaaacatgtgctgtgtccactcagggttaaatggtttaagggcggtgcaagatgtgctttgttaaacagatgcttgaaggcagcatgctcgttaagagtcatcaccaatccctaatctcaagtaatcagggacacaaacactgcggaaggccgcagggtcctctgcctaggaaaaccagagacctttgttcacttgtttatctgctgac

SEQ ID NO: 32785 - DNA, 1781 bp, Artificial sequence
  DNA replication origin
cttctctcgccgcctcctggcctccgcaccgacgcggcccgggctggagccgagccggggccgagctgcaggccggaccggagccggatctgtacccgctgagacgtggaaacatggaggcctgagccggtgtgcgccacctgggctgcggcggcgacagcgacttctcctgacccctctgccaccctcccatccgtccgcgggtccgtggagctggagcagatcccccagccggctgagacaggtgggctgtagcgccgcccccctcagcgcggccgggcccgaaagcctggctgtccccggcctcctgtcagagggggtcaggggccaccctccgcaacccggccagcgccccggggcggcggcgaagggaccctcccttccctgcccgcgggcgcctgggccacccggaggggctgtgctgacagcggacggacctctgtccgagtccgctgttgggagttgggggataccgaaggccaagtcggtgcttccggagatggggcggtgttggtctgacaaatgggcgtgtgatgggcagggtgagcaatagctgttgggtttttctttcttctttttacattcatagtttatcgaggtataactaacatatcagaaaattaaccctttaaaagtacaactcagtggtttttagtatattcacagggttgagcagccatcaccacccttaactccagagcatttttaatcaccgccccccccgccccaaagaagctcgtacccattagcagtcactcctccttctctcccctacactattgatctactttcagtcgccgtggatttgcctgagcaattgtgttttgactgaaaagtgaaagggtgggtgtttgtgaactgggggcagtagtggggtttgagggtattggtgtggtaaagctgattggataaagctgttctctactgaacaggggtagagaagtgatgggatgattgtaatcggccagcaaagcgggtacccaggatagactgattagggggcacagatggagtgagttccttgaaagaggagaggggaagttggagagaggggtgtgtagagcaagggtgatgtgctgaaggatgaaaacctggagggtggaggccgtggagaggaatgtagcgtccaccagaggaactcaggtgcttaggctgatgagttgagggctcaagagaagaacgaggtggaagggaagagaatctataggaatgggtgaatggttgttgcagaggatgaaatttatgaatatatggatttctggagtgattatcctgctttgaagttttattttagataatcctctcagcaacttggagatagaccggacaagtatgaatattcccattctgtaaatgaagaactagtcttttagaggttaggtgtctgccttaagctcataaactgagtacatagggcaaaatgagttggaataattgatgaaactatcagtcgcaagtggattaaatggcagagaactgagttggggcaatgttaataggaaggagattcagctattaagaagtctgtgttgttacgacatataggtcaaggagtttttatgtttttgcaccttttaaccatagaaaagttcacacagtgaaataataaagggtactcccatgtacccattacccagcttcagcagttaactcatgccaatttaatttcatctatgtccctatgcattcctatccccactcacaattattttaaagcaaatcatagacattcaatttcatctgtaaatatttcaatatatatctgtagaagattgaattgc

SEQ ID NO: 32786 - DNA, 941 bp, Artificial sequence
  DNA replication origin
ccccgcctggccagccgtgccgtccgggagggaggtgggggggtcagccccctgcccggccagccgccccgtccaggaggtgaggggcgcctctgcccgcccacccctactgggaagtgaggagcccctcagcccggccagccaccccgtctgggagggagatgggggggtcagcccccccacccggccagccgccccgtccgggagggaggtgggggggtcagccccccgcctggccagccgccccatccgggagggaggtgggggggtcagcccccccgcccggccagccgtgccatccgggagggaggttggggggtcagccccccgcctggccagccgtgccgtccgggagggaggtgggggggtcagccccctgcccggccagccgccccgtccgggaggtgaggggtgcctctgcccggccgcccctactgggaagtgaggagcccctctgcccggccaccaccccgtctgggaggtgtgcccagcagctcattgagaacgggccaggatgacaatggcggctttgtggaatagaaaggcgggaaaggtggggaaaagattgagaaatcggatggttgccgtgtctgtgtagaaagaagtagacatgggagacttttcattttgttctgcactaagaaagattcttctgccttgggatcctgttgatctgtgaccttacccccaaccctgtgctctctgaaacatgtgctgtgtccactcagggttaaatggattaagggcggtgcaagatgtgctttgttaaacagatgcttgaaggcagcatgctcgttaagagtcatcaccaatccctaatctcaagtaatcagggacacaaacactgcggaaggccacagggtcctctgcctaggaaaaccagagacctttgttcacttgtttatctgctgaccttccctccactattgtcccatgaccct

SEQ ID NO: 32787 - DNA, 1302 bp, Artificial sequence
  DNA replication origin
caggcggggggctgaccccccaacctccctcccggatggcacggctggccgggcgggggggctgacccccccacctccctcccggatggggcggctggccaggcggggggctgacccccccacctccctcccggacggggcggctggccgggtgggggggctgacccccccatctccctcccagacggggtggctggccgggctgaggggctcctcacttcccagtaggggtgggcgggcagaggcgcccctcacctcctggacggggcggctggccgggcagggggctgacccccccacctccctcccggacggcacggctggccaggcggggggctgacccccccacctccctcccggatggcacggctggccgggcgggggggctggccccccacctccctcccggatggggcggctggccgggcggggggctgacccccccccacctccctcccggacggggtggctgctgggcggagacgctcctcacctcccagatggggtggctgccgggcggagaggctcctcacttctcagacggggcggctgccgggcggaggggctcctcacttctcagacggggtggttgccaggcagagggtctcctcacttctcagacggggcagccgggcagagacgctcctcacctcccagacggggtctcggccgggcagaggcgctcctcacatcccagatggggcggcggggcagaggcgctccccacatctcagacgatgggcggccgggcagagacgctcctcacttcctagatgtgatggcggctgggaagaggcgctcctcacttcctagatgggatggcggccgggcggagacgctcctcactttccagactgggcagccaggcagaggggctcctcacatcccagacgatgggcggccaggcggagacactcctcacttcccagatggggtggcggccgggcagaggctgcaatctcggcactttgggaggccaaggcaggcggctgggaggtgtaggttgtagtgagccgagatcacgccactgcactccagcctgggcaccattgagcactgagtgaaggagactccgtctgcaatcccggcacctcgggaggccaaggctggcggatcactcgcggttaggggctggagaccggcccggccaacacagcgaaaccccgtctccaccaaaaccagtcaggcgtggtggcgcgtgcctgcaatcgcaggcactcggcaggctgaggcaggagaatcaggcagggaggttgcagtgagccgagatggcagcagtacagtccagcttcggctccacat

SEQ ID NO: 32788 - DNA, 888 bp, Artificial sequence
  DNA replication origin
aaaaccagtcaggcgtggtggcgcgtgcctgcaatcgcaggcactcggcaggctgaggcaggagaatcaggcagggaggttgcagtgagccgagatggcagcagtacagtccagcttcggctccacatgagagggagaccgtggggagagggagagggagagggagagggagagggagagggagagggagagggagagggagagggagagggagagggagagggagagggagagggagagggagagggagagggagagggagagggagagggagagggagagggagagggagagggagagggagagggagagggagagggagagggagagggagagggagagggagagggagagggagagggagagggagagggagagggctcaccggatacactctattttaatttttggtaacattttaaagaagcaaaaccatttcacttaagttttttccattcacttaacatttttcttcttcttctccttcttcctcactatgtttcccaggttggaaacaaatgatcctcctgcctcagcctgagattacaggcgcaaaccaccatacctggctccaaaatttatcttctgaatgcttgagcttattctcagcagatttgggctgaactgaatttgctgctaaaactgaggtgtagggcagtgaccaattttgggggggtttcttatccttttactgccttggctgctgacagcatttcctgtcttgaccccaggcagctctctccactctgatgctgtgccctccacatgtcctgccctgatgctcagtctttccctctcccggtttaatccaagtagctctgcagggtttggaggtccatgcaaggggattttactccctcctcagaatataggatgatggcctttctt

SEQ ID NO: 32789 - DNA, 1011 bp, Artificial sequence
  DNA replication origin
caggacggagggaagggaagataaacgtgagagccagggcagacttggagaccctcttgggccccattgcagatgagggggtgaggtcaagaggtcactgaccattcaccgtcccactgtccagcatccactgcgggccgggtgcttttctcagtgtggaggtagagtggtgataaagacgcttgcctctgccctcagagcaaaaccaagtggaagcaaactgagaggaaagacggcattcagaataaaggccatagagaccgtgatgccatagagcggttggtggcgggccagtgagtcaagggcgagtctctctgtgaagatgacatttgggcagagacatgaatgaggagacagagttggggaggatgccaggcagggcagaagcctggcaggggccgggggtaagagctggggtttgctgagcagctgagggcagcaggtggggcggggccggcagggatgggtggggctttctcaagtgggcggggatgtgggtggggcacctcgggatgggcggggaggtgggaggggctggagcaggcagagcagatgaagccagaaggactgggaatgtttctccaaatgcaatggaaagccactgtagaattttaagcagggggttgacttgaggtggccgttgtgttaagaacaggctccagggtggcaggagtggaagtcagaagaccactgggaggctgtggcagtgcccaggtggcctggactagggcgtcagtgtcagggagtgaaggagtcggcctgggatgtgttgtggggatgctgccaacaggaattgcagggtgatgggctggggcaaaaagagtaagaggaatccagccagggtcctgtgtccgcctggcaaatttactccattgagcaaagccagacacacaatcacacccagccatattttcgttagtgctatttgctttttgtttttgttttgtttgtttgttttttgagatggagtctcgctctgtagcccaggctggagggcagtggcacgatctc

SEQ ID NO: 32790 - DNA, 945 bp, Artificial sequence
  DNA replication origin
ccaacaggaattgcagggtgatgggctggggcaaaaagagtaagaggaatccagccagggtcctgtgtccgcctggcaaatttactccattgagcaaagccagacacacaatcacacccagccatattttcgttagtgctatttgctttttgtttttgttttgtttgtttgttttttgagatggagtctcgctctgtagcccaggctggagggcagtggcacgatctcggctcactgcaagctctgcctcccaggttcatgccattctcctgcctcagcctcccgagtagctgggactacaggcatcctccaccaagcccggctaagttttttgtatttttagtagagacggggttttaccatgttaaccaggatggtctcgatctcttgaccttgtgatccacccgcctcggcctcccaaagtgctgggattacaggcgtgagccaccgcgcccggccagtggtatttgtttttaatcaccacacagagctattgtgaggaccaaataaagaaatggatgtgaaggcgtgctgcgaactgcgccatgtggggtgttttctcattgttcaggtagcattcagcgtgaggccggtgttttcacagcctctcctcctcccccacccccagtgccattaacatcaacttggagtttcccgagggatgatttagcttcctgatggtccagaagctgccctgactctttctcctgctggctgatgggggtgggtttccacaatgcaaagtgcctacaagctgtcaacaagttcaagctgatcaactccaggggagaaggtggtaggcattggggataagaggctatgacatctcaggagggtttattcatccttggggcacgtccttccaatactattcacaaacttacagtgatttagagaccctctgttgggcgggactaatgatgttggtaccggtgctctggtcag

SEQ ID NO: 32791 - DNA, 1256 bp, Artificial sequence
  DNA replication origin
cagacacggcaaccatccgatttctcaatcccttccccacctttcccccctttctactccacaaaaccgccacggtcatcatggcccgttctccatgagctgctgggcacacctcccagacggggtggtggccgggcagaggggctcctcacttcccagtaggggcagccgggcagaggcgcccctcacctcccggacggggcggctggccgggcggggggctgacccccccacctccctccctcccggacggggcggctggccgggcggggggctgacccccccacctcccggacggggcggctggccgggcggggggctgaccccccacctccctcccagacggggtggctggccggccgggggctgacccccacctccctcccggacggggcggctggcctggtgggggctgacccccacctccctcccggatggcgtggttgccgggcggagacgctcctcacttcccagacagggtggctgccaggcggaggggctcctcacttctcagatggggtggctgccgggcggaggggctcctcacttagacggggcggttgccgggcagagggtctcctcacttctcagatggggcagccgggcagagacgctcctcacctcccagatggggtcgcggccgggcagaggcgctccccacatcccagatgatgggcggccgggcagagacgctcctcacctcctagacgggatggcggctgggaagaggcgcccctcacttcctagatgggatggcggccaggcagagacgctcctcactttccagactgggcagccaggcagaggggctccccacatcccagacgatgggtggccaggcagagacgctcctcacttcccagacggggtggcagccgggcagaggctgcaatctcggcactttgggaggccaaggcaggcggctgggaggtggaggttgtagcgagcagagatcacgccactgcactccagcctgggcactattgagcactgagtgaacaagactccgtccgcaatcccagcaccccgggaggccgaggctggcggatcactcgcggttaggagctggagaccagccaggccaacacagcgaaaccccgtctccaccaaaaaaatacgaaaaccagtcaggcgtggcggcgcgtgcctgcaatcgcaggcactcagcaggctgaggcaggagaatcaggcagggaggttgcagtgagccgagatggcagcagtacagtccagcttcagctaggcatcagagggag

SEQ ID NO: 32792 - DNA, 920 bp, Artificial sequence
  DNA replication origin
gaggagcgtctctgcccggctgccccatctgagaagtgaggagaccctctgcccggcaaccgccccgtctaagtgaggagcccctccgcccggcagccaccccatctgagaagtgaggagcccctccgcctggcagccaccctgtctgggaagtgaggagcgtctccgcccggcaaccacgccatccgggagggaggtgggggtcagcccccaccaggccagccgccccgtccgggagggaggtgggggtcagcccccggccggccagccaccccgtctgggagggaggtggggggtcagccccccgcccggccagccgccccgtccgggaggtgggggggtcagccccccgcccggccagccgccccgtccgggagggagggaggtgggggggtcagccccccgcccggccagccgccccgtccgggaggtgaggggcgcctctgcccggctgcccctactgggaagtgaggagcccctctgcccggccaccaccccgtctgggaggtgtgcccagcagctcatggagaacgggccatgatgaccgtggcggttttgtggagtagaaaggggggaaaggtggggaagggattgagaaatcggatggttgccgtgtctgtgtggaaagaagtagacatgggagacttttcattttgttttgtactaagaaaaattcttctgccttgggatcctgttgatctgtgaccttacccccaaccccgtgctctctgaaacatgtgctgtgtccactcaaggttaaatggattaagggcggtgcaagatgtgctttgttaaacagatgcttgaaaggcagcatgcttgttaagagtcatcaccactccctaatctcaagtacccagggacacaaacactgcagaaggccgcagggtcctctgcctaggaaaaccagagacctttgt

SEQ ID NO: 32793 - DNA, 1185 bp, Artificial sequence
  DNA replication origin
gcggccgctcgcaatcacccagatttcaagagcgtgggtggcgccccgagagccacgcccctgccctttcacctacttcctggggctccttggcggggtcccagcgtaagatggtcctaccccacgcgtagcgctgcccgcctcaccccagcccgagggagcccaggggacggggctcggatagaccacaacgcgccttgagagcggactctttcctcacatcctcatttttagattttctccgtttccaaaccgagagaatttggtttgacacctctcacccatcatatcctagccccgacaggcgatgactcttcccctttgtctccgccaacaccctaaacactgggcaggagccaagggctgaggaacttggcgcgcgggcggccgcggccgccagctgggggcgggaccgaacgtcctgtgggcggggcgcggcggcggcggcgggattggctggggcgggcgggtgcgcagtccgctgggcagaggcttgggccgccgagctggacccggaccggttttgggtactgtactgggggcagggcagagaggtgggcggcagttggggtgcggtgattgtagtaggctagggcgctttcgggtccccattgcagcccccggatgagcccgcagtattttccttatatgatcaggtcccattgcgggcggcgccgcttgcccggagcctgagaggattatgaaaacgtggcgagcgaaatggggccaggggacctggagcaggggcgtgaggagagtaggcagcgggtgaggctggacgggagggaggtctagggaggcctctgccgcgggcactgtgagtcctggccgatgatgacgagaccactgcgcaatctgagttctgggaaccaggtgatggagtatgttctgagaacagactgaggccgggcaagcaggaggcggccgcggcaggggagaggcggagagcccctcgataccagggctcggagggccgggctgcctagcgagggcttcttttgagtgcgtaggggtggtgggtggcatggacggtttctctgagtcgtcagcgaatgccccccctagaatcctgcttttcaaacactttggtgacactcttgcaatgttggggtgtttttaaatccaaatttgtattatgaaaacttacaaacttacagaaaagtgggaagacttgtacagtggaca

SEQ ID NO: 32794 - DNA, 1283 bp, Artificial sequence
  DNA replication origin
ctgctggtccagggaccatgtatgagcaacgaaatacgaactttcattctcacaactccatgccagcggcatgatcccctttcctgtgctctacacaagaacactggtgagtagcacagccacggccatgtgcggctagttaggaaagaagccaggtctgaacacagcccatgtgattccagagaccacacccacatgtgctgtaccacacagcactttaaactgtaaagtcctaaccaaacagaaggagtctgaatccttgatccactgcttcccagctgtgtgacctgggcaagttactagagtgagtctctgtttccttcagtgtaaaatgagaaagcagcagttctgacttaaagggaggttgtgaggattaaaggagggatgagtctggtagaggatgtgctccaaaagcatgagcttccatcattgccaaagcactgtggcctgcagagagctgcaccaaggaaagggggctgtggctgctgctgaggaaaagcatgtgggtggctcccctcccacttccatcgtatgggcagaacaaagaagcagtgggtcttgccatcgagaatagcagctggacacagcaggagctggggggaggatgagagtaggtgtggggagtggaagatgggggcaggtgcaagggcaagtaggagacagagggtgggggctgtgcaggaggtgaaggaaggggtgtgggggttgtgctggggatggagatgggagcgggggctgaaggaggggcaggcagcatagggtggcacagagggtccttacctgtcaccaggttccggatgaggagggcctcgtcctctttgtggtactccagcatgccctggaaatccttctctttccgctggaccgtgacctgcctgttgagctcatggcgcttcctctcactctgggccaatgcctgggcagctgagcaggaaagaaaacaggaagcatggatgagacttccagctgcaggcctgagggtagcgggcatctctggcgggtggaggatgggacctggggcaggggaaggggcatctctggcaggtggaggatggcacctggggcagggggcatactgggttctccaaacttccactctctttgcggagtctgttcctacagccagagccacaccccaagtgtgaggagctcagcatccagcactggggtccacactctggataggggagaggaaacatccgaaaagacagcaggcaggtttcagaccagagaaaacttgtgaaggatgacagccagcatggtctctcaccgctcctgcatag

SEQ ID NO: 32795 - DNA, 1087 bp, Artificial sequence
  DNA replication origin
gccacaacgtggccatcgtgacacagccgcagggcaaacccaggtgttcagggcaaggcctggacactgtctgtgacctgtgggtggtggatcagggtggtgatggtgatagtaaggacacgtcctcagccactaaatgcaggttcaggtttaggaagctgccaagtgcagtctttgcaactacataagatgatgactatttgggaagagtttcagtggcagggttgaaggtataaaggcctggtcaaccctcactcaggcctctcctcagcctcacaccatggtagagggacagtgggcaaccacagcatcactcccaaacacatctcagtgctgactgcacacgggacgctgtcctaagcacgggaacagatacaatggcatgcttaatctgtccctggccagtcgaactaaggagacacatctgtacattcacatggaaacactatgacacagctcagtcaggcaccaagccaggagtgtgtgatgtgggtgctggtggtgatgggctggaaggaccccacggaggaggtgggatgaagggtgggtgctgatgatgtgggtgctgatggtggtggggctggaaggaccccacagaagaggtgggatgaagggcgggtgggactcttacatccaggttcaaaggagctgatccactgggaaaggaccaatggaagaggaccaggacgagtgacacccagggaagggtgctccatgaactcctagtggctgaagggaggctctgagtggaggtgggggagagtgtgagaggatgaaggctggcagactagggctgggatttcattctgcaggcaataaggcaaaggcaaaggccagacagtgctgtgaaaaaacaggactgggaagctactaagcaatctgggaacaggggacaagaactggacacaagggtaggggcagacacagagaaacatcagaaaagagggagtgataggtctttaggagtaagcaaagcttgaagccaagagactaggagaatgagaaactggaggaatagcaaatccaaagttggtgggcacatgggcagatatgaagagaagtgtccccctggatagagatcacagac

SEQ ID NO: 32796 - DNA, 1001 bp, Artificial sequence
  DNA replication origin
gccatgtcggtgggcgagctctacagccaggtgagcgcggccgcgagggaggcgccccggggccggggtggcgcgctcggggccacctagtactcagggtcgccttctccctcggctactggaggcgggaggtgacgggagacccccctccgcggtgtcctcctcgtcactgtcctcggagtccctaacttcggttggcggagaaagtttggcggttccgggaacgcccgcactgaccggccacccggctcctagaggttccgcagcgccacggctcagcaccaagccagggctgtcgccccctccccgccgcgcccctcactttcgttgcctgggctcggctccaaccgagttccccgaacggcagggcgaccctgccagctctgagcgccgtgcgcgggacgggcccccgcggtgctcccgctgctgtcccctgtccccgccgtggaccccaccccaggggctctgcggcgccggctctcgagggcgcgcctccgaggcgtcctttcctcccgcatacccacaacagggaaccctggacttgggagaggtgggggttctggacttggtggagagggaggagacaacctggcgtgagggcgcggcggctggatggagtgagggtaagcaatgggtagaggggtgcgccgttatctccggagaccccagggaagagcattgtgaatttgctggggatggatgttttgacgcggcctctttggtacaaagagggcttcagtgactgcggggagggggttggagtaaagtcgaaccgggagcagggtgtgagtttcaggatgccttcaaggtcagaagggatgtgtgaggctgggtgctccgaatcgggaacaggtgcagcccgggcggagacgcccgcgttccgcagcagttgctgtggttaaagttagggacaagccaccgcttccaggggagctcgcggcagcgctgcagccgcccgggacccctcgagtttcaacctggagtcagtagtgagaggggca

SEQ ID NO: 32797 - DNA, 1248 bp, Artificial sequence
  DNA replication origin
cccgcctggcgccatgttcccgggctggcctggagtttctcgatcttctcgctcttctccgacctgccccgccggcttcccgcaggcgccgcggccggctcgctcccggcggcgcgacctttactcccgccgcggcggcgcagctacggccggacaggagttgcgagcgccgggggaggaggccgcgccgcaccactcccctcccaggtgtggggaggaggcgagggccggcgaggagggaggacccgctcgcgtcagagcggacggcccgtgcgccgccgcgcctctgagccctgccggtgcccggcccgacgcgccctcccgcgcccccgctgccacctgggcctccgggccgggggcggggcgctcagagaggagctccgggaccggcgcgggccgccccctgctggacgccgcgcgcgcgcaggcacaggtgcgccccggcgcccgcacctgccctgccgcgctccgcttccacccgcaccgggccccgcggagtccggcatgaacgcggtgcagacaagaaaagggaagaggaactaaccagagaggggggaaaaaagagaagcgtctatggctggaaggccccagacattgccctcgattttacctggctgtattcagcgctttcatgattaaaattcagttactcgtagatcgttattaaggcgacctggatatacatacaccagggatcttctccttcaaactgaactctctgcgcggaaatccttgtcagtaaagtgggagtcgtaactccttctgtacaaatattgtccactttcgcccacagcctccaaggagactccaggccactcatctcagagggcttctgcttttccgggaagtctcacgttctcccaacccccgtctcgtctacatgcagactccgggtccttttgccactcactacctcgtttatttgtgttccctctctgaccatggcacttggctgcctgcagcaacttcagctcctctcctacttccagtgaaaagtagaaatttcaaccaagaaaaaaaaaaaaaaactgccagaagtctgtggagggagacgaggggctgtcagaggagacactcccttctgaagctgacatctgtccctgacccaggggtggcccctgaaaagtggttctcaaccggaagatatatctgtaccagccggggcagttgttcaagagccccagaaggtgattctcagaggcatcccacctggaactcaagatcccgttgtaattcacctgtgcaggc

SEQ ID NO: 32798 - DNA, 1846 bp, Artificial sequence
  DNA replication origin
gagtgcgcaggcgcgaagcagcttccttgccgcgttcggtatcggctgtggagaccgcgggagggaagggagggcgcaggcgcaagccctccccgaccgcttcccttcaggttgaggctggaaagcgcatgcgccagctagatgggcagcgaggagagccgcaactgccagtccctcgaaggggttagctgtcgttgaacgtcagcacgcagatgcaactggctctcggcaggggggcgcgcgcaccgctgcggagcgccggcccgtaggcgcgggagcctccctattaagggcacgcgacatcgaggcaatagtgcgcaggtgcttagccagaggcggagcccgagaggcaggcagcggacttccggttccgggagcaacgaacagccgcggaggcgacagctaccgcttcagaggaggcggccgcggaggaggaggaaggggaggagggcgaggcgggaggtgcaggagggaccctcgccatgggtccacgggcctagagtggcggaagataccggcctggtgccaaactggtgagacagccttggggctggacgtggagagcgctcaggcggaggatgggaaggaattgtggctcagaacgctgacggggaggaatgaagggccctcaggccgataagggggaggaatggcggcgtcggaatactgacgaggagaaatggggggatttaggctgaggacgggaaggaatgcagctctgaactctgacaggtaggagtgtcgggatcctgggacgaggacggagaggaatggtggagatcagaacgctaaagggagacatcggggcatctgaagttgagagagaaatgggggttcagaactctgagagggagaaatgaggggccctcaggctgatgacaggagaaatagaggctttggaatgctgaaagggaggaataggaggccccatatagaggacgaggagcagtaggggatcagaatggtgacagttagggatggcatgatcccgggacaagaacagagagaatggaggagggttcggaatgctgaggggagaaattagggtctctctggatgataagggaggaatggaggatgagaacagtaaggaggagaagtggggaactttttggctgtagaggaaggtttgggagctcagactagggagaaattgtgggtgagaacattgaaggagaagaaaaataaggggggaggtcttgggctgaggaaggggaggcatgggaggcttccagtgtgaggaatggaaaagatgaggggctgttcaggctatgggttggagcagttgtgtctcgcagaggaagtcgaggttgtaacactgaggtagcaggataagaggacatcaggcagagaaggaatggagtggttaaaacactgaaggagggaaattaggaactcctgggtcaaggaaggggggaatgagagactactgaagtcaagtagtgagggcaagagaaatggggccctttggggctgaggatggggactatgggggtcttggggtgataaaatagagggatagaggcccttaggtcagtgacagggaggaatgagggggaaggatgaaaagtttctggattggcagtgaggagaaatgatgggttgtcagtctgaggatagagaggagtaggggattaggacactgagaataagaaacagggatccttgggttgaggaatgatgatatcctaggcccagaataggaaagaatggggtgagaatatgaggggtttcttttccatatatgggctggttgcctgtggcaggtcctagggcttgggcaagcactaatggataccagtgatttgtgtggcctggggcacagtgttgtcccttcctagagcct

SEQ ID NO: 32799 - DNA, 920 bp, Artificial sequence
  DNA replication origin
ccgcgatgggaagtccgcagtgagttacgcggggtctgtgaggcgccacgatggagggtcgccatgacccattagcgagtgtggacgcagggagcgggtgtcggtgggtgcgtgatgggaagtatggagcagagtaataggatgtcagaggaagggatgggggtcagtggggactgtgatggagaggttttttgggggccccgatgtgaaatctgcaggcagagtggggatccctgctgaccacggtggagttgtaatggggggatgagccgccacggtgggggctgcttaaggatccgtaatgggggtgtcctgcaggagggagatggttcagacccagagcctccagatgccggggaggacagcaagtccgagaatggggagaatgcgcccatctactgcatctgccgcaaaccggacatcaactgcttcatgatgtgagcgcgggagagatgggcggggctgacactggcagggtggggtgaggccgatgggccgcgcccctcacatctccatcgcctgccccatcctctgcagcgggtgtgacaactgcaatgagtggttccatggggactgcatccggatcactgagaagatggccaaggccatccgggagtggtactgtcgggagtgcagaggtgagggccatggatggacagggaaggcaggtggggcttcaagggaggaggaggagccacaagggggggttatggggattagtgatacacgtctgtggtgagctggaatggggctccattgtgagtaatagaagatcccacgggaagaggcagctctgccctggacaggggtgcagagtaggtgggtgggtcagtaagggagcgaagaggaagaaagaggttttgggaccattcaagccatccagtgctcactcactttggccctactctctgccccacaga

SEQ ID NO: 32800 - DNA, 738 bp, Artificial sequence
  DNA replication origin
gtgggcgcctttgcaaccgcctgggacgccgccgagtggtctgtgcaggttcgcgggtcgctggcgggggtcgtgagggagtgcgccgggagcggagatatggtaagtagcgggtccagggaggggttcggcggtggaggtcggtcggttggcaacagtggggtctgtcggccgactcaggggtctgtggtgagccataaccggagtctgtggactgaacggcgggagtctatgggcagaatgatgaaccatctgggagttctatggtgagccacggtggggggctccttaatagaagtttagtggggactccgtgtggcagttccgtgggaaaccatgatcgggggttcttagggcagagggataagcgggttgtaaggagtcacattgagtggtctgtagtgagccgtgacgaggagtccgtgtccgggtatccgtggacagccgcgactgggggtgggtgcgggtgccaggtgggtctatgagataaacagggaggggtgcgtggagaaccgcgatgggaagtccgcagtgagttacgcggggtctgtgaggcgccacgatggagggtcgccatgacccattagcgagtgtggacgcagggagcgggtgtcggtgggtgcgtgatgggaagtatggagcagagtaataggatgtcagaggaagggatgggggtcagtggggactgtgatggagaggttttttgggggccccgatgtgaaatctgcaggcagagtg

SEQ ID NO: 32801 - DNA, 726 bp, Artificial sequence
  DNA replication origin
catctatgaggaagtcacgcagtaggtgcagccatgttgcctgtacgtcgaggccgtacaagcagccgccgtacggactctactgacaaggtggcggcgccctcgggaaagccacattagagcgcggccatgttcccggcgaacatatggattcggccaccatacggatacgataagcaagatggcggcgcctgaggggtcttgggggctctaggccggccacctactggtttgcagcggagacgacgcatggggcctgcgcaataggagtacgctgcctgggaggcgtgactagaagcggaagtagttgtgggcgcctttgcaaccgcctgggacgccgccgagtggtctgtgcaggttcgcgggtcgctggcgggggtcgtgagggagtgcgccgggagcggagatatggtaagtagcgggtccagggaggggttcggcggtggaggtcggtcggttggcaacagtggggtctgtcggccgactcaggggtctgtggtgagccataaccggagtctgtggactgaacggcgggagtctatgggcagaatgatgaaccatctgggagttctatggtgagccacggtggggggctccttaatagaagtttagtggggactccgtgtggcagttccgtgggaaaccatgatcgggggttcttagggcagagggataagcgggttgtaaggagtcacattgagtggtctgtagtgagccgtgacgagg

SEQ ID NO: 32802 - DNA, 1095 bp, Artificial sequence
  DNA replication origin
ggcttttcctgccgccgatccagctttccctgtgacggtgaagggccgcggggctccgccgagggccacccagggctgtggggcttcccggaatggtgcggactcggggacagcccgcgccgcgaccaggcccttagtgctccaggtgcgcgccggccgcccggacgcggggttctgatcctcccaaaagcgggtcagaggttggacacactccaccaggccaaccgaccccacgcagggcccgacttctgggggctccttggtaggatgcagggctctcagtagagttcccatggggtccctcttgtggagacacaggcaggagggaccccatggggactctaatggcagctgaggggcacagcaggagttgcggggtctgcggggggccaaccgtggtcgccgccctttcccgcccgctccgaaaagggcgctcctgcctgcccacccccattttaagccagtacaataaatagcaaaatagcaaggatctttccctaagtgctacgaaaggcccaactgtgagctcctggagcgctcctcgacggagtggagagctaaccagacctttatgactattataaggcacaaagaaacgtataaactgaagctgtattattaagacctgcgacttttccaagaggaaaggcgttagacggcctttcaggcagaacccgataaatatccagccagagagaccgaggttgatgtgaggatcgcgcagattcagcttctcagtgccaagaggaagtggctagtttcagcgtccacggttcccatggtgactctcctcacttccggccgggcgcaaacgcacccctagccacccgccctaatacgaggatagcccgtgacaaccagaatgcagtatccctaaagcctctgcagtccctgcgattgtgggatcctgactatgtcaggattttggctttgcagggtgtggcaaggtgaagggtctggtactccctcttgggggtcgtggagcgttgggggtgggtgtggagaaggaggcttggggaggaagggagttagtgacctgggcccaagaccctagagacttgtccaggtgcccccactcccaggcccaaccagccc

SEQ ID NO: 32803 - DNA, 1328 bp, Artificial sequence
  DNA replication origin
cccagagccgggccccgcccccgcccactgggcccccacctgctgcggcggtggcgctggggagccgggccctgggcgcccgggggcggcagtctcccgcgcgccctgctctgccctcccgcagcctccaggccgctcagccgcgcggtcctggggccttcccggacccagtcccgcggagacgagctcacctggggagccgagccccgtcccgggtagcctggccttcccggggcacacgcggtagagctccagtcactcagaagcccttcctcacgcccgccgtgggtgggggatcctcgggctccgtccgggagggagggggcgccgagaaggcgggaagcggggatctgcctgagcccggtcgccgccccgccagccccgcgcggctgcagccgccgggggcccggtgggagggtgggtggggagaaggagccggcggggaccggtgggctctggaaccggggagacccgcgcgcgcgggaaggggcactgggccgagggtcgagggggcgcggagcccaagtgcaccggtccccagccggcctgggattccgagcgggccgcctgggctgtgaatctgtgctcattggcatgaccggaataaaactaacaaaagagaaccaacactttgggatccagaggaaagggacagaagaagccactggaccctaacactggtaataactggtgcttctgtggtgccttcagcgagcccagagctgtgggcaccgatgagggtcgtcactgaacgcggtgcgtcccgttggaatggttgaggcgctgcttttctaggcatagaaaagtctgataacctaaatattgcataatgaggtcactggtggctttagctgcccatgagccttctcctctcccaactcccaaagccttccgagtgagacctgcgttttggcactttcatagggtctgctgtgtactgcagttattcccgcttcgtcccccacctctacccccagaccctaatacaattccagacgcttaataattgttgcaagaattcgctgtcgaattttagcgtgggcaaaacataaaaatgaaggattgtgggatcatattggaaaatgcactaagggtttgcacagtgatggtggtatgaagggtaatgagtgttggctgccattagtacatagttgcgctgcgactcctatgtgtgcaggtagtaggtttaggatgatatgctaagttagagactgcagttatcaggaccttcattaacctcagagaatagttagggataaggaaggagtgtgtaacaagcgagtgtgtgtatatctgtggtaagacattccaatgtgtcttccccaaag

SEQ ID NO: 32804 - DNA, 1166 bp, Artificial sequence
  DNA replication origin
gctggcgccgccgtccaccggggccgggcggccggggggcgaggcagacaagcggcgctcggggtcgtcggcgggcgggctggcgtgctctgggccgccctgcgtgctcttgacccactgcgcgatctccaggaagaggctggccggctcgtcctcgcgcgcccccgtgtccgccagccccgtggccgtggggggcgcgccggccgcctgcttccagtgcgacaggtccaggatgagcttgggctccgagtagtggtgcggcttgttgtcgcgccacagcagcttgtccaggtaggacggcgaccccaccttgtagtcgcaggagcgcccgtagtcggcctcgaaggcgcgctccatggacgagtgcgactgctctaggaagcgctcggagctgctgtgcgagtccttgcgcgggtccacctgcacgtcctcagccagtggcgccgaacccgcgcgcgggtcgcgctgtacctcgctggcgtcctggcaccggtcaggccgccactccaggtccgacgacaggctcacagggtacctgcaagggtacaaacagagcggtgattggatgcccaagccaggtagcttccgggagggagccaagccctctaatccctgtttgccactcacacacctgccttcgacccccatccctcaaggtgggagggtgatggacaggtaatggcgagccttgggggctcagctggggacatggattgttcggcttaactcttgtgttcttttgtacgcattcgaaaccctgcagatatttcctgcgcacctaccatgtgccagcactcactgttccagacattactgaatacagcagtgaacaaaacaaacgtccctgtcctcgtgaaactttctaggggatccacctgtgcaatgcttctcaaaagctgatagatgcacgaatcacctgcgggtcttgctaaaatgcagatgttgattctgtagatctgagatggggcctgagattctaacaagctcccagctgctctgatgctgctgggcattggacccacattttgaggagcaaggctccagtgagtgcttctcaaccctggatcagattagagtcacataggggaattaaaaataaaatagcatgtctgcctcactgcttccccccaccaattctgactgagtaggtctagggtggggacctg

SEQ ID NO: 32805 - DNA, 1271 bp, Artificial sequence
  DNA replication origin
tgtccccaccccacgcttctgcagagggcctgtgtctacacaccattaccccatgctctgtgggtgagcacacaggtttgcatgcaccaaactcaccttagcctacactatgaggggcattgctgctttgagtcccttcctttgtcatgaggtctccatgctggtgcctgacccctaagagcccttgctgttgacacctctcttttcatatcttcctacctttctggattccttgcccccaaggtcacgacgtgctctccaacacatctctgtagggtctgctgtttgtcaaggctaaatggatgatcaaactcaggaaagtattgatgaaggatgttgggtcccatgtgaaaccttctctcctaacacatttgctctatggcaggacctcactgctgtcctccaaatgagcagttcatgtagagaacattaggtcccgaggtaggtctggagaggcgctgtggttaggtgggggggccgggtgtggggtgaagggggagtgctggcagggaggttggagggattcttggaattggtgccttcaacctcactggggtaggacgcccagtggggaaagagggctgtgtctttgcgtgtcaggaaagtgcatagggagtgctgagggggtgtgtgcacaggcctgggagaagggctgattttacccacagaccccaggctgttctgacctgaaacgaagatttccgaccatgcaggggtgaggcaaatacaggggtgcgacagatgagaacatttaagtacttggggagccaggaaagtatgcttggtgactaggagaaacaaactggttcagtttccagtttcagaatacaagaaacattgctctgaataaaagaacatcgaatggtaatggacagggaagaaacatctcagaccaagtttctaacaaaaagccagaacgaccccagtagaggaagacattctatggtggacagaccctggcctgggggccaggagactgggatttcaagctcgtcctcacactaagcctgtgatcttaagcgagtgtctctgcctctctgggcctaattgcctttcctcagctgtcagttgaggctagttgggccagatggtttcggagctacctctgcaagatttctcggcatcctgccacccaggtggggcccgcagactgctgtctaaagccgtttcttccctgtgcaccacatgtggtctcccctttgctaggaaagtgatcaacccctaagccagggtcctgttcaaacccgctcccacaggttaaaggctagtta

SEQ ID NO: 32806 - DNA, 1058 bp, Artificial sequence
  DNA replication origin
ctgtctttgggcccctgggaggtatacatagtgttaacactgctaacattggtgttagcaggtccaggtgggctgattcttaggcctccaggtggattgttcaggtgctggctatggcagtggtgggctgggcaagtaggttattccttagtcctctggataggatgtgtgggatgagcaatggcagtagtgttcgtgggacaacctttgggctccaaaccagcatgtgctgttgttagcagtggctgtgatgggctgtgcacgccagtccccaggttcccatgtggtgcatatgggtgggcgctggtggtgatggtagcaacaggctgggtgggcctgtcttctggcccctgggagaagtgcatagatgccagcagtggggggtgggatatgatgatcctcaggcttctgggcatcatgattgggcaaaaggtggggggtggctggtgctaggccacctaggcctgtcatctggccttctagtggggtgcatgggcacaggctgtggtgggcagggtggggcaatccccaggctccctagtagcacattcaggtggtggtggcagccatgatggtggactgggagagtctgtcttcagcatatgtgcacacacactgcagccctgatgctggggttgggggttggggttgctgtcagtgggagtggtcccagggaggtggctctcagactctgggaagtgtgtgctttggcccctgaagcctattaaatttaaaggaaactttattgccagaaaatattacagagttggcagataattcctaggtcaatctttaagttgcttacagagaatagaatgttaaacctggagttctggaggctgagaagtctaagatcaagtttctggcatttggtatctagtgaggaccttcttgctgcaccgtcacataatagaaaccagaagggcaaaaagggatgaactttatgtccttgcatggcagaagaacagaagagagcaaacctactcttgcaagccctttttatagcagcattaatcctttcatgaggactctgtcctcatgacttaaacacctttcaa

SEQ ID NO: 32807 - DNA, 1123 bp, Artificial sequence
  DNA replication origin
tcgccgcgatgtagccggtccctcgccctcagcccggactccgcagaccgcttcccttcccccagcccccaccgccaggccgggaacggcgggggccgcacgcgcggaggccggaggcgcggcagcgctgggctctcggggccgggccaggggaggccggcgcccgctcctctcccggacccccgcccgggccccaccgcgccgggccttaccagaggtctcgcgccgcgacaggtggtacacccggcggagaggccgcgccctgccgcccgccctggcgatgctcagctcccgcgccgcccggccctccccttctgcgagcctcccggagccgccgtcagctcaggctcacactggcgcgggcggccccacacgcagaggcggcccgaagagcggccgagagaggggagggcgcgaggagccggccagccgcggggcccggaaggcgtggcccacggtggagacggacgggctcgcgggccaattggaggcaggaaccggccggaggggcgggctccgtctggaggcttagctgccggcgctggggttcctgtcctccgcgccttcctcaacccagctcctggaggttacggttctgaggcggggcgggcggcctcgtggacgcgatgctgaggatgtgagaagtgcagtgcggaggaggaggtggagctccgccgctccatgaaggaagccggggctggccgaccgcgccccccagcactcctggcccgggggtcccagtctccgaacccgcggaggccagggaagctgggagttggggtctgtcctgcctgagccacagaggaagggggagaacgggagggcaggagacggcaaaggaaggaagaagaggacccaggaaatgcgaggcttccgcacttcagcgacgctttcactttccgagctgttttgtgtgcttaggacttgctcttctgcagaattctttgccactcctcatggctgctggcaaggttattggcctgcggtgaatttaccaatcacctccactgtcacagtcaccataaatagatgctcaatgttctgcctcagaaaagcaccggaacacttaattgtcttgtccttgaaagccgcagggaccgtgccttccaacatccctaccccc

SEQ ID NO: 32808 - DNA, 1275 bp, Artificial sequence
  DNA replication origin
gtgtggggccgcccgcgccagtgtgagcctgagctgacggcggctccgggaggctcgcagaaggggagggccgggcggcgcgggagctgagcatcgccagggcgggcggcagggcgcggcctctccgccgggtgtaccacctgtcgcggcgcgagacctctggtaaggcccggcgcggtggggcccgggcgggggtccgggagaggagcgggcgccggcctcccctggcccggccccgagagcccagcgctgccgcgcctccggcctccgcgcgtgcggcccccgccgttcccggcctggcggtgggggctgggggaagggaagcggtctgcggagtccgggctgagggcgagggaccggctacatcgcggcgacccaggttccagcggccgcggctctacccggcgcgcgatttccaggttcctccgccggctggtgcctgggcgccccgctctcgcccgggagcgaggccctgggcctccaaacgccagcatctctttctcgctctttctgcacccctccacaaaaggacttctgtggctggaaaccctttggcaagcctatctcctttattcagtcgggccgagttaacggcaggagttaggctgtgtgtgtggctcctccctttaaaaaaagacttgctgcgggctggagagttctgagattggaccgattccgtctattattaaatgccatctgtggaccgggattggcaggtgtttctttcacgctggcgataactatctctgcatgtggtgttacctaggtggtcctaggtttcgactttcttttttggttccagagataattctagaaaatttacgttgcttgtggtgagaagcgtgatcaaattaacacgtgctttcttacaaaacgttttatcatcttctgtctgtggatttaccttcctgatgcttgtggctatcacctctaagcaaagaggttaatagcattgctatttctgttagtgttgcagttgataacgataacaatagtagcatgtattaattgctagtgacaggcagagcgctagtttctacacggattatctcaaaataaccctttgaggttgatactgttactgcctccactttacaaaccaggaaactaaggtttaggtaggttaagtaacttgcctaagaccacagttttaacgtgacaaagcctagattcaaactcaagtggtctaacttcatagctgcatcctccacccccactcccttaaacgtgtatactccttaagcattgctcatgttgttaagctaattgcgatgt

SEQ ID NO: 32809 - DNA, 1091 bp, Artificial sequence
  DNA replication origin
gccgcccctcctcagcgccgcgccgctgcccgcgcgggccggaccgcctcgagctcccgggccgccctgcggcggggggcctctctcgctgggcgcctggctcccctcacccgctcccaccccctgggcggccgcggagcctaggggagagcaggaagggcctcccgaggagagcgggaaggcgcgaacgcaggctccgccacccaaaccgctccgttaccgcagcggcgacgacgaccagggccgtgttgttgctgccaacttgtcgagaagccactgagcatgcgcgcgcggggaccacatccgggtaatttcagggtttggcccttttcccccgcagctttcctttctcccggctgcccccgcctcccgctccgagtgacggggagggtcgctctgcgcaggcgcctacagggcagcgccagccggcgggcggctctgaatctggacctgggcctgggcctcagcgcgggcggaggcgaaggcctgtttgagggagtggtcgccggggaaattggcatctcgttgcaaaaaagtatccaaggagcgcgggagagctcggcgtagagtgggcgtccagtaagtgtttataaatagctattagcccggcctttgttgtttttttgttttgttctgtgttgaggacctgcgtaggcacaaaaattggccttcaacagccagtcgacagctctggggagaaggtggctaggttgtaggagttcacttcgggaagaaacagacgctggcggcaccttccttctctttctggcagccccgaatcacgagccccagaggtgtttacactcgagagacgcacaggacagtcaaggaatcacatattgaagagccttgccaggcgttgcaagtgtgagtggattttgttggaagagatgtaggcgcactctcggagctggaggcgaacttcgaatcctacgacacacctgttaactaggttacctgtttgtttggtgggggaaggcataggctctgcttttgactttatgcctcttttatttcacattttttacaagacgcatgcatttctttttcatttaaaacgcattaatgatttattttcaccaaccaggaac

SEQ ID NO: 32810 - DNA, 1130 bp, Artificial sequence
  DNA replication origin
acaaaaccgccatcgtcatcatggcccgttctcaatgagctgttgggtacacctcccagacagggtggcggctgggcagaggggttcctcacttcccagatggggcggccgggcagaggtgccccccacctcccagacggggtggcggccgggcggggttcgccccccacctcccggacggggtggctggccgggtgggggctgccccccacctcccggacggggcggctggctgggtgggggctgccccccacctcccggacagggcagctgctgggcagagacgctcctcacttcccagacggggcggctgctgggcggagggactcctcacttctcagatggggcggccggtcagagacgctcctcacctcccagacggggtggtggtggggcagagacactcctcagttcccagacggcgtcatggccgggcagaggtgctcttcacatctcagacggggcggtggggcagaggcgctccccacatcgcagacaatgggcggccaggcagagacgctcctcacttcttagatgggataacggccgggaagaggcgctcctcacttcccagactgggtgaccgggcagaggggctcctcacatcccagacaatggtcggccaggcagagatgctcctcacttcctagacggggtggcagccgggcagaggctgcaatctcagcactttgggaggccaaggcaggcggctgggaggtggaggttgtagcgagccgagatcacgccactgcactccagcctgggcaacattgagcactgagtgagcgagactccgtctgcaatcccagcaccttgggaggccgaggctggcagatcactctcggtcaggagctgtagaccagcctggccaacatggcaaaaccccgtctccaccaaaaaatacgaaaaccagtcaggcatggtggtgtgcgcctgcaatcccaggcactcggcaggctgaggcaggagaatcaggcagggaggttgcagtgagtcgagatggcagcagtacagtccagcctcggctcggcatcagagggagaccatgcagagaggacagggacagggagagggagagggagagggagagcagccacattcttttcattaaaggccagggtttgatctaa

SEQ ID NO: 32811 - DNA, 2101 bp, Artificial sequence
  DNA replication origin
ccgccaccgccgcctctgccgccgccctcgggcggcccggagctcgagggggacgggctcctgctgagggagcgcttggccgcgctaggcctcgacgaccccagcccggcggagcccggcgccccggcgcttcgggccccggcagcggcggcgcagggccaggcccggcgggcggcggagctgtctccagaggagcgggctccgcccggccggcccggggccccggaggcggccgagctggagctggaagaggacgaggaggagggggaggaagcggagctggacggagacctgctggaggaggaggagctggaggaagcagaggaggaggaccggtcgtcgctgctgctgctgtcgccgcccgcggccaccgcctctcagacccagcagatcccgggcgggtccctggggtctgtgctgctgccagccgccaggttcgatgcccgggaggcggcggccgcggcggcggcggcgggggtgctgtacggaggggacgatgcccagggcatgatggcggcgatgctgtcccacgcctacggccccggcggttgtggggcggcggcggccgccctgaacggggagcaggcggccctgctccggagaaagagcgtcaacaccaccgagtgcgtcccggtgcccagctccgagcacgtcgccgagatcgtcggccgccagggtgagtgcaggggtggggaggtccagctgggcatggccccgggcgtgggtggggagacgagagaaaggagcgtgggacggaaaaggcgaacccggcgaggcccccaagtccaccgcgaaggggtctgggaggagccgagggtcgaccagatgtgaagatgggtcaccttgcgaaaacccacgcttttccgcccgtcttgcctggtaaaaagtgtgaagtttctcgggcgacccagtccggtggtgttcacgttacttgggctgtattcgtggaacaccaggctggcgtggcaccagaaacctcagtgaggtggtaaaaggtcgggctcgaggagttgtgggttcgctgttgggtacggaaagcttcgagattgcaagtttgcgccgccgagtgtcttctaaaagcgttcagcctcccttacaagaacttgttcagatggagaaaagaacagaaatggaggcctgtagacagagctcactggggagggaaggggtgttcaaatggtcggtatcaccgccatcccctgcccctccgctgttgagaaacttagctttggaaaagcagcccaactcactgccgcctatcttaactgtatttctctcggtacgtttcaactctcggaaagacacactgacacactggctgtcttttaaaactgttcagtgtgcaggatgaagaaaaaatggacactaaggtaattaagaaacttcatcggtttatacagttttcagttaattctcctcttcacttgccagcacaccagtactgcagacagactcctcccacattgttcagacaaaggacctgtgtctcagattccaggagtagatttgtgaaggtgggggaaggggatgcctggggtacctctgtatccgacatttttagggaaggtcctaagttctttatggtagcatttcccctttatgaaaggggcagatgttacctgctgccaccgcatgacaatgtggtttagcctggttgttgcatgcctctttactgttaggttgagagcattgttggggtcaaataaagagagatgatggcgctgccgcttaaatgatctcatctttcccaggtggtctaaagtacacataaataagagctctgtcgaaatggtggtttcacatatcagacttggcttatttctttcctatctgtaggattttaataaaaactcatctgaaatctggataaaggagatagcttagttcagactgcctgatgattggcacttacagacactgttcaaagctggacctttcaattgaaaggtagcttatgcttgtcgttcttctggttaatgagtttcagattcctggattgtttggttttggcgatacttagagtaataatccaggagaaaacttttgtttacatgggataaaattacaacatctcaatttggatcagaatgagttgaccatt

SEQ ID NO: 32812 - DNA, 836 bp, Artificial sequence
  DNA replication origin
ctatgcctttagcttcagccacctttttaagaggaaattgccgggcaggtgggggagggctagtcgcagaatgaaactgtaagctggaacaggtgtgaggaggggaggtgataaaaggattatagggttggggagtagaggctgaggaagaattaggacctggctccgcctggtgaggggcagcctggggaggaggggagagaccagatgggtctgtagaaaaggaagagtagaaagactcagcgacgcttggggttgggactgagagaacaggcgggagggaaagaaggaggatttgggaccagtcgcattgggaacagagagtagggaaggaacaatgtgtaaaagaatgcctggatgtcaggcacctcagaccatttgcccattttatgacaagaattatctagatcttgtaggatggaaaaatcgaaagtgccgttttctggccatttaaagccattgtcaagtttgtactggggccaagcggtgttgcagaagaagataaggcatttaggttttaggtcgggtgtgagttgaagaggttttaagctcttgagaacacaggctaagggagaagaagcaggaatggagggtggaaggttgcccatagtgaaggaggcaagcccagagaaaagagagagtagggacacggagggaaggggttgaggggttcttatcctccagaaaagtgggaaaggggttggggcgtggaaataaggggttgaggtgcagagataagaggtcagggcatggaaataaggggttggggcacagagataagaggtcggggcatggaaataagggatcggggtgcagagataagaggttggggcgtg

SEQ ID NO: 32813 - DNA, 1452 bp, Artificial sequence
  DNA replication origin
catttctatttattccagcaaatgccttctctgtctggctcttaaaatggcatgtagttgttaggttctgctgggagtcagctgggcagtatatgcgctgacccccataagaagcaggtgatacactttgatgtctcagttgaaagttgacttcctaggacccgtgtgaaattcaagtgctctggctaagtgccctgaacaggtagtagctgcctgtagctctcccctgagcctcagagcaactgtggcaccacattacactgcatataaatgcaccatgctgctttcatgttgcgtagaaattcccccttcatattacagctttgtaaatacatatggaagctttatcagggtgaagttattagagtaatctatctcccgtttctcatagaaagatacaaatgttaagctttcctcaagttttgggttcttttaatcacatatataaacacgtgtgtgtgcacgtgtgtgtatgggtatgtgtgtacgtgtgtacgtatgtgtatgtgcatgtgtctgcatgtgtgtgtgcatgcatgtgtgcatgggtgtgggtgtgcctctgggtgtgcgcatgtgtgtgaatgtgtgtgcgtgtatgtgtgtggtgtggggggggactggggatgtgtgtgtatgtgtgtgtgtatgtgtgtgtgcgtgtatgtgtgtgtgcatgggggcgggtgtgtgcaggggtgtgggtgcacatgtgtgcatgtatgtgtatatgtgtgcacctgtatgtgtgtgcacgcgtatgcgtgtatgcatgtgggtgtggtgtggcgggctggggatgtgtatgtgcgtgtatgtgcatgtatgtgtgtgtgtgcatgggggcgggtgcatggtggtgagtgtgtgggggggcatgcgcaggtgcgtgcacgggtgtgggtgcacgtgtgcacatatatatgtgtgtgtgcgtgtatgtgtgtgcacgtgtgagtgtatgcgtgtgtgtgcatatgtgcatgtgtgtatacatgttggtgtgtgggtggtgtgcgtgcgtgtgtgtgtgtgtgtatgtgtgggtgtgtggggcatgtggggcatgtatatatgtgtgtgcatgtggtttatgcgtgcatgtatgtgtatgtgcatgggtgtgggtgtgtgtgtatgtgggtgcatgtgtgtgtgcatgtgggcacgtcagtgcacgcttgtgcgtgcgtgtcagtgtgtgtgtgcgcacacgtgcagcaacatcagaacttggcagttctataaaatgacttttattcacacagtctgtttgtgagaaactacaccagatagtaatgggatcttttccatttgtaaatggcatgagaatgtgatcaaaaatgtgttctttaataatagtgctgttttgaaaaagtgaagaaaaggaagcattttgtttaggggggaaaaatggagtagaaggagagctttccaaatgttattgttgct

SEQ ID NO: 32814 - DNA, 1054 bp, Artificial sequence
  DNA replication origin
tccaagggctcggttacggaagaagcgcagcgccggctggggagggggctggatgcgcgcgcacccggggggaggccgctgctgcccggagcaggaggagggggagagtgcggcgggcggcagcggcgctggcggcgactccgccatagagcaggggggccagggcagcgcgctcgccccgtccccggtgagcggcgtgcgcagggaaggcgctcggggcggcggccgtggccgggggcggtggaagcaggcgggccggggcggcggcgtctgtggccgtggccggggccggggccgtggccggggacggggacggggccggggccggggccgcggccgtcccccgagtggcggcagcggccttggcggcgacggcggcggctgcggcggcggcggcagcggtggcggcggcgccccccggcgggagccggtccctttcccgtcggggagcgcggggccggggcccaggggaccccgggccacggagagcgggaagaggatggattgcccggccctcccccccggatggaagaaggaggaagtgatccgaaaatctgggctaagtgctggcaagagcgatgtctactacttcaggtacctccctgggggcggggagggggtggcggggtcaggccggggtcaggggtcaagagcgggcctgggcagaggatgagcgctggggcccggggggcatgtggcagggacaggctggtttggtggtggaaggtggcggaacccttgggtgagagttgaccccagtgcggtgggaggcagtgtcaaaaggtgagggcccgcaggagggcatcttatgtggaaggcgtcggggaagatggtttgcgaagaaagggttagcctggcagggatggttagtccactgaagggttaaaaggaggtgtaattcatcgaaactataaaacccagtcactgttggctcctgtcccagcctgtcccagattcatcatcacaagtgttaagcatgcacatgtggaagaatgagctatctacagtaacaaggtttcatttacttcatccaagaaagttttgtataaagcag

SEQ ID NO: 32815 - DNA, 1370 bp, Artificial sequence
  DNA replication origin
cggccgggcagaggcgcccctcacctcccggacggggcggctggccgggcaggggggctgaccccccccacctccctcccggacggggcggctggccgggcggggggccgacacccccacctccctcccggacggggcggctggccgggcggggggccgacccccccacctccctcccggacggggcggctggccgggcagaggggctcctcacttcccagtaggggcagccgggcagaggcgcccctcacctcccagacggggcggctggccgggcggagggctgacccccccacctccctcccggacggggcggctggccgggcagaggggctcctcacttcccagtaggggcggccgggcagaggcgcccctcacctcccagaccgggcggctggccgggcagggggctgacccccccacctccctcccggatggcacggctggccgggcggggggctgaccccccacctccctcccggacggggtggctgccgggcggagatgctcctcacttcccagatggggtggctgctgggcggagaggctcctcacttctcagacggggcagctgccgggcggaggggctcctcacttctcagacggggtggttgccaggcagagggtctcctcacttctcagacggggcggccgggcagagacgctcctcacctcccagacggggtctcggccgggcagaggcgctcctcacatcccagatggggcggtggggcagaggcgctccccacatctcagacgatgggcggccgggcagagacgctcctcacttcctagatgtgatggcggctgggaagaggcgctcctcacttcctagatgggatggcggccgggcggagacgctcctcacttcccagactgggcggccgggcagaggggctcctcacatcccagacgatgggcggccaggcagagacactcctcacttcccagacggggtggcggccgggcagaggctgcaatctcggcactttgggaggccaaggcaggcggctgggaggtggaggttgtagtgagccgagatcacgccactgcactccagcctgggcaccattgagcactgagtgaacgagactccgtctgcaatcccggcacctcgggaggccgaggttggcggatcactcgcggttaggggctggagaccggtccggccaacacagcgaaaccccgtctccaccaaaaccagtcaggcgtggcggcgcgtgcctgcaatcgcaggcactcggcaggctgaggcaggagaatcaggcagggaggttgcagtgagccgagatggcagcagtacagtccagcttcggctccgcatgagagggagaccgtggggagagggagacggagacggagacggagag

SEQ ID NO: 32816 - DNA, 931 bp, Artificial sequence
  DNA replication origin
gaggtgaggggcgcctctgcccggctgcccctactgggaagtgaggagcccctctgcccggccagccgccccgtccgggagggaggtgggggggtcggccccccgcccggccagccgccccgtccgggagggaggtgggggtgtcggccccccgcccggccagccgccccgtccgggagggaggtggggggggtcagcccccctgcccggccagccgccccgtccgggaggtgaggggcgcctctgcccggccgcccctactgggaagtgaggagcccctctgcccggccagctgccccgtccgcgagggaggtgggggggtcagccccccgcccggccagccgccccgtccgcgagggaggtggggggggtcagcccccctgcccggccagctgccccgtccgggaggtgaggggcgcctctgcccggccgcccctactgggaagtgaggagcccctctgcccggccaccaccccgtctgggaggtgtgcccaacagctcattgagaacgggccaggatgacaatggcggctttgtggaatagaaaggcgggaaaggtggggaaaagattgagaaatcggatggttgccgtgtctgtgtagaaagaagtagacatgggagacttttcattttgttctgcactaagaaaaattcctctgccttgggatcctgttgatctgtgaccttacccccaaccctgtgctctctgaaacatgtgctgtgtccactcagggttaaatggattaagggcggtgcaagatgtgctttgttaaacagatgcttgaaggcagcatgctcgttaagagtcatcaccaatccctaatctcaagtaatcagggacacaaacactgcggaaggccgcagggtcctctgcctaggaaaaccagagacctttgttcacttgtttatctgctgaccttccctccactat

SEQ ID NO: 32817 - DNA, 1213 bp, Artificial sequence
  DNA replication origin
aacctcccaggtggtttatccagtcgtttgcaaacctcagtgttcagcagaatcacctggagaatttgttgaaacagatcactgaaccttctccatagtttctgattgggtaggtgttatgggcttatgtcccacctcccccaaatctgtatgttgaaatcctaactgccaatatctcagaatatgaccatatttggagacaggacctttaaagaggtagttatatgaggtcatgtgggttggctctaatccaatacgaatggtgtccttactggaaaaggagtttaggaaacagacatttaagtgcagagagaaaaggccacgcgaggacacagtgagggggaagccatcaagaaaggggagacacggtgagggcgaaaccatcaggatgggggagacacagtgagggggaagctgtcaggacagggaagacacggtgagggggaagccatcaggagaggggagacagggtgagggggaagcagtcagcacgggggagacacagtgagggggagaccatcaggagaggggagacacggtgaggcgaagccttcaggttgggggagacactgtcaggatgcggaagacacggtgagggcgaagccatcaggacagcggagacatagtgagggggaggttgtctggagaggggagacacggtgagggggaagcagtcaggagaggggagacacggtgagggggaagcagtcagcaaaggggagacagggtgagggggaagccgtcaggagagggaagacagggtgatggggaagctgtcaggacgggcggagacgcggtgagggagaagctgtcaggagaggggagacacggtgatggggaagcagtcaggagaagggagacacggtgagggggaagccctcaggagaggggagacacggtgaggaggaagccgtcaggagaggggggacatggtgagggagaagcagtcaggagacggtagagagggtgagggggaagctgtcaggagaggggacagccaaggggagaggcctcagaagaaactaaccctgctgccatcttgccttggatttccagcctccagaactatgacaaagtaaatatctgctgtttaagtcacccatctgtagtatttcattacggaagccctagaaaattaatgcaataggtcttaggtgggacccaataatgtacatttctaacaaattcccattgatgctgatatcactggtct

SEQ ID NO: 32818 - DNA, 1318 bp, Artificial sequence
  DNA replication origin
ctaattgtccagcaccctaatttgtgaaagaaaggggttataaaaattaaagtcaggcccctggcaaagtcctcggtccctccgagggggcatcaaggggaggggcgggggggctggcggcgagggggagggaagcggcgggaggggaaggggtgtctcttctgggagcgccgggcgccgggagcccgcggcgcgggaggcgcggagccgcgtgcggggccgccgagcccgaaccccgcgccgccgggcgcctccgccccgccgagccccgcaggcgccggtacctaccgcccgcgcgcgagaaggggctctccgtgcaccgccggcgccgaggcggcgttcatgtctaaccgccgccgccaccgccgccgcctgctcctgcgcccgctcccgcgcctgctgcctccccgccgccgccgccgccgccgccactacagatccgcagacacacagccaagatccctgactcttaacaccaactctcttctccggggaggggaggggacggagggaaggggggagggggaaacacgccgaggcgcacggaattgcaagttcagcaaagaaatgggtgggggggctccggcggggagacgcgacttgctccgggtcgggcaggctaggatgcatccccctcgcacccaccccgaggggaaaaaaaaaaaatctcaacacctcccccgcctcgccaaaaaatacaaacgaaaattcatcgagcacctcatttttcctcagatcgtcagttacaatctgaagcctgaacagttcagtttttgcccgttgcatccctcggaggcactttgaaatttattcgagtttacatcccctcacttctttctttctcttactctcgttccctctcactcacacatccacacacggcaaagcaagtttatactaggctgcaaatacacgtgatgcaaaaagactttgccaagaggaacaatatttttctttttcgtctataaatcaagccacattttcctggggagattttcgtttcggtagttttgcgttgggggcgaaatctgaattgcatactttctttcccctcccttttaagtcacagaatagtataactgcaaacttcgaaaaaaaaaaagggcaatttttgggggtggatgttgttttgtttttgcacttgagttcctaggcacgctaagtccctgttcgccagcactgtaagtttttaattcaacatttaccattataggccctgcatgctcttaaaacatactttttcacatcactttttaggataaaatttaagcttcataattctatcgtttcgtaataacaagcgtgctttatccggtat

SEQ ID NO: 32819 - DNA, 975 bp, Artificial sequence
  DNA replication origin
cctcacccacagttctgcgtgattttcctaaaatgttgcacctagaatttactgcagtattttgttactttgcccggaaacctttaagatcatagcctgatgctgtatggagcatagtgggcattcatacacttgtttctcaataaatatctcctgactaggtaccaagcactcttttaggcactaaacataaccataaacaaaagagacaatttctatcctcataaaatttacgttctacttgggaagaaagacaataatgttttgtttatttagcaaaatatttgggttcttagatattgatagggagaaaaataaagcagagaaaaaggatagaaagtgagggaattcagccgggagcagtggctcacgcttgtaatcccagcacttagggaggtcgaggtgggtggctcactgaggtcaggagtttaagaccagcctggcaacatggtgaaaccccatctctactaaaaatacaaaaaattagtggagcgtggtggtaggcgcctctagtcccaactactcaggaggctgaggcaggagaattgcttcaacctgggaggcggaggttgcactgagctgagatggcgccactgcacactagcctgggctagaagagtgaaactctgcctcaaaaaaaaaaataaaataaaataaagtgggggaattggccctggtgagcttgtggtggggactagggtgttgcaattgtagatgagatggccaggaagctggtggtgagaaggtgacatttgagtaaagaatgagggaggtgagtgagctgggctttgagtccagcccggatacctggagaagagagctctagggagggacagcagcaaggaaaaggcccagagttaggaccgtacctgtaagaggtgacagcgtgcttgctggcagtcctcacagccctcgctcgctctcggcgcctcctctgcctgggctcccactttggcggcacttgaagagcccttc

SEQ ID NO: 32820 - DNA, 1187 bp, Artificial sequence
  DNA replication origin
aggagcagattgggtaataaaatgtattttgagaataagacggccttttgaccttttagggtctagggctgtaaagtgtctcagggttgctgctgaacgagtcatgaattgggctggatttttatatttgatgaaaaagagcctaaatgctatctgatttgggataaagaaaaaggagcattaaccttgactatgcctttagctctccagccacctttttaagagtaaattgctgggcaggtgggggagggctagtcacggaatgaaactgtaagccggaccgggtgtgaggaggggaggtgataaaaggattatagggtggaggagcagaggctgaggaagaattgggacctagctcggcctggcgaggagcagcctggggaggaggggagaggtcagatgggtctgtagaaaaggaatattagaaagactcagcgacgcttggggttgggactgaggggacaggtgggagggtaaaaaggaagatttgggacaagttgcactgggcacagagactagggagggaccaatgtgtaaaagaatgcctggacatcaggcacctcagaccatttgcccattttacgacaagaattatttagatcttgcaggatggaaaaattgaaagtgctgttttccggctatttggaactactgtcgagtttgtattggggtcaagcggcattgcagaagaaaataagacacttagattttaggtcaggtgagagttgaagaggttttaagttcttaagaacacaggccaaaggaaaagaaggaggaacggagggtggaattttgcccatagtgaaggaggcaagtttaaagaaaagggagagtagagacacggagggaagcggtttgggggttcttaccctccagaaaagcaggaaaggggtcagggcacagagatacaaggttggggtgcagaaataagggatcagggcacagagaaataagaggttggggtgtggaaataagggatcggggtgcagagatataagaggtcggggcacggaaataagggattggggtgcagagataagaggtcagtgcgtggaaataagggattggggggcagagatataagaggttggggtgtggaaataagggattggggcacagagatacgaggttggggtacttgccctcctctaaaaaagcgggacttgccactaagagtgaaggagaag

SEQ ID NO: 32821 - DNA, 1764 bp, Artificial sequence
  DNA replication origin
atcgtgcagttggttgtcgtttgctggaggattccattcctgcttgtccagatgtgtcgacacaaaattatccgctttctggctcaggttttggtaagctggcttggtgtccacgtcagccttgcagtcccggcggaagctgtcaaaaaggcccctgctcttgagctgccccacgatgatagcgatgagctgagggtcgccagggggcaacgaggccgggttgatggggccgccgcccccgctggcccgggtcgaggccgggcccgcaccgccgctgccgccgccgccaccgtccgccatggctgcgcaccgggcccacaaggaaaccgattatagcttcttctccaggacagaaagcctagaatgtgtagaggtggctaagggggcggtgaaggaggagggccccaaggaggcagcggcggaggtgacggtggtggtgatggcggcggggccggtggttggggcggcggtgggggaggccagctccagaccgcggaggttgtggaagacgcggcagcaaccgcctgctggattccaagcgcgctccagatggcgtcaccgttgacctttgcattgtgaggcgggaaccgtaatctgcatttcttaaaagatctctaagagggaggtgggaaacaaatgccagtgggcaagggcgaaacagggagacaatttcagcaaccatttcagtgccctaagaaggagatggcgaggagtgaatgatcttcgtggcctggcaggtgaagaaggtaacagggatacaagagatatttaggagatagactcatcccagggattggagaacaacggggtgagggacgagggaaaggagagggtcaaggatgacccccaggcttctcacttgggcaggtgcatggaggtgccatttactaaatggagaacaggtatagaggtgaggatgggagacagagacatgatcgtgcattccatttttatttactagtttaagatgggtatgggttattcagatgcagacatctgcctatgaagtccaaagatacaaggactaggggctggggagagacatctaactcactgaaggtagagactataggtggcaattacaatggagaacttagaagagatagaggaacacctggagagcccatgagggggactgagaacaacactaaaaagatggagggaaaactacaaaagccttggatcatagaccgcaaaaggtacatttcatgaaggccatgggtgaaatgccacactatgttccacaaggtgtccattggctttggtagccattgatgagcctagggcagatgtgtcagtcagaaggaggtcatttcaacaagagaactgtattgcaaccaagagccacaaaaggcaaccacatccagcgccatccaatagagaagtgcaggtgcacagaaagaaccttctatcaatatttcaaaagaaaagcagatccctgatttcaccccaacactcacttccctgaattaaaatgcccctgagatgtagacaccacattgttctataagccgtaacatagcttaaaggtagtatatttcacaaagaaagtttacacaacagactctgtcaataacctcaccccatagcttctgacatacaagtacagatgcctcagatggacgtattctgaatctcatcccacaggagacagtgaacctaccaagacttcaccacagcaaccccctacctatgctcctcaccatccccatgatcagctcgacaattcagttctgtatttttttaaattaatcaatatttatt

SEQ ID NO: 32822 - DNA, 1009 bp, Artificial sequence
  DNA replication origin
ctcaggaactgacagccagacaaaggataagggttttgttatccacacttaaaacacctttttcatgaacagaaatgaagctgagccttccccctcactttgctacacagagttttgtcagtgcaccatatgctgtgaggaccaagtatagtttttttgtgagaaaaataacatggtcattagaaactgtgaaggaaacaatcaaaaagctgagttagaggcagagcagaggaactaaattgtccttctcctctctgcagcacttctggaccacctacccaggctgggaggagcagcagtgctgcggtgctcctttgcctgtgccctgctcccagatacaggtggcctggggtggggaggggtctaggtagatcatgcagatagaagaatgtcatggggaaggaaggaggaaagggaggagaaagaaggggagggggaagggggaaggagaaggaaggggagtgggggggagaaggaggagaaggaaggggagaaggagaagaaaggagagcaggagaaggaaggggaggagaacagaaggaagaggaggaggaaggggaggaggaaatcaggaggaggaaaaggaaggggtagaagacaggaggaggaagaggaggaaggggaggaggaaaggaggaagaagagaggaggaagagaaggcagggaggaggaggaggagggggaagacatgatgatgataagcgcttatattaccatgcagagtgccaggaactctccactctccacagcactttgaggcagctgttattattgtccccactttacagatacagaaattgaagcaaagggatgttaacaaaatgggaaataaatatttcctggcctgggaagaatgtggaagctttgtcattcacttccatctcccagtccctccttgctggtgcttgactttagcacagaaacattactgggtatatacccaaaggattataaatcatgctactatgaagacacaagcacatacatgtttattgcagcactattcaca

SEQ ID NO: 32823 - DNA, 1141 bp, Artificial sequence
  DNA replication origin
cgggctggcgtacttgggagtggtgaagatgttctcctttttcagggacacgtagctgatgagcgataaaatcagcagggcgacgctgagcatgaccagccccagcacactggcgacccgggccattttgcagtttctcatcccgggctgggctgggttcagggaaaccggggaaatcggtccattgagcggccagcagctcgctggcgtgtatatatgtgtgtgtgtgtgtgtgtgtgtgtgtgtgtgtgtgtgagcgcgcgcgcgtgtggcggaggagggggacccgggcgggggtggggggaggccaccggggccgggggttggggctggcaggagccccggagagcagcgggaccccgtaggcaggggcgcgcggggcccggtgccgagcaggaagatggaggggctgcgcggcggcgtggcgaaggagcgcgcagcgccgtgcgtccccggccgccggctcaggctcccccgcgcgtttccagcgaggctgccatctcctccgccgcctgcaagataaatgtgattggaataatgttacagttcgatctaagcacaggatttaattaatgaactctaatctcccaaataaccggggggagggggtgcaggagagggagggagtagagggaaatggtggagggagggggactgaggctgccaggctgcagcccgagcctacggcctccccggctgagggtgccggcgaggaggtggctgtggggagacgggatcccaaacttagtttaatggaccattcattactttataatatcacggaatagagagacaaataaccggatttgctgtcctggagggtaaacaacagctgggtgcttctcaaagaagcagggaggatggtttttggaaggcagctatttaaaagcatctcccctcgttaaggcaccgccccggccccctgcccccgccatcctcccaccccaaaggaagctccaaacagcaactgggcctgcctgcctcgggagcccttaaaaccttcttggaatttgccagaatgactcccctgtgcgccttgtatgcccaccacatacttcacttatccctaaagggtgggtagtgcctagcaaagttgcgaggtgacctgtgagtcgggagggcctgccttcctctccccttt

SEQ ID NO: 32824 - DNA, 1369 bp, Artificial sequence
  DNA replication origin
cgaggaccagggaatcagcaccgcggacagcggccgccccgccagcctgacccgctacgcctttgcagccccatagaattgtttttggagaaagggcagaggaaaccggagacccagggaaagtctgggggtggttcctgccttaacctcttccttcccaaacccacgtccgatttcacttcctataacttggctggggacccccgggggccgccggcctactccgctcctcggtccaggcgaggctcctctgggttcctcgcctcggtcccagcttggaccacaggtggcactttgtagttgccacctgcccgtcaggaggccctgctgggagagttcccggggtcacagagcggggcgggggctctcgcagagcggcgtcaagctgcgcctggagccttcacaggccggcccagcgcggagcggtgactccgacctggcgagggtgggcggcccttccgaggctcgcttcccgcagggggcgggggaattgcagaaatcccggaaagctggtggggggcggtggctgcgggggaaagggttgagagagaacgccccaggggcttcctgagaataaacccgcgtgtcctttgataggcgtgggggagtaaaggaggagggcgcgaggggagtccggcgcctgcgccattaaaccgccagcaccgccccgggcccggcccgcggagtctgcggacagggcgcggggagggcgctcccctcacgcctgtccatctctgctcgccgccccctcccgaacaaacacaccgtctttccctccaccctcaccctcctgaaagcctcccccaacccccatttctgaaatgagggaagggatgctgaggaagaatacgagaaatgcaatcacatcgatttggacagcggcttctaggggctttgggttaaaaaaaaaataacagggagggggaagggagaattagagagaggagtggaaggaccgcgcagttatctggcccaaagagtctcggagaggccaaaacacccctcccccacgccttcccttccccaaacaccccatcaaccaaattcccgagggcactaacacagaggcccgcactcaccggaatcccgcgtggaacatgtacattcggggcgcccccgggctggcgtacttgggagtggtgaagatgttctcctttttcagggacacgtagctgatgagcgataaaatcagcagggcgacgctgagcatgaccagccccagcacactggcgacccgggccattttgcagtttctcatcccgggctgggctgggttcagggaaaccggggaaatcggtccattgagcggccagcagctcgctggcgtgtatatatgtgtgtgtgtgtgtgtgtgtgtgtgtgtgtgtgt

SEQ ID NO: 32825 - DNA, 767 bp, Artificial sequence
  DNA replication origin
aagatgccgtgctgtgtcccccctgagcagctgcgatctgggggaaggggcattgcttcaatcgccttcgcctcaccccaaagctttcctggaggcgagtaagccgggagcaaaagactccgctatgtgccagtatagacaaacactcgtcactaacaagccacttaccgagagtccctagctgggagccaatagtttagccttttaaaatgcaggcgctaatgtattctaatgcatggtaaattcccgaggccgggacatgcataatctacgcggtcagagcaactgtagtgccctcgtcgccagcgagctgcggccggccggcggcccacgggcggcgcgggcagcagtaatgcatgcaaagttaacacaataacatcatttaattacccggtgagcccataaatctcagttatgaggcttccgaagagccctgctagattgcaaaacaaaactagaattccgggagctgccgtttcaaggtgaccaagtgctttctgcatcagcgacttggaaagaagtggggagagtgtagaaccggtgaggtggaggtgaggagggtcgctggtgtcccaagtgagcaaacttctcctgggggcagagagtaagcaaaccagctgagacggcaaccacggacctttctcctaacacgagacacacacacgcgcacacacacacacacacacacacacacacactcccgcttctctcaaatcccgggagagaaacggcggtgggcagacgacaaggaatcctggctgacacct

SEQ ID NO: 32826 - DNA, 918 bp, Artificial sequence
  DNA replication origin
gtgtaggcagccttcattcagtccatcagggcccgggggcggcgggggcggcgggggcggccggcgggcgggcaaggcgcgcgtggcggggctcggctgcgggagtgggggcgggcgcgggagtgagtggagaggagtgcgcgtgcgggtgtgcgccccgggctgcgggcgggctcgcccggggtgggggcggggtgggggcggacggggcgtgcgtgcgggagaggggaggggacggggagggagggagggatcaccgggccccgccgctcgggccggctcgcagcctcgccatgtccgagcccgctccggcgccgacgtcttctgtttgggtgagcgggagctgtccagaagggctctgccgctcgccggggcagccaacctaccctcccggacctggggcggggccacgcccgacgggcgccaagcgcaaccactccgaggccgcagctgccccgggaggcgggccttccacgggaagctaccagtggctgtggagggggcggggccgcacttttcaggtttggctgacggctcggtgccttttttacctcctttgctactggaatcaaacgtcaaggagagggagggaggagaaggtgggggggtcgctggggagagggaggctggagtgcgagcgagcgagagagattcggtgaaagatgccgtgctgtgtcccccctgagcagctgcgatctgggggaaggggcattgcttcaatcgccttcgcctcaccccaaagctttcctggaggcgagtaagccgggagcaaaagactccgctatgtgccagtatagacaaacactcgtcactaacaagccacttaccgagagtccctagctgggagccaatagtttagccttttaaaatgcaggcgctaatgtattctaatgcatggtaaattcccgaggccgggac

SEQ ID NO: 32827 - DNA, 1032 bp, Artificial sequence
  DNA replication origin
gtgtataggaaagagaaggaaagaatcaagagaagtgactcggcgcgcagacttgggccacaagcaccggacccggagccctcttcccagcagcctggcccctggctagccccggccttacctgccaggcgtaaggcggacatgcgctggaactcgggctcctgaagccacttccacatcctgcggaaggtctccctgccagatttgagtttactccacggttttggattccggagcaggtcggagagagtcccctgagaccggcacagcaccctctgcgcaaagatcgcctgggggatactgtagcgcttcagctccgctgtgatgcgctgggccacctctttggtgttgatttcttccagctggcccgacgtggccacctgcgagcccgatgaggacgagggtggccgctcgcgactgggtgccagcaccggcccgtgagactgagtgtggcccgggtggtgcaggccgttcaggtgcgacatcatggccgcaggtggggtgcccaggccgcgggacaggtgttgctcaccgcgggtcagcatggcagtgtggtgcgcgtcgaagttggggctgagcattttgtcgtggcccggcggaccgtagttgggcagactctgctgcgcgttgtggaggccgcctagcccgttgcccagcggcgtggcggccagcggggacaggctctggctcatgccgggcatctccttgtagggactgtagaggttgttcatggccgggagcccgcgctcgtcgcgcatgagggtgaagctgccgctgacgttgccggacaggcgctggtggtggtggtggtggtggtggtgcggatggtggtgcgggtgagggtggtggaacttgtcagacacggtggagatgggtggcagcggctggagcggtgtcagcgtggtgtaggtgttgctcatgcccatgccaggcggagacgagtcgcaggacatgctcatggcgtggtgcagcgggatggagagctcgggccggtagtcgccgccgtccaggatcgaggccatgctggtgacc

SEQ ID NO: 32828 - DNA, 1232 bp, Artificial sequence
  DNA replication origin
ccgcggtcgccaggcgcgcacaatcagcgcccgcttaatgcaaaggcggagcctgcagccggcggcagggatgcattaactaacctgaatttttaatttctcagcacctcttcctgcgagtgctcagggtctcccggagccccggcaaatcctggcaaatcccagcaaacgctgggaccggggcaaggacggccggtgagcaaggcaaagcgctttccacctcagtctcttctcccacgtcctcccaaagcggtgaatgtgaccttctcaaccttacaccctgccctcgctgtaggtagtgacattggagctggcccgagcccctcaagcccggtcagaaagtccctgcgccaacgccaaggccagagatgggctccaggagcgctgttgtatcctggccgccggttccccgcgggggcaaggctgtgccttcagccaatgaccaaataagtttgcctatatggtgggtgggagagtagagagctcttttccctctgcagagcaaagcctctcaactgcctctgcacagggagactagtcagcccggaaaattgaaatgtgttgtctaaaagagacttgaagtgcatggggttttgaataagggcaggtcctggtttctgtgggtcttggaaagacagggctcctagaggaaaacgcacacccccatcccgcctcccagtacctgggaagatcggaaatagggcaaaggttggcacattgaggggagggcgaatgaaatgggggggggtcggtcaatgaaagctcagggacaaggagagagtaagaaagaaaaagaaaagggagaagggaaagtaggggaagagcggaagagaaagagaaaatggaagaagaaataaaaacgagaagaaagaggacgtgtataggaaagagaaggaaagaatcaagagaagtgactcggcgcgcagacttgggccacaagcaccggacccggagccctcttcccagcagcctggcccctggctagccccggccttacctgccaggcgtaaggcggacatgcgctggaactcgggctcctgaagccacttccacatcctgcggaaggtctccctgccagatttgagtttactccacggttttggattccggagcaggtcggagagagtcccctgagaccggcacagcaccctctgcgcaaagatcgcctgggggatactgtagcgcttcagctccgctgtgatgcgctgggccacctctttggtgttgatttc

SEQ ID NO: 32829 - DNA, 1070 bp, Artificial sequence
  DNA replication origin
ttctagctcagcccccgggcccattttcacgcagggagcggcgcccagctggggcgggctctccgcgaggggcgtgtctctgcctggcctcgcccgccccggcccggcagcgaatgagcgggcgcgccgggagggcgcgaggtcagggggctggggacgcgcgtggggatcgctacccggctcggccactgctgggcggacacctgggcgcgccgccgcgggaggagcccggactcgggccgaggctgcccaggcaatgcgttcactcggcgcaaacatggctgcggccctgcgcgccgcgggcgtcctgctccgcgatccgcgtaagtgggtctgtcgcggcggccgccagggccaggatccctgagaaggcgtgggcagagcgggcagctggcgcccgggccctcgcgcccgggggattcggggagcggccttgggggtgctgcgagcaaccgggcgaggggcgtcgcggagaagggagggctgagggcagcactcagggctcgggaggccgcggggagggcgcccggatccaggaggcgcaggttcaagtcccatcggtcggctgggtggcttggagcagtggctggaatttcccagagccttggttattgtcacctgcaataaccaggctgttgagaagattacgcgagggaaggtatgttatgggcctgccatagaggatagtaaggaaggcatcttcatcatcaccaccatggacatctgccctgcagttccctccctgctgaggaaagcccatggtccttggtccctctgtgcccacttctccttagcagcgggaccccccgtggggcagcctgggctagcgttttctagagatatctggggaacttgtaagacccaggaacagcctcccacgtttctgatgcaaaccgtgaataggttgtgaccacaggatgagctgatgggactgtggatctcacacacctggctgggacagcatttccaactgtgacaccttgaacaaggcacctaacctcgccagagctttggtaaatgtacattgaaatcctaattttttttttaaggcttgccttgaacatgagcac

SEQ ID NO: 32830 - DNA, 878 bp, Artificial sequence
  DNA replication origin
caccccgtctgggaagtgaggagcccctccgcccggcagccaccccgtctgggaagtgaggagcgtctccgcccggcagccaccccgtccaggagggaggtgggggggtcagccccctgcccggccagccaccccatccgggaggtgaggggcgcctctgcccggccgcccctactggaaagtgaggagctcctctgcccggccagccgccccgtccgggagggaggtgggggggtcagccccccgcccggccagccgccccgtccgggagagaggtgggggggtcagccccctgcccggccagccaccccgtccgggaggtgaggggcgcctctgcccagccgcccctactgggaagtgaggagcccctctgcccggccagccgccccgtccgggagggaggtgggggggtcagccctccgcccggccagccgccctgtctgggaggtgaggggcgcctctgcccggccgcccctatgggaagtgaggagcccctctgcccggccaccaccccgtctgggaggtgtacccaacagctcattgagaacgggccatgatgacaatggcggttttgtggaatagaaaggggggaaaggtggggaaaagattgagaaatcggatggttgccgtgtctgtgtagaaagaggtagacatgggagacttttcattttgttctgtactaagaaaaattcttctgccttgggatcctgttgatctgtgaccttacccccaaccctgtgctctcctgaaacatgtgctgtgtccactcagggttaaatggattaagggcggtgcaagatgtgctttgttaaacagacgcttgaaggcagcatgctcgttaagagtcatcaccactccctaatctcaagtacccaggg

SEQ ID NO: 32831 - DNA, 1288 bp, Artificial sequence
  DNA replication origin
gagctgttgggtacacctcccagacggggtggtggccgggcagaggggctcctcacttcccataggggcggccgggcagaggcgcccctcacctcccagacagggcggctggccgggcggagggctgacccccccacctccctcccggacggggcggctggccgggcagaggggctcctcacttcccagtaggggcggctgggcagaggcgcccctcacctcccggacggggtggctggccgggcagggggctgacccccccacctctctcccggacggggcggctggccgggcggggggctgacccccccacctccctcccggacggggcggctggccgggcagaggagctcctcactttccagtaggggcggccgggcagaggcgcccctcacctcccggatggggtggctggccgggcagggggctgacccccccacctccctcctggacggggtggctgccgggcggagacgctcctcacttcccagacggggtggctgccgggcggaggggctcctcacttcccagacggggtggctgcccggcggaggggctcctcacttctcagacggggcagctgctgggcagaggggctcctcacttctcagacagggcggttgccaggcagagggtctcctcacttctcagacggggcggccgggcagagatgctcctcacatcccggacggggcgacagggcagaggcgctccccacatctcagacgatgggcggccgggcagagacgctcctcacttcctagatgggatggcagccgggcagagacgctcctcactttccagactgggcagccaggcagaggggctcctcacatcccagacgatgggcggccaggcagagacgctcctcgcttcccagacggggtggcggccgggcagaggctgcaatctcggcactttgggaggccaaggcaggctgctgggaggtggaggttgtagcgagccgagatcacgccactgcactccagcctgggcaccattgagcactgagtgaaggagactccgtctgcaatcccggcacctcgggaggccgaggctggcggatcactcgcggtcaggagctggagaccagcccggccaacacagcgaaaccccgtctccacccaaaaaatacgaaaaccagtcaggcgtggcggcgcgcgcctgcaattgcaggcactcggcaggctgaggcaggagaatcaggcagggaggttgcagtgagccgagatagcagcagtacagtccagcttcggctcggcatcagagggagaccgtggaaagaggg

SEQ ID NO: 32832 - DNA, 935 bp, Artificial sequence
  DNA replication origin
tcgcaccactgcacttcagcctaggcaacagagcaagactctgtctcaaaaaaataaataaaataaaagtagttaaaatggtaaattttatgctttgtccattttaccataatttaaaaaatggcccagggagtggggtctcttgaaggaggttatacttaagttgagacctagaggataagaaagtaccagtcaggggaagagtggtccagtcaatgggaaccgcatgtgcaaaggccctggggtgggtgagagcttagtgctgtgctctaggaattgtgagaggccagaatactgggtgtgacatgatgctggggctaccatgggataagggaggcaggcaccaaactgcagagaacctgataggaagtcactaacatttttaagcagcggcgtgatgtgatttgattcctggttttgtttgataatccagagactgcgatatggggaatgggttggttgttggtgggggatgggggtgggggcagggaatgaggccagaagcaaggagaggaaatctgggaggctgctgcagtgtccatgagagagagaggatgggggtttgggcccgatgatgggagtggggatgagaactggaaggtaggagccgcacttcacaaggggaatcctggtcttggtgatgggttggatttgaagatgtaaaagaagagaattgttgacaattctcaaatttctaacataagcgactaaaggtgatggcatcactgagaccaaggagtagttttagaagatgaatgtagctttgatcatgtttagtttgagttgctgggacacctaggtgtggtcgggggtcaagcattggtgattcagaagtctaggttggagacacagttttgggaattgcaacataggattgggtttaaggagctgtttggggatgctggaaacgcttcggaagccagtgcttcctatca

SEQ ID NO: 32833 - DNA, 1447 bp, Artificial sequence
  DNA replication origin
gagcggagaaaccagtttggccggtccggcggagcggaggcaaaagggcggctgcagaggaagggtgcacggacgcggggcggggaaaggcgggggagccactagcgagccgcgagagccggaggtgccgccgccaactagacacgcttccccgggcccccggccagcccccgtgcgccatgcagcgctagcgcggcggccagggctggggccgggcgggcggcggcagcggccaggtgcgcagcgagcgctccgagcggcgcgcaccaggcggatgccccagccggggcccagcgaacgccaggtaagcaggggtgcggcgccgggggcccccagaccttcccaagccccttggcccggcggtgtcctgcaggttccctggccgctcccgccgcactttggagatccgggatgcggcggcagcagctgtcagcgccctcggactcccgagcccgcacaggtgggatttgggtggaggtgctgggagcccccgaggcctcggggacggcgagacacggccggctgggcaggcagcgctgcggagagttccgtggggttttcacctgcctagaggagggaaatctcggggtgtttgggttcttcgatcggtagcgacacacatgtccgggggttaagccaggtagggcttgcggctccttgggggatgccgctggctcctgtgcggtggctaccgcccctctggaagaccccggtgaccgggtcctgctggggcgctctttgggagcagatgccaacgtgtccgaaaaggacttgcgggccaaacgtatctgaccgcggcccacctgccgggagggatggagggggtgagatcgctctcctccccagctcctgtggcagggccaggtactcccagacatcttccgtgcgctttattgtgggatggggaggggaggtgatggggaagaccgacaccactgtttttccggtgactgtcgggtcgcgtccgccagccccgctgagatggctgcaggcatctccttccctcagcagtttggtgccctgcgctgtcacctcgctgtgtgcacgaggaggggcaacttgttggggggcgcggggagatgttgcagagaatggcccagtgctttaacacccctcgcccccacttctccaactccctccttctccccaaagtgaaagaaaagttctgaagtgtctgcccaacttttccgacggaggcgtgtgcctgtggtccctgccgggggttggtggctggttgcgggggggggcggtgctcggagcgcagatccgtgacggttgtacgggggagactggattgcagtaaggatgcaaattggggaagggggattgacacgcagaagtaaggaggacttgggccgcgcttctgcccggtgagtacccgctcaaccctacccgacccccttggcctgcacgcgctgcccttgggggctgcaagctcttcctgggt

SEQ ID NO: 32834 - DNA, 1714 bp, Artificial sequence
  DNA replication origin
ggaaagcccggccgggtctgcgccgccgccgcgcgcagtgagaggcgccggggctgccgcccggtgctcggcgcgctctcgggagccgcccgcccgctggtcccgcagccttccgggaggaagcggtgccggcagcgtccagggcgcgctctcgggcaccctcacctgccggcgcccggccgcttacccggcagggcgtgcgcagggtagggtgcgggaccggggggacctggaggcagaggggagaaccggccgtccgcgccgcagcacagccgctgggagcgcctcagaccccgcgcggggcgccggctccatggcgaccgggctcggggagccggtctatggactttccgaagacgaggtgagtggcacccccttcctgctcgggactccccggggagttcctatcccgcgccggcagggggaggggaaaggggccgtccccggggtgctcgtgcccagcgtctgcaggggagccccaaagcgggagcgccccggagcgggatccaggggagcttgggtccttccgcaccccccaccctccgcaagccgagctcattgtttgtaaataaagcggcgcgacgcccttggagctgggggttcactccgcagctcctcgctttcgggaggagagggagggggcatgcgtgcctctcttccctcttcctctccaagcagcgtctcccggggctgttgggcaactttccgcctctcgcccctgcagcccgggagtccatgatgcatgtcacgtctgggtcgcgcggctggagacccgggactgcggagaagccggatcgtttccccctggaactttctctctcatgattgtgtggatcagcaggcgctcagaagcctgtgcgtgcttatcccggcgggaatgggggacacgctgcgtgtgtccctcccctcgttttgcaaagtctacggccaggattgtggatttcggagcctcggtgggggaggtgttcaaggctggtggcaggtgctcctggaaacttggggaggaagcttgcagccctgccattttttcctcccgaggattcaaagcccggcacctccagggtgggtggggagaggaaagcttaattgatctcttttattaataaagcgactgaataagccacgcctcccaggcggtcggtttcactggaaagggctttgtttttaccttcattctctcttccgtgtctcccactccccccttttgaaacaatcctgctaaatcactgcctagtcctctctcgaccagccacgctcggctcttattggtatgttgctctgccaaaaaggggggtgggacgcttgtcgcgggcgcggcgtgacaggcaggctggatggagcaggtaggagtggtttgccatctggcggggtgcgcgctcaggtctggctcccctttcgagaggtgaattttacaacccaagaagcattactcagcagggaggtatttcctatcctggttgtgcatttcatgaaaagttgatgcctggaaattcaggcgttctcgatttctctttcttcccctccctcctttcttttcagaggttccctctttctctcgtgttgggggtggggttggaagaaaggctattatctgagacaggctcgcgttatggctccgctttctgcggctctcctaccctggcatggtgtgtgtgtgtgcctgtgtgctacgtaagtgtggaatgaaaggtattttggggtgggaagggtgttt

SEQ ID NO: 32835 - DNA, 2716 bp, Artificial sequence
  DNA replication origin
attaaaataaaaaaagcggcctgtgctttatcattttctttaacttacatgcctgctggtccagcccagattgctgatagaggaagccctgagaaagttgcccagccagttgcccgtgcttcaagacacaaagggctgactgaggcatccgtgcctacccttggctgctgctgctcagcctgcttgcatctcgtctgttttcagttatcagtggtgtgagaaaaacacaacggtggattcagaaggagaaaccaagtcatctgcatttggcctcagtgtgtggactgtcctgaaatttgagtacagatgtgttcatgtcctgggattagataaaaagagaggaaacacacagtgaattcttatggtctgtcatttcagttggccatcttctgcccctctgttctggaagcttctccactaaaatagagcacccaacttggttttctacttgctttctggcccatcttgagttggaggaatcatgtgtttcagaactcttgctggtggtgggtgggagatcaacaaatgatttcattaagctgtgtgttcttaataaactttgggaagatttgtcgcagagaaactcagatagggaccttgtgatctcagcagtcatgggtttatcttgtccacacgcgtggcttcattgggatttggttggttgcgatccagcagaactgtggcggtgttgggctctgttggggtttggttgtgagcggaactgtggtgttgggctctgttggggtttggttgactgtgatctagtggaactgtggtggtgttgggctctgttggggtttggttgactgtgatctagtggaactgtggctgtgttgggctctggagtttggttgtgatctagtggaactgtggcggtgttgggctctgttggggtttggttgactgtgatctagtggaactgtggcggtgttgggctctgttggggtttggttgactgtgatctagttgaactgtggctatgttgggctctgttggaatatggctgtgatctagtggaactgtggcggtgttgggctctgttggggtttggttgactgtgatctagcggaactgtggctgtgttgggctctgttggaatttggctgtgatctagcggaactgtggcggtgttgggctctgttggggtttggttgactgtgatctagtggaactgtggctgtgttgggctctggagtttggttgtgatctagtggaactgtggcagtgttgggctctgttggggtttggttgtgagtggaactgtggtgtcgggctctgttggggtttggttgactgtgatctagcggaactgtggctgtgttgggctctgttggggtttggttgactgtgatctagcggaactgtggctgtgttgggctctgttggggtttggttgtgatctagcggaactgtggcggtgttgggctctgttggggtttggttgtgatctagcggaactgtggcggtgttgggctctgttggggtttggttgtgatctagcggaactgtggcggtgttgggctctgttggggtttggttgactgtgatctagcagaactgtggcggtgttgggctctgttggggtttggttgactgtgatctagcagaacagtggcggtgttgggctctgttggggtttggctgtgatctagtggaactgtggcagtgttgggctctggatttggttggttgtgatctagcggaactgtggcagtgttgggctctggatttggttggttgtgatctagcagaactgtggtagtgttggcctttgttgggatttggttggttgtgatctagtggaactgtggtggtgttgggctctgttggggtttggttgtgatctagcggaactgtggtggtgttgggctctgttggggtttggttgtgatctagcagaactgtggtggtgttgggctctgttggggtttggttgactgtgatctagcagaacagtggcggtgttgggctctgttggggtttggctgtgatctagtggaactgtggcagtgttgggctctggatttggttggttgtgatctagcggaactgtggcagtgttgggctctggatttggttggttgtgatctagcggaactgtggtagtgttggcctttgttgggatttggttggttgtgatctagcggaactgtggtggtgttgggctctgttggggtttggttgtgatctagtggaactgtggcggtgttgggctctgtgggtttggttgtgatctagcagaacagtggcggttttgggctctgttgggatttgcctctgatctagcagaactgtggtggtgttgggctctgttggggtttggttgtgatctagcggaactgtggtggtgttgggctctcttggggtttggttgtgatctagcagaactgtggtggtgttgggctctgttggggtttggctgtgatctagtggaactgtggtggtgttgggctctgttggggtttggttgtgatctagcagaactgtggcggttttgggctctgttggatttggttggttgtgatctagtggaactgtggcagtgttggcctttgttggaatttggttggttgtgatctagctgaactgtgatggtgttgagctctgttggggtttggttgtgatctagtggaactgtggcagtgttgggctctgttggggtttggttgtgatctagttgaactgtggtggtggatcccaggagctgctgctgctt

SEQ ID NO: 32836 - DNA, 2298 bp, Artificial sequence
  DNA replication origin
cacaaacatcagcatcaaatggagactgttccttgcctgccatctcattgactcccccagattcttttctctgagcccactcttgagcttgcttcccttaacctcttctctctatgctcatttttcatccaagccctaggcaggcctcctgtgctggtccacaaagagcctttgtgagaatgagaaataagcacctctcctagatgcttgggagagatgcttgaagagccaatgggacctccatgacaatgagaaaaaagtaccccttcctccaggctggccatcaggtgccacagcacaccatattgtgttccactcaatgaattcaaggcagtttaccaggcaactgtcatgtgccaagatttctggacctgcaaacaccaataagacagggctggagcctctgagcctcccaagtccgctaagacaaggggccgtaggaggagggaacttgtacacccactacagccccaggagcagcagtgttctgtccccttgggctggggtgatgaggtgggcagcagtgttctgtcctcttgggctggggtgatgaggcgggcagcagtgtcctgtccccttgggctggggtgatgaggcgggcagcagtgttctgtcctcttgggctggggtgatgaggcgggcagcagtgttctgtcctcttgggctggggtgatgaggcgggcagcagtgttctgtccccttgggctggggtgatgaggcgggcagcagtgttctgtcctcttgggctggggtgatgaggcgggcagcagtgttctgtcctcttgggctggggtgatgaggcgggcagcagtgttctgtcctcttgggctggggtgatgaggcgggcagcagtgttctgtcctcttgggctggggtgatgaggcgggcagcagtgttctgtccccttgggctggggtgatgaggcgggcagcagtgttctgtcctcttgggctggggtgatgaggcgggcagcagtgttctgtcctcttgggctggggtgatgaggcgggcagcagtgttctgtcctcttgggctggggtgatgaggcgggcagcagtgttctgtcctcttgggctggggtgatgaggcgggcagcagtgttctgtcctcttgggctggggtgatgaggcgggcagcagtgttctgtcctcttgggctggggtgatgaggcgggcagcagtgttctgtcctcttgggctggggtgatgaggcgggcagcagtgttctgtccccttgggctggggtgatgaggcgggcagcagtgttctgtccccttgggctggggtgatgaggcgggcagcagtgttctgtcctcttgggctggggtgatgaggcgggcagcagtgttctgtcctcttgggctggggtgatgaggcgggcagcagtgttctgtcctcttgggctggggtgatgaggtgggcagcagtgttctgtcctcttgggctggggtgatgaggcgggcagcagtgttctgtcctcttgggctggggtgatgaggcgggcagcagtgttctgtcctcttgggctggggtgatgaggcgggcagcagtgttctgtcctcttgggctggggtgatgaggcgggcagcagtgttctgtcctcttgggctggggtgatgaggcgggcagcagtgttctgtcctcttgggctggggtgatgaggcgggcaggggcctcagcaggagtgttgccacccaaactgggccctgacagatgagagggcagctgccagaaaggatgtgagcagatgccaggcagaggggaaaacacaggcaaaggcaaaaggcagcaacttcatggcatatttagtgactgtgagtttccagtgaaggggtgggaaagggagggaaggagagagggaggaagaacgggctcacttcatgcaatctgttggtaaatacttcctgaggacctgttaggtgctatgtgctataataggtcgtggaaaataaaaataaataaataaaatagaatcctagtcatcagaggagaaaaatctaatttcaggagaaagaaacaattctaagcataaaacaacaagtcaacctcactcacagaactatgcacagcacttcccaggggtcatgggcaccccagagacagggagaggtctgctgggggacagagcagcagcctgtgtggcggaggagatgaggacccagctggtgaacataggatgggccactggaggagtcaccagatcagggtgaggttagggcagagtacgtccttgggaaaggggacagcagaaacgggacacaggcacacaagggtgagctgtggccgccccacgtgggcg

SEQ ID NO: 32837 - DNA, 1071 bp, Artificial sequence
  DNA replication origin
ccccgaagcgccttgttggggctgctgcaactggaagacaaaacaccgcttcccagagcttccagaagcatctggaacgtgctgcagggaccagcgcctgggctctgccgcggccgggccgccctggccatcggggcccaggggcagcagcctcacctggcgcacgtcggcgctggaggcgcggtgctggatgcgcaggcccggggcagcctcctccgcgcagtccacggggccggagcaccgcacgcggcggccgcacgtgccgttgacctggagccctgggtcccgggctgccctcggaggggagctcccgggggtgtccctcggcgagggctcccgggagccactctggggcgaggccctcgtggtggcagtggcggaggcctggtccctggggtcgggcgttgcgcatggaggcccatcgtcggcgccctcgggcggcccgcacccgtccgtggccccgtccgtggccttgcgctgcagggagatctgcacggaggagctgcacgtggggcgggcgtcgatgctggtcaagagctgcgggatgaacatggacgagctccgcttaagcgcacccacgcctccctgcaggcctccgccgccgtcctcccctccgttctgggcgaaggggtgcgggctgcttctccgcggtagggtgtggaatgccatgaagaagtcgtcttctctctcctggtctaggatgtctgattcgggggctgtgttgctgcgaccagagccaaaatgaaaccgaagccgatgggccatggtgaccaggggggccaggagggctagggcaagcggcaacaacaggcccgacactgccagaagtcacaaaccaaagacacaaattccaagaaaaagtgtcccatctgccaaactgttagcactgcggcaccgggagcgacagatagcagaaataacccaagtggcaagcggcattccaggcatgattggataagagcaaaaagctctcatccacactgtgacagagggtagggtggccagaaccacatgaccgcgctctccccctccaatgccagcttctggacttagaggagttttcccctactc

SEQ ID NO: 32838 - DNA, 2024 bp, Artificial sequence
  DNA replication origin
agggaagatgagctgcgctgcacctgtgttctaacagaactcatggcacaggggaccagaggcccagagtcctgttgctccccagggaggtgggctttgagagagaagcctcctctttgcatcccaaacaaccgcaggagccaggagtctggaagctgctgccttctactcaggccctctacactggctgtgtccacaccaacgggtttcatggtaccaaaattcgagttccatttttacagcacgtattttaggcattacgtattcccttcctaacatcctctgctaaaatcactggaaaattaagtaattcactggttactgcggttggaaggcaagaagagtgtaaaaaattccttggatttgagatgaaaatctgttgacatgcttatgaaatgttaacattcataaatttctatcacccacattattcctcttcatgtatatagagagatgaaggcttgtaaatgaaataatgcctggaaatatgatctctcaggcggaggagtgttcgggtaacttctccacacacattattcacatatcacatatatgcaacagctgcaaacagatgtgagaataagccctagagaggtctcgtttaatggacactttgagaatatgagaatttgcctaacaaaacagcactggccgaggtgtgtgctgaaaaggtacgataggacccacagcatcagtctgtgacaaggtaaatacaggcggctctgtcaggaaggaaaaaagggacattcctctggtcagctcgttgcagaatggcatttctagaggagggtttttctactgcaggctgtcacctgtggccaaatgagtaagaaacttgaaaaaaaagtgattttctaaattcctccacccactttgaagcgacctcaatggctaaaaagaatttacaaagagttgcaagtccatagcaataataggattcaatgtgtgaggagactttcacagagctgtggggctaaaattggggaataggcatggcattgtctaaagagaaatctctccgaggattggtgttgtaacataaaaagttcatctttaaccaaaacaaataactgcactggtagactatcaatgaccaatttgcggacatatgtacttttttttatatttaagctttctaaacttttatttccttcaattataaagtttgaaagcaaaacatgaatatgatctcaaggcaaggagagaggcctgacgccctccacgtacctccatgtcatccctctggtcactgttttcttcatcttgacctccattttttggcatataggccattttcaatcgcaaaaatcccttaactcgagacttatgactgcacacataatggaagaaaattggttagaagggttgtgacttcaaaggacacttaaaatcgtcttcagcaaaagccaaccaccacagcacgcagggcaggcatccccacccacccatacccacagcacacagggcaggcatccccacccacccatacccacagcacacagggcaggcatccccacccacccatacccacagcacacagggcaggcatccccacctatacccacagcacgcagggcaggcatccccacccacccacacccacggcacgcagggcaggcatccccacccacccatacccacagcatgcagggcaggcatccccacccacccacacccacggcacgcagggcaggcatccccacccacccatatccacagcacgcaaggcaggcatccccacctatacccacagcatgcaaggcaggcctccccacccacccatatccacagcacgcaaggcaggcatccccacctacacccacagcatgcaaggcaggcatccccacccacccatatccacagcacgcaaggcaggcatccccacctatacccacagcacgcagggcaggcatccccacagcatgcagggcaggcatccccacccacccacaccacagcaagcaaggcagacatccccacccacccatatccacagcacgcagggcaggcatccccacctatac

SEQ ID NO: 32839 - DNA, 1209 bp, Artificial sequence
  DNA replication origin
tgagcactggcaggcatcaactacatgctgagccctggagagacccagaagacctcagggggcatacagcacacagcacgtcagtcaatacctcgaggatggcagggaaagaggtgatgggagagagaatgagaatgcatcggtacagagtgggcagtgtcgagccagcaatgtggcactgaagcatctctggggaaacccttgaaggcacactgtttgttgacaggttgacaggaaggaggtgtcagagggtaatgccagaggggggtaggtctggattatgaggggtcatatgccatgctaacagttttcatttatgctgaaggtcacaagatggccaagtagaagaaggacattttcagggctgcatttcagaaatagtccataaggggctcacagctaggcgggcactggagaacagggcactggagaacagggtaggcactagagaacagggcactggagaacagcaaagcaggaaagggggcggccgacaggaggctgtgagaacagcagtcaagaagtgatcggagcagggctaggggagtgcacagacagggacgtgccaaggacggggagtcacggggcacagcaagcctgggcacggggagatggcatgaggaggggagatggcatgaggagagagggagattctgaggggatgcccaagtgtcaggtgggaggggacagtggtggcactgatgagaccataaccgatgtgggggctggggaggaaaaagtggctttagcactgggacccgtgagcctctcaggagaagcagttgaggaggccgttagacctgggaattctggaggctggaaggcagacgccggcctgagataagaggctggtggtgagcggagatgggtgcagccggagccacaggtaggatgaggaaatccagatagcaagggtgagacaaaaaagcagcgggtgcaggacagctggcagggtgacacctgcatccacagggccagcagaggagcatgcacttccaggggactggagaccagtggggaggggtgagagcccggagtgaaaggcactgtgccttgcaggtgtctctggggggagtgagctatttgtgtcaaaggcagcagaggaaggaggtagacagggctggagacaccagtactctcggtcctggggaggctgctggagaccagaggggcagcagctgaaaagacccctccctgccccatcacaag

SEQ ID NO: 32840 - DNA, 1543 bp, Artificial sequence
  DNA replication origin
ggccaggagccaccagaagctggaagaggcaagggaggacctccagaggagtgcagccctggcgacaccttgaatgcacacttctggcctccagaactgagggagtaaagctgtggtgttttaagctgcccagtttgtggtcatttgcagccctaggaaacaggtacagttgccaatagtgtagatacagtgaattattaagaaaaaaaatgtgggtttttttttttccatttttgtttctgggaccttctaaagaagcccaggaaactagggttacctccatctcgggggtgagatggtgataaggtgaagagaattgtatgcaacagagatgaggaaggggttgtatatgatagaggtagggatggggttgtatgtgatggaggtggggatgggattgtatgtaatggaggtggggatggggttgcatgtgatggaggtggggatggggttgtatgtgatggaggtggggatggggttgtatgttttggagatgaggatggagttgtatatgatggagatagggatgaggttgtatgtgatggagatgtggatggggttgtacatgatagagatagggatggggttgtatgtgatggaggtggggatggggttgtacgtgatggaagcggggatggggttgtacacgatggaggtggggatggggttgtacatgatggagacggggatggggttgtacgtgatggagatggggatgtggttgtatgtgatatagatggggatgggttgtatctgatatagatgagggtagagtcatatatgatagagatggggatgggattgtaggtgatggagatggggatggggttgtatatgatatagatgggggtagagtcatatatgatggagatggggatggggttgtatatgatatagatgggggtagagtcatatatgatggaaatgggatggggttgtaggtgatggagatggggatggggttgtatgtgatagagacagagatggggttgttcatgatgaaggcagggatagggttttacgtgatggagatggggatggggttgtacgtgatggaggaggggaaggaggttgtatgtcatagacaccagaatgtgggttgtactgtgagagaggcatagataagggttgtgctgtggaaagcaaacagatgaaaataaataggttttgtatttgtttaagcaggacaataaccttacagtctggctttgttgagagagttttctatgttcctttcttcttagatcagagaatcttatctctgcacaatctgaaagcaaacaggtgtgagggtgtggacaagtggacacagccttccctgctcagagctactgggaggaggaaggtgacggagacagagtcagggtgagaggggcacgtaggtcctgactccacgttttgcaatgccgggattgtggtggagcaagctaagggaaactgagaggacaggagagctttgcctgcttccctttcaggacacaggaactagccacccttccacctacccatgcagggcagctcagacactgtcttccagagggtg

SEQ ID NO: 32841 - DNA, 1420 bp, Artificial sequence
  DNA replication origin
gttttgaagttcttgtgtgctggagatgtggctggggtttgtctcacaggggaggcaagtaattgcaactcttctctattattgtacaccttgaaggcgaggttaattaagtcctgttgtggcatttgagggctgggatctaatttttgaagctttttgtaatgtcaggagtggattgggtaataaaatgcatattgagaataagacggccttctggcccctctgggtctagggcagtaaggtgtctaagggttgttgccaaactggccatgaacggggctgggtttttatatttgattaacaagagcctaaatgctaactgatttaggcgaggtcagataaagaaaaatgagcattaaccttggctatgccttcagctccagccacctctttaagaggaaattgttgggcaggtgggggagggctagtcatggaacaaaactgtaagctggaccgggtgtgaggaggggaggtgatagaagcattatagggtgggggagctgaggctgaggaagaattgggacctggctcagtctggcgaggagcagcctggggaggaggggagaggtcagatgggtctgtagaaaaagaggattcaaaggactcagagcttggggtggaaactgaaggaacagccaggagagaaagaagaaagatttgggatgagtggcattgggagcagagactagggagggactaatgtgtaaaagaatgcctggacgtcaggcacctcagaccatttgcccattttttgacaaaaatcatccaggtcttttaagatggagaaatcaaaagtgccattttctggctatttagaaccattattaagtttgtactggggccaagcagtgttgcagaagaaaataagatgcttaggttttaggtcaggcgagagttgaagaggttttaagtttttgagaacacagactaagggagacaaagggagaatggagggtggaaggttgcccatagtgaaggaggcaagcccagataaaagagagggtagagatacggagaagggggatggtgagcagccctgggctgcaaggtaggagaggagccaaagcaggcgtccctgcaattgacttgccaccaagggaatgtgggtgaatgatgaaggcaggcatccctgtggtgatcagacacgaatggagtgtgggtgaataatcaggcaggcatccccacagtgattaaacaccaagggaagactgtcttcctaagtccgtgaccggtgccagagttttggctccacagataaaatgtgtctcctttgtctctactagagaggaaaaagaactggaattggaaggacagggagattgaagggtagggagagagggagattgaaaggtagtcggctgggcacggtggctcatgcctgtaatcccagcactttgggaggctgaggtaggcggatcat

SEQ ID NO: 32842 - DNA, 1219 bp, Artificial sequence
  DNA replication origin
cccgcaggcggttgagggtcgcgccggccggaggggcgagcagcggccccgtgggggcggccgagggcggcagggcctgtagcgggtcccccaacagcgacatggccctcgccggcgaccccggactgccggggctcccgcccgccccgtcacgggcctcggccccggggcaccttccgctcgcctccgagccgcggaggcaggggcggaagaacaaatctggcagcgcggcacggccctcagaggaggaagctccgctccccgccccaattagacaggtttgccgaggggagcctggcctgctggccgcgccagccgcgcaaaggggcggggcacccggggggcggggcacggagcctcgaggggcgggaccttgggcctcgaggggcggggcggggctgcctactgcgtgcgtgcggctgcgcgcctccctcgccctcccccgcggtcccgggctggccgtggcgcgcgcttcaaacccagccctcccgagcaggaaaggacgggtgggtgcagctggaggaggaagcggtggaggaattacgccccggcagctcctctacggcggggaagcctgcggcgtctgggcttcctgagaccgtgggaggaggcctgcgtactcacgccagagagcggggcaagcggttctcagtcgccggctcccgcccgcagtccccggcgagcgctctcccctgactcagggactttcatgtgcccggcgacacaccagcatcctgcagtgggcaacctcagcggacgcttcctcgttttagggttagatgtgtatggcattgctagagggaagtagtgctggagatccggatacttgagttggaattggccaaaatctttgcctagacttttaaacaattactactttgcaaactgagctgtggcatatttagggctaatcagatcttggaaatgattgtttttagcaggaatcatctggtttacaccgcgtcagactgccgcccgcaatctccgtcatcaaagcaggcaaccctgtagaggatgcctttccctggaatgatccggaatggacgacacctgagctctctctgccaatcttagcaacatccaaggccattatccctttgaaaactatggcttcgtttgggacaaaaaggaagtaacttacgaaatgtgaccagtcaggtagttccctacacgaggcttcctggcccaatttctgttgccattagcttttcatcaccca

SEQ ID NO: 32843 - DNA, 1079 bp, Artificial sequence
  DNA replication origin
gctcccctcggcaaacctgtctaattggggcggggagcggagcttcctcctctgagggccgtgccgcgctgccagatttgttcttccgcccctgcctccgcggctcggaggcgagcggaaggtgccccggggccgaggcccgtgacggggcgggcgggagccccggcagtccggggtcgccggcgagggccatgtcgctgttgggggacccgctacaggccctgccgccctcggccgcccccacggggccgctgctcgcccctccggccggcgcgaccctcaaccgcctgcgggagccgctgctgcggaggctcagcgagctcctggatcaggcgcccgagggccggggctggaggagactggcggagctggcggggagtcgcgggcgcctccgcctcaggtgagctcagggccgcggcaggccgggcgcgcgggtcgagcggggtgggctgcggtggggaggtgggggcgctgtcggtggggctgagcgcggcgggggccgccggcgtgagtgagcggaggtggggaggacttcggtcattgaggcggagcggaactcagcagctccccggaacgcctggggtttgagagcggggcccagggctctggagggtggaggcaaaagtggcccagcggctgcctcgctccctgttcccacccccgcccctggtgaaagggagaagtcgaggttgaccccggaggatagtgagagaaggaaagctgtcaggggacccctaggatggggcagtcatccagaggacttaaaatgcaaaagaaagggatgtggacactgctctgggagacctaaggaaggctgggaagaagcgcaggcgaggtgatgaatgcagagggtggggtgcaggaattcatgaacattttgcaaggtattgggaaagactgacgccgaactcatcatctccctccatcaaaccaggttaccacgttctcttcttgacttcaccatgaacatgaaactcgaagtaaaactattttccttgttaggtttggaatggctgtattagggttcctgaagttttggtctcgagactcctttaccctcttaagaattattgaggacc

SEQ ID NO: 32844 - DNA, 1468 bp, Artificial sequence
  DNA replication origin
cgccccggccgcctcccgccgccccgcacccccagaggcgcacacccacccccttcccggggttggccttcgcggcggtcaagcccgggcgtctgggccgcagctcggatgacctttgttcagcgcggcgccgccggcggctgctgctgtggctgctgctgctgtcgtcggagcggcggcggcggcggcttccatgttacgggcgtgtcatctgcgttcccgctgccggggtctgtgtgtgcgtgtgcggtggagcggcctcgccgccgggccgggcggcggcggcggcggcggctcggcccgggcggcgagcgaacaaaagggagcgcgggcgagggggagggggcggccggtgggggaagggagctccgggaccgggcggcggcagcgcgaagccccgcggccggcgggcgccgacgcccggccgctgcggagccccgagtccggcggcggcgagaaggcgccccgcggacctgccaagtctcgcccatacggggccgctggctcgcggcttcgccccgggagtggagcggggtggtggggctggtgagggggcgcagggagggctgcttttttccaacgacattgcgggctctcacccagtcctttccgtggccccaagccgcgacttactcgagtggaaggaagcaaggcctcgccaaagatggttgaaaagaccgtgagcctctacccaggatcttgaagccaaggtggtggtttgttttcctcgtaatgatggcaaatgagtaagaagagagcacgctatcttcggacaaattaaatctgaaattctccctggaggtggaagaaggggctctcctctggttagttagtggtttggagcccttttcgccttcaactgagccacaaaaggatggaagacaccccctggggtggggagaaagccctggtgtaaaagacacacgtttgctttcagagaaaaagccactggggccagattgaaacatggcatgttcagttcatgtaggtttttttttttccttaatgggggaatgatattgagtaaacaagatgtaatagctaggtctttaaattctagaagggagatggtgtacaaatgtaacaagcacatattgtacatacagcaggtggtcatagcctgcggaacacaaaaagatacatatgtaagcccgctaaaggtcacgaaggtgtataatcgtgacccgtgcaagggcgagagacgatagatttccattccagatgaggtatgctgttttcccagccccgtgtcctcgttcctttattgttcacagacgtgcactccattgaaaggtttttaaaaccagacagaaacccccaagtcaagctaattgtgctgacactggaaataggacaaaatggaaggagctgaaaaaatgtcaccataacctgttaaaaaggttcactcctgtttgataggaatctgaagacacaaaaataacactcaagtagcagtgatgaccaagca

SEQ ID NO: 32845 - DNA, 2373 bp, Artificial sequence
  DNA replication origin
caccgcacacgcacacacagaccccggcagcgggaacgcagatgacacgcccgtaacatggaagccgccgccgccgccgctccgacgacagcagcagcagccacagcagcagccgccggcggcgccgcgctgaacaaaggtcatccgagctgcggcccagacgcccgggcttgaccgccgcgaaggccaaccccgggaagggggtgggtgtgcgcctctgggggtgcggggcggcgggaggcggccggggcgaacgaggggcgcagggcagccggacccaggggcgcgggtgggcgccgggcagaggcggggtgcggcccctcgtgcccactcctgcgggccggggtgagcgcgtgaggctcaggcccctgggcctgcccgcagtggcctgtcccaccctggccttggggacagccggccttcgcgccccgccagctggcttggggggccgaggaggaaccgcccgggctaggccccgcaggttacgagacgggggccacgtgagcgcggctctcctactccccccgccggcgccggccgggcacagatgcgtttccagaggcctccgtgccccctctcccactggccctgccttcgccccccgccccctccccagacagccccagttttcttcccccgaggtgaagggatttggacttctccccccaggtgcttgaaagaagagaaggttggaggaggaggaggagactggggggctgctggtggtggtgacagggctgggagagagaggagagggacggaagggaggagggggctgggtggggtgggggtgacagcagagaggagcctggtcaacaagccagcaccactgtgctaggaggccaggccggctctgcagccgacgcatcccgtgtgagcagacacacatagctcgctttcttgggggctctttgtcagccaccaacacagagagcacacactgacacacacgtacacaaagatctgagccaggttgtgggaggtaagtgggggaaggagaaggagggggaaacagtgtctgcggtgggctgtggggtggaggggaggggggatgggccctgaggggctctggggtgcttgcgaggtgagcatttccaaggctgtgtgctcgtggggtggggggacacacgatgaccttctcctcctcaggaagacctaagagggaagagcaaaccccagcgagatcccccctgtgctgatgattttcagggacttgttggcaactcagcgagggttgccatagcttttttatgtagggtgaccagaaccggctgaaactggtttgaggcagatcagctcctgaacacaatgcagtcactgagctactacagtaggatagcagcttcctcccttcatggcagccaaaagcagaggagcttgcaggaaggtaccatccctacacagtatgtgaatgcacacttagacaccacacagcactggtacgtgactaatggagccctaaaagattctgggtagagaagatggaaaaaaaggtgcaggtttgcagggtctgagattacttgggcttttcctgcctttttcttttgcttaagggatggacaaggagctgagatttatgacccttattagagaaaaaaatgtgccttgctagggtggggacacttggttgatgcagtctctctctctctttctcggtgtttataacaaaacaaaaccaaaatgaactgaggggtttgtaatggtagtttgtttgttgctggagaatgctactttgcatgctttttttctcttgcagggtatgttctgtcttgtgctttttcttttagaagctactaaagggtgttggggatgcttctgactattatgaaggccaaaaggtaacaatatcgttctaggaaatgaacataaatgcattccagtgatgctgttagccatacatgctgtcttttttttccttgtaggcctgttgactggggctgcttttaaccctttcctatttgctgagaatgcagccgtgtgacagtaactgaacattggtctaaagtctttccaaaaggtcaaggttcacaaggtgagatacgctgttttgagcatgaatttaaatatttatttgcagatccatttagacacagacggaccgtggattgctacccaggagataaaattgggttcagagtggagaagaaatgctcttaatgttatcccagtttaatgggattagagtgactttatgatggtattgcgatcaaggcgaaatctgaatgccttcattaaatcgcatgtgtctgggcaattgggagagtcaggcctggaaggaagcgagtgtggagaatggtaggcgtcagggccttgtggagaatgtgctgttttgcataagacgaaagcagtacacatgtggcattttcccgatga

SEQ ID NO: 32846 - DNA, 633 bp, Artificial sequence
  DNA replication origin
gcagaggaacgttgagcaactctagaggggtgtgtatgtggcagtttagggacagtttgagctttcaggtagaggcagcctagggaaactggcataaagcagtttctttctctattccatggaagttgcatgcttgtgaaaagggccagctatcttctgtcttgccatacaagtgggcagagctgcctgggaataccaggtgggttaaggatactgcccttaaccttaaggtggagggcagcagagggggagagagagacagagagagagagagattggggaggaggggagagagagagggatgggaaggggaggagaagagagaaggggagtggaggggaggggagggtatgggagtggagaggaggggaagggaggggagaggaggggagaggaggggaagggaggggagaggaggggagaggaggggagaggaggggaggagatctgcaagaaagaggcaaggtccagaaaaagagagagagatctgcaaggaggcaaggttccaaaatctatgggctgggacagcaaagatgtggcctacgaagagaaaggtctggagaatcagaaggccttcaaatggtggttccaaatccctccagcaaagcccatccatctttagagctcacccgt

SEQ ID NO: 32847 - DNA, 1168 bp, Artificial sequence
  DNA replication origin
aggtgatcttattccatctttcccaccttccagagagacagagtttatttagacgaggaaaggggactgggagcttcactaatttgctcaggaccgacagacagtagccagttgatgctaattaaggctctgggggcatcatcctgaaagcacgcttagggacgggggttgtggggtggacgccccccccccccccgtgccaggacctgttggcgggcatccaggttctgctggcggtcgcccagcttccagtgtcaacggtggatatcgagcacgctcaggcgggagtccgggactctccttcttcagagagtctcaggagattgtgaagcgggctgagatttcgagattccttcctcgccctagagccggcgccaaagaactgcagatactgtccagggcacgcccgcaagaactagctctcggggcggtggcgtagggcgctccaggacactctccgagcgcggcacctcaccagacgcgccttttaccgaactctgggttggcgagtgtggagcgagttggggaggttagagagtctcgcggctccgaaaaggaaaagcatctctttgcctcagttcttgtaccgctggtgatcaaccttgggtgttagggactggcaccgaaccggagatctgcttggtgaactgagaggagtccttaggagagcggggacgccaggggccgggggacacttcgctctcgccctagggaaggtggtcttgacgctttctattgaagtcaaacttgaaaatatcagctgccgctggactatggggctagcgggggaactgggagcgcgctagcatctgagccttagccccatccactccggaccccaagcgcgcacgccggctccagggaagggcgcctctggtctaggccgccgaagcgttcggaatggggacgattctctgctgcagcgaagtgtccctagaattttcacaaggaaaccctgagcttcttctcagtcctcctctttccctgacccaccctgtccgtcaacgcaccctcctcccgtaccccaatattcactcctctccccaagtcctgagcgtgcttaaacagagtcgaaacaaaacaagcatgtctttaattctcctctcaaatagtttgaaactacttatacaaaagtttctcaaactctatttttccgcctcccctgctt

SEQ ID NO: 32848 - DNA, 1115 bp, Artificial sequence
  DNA replication origin
gcggagcggggcgcccggggcgcgaaggagcgggataggaggctgggcgcgcggcccgcctgccccaaggcgcccgaggaaggctccgagccctccccgccgccagccccggcgcccgcccccgagtacgaaggtgagtgcgcacccctggctgtgcgaggccgttcgggcgcccgagcttaggagttggccagacgagagcgccccttccttaacttttattaaggcaactgggcgcggggttggggaccgtctatggcgggagcttccaatttgcattcagagaaagcttaggacccatcgccgccctcaccacggacctccccgggccatctcggagcccgcaggcgggctggccagtgcccacagcgaggcggggtcggcccaagggtgttttggggagtgcatctgaccctcccgggcctcgtcgccccagcccctcgaccctactgccccaaggagcccggggaggcacggccgagcccagggctgcccgtcgggccagccaccggcgaagcgaaactgtcagaggaggaacagcccaagaaaaagcatcggcggaaccgcacgactttcaccacgtaccagctgcatgagctggagcgcgcgttcgagaagtcccactacccggacgtgtacagccgcgaggagctggccggcaaggtcaacctaccagaggtccgggtccaggtaaagcgcccaggttgaggaactgggatctgggagggcccgaggcccaaattgcagccaatgcttctcggaattcacgggtgtccatgcatttattactgtccttcctcgacttggcatgcccagagtctcaagggagaggcacagatcttcgatgttccctgtgcatcgcccttcaagcagtctgttccagtttgtagtacgagctcccctttgggggtttccctcttctaaactcaaaatagaagatgggaatgacttgcaagatgaagaggccgacagctcattagacatagccaggaaggggttgggggttgctgagtggaaatggaatgcaggtagtgatcgagggtgacaggattggggccccaaatgccaccctcgtcactagctgcgaataccgagttggaaacgaaaaccctgtt

SEQ ID NO: 32849 - DNA, 1312 bp, Artificial sequence
  DNA replication origin
tgtttgatgcccacgacgtggccctcgacggttgccttgccctctaaagggacgcagcaaacgcttgtctgaacgcaagcgggataaagaagacacccctgctgtggagatcagagcgcctactgaaaaggagattttagggatattgtcctctaggtccttgagcttttataggaaagcattttaattcacggttcaggccaccagttcagggaaggccaagcgctcgcctcgggtctcgcctcagatttgaggggtgagacgttcacagcgccattgtccatccgcgctgctggaggtgaaacacactcaccctatccaatcatctttccaagtggccgatcagtcactgtgggccacggaagcctcgagggggtccaaaggagaaagaactgcaagccaattactcctgaaccctcggggaggcgagaggcctcttccccgggagaaggtccttccccagccagctctgggccatctccttggcccggagtgttggagggaggcgggagtgcgacaccgctgctcatcagtaaaggagcccgccctccccgcaggacaaggggcgggagcgaggaactccaggtgggtctcctgcgggacctgagcccggcagcacatccgactcggggctcccagtctcctgctgggcgatcgggcgctagaggtcaccggacttgcggacataaatggccctggggtgggcgctgcggggaaggagggaggctgccggcgctcaagtccgaggggactgggaggagttacaacagatatagacggacaaactaaacgcgaggtccgggacttcgtacaacccagccaagaaaggagtgggtcccgaaaagggagccagcgaggggaaattcaaactgcgacgagtgcggggctgggaagccttcggctgggtctcggcgcttccagggggcacaggccagggtggcggccccgcggaggtgagccagagggggctagaggggcgagtctgaagctggggaggggtgcgtccaaggagggaggtgacccccagggggtagtctgaagtgagagggtaagcccgaagtagagggagacaaacgcaaggggagagatgagcccaagggcgtcggccccactgaggcaggactaggggtgcgccgcgaccaggttcccgagcccatcaggcatcccgccgcggatccccggagtgtgtttgtaaagcttaaaacggatcaagaggtggaaggggaatattcctagtgccggcccaggggtggccactagaggaccctgtggctgggccgggtgaggacacgcccctctgtggagggagggg

SEQ ID NO: 32850 - DNA, 1409 bp, Artificial sequence
  DNA replication origin
accataagcattcgggattgtgccactgaaaaactgatgtcacatcaaaaggaacacctttcttctaatatactaaaaaggttttgtacaggctgggtccagaggtcttagggctagccaattcctgctcccaggtattctaagaagccggagaaagctccctgcaggtaaggacccatcggcgcttcccgcactctgccgcgcgggaagcgaaggttggagtcctttccccacccccggagggtgggcggggccgaaggaccgcaccgccccagacccgccccctgcgcgtggccccgcccacagctgctcctggccgtgcggccgcgcggaaagcggaggccgggggcggggctcaccccttgcccttgggggtcccccgggctctgccaatcagcgagcgccctgttggccatccgcagccatccgcgcccctccctctcccgccctcctccgcgttccagaatccaagatggcgggatccaggcaaaggggtctccgggccagagttcggccgctgttctgcgccttgctgctgtcactcggtcgcttcgtccggggcgacggcgtgggaggagaccccgcggtcgcgttgccacatcgccgtttcgagtacaaatacagcttcaaggggccgcacctggtgcagagcgacgggaccgtgcccttctgggcccacgcggggagtaagccggagcagagggctgggggccgggttcctctcccccttctgctgcctcttcgcctttcatccgcggctaccctggtgtgctgaggttcccgttccagcagctgcacaccatatgcgctgtggaggggaccctcctggcagcccctccgccgggtccctcctggttcgcacggttccctccgcttgtccccgagtctttccctcacccattctgttctctctcacccgcctgctgtcttcccttctttgatctcgtcggtactttccgttggatctagaggtgtttggttacctcctacacttcctagcactcaaacttgcttctaggtatcatgtttcacaacgccacgtctctaggagaaatgtgccctacccccagccatcccaacctgagacatgttctagaagcccccttacttcctttcccgcttccaccccccacccccgatccccgatttctttgctccggtgttagcaatggttaatgcttcgcttgaaccccatgcccactgacggctcctgagatggcatatagtagtattagagtaattttttaagtctttgtatgtcagaagacattcttatactgttggaactacacattttcctctcagtgacttggtgtggtctttgatcttttctctcgtagtaacacattatgtaactttttaggagaagggatatatttttagggattgattgtttctgaacctgagac

SEQ ID NO: 32851 - DNA, 1007 bp, Artificial sequence
  DNA replication origin
tgtgaaggagattggattggattttgggtgtaaacagtggggcatagcaaacacgggtggctgctttcgtatttgtgttttgttttgaaagtacagcgtcaacaaggcaattcttggcacttgtctgtcttctgaccttctgttggggcagagtgtggctgtcacggcctctggacaaaaaagtagggggaggattgtgagtggttgtgttgagtgaaaacaaaaagattgttggggcagaggaaaaaagtctttctaaaaatgtgggccacagattcacctgggtatttgttaaatgagtgacccgggtgcttgttaaaactaagcgtggatggggctagggaatcggtagttataaaatgttccccaggtggttcttgtctctgaaaggagagaaccactgttctgcttgcagccttttggagatgagggttgatttaggtttttcaccattgaattcttggttctgttccagtgctctcactggataggggaacatgcacccataaacgtttattggatatctgcgttttagaggcgctgtacaaggtaatgtgatcatatgcccacacctgactgtctctggagactcacatgctctgttcgggttgccaggataaatactgagtagtacaaggtaacgcagcagtccctagaaacgaacttgaaagaaaacaatgttttattccttataaggttgtagcctgtgaatcaatcatagcgtttcttgcaggtgagagcatttcatatacccaaaggttcagaccaagtggttccacggctgtcagtttatgggtgcaaaagcaccatcagttacatcgcgtacttctgctcttaaatctgttgttggcagtgaagggacaataatcaggcaaatcaagtcactccttgggcttaggaaaggctcctttctcttggcgtgtgcggggggtgaatgctgaacaaaatgagagaggtagtagaggagaaaggagtatgttcaattggcaggttaagacttaaagagg

SEQ ID NO: 32852 - DNA, 983 bp, Artificial sequence
  DNA replication origin
gcggggcgaagggtatccctgacgcgacccacggatggcagggcgcaaaggctgatacccgggagcggagggaagtgtcgcccaggacagctgagcactctccttatccccggagaagtgagggcgtgcggatcgctgtgggagtgggcgccggggaggaccgcccgcaccccgcgagccgggcgcgcatcaagcaggagctcgccctccgctggggcttgcagcgcttacctgtcgccgtcctccggctcctctctgtaggtccacgtgtgtcccaacgccaggagcagcagcagcggacccaggctcctgcccagctggcccctggcagctcctccccggctcggaggcggcggcaccatcagggaagctcccggcttcttcccagcgccgagctccgtccggaccaagcgtcctgctcctccgcggccgccgccgccttccctcttcccggcagggggcgccggagagcaggggcgtttgcaccacctgcacggggagcaggggtccggaatattatggggctggggggaaaatgaggctaggagttggggtatcggatgcaaacccagcagagaagcaggtaaagggggtacctgcggtgtccggctggcgcgagggccctgaggttcaagttgtctcgtcgggacgttcacgtccgattgacagacttgctggactcggcttggggctgcgccctcgcctcttccctctccctcctctgggagaagcgcgcagggtggggaaagcgggcggttgtttgcattttgcaccagggtctcacgaccgggaggaggaggagctgattctccaccggggagaagagggagggggaagagaggggttaataagcttccttcctgttgtccatgggtttctaaagcccagggtcaggccagtgttcgtctttcctccgtgaggacctaccctgagatttgcaactatcttagtcttcttttctcttagattatgtgaggaaggag

SEQ ID NO: 32853 - DNA, 1185 bp, Artificial sequence
  DNA replication origin
agcgggtcggtacctgctggagcccgcgcggggctcggttgagcgttcttgcgcgccttcttcccaggcatctccgccggtgccgccgcccactcagctacagagcccgggaacctcagcctccaactggagcacctcggacagctgcaggacgcgagctgaacacgaacagtcctgcaggcagggatgctgggatcgggtgtccggacgcgcggagatgccaactacacacggtgagtgcccgggaaactctgagatccccgcgccagagaccacgcttttgtccagtgagaacttccctggtgacgtagggaaactagacgcccggcccgcccctgtccccgcccctgtccccgccccgcagacggcgttatgggagcggacgcgggacgcgggcggggaagtaccccgctgagcgcgacctgcccggacacgctcccgacccgcggcggcgccgacccgcggcggggggcgcagagcgctcggccccgaaattacttccttacaaaacgaggtgggaggagaagggggtcggctttgaccatctgcaaacgctggacgtcgtcagcggcagtggtggcgggagctgggagtggcgggagctgggagtggcgggaggggaagggtttaaccaggaggaacgttgtgggtggggagagaccagaggccttggcaattagagacttgggtaaacaagcccagaaaagagattggaaaaggaaacttttcgaacttgaagagtatgggcagtaacagggaagggaaatgagaagaaccttaatcaccgcagaggagatgccagaggccctgtgagaaagctccgggtcccaggaagtcactgcaaacagaagccctggtgccagccagaaagaacatcgtgtttgagttgggaagggatttgtgtgtgtccttccagataggtcgatatcgcccattgtggatgtttagcaaaaacgagtggatcgttatcatatggaaaacgttcaaatcttttgtgggagggctgagctacctgggaacgtgaaattatttgcataatgtttggcgaggccatgagtaattctactattatgaagaggagtaattaggagtggttaacggttactgagagccgcttcatgctaaggactttgacatgcattttctcattccgtcctcagaacaaccgttgctactttacgggtg

SEQ ID NO: 32854 - DNA, 1345 bp, Artificial sequence
  DNA replication origin
cgccgtctgcggggcggggacaggggcggggacaggggcgggccgggcgtctagtttccctacgtcaccagggaagttctcactggacaaaagcgtggtctctggcgcggggatctcagagtttcccgggcactcaccgtgtgtagttggcatctccgcgcgtccggacacccgatcccagcatccctgcctgcaggactgttcgtgttcagctcgcgtcctgcagctgtccgaggtgctccagttggaggctgaggttcccgggctctgtagctgagtgggcggcggcaccggcggagatgcctgggaagaaggcgcgcaagaacgctcaaccgagccccgcgcgggctccagcaggtaccgacccgctggggccagcgaagacccaggccgggcggggtcggggccggggtcgaggtctcggctggggcgggctcagctcgccggggctcaagcacagactgcacgggggtcaaggtcgggccaggtctgtgccctggcgcgagccttaggggcgcctccagaaagttcttcggggtttttccccaggaccggcgggtacggcgggtacggcgagggaccaagccggatttgcgattgggatgcagctgcgtttcaccaggggcaaaaagctcctttcctcctctctttcctcctcgccacttgcccttccccggggccacgaggaacaagtgcaagtgtaggcggctgtctctaggagaaagtcattgtcgcggcagaaggggcaggagagagccccggggaccgcctggactcccagcgcttccagagacggccccacaagggcccctgtgttcaggagcctagaaaatcttgtaacatttaaataatcgatattgtgggaggtggggataggagaataggagttagtccgctcctttttttcattcattcattcgcactccccaccccgatacatacagctccatcgtaagttttcaggccagcgccccggccccatgctttttctaaatctaaacagagaacccagtcactgcccagagcccgaagtctgtgtgggccatactgctgttgcatcagacgattatacgccccccccaccttttaagttactttcattttatagagctcctggggcgtgcgaaggaagtggtgcattgcaaatgtgaccatgcctaagttggtaacaggctgctgtctctggcgcttgtgtgggatggaaaaagctttgtctaccttttgtgatgtcttaggattctgaccttgtttctttctgaaggatcttacttatgcatagcactttctggtccgacttaattcccaagaacaggaagcagcacaaagtccctcttaaacttgattt

SEQ ID NO: 32855 - DNA, 1026 bp, Artificial sequence
  DNA replication origin
cgcggagccagccctctggggcgaaatccccgggcggcgtgcgcggtccctctccgcgctgtgctctcccagcaactccctgccacctcgacgagcctaccggccgctccgagttcgacttcctcggacttagtgggagaaggggttggaaatgggctgccgggactgggggagctgctctctggaagcagggaagctggggcgcaccggggcaggtggaggacgtggcgcgctgggagcggggactgcgcgcgcctggggatggtgactggggatccaggagcgcggcttgtgggggcgcttggcacggcttcaccctcgctggccccgcaggcggtggcgcctccctccgcctgcagaggggacagggtggccgcgtccctcgcacagagatgtgcgccgggaaggggaccagagagccaggctccggggaggcgcaggcacctacggggccgatccctggtccgtgcctcgcgccgcgcccccgccggagctcggctgtgggaggagaatgtggtgggtactcgagtccccgccacctgccggacttcgccaactccccggatttcctgtcctcgggccctgacactcccaaggaaagctctgaattgcgctcgctgtttggtttttgcttgttgtagttactctgggggaagagccgggggcaagggggtcaaatggggctaaagtttcagatttgcaaagagaacgttaccgaggactctcaacgtgtccttagcaatcggagagactgcagcagcctttgcctagctatccgcctctggggcagcagtgggggctgaaatctggaaggcagcccggaggcagcgtcagagccttgttttgttttgtttgtttctgccgagaccaggctggaagtgagaggggatagtaccagacaatcggggagttggtcgcctggtagattcagagtttactatgttgttgctattattattaatgctcttgttattggcacgagcaccaggaacaattttttttctgattgttataaatcgcctgcaa

SEQ ID NO: 32856 - DNA, 1320 bp, Artificial sequence
  DNA replication origin
ggctggtgccctggagtctgggctgacgcttgagtgtgaggccttcgctttccgtgtgaccttcatcttgatgtgggcctgacgtcttgtaagtgcgcaatgaaactgtgttggaagaagggtctgggggagggcgaaagttccgtatggatggtgctagccctggttaacagagctaggagcagctttccaggaggttcggagcaccggtctgcatgtgcaagtgtgcacatgagcaggggaagagggggagagaaagggaggaggggagagaaaggagggaagggaaaggaagggagaggaagggagaaggcggggagaaaggggggaaagggaaagggagggagagggatagaggggggagaggaagggaggagggggggagagggagggggagaggaggggaggagagaggaggagaggaagggaggagagagggggagaggaagggaggagagaaggagagaggaagggaggagagaggggggagaggaagggaggagagaggggggagaggaagggaggagagaggtgggagaggaagggtggaggggagagggaagaaggcggggaaagggaaaaggagtggggagcgggtagagaacagccccagggaagcaggaagcatctcagctttgaagcatgtcaggatctacttacacagaggtggtttctgaggcccataagcctatcagttcttggtgtagtcagggaacaaaactcacacctggtttcagcagggagaatttggagtggagggctgaaaggccagaaggaagccccgaggcatcagagagagagcgcagctccaggaaaaacagccagtgcccctctggctggggcaacacacaagggaggtggggattctggcatctgcaggtttggagcggagccccttgaggctgggcctgagacccctgaggaagcagtgctgctccttgggctggggccgcaggagcttcgaggaggtgcccctgttccctgggactcagacctcttagaagtaggtgtgatgaggagcaagtcactcctccctcctcctgcctcctgggctccctctagtaccttctaccggcaggcagaacctacctgggagaggagatggttggaagaggagaaattacggcttggagagtttcagccccagcacccaaagcagagtatggaaaggtgagcatggggctgagagacaccagcttaataacccgtgcagcaatgcacatttaatattccgctttaccagccgtagaatacacatttggtttcaaaaatggcaaagaacagacattaacagcttttctccaagtcactcagcaaatt

SEQ ID NO: 32857 - DNA, 1404 bp, Artificial sequence
  DNA replication origin
ctgctgtaactggggagatcttctggaccgcggagggggtggcggggccgcagggtcccggggaggggagcgcggggtctggcggggcacgggggaggtggtcccgggagttgcgtgtctcctgagagctggcggagttgggcgggcggccgcggcggggagcggcgctgtcggctgctcggccgagtcctcggatgccccctggagctccggtccgagggagctttcctcgtgcccgcgccgcgcgcgcccctgggtgtgcacgtgcgcgcgcgcccgccccagttgcgcccccggcccgcacacaccccggctcatcttctcccggtccccttgtctcgcgccttctccagccctagaagttgccccagggcccctcccgggattagagagcgctgtgaagggccagatgttgggggtcttttgtgcagacacacgcgcctggggcgcttgctcctggaaggacagcggcaggacaaagccagctggactcgtggggcgctgctcgggaagcggcggtccccaatcccgcctggggtcggggcatggcttggggagcgctgcctgggtctggagagagtagagaaatcgccaaagcagagtgacggtgacttgatgaggtgacggtgacttgatgaggtggcggtgacttgatgaggtggcggacaggggcaaacgaaagaaagatgctcgggattgccgcgctgtgtgcctgtctgcgcggctgactaggcgccccgcattcccatatgaccgggttacctggtagattttgccagtgtgtctttgccccaagatgttattccccacctgctccgatttctttctttcctagggcttactgttgctagtaggcgctctgccaccagaggggaactcgtgggcgggggagactgcggaggaggggggaggtggttatttatcctgtagagacaattaggagccgtgacgcccccttctcggccgccagccctccacacctcatctgccttgctccacctccctagtgcacccgctccagccccgtctgcccaggagggcgcttggatttccttctccgcggcgcgtatctaacccttcctgcatgtatttcactgcaggctgaagaaagctcagtctcaattgtgtttcctgcctgtcagcctcttgcctcctaaacgtgtaccatttccacttgatgtcatcacgcagaaggggtgaaagagactcggtgacagatacaggtaaccccccacgatctgggtagcgcctgggtgtctctgggtcatttgggccgacagtgctggcacagggctgtttgggtggtttctgcatcaacatcgttcctatctgtgagaaggtgtgggggctgctaaaactcctggttcaaagaaataaattgcaaatgactttataccttccctt

SEQ ID NO: 32858 - DNA, 1261 bp, Artificial sequence
  DNA replication origin
cgagagccacggggcggacgctgacagcgcggcggcggcgcctgcagccccagcacccggcccggcccttcgggcggcacccccacctgcccggccgccctccgcgttcgcggtcggacaccgccgccaggcgctcggcaccgagcgagagctttttgtgtcactgagactccggcaccaaagggggtggggggagaggctgggctccgctccccgcggcaccgccctccccggcggctccaccccctcctccccgcccacagcccggcgggcccgggacttctctccgtcagtcccgaatcgcccacctcccccggggtgaggggctgcctaccctctctcgcgcgctccctcggctttgcccccagtgcctaccctcggccaggacctcgacgccgtctctctaccgtgcaaaagcgggacctgagctggcggcaggtgtgaaaggaggcctgggcagccgggaggaggggcagggccgggaagggggccggggccgcggtgggtgggttggggggtgcccagtctgtgcctaggacccggacagcgagagggaggagctgagatcatcaggtttccagaagctgccctgcatcctcgtcaccggatactttttggctgcccctaaaagttcacgtagtccagccagggtggggccccgctttccaaagaggcccgaatggacaccccactacttgaatccctcgaatgggggacaagaagcaggggagtaaagagatgcaagtcctaggggttatatggaagcgcgaaccccacggaacctcggggcccaccctattccacaccttaaaacctaacttcgacctagggaggtgcttagaatgtcttgttccccggagaaaatctcccgcctcttgagttaactgcgaaataggagaatggaggagaaaggtccttggtagaagatagttccatgccctttggtgcctttttaaaggatttctctgcagcatgaaaacctaaaactctcttcttgagatgaagttcagcctgcggacgttacccggtccccagcagcagggctcagttgagtgtgatccccacggattccagcggcacttgctgcctttccccactgctggagtggagccgtctttgtcttaaggtccgtagtatccgcaaggaaagagtccccattttcactcccccaagtagcttattgaaatgcttctgccaagatttctttttttactttttctgtttttttttttttgaagatggactctcgctctgtcaccca

SEQ ID NO: 32859 - DNA, 753 bp, Artificial sequence
  DNA replication origin
cttcctaaggccacgggatcctgtggcgacagcgagcccgcagagccaggatctaggccacttccggcgcccagccgaagtactgcccgccgttcctctgttgcagctacctcgtcatcgtcctcatccgaatcactgagaaatggattcacgccgccaccactgccactacctccaggcgccatcgccgccatcttatcctgtcaggagtgtgggcgcctccctgactggttccgacgggccgcagcccgaatcctctaggcctcaggggacacagcgcacctccacagccccggcctgaccacgtcctgcctcccgacttagagacaaggagtacgctccaaggcaggagatccggatgcagctgcacctgatgcctcagcctctgctgcaccagcagcccggctctgcaggcgtcttcctggtctccagtctcgcgagaactggagcgtgcccctgcccctctccccgatctagccccgccccagccccgccccagcccacttcagctccgcccattcccagcgccagatagcaaagattgaaggccccgctctccgctcaaaagcaaaactccacccacgactcctccatgattggtcagagaaggaaggcgtggagcggactgacgggagactggcccgagaattatcgcgatagcagcagcggccgggcaggtattgggggcgttccggaattgaggggtggttgtagtggtggcttaggaataccctcccggctatcgcttcagtg

SEQ ID NO: 32860 - DNA, 1257 bp, Artificial sequence
  DNA replication origin
gcagccgggcgagcagcgcgcagagcagcagcagcgcgaacagcgggcggcgccgccgggcgcgcggggccatggcgcgggacaggctggcgggcgccgcggcctcagcggcctctgtggcccagcgggcgcggctgccgcggccctgtgtggtcccgcccccgtgccccgccccgcacctgcccccgcgccgccctcctgcgcccccctccggccgggcccggcggtgccagccaggtggtgcccaagctcccctggtttgcggtgggacgcggggccccgctcggggaggggccccgggggtgttcgccgcgcccggtgcctccttggtccggtctccgcccctggcccaggtgctcgggctgcagacaggttggcgggagaccagccctgggttgcccttcacggcactggctcctgccttgccgcaccccaggcctgtgggccccgcctcccgggaaggaatgggggcatcggggtggtcctgctcctgccccgcgcgcccacccttcgaggcccggccttccgaaagtggatgcgccaccgtcgagaatgaacgggaggaggatccttcctggagatttcgtcgactgcagttaaggcatcaacacaatacaccatccgccaatcttcgtaaaatactcctcttgttctttgcttcaaaatgttggggccagcagccactatctctttttcttctcctgatcctctgcctccgcccctcacccgtcctgcacccaccaaattctagaaaggcaccaggctccgccagccttgaggcgtcccccagcccccatcaccacattggccctttcagacataaagtggccagatgtctggggcacagtgttacctaaaaactgaggtccgttcttctggtgcagtaaggccaagccatccgcactaaggtttgcactgggagaaaagagggcgcttatctgcagagctccaggcaaggagaatggggcagctcttgcttaaatcctgaccttcagttggcttgcaagtaaggatttttaaacgcagggttaatttcaagaaagcagaagttacaggcaaaatcataatacacggaggttgcacattggtttggtctaacaagctgggatatcttgaaaatctttaaagtgagggtgcttataggttatacattcaaagattttctgacttgccatcagtgaaggaagagaagctttgttaaaaatttggggtcagcaaaaatgaatgttagctctggctcgtgggtgtgacttcctc

SEQ ID NO: 32861 - DNA, 1524 bp, Artificial sequence
  DNA replication origin
gtctcccgccaacctgtctgcagcccgagcacctgggccaggggcggagaccggaccaaggaggcaccgggcgcggcgaacacccccggggcccctccccgagcggggccccgcgtcccaccgcaaaccaggggagcttgggcaccacctggctggcaccgccgggcccggccggaggggggcgcaggagggcggcgcgggggcaggtgcggggcggggcacgggggcgggaccacacagggccgcggcagccgcgcccgctgggccacagaggccgctgaggccgcggcgcccgccagcctgtcccgcgccatggccccgcgcgcccggcggcgccgcccgctgttcgcgctgctgctgctctgcgcgctgctcgcccggctgcaggtaaggagcgcccgcgcctgccgggccgcgcggcccgacgcctcctcgggagccccgggaagggccggggccggcggcatcctggctcctccgccttccgagaggagccggagttttggggagcggaggccgtgggaagctggggaggcgcttccagagttggacggcggagggcgggaaagggcaagcggagggaaactggggcgcagaaggagcaggttggcgggaccgcaacacccgaaacgggctcttccaaaagcccctcttagccgcaggctttgatgctgtcattttctccaaatgcttcttgagcacctactaagcgcttgcgccgggcggtgccgcgggagacagcgccgtgggcacctcacttgcggcagataaccgttcccgatacgatttctcccgggtggcctccgtcccaaatttccacccggaaagagacatgattccctccgtccctgaactgcgggcttgcctttgcctcccctgagccccttcggggacacccctgccagctcgcctggaggccccgcacggcggggagagactgcgcgcgcgccccggggatgctggacttgaccctcgcagacccgagtggcttcccggtcctctcggaacaggtttctcagtacagttagcaagcgaatgcagccaggcacggactttctgcctcgtggaggagggccgcagagggaagcacacccagcacaacaaacgctttaaaaatcgttgatacgaacttgaaagctctcacagggaagggcgagtggtggttttcttggtttcggctgggtcagatttcccctctgttaacactaggttaggctgctgccgtccctccgcagccgggcacggaacccggagaggcgtggggagggacgcatggagaatcgtgtttgggtgagaagagaggggaaaagccttgacagaaataatgtgggtgcactgaaggctgaagcaaaagattctagggaagattcattcccaattgtatgggtctgtcagtatggttgagggaaacgaaggcggaaaagtctaaaggattttttcattttaagcacttcaggtgttgcttaattaagtgttcaacaggttgaacggggtgctaccttatttgaaccaaaggaccagggt

SEQ ID NO: 32862 - DNA, 1184 bp, Artificial sequence
  DNA replication origin
gccgccgctccaccagcaacaggcggcccgagtccccggggcggcggcggcggcggcagagggccccgcgacgggcccgcgggcggcggcggcggcggcggggggcggcagtcgcggcggcggcgcgaaggcgccttcgcgcccggccgcgcgtccgcctcgggctcctccgcctcgggcggcggctccgcggggtgcgttggcttcagcggcagcttcatcctcagcatcctcggctagggcggcgcagacatgcgagcgggggcgggcgggaggggccgcgaggtggagcacgggccgaggcggcggcgcggccgtcaggagcggggcccctccatgccgccgggggagggccggggccgggggcgggtctcggccggcgaggggggcggtggccggccggcggggtcgctggcgtcgtcttcccgggctgggggcggggcgtgcccgcgacggctcctccccctgggctcctcgccggttctgggagcccgggtgcgggtgggagcaagcgagcgagggtgtcctccttccgcctccctctctccgccgtccgcgctgagccggggcggcggtgcctgagctgttccctcgcgagccggtgaggacggagcggctgggtgaggaggtggagcagccgggccgggcggagaagcttgcgggctccgcgcacctcacctccgccaatcagcaccgcgaatcgacggtgacgtcgctctccccgccccctggggggccgcctttctccaggaagccacgcccaactgctggccggccgcctccctctcggcggcttccgtgcggtcctaaaggctggtgctcggcaggaggaggacgcgggctggggccgtggggcggcgtgagggtagcccgggagcggtgaggagcgtgcgaggcccacgtgagcggagggacgcggccgctctcacctttcctgagggccctggcccggctttggactcctgattctcctctgcttgccagctgccgccccgcctccgccagtggtgcccgggctgcctgcgcggccggagtgaacgcgtcccgggagcaggggtttctccgaagtgagtgcgccagccccgggacgagctcgttcgagtcctcaccgcccagtgcacttcctgaaagccggcggtgggctgtctcccaccttgtgaaactttgccaggtgtcgctcacag

SEQ ID NO: 32863 - DNA, 1293 bp, Artificial sequence
  DNA replication origin
cttgcccgagccccagcccggcgcaggtggctcggaatccccacccggcagctcccagcgccagagggctgagcttcgtctcgctgggccgctccgttccactcccccaccccaccccacaccccggcagacacagccacccgccatcacagaatgctctagaagtcccttccgtgccacggtgttgccacggaagacgtggagctccccgcccggggcccctctcggaggaaaagtgtcgggacgtttttggctctgagcatctcagcgctcggtgcgggagccgccgggcgctggaggaacctgtgtgagagccagccgcagtgagccccaggcagcgccgtccttccccgcctgcctggccggggctccgcctcccgtctccgggctctgccgggccctcggcggggtgtcctgaaggtgcgctcccggcgagctgcccttgtctttggcacagagggactttttttgcccagtgtgtgcctgagttaaaaggggtcgtacgggtccttgtggcttctgctctgagggcttgtgttcccagcagacatctgacgtagagacctgcgaatggatctgagatgagtagtaacgcaggttgtccggggagagaaaccttttctagcgcggcctgggatgctttttccctccggcacacgcgctttctcacgggcttgattcctgcctacagattggggttccgggatatttgttgagcgtttacgataggcgttaatgttgcccaaaagaatcacttaaacaccaaaatgtagtagacgagaatccagatgagacacttgtcgcaaacattaaagatgaattttttttacagccatgaaagcaatttaatgataattagggtccagtgagtctttgaggaggacttttccatgggaaggtggggagtaggtttcagtaagagtgagaactgtaaagtgagattatttgtggggtcacaggcttttgaaaggtgttgatttggatgccatgtttttcagcttaggtgatctctaggagataatggaaaaggggattttctcctctccttgcttgaacgttaattcagtatatatatatctgctgtcattcagtaccccagaactaaaattgggcatggtatttcactagtggctttgtggactcagtacccgtggaatcaatggatttggggctggaaggaatttagagataatctagcctgaaccccttttttaaaacgacgcttctgtgaggtaactaattcatgttttgggacgtattttatcaaactcagatgtaacgctctagtgccca

SEQ ID NO: 32864 - DNA, 1389 bp, Artificial sequence
  DNA replication origin
gttcccgccgctcggggccgccggggtcagcgcgggctccggactccggccgcccccggccgccgccgccagagccgccgcggccgccgctgctgctgctgctgccgcagcggcggccgccggagccgaagctcggtcctccctgccgagctcggggagtcgctgtaccgtggccgcggcggcgggctccattgcagtggggcttcgcgtttcccccccagctccggaggcagcgggcggagagggaggcgatgaggcggaggtgggagacggcggcggcgcgcggagaagggagaagccaatggcgttgtgcgcggccgttccaggggattatgtggcgattcggagcattccgtcggtgtctcagtgttccatcccgcgcgcccgcctcgccgccaccgcccccccgacacacgccctccccgcccgggtcgcgggctccccagcgccggccccgcccgctacccccgcctcaacccggcgaaccagccgcggatctgggctcattgaatattaatcatgcgccgggagcgggaaggcgggaggctggcagggcgggagggccgcgtgtgcctcataaatattcatcgccggcatgacggcattccagggaggagtggggagagccaggggatggccggaggcggagcttcagggtaaacaaacgtgacgcgtgcgtacgagggcggggtggggggcagtttcccgggaggttcctgagccggcctcggagagggcagtgaagaccgacgcgcgcggtaaaccttgggagttgtggttctcgtaaggggatcggcaatcccgagggaaacatggtggactacaagtcccagcggtcctttggttctgcttctcctggccgccagcagctggccgtggccagtgagtattgtgccctctgccgttgaactctgtgccagagttcttaatgaacacgaatgctcatgttcattaacttgtattttacccgcactccagcttgccagatgacttttattttccctactaattaaaggtgagggctttcagggactgtaaacgtacgaaggtcgcaggtcctggtcctcacctgcgcccattgtatgagatagagatacacacccgtcacaccacagcatcactggcagtctgagtgggccaacctcactttttccccactttttcaagacccaggaagacaggcagcgtctgggaattctaactgaggctgtcgttgaatgtgcttgttcgaaggcacaaccctaagtctgtcctctccctctcctgtacctgaaaaggaaaatagcaaaggactgaggtttcattgtttcccattgctcttgaagtctgaagtagtttaatgacacagaaagcactggtaagtagaagaaacattagaatggagtatga

SEQ ID NO: 32865 - DNA, 723 bp, Artificial sequence
  DNA replication origin
cggggaggccggcagcgccgggggagtgcgaggcagcagcggccgaggacgacgacgacgaggaggcggccgcggcggccgcggacagattcctcttcagccgccctctcctcagcaggagggagttggcgccgccgccggccccgggtacgggggcagccccgccggcaatgggctggggcgccccgcgccgcctcctgcgcccggcaccccccgctctgcccggcagcggccccggcggcgcctcgcctggggcctcttcccgcgccccgctgccgctgccgttcccgccgctcggggccgccggggtcagcgcgggctccggactccggccgcccccggccgccgccgccagagccgccgcggccgccgctgctgctgctgctgccgcagcggcggccgccggagccgaagctcggtcctccctgccgagctcggggagtcgctgtaccgtggccgcggcggcgggctccattgcagtggggcttcgcgtttcccccccagctccggaggcagcgggcggagagggaggcgatgaggcggaggtgggagacggcggcggcgcgcggagaagggagaagccaatggcgttgtgcgcggccgttccaggggattatgtggcgattcggagcattccgtcggtgtctcagtgttccatcccgcgcgcccgcctcgccgccaccgcccccccgacacacgccctccccgcccgggtcgcgggct

SEQ ID NO: 32866 - DNA, 1451 bp, Artificial sequence
  DNA replication origin
tgcccgtcggcggcccgggcgggtggtcgcgccgcgccagcccagcgccctcggactccagccccggcgagccgttcgttgggggccctgtctcttcgccccgcgccccacggcctgtggtctccgacaccgagagcttcagtctgagtcccagcgccgagagcgtgtctgaccggttggacccctacagcagcggcggcggctcctcgtcgtcgtcggaagagctcgaggccgacgcagcctcggccccgacgggggtcccgggccagccccgccgtcccggccaccccgcgcagcccctcccgcttccccagacggcttcctcgcctcagccgcagcagaaagccccgagggccattgacagcccgggcggggccgtccgcgaggggtcgtgcgaggagaaggcagcggcagccgtggccccgggaggcctccagtctacccccgggaggagcggggtgaccgcggagaaggcgcctccgccgcccccgccgcccaccctgtacgtgcagctccacggagagaccacccggcgcttggaggcggaggagaagccattgcagatccaaaatgactacctcttccaactgggatttggggagctgtggagggtgcaggaggaaggcatggactcggagattggctgcctcatccgcttctatgcaggtaaggaagtcacctgccttgacgggtggttgcaaaagctgccgaggaccgaggagtgattcaaattgcttgtcagtttgcccaacccaagagtaagtgcgggtcctgatgagtctttgtcttaaactttacagctttttcatacagtctgtgtagtactagattgagcaatctttaaatctgcacgttttatcaatcttgagggctcagaggttggaaagcaatgtgaaagaggtggctgaatcaccaggaagtacaggaagcagatccctctgaaagcggcaagagcacctttaaccataaaggtgcttcctcaggggcatgttgggtttcaggcagtttgggatttcaggtaaactgtcacgtgagcataagacggacagaagaaatgacaataaaaatgctctatcacacttttgcctgcatttgactgtccagttgagcgttctagctgtatgtgccaccgggagctcctgacttgtcaactggtgcctttgtttattcagctctgccacactcataaattacccacggagccctcattagaaatctgacaaaagggtgcctttttaactgatacttttccccagcgctttttttgctcgatttctgtttcgtctgcaagtttgtcttgcataaaaaaaaagattttgcctgtttctctcattttcttccagcctttatggtcagaactgaccaccgcaatacgccttgcaggaaggttcacaagaaggatttaagtggttgctatttcttcagatgtgtcctgaaatcttcccccgtct

SEQ ID NO: 32867 - DNA, 1471 bp, Artificial sequence
  DNA replication origin
ggattcaaactcaaccaaaccaaaccaaaccaagcctgctctgtctccctccatctgaggttgggttgtcaccagcaactgattttttttttttttaagtagagcacattaaaggacgagaaggtatggccattttaatctatcattggcaaacaccttggcaaatgtgaaacaaatgcattttgctttcaactttttagtaactggcaactccttgtgcttttgagttaaggccacaggggtgaatgccacagggagtagtttcagctgggcagggcccagctaggagtgggtgctctccagaggtcgctgtccagggccacggctggattcggaccccttcccctctggccagacctctacacaggccaggcctggctgaaatgaacatcctggaagtcttgaaacggacaaaagcacatcagagtttgctgccacacatgcagggctacacacagagcagaggctactggtgtgtgtgtgtgtgtgtgtttatggtagtgtgatatgcatgatgtgttgtgtgttgtatgttatgtgtgtgatttatgtggtgtgtatgtggtgtgtctttgtgtctttgtgtggtttgtgtgtggtgtggtgtatttgtgcgtgtctggtgtggtctatgtggtgtggtgcatagtgtggtttgtgtggggtgtgtgtgcatgtggtatggtgtgtttgtgtatttgtgtgtatggagcatgttgtgtttgtatttgtgtgtgtgtgtggtgtatggtatggtgtgtgtggcatggtttgtagtgtgtgtgagtgtggtatgatgtgagtgtggtgtcatctgtgtgagtgtggtgtgtgtacggtgtgtagtgtatgagtgtggtgtggtgtgtaggatgagtgtggtgtgtgtggtgtgtgtagtgtgtgtatttgtgtgtggtatgtagtgtgtgagtggatgttgtgtgtgtggtgtgcgtggtgtgtgtgagagcgtggtgtggtgtgtagtgtgtgcatttgtgagtgtggtgtgtgagtctggtgtgtgtagtgtatttgtgggtgtggtatgtagtatgtgagtgggtgtagtgtgtgtggtgtgtgtagtgtgtgtgaatgggtgtggtgtgtgtgagtgtggtgtggtatgtagtgtgtgagtgggtgtggtgtgtggtgtgtgtagtgtgtgtgagtgtggcatggcatgtagtgtgtgtggtgtgtgtagtgtgtgtgtgagtggatgtggtgtgtagcatgtgtacttctgtgcatggtatgtattgtgtgagtgggtgtggtgtgtgtggtgtggtgtgtgtgtggtgtgtggtgtgagtgggtctggtgtgtgtgagtgtggtgtggtatgtagtgtgtgtatttctgtgcatagtatgtattgtgtgagtgggcgcagtgtgtgtggtgtggtgtgtgtgtgtggtgtgtaatgtgagtgggtgtgtgtgtgtggtgtgta

SEQ ID NO: 32868 - DNA, 922 bp, Artificial sequence
  DNA replication origin
ggccgtggggtgggagctggggcgagaggtgccgttggcccccgttgcttttcctctgggaaggatggcgcacgctgggagaacagggtacgataaccgggagatagtgatgaagtacatccattataagctgtcgcagaggggctacgagtgggatgcgggagatgtgggcgccgcgcccccgggggccgcccccgcaccgggcatcttctcctcccagcccgggcacacgccccatccagccgcatcccgggacccggtcgccaggacctcgccgctgcagaccccggctgcccccggcgccgccgcggggcctgcgctcagcccggtgccacctgtggtccacctgaccctccgccaggccggcgacgacttctcccgccgctaccgccgcgacttcgccgagatgtccagccagctgcacctgacgcccttcaccgcgcggggacgctttgccacggtggtggaggagctcttcagggacggggtgaactgggggaggattgtggccttctttgagttcggtggggtcatgtgtgtggagagcgtcaaccgggagatgtcgcccctggtggacaacatcgccctgtggatgactgagtacctgaaccggcacctgcacacctggatccaggataacggaggctgggtaggtgcacttggtgatgtgagtctgggctgaggccacaggtccgagatgcgggggttggagtgcgggtgggctcctggggcaatgggaggctgtggagccggcgaaataaaatcagagttgttgcttcccggcgtccctacctcctcctctggacaaagcgttcactcccaacctgaccgataacgcctgccatctaaaagtctttaacttgcttgctagtcgtggagatccaaagatctagcgtttgtaatccagtaggatgtggtggta

SEQ ID NO: 32869 - DNA, 1133 bp, Artificial sequence
  DNA replication origin
cccggacgcgccctccccggccgcggccccgcgcgccatgtgcccccggcgggacgcgccactcccgggcctgccgcggcgcctttaacccgggccagggagcggggcggagggggcggtcgggtggctcagaggagggctctttctttcttctttttttgaatgaaccgtgtgacgttacgcacaggaaaccggtcgggctgtgcagagaatgaagtaagaggacaggcaccacagccccgctcccgcccccttcctcccgcgcccgcccctccgcgccgcctgcccgcccgcccgccgcgctcccgcccgccgctctccgtggccccgccgcgctgccgccgccgccgctgccagcgaaggtgccggggctccgggccctccctgccggcggccgtcagcgctcggagcgggctgcgcggcgggagctccgggaggcggccgtagccagcgccgccgcgcaggaccaggaggaggagaaagggtgcgcagcccggaggcggggtgcgccggtggggtgcagcggaagagggggtccaggggggagaacttcgtagcagtcatcctttttaggaaaagagggaaaaaataaaaccctcccccaccacctccttctccccacccctcgccgcaccacacacagcgcgggcttctagcgctcggcaccggcgggccaggcgcgtcctgccttcatttatccagcagcttttcggaaaatgcatttgctgttcggagtttaatcagaagaggattcctgcctccgtccccggctccttcatcgtcccctctcccctgtctctctcctggggaggcgtgaagcggtcccgtggatagagattcatgcctgtgcccgcgcgtgtgtgcgcgcgtgtaaattgccgagaaggggaaaacatcacaggacttctgcgaataccggactgaaaattgtaattcatctgccgccgccgctgccttttttttttctcgagctcttgagatctccggttgggattcctgcggattgacatttctgtgaagcagaagtctgggaatcgatctggaaatcctcctaatttttactccctctccccgcgactcctgattcattgggaagtttcaaatcagctataactggagagtgctgaagattg

SEQ ID NO: 32870 - DNA, 1277 bp, Artificial sequence
  DNA replication origin
gcgggcaggcggcgcggaggggcgggcgcgggaggaagggggcgggagcggggctgtggtgcctgtcctcttacttcattctctgcacagcccgaccggtttcctgtgcgtaacgtcacacggttcattcaaaaaaagaagaaagaaagagccctcctctgagccacccgaccgccccctccgccccgctccctggcccgggttaaaggcgccgcggcaggcccgggagtggcgcgtcccgccgggggcacatggcgcgcggggccgcggccggggagggcgcgtccgggccggccacccgcccgctccgctgcgcccgcggggcccggccagtgggtggcgcgggcggcacaggcctcccgcgcggccgcggcgcggtgggtgtgcgcggggccttctgctcaggcctgcggcaggccgcgtgcggacttggtggtcgctggggtccgcgacggggtgggggctcccggggaaccgcacgcggccgggccgggcggacgacggagtgcggaggggggcggctggcgggagggtgcgccatgaaaacaagggctggaaaagcgccgggaaccgcctggaccctttctggccgtgtgagtgtgtgtggagtgtgtgtgtgtgtgtgtgtgtgtgtgtgtgtctcgcctggaccttttctagccgtgtatgtgggagtgtgtgtgtcgcctggaccctttctagccgtgtatgagagtgtgtacacgcgcctacacacacacacgttgtgttaccggcgctcggccgccgggggaagacccaggccaatgccgccccccaccgcccccagcagtgggacctcagcgctgccctgctgtgaagacaggtgactctgcacgttttaagcaatgtctagggacgccccgagcgtggtgtttactttcaagtagcttcctaggtgtccgcgcactacacacgcacgcgcatccccgcccgtgtccacctgaacacctagtccgtggcccaggccatgcagaactcagcgctccagggaaggggtttatcaagggctttacgacagtttaagtcaatgttttccctctgtccctaacaccttttacactggtttagtgctacacgatgaggacttccatatagtaactttcaggcccaccgtcctaacgctggggtgggtgggctcctaaaggtctccacctttgcctcgtagccaatcctagttggccgcactttctcaaatgaggtacatagatacacacatacacattcacactcgcagacgtgtgtacgcgcaagcagac

SEQ ID NO: 32871 - DNA, 1008 bp, Artificial sequence
  DNA replication origin
catgtggtggtgagtggcctcctgttgctgccccccgacttaccggcccgcgcggcctttccgccgccgaggccgcgtagcctacgtccctttttccaggccgcggtccccaggaaggcatggccaaatggggaaggtcacctgccgccgtccaccccggcgcttttcccccggccccggcacccggcctcgcggacccgccctccgcagcctcgggctcctcctagggccggagagcgtgcgacgggggaccccgccggccgcagggttcccggggccccaggggttctgtggctgctcgtgaatccatgcaacatccctgggatgtggatgttttgtcctcagtttttccgatgagtcaactgaggcacagagaggctgagaaactttgccaaggacacagcggtcggtggtgtgcagggtgcggcgcgcggccccgggcgggggcagacagcggggaagtggggtcccagccgccgggacccgccgaggcagctcggaactggaagatggcctgtgcgagtgacgggaagagccgctgccagaggattccaggaagtgactcacctggggaaactgctcagaacccagcgggctggcggtggtggcttagcggtattgggacgcctgtcccgtctacactgcttgtctctgagctcagcgtggcatctgctgattgctgctccaatgcaatcctttgctgttttctagtgggaaggatgagctaaacgacaaggcttgtgtgcgaggaatgaaggagaggtggataggtgtgatttatttcttggcggaagctcgcatattcagcgatccctgttctgcaaatgtggcacctttcttaaacagagagaatgcctccttgcctgcgcccagcactttcccgtttgcagtggctttctcacgagcattctcgtttggatctcccaaacccgaggcacagtgaggcgaggagttaggagtaaggagggttggttacaaaattggccgcacacctcttcctgtcctatc

SEQ ID NO: 32872 - DNA, 1775 bp, Artificial sequence
  DNA replication origin
cctcctacaatatactccatgttgcagccagagggaccttcgtaaatacaaatatgattatgtttctccccagcttaaaatccttttgtgtttccccatagtccacaagggaacgaagaaacaccaccaacagcgtccacatggccttcacgacatggccctgtggacacatcagacgttgtcttgcagtgcctcatccacactatctgtaccactgcaggcctggatacgtcatggttttcatggtgctatcttgtgcctctttgcacctgcacgcactgtgtttcctacatgggatatctgtgtttacaaccaaactcccaggggccaaattatatcctttgtaaaggacttcaaaccaccaggcatttgctggaagtttcacggaggaaaacaagcatttttcatcttttaatctgttttgctggtcaaagaggaaaaggagtggatggacaaagtggggcccaaagtctggatctagttctgaccaacaaggagaaattgatgcacaatggggaagtgaccttggcattttcaactggcagagccggtaagtttgggcacagttcaaatgtgagtctgtagccactagagagaggggtttcaaagtcatggagaaaagatgggggtgaatcctgcaccaagacttattgaggagagttcttgggaacagttacttttaggattccacagggaaatcactgagcgagttttacaaaatactgctgctgggttccctcctccaagagatctttacttaattggtttggggtgcagagtgggaatgtgcatctttaaaagcagaattcccaaactggagagctctgtgagagcttcctgcaggagacattatttgaactgaattttgaaagacaagcttgcatgccaggaaccccatgtatatgaacagaggatatgaaggaatgtaaataatttgctatggctctaaagaaaagaagggagaaatcaagacgtgaagaggcttacactccttgctcaatagtttctaatttatctttttggataagaggatgttataaaggattttaaactgaggtataaaataattagaattggaatgtttacctgaacttcagagtaggcaataggttggcatggatcagaactgtaggtaggaaaattaattgtttaggagagacatgagacatgatagaggtgacagagtatggacaggaggaacacaaaagtgatagaagtaacaggactgttgatcatttagttaaaagaactgcggagggacacacccaggtttctgagagatgtccagtagtacacaggtaacatctacggctcgagacaggttagagattttgaagaaataagttaaaagttgaaacatgaacctatggatatagtggaggtcatacaagaagatcatattataatgaaaagaagagggcttagaatggtaggaaaggaatcaggataccaagcaaaggagtcaggaaagaagggaagggtgctctggaaatcctgggaaggtcaaagaagaaagggctaaatgtcgccaacaaacaaaatgaaataagacctgggatgtattttttggccaaggcaattagaaaatgattagtatccttatcaggagcaatttcagagaatgtttgggtggacgtctaactacagtggagtcaaacgtgaatcaacggtgaaaaaaggacaatagccaatgtgtacactttttataaaaaccaccctccaaggaccaggcactggccctctctccggtgcccacagacatccacacaggccca

SEQ ID NO: 32873 - DNA, 1355 bp, Artificial sequence
  DNA replication origin
agaagtggatttggagcgctagttttagcaggacctttcctgagaagactgaggccaggtgtcagtaggcaggtgcctgagaagagaatgcgaggagaggagatggaaatgcggtcagacggccaagaacgcaggactcccgggcactggtggctgagcgtgccgggggcttccattcgggcctgcagacacccacagaccttattatcccggccccgccggcttgggggccttctgccttccttctcaaagggcacgaccgcaggcggcggcgaccacagacggcggcgactgcaggcggcggtggggcacgagtcggcaccgagggcggacccgcggtcggggtgagtccctacctcctgggagaggctggggccgcgtgggggacccggggcggggtcggccgacgccccttccccagcacccgccctccccggcttctccaaggcctcaccccgccgcgggaagagcaggtgaccgcacgcgagggccccgcgggggacccagggctggcttgagcgcactggcctcctgctcttgcaaggaggactccaaaacgattctgaaagggaaagtgtcttgaaattaactggaggccgaaacccaggggaagctggtggtgcaaaggactcatccacgctttgggctgttacatagagaggattttggaggaggggcaagagaagttgggaccctgggcttttctgtttcaagcaagcaaagggagggtggcggactcctatttcagagtagggaggagccttgggtctttatttcttacatgtatcagggactcacctgaaaagaaaatgatgtgtgccacaagtaattagtagcattcctgaccccatatacagagccaggcgtcctaactcctgacacctaagctcttttccacccctggcgctggagccacggtgctaagtgtgagtggttctgtccctgggctgcacatgacagaaacacgtgcagactgcgtggctcagacacagagtggctggggacactgctacgtcctctatcggggggttcagaggcagggcgggcttcaggctgactcagcagcccgtgatgtcatcagagactcacattctccctcactcactgccccaacttcatcctcaggttggtcacaaggggcctccgcaactggaagcatttcacgtccaggacaagatgtccagaggaagagaacagaacaaatgacttactgaagtagaaagcgtttcccagacctgtcccccagtagatgcccttcaaagtagccagaatccgtgcattctaacttgagcctggattagggtggggcaagcaggtgtctagggtacaaaagttgagaaagcacgggtcgggcg

SEQ ID NO: 32874 - DNA, 1029 bp, Artificial sequence
  DNA replication origin
ctccctttgcttgcttgaaacagaaaagcccagggtcccaacttctcttgcccctcctccaaaatcctctctatgtaacagcccaaagcgtggatgagtcctttgcaccaccagcttcccctgggtttcggcctccagttaatttcaagacactttccctttcagaatcgttttggagtcctccttgcaagagcaggaggccagtgcgctcaagccagccctgggtcccccgcggggccctcgcgtgcggtcacctgctcttcccgcggcggggtgaggccttggagaagccggggagggcgggtgctggggaaggggcgtcggccgaccccgccccgggtcccccacgcggccccagcctctcccaggaggtagggactcaccccgaccgcgggtccgccctcggtgccgactcgtgccccaccgccgcctgcagtcgccgccgtctgtggtcgccgccgcctgcggtcgtgccctttgagaaggaaggcagaaggcccccaagccggcggggccgggataataaggtctgtgggtgtctgcaggcccgaatggaagcccccggcacgctcagccaccagtgcccgggagtcctgcgttcttggccgtctgaccgcatttccatctcctctcctcgcattctcttctcaggcacctgcctactgacacctggcctcagtcttctcaggaaaggtcctgctaaaactagcgctccaaatccacttctaagtgcaagcacttcttgtccctcctaattcttttattcagttccacgttgtcgagcccccttttacccagcactgttcctgatgctgagttggggccaccgggactgattttagagagtttgcctggtagaggagctgccaatcacaggagtaatgacaatgcagtgattgatgggttagtctgaggaagtgcaggtgggaaagagtgaagtggggaccatctccagggtagggactggggaagccgctgaggcagtgatgttgaagtaaaggcatagattatgtgcaaattccatggcat

SEQ ID NO: 32875 - DNA, 950 bp, Artificial sequence
  DNA replication origin
ggggctgacccccccacctccctcccggacgaggcggctggccgggcagaggggctcctcacttcccagtaggggcggccaggcagaggcgcccctcacctcccggacggggtggctggccgggcggggggctgacctccccacctccctcccggacggggtggctgccgggcagagacgctcctcacttcccagacggggcggctgccgggcggaggggctcctcacttctcagacggggcggctgctgggcggaggggctcctcacttctcagacggggcggctgctgggcggaggggctcctcacttctcagacggggtggccgggcagaggcgctcctcacatcccagacggggcggaaggtgaggggcgcctctgcccggccgcccctactgggaagtgaggagcccctctgcccggccaccaccccgtctgggaggtgtgcccaacagctcattgagaacgggccaggatgacaatcgcggctttgtggaatataaaggggggaaaggtggggaaaagattgagaaattggatgattgccgtgtctgtgtagaaagaagtagacatgggagacttttcattttgttctatactaagaaaaattcttctgccttgggatcctgttgatctgtgaccttacccccaaccctgtgctctctgaaacatgtgctgtgtccactcagggttaaatggattaagggcggtgcaagatgtgctttgttaaacagatgcttgaaggcagcatgctcgttaagagtcgtcaccattccctaatctcaagtacccagggacacaaacactgcggaaggccgcagggtcctctgcctaggaaaaccagagacctttgttcacttgtttatctgctgaccttccctccactattgtcctatgaccatgccaaatccccctctgtgagaaacacccaagaatgatcaataaaaaata

SEQ ID NO: 32876 - DNA, 1213 bp, Artificial sequence
  DNA replication origin
cttggttcaagcgattctcctgccttagcctccagagcagctgggattgcaggaggctgccaccacgcccggctaatttttgtatttttagttgagacagggtttcaccatgttgatcaagctggtcttgaactcctgacctcaagcaatccaccagcctcagcctcccaaagtgctaggattacaggcgtgagccaccttgccctaccgggttcaggttttatagcagaaatttctagcccagttcccaattaggtttgtttatgtaaaaaaagaattcaaattcagctgattgatcaacacaactgagtcctgaatggtcactatagctgagctctgagcggcaggggcaggtcagctctgatgatttagttcaggtgaactcggactggttcctttccaatccccgaaccgttgtgtccggaactggtgggttcttggtctcactgacttcaagaatgaagcggcggaccctcatggtgagtgttacagctcttacggtggcgcgtctggaatttgttccttctgatgttcagatgtgttcggagtttcttccttctggtgggttcatggtctcactgactcagaagtgaagctgcagaccttggcggtgagtgttacagctcttaaggcagcgcgtctggagttgttcgttcctctcgatggccccgtggtcttgctggcttcaggagtgaagctgcagatcttctcggtgagtgttacagctcataaaatcagtgtggacccaaagagtgagcagtagcaagatttattgcaaagagcaaaagaacaaagcttccacagtatggaagggggacccaaaggtttctactgctggcttgggcagcctgcttttattgtcttgtctggccccacccacctcctgctgattggtagagccaagtggcctgttttgacagggcgctgattggtgcctttacaatacctgagctagatacaaaggttctccacctcgccatcacattagttagatacagagtatccacacacaggttctccaaggccccaccagagcagctagatattgagtgtagattggtgcactcacaaaccctgagctagacacagggtgctgatgggtgtgtttacgaaccttgagctagatacagagtgccgactggtgtgtttacaatccctgagctagacataaagactctccacgtccccaccagactcaggagcccagctggct

SEQ ID NO: 32877 - DNA, 1239 bp, Artificial sequence
  DNA replication origin
tccctcttcggccccggctccggcgcgctctctcctcctctcctgcgcgccctctcgccctctctctggccgcgcgctcccgctggctccggaccctgcgtctcagctgcccgggcgagccggaggggcccctcgcagtgagcagacgcagcgggcccccggcgcccgaggccggggcagggtccccgcgcaccgcggagtgggctgtgattggaggaggagcccgtgccgggcgggcccgagcgggtgtcgagccggttcctccagtctgccccgcgcgcggagctgcgcgcactgggtccccaagagcccgcgggcgtccggcagccgagcgcacgttctttcggatgcacacgcccgggtccctggcgtctgacgccgtggggagggcagcgaggccccaggtgagtgtgtctgcctgcgcggggctggggaggcgccgctgggcagatgtgcgcccttgctgtgcgcctttggaagcaggactaatcagtgagcggagagcgggcggggatgtccgtgtggagtttcccttggcgtccccaagttactgcgtgttgcagtgagatgtggctctgcaaggcaggacaggcttgtggacggaggcgggggcgtttggcccggaaagccggtgttgacagacaccaggtgcgacacgaggagtagtagttgagggtaagagcaaatcccggcactctccaggtgcagcggcaaacatgggcaggctggagcactctcctcaaagaggaccacaagcaggctcctccctcaacctcggactgatgggggcacaactccgcgccggctgtgccgccgggttctgcagaggtctgaggctggaagggggtatgcgccgctttgggcaggagtcctttgaaccattcgctctggacaccttttacctttcgtgaaggtggagctcacttcagggtgctttgcttttttcccctgtaattagtattctgctgatctggttcatctgcatcctgcgtcccctccgcctggcagtaccttaagtgtgcgctgggaaaagggcgccctgcttctctgaatgcatggtggacttcttcatgggtgcacatggtacactgctacttgccggtattcaaccttccagtgtggattaatgagaaaagacccgttattctgtaccgcttcacgttttagatcgttaaccctacggatttcttaaatgtcatagttcaggtgagtaaagattggcaatgagttcacccagca

SEQ ID NO: 32878 - DNA, 885 bp, Artificial sequence
  DNA replication origin
agcgtctccgcccggctgccatcccacctaggaagtgaggagcacctcttcccggccgccatcacatctaggaagtgaggagcgtctctgcccggccgcccatcgtctgagatgtggggagcgcctctgccccgccgccccatctgggatgtgaggagcacctctgcccggccccgaccctgtctgggaggtgaggagcgtctctgcccggccgccccatctgagaagtgaggagaccctctgcccggcaaccgccccatctgagaagtgaagagcccctccgcccggcagccgccccgtctgagaagtgaggagcctctccgcccggcagccaccccgtccgggagggaggtggggggtcagccccccgcccggccagccgccccgcccgggaggtgaggggcgcctctgcccggccgcccctactgggaagtgaggagcccctctgcccggccaccaccccgtctgggaggtgtgcccaacagctcattgagaacgggccaggatgacaatggcggttttgtggaatagaaaggggggaaaggtggggaaaagattgagaaatcggatggttgccgtgtctgtgtagaaagaagtagacatgggagacttttcattttgttctgtactaaaaaaacttcttctgccttgggatcctgttgatctgtgaccttacccccaaccctgtgctctctgaaacatgtgctgtgtccactcagcgttaaatggattaagggcggtgcaagatgtgctttgttaaacagatgctagaaggcagcatgctcgttaagagtcatcaccactccctaatctcaagtacccagggacacaaacactgcggaaggccgcagggtcctctgcctaggaaaaccagagacctttgtt

SEQ ID NO: 32879 - DNA, 1204 bp, Artificial sequence
  DNA replication origin
taacaaagcacatcttgcaccgcccttaatccatttaacgctgagtggacacagcacatgtttcagagagcacagggttgggggtaaggtcacagatcaacaggatcccaaggcagaagaagtttttttagtacagaacaaaatgaaaagtctcccatgtctacttctttctacacagacacggcaaccatccgatttctcaatcttttccccacctttcccccctttctattccacaaaaccgccattgtcatcctggcccgttctcaatgagctgttgggcacacctcccagacggggtggtggccgggcagaggggctcctcacttcccagtaggggcggccgggcagaggcgcccctcacctcccgggcggggcggctggccgggcggggggctgaccccccacctccctcccggacggggtggctgccgggcggagaggctcctcacttctcagacggggcggctgccgggcggaggggctcttcacttctcagatggggcggttgccgggcagagggtctcctcacttctcagatggggcggccgggcagagacgctcctcacctcccagacagggtcggggccgggcagaggtgctcctcacatcccagatggggcggcggggcagaggcgctccccacatctcagacgatgggcggccgggcagagacgctcctcacttcctagatgtgatggcggccgggaagaggtgctcctcacttcctaggtgggatggcagccgggcggagacgcttctcactttccagactgggcagccgggcagaggggctcctcacatcccagatgatgggcggccaggcagagacgctcctcacttcccagacggggtggcggccgggcagaggctgcaatctcggcactttggaaggccaaggcaggcggctgggaggtggaggttgtagagagccgagatcacgccactgcactccagcctgggcaccattgagcactgagtgaacgagactccgtctgcaatcccggcacctcgggaggccgaggctggcggatcacttgcggttaggggctggagaccggcctggccaacacagcgaaaccccgtctccaccaaaaccagtcaggcgtggcggcgcgagcctgcaatcgcaggcactgggcaggctgagtcaggagaatcaggcagggaggttgcagtgagccgagatggcagcagtacagtc

SEQ ID NO: 32880 - DNA, 1080 bp, Artificial sequence
  DNA replication origin
tatcagttttgtattgctttttattttctgaggctaccagcaaatttgaagctacattttgaattctaataaatttatctaatagaacaaacttttgtaagattctatttgaaagactagataaaatagtgggggagtctcaaaaccattgccacaaatagtggaattcttcataaatgaaaactaataacaatttgaactcatcttctagagaaacaaaaaggaagggaggaaggaaggaaggaagggaagaagggagggagggaggaaaggagggaagaaggaaggagggaaggaagggagggaggaagggaggaaagaatgaaggaatggaggaaggaaggaagggagggaggaagggagggagggaggaagggagggaggaaggaaggaaggaaagaaagaaggaaggaatggaggaaggaaggaagggagggaggaagggagggaggaaggaaggaaagaagggaagaagaaaagaagaaaggaaagaatggaggaaggagggaaggaaggaaggaaggagggaaggaaggaaagaaggaaggaaggaaacaaggaaggaaggaaggaaggagggagggagggaatgagggagggagagaggaggggaggaaggagggaagggggagggaggaagaaaacgagggaaggtaggagggaggtagggagggaaggagggtaaagaaagaaagaaaggacaaggagataaagatttccaaacataggttaattacagagattatctttgaagacatcagtaccaaagtcagagtagttgcacagttacagagaatagtagataagaacttgcataaatctacatagtcaatagcagcagaaggcagacaaattcctaggcagatagagtgggttcccagcaaaacctggccttcaagctaaagacagattaaaacctgaaaactaagctgccagagtccagaatcagagagggaacttcctcaatgccttttagtcaattgaatggtagcttttccatgcccatccatggagcaatcagcatgtactcccctattctgagccaataaaaaccccagactcagctacacattgggacta

SEQ ID NO: 32881 - DNA, 1391 bp, Artificial sequence
  DNA replication origin
gctttgaccaaaatgctgatggtgatatgaacagtaaagtccaggccgaggtggtctcagatggagatgaagaacttgttagaagctggaataaaggtcactcttgctatgctttagcaaagagattagcagcattttgactctgtcctagagatctgtggaagtttgaacttgagagagatgatttaggatatctggtggaaaaaaaaaatttaagcagcaaaacgtcaaaaggaagtagagcaaaaaagtttggaaaatttgcagcttgatgatgtgatagaaaagaaaaacctgtagtcccagctactcgggaggctgaggcaggggaattggtgtgaacccagggggtggagcttgcagtgagctgagattgcgcccctcctctccagcctgggagacagagcaagactctgccaaaaaagaaaaggcggggaggggatgggacgggaggggaggggaggggggagaggaggggaggggggagacgaggggaggggagaacctggccggatacggtgactcacgcctgtaatcccaggattctgggaggccgaggtgggttgatcacgaggtcaggagagccagaccatcctggccaacatggtgaaacccctactaaaaatacaaacattaaccaggtgaagttgcacaggcctgtagtaccagctgctcaggaggctgaggcaggagaatcgcttgaacctgggaggcagaggttgcagtgagctgagattgcaccactacactccagcctgggtgagagagattctgtctcaaaaaaaaaaaaaaaaaaaaaaaggaaaggaaaagaaaagaaaaacccactttctgggaaggcattagaaatttgcataaataacagggaactgaatgttaatcaccaagacaatggaaaaaatttatccagagcatgtcagagaccttcatagcagcctctcccatcacagccctgggggcctaggagagaaaaatggtttactgggccaggcccaggtcctgcctgttctgtgcagccttgggacatggtgccctgtatcccagctgcttcagctccagtcatggctaaaaggggccaaggtagggctctagccattgtttcagagagcacaaggccaaaaccttggcagcttacacgtggccttgggcctgtgggtgcgcagaagtcaagaattgagctttgggaatctctgcctaggtttcagaggatttgtaggcggaagtttgctgcaggggtggtgccctcatggagaatgtctgctaggacagtgcagaggggaaatggggggttgaagcccccacacagagtctccactggggcactgcctggtggagctgtgagaagagggccactgtcctccagaccccagaatggtagatctaccaacagc

SEQ ID NO: 32882 - DNA, 1469 bp, Artificial sequence
  DNA replication origin
gatggcgagagacccctgagccaccaagtccgcttacctcaggcagatcccgacgggggctcggcgccgcactgggccccaagggagacggaggtggagagttccagaaaactgctctgcacggcgggccaggctcccgcggggctccgcaagacccccgcgtcgtctcccgcgctacggcaggcgctgccccagctcggtctcctcagccgcgctcggtccccgcgacccgcacggcccggacacgcccgccctcaggaaacgccggacgcttgtgggggcaaccacggaccgcaggacagagacccgcgggcggcgggttctctcggtggcgccgtatccagagcagcgcccgcgtgcccaggcggtgatgtcgccgcggccgaggatcctctgtgccagctccggccgcgcagcccggggagggtgagacggcgacgcgggccggcaagcgggggcggggcggaggcaggacggggcggggttgaaggcggggctgaaggcggggcctcagggaaggcgagagacagcgacgctggctggcgggcgtggggcgggacggagacaggacagggcggggtcagaggcggggcttcggggaggacgggaggagccgtgagcaggccggcggcgggcggggcggggccgaaagcaggtgaggcggggccaagcgccccgggtttctaagcggaggaagctctaggcgtttgtgttctgggcttgcagcggtggccgcgcgctcccggaggagtcgagctggaggaggggacagtttgggagtgcgagagtctaaagacgctgccaggctggcgttaaaaccttttggttatgggaagacgacaactatataatagagccatagtgggggctgtgggattgactcaaatgatgggaggagctggagtgggaggggataagccctgggacgacagaaatcatccttttggaaagagcaagggctggggaaggagggaatgagcactcccttggaactgagaggcagcctggctgagcttgctgtcctttggaaaagcaaaaccgaaatacccagattaatataggaggacaacttctgtagcccagatgctaacaaagatcaagggaaaacagaaaagactaatcagctttactgatggaaaacaatttctcaggcagtataaataggggaagcatgggacaaacaagtagaaggagcctcttatttaaaaatgggacctggtattcggtaaagacctacatgcagacaggagaaggcagtgtgccccggctactacgacatgtgagtgcagtgccaggtcgtggaaatcctagagcaggctgggactcctgttgcactccacacatggagcttctcacagatagctgagatgacactttggcataaaccaacccaagctctgacctcaaatgtaaaaaataatagcttagtagtaataaaaatacagggaaatatcaagcttcacaaatga

SEQ ID NO: 32883 - DNA, 1030 bp, Artificial sequence
  DNA replication origin
ccgccgggtctgcgcgggtctcgcatccagccggccgccgccagcagcagcgccgccgcccgctcttccccgagctcccgccggtggggacgcggggtcgcctgcagggccgccgcggacggggaacggggcccggcgccgcgagccgcgccagccctccgcgttctggcgctcaccttcgctccccgccgcgagcccagcgccgcggcccgcgcctccgccagctgcgggagcccccaccgcgccgccgcccccggcagcacccacgggctggcgcctcgctcggcggcgcacagctggccggagcgcaccaccgcggctccccggcgcggggggagggggcgggccggggggggcgggctgatgcgccggccccgctccctccccctggcccgtggggtggctgggctcggagacgctcgcaagacgcgctccatccctctccgcgcgggtgggagcgcctccgccgccgggcgccccgaggcccgctccccacccggctccccggtccctcagcgctccccgggcgcgagattcctaaggacacggcgcctcattcccgggctctaaatctccactcgcaagctgtgcagcggggaaagggcagtggggacacttccaacgcggaaggccagcgggagcgagacacttatttcattggccttgtttacagtacatttttattcccaagcactcgcggccgttccaggtctctgccccgttaggaagtgtaaatcgacgccagacccttcctggtgcacacaaagagaccaatcgtgcgcatgtgtctaatcctcccgcagcctagagacaggcaggcgggcgaggcagccgggcgccgacgtcctctgctgaaggagtggagaagaccgaccgacccgagtggttgatttatgcatgcgttttcgttaactaggactgaaagtggctcctggctcttctgggaaaatggagaacgtggttgttatcaatggataccaatgacttcctgaaatgctcaacttgtacaaacaaaaaatgaaaaactttc

SEQ ID NO: 32884 - DNA, 798 bp, Artificial sequence
  DNA replication origin
gccagaacgcggagggctggcgcggctcgcggcgccgggccccgttccccgtccgcggcggccctgcaggcgaccccgcgtccccaccggcgggagctcggggaagagcgggcggcggcgctgctgctggcggcggccggctggatgcgagacccgcgcagacccggcggcggacggcggctctcgactccggagagcggatcgcggggcgcaggagcccgatcgcgctggccatggcctccaactttaacgacatagtcaagcagggctacgtgaaaatccgcagcaggaagcttggggtgagtggctcgctcggcttgctccttccccggcgctcgttcggcccggctggctgcctggggggggggcagggagaggtgacccgtgcgggtacagggcagagagggacccggcccttaggcggatggcccgcttgttgcttggccaggtgggggcccacacctgccggggggctccgcagacggacctggggactccaggagcgcctgagtccccatcctcgagtgcaccgggctgtcttcgaccgtgcggggaagtcagtagacgaaaggggttgtcagttccaacgaggaacgtgccttggaggaggtttctttgcggtgctatccacgatggtctgttctcaaaagtgtgcgcctttcgggtggaactgctgtgtgtggcgacgctcgcgtgtgtttagaatcaccattttctggtctccgcttcccaagctcaattcgaaattcccgtctgatgccctcccagcgccgcgcgtccctgccggctgtagtttag

SEQ ID NO: 32885 - DNA, 1191 bp, Artificial sequence
  DNA replication origin
ggacctggggactccaggagcgcctgagtccccatcctcgagtgcaccgggctgtcttcgaccgtgcggggaagtcagtagacgaaaggggttgtcagttccaacgaggaacgtgccttggaggaggtttctttgcggtgctatccacgatggtctgttctcaaaagtgtgcgcctttcgggtggaactgctgtgtgtggcgacgctcgcgtgtgtttagaatcaccattttctggtctccgcttcccaagctcaattcgaaattcccgtctgatgccctcccagcgccgcgcgtccctgccggctgtagtttagggcgccttcgccgtggccgagggcggctcccgcgccccgcaagtgctcccctacccggggacccgcgcccgcgtgcaggcaggtgtgtgccccgcgcccgcccgcggtcactgctccgtgacggcaaagttgatggagacctttccctattcttgagagatgcgctgcctggcttgggagggaaaccgtgtagaacccaagggttcaaaactattctagtgaccagacgaggcggtaggagggactcacgggaggcagcgggacaggaggggctgtcacctgggcgggagcagcctagacttgggacgcgagagagaggatggagggatgggcaggaggtccctggggagcgcgcgatgtagggtggcctgggaggctgaccccggctggctggtccagaaaagcgaggggaaactcgtctgggaaagaaagggcccctgttccagactctggttgtgtctacctcactgttctccaacttccagttctaccaagctcctgcctcccggggcaaagggtccttgagctagaacctttcctgtgttccctgatgactggatgaatcctccaacttggagaaggggaaaaagaggggaggactttgctaatttttgtgtaaaaaagaaagcaaaagaagggtagtgttagagagtggaagaaagataaggtagaatccccgaaagagggcagatcaccaagcaccaggagtcgctttgtcgggagttggcggcgccaggtgttggggacaggaggacgggaaaggcagacttgactcttggtgctgcctctgctgggtttcgcattaaaggtgcagactgtaccccaaggacaacaggggcccattctggaacttcagcagctctgtagtaggctggg

SEQ ID NO: 32886 - DNA, 1709 bp, Artificial sequence
  DNA replication origin
gctctttcagagtttctattttacccaaaggagggactgtgctgagtctgatttgtgtgtcatctgatcgcctgggcgaggaacacagagaagacaatctgttaacgccgagcaccgaccatctctgtgtcaggctccgcaggtggctctgtccttggcaatgtcactcgctttcagcctgttctattgccaggtgtgtttggcgacgtggaaaatactctctcactgtgggaagcttgggatgcagggaggaaactcggatgaactgggtggtaaaaggctaattagaacggaaccacttaaccacttagcggtagaaccatttaaatgtcaaaatactgagagaaaaatcttgcattaaaaaaaaagttgttttagattcactatgtcctggattctgttgctgtccacgtcaaggaaagtgcaccaggctcagcaagaggggatcaaagagaagaggggcttttccctcgcacctcctgccccacgcccctggctctgccaccgccagtcctctgagcttccagaactttctgccccacggcgcctggaggctctactagtccctccttcccctctctcccagggtcctgccccgcactcctcctcgcctggcccgcaggcctgagggtggtgatgcttcctgctgttgcgcatgtctgcattttctcatcggttcccccagctcttgaagcagcctcctcatcaaattcttttaatctcagctgagtgcatcttctttcctgcaagaccctgatgatatagtgaaggaaaaatgaagcagggcagaggaggggaggagttaagagagttaaaggatgggttaaggtagtgattaccaaagaagctaggagaggagttaggggcggaaccaggggaggggctagggaaggagttaggggaggggctagggagagactagggaaggagtcatgggatagaccaggggaggggctaggggaggagttatgggaggagctagggagagactaggggcaggaccaggggaagtgctagggaggagttaggggaggggttagggagagactaggggagggactaggggatgagttagggagagactgggagaggagctaaggagatgaggctcggggagaagctaggggaggagttagggagagtggggaagagctagggggagtctaggtgagggacaaggggagcgacacaggaggggatggggaggagctagaggaggagttagggagagactaggagtggagctagggagagactaggagtggagctaggggaggagttaggagaacatctaggggaggagttaggggagaatctaggggtgaggcttggggaggagttcgagggactagggaaggaactaaggtaggggctagggaaagaggagctaatggaggggctagggaaagaagcagtcatgaactaggggaggagctgcaggaagaattaggggaggaactaggggaggagttaggggagcagctagggaagggattagggaagggggaggagctggggaggctctaggggaggggctaggggagattttaagggagtagttagaggttagaagtaggatctctggagctagaacaccaggtatatatgttgcctctgctacttcctagcttgtaacccatcttaagggaattacttcatctctgggtttgtttccctatctaaaaattctggatggtatagtggcactt

SEQ ID NO: 32887 - DNA, 922 bp, Artificial sequence
  DNA replication origin
ggctggctacaacctccacctcccagccttggcctcccaaagtgccaagattgcagcctctgcccggccgccaccccgtctgggaagtgaggagcgcctctgccccgccgccccgtctgggatgtgaggagcgcctctgcccggccatgaccccgtctgggaggtgaggagcatctctgcccggccgccccgtctgagaagtgaggagcccctccgcccagcagctgccccatctgagaagtgaggagcccctccgcccggcagccgccccatctgggaagtgaggagcgtctctgcccagcagccgccccgtccgggaggtggggggcagcccccgcccagccagccgccccatccaggagggaggtggggggcagcccccgcccggccagccgccccgtccgggaggtgggggacgcctctgcccggccgccccttctgggaagtgaggagcccctctgcccagccgccaccccgtctgggaggtgtacccaacagctcgttgagaacgggccatgatgacgatggcagttttgtggaatagaaaagggggaaatgtggggaaaagatagagaaatcagattgttgctgtgtctgtgtagaaagaagtagacataggagactccattttgttctttactaagaaaaattcttctgccttgggatgctgttgatctatgaccttacccccaacccggtgctctctgaaacatgtgctgtgtccactcagggttaaatggattaagggcggtgcaagatgtgctttgttaaacagacgcttgaaggcagcatgctccttaagagtcatcaccactccctaatctcaagtacccagggttacaaacactgcggaaggccccagggtcctctgtctaggaaaaccagagacctttgttcacttgtttgtctgctgaccttccct

SEQ ID NO: 32888 - DNA, 1082 bp, Artificial sequence
  DNA replication origin
taaccctgagtggacacagcacatgtttcagagagcaccgggttgggggtaaggtcatagatcaacagcatcccaaggcagaagaatttttcttagtaaagaacaaaatggagtctcctatgtctacttctttctacacagacacagcaacaatctgatttctctatcttttccccacatttcccccttttctattccacaaaactgccatcgtcatcatggcccgttctcaacgagctgttgggtacacctcccagacggggtggcggctgggcagaggggctcctcacttcccagaaggggcggccgggcagaggcgtcccccacctcccggacggggcggctggccgggcgggggctgccccccacctccctcctggatggggcggctggctgggcgggggctgccccccacctcccggacggggcggctgctgggcagagacgctcctcacttcccagatggggcggctgccgggcggaggggctcctcacttctcagatggggcagctgctgggcggaggggctcctcacttctcagacggggcggccgggcagagatgctcctcacctcccagacggggtcatggccgggcagaggcgctcctcacatcccagacggggcggcggggcagaggcgctcctcacttcccagacggggtggcggccgggcagaggctgcaatcttggcactttgggaggccaaggctgggaggtggaggttgtagccagccgagatcatgccactgcactccagcctgggcaacattgagcactgagtgaacgagactccatctgcaatcccggcacctcaggaggccgaggctggcagattactcacggttaggagctggagagcagcccggccaacacagcgaaaccccgtctccaccaaaaaatacgaaaaccagtcaggcgtggtggcgcgcgcctgcaatcgcaggcactcggcaggctgaggcaggagaatcaggcagggaggttgcagtgagcagagatggcggcagtacagtccagctttggctcggcatcagagggagacggtggaaagagagggagagggagaccgtgggggagaggg

SEQ ID NO: 32889 - DNA, 1084 bp, Artificial sequence
  DNA replication origin
ggagagcagcccggccaacacagcgaaaccccgtctccaccaaaaaatacgaaaaccagtcaggcgtggtggcgcgcgcctgcaatcgcaggcactcggcaggctgaggcaggagaatcaggcagggaggttgcagtgagcagagatggcggcagtacagtccagctttggctcggcatcagagggagacggtggaaagagagggagagggagaccgtgggggagagggagagggagaccgtgggggagagggagagggagaccgtgggggagagggagagggagaccgtgggggagagggagagggagaccgtggggaagagggagagggagaggaagagggagagggagagggagagggagagggccaattgtattaattgtaaagttggtatgtctattttctttttctctatgaaatgaatgaatatattttcatcaaatctacttaaaaactactcacacattcctgattgttcaaagtagtatcattttttccaaacacttttattgattccacatcttttttcattgttcaccctgtccacatacacacagatataccagcattgacaatagaggtaagtaaatgtcagttacctaagcaactcctcaggtcctgcttgtgtctctcaaatgttgagaagataggagatattctgtttctcaaaaggctgatgggctgagagtctttaaagtgtgcagaggggccggcagactctctgggctcttcagttagtgtaaactgttgatcctgtggcaagggcatagctttctctgtcagtctctctggtggagatctgaaacttcatcagggctgtgcacagaaggcgatgcctccaaggggactccatctctagcagcaaggctatcaggtttctcaggctgtcccttgagttgcatgtttttctcttaatgtttgaataattgaatcattttggtagaaaattggaggagtcgtgagcacgtcaaaaccctgctacaaatattttagataaactccatgcatatacttctgttgttgtagatgaatgtatgggttagggggtgaggggtgcatgcagcccatgccgaggaagatttt

SEQ ID NO: 32890 - DNA, 1211 bp, Artificial sequence
  DNA replication origin
tgggcgtgggctccgcgggcccgcactcagagctgccggccggcggacaagccccaggaagtgaggggcttagcacctgggccagcagctgctgtactggatttcttgcagggccttagctgcctcccctcggggcaggacttagaacctgcagcccgccattcctgagtcttcccgcgcgccccgcccaccgcccccgccccccgccgccccgccccgccccccgccgccccgccccgccccccgccgccccgccccgccgcccccgccccccgccgccccgccccgccccccgccgcccctcccctctgccaccatgggctcctgcgcagccagagcctcccagaggagcgccgctccctgctccaccacaccaagtaccattgactgcccaagggctgagtgcgggcgcagggcgcaggactgccaggcagctccccctgcagccccggtgcaggatctactgcgtgaagccagctgggctcctgagtctggtggggagttggagaatctttgtgtctagctgaaggattgtgaatacaccaatcggcactctgtatctagctcaaggtttgtaaatgcacccatcagcactctgtgtctagctcagggtttgtaaatacaccaatccacactctgtatctagctaatctagtggggaggtggagaacttttgtgtctagctcagggattgtaaacacaccaatcagctgtctgtcaaaacagaccaatcagctctctgtaaaacagaccaatgggctctctgtaaaatggaccaatcagcaggatgtgggtggggccggataagagaataaaagcaggctgccccaaccagcactggcaaccctggtccccttccacagaggggaagctttgttctttaactctttgcagtaactcttattgctgctcactctttgggtccacactgcctttatgagctgtaacactctcataaaagtctgcagcttccctcctgaagccagcgagaccatgaatgcaccgggaggaacgaacaactctggatgcgcccccttaagagctgtaacactcaccgcgaagatctgcagcttcactcctgagccagcgagaccacgaacccaccagaaggaagaaactccaaatacatccgaatgtcagaagaaacaaaccccggatacgccacctttaagaactataacactcaccgcgagggtccacggcttcattct

SEQ ID NO: 32891 - DNA, 1304 bp, Artificial sequence
  DNA replication origin
agcagggagcggcgctcctctgggaggctctggctgcgcaggagcccatggtggcagaggggaggggcggcggggggcggggcggggcggcggggggcgggggcggcggggcggggcggcggggggcggggcggggcggcggggggcggggcggggcggcggggggcgggggcggtgggcggggcgcgcgggaagactcaggaatggcgggctgcaggttctaagtcctgccccgaggggaggcagctaaggccctgcaagaaatccagtacagcagctgctggcccaggtgctaagcccctcacttcctggggcttgtccgccggccggcagctctgagtgcgggcccgcggagcccacgcccacgaagaactcgcgttggcccgcaagcgccgcgcagccctggttcccgcccgcgcctctccctccacacctccccgcaagctgagggagccagctccggccttggccaccccagaaaggggctcccacggtgcagcggcgggctgaagggctcctcaagtgtggccagagtgggctccaaggccgaggaggcgcccagagcgagcgagggctggagggctgccagcaggctgtcacctctcagaatgaacttttattaagagacttggccatcaacctggcttccatactgtaagtaatcattgatacaatcttttgcctgcatgtcattcttaaggcttttataactctcgccgagttaatgctgaaaaaagtaggctacacattgacatcaatgtgagtcgcacactcaagactaaatccttaggtgttatttttattttaatgcccctagttctattgcctaaaaccaatagaaaatataaattttgccctgtgctactcttattagtcctttattctccttaaaaggtaacatttattccttcatttcctgctgtatttgttctttgaaattcatgttaatttttctgatccacgtcgagatgccttatattcataaacttgaattttactcctcacgtattcaaacactaagaacaagttgtcatcataaaaatattattttgccttttttctgagttatttttgtttaccatttttaatttatgcatctttatttttctaagcccctgtttttattgctggctcatcccattcaataccaccaccttacaatgtctctttattttcacagtgtgatatgcaaaacatgaatgcatgacagatgttgtaaatttgcctaatttgatttggggaaagaaattgggtcatttatcttagtaaattcaaaacatgatttcagttaatttttttttttc

SEQ ID NO: 32892 - DNA, 1504 bp, Artificial sequence
  DNA replication origin
agacttggagggaattggggaaagaaaagaaagaatctaaaagaagagaagcgaccggtgcttttaagggtgtctaattttcaaaagagacgtctgggagtattttgctctgggcgtttgggtgagcaggaccggggcgttggagggtgcggcgggcttgggagcagggaaggttccgagtcctagggaggcggcagcgctcggctatgccctctggagactggcggggctgcggggccgaggggacccgcgagggagccgcgctgcggacgcgctgagcgcgggagctcgaggggccccaggcagcggtgcgggcgcgaagcccaggggttggaggcacctgggcgcacagcgcggggcgctgagccgggcgagacgcggggttcccggtcccgggcgcggcgcctaagcgggcgcgcggggcgtggtgcacccctgaagcggcgcaggctggcgcgggaaagcggcagggcggggcggcgcggttattggccacgcgctgggagcagggtcgcgctccgtgtcctcctcccgacagctcccactcgcctcattttctctaagcagagcaacttcgcggacagcggagctcgcccagcatggatgttccaggtaaccacccccgacctgccctcccctccgcatgcaagcgccttctgcgtggattttaacgaagactctccctggtccagatcgaggggtggaggaggtggagagagagaagggaaatcatgtaggatcggggctgcggacagcggatatttatcaagagccaacttctctgttcttagaaagaatactggaagagttaatgggaggctgtgggcggcgagggggcggcttctctgcgtgtctctgggctggtattgaaatggcctgtctgctttcctgggaggagcggggacggggcaaaagtgcagacgggcgcgtaagttcgcagaaacctgcaggggctgccgccccgctgagaaagagagaatccccgtggtctggaaaccagagctggagaataacccaagcctgggattccgtcgttggaatcggtccttcgcctaagagaggaatcccaggggtttcacccaagggggctcgctagtggctgcagggaccttggaagtaggtgtttggctttactgcccgtgtgtgtgtgtgtgtgtgtgtgtgtgtgtgtgtgtgtgtgtgtgtgtggtgtcatttcccccctagtaatcttattcgccccaaggagattcctgggatttgttctgtgggtggaaaacagataaaatctgtaccaaagggacttaaatggactttaaaaacatctcgaggattgaaaaatagaggatagcagggaaacaagggataggaaaagggttccttggtgctgctccaaggaaatgctgtgagatgaaggcgagaaggcaagcattcgtaggtttttctttgcctgcgtcttagccccctccgcgctggtgaatgggcggggtggcggtgacgccttctgagggtctcggggcccgtc

SEQ ID NO: 32893 - DNA, 1052 bp, Artificial sequence
  DNA replication origin
gcgagagcccgcccggggcggaggacggactcatccggatctggctgcagcgtgggctcggagctcccccttcctctcggtctccctctcggcccccctttatttccttcttgctttgcgtctttaacacctctcgaccctgtcctccccccgccactggaagtcttcccgtctctaaatggaattagtggagcccggagcctctggtgtaacgcacagacatgatccatgggcgcagcgtgcttcacagtgagtaccctccccgccgcgcccgtgcgctcccggagccagccctcccgcccctttcccggggccgaacgcgcaggaaaagcctctgcgccgcgctccggcggaccctgcagtcccgcgcgggtcggggccgacgtaaactttctgtattgcagcatcgtggaaccgggcgtgggggcggcgcgcggtcagccgtcgccggatcccaaaacctgccggagaacggtctttcagtgcgcaggaaccccccgggggtggaggatagcgtgcagttcagggatggacacgtgcggcagagattggcccaagcgagggcgcaggtggaaagcgggagagcgcggatgatacctagtggggccagaggagtcttcctcttctaggggctcccggagctcggcgggcccctgttcgcagtacaggaggtagcagaaggcacacctgaagccagcgctggagggaagggcgagggtcagcttccacccctttccgccctggagaccgctgatgtcgctttatgggtgtgtggtaacgcgggcagtgtagaggtgggaaggaatgagaggaaaatagtatcacgagtcatcgagtaaaaggcagtataagaaaatgtgtggtggaaatgtatcattactaagcaaagatgagagtgttgatcgcgggccacgcagttgagaggggtttgctgctgagttaaacacagtacgtggtctataatgtgatttcatcaaaacaggaagagcggagtaaacaaatacacatcctgatgctgaaggatgtgcatacctgtgtgttctgggtgtgag

SEQ ID NO: 32894 - DNA, 816 bp, Artificial sequence
  DNA replication origin
ccccgctcccctgcaccgccctccagcccgcctcccagacgcccacccacccgctcctctttccgcaagatagcagaggtggcgcgcagcccggcgagccgatgacggaccccttcttcctgccttcaatgcctcagcggaagatccccaagggctggagcgaggagcgctgccgctggacatcctcccggggaggctgctccgacctgctgcgcggcgcgtctgagactggggactgagccaccccgccgccgccggcgccgccgccgccgcccgctccgtcgctgccgtcggtctggactggcccccacctcgctgcgccctctccccggccccggccccggctcggggcgtcccggggctcgccctgcgaccgccgcctcccgcgcgccgcgtcctcccgaccccgcggcggcgacgatgcccgggaggagggtcctgacggcggcggcgcggatggtggcggccggcgcccgggtgtgatgcgagcgtcacggtggggatgctgctggctgcgcggcgctgagggccagcgagagcgagagcccgcccggggcggaggacggactcatccggatctggctgcagcgtgggctcggagctcccccttcctctcggtctccctctcggcccccctttatttccttcttgctttgcgtctttaacacctctcgaccctgtcctccccccgccactggaagtcttcccgtctctaaatggaattagtggagcccggagcctctggtgtaacgcacagacatgatccatgggcgcagcgtgcttcacagtgagtaccctccccgccgcgcccgtgcg

SEQ ID NO: 32895 - DNA, 1003 bp, Artificial sequence
  DNA replication origin
aggatgtccagcggcagcgctcctcgctccagcccttggggatcttccgctgaggcattgaaggcaggaagaaggggtccgtcatcggctcgccgggctgcgcgccacctctgctatcttgcggaaagaggagcgggtgggtgggcgtctgggaggcgggctggagggcggtgcaggggagcggggcggccggggggggggccggggggcggggaagggagggaggagaaaggagccggaagagggcagagttaccaaatgggctccttagtcatggcttggggctccacgaccctcctggaagcccggagcctgggtgggatagcgaggctgcgcgcggccggcgccccggggctggtgcgcggcagaatggggccgcggcggcggcagcaaggacatcccagccgcgcggatctgggggaggggcggggagggggtgaggacccggctgggatccgcggctcggcccgccagggcgcagagagaggatgcagccgcaaatcccgagccggatcctcgtgccggacggaaggcgtggaagcgggaggggccttcgtgtgaaaatcccttgtggggtttggtgtttcactttttaaaggttagaccttgcgggctctctgcctcccaccccttcttttccatccgcgtaaaggaactgggcgccccctctccctccctccctggggcgcaggtttcgccgcggactccgcgctcagcttgggagacacggcaggggcgcgccccagggaaaggcggccgtaaaagtttcgcggttgagcactgggcctgatgtccagtccccccaccaaattactcctgcaaagacgcgggcttcttgcaattgagccccccacctcgaggtatttaaaaccaccccaaggcacacacggacccccgttcccccgcgccacttcctcctacaggctcgcgcggcgcgttaaagtctgggagacacgagttgcggggaaacagcaccggaagagcccgggcttgtaaaatgcga

SEQ ID NO: 32896 - DNA, 1334 bp, Artificial sequence
  DNA replication origin
cgggaagggctggagcgcgcgggggtgcagggagtccctccctgggcgccgcaacggcacctcctccctttcccggctccgtcccgccctccctcggcctctgcggacgcgacccacgcagaccacagccgagcccgccggaccccgggactacggaagccatcccgtccggccacccacacccgcgccgcggctggggcttgggttggggactgtggcggcgaagaagccggggtaggaagagctaatggcaatggcggggtcgccggggggcggggggtcagcagcagacgctgagctgtgaagactagggtggccccgaaaggccgaggaaaggagaaagggccatgagaagagtctggcgagcgctcgaggccggggggctgcctcccggctctggcccggcctccgcttcccggcacctgctgctggggcgcccacgtgcgcgcggggctgcgcggggcgttgggtgctcgtcgcagtcctgcccacgcctagcgcagcggctgtgagtgggtggaggtctcctgccagtaagttgggatgagggacgatgaggtgacccccaagtctggaagggattcagagtctcacacgcgcccccaagcctcctaccaccacaccaaagtgctggttcctcgatttccagggtggggtaaagtgaccgagcaaaggggatggtgtgtttgtgtgtgcgcgcgcatatacgcgcgcgcgtgttgtgcatccgtgtaatgaaagttgggtcatgggtcaacccgggagtagagcgagatggagacctaaagagagaaagctgagagaagggggaagacatggacagggtaagagagagagaaaggagagagagaagaaagggaaaagaggagcggggagagaaaagagaggcaggagagagaatgaggggacagaagagagtagggagacgagaaggcggaggacagaagaaatgggggagagggaagaggacagagaggctgcgcgcctctgaatacgccaagtccagcagagctggaggcctgtgagaggagctgcaagcttgagcaaagggagagaggtgagcggatgaagggagattggtgagtatccgcccacgcacctacttgtaaaaagatcaaggggaaacacgcagaaggtcccgcgggagtcctgtgacccacgtgaggtgctcgtgccagcgcggggtgggaggtggtgggcaatgttcgtcgtggagttgaggaagaaattctccagccttaaggaagcaaaagagttcaaagatcagtgaggctgctcaacagagggatatgcagatgacagaatgcttggaaaacgcttttggggatccgggt

SEQ ID NO: 32897 - DNA, 964 bp, Artificial sequence
  DNA replication origin
aagaatactgagataaaggacgcctctcagtagtcacctgtgatcaagtcaccccccgagttagcacctaccagatgctaagtgctgtggaaagtggaaagagtgaaattagagagcatgattcccactctgaagggcctctagtctaagaatgaaaaaaataaatagaacattgattaaatgtggtttgctgtcatgataacatctccacggtgctatagaaatagaggactaactcagcttcgggagcctaaataggcttccaagaaggaatactagagacaaggtgcgtagactagtagagggtgaaggatggatggggaaggagggtgtgtctagtgaagaaagtagcatgaacaaaggcaaggaagtatgaaagtgctggtgctgaaagacagctcaaacaggtccatggttgttggtgaggggtgtggcttagcaaggggcatgctatagtgtggagtgtggctataatgaaaggtgtggccatagtgaggagtgaaagcttggtaaggggcatggctattagtgagggggtgtggctatatggtgagttgtgggggtggttaggggtgtggtaaggggtgaagcttattaccaggtgtggctgtcagtgagaaggtgtagttggtgaggggcgtggctatagtgagggacatggctgatagcaacggtcttagctgtaatgtgggatgtgaacctgtaagaggccatggctgatggtgagaagtgtggctgttagtcagaggatgtggccgtattgtgggatgtggtgtggtgaggggcatggccattagtaagggggtgtggccataagtggggcttggctgtagtgaagggtgtggctgttagtgaaggggtgtggctatagcgtggggcatggtcgtcgtgaggggcatggttgtagtaaggggtgtggctattagtgagggtcatagctacagctatggacatggtgaggggc

SEQ ID NO: 32898 - DNA, 862 bp, Artificial sequence
  DNA replication origin
attatttctttttgctttgtttcttttcctatcctgttgaatcatgtccttggaaagctgaaattaatctcatcctaaaatctagaaactgctagtgtaatacatacaaaatacatactcttctcatagtttgcattccttctgatttaaaataagttattgaaagatttgttttctttttccagttcatttatgtgatcatttcattgcactcttactagcattcacagtgtggtatgcactctgctgaatataagccagaaagctgagaaaagaggaagaaaaattcaaagaggaagagtaggagaaagctttggtctggggagagcttgcagacccatggggcacatggtcctgagggcaagtggtctccatgtattgtggtgtatgggcagtggtctttgcatgctgtagtctccacatacagtgggctccacatgctgtggtctctgcatgctgtggtctctgtatgctgtggccgctgtgtgctgtggcctccacgtgcagtggtctctgtgtgccgtggcccctgtgtgctgtggtctctgagtgctgtggtctctgcgtgctatggcttctgtgtgctctggtctctgtgtgctgtggtctctgtgtgctgtggcccccgtgtgcagtagtctctgtgtgctgtggcttctgtgtgctgtggtctccgtgtgctgtggtctctgtgtgctgtggtctccacgtgctatggcccccgtgtgcagtggtctctgcatactgtggtctctgtgtgctgtggcttctgtgtgctgtggtctctgtttgctgtggtctttgtgtgctgtggtctccacgtactatggcccccgcgtgcagtggtctctgtgtactgtgg

SEQ ID NO: 32899 - DNA, 1462 bp, Artificial sequence
  DNA replication origin
tctgatatgagaaatggagcaaatattcctttggttagtccatccattaaatatttgaggacctactctgtagcagatactgttcttggtgctgggacagaaatggtgagccactcacatgttctcatgaagctgatgattagtcggggaggcagatttaaaatacagtaagctgggatacctgttgttgagaaaacaaatggatcccccagtccagaataatggggtggcgtggtgaggaaagacttacttcaggaggcgcatttaagatgagaactgaacactgagactcaggagcttcgagaggagcttgccagcgaggggagaccagaggtgtggtggtgggggctccagatgctgcaggaacagtgtgggggtcggggagcccatcaggtggggctaccaggctctggggaggagtgtggatgccatgtagtttcccaaattatcttgtttatttgtttacctctcttctctagaagtagggaagacggagagacacaggcaagtgggagatatagttgggggcatggctgacatgattcatttatgaattaatgtaggtgtgagggggaaacaggcaagtaggaatccagagctgttggctgaagcagtagcacaggttgaggtgctgttgactgagatggaagagaggtggggtcagggcggaagagagggccatgataatgactttggactggttacagctgagatgcctgggataggtgcaaaggaggatgccagatggatgatggatgtgtcagtctggctcaggatgaggcctggtggggtcagcagtcatggagctgggtgaggtggcttagggaaagggtggggaagggaaggcaaaggcgactcaggagcaagcttggaggacctgcggcagtgagaaccaaccaagcaggcagggaagagccctgaggtccaagacattgaggagaggctgtgtgtgaagcagaagaggagagagcctgcaacacaagagcagtcggtgacctgcggcctggggaggcggggggaggaggcagcagggcatggtggcccctcacagctgttgcaggtgaatgcaagggaaggggctggccgctcattttcctacttgcgtgtgttctattccacactggaatgtagaaagcaaaaattagggagcttggaggtggaggcaacaggtgtagacaagtgttttgttttcttttgttctttcccagagcttggcagtgcgagggagcctagaaattaggtggcggctccagagagatgggggtggggagaaccaaaggaagagtgcagtttcagatgagagattcagggtgattcagaggctcctatgaacagtgtggaagagggaggcaggaaccggaggctgaggtccttgtgcagaaaccgtggggacctagagcaccggtgctttgatgagaggaagtgagcattctccatcggaatagggggaagaaagtgagga

SEQ ID NO: 32900 - DNA, 1224 bp, Artificial sequence
  DNA replication origin
ctttaattaacataatgtgacattatgagctttaaaaaaaatgtttttcccgatttccttgggaaatgtggcctaaggagaatggatggcactgcctctccgggtcctgtgtgctcccactgcctgagtcatgattctctccagcaccattctccacccctccagacagtgctcttggagggaatgcatcccatatatcgggcctctcaatgatatcacgacaaaggaactggcataaagaaacttctgatggtctcattgcagtaacgagcttaaaaagaaaatgacaaccttagttcaggtaaggtcagtatttgcagacctgtggatttgtaaggatgctctggaaagaaaagctaatctcaaatgtgccaaaaaggaatgtgaatgtattagggcatgcctaatttttattggtgttaataagtagaggaatgttagtacacacatgtgtggggtttattcttttaagttcatgtctattatgaagcacagatatgctcttgtttcctctgtgtaacatgagaccagggagtagaagggattgaattgcccagtgaaaggaggatctgtgtgtagaacaggaagtgctgctgggcaggtggagtggagaagaggggacaggtggggaagaggtggggagagaagggaagaggtgggggcaggtccgggacaggagaggagaagtagggggaggtgggaggaggagtggagaggagcgggaagagggagaggaggggagaggtcggggagaggaagggagaggtggagagagaagggaagaggtgagggacaggttggggagaggaggggagaggtagggaagaagaggagagaggtgggggagaggaggggacaggtcggggagagtaggggagaggtgggggagaggaggggagaggatggggagagggagaggagtggtggaggacatgtggggaagatgcagggagaggcaggggagaggagggggagagttggagggagctggtgcagggggaggcacagcctcacgagcctgggcactcaggaggacgcagcacagaggcgccagttgagccgcctggttgatggaccagctgattgtcttaagcagaaagtcacctgtgcagaccgcctcctgggagaaaacctttctaagttatcatatgaattgtaatgagaggtgagtcaggcacaggttgaggcgtgagtgcagctgaactaagcttaggagcaaatctt

SEQ ID NO: 32901 - DNA, 946 bp, Artificial sequence
  DNA replication origin
gctgggacaatgccagagcctgcaggtcaggccatggtggggcctggctccactgctcaggcttcaggcagaagggcacgaggttggaacaggagctgttgatgggactcagagctagaagaggatgagcaggaagagagggcaaacagagaatgagggtatccccaaaggagggtccacttggatgacatggccagctccaagagccacctccaggtcctggtccttacatccaaatcctaagtcctagggagcagcatgtccatgcagatgggctgtgccctgtgcccctcagtgctcagacaacagaggtggcacagacgcactgcacccagcacagctgtggtgccctgaggcctcaggtgtccggatgttgctcaggtgccctggtggctcaggggagagcagactcagtcacagtggctgggcatggcaggaagtggctcctgggtgtacaacatgggaggccagcatcatctggccaacagatcctgccaagatgggacagggtcggaaatggaagacaatagggcttccatgaagtactcagactgcctatgagatggcaataggccccaggacttagcagcgctctgacagggagctggaggtggggataggatggacctgaggtccgggtgctggaggtggggacaggatggacctgaggtccgggtgagggagctggaggtggggacaggatgggcctgaggtctgggtaagggagctggaggtggggacaggatggacctgaggtccgggtgaactgctggagggaggcttctcaggccacagtgcaaaggaggaagaaaacgctttcaaagcccaggtcaggggtggggaggttacgagtgatggccagcgggttaacaagccatgccagaaactactggaaaacccaagactgtagacactttctaaaagttcatttgaaattattatacct

SEQ ID NO: 32902 - DNA, 967 bp, Artificial sequence
  DNA replication origin
tatctgaaggcaccatttggtttggctccacatcagggtggggagcactggcatttggggtcgtgctgtcaccctggaaggtgagtgtcactccttggtcatcagcattaccaagggcaagggaagaggaatggcagggcccctgctgagagctctgccatctcctgggaggagtggacacagaagccaggagacaatggggagacaatgggaggatggggagatagtgagggggtggggagacaatggggaggtgaggagatagtggggggtggggagatgacaatggggggatggggagatagtgggggctgtggagatgggggtggggagatagtgggggatgatatagtgggggatggggagatagtgggcggatggggagatagcggaggatggggagatagcgggggatggggagataggggatggggagatgggggatggggagataacgggacaatggggagatagtggggggatggggagatagtggggtggtggggagatggggtgtggggagatggggaattgggagatagtgggggatggggagataacagggggacaggcagatagcgggaggatggggagatagcaggaggatggggagatgggggtggggagatagtggggggacaggaagactatgggggacatggagacagtcggggtacagggagagtatggggaggtgggaagacaatgggggcacggattgatgtcaagtctgatgctcagctgcttagcggaggtgtggccggcagaggccagcaggaagaagtgtgctgggcactcagcacctgccagggaagctcagaagcaatcgaaaagggcacgagtttgtccaatagggatggggtgtcaaaggggttctgtgaggagacatattttgtaatcaatcaataatgtctgaatattaagagatcactaaatcattatgtaaatcctgaaacataaatcacag

SEQ ID NO: 32903 - DNA, 1127 bp, Artificial sequence
  DNA replication origin
gtgatgtgcccgaagtgcttcttggggctcagggtttgttcatctgatgtttggtcattcctggggactcctaccaccgagccagccataaaacaaagttaaagcagcgagttgcagaagagacaagggcaagaagccagctcctgtgggacaatcacagcacgcagtgatcagggcatgtttctattatctctaaactcgggaacgggtcatgtgaaattcaggcgcagggcaggcgggagagcgatccgggatgggctggcacgtactgggcactgaataagcttttgttcagtgaatgcaggagccccgggcgtggcggctttcacagcccctcagctgtgacagttcccctggggtggcgccgcctccccctatcctggggaaaggcgttcagggagtgagaagcatccctgggtggggtgggggatgctggtgagaaccagggacgccctgtgggcccagggccagcctgctttacagaacaattgggatgggaacacggatgcctgctctcccagatgatactgcgaatctataaatatagacttagacacacgtggtggacgtgttctcctccccggggtaacggagatgtttccagagagcagatctttgcagccctgagaaggacgcccgagagtttgtgcagcctgggagacggcggggggtttgattcaggggtgcccgtgggaaggggagggctgggtcgtcccagaacctactgactgtcctcgacccccgactctctgcatgctccggatctcactcccgggagggcccggagaaaacccaagttggggtgagactcagaggggggcggttctagtggagaggtaaacggggggggacaacgctgcagccccctggggcgagggtgcgctctacagagcgctgggggcaagggcacctggcctctcagagaagttggtgggggagggcaatgtgacaattaaagatatgtagtcttgaggaatcagtccccaaagagagaggcgattgaatctacccggatttcgtttaagtggggagctggtcttcttgggggaaaaaagtgcaaaaagaaaagtagagagggtggagcaggggatgcggcgagtggacccccagtgggtgctcggggcgcg

SEQ ID NO: 32904 - DNA, 1162 bp, Artificial sequence
  DNA replication origin
catggacaatctcttgggaagctttaaagagtacagccatatccccagtgccccagaaagtctaggtgactggtctgtggtgcagcaagagtgtcaagatgctcaagccgctggggtgtctccaagcccggtaggtctgaaatccaggcctgctttctggagcatggtgggccattaggacgggatgtctgggaagaagctagggaactttctgtgcactcagggtaatgggtcatggggttctgggcccatgaaggagccagggaggcagctggggcatgggcggtggggtttcttctccccatcactcctcctttgcggtgtgtttatgagatgtgtaaggaaggttttccttcttttagaactgcgggtccagtgaggccttggagttgggagttgggtcaaggggcaggagcaggcgggggcagaagtggtggggggaggagtgggtgggggcaggagcaggtgggggcaggagcaggaagggctgaggctgcaggcagggctgggggcctgtggccaggggtgtgaggaccaggcccaggcagaattcgcttgaccacaagggcgctgctctgggatgcagtgtggccccaggctagggaggcagcccctctcctacttgcatcccaggccagcagcactctgatgttgcagggctgtaagcatagggagcacccaactcagcctagaggggatggtggtgccctcaggtgctggagctgacaggagggccaggagacctggggtcagtgtgaggccctgagccaccccattggagacacagaactatgggggacttatgggatgggcaaatgtataatgttaagccgactggagtgctgcgtggctagaacgtgggcgtagagaggaactgtgtcattacttcttagtcactgtcggctaagactggaaacatatgggtaactgctagagtctgaacgtatgtatcctcccaaaattcatacggcgaagcctaaatccccaatgtgatggtatttggaggtggaatctttgggaggtacttaggttgtgaaggtggagctcttaggaagggaattagtgtccctataaggggatgaagagatcagagcgctctctcttcaccaggtgaagatacaacaagaaggcggccatccataaaacaggaaaagagtcccca

SEQ ID NO: 32905 - DNA, 1233 bp, Artificial sequence
  DNA replication origin
ggtggccagggcgaccgcggggcgggccagcgccgggggtcgtggccgggacacgtggtacggaaccggcgccgcgcttgctgctggtaacagggccttgcctagtgggccttccttcccaggtgggtcttcctgatggaccttccttcccgggtgggcgccctgagctgggaacgggctgggcggggaggacccgggtcagcggcgagagtcacgcctcattcgtgggggagcgtggggcgcccggccgcagccaggcgggaacaatggtgtccgggctgttcccgagcgcgcggtcgggggcggaggcccgtgacggccatggccccggggcctctcgcacctccgggccactcgtgtcccagcagcgccgagcgcgtccccggtacgcagggacaagctgggcggcgcacttggcctgagcctgcgtggccctccctggtggagtcgagtggaacgacccgggttggagatggggttgcggggagccgagcgctggtcaggccacacccctccccaggggcctgctgagaactccagcctttctccaacggatccctttcccggagacctggggtggggagtgtggcgggacagaagcctcccaggttcaaagggccctggacagcgtccctagctcccgccagcatttgaggcagcgtttaaggctataggaggaagcgtctgaggggagacaaaattcccatgccagcttgatggtctggggcaggtgtcttattcaattggcttcagtttcctcatctgtgaaatagagacaatatttggtcctcacagacagggccaccaaaccaaactccccaccgcctgccaaggtcagattccgtagatcatccaagcatagactgcaggaagaggcggagaacccggggcctgctaccaataccttccttgtccctaatgtttgcaggcaggagtggaggaagagaagtccacattatgcttagggatcaagttctagcttgggcagattggagattcttttattggttcttaatcagacatgaaggtgtgattcagttatttgtgttatatatgccttcaattatcaagggacagggactgagattctcagaactagaagactcatttgtgtgtactactgacggttccaggtgccacagcaatttctcctgccctccactagtctcaacatttaaatcatgttactcccttgccaggcatggtggctcatgtgtgtaacctcggcacttt

SEQ ID NO: 32906 - DNA, 951 bp, Artificial sequence
  DNA replication origin
catcacttgttgaaagtgatgaagcctaacacagcaggacttctcttttgaatcgtcctctttttggactcctcagtaccctgtgaatgatttggaagcattaagtatttgggaaatttccaagacgtgggagcaactccaggctcaactatggagagcctcatttcagcctcgttctctcccctcctgctcttttttcattgttactgttgagagtctcccggggaggtgccatattcaaatttcttccattaattacttcaacacacatttatagaacacgtgtcatgtcccagagactgttctaggtgctgcggatacagctgtgaacaagacaaggaaggccctgccctcatggagtttatatgttgtgagaaaagggggtagcacctccaaaaagaaagaagggaagggaggaaggagagaaagataaaaggaaagggaagggagggggaggggagggggaggggatggagaggggaggggaagggagtggggagaggagaaggaaggatggaaggagggcgggaggaaggaacaggagggaagaaaaaggaaaggagaggggaggtgagggaagggaagggaagggaagggaaggcaagggaagggaaggaaagggagaagggagaagggagagagggaggagagagggcaggagagaggcagggaaggaaggaaggaaggagggagggaagagaggaggggaggaagccgggagggagaaagagagactactttagaatgtaattagtgctaacaagacaataaagggggataatgggatggagagagaatgactgttgggatgaaatatttctttagctcattcattcaagagtctactttctgttaaactaacttgaggcaaattgatgattggttggtaatttggacacataactccttctagaaaatattttccttaaaatgactgcttccaaagtgtta

SEQ ID NO: 32907 - DNA, 1156 bp, Artificial sequence
  DNA replication origin
tgcacatggggtttcgtgactacaactaatactaagctgcctttatgcatggacttgatggctctattaaatgaggtaataccataagggcaagacacattttcaacaggaagtcagctgacgtgacagatgaagaaagagatgcgagtggccccctagtttctattgcctcttaccttgcgcagccattgcccttgcagctcgcagggggcttgtgggcagccctgcctgtccggccttgccctgcgaggagcagggaatccagttctgctggagggcggtcatcacttctggattcgtcctttttttttgtactccccaaagagaaagaacaaaagaccactagatgttttcatacacgcgtgtgtatgcacacctgccttgtcacacgtacccctcagtgaagttactgtgggcctggtgacaatgtcacactgcctgcatgacgaatttgggtgaatctaggaagggcgaagggtgtgatggggctggatgggagaggatgggttctttatggcatcaccatagtggtgtgtgtctgtgagtgtgtgtgtgaatgaatatttgtgtgtgagagtgcgcgtgtcattgtgtctgtgtctgaatttgtgaatatgtctgaatgtgagtacgtgtgagtgtgtatctgaatgagtgtgtgggtgtgcaaatgcatgtgtgtcagcctacaagtgcgtgtctgttttagtgtgtgaatgtcagtatctgtgaatgtgtgtgtatatatctgtgtgtcagtgtatctgagtgcgtgtgtcagtgtgaatgtgagtccgtgtgtctgttagtctgaatgtgagttggtgtgtgagtgcatgtgtgtgtgaatgagtgcatgtgagtgaagatatgtgtgtatctgtatcagtgtgtgagtgcgtgtgtatctgagtgcgtgtcagtgtgactgtgtgtgtgtccgtgtgaatgtgtgagtgcgtgtgtgtgtacgtgtgaatgtgaatccgtgtgtgtctgtatgtctgtgaatatgtgactgcgtgtgtgagtgcgggtgttagtgtgtgtgcatgtgagtgtgtgtgtgcatgagtgtgagactgcgtgtttgagtgcaagtgtgagtgcgtgagggtaagtgcatgtgtgaaactgcatgtgtgagtgtgagtgc

SEQ ID NO: 32908 - DNA, 1365 bp, Artificial sequence
  DNA replication origin
gagagtcctgggccattagcagggccctcccggagccggagaagtgaggggccaagtccactccaggccaggcgcaagcccgggagcagagctcgggcgccctctccttccatctcagtacagcaccctgttcctcctccctctgcaggccgtctctgggttttcttactgagatggtcaagggtgaaacccgaggggctgctctgtccttccgctgctgcgcccctgtggagagaaatgagccccctccccagtcacagcgatgaaactagctcagggaccactcacgtcagccccaggaaggacgccggcctgggtgggaagggtagggttcccagtgctgactcaccgtggggctcacggctggcagagtctcagttaccaggtgacctggatgtgtgagtgtgcttgcctgtgtaggctgtgtggctgtgtgagcgtgaagcaggtgtgagtgtgaactgggtgtgaagcatgtttggttctgtgagtgaatgtgatgtgtgactcatgagcgtgtttgtgagtgtggatcgagtgtgtggatccaatgcatgaatcgtgtgtgtgtggatcctgtgtgagcatcctgtgttttgtgtttgtgggtgtggaccctgtgagagtgtgaatcctgtgtgtttgtgggtgtaaaccctggtgagtgtggatcctgtgtgtttgtgaatcgtgagtgtgttttctgttggtgggtgtggaccctgtgtgtgaattctgtgtattttggggtgtggaccctgtgtgtggattctgtgtattctggggtgtggaccctgtgtatgaattctgttatttaggggtgtggaccctgtgtatgaattctgtgtattttggggtgtggatcctgtgtctgtgaatctcgagtgtgttttgtgtttgtgggtgtggaccctgtgtgtggattctgtgtattttggggtgtggaccctgtgtgtgaattctgtgtatttttgggtgtggatcctgtgtgtctgtgaaccttgagtgtgttttgtgtttgtgggtgtggaccctgtgtgtgaattctgtgtattttggggtgtggaccctgtgtgtggattctgtgtattctggggtgtggaccctgtgtatgaattctgttattttggggtgtggaccctgtgtatgaattctgtgtattttggggtgtggatcctgtgtctgtgaatctcgagtgtgttttgtgtttgtgggtatggaccctgtgtgcgaattctgtgtatttttgggtgtggatcctgtgtgtctgtgaatctcgagtgtgttttgtgtttgtgggtgtggaccctgtgtgtgaattctgtgtatttttgggtgtggatcctgtgtctgtgaatctcgagt

SEQ ID NO: 32909 - DNA, 1265 bp, Artificial sequence
  DNA replication origin
gcggcgccgggcctgcgcggtcccggcccgcccgggagttggggtcaatgaatcccctctccgtggtggcggtggggatgccgtaggactgcacggctggagctgagggctgcagcgggcacttctgagggagagggagttagatggacggagcctggacgggcacgcgggccccgcgcgtctgctgccaccgctccagcgcttgcccttgcgaataaccacgatgtttggtgtggtttttcaagcaaaggcccctggcaaactcaagcagccgctggctggctgcagccgccccagctcccagcagagccccactcccccctcccaaacttggcctctgctaacccggtccagcgcgtgtgcgcgctccccaggctgctccggtgtgcgtcctgctccatctctccacctcttcccaggaagcggcaaaccacagcctggggcggggagagggggggttgcattttccccttgcagagccccccagggcgcgcccatcccgaggtggggaggactgccgtcgcagaggggctggccgcccgggtgtccccccaaggcggggtctccctgcagaggagcggctactgcctttgggactgtggagacaccagggggacaaactgggagggatgaagggcgtgggaagggttaatcgtgggcaaaggattgcacagaacacaactggcagtgggtcggctcctgtccccccacttccagagcaaaccctaccgtcacttccacccccacgggcacctttcctggagtttgctttacagcctaaggcagaggcactgagacgggctccagctggctctgccctgggctgctgctgtgaagtccagaagcaagctcccagggaagtgggccctttttaaaacgccaggccttgagaattatgtaaatttaaaggaaagatggcaggttctttcccttctctaaaaatagaatgtaggaaaaaaaaaatagaacgtaggcatcttgatattaaattccaaataagaaaccagcaaaactcatcttcccccttctcatgattgtgtatcttccacgggtatggaattgtgtggggtgttattgaggctgtgtggtgtgctggcgtctgaatgcagcttgacataacagaaagcagttgctccctgcgttcttatttctacaatatacagagacttttctgtcctgtagatacatgggggatgatcataagtgagcttttataagcgcagagtattacctatatcaccgtgaaagtgtatcgcatacaggac

SEQ ID NO: 32910 - DNA, 1014 bp, Artificial sequence
  DNA replication origin
agctggtggtgacccggctgagccccaacttccgcgaggccgtcaccctgagccgggactgcccggtgccgctccccggggacggagacctcctcgtccggaaccggtgagcccggcgccccccaaccccacgcccccgttctcgccccgggctcgcgccgcgccgcgccgctcccgcagtccccagcccgcccgcgtgcccacactccggcgcgcgctcgggcgcacagcctgagtttgcgagatcccgggaagttgaacccgccgccatctggcgaaggcgaatgtgatgtgactgttgctggtgtgaatatccgatgccaccgaacgtcctcataactgagggttattttaatttgggattcccctcccctcctccagccctccctcctccccctcccgctcccgaaataaaaccgacgggacccagaaggggaggctccccgccgggccgcccgcgcgcacccacagttcctgcgttgacataatctttagggtggagcgggagcagcctggacgcaaactgcgacgtttaggtaaacgtgcttcggaggaaggaggctgggacccggctggctttccctgttccctccaggttggcagccgcctcgcagtggcggagcctgtcgttggatgtgtgggtgtgcacctcgccggtgttgtctgcgtgctgtcagtgcagtgtgactgttgtctgtcccctgagtgttaacgaccgccgcgtggcgcgtgtcccgggcagctgggccagggtcggggtgggggcatggctgcctttgccggcacgttttgcagacattcaggtgacaccgggttgttgcgagaccttctggcttttccattccccgcgctccccaccgtcgtgtttccgcctcactcatctttagtaactggcgaagcaacagggaggaaacggacctcactctttatcggagccatgcccgcttaggtctttgctccgtgggtccctggctgcccgacttgactggcaaggcgctcctctatgccctctgc

SEQ ID NO: 32911 - DNA, 1297 bp, Artificial sequence
  DNA replication origin
ctgagcggccccgggcgcggcggtccatgcgagcggctccccgcggtccgcggcgcgcccggagcccggagcccgcggggacgaggccaaagttgggcgcgccgcggagttgcgcccgcgcccggggccccgcgtccccgcgccccgcgaactccggcggcggctgaggcgacggctgcggcggccgagcagcatgccgaggaggaagcagcaggccccccggcgctcggcaggtaacgggcgcgcggcccgcgccgcggggagtgggcgccgggaggagcaggaggagggggcttcgcgggccgaggtgcgggacgtgggccgcgggccgccccaagctggggaggggaggcccagcctgcgctggccacagtcgtctggaggctgcggtcgccgtcctcccccacacccccaacctgggccggcgcgtggagcagagaaagttcgcggtgcttctctgcgctgcgggaagcccggatggccgggggaggccgggggccgcgggacggcgggtgcttctggctacctcaggagggggcgtgcgctgaggggaagtagttgctccttggctgccggagcgcactggaaaagtcctccaaaggcggggaggctgaacctgacacttgaaaacaaggtcaccaggctgggacgcaaagaatgtgttcagaagatttctctggaaaacagcagcctttaatgtcctgtgcaagaggccccccgcccccactttttttttattacctctaaagatgtcttttgatcaggccagcacaaggcagtgatagtgcagactctgattgaacagaaaagttatttttctctggaggaggaactggcaggagctggttttccttgttttctgttttattagaggattgccatccttgatttgatgtgtgattgatcgcctgtcatctggcagcctttgatctattcattcctgataaacatcaataaatcactcaccatggaaacacacatgctcctgacagctccgccactatcagggcaacttttctctctcgctcccccttttgctgctccattttaattttgtctcagaagttttacagctgcagcatcccttaactcagctcacctactaatccattgctaaacctggggtgggtcagctgccgtgcgtttttgagcacaggtttgaaaatagcccagtgattctgctgcctgctcaagtcttgtctcagttttggacattgcgtttgtggggctgagaatgcaacccatatgccagtgagttatcgctaaataatagagtaaatcaactctctccaagctc

SEQ ID NO: 32912 - DNA, 1164 bp, Artificial sequence
  DNA replication origin
gacagagagggagtctagcagcaccagcccagaacttgggtgatgaggacaattagtctacattggagggccccatctcccggcaggactccttctgttctccaaggtgggggtagcattagctgagtgatttcttgcgtttgtctgagactagagggtgtcctggccaggttctcgggtgtctggaatgctgtcttccaggagatactgggcatggagacaaacacgtgtccatggccgcaggaccagctggccgtgaggggactgcctgtgtggtcttgccgcagtgggtccccgtccaggtggtgcagagggaacgtggggctgaggtgtcttcatgggaggccatgtcgggggggcattccacggccacgctctgtcttcatgtcctccaggcataagcagaataaacagatgaacacagagagactgggaccaaagcactggtgacaaccctcttcctgatggtgtcctgagtgtgggagagcagtgaccaccagtaagcgtgggtgtgcgtgcacgtgagtcactcactcataagggactctccgagtgagtgtgagggtgcgtgagtggttgtgtgtgaggtgatgagtgtgtgtgagtggttaagtgtgtgtgagtttgtatgattttgtgtgtgtgtgaggacgtgtgtgtttgtgtgtgtggtgatgtgtgtgtgtctatgtctgcatgagtgtgtgtgcatatgtgtgagtgtgtgtgagagagtcactcagactctcacgagcgagtgtgagggttcatgagtggctgagtgtgagtgtgtgaatggctgagtgtgagggagtgtgagtgtgtgtgaatggctgagtgtgggtgagtgtggcttgagtgtgaatgtgagtgtgtgaatttgcatatgtgaagtaatgagtgcgtgtgagtggctgtgtttgcatgagtgtgagtgtatggttatatgtgtttgtgtatgggcaaggtggtgtgtgtatgagtggctaagtgtgtctggtaagtgagtgtgagtgtgcatgtatgtgagggtgtgtgtgaggtgatgagtgtctgagtgtgtctggtaagtgagtgtgagtgtgcatgtatgtaaaggtgtgtgtgtgaggtgatgagtgtctgagtgtgtctgcatgtgagtgtgtgtgtgtgttgcaggga

SEQ ID NO: 32913 - DNA, 910 bp, Artificial sequence
  DNA replication origin
tgggccctcgcctaatgttactggtgtccttatacaaggcaggaatgcctagaaggtgaggaagaacagagaaaagctatgtggcaattgaggcagagagtggagtgatgtctacaggcagggcacatccagggttgccagcaacttcagaagttgggagagacgtatggggcagatccttctcaagagcccttgggtgagggtggccctgccaacagcttgatttcaggcttttgctctccaggtggtgagagaaaaaaatctctgttgttttaagccacttggttggcagtaatttgtcatggcagctttcggacactcgggcgacaccaagtgtggatgggtatcaaggaggcagctgcgtgtataattcaggagcccaggagagttctggatgtatttaaagctgatgtgtgaagtcgtgagactggggaccatccaggctgcaagagaagatagagaacgggggagagggactgggccctggcatccaggaggccgaggtagatgaggactgggttgagatttagacatcaccaggtggagtcgttgtggccccggggagagcaggggccatggaggggtggggatgttgagctgactgcggtgtatccaaaaatgaatgtgggaggtctatctgggtgggaagcacagacaattatgtcacagagttttgctgcaaaaggcagaagagttaatggggcagaggcaggtggggaggtgtggacaagaggaagtcattgttggttttgttttgaatgggagaaataatggcatgctgtcgtgtttgggggaaggacacagaagaatgaggaggattccggcactggagtgttgccctgagtaggcaagggagcacacgtccagttgagaagcagaggacaggtttgaacgggggcatggagccggc

SEQ ID NO: 32914 - DNA, 921 bp, Artificial sequence
  DNA replication origin
gagcagcttccagagccacctctaatgatgagcccaaaggcagaaggctcttcctcctggggagatggcggggacccagaggctgttgtggataaggaagtctccccgctacgcagtgaaagggggaaggtggaggagggaacagaaatctatgagtatttgaatttcaccgatagtgtccatccaatgtgctctagaaacaatgcgctatagaagcacgccctttcgattgagacaggctgggaaactggggcatcggaaagaaaatgatggctctttggccaagagaagagtccagtggtctgtgcttctgtgtttctaggccatgcagttttgttttgtgttttcgtttttttaataacacaaaacaaattggcaaagcttgaaaatagtaaaatggtccccaaaccttcaagtactggctccctgtttccttcagcatttacgttagggggaaactgaggctgcctgaggggaaagtcctggaagtattgtgcagggcggtaggggagggggggcgcggagagagaaagagagagagtgaaagagagagaccgagagagaagagaggggagggagagaggaaagagaaaagagaagagagagagagagaagtgagagaggagagacgggagggagggagagagaagagagacagaggagagagagggagccagctagcaacagagaacacatcagagattgagaggcaaaaaggatgcaagagaagctgtgaactggggaaggtttatctaagttcatctgaagttcatcttcttacctcgacactccagattgcatgctgcctcactggggaaagggctttctgagatttttatttttaaatttgagacgggggttcttattatgtcatccaggctggtctccaactcctgggctcaagggatcctcccgcctcgg

SEQ ID NO: 32915 - DNA, 1021 bp, Artificial sequence
  DNA replication origin
atatcaccctctttggatagtctcacctgactagccctcccactccaatctaacctggattgtatatacttctcttcctataacatcctgtcaccatcgccatcatggccataggagactgtgtaatttctcgcttccttgcccaaacccagctgccaaataggaaatccttggggtcagggactgtgtattttgcaacattgttttccagggcctatcccagtgcggacacagtgcacattcggcacatctttgttaaatccgtgtgtcaagcaaggaagaaggtgggactgtcctatggacaactgggctatagaaatctgagtttcagaaaagcgctcagagccagagatgaatatttaggtgtcatcagagtcggaaacttaataacactcaaaaaatagaaacaaaagaaagagggggcagggagggagcaggaaaaaggagaagtcttccgagaagggcggaagggagggagggagggaggaaaagaaggggtaataccatctagaacagcaacatatcaaggacagggatgaggggaatggtctaaatgcctgagaagaaacatgagaagacaaggcaggaagggagcagagtgcagagctcagggaaagctggaggaagtcaagcatgtgtggcccttcagatgcgccccataggtagagaagactgggtgtttgcttgtgaggaaagcattgccttggcaggtttggttggtggaggtagaaggcgagttgaggagtgacagttcactgtcaaggacaggagagaaagaggacaaagatcatggggctaacagggttgtgggggttttcatgggatgagaaaacattgaggaaactgaaatgccgggaggaaggagccaatagaggatgagaaactgaaaacagaaagaaaagtaaaaggggatggtattatgaatggaaaaagatctgcaaaaagatgggaagaaaatggattcatgcacaaatgaaagggagacacttcgctgaaaagagagagtaagaggtgagagtgg

SEQ ID NO: 32916 - DNA, 1382 bp, Artificial sequence
  DNA replication origin
acctttaatagcatcctttgcggtcagggggaagatgctggaattcccattttgcagtcaaagcaacagaaactcagagaaatttatctgcatccccagtatcccctaataggtaaggggtgtcaagccacttcactgcccaggtagctttctatatttacttcttcttttttttttttgagccagggagccagggtctgattctgttgcttaggctggagtgcaatggtgcgatctcagctcactgcaacctttgcctcctgggttcaagtgattcttgtgcctcagcctcctgagtagctgggattacaggtgtgtgccaccatgcccggttaagttttgtatttttagtagagacggtttcaccatgttggccaggcttgaccacaagtgatcctcctaccttggccacaagtgatccgcctaccttggccttgcaaagtgttgggtttacaggcgggagccactgtgcccggctttacatttactttttcatgggccctttggtttccttgacttgtggcactccacaccttttgttgggagtgtgacagacagtgttcactgagcacccagggccctggccccacatcagatctgtaatgtttgatcatccaagtcacttgccctctgaagacctctctgatgcctttgcccctcacagttgctctcattgacttcaccatcctggccagtacttcctactggcatccattggcttccgtttttaattgcatgtgtcacgtttttggtaatttattatatagaattattgcttccactaatggttcttgagggctctttggcctctatcaagaacattcttttgttttgtttatggacagagactatgccctaggcttctacagctcttggtggctaaccctctttgacctatagaaggtgcatgggaaacacttccaaaagggacacagaattcattcggaaactcggctcctgtccaggaggtttgaagagaagtgtgggtgctcagtgaggtaggctgatgagccagggcctaatggaagcctttgtgcaatggaagcatttctacaatcattaggcttctcttaccacgcaatgccatcagcaacatttgaagaactcagactcatgtgaattctggatcctccaaagacacatgcaggggcaacactactcctccagtgagtgccacttgtgctgccacatgagcaaaaattgaccggggacgctccgctgttctctgccctgagctgcgccatcgttggcacctgccccaggctttcccgtgaagtccttttgtcagttccctaattcttccttgctcttccttgaacatttccagtttgaacatatatagtaaaaactaagatttcttttctacatacaggttttgtttg

SEQ ID NO: 32917 - DNA, 1231 bp, Artificial sequence
  DNA replication origin
cggccaccggctcctgtttgatggagtgtaggacggggggcgccccagccacgccgggctgggcctgcaaggccgcgtcgcccctggaccccgcagcacaggtggccagagtcctcagctcctgggctgccttcgaggggggctcgcggggaggtagaggaggagcgcccccttcgccctttgcaggaggtggaccctgaggctgagcactgaatttggctttcagggagtccggggcactgtgcttatttgtgggggcaaagccagcccccgctggggggaccccaaacttctccacaggcttgctattggccgagggctgcgcgccagcccgggcgatgacggtgggcgtaggggtggcgctcctgctgaagcccccgccacccggggcaggcaccggtttggagctagcctcctgcctgggcttggccaggggcccctgtgtggccgcgccatgtggctcctggccgtgacaaggtttggtctgtcgatacccgtcagggccgggcgcccacagagcgcagggacctccggaatggctctccttattcttaggcatgctagcggcttttgtgaccactcccaggggagaagagccacttttggaccccggcatcccccctggcacctgagtgcgggtgaaccgagcaaggagcaaaggctggcattctttgccaccgagggcaggcggggggcccgtgcgtccgctccgggaaaggaaaaccaaattgcttctgatgcttttgtaaccattgggctgaatccacgggggagccacggagttgcagctgacgcggtgccagatgcgtttgtgcatccacaggacctcggggtagtaggtcttgtggctgcagtaaggacacgggtgaacgactaaagccgcctgcagggaggaggccgtctccttattgctggggtcatcccgcgtcgacctcgcacttaaatctagcggcatgaggtctggggccagcgcccgcttccctcccccagagtgttccttgttgtgcaaatcggacagcttttctgcagggtgacccgtctggccctccgctcccgtactggaagggaactccacaccatcaccagggacgggcacctcctgcttggggtgaaatgctggcatctttaagtccatagaaaatctgtgctgctcttgccttctagaagtctctctgctactgttttcaagtatggacacagaagctgcgatccctgccttggactcgccggt

SEQ ID NO: 32918 - DNA, 1983 bp, Artificial sequence
  DNA replication origin
gcttccgtgcacccggagagcatggggtgagtgttggagatcctgctccctctgcacagggccgctgccaggcctttctgagccagccttccctctctggtgtgtgccctcggcactgcggtcagggttagaggcagccatctatgcagggccacgccatgctcaaatcagcaccgttctctttccttcaattctaataaagtgcccggtgagcactgccacccaggggctgtcagattggtggggactgaggagcagaagtgctttttcttgcagactttctccctgtgtggcatgggagccacggaaccaggcatttcctcaaccagggagctggagccccctccccggacacttctctagccgagttcttccgtttcaggatcagggccaccgaaacatcaaaagccacctacgccaggtcccaactgtagggggggtgggggatgggagctgtggagagggagtttgggggccatggaggggatgtgtggaaccacagagggggcgtggggttcgtggagggggcgtgagaactgtggagggggtatgggggccatggagaaaggtgtgcgggtcgtggtgggggcgtggggggcgtggacggggcgtgagaaccgtggagggagtggtgggggctaaggagaaaggggtgcggcccgtggtgggggtgtcggaaccgtggaggggacgtgagagccgtggagggaggggtgggggtggtggagggggtatgggggctgtggaggaaggcgtgtgggccctggtgggggcgtgggggccgtggagggggcacgggtgtgtcctgtgcctgctgccacctgttgggggtgtcctgaggagttctcattgccagtggtggcgcttaatttctctgggaggttcacctcgcgtgtgcagtagatggagtgcacacgagaatgggaagtgtagaaaagggataaatgaaaaagtcagaatggcactcaggaacctgagaacagtggatgggtgtcgtggtccccttgggccgcctgggaggcccctcgtcttagttttgttttgacctggctgtaacgaaaccttggcagtaaggaaaccttggctgtgtcatgtggcagcactttgcgaggcccactggacttggcagtagtttattcccatgattggaggcccctggagggcccttgtcaaccaacagcactgggtccaggagccggggacgaggggcgaagccgtctgttctgtggcttactgatgatgaatgcggggagcgcttgggcctgcgcctctctgtacaccaaggcctgaggcctgatcgggagctcactagaggcttttgctgtttcagtggccctgatcctgtaatgaagaaacctcggtcagaagagggtccggggaagagggtcctgggtccctggctgagaaggtgcctggtggggaagagggtcctgggtccctggcgagaaggtgcctggtggggaagagggtcctgggtccctggctgagaaggtgcctggtggggaagagggtcatgggtccctggctgagaaggtgcctggtggggaagagggtcctgggtccctggctgagaaggtgcctggtgtggggaagagggtcctgggtccctggctgagaaggtgcctggtggagaagagggtcctgggtccctggctgagaaggtgcctggtggagaagagggtcctgggtccctggctgagaaggtgcttggttccttgttgctgaggatcctgcgcctctccagttagccacgtgttttcttccttggaaaggaagtaggtccttggaaagctgttcagtctttctgctcatcagctgcttctgcgaatagcttcagtttcctgcccgctgcccctccactcgtggtcatgcttctctcccgccctcctggggtggctcgggactctgtgcagggtctgtgtgttccagaggcattttgccgttcactctcgaccggtgacatcgataacttgggctagacca

SEQ ID NO: 32919 - DNA, 1486 bp, Artificial sequence
  DNA replication origin
gtcaggtggggggaaggcaggtggtcaggtggggggagggcaggtggtcaggtggggggaaggcaggtggtcaggtggggggagggcaggtggtcaggtggggggaaggcaggtggtcaggtggggggaaggcaggtggtcaggtgggaagccgggaaggcaggtggtcaggtgggggcagggcgggtggtcaggtggggggagggcaggtggtcaggtggggggaaggcaggtggtcaggtgggggcagggcgggtggtcaggtggggggaaggcaggtggtcaggtggggggaaggcaggtggtcaggtgggggcagggcgggtggtcaggtggggggaaggcaggtggtcaggtggggggaaggcaggtggtcaggtggggggaaggcaggtggtcaggtgggggcagggcgggtggtcaggtggggggagggcaggtggtcaggtggggggaaggcaggtggtcaggtgggggcagggcgggtggtcaggtggggggaaggcgggtggtcaggtggggggagggcaggtgggaaggcaggtcagaacacagcctccaggagagtgctgtccacacacagaaactcattcattgcccaatcaccacacacgccctttctgactgaaccacggttgactggaagaaccggatgatatcccaggtctgcatttttcaaactcagtcccgattccaactccttctgctctaactaaacacatgagtgagcatttggtcatctcaggccaggcaggaatattggaaacggatggagcaaagtcacagacaaagcctgcatgcctgcatgccatgtttttaggttgtaagggaacaaatgttaaacacaagaaagggaattttggccctaacccagcagagtgggtttcccacacaggcactcctgctgccgcagggcctctgcgctcgctgtttcccccgcaattcacaaggctgcaccccgtcctaaacgagcatctcccagacaccaagaaagcaaaccttgtttcacagctttatcgccactatctagcgcatctggctcctgggagagagaccatcaacaaatatgcatttatgggatgaatgaggtgagtaggagtcatttaatatccaagactcacatgcaatgagacagtgcacaggaaactgctaaaaagcatgaagcgcaagatgaattcgttaattcagcaggtatctcttaaggacctgcaaataagaacagtaacgttaagcacaggcagcctcaggggcaggtacggaattctggcagcacagagcacagctcttaacccagttaccaacctcgagtgggtgctgaggtggacatcccagagctacagtcactggagtcagtgaccacggacaggctggaggccacgcattctagatgagggagtctctctccaaaacaagacgcaccagcacgtgccgaggaaatgaaactccaaatgacggtaagataaagcacttcccaaatgacgtcacc

SEQ ID NO: 32920 - DNA, 1947 bp, Artificial sequence
  DNA replication origin
gtcttaacgggtgcaccagtatagtactgttgtatggacttccaggtggatttgaatagtttaagcagttgtgttttattcctatgtatagtaaacgcagggtagataaacatgggtaattacagagaaatagtcatagccattgatgataatggaaatgacagtagtgccaggcgcctttggtggtttctggcctggtggcaggcaggtggctcagcagcaactgggaaggtgcgcaggtgagcacagtctccctttgcaggtggcttctggctctcagccctgtagcttcgactagcttcgactctgtggcacaaccagtggatcacttgttgtcctgcgagcgcagacagcagctgccagcatgggaacacggagggcatcagttcatcacttgtggtcctgcgagcgcagacggcagctgccagtgtgggaacacggagggcatcagctcaagctgatagaagcgcagcggcccgatggagctcgcttctagttcagagaggagaaatcacgtgagagtcagacctgtcaagtcatcgctgatctgaagttcgtttaaggagcggagtttagtcgttcagatctgttgcgactcttcagatcacttcccgttttgcaatcacgactgtccgtgagtgcccgagtgtaagttgtgttcttggagaagcaacgtcttcctctgtcccccgcaggggcctcagacagcctgggtccctgaggggccacttggtccatggtctgtcctgtcacgtgggtggcagagggggtcacaggtcacacaggtccgggttctcagctgtgggacgcctgtagcttggatgaaaggaaatgtcctcggacctaggcatcttaggatggtaaagctgaaggggcctgtgggacccttcctgtcctctgggtggtggctctgggaggttacgggagggcaccctttcttcaggtttactctcgacttctctggaggcagctgcgcgggacagcccagtgtgtgcctcgttcactgctgaactcagcaagagggattgttgtggccactggcgggatttgtattcacagagtaaatgaattcattggtgttgaccgaggcgatgtcttcagcaaatagaaggcgcggggctaaggcttgtgcatatacaatttcttttcagagaagccctcccctccctgtgggatgcagagaccactggtcacgttcacgtgcacacatgcgcgcacgtgtacacacaaacgtgtacacacgcgcgtacacacatgcacataggcacgcacatgcatgtgcagtcattctgtggaaattgtttatgcagagttggcactcaaacaatactggttttccctgtccctcttgagagcctataaacagtagtggaggggtgcggcgcgggggtgtggttggtggagagatggagcgcgggggtgtggttggtggtggaggggtgcggcgcgggggtgtggttggtggagagatggagcgcgggggtgtggttggtggtggagagatgcggcgcgggggtgtggttggctctgagagccccgggaaggaactgactgggaggccggttgtgctccgggctcaccttgccccaggagtgccgtcggtctgtccaggggccacataggggcccatgcgggctctgccagcagctgcagggcgtttcggagatggcctcggagaagcccgtgggcggagagggacggacttaggcttggcctcttgtgaccagctttttgatgtagtacttgatggaaaacagcttacttagctttcaaaattttgaattcatagatccagggctccagcttggtcaacgagctcctgcgaaacagttgcagagatattattttgtaactccttctcaaaatagaaatatgactgagtggttgagaagataaatgcagtaattagggctttccagagatttgtctgaggcattgttcaattgg

SEQ ID NO: 32921 - DNA, 1127 bp, Artificial sequence
  DNA replication origin
cacctgcgtgtgtttcgggggagccttttcacctgcgtgtgtttcgggggaaccttttcacctgcgtgtgtgtttcggggggagccttttcacctgcatgtgtttcatgggggaaccttttcacctgcgtgtgtttcatgtgggaaccttttcacctgcgtgtgtctcgagggagccttttcacctgcgtgtgtatgtttcaggagggagccttttcacctgcgtgtgtttcgggggggaccctttcacctgcgtgtgggtgtttcaggggtgaagcctttttacctgtgtgtgtttcgggggagccttttcacctgcatgtgtttcgggggagccttttcacctgcatgtgtgtttcaggagggagccttttcacgtgcgtgtgtttcgggggaaccttttcacctgagtgtgtgtttcgggggagccttttcacctgcatgtgtttcatggggtaaccttttcacctgcgtgtgtttcatgggggaaacttttcacctgcgtgtgtttcgggggagccttttcacctgcgtgtgtatgtttcaggagggagccttttcacctgcgtgtgtttcgggggggaccctttcacctgcgtgtgggtgtttcaggggtgaagcctttttacctgtgtgtgtttcgggggagccttttcacctgcgtgtgtttcgggggagccttttcacctgcatgtgtgtttcaggagggagccttttcacctgcgtgtgtttcgggggaaccttttcacctgcgtgtgtgttttgggggagccttttcacctgcatgtgtttcatgggggaaccttttcacctgcgtgtgtttcatgggggaaccttttcacctgcgtgtgtttcgggggagccttttcacctgcgtgtgtatgtttcaggagggagccttttcacctgcgtgtgtttcgggggagccttttcacctgcgtgtgtatgtttcaggagggagccttttcacctgcgtgtgtttcggggggaccctttcacctgcgtgtgggtgtttcaggggtgaagcctttttacctgtgtgtgtttcgggggagccttttcacctgcgtgtgtttcggggaagccttttcacctgcgtgtgtttcgggggaaccttttcactggcat

SEQ ID NO: 32922 - DNA, 1164 bp, Artificial sequence
  DNA replication origin
aggccggacggcgggtggctgagctggacccggtcaacagctaccaggcctggcagctggccacgcggggtaaggtggccgagccggccgagtacctcaagtacggggcctgggacgaggcgctggccggggacgtggccttcgacaaggacaggcgcgagtacgtcctggtgagccaggagaagcgcaagcgtgagcaggatgcaccagccgcgcaggggcccccgcggaagcgcgcgagcgggcctggggaccccgcgcccgccggccacctcgatccccgctcggccgcgcgccccaaccgcagggccgcagccaccaccggccagggcaagtcctccgagtgcttcgagtgcggcaagatcttccgcacctatcatcagatggtgctgcactcacgcgtgcatcgccgcgcgcgccgcgagagggacagtgacggggacagggcggcgcgggcccgctgcggatcactcagtgagggtgactcggcctcccagcccagcagccctggctccgcctgtgccgctgctgactccccgggctctggcctggccgacgaggctgccgaagacagtggtgaggagggcgcccctgaacctgcaccaggtgagcaagtgtacccaggtggcctgggtcctgggatcccaggctcagggggttcctgcttccaggtaaacgtatactcaagtaggctcgctcattagccccttacccggtggccctttactcagctaggcctatgctcaggtaaccctgggactcaggactccacacccgggtggccttgtgcccttgcccagggtccctgtgcccagggtcccccacacccaggaatctgtccccagtatggatctggaactggcactttggagtgcagacacagacacccatcagctccccttggagcccctttcagtgtttgcatatactcacacctttgacctctagggttgatggtctcacctgagcatctgtaatcctaatttctgagcaaagaacaccatcatggatcccttctgagacattcacccccttctttttctgcttcagacccagttctcaccatacgatgcatgcgcgcgtgcgcgcacacacacacacacacacaaacacacacacacacactttcctccactccagctgggtagaagactatcttcaaat

SEQ ID NO: 32923 - DNA, 882 bp, Artificial sequence
  DNA replication origin
tgctggacatttaaaggcttggtgttgagaagtgttgctgttggcatcatggcagacagtgctggaatacattccgagggaggcgacgcggtgcccgatggggtgcacacggccgccacgtcctgaatggcacaaatcctgggctgagctcagggccagcttggcacgcgaggcctccctggccggcagtggagggccagagttttctcccacgaaggaagctaggacggctgtcctcagagagcttgggtgcctgtgggagggctcaatgatgttgagtggatggtggccacgggtcagggctgtcaccggcccaggatttcccgagctggcactgggtccagtgtgcctccagcagtgaccgtgcatggaggagaagccgaagctcggggcagggagagagcgccctatgcacaggagaggggcagcaggtgggcccggcgccccgttactgctgcagcgtctggctctgtgcgaagctggtaatccaggcacatgggcacgagtgttgctggtagattgttggaagtggacatgcgtgtttgcctccaggtagggtatttgaatgagtgcttttatgtaggttaagagatcacacacatgtgctctctcagacacacacacacaccctcgggcacactagcacatgctcacacatgacactcagtctctctcatgttcacccagctgcttccacactcactgtcacacactctaacctttacacacaggcacgcacacacacgacggtgaggcctggcattgcctacaggcatgcacacacacaacggtgaggcacgcacacgcacgacggtgaggcacgcacacgcacgacggtgaggcacgcacacgaggcacacacacgcacgacggtgaggcctg

SEQ ID NO: 32924 - DNA, 1959 bp, Artificial sequence
  DNA replication origin
ggggtgggggcggtggccgcttgttgctgggctgccaggaggagggccgtgggcggggcgggaaggggcggagaagcacggggagggcctggcccgccgcccccgccccccggcgcccgccccccgccccccgcccccgtcatgtggagcggacgtcacacgcctgcactgtaacccaagaagtgaaagagacggacccacagcccaacttcgcaccataacaaaggcgggggtctgtgcgggccggggggcgggggcgggcggggcgggcggggggagccggcgggggcgggagcgaggcccggaggaggagagagggggctgcggggggaagggcaggccgcggggttggggggagcgagcggatggggctgtggagggccggggccggggccggggccggggaggggggcgggtccggtccggaactggggtctgcgcggggctccgggccggggcaggcgggggtccgcgcggcggcgtggaccgggctccgggggccgaggcgcggcggagcccaggtaattggtttctattttaaacttcactttgttctggcggaggtggggcggtgggaaaggcgtggccccgaggacgattacataagtgttcacacctgaaccggtcctgcgcccgcgagcggatttggggtgggagttggcggtgggcacccgggcttggggcgcctcgcgaggggctgctgcgtgggggttttgtgttctgcgtgtgtgacctcacagtgtctccgcggtaaagaggccggggatggctctgtggactgcctggaaaagcccagatgtgcccgtgggcgttgggctggccttccaggggtgtcccctgcgtaacaaaggacggagccctcggaccctccggtccgctcgtcgtgtgacttaaccagcaagtcacaaaaggaactttagtggggatcctacttacacatacagcagaaaggcattgcccccgtcagcctgccatgcagtttcgaatcttgattgaaggtaatttaaaagctgagtgatgtacgttcaccatggggctatggagtaaatactattaaagaaaatgacccgagtagatgcaacggtggctagcctcccaaaaggagcttttccagcttattttaaaaaccaccttattaatatgattgaagtattttggtttagggatgtgttacttaaaagagctaggcatgcatgttatttgataggatactggctactgccgtgtaaaataaaaagagctcattttatcatttgttccagcttcattttcacttgcattctttgattatgtcgtcaggtaactgttatttatatttacacagaccagccagaattaaatatgccacataccactattgtgcatgggtctgagaacccctcgcccccccttagtaaaattggagagtgaagttgcgtaggagcctgccgtggtgtcaggggtttgagagttgggttacttgtaggaggacgtctttaatttcacaggagtgacccccatggccatcttgaatgggctctgggatgaactgaattctgtgtaagactcacaaatattttggtaattgaatttgaattttggtgtgttaaggcacaagcatgtctaatgtttttcttaattcattagtagggctttgttttcttaacatttgctaatttgaatatactgaaacaccagagcgcattaaccttctaaaaaaataataatcccggtggatctgtaataaaactaaccaagaggaatggggatgcctcgctagaatgaaacacaacaccaaaatagcaggtttagtaggtacagctttcaacaatgcagagagatgggagttatgcctatttttatttctgaaagcttttgtttattagaataatctttccagatggcttaatatcctgaaatacactagatcaagaactttaactttgagaaatgtgtctgctatgaattgttgacaccctg

SEQ ID NO: 32925 - DNA, 2000 bp, Artificial sequence
  DNA replication origin
gcgtccggggcgcgcgcgggcggcgcgaggagggggccgggcgcgtggcgggccccgcgcgccctcgcgcgtcccccgcgcccgggcgcagctggcgcggtcggtctagtgcagcgctcggctccgcgccgcgggcgctcggcttcaccttcagatgcgcggggcgtgcgcgtcctcctccccaggcccgccgcctccctgccaaggtaggggccgcgggcggggggagggctgcgccgcaggggccgcgggcgggcggtgggcgcggggcccggagccccgacgtgccccgtactctggtgtgcgccgctgggggtagggggggaggcgctggggaggggggtgcgccggggaggggccccccgggcgcggggagggctacttggctttcccggtgggtagttgctctgctcgtcaattccaggataggggaagatgcaacttcgggcggcggggcgagcgcccgggaggtggtttttaccgcagtggaggggcggggtgggggccggggtgggagcgcggaagaggctctggctttgtacactttgtcaaaggcgacgcgggaggaggggagctcggatgcgctctccatccattaggagacaaagagcaaattgccttactttaaagtaaaacgctccggctaatgaaggtgggtgatggggctgcgggcccgaggagccgcttcaattattaagggtttggcggatgggatcgatgcctgtgggcaccgcgcgctgctgcctaggggacgtgtttgcgtggaggtgggggtggccttgttttttacggccccctccccggctgcttgccagtctgctgggagcttctaagtgaccctaacgttaaagaagtgagaggtcctggaagggaagttcgggcgggggtgggggtgggggcgagggtctggcaccgactcggagaggggtgggcagggactcctcggagctgcgccccgccgggtgcgggtgggggaggcctcggtggcgagatgaacccgggtgtatgaaggaagaatgcggtggggtgtgtgtggttgggcgggaggtggggggaggcgcctccgctgccatttccagggagaactaacagactgaatagttacgatcagtatttagattaaaccgcctcaagttttaacgaaactttgtatgaataagtttgttaaatggcagccgagtggggtatttaaaagcagcagtttatgtgtgtggtgaggaaagccagtggacccccgcaattagggaccagagggaaccagccttttacccgaaaaatgtgggtctgtaagtcagcctcatctattatcagcgttaataagcttcccgcagcagaccgggagctctgggggctgtgtgtgtgtcttactcattccgctgataaagagtcaccgggtctccgggtgtgcaaagatcaacttgcgcagccctctttttaaatatattcattctgtgctttatttaatccagatgcacaaaaagccatttgctgctgcattgttggtttacattttttgaaaaggcgactggtgtaacctgtggaatttgaaatgcaaataagagcctgtgggagtagaggcagaacagatcagcatttataaagtggaaaagatttaatgtctttgaaatcattgcaggggaagaaactggagggggagtgtgatttttcagggagtgaattgtgacgtcaggtctttttggaaaagatgttatttttaaggtctgaaacccggctaggtaaagtgcttacaggaaaaacagattacaagattaacatctgttaacatgatcgtttatctccagccaaaaataggtcagttctttcttaaggaaacacgattgctggcgcatgcttaaataataaaatcaaaacggcgagttcataaattaggaacgagtgtttgttacaatctgacctgtgaagaaacgtttttgaatttcgagatcaatggaaggtcaaagtcccttttcggtgtagagagcaactctttcccctgcgtc

SEQ ID NO: 32926 - DNA, 2181 bp, Artificial sequence
  DNA replication origin
ataatcccctttggggacatcactgacttcaaaacggttaagggtaaaaggcaaaagacctgcccgtttggggacatcactgacttcaaaacagttaagggtaggccaggcgcggtggctcaagcctgtaatcccagcactttgggaagccgaggcgggcggatcacgaggtcaggagatcgagactatcctggctaacatggtgaaaccccgtctctactaaaaatacaaaaaattagccgggcgtggtggcgggcgcctgtagtcccagctactcgggaggctgaggcaggagaatggcatgaacctgggaagcggagcttgcagtgagccgagattgcgccactgcactccagcctgggcgacagagcgagactccatctcaaaaaaaaaaagggggggtaataggcaaaagacctgcttctgtggccaggcagcgtgccttgggtgtcacttgtacctggcttgggagttgtctagggatgactttgggctgcagttggtgttcctggaaggccacaagacatggctgctcttccagatttggtgtgggtgagtccgctgggagtgctggctctttcacactgcttggagggttctgcccgccagtgtaactcacccaaactcactaaagcagcaaatggcagctccaagacttagcctcaaggaggtggacatcagaaggcatttgatgaggaaaggactcaggtgcggccgcacctggctgtctgtgggtgagggcctgggcatttgggtcctaagcagatgggtcctgggtaggtggagtaggtcttgggcaactgggtcttgggcaggtggagtgggtcttaggcaggtacatcctgggtaggtgggttcttctgggcaggaggggtggattctgggcaggtggattctggccaggcagattctgagaagatgggttcagggaagctagattctggacaggtgggtcctgggcagctgggtcatgggcaggtggattctgggcaggtaagttttggacagatggggtcctgggcaggtgggtcctgggtgggtgggtcctgggtgggtgggtactgggcaggtgggtcctgggcgggtgggtcatgggcaggtggattctgggcaggtaagttttggacaggtgtggtcctggtcaggtgagtcctgggtgagtgggtcctgggcaggtagattctgggcaggtaagttttggacaggtggggtcctgggcatgtgggtcctgggtgggtgggtcctgggcagatgagttcagggcagatgaatcttaggcaggtggattctgggaaggtagattctgggcaggtagattccgggcaggtgtgtcctgggcaggggagttctgggcaggtgagtgttagacaggtgggtcttgggcaggtgggtcctgggcagctggattctgggaaggagagttttagacaggtgagtcttggccaggtggattctgggcaggtgggcccacagatggcaggcctttagcagggccgaggggaaaggggaatggagaggcttacaactgtcatccacgtttcatccttttatggtttgagggacattgcttttcaaagcctgatgtatacagtttattaaaataaaaccttttccacacaagacgaaagaacaaagcttgggaagtggatgctcacggtttgtcggaggcggcaccgcgcagttgttgcaaccacgggctctgggcaggctgactgtgtttgaacactgcctctactgcttcccaactacaggaccagtggccaggccacaattttctcatctgcaaatagggagagtggcaggacctacttcataggctgtttgaggcttaagtgagtcaatatttttaaagcatgtggaatagagcatgatacaaaataagtgctatataaagactcaataaatagatttggttgaaagacatatgagaaagcactttgaaaagagtcggaaactgatctaataacttgatatgtgatgtgggaaaatcattgcatcctgccatgtcagcgtatttagctgtgaactgggcagagagttgcagttaccgaaagcatgcccgtgtattcgttggtgttctttaaagaatattatactgctctgatagtggaactttgtagttgcccagaggtcatttgctccctaaaaacttagcaaggggccgggcgcagtggctcacgc

SEQ ID NO: 32927 - DNA, 1224 bp, Artificial sequence
  DNA replication origin
tatttattttggccggtaaatgaggacttgttccctgcctggggtggcggggccggggagaagctctgttccgctggctgtggcggcaggcgggcaggcaggttccagtttccagtttggcccaattcctccaagctagccctgctgtcacctacggaaaacagagaacctggggggatgtgctgaaggcagctcctgagccttcccactccccacacgccctcacatcagcagcagagcccggggctgacggagtgggtttctctgggaaggactctgcccttggatagatctgtatctatggtaacagtaagatgtttgtgtgaataactgaaaaaaaaaaaaaagtctttcaaatctcttcttctaaactgtcaaggcatgttatttccagcttcaaatattatttttaataaatacttatttttcccatgtaaacactcaggcaactctctttagaacttatatgttcccagggtgcataatgggaggtgtttcattacacacgagggaaacatgccgtgagtcagaggaaagagtaaattatgtaagaaaagtgttgtgtgtgtgcctgcgtgtgtgcgtgtctgcctgcgtgtgtgcctgcggtggagggggcgatgtgcctgcgtgtgtgcctgcgtgtgtgtgtgtgcctgcgtgtgtacctgcgtgtctgcctgcgtgtgtgcttgcggtggcgggggcggtgtgcctgcgtgtgtgtgtgtgtgcctgcgtgtgtacctgcgtgtctgcctgcgtgtgtgcctgcggtggcgggggcggtgtgcctgcgtgtgtgcctgcgtgtgtgtgtgcgtgcgtgtctgcctgcgtgtgtgcctgcggtggagggggcgatgtgcctgcgtgtgtgcgtgtgtgcgtgtctgcctgcgtgtgtgcctgcggtggagggggcgatgtgcctgcgtgtgtacctgcgtgtctgcctgcgtgtgtgcctgcggtggagggggcgatgtgcctgcgtgtgtacctgcgtgtgtgtgtgtgcctgcgtgtgtgcctgcggtggagggggcgatgtgcctgcgtgtgtacctgcgtgtctgcctgcgtgtgtgcctgcggtggcgggggcggtgtgcctgcgtggtgggctccctggagtgatgggcattagccttctcatgactgccgcctgggagactggttattccaaaggacctggcgcccaacgccagcacgaccgaagcc

SEQ ID NO: 32928 - DNA, 1363 bp, Artificial sequence
  DNA replication origin
agggagtggtgatgactcttaaggaccatgctgccttcaagcatctgtttaacaaagcacatcttgcactgcccttaatccattcaaccctgagtggatacagcacatgtttcagagagcacagggttgggggtaaggtcaccgatcaacaggatcccaaggcagaagaatttttcttagtacagaacaaaatgaaaagtctcccatgtctacctctttctacacagacacggcaaccatccgatttctcaatcttttccccacctttcccccctttctattccacaaaaccgccattgtcatcatggcccgttctcaatgagctgttgggtacacctcccagacggggtggtggccgggcagaggggctcctcacttcccagtaggggcggccgggcagaggcgcccctcacctcccggacggggcggctggccgggcggagacgctcctcacttcccagactgggtggctgccgggtggagggtctcctcacttctcagacaatgggcggccgggcagagacgctcctcacttcctagatgggatggcggccgggaagagacgctcctcactttccagactgggcagccaggcagaggggctccccacatcccagacgatgggcggccgggcagagacgctcctcacttcccagatgtgatggcggccgggaagagacgctcctcacttcccagatgtgatggcggccgggaagagacgctcctcactttccagactgggcagccaggcagaggggctccccacatcccagacgatgggcggccgggcagagacgctcctcacttcccagatgtgatggcggccgggaagagacgctcctcactttccagactgggcagccaggcagaggggctcctcacgtcccagacgataggcggccaggcagagacgctcctcacttcccagacggggtggcggccgggcagaggctgcaatctcggcactttgggaggccaaggcaggctgctgggaggtggaggttgtagcgagccgagatcacaccactgcactccagcctgggcaccattgagcactgagtgaaccagactccgtctgcaatcccggcacctcgggatgccgaggctggcggatcactctcagctaggagctggagaccagcccggccaacacagcgaaaccccgtctccaccaaaaaaatacgaaaaccagtcaggcgtggcggcacgcgcctgcaatcgcaggcactcggcaggctgaggcaggagaatcaggcaggggggttgcagtgagctgagatggcagcagtacagtccagcttcggctcggcatcagagggagaccgtggaaagagagggagagggagatcgtggggagagagag

SEQ ID NO: 32929 - DNA, 936 bp, Artificial sequence
  DNA replication origin
gcgtctctgcccggccgcccatcgtctgggatgtggggagcccctctgcctggctgcccagtctggaaagtgaggagcgtctcttcccggccgccatcacatctgggaagtgaggagcgtctcttcccggccgccatcacatctgggaagtgaggagcgtctctgcccggccgcccatcgtctgggatgtggggagcccctctgcctggctgcccagtctggaaagtgaggagcgtctcttcccggccgccatcccatctaggaagtgaggagcgtctctgcccggccgcccattgtctgagaagtgaggagaccctccacccggcagccacccagtctgggaagtgaggagcgtctccgcccggccagccgccccgtccgggaggtgaggggcgcctctgcccggccgcccctactgggaagtgaggagcccctctgcccggccaccaccccgtctgggaggtgtacccaacagctcattgagaacgggccatgatgacaatggcggttttgtggaatagaaaggggggaaaggtggggaaaagattgagaaatcggatggttgccgtgtctgtgtagaaagaggtagacatgggagacttttcattttgttctgtactaagaaaaattcttctgccttgggatcctgttgatcggtgaccttacccccaaccctgtgctctctgaaacatgtgctgtatccactcagggttgaatggattaagggcagtgcaagatgtgctttgttaaacagatgcttgaaggcagcatggtccttaagagtcatcaccactccctaatctcaagtacccagggacacaaacactgcggaaggccacagggtcctctgcctaggaaaaccagagacctttgttcacttgtttatctgctgaccttccctccactattgtcctgtgaccctgccaaatccccctc

SEQ ID NO: 32930 - DNA, 811 bp, Artificial sequence
  DNA replication origin
aagcaggtctaagtgtgagtgtgaaaaaaaggcaaattgaggaaaagtatgattggagaagaagggagggagggaggaaggaaagcagcgagggaggaaagatgggaggaagaaagggagggagggagtacaggagggagggagggagtacaggagggagggagtacaggagggagggagtacaggagggagggagggagggagtacaggagggagggagggagtacaggagggagggagggagggagtacaggagggagggagggagtacaggagggagggagtacaggagggagggagggagtacaggagggagggagtacaggagggagggagggagggagggagggagggagggagtacaggagggagggagggagggagggagggagtacaggagggagggagggagtacaggagggagggagggagggaggaaggaaggaaagaagggagggagggagggacaaaaggaaggaagggagggaggaaaggaaggaaggaagaaaggaagggaggaaggaaggaaagaaggaacgaaggaaggagaagatatacaggaagatgaatgtgactgaacgctgaagggctatgaacaaggcttaagactttaggtccaaacaaaagacacaatagcactaacttgtcttcaggttattcaatctaacatggaactccagggctcaataacagagtttctcttgacatgtgcgtactttgtgcctcttcgtaagaatttgggacattatcagaacaatgggccatgactctgggattctaattggtattttcagaaggtatactttttcct

SEQ ID NO: 32931 - DNA, 1763 bp, Artificial sequence
  DNA replication origin
ggagttcgggtgtgacaggatgactgtggtgtggtggtaggacttcgacgtgtggacccccaggtatttggaaatgtaggtccggggcgcacctgagggctcaggactggaagtgcacttggggagccacggatgcgctcccagaagtgcgcccaagaggaacagtgtggggcctgagcaggcgggaagcttgaggagtgcccacccgcagggaatgggaaggacagcgcagcagcttgaggagaggacgctcagagagtgagcttcagaggaacacccagggtgtgaggcgcgcaacccaggcgtggcacagctgcatggaaacccggggcaaagtggcatgagcagctgccaggaagtccagagggctccgtggtaggcagacgttctgtgacggagcccacggcaggtgcaagtgtgagctgagacctgagtctgctaaggagaagtgaggacgcccctgataaggttttgaagctgaaggcgccacaggagtcttgatgatggggcaaacagtcctgggggtgggcgaggagagcacactcagcatgcgtgctggtaggagggctgaggtggggggggacaggaagagaaggttgggatggtggggggagagctacactcagcatgcgtgctggtaggagggctgaggtgggaggggacaggaagagaaggttgggatggtggggggagagctacactcagcatgcttgctggtaggagggctgaggtgggaggggacaggaagagaaggttgggatggtggggggagagctacactcagcatgcgtgctggtaggagggctgaggtggtgggggacagaaagagaaggttgggatggtggggggagagctacactcagcatgcttgctggtaggagggctgaggtgggaggggacaggaagagaaggttgggatggtggggggagagctacactcagcatgcgtgctagtaggagggctgaggtgggggggacaggggaagaagtttgggatggtggtggggagagcgacactcagcatgcgtgctggccggtggggctgagatcagcggggacaggaggagaaggctgggatggtcggggaggaacagcacctcttttcctgtgtaccttgggctccagatgaagactggctggcaataggctggctgagttgaggattgaagcagcttggagagggctatcttctctttcgaggtggctgccctctctgtaccctatctccccggagagggacagttctgtgctatcagtgatctgcataaagaaagatggctgtaagtttacttgtgaatcattagtacatttttatttttattatagcccagtgcgctctcacagctgtgatcaaatgagcagacaggaacactctgaactctagaaatggatgggctccagggccattgacttctaaccatcatccaacagattttctaaaaaaaaaaaaaaaaaaagaatgcttgatgttttatggttcaatcctagaaaagtcatagaatattaaactttgtgacgacctcagagagcagctaattcaactttctcattttacaatttgagacctagaaaggtcaggtgatttttcctggggtcacacggcttgacacctgtagttttctgtgaagtgaaagcctctcagcatctttcaggaatctacagaagaaaatatgttggaatttttaggcttcacagagcaaccatcactccctaaaactttggctgtagaacattcttgcctcctgcaatttaaagtaagcatg

SEQ ID NO: 32932 - DNA, 1580 bp, Artificial sequence
  DNA replication origin
caaacatcatacacacacacttctttttttgagacggagtctcgctctgtcgcccaggctggagtgcagtggcgggatctcggctcactgcaagctccgcctcccgggttcacgccattctcctgcctcagcctcccgagtagctgggaatacagacgcccgccaccacgcccggccaagttttttttttttttttttttgtatttttagtagggatggggtttcaccgtgttagccaggatggtctcaatctcctgacctcgtaatccgcccgcctcggcctctcaaagtgctggcattacaggcgtgagccaccgcgcccggccacacacacacttcttaaactcacttaactctaaaggtacacacaggaaagaaagctggtggtgttatttacatatgaggcaaagttgacaatagcaagcattattagaaataaagaggaacatttcacaattggaaatattcaaaagagctggaatacatttgtcttatttaaggcatagagagaagactcgcatggctgtagacaaaactgattggaggatgaccaggtactaggctgtatctgtaatctaggtgagagagcatggctcaggggtaatatacgtgggaatggcttggatttggtttatatattggagctagatctttgatgagattgagtgaaggctgcagtgggaaagggtaagcaagaatgactcctagacaccgctcagcaataaaaagcacttaaaatatttatcaatatatagatgaattccaacataattatgctcaatgaacagcccccacttccctaaagattacgtgcgatacaattccatttatataaaacaccaagaaaaacaggttgggcacagtggctcacatctgcaatcccaacactttgggaggctgaggcagagggtcaattgaagctaggagttccagagcaggctgggcaacacagagagaccccatatgtttaaaaaaaaacaaaaagctagacatggcggtcctcacctgcagtctcagctactcgggaggctgaagcagttggattgcttaagggcaggagtttgaggctacagtgggtcccgatcgtgtcactgcactcccgcctgggtgacagagcaagcgagacccagtctgtataaaaagatatttaaaaactccaggaaattcaaactatagtgacaaaaagcagatgggtgggagggggaggagggaaggagggagagaggaaagggttacagagagacgggaggaacatcttcactgttgattgtgatgatggtttcacagtgtatacatgtgtcaagatgtatcaaactgcacactttaatttgcgccactgcactccagcccaggtgacagagtaaggtcgctttccccgggctcggccggcctctccacccggcgctcgggtgctgcgctgcctgttcctgttgccacttcgtgtaagttagcgcaggcaacaacacacaagaccagcacacgtgaaatggtccattttaatgcactgcccccagggaaaggaacattaccggcttctggccatgtcgtcttcccagtcccagatggcggttccgggtttg

SEQ ID NO: 32933 - DNA, 1086 bp, Artificial sequence
  DNA replication origin
ccggcggccggtgcggggcccgcgccctgccagtccccggatgcggcgcggggggcgccgggagcggcggggcgggggcgggggccgcgcagacccgggccgccgccgccgccgactggccgggcgggccgcagcgcgggcggaatgatacgggcgagtcgccgcccggcccctccgcgcgctgggcctactttcctgggccgggcggcggctgaggcgggaggcgggaggcgggtgagggagcaggcggccgcctcctgcgcgcgccctgcccccgctggccctgccgcggcccgcgctgaacttgagggaaagtggccgccccgtgttccgtcccggggccggagggccgcggggcgcgctggggaggcggcctggccagagcccgggcctgcggataccgcgccccgggctcctcccggacggcgcccccgcccgaccctgcgcggcgccggctgccccggggacgttgggctcggcccacagggaggccgtggagcgcggggtcgtgcacacagtaggcgccagcgttgtccgggaagcgcagggtcgtgcacacagtgtgctccagtgttatctggggcgcgctgtggggcgtgcatacagtaggcgccattgtgatccgggaacttgaaccctgagcctctgcagacgctgtgggtagtgcatacagtaggcgccattgtgatccggggggctggaaccctgggcatctggagagcgctgtgggtcgtgcaaacagtaggcaccattgtgatccgggtagcttgaacctggagcttctggagagcgctgtgggtcgtgcatacagtaggcatcagtgttatgtggggagcgctagatcgtgcacacagtaggcgtcaggaagtgttttccccagtaatttattctccatggtactttgctaaagtcatgaaataactcagattttgttttccaaggaaggagaaaggcccagaatttaagagcaggcagacacacaaccgggcacccccagaccctggcccttccagcagtcaggaattgacttgccttccaaagccccagcccggagcttgaggaacggactttcctgcgcagggggat

SEQ ID NO: 32934 - DNA, 1403 bp, Artificial sequence
  DNA replication origin
cttgaacctggagcttctggagagcgctgtgggtcgtgcatacagtaggcatcagtgttatgtggggagcgctagatcgtgcacacagtaggcgtcaggaagtgttttccccagtaatttattctccatggtactttgctaaagtcatgaaataactcagattttgttttccaaggaaggagaaaggcccagaatttaagagcaggcagacacacaaccgggcacccccagaccctggcccttccagcagtcaggaattgacttgccttccaaagccccagcccggagcttgaggaacggactttcctgcgcagggggatcggggcgcactcgccggtgccgcggttcccaggtcgagggcagtggggtagggggcgccgcgctttttctcgcgggcgccgtggttcccgtgcggccttggacgcgagtctccccctgcaggcctggtccctggtcctggtcacccgtgcaactggagcggcgctccgcgtttggaaagggttttgaagggggttctaagggggagtgggcgcctaggactccctatgggagtcggtgggttataccttgactgccgttgatttttatttaactgtttagcttagtgactcaagtgttccccttttcttggggatgagtaaactgaggctcattaaagagcttgtgaccaaacaacacaggtgccccagagaaaggtcgggcctggaaactacaaaggattgtgttaattttgtgtttaggaagaaagaggtaatgggtaggaatcaatgtaaacttattcataggccacaccaaaccaggaattcttgtcgtgattgcacttggtagagttaacacacgtgcacattacggaaacgttggtgaccaacaggcgtttcagcgagctttcgcacacctcatgggcctttgtgggctgctggagagatgttggctgcaccatgacccaggtatgcagatttgtagttggataacagcagtgctcagaattttgattaatggttgatggtgtctggcctttaaggaagtctttgttgcctctcccgcttttgagttttggccttgaccttatttcgttagtttaattgttttgttagtatgccatctgccaaaaataatgtaaggtgcagtgtctcagttacttggaagaaggcttaggatagagaaagaatgtaaaatttccacggccacaggcggggcacccattcccccagtatccccatctcaccgatggtatccctgtccacctggtgtttcaccctcaggcctcaagaattattctatttcttttatcccccaacacacttcctaatttagtgttgcagcttctacctcgggaatgtatttccagtgggccctcctctttccatctccagagataccctctgacccagcctccctctccg

SEQ ID NO: 32935 - DNA, 1597 bp, Artificial sequence
  DNA replication origin
atgtttggttactatggattcagtacactttttacgtttcttaagtattttaagattctaatgatattgtgtagggaggtcttttggccatatgttgtgttacgtgcctgtaggaaagcgatgcatttgtgtgtgttagttttccctgccatcctccctgattctctatgcagcctcatctacacataataatcgggtagtaagtttttggttctgtgttgttgcaactagcatatgcgcagtttttaaaaaaaaatcacccttatatcatttattcgttttcatagtatgtagcgatggcatattcacttaactttttattttgaaaaattccaatcctaagtgaagatttgaaataatagtacaatggatatttgtataaccttttcctggactcaccaattgataaatttgccagatctcacctccccccttctcccttttttgaacaattttcaagtaatctacagatttcacgttattttaccactaaatacttcaggatgtagcccctaaaaacaaagacacttttcttcatttcacaaaacagtgatcacagtttaacattgctgtaatatccattttcagaggtccctatctggaggggaaaagagtgacattttacaaggggagcagttagttttgaacagatgagatacttctcttttgaccctggaagaagtggaagagggctcaggtggaggcgagtgcaggtggaggaggaagggggaaagggctcagctggaggcgggtgcaggtggaggaggaagggggagagggctcagctggaggcaggtgcaggtggaggaggaagggggagagggctcagctggaggcgggtgcaggtggaggagaaagggggagagggctcaggtggaggcaggtgcaggtggaggaggaagggggagagggctcagctggaggcgggtgcaggtggaggaggaagggggagagggctcagctggaggcgggtgcaggtggaggagaaagggggagagggctcaggtggaggcgggtgcaggtggaggaggaagggggagagggctcaggtggaggcgggtgcaggtggaggagaaagggggagagggctcaggtggaggcaggtgcaggtggaggaggaagggggagagggctcagctggaggcgggtgcaggtggaggaggaagggggagagggctcagctggaggcgggtgcaggtggaggaggaagggggagagggctcaggtggaggcgggtgcaggtggaggaggaagggggagagggctcagctggaggcaggtgcaggtggaggagaaagggggagagggctcaggtggaggcgggtgcaggtggaggaggaagggggagaggactcaggtggaggtggaagtggagcagctcctggtatgtcttgcacgtgttcccagctttcctcagactgtgctttcttagtgtctcatgaagttttttatagactttcaggcagaacccaagggtctgcgtattaaccagttagatctgtatgatctagtaagtatttctgtcttaataacttaatagttatttgaaagaccaacccgggtgtgttgggtactgcacagcgtctgtatccttgca

SEQ ID NO: 32936 - DNA, 879 bp, Artificial sequence
  DNA replication origin
ttgtctgggatggagcccctctgcctggctgcccagtctggaaagtgaggagagtctctgcccggccgccatcccatctgggaagtgaggagcgcctctgcccggccgccatcacatctgggaagtgaggagcgtctctgcccggccgccccgtctgagaagtcaggagtccctccgcccagcagccaccccgtccgggagggaggtggggggatcagccccccgcctggccagccgccccgtccgggaggtgaggggcgcctctgcccggccgcccctactgggaagtgaggagcccctctgcccagccagctgccccgtccgggagggaggtgggggggggtcagccccccgcccggccagccgccccgtccgggaggtgaggggcgcctctgcccggccgcccctactgggaagtgaggagcccctctgcccggccaccaccccgtctgggaggtgtacccaacagctcattgagaacgggccatgatgacaatggcggttttgtggaatagaaaggggggaaaggtggggaaaagattgagaaatcggatggttgccgtgtctgtgtagaaagaggtagacatgggagacttttcattttgttctgtactaagaaaaattcttctgccttgggatcctgttgatcggtgaccttacccccaaccctgtgctctctgaaacatgtgctgtgtccactcagggttaaatggattaagggcggtgcaagatgtgctttgttaaacagatgcttgaaggcagcatgctcgttaagagtcatcaccactccctaatcttaagtacccagggacacaaacactgcggaaggccgcagggtcctctgcctaggaaaaccagagacctttgttcacttgttta

SEQ ID NO: 32937 - DNA, 1077 bp, Artificial sequence
  DNA replication origin
caccgatcaacaggatcccaaggcagaagaatttttcttagtacagaacaaaatgaaaagtctcccatgtctacctctttctacacagacacggcaaccatccgatttctcaatcttttccccacctttcccccctttctattccacaaaaccgccattgtcatcatggcccgttctcaatgagctgttgggtacacctcccagacggggtggtggccgggcagaggggctcctcacttcccagtaggggcggccgggcagaggcgcccctcacctcccggacggggcggctggccgggcggggggctgacccccccccacctccctcccggacggggcagctggctgggcagaggggctcctcacttcccagtaggggcggccgggcagaggcgcccctcacctcccggacggggcggctggccaggcggggggctgatccccccacctccctcccggacggggtggctgctgggcggagggactcctgacttctcagacggggcggccgggcagagacgctcctcacttcccagatgtgatggcggccgggcagaggcgctcctcacttcccagatgggatggcggccgggcagagactctcctcactttccagactgggcagccaggcagaggggctccatcccagacaatgggcggccaggcagagacgctcctcacttcccagacggggtggcggccgggcagaggctgcaatctcggcactttgggaggccaaggcaggcggctgggaggtggaggttgtagcgagccgagatctcgccactgcaccccagcctgggcaccattgagcactgagtgaacgagactccgtctgcaatcccggcacctcgggaggccgaggctggcggatcactcgcggttaggagctggagaccagcccggccaacacagcgaaaccccggctccaccaaaaaaatacgaaaaccagtcaggcgtggcggcgcgcgcctgcaatcgcaggcactcggcaggctgaggcaggagaatcaggcaggggggttgcagtgagccgagatggcagcagtacagtccagcttcggctcggcatcagag

SEQ ID NO: 32938 - DNA, 1196 bp, Artificial sequence
  DNA replication origin
gttacaggaatctagatcacacagtggccccggtagcctcagtcaccttgaagataccgtctgataaaaggatatgggagaaatgtgtatgtttaaaaaagcatagctttaaaaacaccaaatcacaaaccaaataattaaacatttttccattgtgtgaattccacaataatagtttccttgacctgttccatgctgctgtttttagttagcagctaaggattaatttgagcaattatggaaaataacacattttggtgtatttagatatatggatttatttttggaaaatacttcctaaagcaactgtgggctagaaaaccagattgcaaatcactgtcagagaaaattgttccatgtaccggtaccacagggccgtcctgctccaatgaattctgccattgtgcatttaagacaaaagtaaccaaagcttcccgtcccttcctgtcccttcccgtccctgtgtggaggcctcgtcagccctcagaagtggctgccctgttcagagctctttccacacagagtccctacgtgaatagtaccatgggctcttgggtctccttccagtactttctgcctcggatactgtatggccttatagctggattgccaatcatggaaaataaaggaagaagcagtaatatttccaggagccattcccagcctcctaaccattgtctgattcccagcctcctaaccattgcctgattcccagcctcctaaccattgcctgagcctctggggactctcctttccagttgcttgtattttaatgtgatagatcccaaaatttccttaggcaatcgtgtggactctaggccctaaaaagatgatctggaagtgcattttggtggctggggagtggggccctgtgaggcccctaagattgtgtctaggttccctgtgtgggtcagacctacaagaaggatatctgtggacggtaagctggaaacctggatttttgagccaggaaaattattagtttccgggctaaatttcctggtggtagaggacagatctgtcaaatcaggtcagtggtgactgcgtgtgtgtgtgtgtgtttgtgtgtgtgtgtgtggtcattttatgggaacatagaacactcaaaactaaccaaaattgtactctgggctttaaacctaactagatgcgctaccaaaacatactacttttaaagccaaggtaaaaatgtggag

SEQ ID NO: 32939 - DNA, 854 bp, Artificial sequence
  DNA replication origin
ggagggcacctgcgtcccaggtgcgaggagggaggtggggtagggaggcgagtgatgtgagacagcgaggccgagggccctggagagggctttccagggacgaggggtcaggaaggcctgtacagggagagtggcccttgcagtagaacttcatgctgggaaggaggacagcagtccccaggtccccagacactgaagcctgatctatggaggtggaggagaggggcagggggctggcaccacggcagctgcagcagagttgggggaggtcacggtggacctgaagcttggaggacagttgaagaggggtttggaccccgtctcaggcatgcagtctttgagccaccagtgtggtgctgggcattgcagcatccacagggggacatggagtaggctgctgtggtcaggagttcacaagcaggtgatggagggcacttgtgagatgtgtaagtcaccagggagtgcattcgacctctgcagaccagcccagtgtgcagcgtggagggcatcgggggaggtggtcagcaggaggaactcaccgctggaaggagaacaggatttgcacggcctccagggaggaggcagagaggcagagagcctcaggatcaaaaacgcagaaatcaggagacacaggacggcagctgggggaatggcaggggtgcggggagtctgggtcaggtagaatggctgggaccagatccggcctggaaagctgagcagagtggacgcgtgacagtcctgccctacacgtgtgggcatgtgagtagcatttgtggaaacagcgacttaaatccatagagatgtgtcagctcctgcgtgtcctgcatccctttctcactcaactccggctcccc

SEQ ID NO: 32940 - DNA, 1246 bp, Artificial sequence
  DNA replication origin
tgtgtgtcatgtacctaccatgtaccatgtgcctgccatgtgctgtgtgcctactgtgtaccatgtgcctgctgtgtgctgtggactgtgctaggtcctggggacaccatggtgacaagacagagacccggctgggtgtgctctcctgtggcaggggtggtgatggagtacacgtggggatggggaagcagaacagtgctcgggcagtgacacagtggctcttctcagcaccccacagggtcctggtggcttccaggacacctccggccctctcccgaggcttccaggtccccaagcccctgcctgttctgggctggggcaagtgacacctccactacacagctccaagccatggctgccccagctccacctcagggacctgtgggaccaactgtggtcttcgctttcccctgtcagctgccctcacagacagggtgcaagggaaagtgtgtctgccgggcagcgtctcacagccaagggtagtgtgagtgtgtccttccagcgccctgggacagcaggaaggagcaccatgtgtggtagtgtgtgtgcacatgggtgtgtggtgtgttgtggctgtgtgtgtggtgtgtgtctggtgtgtgtgaagtgtctgtggagtgtgtgtgtggtgtgtgtctgtagtgtctgtggagtgtgtgtgtggtgtgcgtatagtgtgtagggggtgtggagtgtgtgtggcatctggagtgtgtgtgtgtggtgtgtgtgtggtgtctgtgaagggtgtgtgtggtatgcatatagtgtggggggtgtgtggagtgtgtgtgtggtgtgtgtgtgtggtatgtagtgtgtgtgtgtgtgtggtgtgtagtgtgtgtgtgtgtgtgtgtgtgtgtggtgtctgtggagtgtgtgtgtgggtggggcgggtggcctgtgtgttggaatccagctttccgcactgtctctgtctgtgaaccctggtgccgagcacagggcagacactcacacgggagatttcctgcatttcctcttggatttggcctccagtgggaaaaatccaggtcagcagctcacggatcatggccgactgtgctaaaacctgaacaggcctgtcctgtgccaactgctgggtgcaaagcccccagaatccagcccatgttgtgagggtggtgggtggagctcagagagaccaagcagtcgggctgaggccaatccaccctaggggagagatggggtgggacacaggcctcctgctcccgaacccactgacccc

SEQ ID NO: 32941 - DNA, 1266 bp, Artificial sequence
  DNA replication origin
gggtgtagacgcgggtttacagcgccggggcccgaccctgacaggtgtccaggggtggactccagccaggcccggcggtcccagggtcgctgaaaccgctcggcctcgggccgtggggctgaggggaggagtctagggtgggaggggacggcggtcaaaagcggccactctgggcgggtgtggagagggtgctggctgccagggcgggctggggggtcctcccggctcgcggcgcctgctaatcacaccccgggggccccgcgcgcgatcgcgctcctgcccctgcccccggggcgaagcgcagtctccctctgagctccaggggcggccaggagagcccgggtccgggcttccgccttcgcagggcctgtctcgggctcttcggccgggcccgtcgctgcgcccacctgggcccacgtgcgccgcccgcagccgcccgccggcccgcccgggtcttcccggcagtcccctcctgggccccactgcctgtcctgggccgggtgcgtccgttttccgtggcccccgaggccggggtgtgtgacctgcggtcatttgccgccacactagattttccggggtgctgggggcagcgccttgtgtcctttcgcgtccacctgagcccccccgttttggaaggtggagtggggcttgggaaaaggttcaagcgtctttggggacccccgtgcgactctggctggaaacaggcgagctctggttccttgttccgttttccaattgcaacaacgtgagaatcaacaagtgctcggtttctctgcgcgtgggtgaggggcgcgtgggctcgctgggtgctggggtggggagggggcgtggacttcgttccggggaggcctctgcctcgtctgaccacagaacgccccgcctggaaagagagtttttcagaggaaggaaacgtcagggaactccagtgtgtgttttggacattttatctggcgaagctccgggggacagtttaaggacggtcaccctcaagtcaggggaccgtatggattgagcaggtcccgcactgagctccctggcggccacctccagtgatgagcacctccttagcggttggggccggggctgtggtcacggctgagagcctggaacccagccgcccttcagtggaggaaggccaggggaagggtaccgcggcagagggggtgtgtgtgtgtgtgtgtgtgtgtgtgtgtgtgtgcgcgtgcgtgcgcgcgtgtgtgtgttttgttttttgaggttttgttttttttttttttttgtgggaaa

SEQ ID NO: 32942 - DNA, 1624 bp, Artificial sequence
  DNA replication origin
ctggtctcggcttcaagcgcccacgcgcggggtccccgggcagcctgcttcgccttccggggtcgggagacaggggccgccggggccggaggctgcttctctctggcgcgcggcggcggtgactgacggcggcggctccgagggacgggcgcgcacccagctccccggccccgcctccccgggcttcctgcgagccaggtaaacacaggccgatcccgccgggcccgccccacctggacgcggccgccggcgccgccccgggagctcggaggaccccgggcccgctctgcccacgcggaacttggggggcgcacggggcccacgcgcagggtcagacctcggaggggcggcctggagcctcgcccgctgccgaactgggctccgaactgcggcccgtcgacccttcccgttcggaggcttggcctccgaacccaccccgaccccgacctcgacctcgcgggaggggtgccaggccgcatctccccgcgtcctcaggggctggaaaccccagaaactgccgatagacttggcgcagccccggccctgcaggaggagagtcagcccggcctggaggcgaaaggagccggcaggtcctcccaaggcactccctccctcccctggagcccaggccaggcccatgtccggctggcaggtgctcctctgggagctgggagctgggagctgggagctaggggcgcaccttctcctgcaggaccggcgcaggaagcgtgcgcggaaaagacagcaaaacacgcgcaggtgcgaggaagcagcctggtcctgcagcccagagacatcgtggtcttcgtcgctgtcttgttaaaaagaaaaagcctgctgtttagccgtgactcacctgcacacagatttagtggtcagagatctttctctggattctcagcctcctgatggtggaagaggaggaggttgggggagtcccagaatgaggccccgcgttcctcctgacctacacccccagtcagggatctggatctggagcttccaggggacctggagcagcctgggacccacacagtttgttaggaagtgagggagaggggtgagcgctgtcccggcccgcgctgggaggcgggactcagacttcagcacggggtcggggtttcggcctaaaaccagcctcccccaaagccccggaggatttagcaactgtcttcaaatgctggcaactggaagagaaatacttccacaacgacgcaaaagcattcagtctggtcgtttcctcaggagagattttcaagtggagggggcaggagggttctgagactttgaggctgaaggtgaggagggaaaagggtgccaaagatagtgtgtttctccaatttttctgccccacaacctcactttaagtcaaggatgagcggagtgggcgtgggaggctggacagctgccctaggagcacgggtggtgacaatgaacccgggtgcacccaggtcccagctcaagtcactcaaagctcaggctggggaagctggaacactaaaatgggtcccattttagatacctgctttagcatcagaaacagcttttcctccccaaaatatctcttggctttatctcagtgactccacagggcggggccaccttcctgcctgcagatgtccct

SEQ ID NO: 32943 - DNA, 718 bp, Artificial sequence
  DNA replication origin
ggctgcaggcaggtggggtgatgataaccttcccctggcccttctagtatcttcaggtggatgtggggcttcggctacactcagcttccttgggccctgctgaccccagggaggctgtggggaagccggtgccacggcctgcctcccactgccagctttagcctcagtgatgctacacagggagggggctccctcctcagcccggttgatactgaggggaaaaagtggactcaacctgccccctaccccttatcctttcttatggtgaggggcttgccagggagggcacagggcagtgagcagccccatgtcacactgctttgctcagggttgttgctgccgggtggggtggagtggggctcagctccacaacggacccactgacattgccctggataggtcagggtgctgcctgcttgtgcagggggtgggatggagccaactgatgctcagcgcagcccgaggccctggcaggagtgggggtggggaggtggaaggtccagccctcatcggccctgctaagagcctggggatgggccatgtgtgtgtctcatgagtcttgctgcaggggtttcctgtggttgggctgctctgttcgtggtcctctggctggggggtgggggtgaatgcacggttttcctggagctccttttgtgtgtgtctgtgggtggtcccagggttggagcttctgcagagccatgtggaatccatgaggggt

SEQ ID NO: 32944 - DNA, 1020 bp, Artificial sequence
  DNA replication origin
cacttcgcatggtccagtagaaccagtttctcctcccctccccttcctcggccctgcggcccttcaacgcccccaggttgcctgggcggtaggtaggcgggcgctgccgcatccttcccggtacagcaaaccccgctcggttccagcaactcttcaaccagatcagctgcgcggggaggttaccgccgcggcgctgtgggacctgaggagagctctggtggtcaccagagcgcggaccttttgcgagggtgacgggtccccacagctccctcccgggctctcagctggccgtggcgggggggactcgcggggcggcccctctcccccggggtgcgcagtttgccctcgctccgaaggctttgcgcacaccgggctctgtgaagccgctgctcccggggacagagcctcgaattttattttattctgaagcttagctttgtaaacccaagtgcaaaagggtgtttctttacagagtcttgaccgcaggctccaggaacttggaatggaatggactcgagctttcggcttccccatttcaatcctttttagaaaggtctcctgaacagggtgaagtggttgaggcggcgggtcttcaccctaactgtagcagaggcaccgtccacgcgtgtgggagatagtttttccctttgtacagccgggcagagctcagcactcacattctttttctcattaagtccacaagggtttgaagactttatactgatcaaaacgtcttcagcctttgacatacgtgtttttatttgcgtaaacgggagcttattttaataatcaggtgatggcgattcaccgggtaaaccctaatgtgcgcaacctcctcgctccagagcatcgccatttgaaatacagctgttaccagttccacccgacttcaccgctgtctctcattctgtttcaataaggctgtgactatacgaccacaaataacctgactaggtagaacaactatcacttttaatactcaagtcacaaggtatttttatcaacaaaagtgtttactat

SEQ ID NO: 32945 - DNA, 1990 bp, Artificial sequence
  DNA replication origin
tataaaaatgattagaaaagcttctattttattttacaataaaaaacctaaagatcagtgattagttcagtcattagttatatacacatacacatatatacacaaatatttagatttatgtgagtatatgtatatataatacatatgtgcttacatatatacatatactaaatatatctatataaaattatcttttgcttattcttaccatgaggatctagcatttgaagaagggatgaagattttctttttcgttttcacagcctctgacccttaacagctactgaacagatgtcagatctttgttgatgtatttaattgcctccttgtttgcacagaataaataaatgtggtggtggtggtggtgatgatggtggtggtattggtggtggtgatggtggtgggtggtagtggtggtgatgatggtgatcattgtggtgatggtggcgattgtggtggtgatggtggtggtcatagtgggggtggtggtggtcatggtggtgatggtggtggtcatggtggtgatggtggtggtggtgatggtggtgatggtggtggtggtcatagtggtggtggtggtggtcatggtggtgatggtgatggtggtggtggtcatgtgatggtggtgctggtgatggtggtgatggtgatgatggttatggtggtgatgatggcaattgtgatagtgatggtggtggtggtggtggtgatggtggtggtggtcatagtggtggtggtgctggtgatggtggtgatggtggtggtgatggtggtggtgatggtggtgatgatggtggtcatagtggtgatggtggtgggcggtagtggtggtgatgatggtcatggtggtgatgatggtggtcatggtggtcatggtggcgattgtggtgatggtggtggatggtggtggtggtcacagtggtggtggtgttggtgttggtggtggtcatgatggtcatggtggtgatgatggtggtcatggtggtcatggtggcgattgtggtgatggtggtggatggtggtggtcacagtggtggtggtgttggtggtggtcatggtggtcatggtggtgatgatggtggtgatgatggtggtgatgatggtggtgatgatggtggtcatggtggcgattgtggtgatggtggtggatggtggtggtggtcacagtggtggtggtgttggtgttggtggtggtcatggtggtcatggtggtgatgatggtggtgatgatggtggtcatggtggcgattgtggtgatggtggtggatggtggtggtggtcacagtggtggtggtgttggtgttggtggtggtcatggtggttatggtggtgatgatggtcatggtggtgatgatggtgatcatggtggtgatggtggtgatggtggcgattgtgatggtgatggtggtggtggtgatggtggtgggtagtgatggtggtggtggtcataggggtggtggtgatggtggtgatgatggtggtcatggcagtgatggtgatggtggcgattgtgatggtgatggtggtggtggcgatggtgccagtggtggtggtgacagtggtggcagtggtggtggtggcaatagtgatgatgatggtggcaattgtggtgatggtggtgatggtaatggtggtggtggtatgtgtgtgtctaagaaagagatgggagagaggagcagagaaagggtaagaagagggtgtggaagcagaggcgtgatgagaagggaggtggcggagagagggggacagaggcaggagaggtgagacaggggagactcgggaaggaaagcaagaatacatggcaacttccctgaagacaggaactgggttggtccatcgtgggtatttccccaggtctcagcacagaaaattgctactggtgcacacgtgttcatcatttgattggtaatggaagatgtgacagggatttggctacttgtttccagccctttctctcaatgtataagtaaagttccctttctcagctctg

SEQ ID NO: 32946 - DNA, 986 bp, Artificial sequence
  DNA replication origin
gtcgggggctgtccccagattctgctgatgtggagctgcccagcacccctcaagttccctccctcccgggacctggtagtggagttagggtagatgaggacagttatgtggtcccagggatggggcggagcgcagggtttagggtcaggctcagaatatggaaccttgactcctccactcagtggtacagcatggcccgaagaggaggaggaggaggctctggaagggagcagcacccacgtgttggggagggggtgttggaggcggtgttgggagggggtgttggggaagaggtgttggagggggtgttgggagggggtgttgggggggtgttggggaggaggtgttggagagggtattagggagagggtgttggggagggggtgttggagggggtgttgggagggggtgttgggggggtgttggggagggggtgttggggaggggtgttgggaagggggtgttgatatttggccaataattcagtcatatccaaatctcatccttggccagtctcccccattctcccaggaaatgtttaaaaggggcagggtctagcaatggcatccctcttttttactgtgattctgttgatagcacaattccttctcgccttagtgtgcacctgggtcatctgggatcctgacttgcagacctgggtctggcagctgcgaggctgagtctgagggtgcatttgtaatgagattggggtgatgctggtggtggtgccaccaggagcaggaacacaggtccttcctcggttggtgtcatggctcatacctgtgtgtaaggggtcttctgtgtgaggcaagccacgtcgttccccacccagcagttctcacagtgtggtgcctgcgccagtggcatcagcttggaacttgttagagatgcaaatttctgggccttaccctagatctgctgaagcagaaacgtgggggacgggaccccgcagcccaggtctaacaagccctcctgacactcgggcg

SEQ ID NO: 32947 - DNA, 892 bp, Artificial sequence
  DNA replication origin
aaaagagaataaataaaaaatgccaggattttggaaggatcatgtacattgacgtgaaaatcacagattatggcagaaatggtgtggggagtggcagtgacaggagctcattctaggattggcagagacctggcctgggagcagcagacaattaccatgagaaagcgggggaggtgggtatgacggttaaccttgagggtcttcagaacagagaaaagctgtaacatctagaagtggaaaaaggggctatgaggacctctactcctcctaccggctcgagagcaccagggtagggggagagggacagtgaggacccttactgcatccacccctggcgaaggcaatgaagcagctgtcttggggaagaccctgcttcacttatagcaagaaagtgcagggcgtttagagagaaatgtcatgaggtaggatattgctgtggatgatgtggtctgccgaggacacaacggacaggcctaggaaccaggaacgttgggcagaggcatgagaaagggaggtgcttggatggtttggggaggcgagtctggggaatgaggaatcgggactcccgagcttcttggagagttctatcaacaggactacacagtaaaatacaattattccagagggactcaaggcaagtggtgctggtgaagcactgagggaggtggggaactagaggaggggtctttcctggagtattcggaggtctggggttactcacttccttattcctgccgttggtgtggaagcaggtgtatgatggtcctgtcccaagcatctagcactgagctgtgtagacctggggtttctcccttagttaatgggccattttggttgaggtttgtgaatctctgcaaagcagagctgcatgaacatttggtgttctaactct

SEQ ID NO: 32948 - DNA, 1525 bp, Artificial sequence
  DNA replication origin
gtgtggctgagccccagggagaaagcgtccagctgctcgcggtcccggcttcttcccgggtctcctcccgccgcggcagcgggcagtgctcccgggaggccagcagggggcagtgctggcgcgtgtcgggagaggagccgagggcatggccggcagctgggagcctcggcccgcgtcctgcagggtcctgacgcaggaaccgtgtgctctccacacaaacattgggaaggaaagtacggcggttaatttgcaaaaaaaggtttctctcttcctctgtatagagatattgatatgtacatgtgtctctatctatgtagacatgaggatggatggatggatggacgaataaatgcatggatggacggataaatggataaatgggtgataaatggatagatggatggatggatcggtggggggaatggatgggtgggtggatggatggatggatggatggatgggtggggggaatggatgggtgggtgggtagatggatggatggattggtggggggaatgtatgggtgggtagatggatggatgggtaggtgggttcatggatggatggatggatggatggatggatggtggatgaatgggtgggtagatgaatggatgggtggatggatgaacacatgggtgggtgggtgaatggatgggtggagggatggatggatggatggatggatggatgaatagatgggtggagggtgggaggaagggaaagatggataggtgggtggataggtaggtgggtgagcggatgaatggattgatagatgggtgggtgggtggatgggtgggggggatggaggatgggtgggtggaagggtaggggggacgagtgggtgggtggatagatggatagatggatggatggatggatggatggatgaatagatggatggatgaatgggtgggtgggtgggtggattgtgtctttctatgcatgtctataaaggaagatatacagagacttaggtaggtaggtagagtagtgagagattggatcgtggctaaatttaggggactttttaaagacttattttagacatggtaatttaaacattttaagtcaacatagattttagatttgtattgtgcagttattttttattgactcaccttttcctaccctctcaatgaaatatgaatgacaatagaataaggcatgtaaagttataatactgctggaaatcagcagtattgatgcatgattacccaggtacaatgacacaattccactagtcaaacctaagtaacactgggtcgggacgtcaggctgaaaggtgaaggggtgactcccacttcctctgtattgacctagcctagagatgttggcttttctctggcaggaagggaagaccccagcacctcacagagcaggtgcttctcctcagctgactgcctctgtctccctctttaagatggcccatcacaagcctgcagcagtccattccagctaacagcagagtggacaaaagagtcatacctgcattttgccgggtgccctgtctcacgcctgt

SEQ ID NO: 32949 - DNA, 2318 bp, Artificial sequence
  DNA replication origin
cccgaatggttttcatgcaactatttgccagcatgaccaggacaaactttcccacaaacggaccatgcaaaaagatgtttagacaacagccgtaactccacagacttcctcctgatgagggggaccatacatcctgtttcccctaggatatcctggtttacatcctctgtctatttgatgcccttttgcacccccaaaagtttgtataaaaaagtgcatgctcttcctatttcatgcacgtattggtggctcctgtggtttcaggaaaccactacttggcactgtgcttggcgctatgctaagccagctggtgaagatcccagtgcagaaggagatgcagtgtgttgggtagagccatgttcctccgaaaggcacgttcacatgcttgtgaatgggacctgcttgggaatagggtctttgcagctgtgatcaagatgaggttagacttgagtaggatgggccataatccagggactggtgtccttataaaagggaactttggacacagagacaccaacacacagggagaaggctgtgtggtgacggggcagagactggcatggagcagagactggtgtggggcagagactggcatggggcagagacgggcatggggcagagactggtgtggggcatacactggcatggagcagagactggtgtggggcatagactggcatggagcagagactggtgtggggcatagactggcatggagcagagactggcatggggcagagactggcatggggcagagactggcgtggggcagagactggtgtggggcatagactggcatggggcagagactggtgtggggcatagactggcatggggcagagactggcgtggggaagagactggcgtggggcagagactggcgtggggcagagactggtgtggggcatagactggcgtggagcagagactggtgtggggcatagactggcatggagcagagactggcgtggggcagagactggcatggggcagagactggcgtggggcagagactggtgtggggcgtagactggcatggggcagagactggtgtggggcatagactggcatggggcagagactggcatggggcagagactggcgtggggcagagactggtgtggggcatagactggcatggggcagagactggtgtggggcatagactggcatggagcagagactggcgtggggcagagactggcatggggcagagactggcgtggggcagagactggtgtggggcgtagactggcatggggcagagactggtgtggggcatagactggcatggggcagagactggcatggggcagagactggcgtggggcagagactggtgtggggcgtagactggcatggggcagagactggtgtggggcatagactggcatggggcagagactggcatggggcagagactggcgtggggcagagactggtgtggggcatagactggcatggagcagagactggtgtggggcatagactggcatggagcagagactggcgtggggcatagactggcatggagcagagactggcgtggggcagagactggcatggggcagagactggcgtggggcagagactggtgtggggcatagactggcatggggcagagactggcatggggcagagactggcatggggcagagactggcgtggggcatagactggcatggaacagagactggtgtggggcagagactggcatggagcagagactggtgtggggcatagactggcatggagcagagactggtgtggggcatagactggcatggagcagagactggtgtggggcagagactggcgtggggcagagactggcatggagcagagactggcgtggggtagagactggcgtggggcagagactggcgtggggcagagactggtgtggggcatagactggcatggggcagagactggcatggagcagagactggcatggggcatagactggcgtggggcagagactggcatggagcagagactggtgtggggtagagactggcgtggggcagagactggcatggggcagccccaagccagggaaactgaggcttgctgggagctaccaggagctggaagacaatcacaggacctcctgtagagacatcacagggatcatggtcctgccgacatcttgattttgaacttctggccttcagaactgtgagagaataattttctgtggtttgcagccacccgccatttgtaattttttatggcacaaagacaaattagaaaatgaacacaagcagcaaacacatcttccactgactaaggcgatggactgaaggagaaagtgc

SEQ ID NO: 32950 - DNA, 1585 bp, Artificial sequence
  DNA replication origin
cccttttgagaagtattttttggcagtgtcttgttcctcatgtccagatccttaattgcatgaccatcaggaaggtgatatacagtctatttaaagatcacatgttgctgtaaatctctggcacagtgacgtggtttataaggcaaattacaactctatcggactcctttaaagcgattaagattgttctttttgttgactgtttttggtcacagtaggcaatgtttttttttaaaggttacttttgataaaaggtaagatgcaatgacaaaaggtttctaagattaagacaaacacattttcctgtgattttggtaaatttacataggaaataaaaaggttctaaaggagattttatctgtaaatcgtgctcttgacatcttgcattctataaataatgtggagcaaaatcaaagaactgactctccttgatatttgtgctccctaatgggttgagcaatctctctatctctagttatgatgatgtggtcatgaggatgtggtaatggtgctgtggtgtcatggtcctggtggcatcgctgtggtggcatggctgtggtgtcatggtcctggtggcatcgctgtggtggcatggctgtgatggcttggtcctggtggcatcgctgtggtggcatggctgtggtgtcatggtcctggtggcattggtgtgggggcatggctgtggtgtcatggtcctggtggcattgctgtggtggtgtggctgtggtgtcatggtcctggtggcattggtgtgggggcatggctgtggtgtcatggtcctggtggcattgctgtggtggcatggctgtggtgtcatggtcctggtggcatcgctgtggtggcatggctgtggtgtcatggtcctcgtggcattggtgtggtggcatggctgtgatggcttggtcctggtggcatcgctgtggtggcatggctgtgatggcttggtcctggtggcattgctgtggtggcatggctatgatggcttggtcctggtggcatcggtgtgatggcatggctgagatggcttggtcctggtggcatcgctatggtggcatccctattatgtcatggtcctggtggcatagctgtggtggcatggctgtggtgtcatggtcctggtggcattggtgtggttgcatggctgtgatggcttggtcctgatggcatcagtgtggtggcatggctgtgatggcttggtcttggtggcatcactgtggtggcatggctgagatggcttggtcctggtggcatcactgtggttgatccctgtgatgtcaatgtcctggtggcatagctgcggtggcatggctgtgatgtcatggtcctggtggcatcgctgtggtggcatggctgtgatggaatggccatggtggaatggttttggtggcataatcctgatggcgtggtcatggtggcattgtctggtgatgtggtcatgatggtggggtcattttacagcctgatctccatctgctactcgcctctttaacctgccttgttaattgctaataatacaggcctgatttttctcaaatgcacattttactgcccctgaaaaaccctaggcatacttatttttgctccc

SEQ ID NO: 32951 - DNA, 1775 bp, Artificial sequence
  DNA replication origin
aattactaattttgaaatgtcaatatattttacatcaactcattggattggccattgttttagtgccgtataatactttagaagtacttttaaaatactttaaaaagtgcctggagacatttaatgaataatttaaatttatagtcttcacaaagcataacaatgttgagacacatgacaagcacgaatcttagtttcagagctcaaagggcccaggtaagtctctttattttgcagagatgtaatccacatccaacagattaaatgacagcaaaatcacttacccaagaagtcatgttagtgaaaattgatgataaatgcaaaataaataccttttcaactcaataggtttagtgcgagatgtctagaaaggaagaatgataataaggagcaaaattcatagtgatacagaatgaagccctgaagttagagcaagtccttttttaaaaacttacttaaatagcttaggggattggagggaggtgttggtgttggtgaaggtggtgctggtgttggcagtggtgttggagttgttggggtgatagtgttattgggggtgctggtgttggcagtgatgttggagttgttggggtgatagtgttattgggggtgctggtgttggcggtggtgttggagttgttggggtgatagtgtttttggggtgctggtggtggtggtgttggagttgttggggtgatagtgttattgggggtgctggtgttggcagtggggttggagttgttgaggtgatagtgttattgggggtgctcgtggtggtggtgttggagttgttggggtgatagtgttattgggggtgctggtgttggcagtggtgttggagttgttggggtgatagtgttattgggggtgctgctggtggtggtggtgttggagttgttggggtgatagtgttattggtggtgctggtgttggtggtggtgttggagttgttggggtgatagtgttattgggggtgctggtggtggtggtgttggagttgttggggtgatagtgtttttgcggtgctggtgttggcagtggtgttggagttgttggggtgatagtgtttttggggtgctggtgttggcagtggtgttggagttgttggagtgatagtgtaattggtggtgctggtgttggcggtggtgttggggttgttggggtgatagtgttattggggctgctggtgttggcgttggtgttggagttgttgtggtgataatgttgttgggggtgctagtgttggcggtggtattggagttgttggggtgatattgttgtttgggggtgctcgtggtggtggtgttggagttggggtgatagtgttattgggggtgctggtgttggcagtggtattggagttgttggggtgatagtgtttttggggtgctcgtggtggtggtgttggagttgttggggtgatagtgttattggtggtgctggtgttgatgttggtattgttggtgatggtattagcaatggtggtattggtaatggtgttgatgttggcagtggtggtggtagtattggtgatgatggtattggtggtggtggtgctgatggtaatggtgaatgtattgtttgtggtggtggggtttgtagtgatggtgtgggtggcagtggcagtggtgtctttggtgttggtggtggtggtattggtggtggtgatggtgttgatggtaatgatgatggtattggtggtggtggtggtggtagtgatgatggtggtggtagtattggtgatggtggtactggtggtggtggtgattctaaaa

SEQ ID NO: 32952 - DNA, 931 bp, Artificial sequence
  DNA replication origin
cttggcttagactgaggagctctgtgggcagccccacctgaagctctgggactaagcctgcgagagagatggattccccaagggaaatggggccattgcttgagtaaaaaggaaatagttgctgaagaggaaaaccacgtgcttactccacatagggcagactcctggaagaggggggcagggtagggaggtggatatgcaggttgccctggcagggtctggaaatgggggctgcaggcttggagggaggcctcagtgtggcttggaacgtggtgtatggtggtctgccgcgaaggccggcctgcacaggggtgggaggggggtgcttctgcatgggaagcacagacagcgctgcctctcccttgcactcagctctcggggcatgagaggctaactttccgtgagcctgtgggccaggcctctttgaatggggctgagggagctttgccctggttcctttgtgtccccacggtgccacgggaggctccctggcagggtgtggggcagggcagtgagtgaagagttgggatgagtgagttagggcccacggattactcaagacaggacttcaagttgattcaggcgtgttagggagctgtgattggattttgagcagggcagggatgggacagaagagtttggggaaggttcctcaggcatccgtcacagaagggacaagaagggagagagagtggatgccagggacacccagaagctgttattgtagtcaggatacgacaggggtgaggctacagacaggggacttgcaagcagggagggcagggtgagacattcagaggaaacgacgacaggaaatggtgacagatagggaacgaggatgaagggaagggagagccagtgacgactggcagtggagtggggagcaccgccacctctcctcctccacttgcccctcctgtggcactggaca

SEQ ID NO: 32953 - DNA, 928 bp, Artificial sequence
  DNA replication origin
gaggccgggcctgcaaaggccgactggagatcaagttctgcgcctgaagaggctgccaaaagtcaaaagcagggcctgcgaaggccgccgagagccatgagctgggctgggctgaaagaggccactgggaggcaggaggagctgggcctggagaggctgactcgaggaagttttgcacctggagaggccgtcgagaggacggagctgggcccagggaggccgacttgctgctcttccaggcccacttccaggccgacttgaggacgacttgggcctgcagaggccgccgggaggctggagctaagcctggagagactgacttcgggacgatttgggcctgcggaggccgccgggaggcccaagctgggcctagaggagcccaccgaccggaggccatttggggcctgcagatgtcatcggagggccaggagctgagcctggagaggccaccgcgaggcctgagctgggcctggggagcttggcttagggaagttgtgggcctaccagggccgctgggagctgggcaggagctgagtccaaagacgttgttgggacctggagtcgggccagagtccggcctggagatgcagccgggaggaagagctgggcccggagggggcgccgggaggctgcaagtgggtctgagaggccaacttgaggaggcctggcctctgcctcccgcattgcccagctgttcctcctggctgcatctcccacctcccagcaaacaagctcttttggctcagctcccgcctgcgtttgtagaccccgaagtttctgcaaccaagctcttcagacccacatcccttctcccagtgactgaacagtcccagctccggctggagaagggcgtctgcagaccccgctgttgcctcccaggggagtctccaggcccagctctcgccccaccgcgacctcccaggcccaa

SEQ ID NO: 32954 - DNA, 2041 bp, Artificial sequence
  DNA replication origin
gccggtgtgaggcaagggctcacactgacctctctcagcgtgggaggggccggtgtgagacaaggggctcacgctgacctctgtccacgtgggaggggccggggtgaggcaagggctcacactgacctctctcagcgtgggaggggccggtgtgaggcaaggggctcacgctgacctctgtccgcgtgggaggggccggtgtgaggcaagggctcacactgacctctctcagcgtgggaggggctggtgtgagacaaggggctcacgctgacctctgtccacgtgggaggggccggggtgaggcaagggctcacactgacctctctcagcgtgggaggggccggtgtgaggcaaggggctcacgctgacctctgtccgcgtgggaggggccggtgtgaggcaagggctcacactgacctctctcagcgtgggaggggccggtgtgaggcaaggggctcacgctgacctctgtccacgtgggaggggccggtgtgagacaaggggctcactctgacctctctcagcgtgggaggggccggtgtgaggcaaggggctcacactgacctctctcagcgtgggaggagccagtgtgaggcaggggctcacgcctctgggcagggtgccagaggcatgagttgggcatcaacaggccaccgtgagggaggagctgggccgcacgcgggctgctgggaggcaggcagggacttggccccgggaggccgccgtgggggcaagagctgggcctggagaggcccctgggaggcaagggcggggcctgcagaggctgttctccaaccagtgctagaactgtacaggccaccaggaggcaggaggtgggccctcagagcttggctggagaaagttcggggcctacaaaggcggttgggagctgggcaggagttgagccaaaagagcttgcttacttgctgggaggcagggccgggagagcccgacttcaggacaacttgggcctgcggcagtcgccgggaggcccaaccttggcgtggaggagcccaccgaccggagaccatttggggcctggagatgccatcggagggcaggagctcatcctggagaggccaccgtgaggcctgacctgggcctggggagcttggcttgaggaagctgtgggccgaccaaggccgccaggagatgggtaggcactgagtccaaagaggttgttgagaggcaggaatcgggcctggagacccaaccaggaagaagagctgggcccggagagaacgcccggagggtgcaagtgggtctggagaggctgacttgaggaggttctgggcccggagaggccgccggaagggaaaaactgggcctggaaaggccgttgtcaggaatgagccccatgggcctgaagaggccactggcaggcgggagctgggtgtgtagaagctgctgaaaggttgggagcttggcttggggggtccacagtgaggtagatgctgggcgtgaagaatctgctgtgaggcagacgttgggactgtagaggctgacgggaggcagaggctgggcctggaggggccaccaagatgcaggagctgggcctggagaggctgcaaagaagcatgagctgggcctggtgaggtcgacttgagaaagttcagggcctggagagaaggctgggaggcaggagctgggtctaaagaggccattgtaacgatggagctgtgcctgtggaggctgttgtgaggcagtagcctcatctgcggaggctgccgtgacgtagggtatgggcctaaataggccattgtgagtcatgagcttggtctgtagaggctgactggagaaagttctgggcctggagaggctgccgggaggtaggagctgggccaaaagatgtaagcacatttgcatttattaggcactttatttccattattacactgtaatatataataaaataattatagaactcaccataatgtagaattagtgggcgtgtcaagcttgttttcctgcaactggatggtcccacctgagcgtgatgggagaaagtgacagatcaataggtattagactctcataagga

SEQ ID NO: 32955 - DNA, 2185 bp, Artificial sequence
  DNA replication origin
cgaaggcggagcagagttctcctcaggtcagacccgggcgggcgggctgagggcaccgcgagggcggagctgcgttctgcttagcacagacctgggggacaccgtaaaggtggagcagcattctcctaagcacagacgttgggggcactgcctggctttgggacaactcggggccgcatcgacggtgaattaaatctttcccggttgcagccgtgaataatcaagggcagagaccagttagaacggttcagtgtggaaaacgggaaaccaaaagcccctctgaatcctgcgcaccgagattctcccaaggcaaggcgaggggctgcattgcagggtccagttgcagcgttggaatacaaatgcagcattcctaaggcacacatgacacccaaaatataacacccacattgctcatgtggtttagggttagggtgagggttaggggttaggggttagggttaggggattaggggttaggggttagggttggggttggggttggagtagggttagggttaggggttagggttaggggttagggttagggttcgggttcgggctaggggtagggttagggttaggggttagggtttagggttaggggtcggggtcagggtcagggtcagggtcaggggttggggttggggttgggtttagggttggggttatggggttaggggttagggttagggataggggttaggggttaaggttagggttagggttaggggttagggttaggagttaggggttagggttaggtttaggggctagggtcaggtttgggttagggttgggttagggttagggttgggttagggttagggtttgggttaggattagggttaggggttagggttaggattaggggttagagttagggttacggtactgtaaataattttatattattactaataataaattattatttgtattacactgttacataatgtaaaccctattaagacatgtttttcttcaaagaatggccttggtttctgtgggctgtgcctcctcatggaagggtaatgcattcctgctaaatcatggacaaaacgggcttccaggagctacagactgcagcagcagcttctcctctacgtccttcactgcctcaaactgttgttgactttgaaagcttctttcagtctagttttatcaacagagctagtatttcatgaggttctactacataccaggttccagaaagctaaatgccttttgtttgttattattcactaaatacaaatcacaactctctcctcattactcacacaacaaaatttagctgagggagattgagtgactttcccagggtcacatagctactaagagcagagtcgtgttcagattcatgtgggaatattgaacacagaaatgaaccagtggaaacatcctatgttccaaaagcctactcaaggcctttcttcttattttaaggaaaatctttatgctaattttaaactccaaatacttatgaatggcagagatctacagatttgattctgatgtaagaaatgatggtcaccagccagttactgctaccaccccacaaccccgagcatactggacgaatgtctaagccttgtggttagtggggacaatgctggtggagtctgaagttgtcatgcagtgactcatgcaagcttaggcagatttggtgatatatgacacagagatgcaaagaaatgttgtagctgacacacacaggctggctctgggagatgcagaaggagcacgtcacccaaaatagagccagacaagacatccttaaggaaggagcaaaagggctgcatcttaaagaatgtagaaaggatttgtcatgagagatggggcaggaagttcttgagaggcagagggagagcatgagaatgttaggaagggaggagagattctcacacatctgggaagctgacaatccatcagcatggccagaaggaaaatgaggaggagcagaaatagatgaggctggatatagaagcagggctgaagcggtgttgattgtggtaaagagttgtgattctatccagaactcaataggtagcattctaaacagagatcttttaaacaagagtcagcaagtattttctgcaaggggctaaatgttaaatattttaagttttccaagccatatggtctctctctcaatgactcagctcttccattataccatgaaaatagc

SEQ ID NO: 32956 - DNA, 1988 bp, Artificial sequence
  DNA replication origin
cccaaagccaggcagtgcccccaacgtctgtgcttaggagaatgctgctccacctttacggtgtcccccaggtctgtgctaagcagaacgcagctccgccctcgcggtgccctcagcccgcccgcccgggtctgacctgaggagaactctgctccgccttcgcagtaccactgaaatctgtgcagatgagaacgcagctccgccctcgcgatgctctccgcgtctgtgctgaggagaacccaactccgctctcgcaaaggcacggcgcgccggcgccggcgcaggcaggcgcggcgcgcccgcgcaggcgctgttcgggagacgcggcgcagggcatagacgcacgcctccgcgtccccggaggggaggggtctctgggcgggcgggagtgaggcgcggcgcaggtgcaggcgcagagacgcacgtcgctgggctcagggtggcggggcgtgttgcaggtgtacagtcgcacgccgctgggcggggagcgcgggaatggcgaggtgcaggcgcagacacacgtccccggcggcgcggcgcacagacgggtggaacctgagtaatctgaaaagcccggttcgggtgccccctgcttgtacccgggcactacaggacccgcttgcccacggtgctgtgccattgcgccccctgctggcgactagggcaactgcagggccctcttccttacagtggtgtccagcgccccctgccggtgccggggcacggcagggctctcttgctcgcagtatactggcggcacgccgcctgctggcagctagggacattgcagggccctcttgctcacattgtagtggcagcacacccgcctgctggcagctggggacactgctgggccctcttgcttgcagtgtagtcggggcatgccctcttctgtccgctgggggcactacaggatcctcttgctcacagtgtagtggcagcacgccccctgctggcaaccagggcacttcacggtcctcttgctcatggtgtggtgcccctacgccacctcctggcagctaaggacactgcagggccctcttgctcacagtgtagtcgtcgttcgccccctgctggcagctagggacactgccgggccctcttgctgacactgtcgtggctgcacgccacctgcaggcagatggggactaggcagggccctcttgctcccggtgtgacggctggcgtcccctactggccgcctcctgcaccacttaaagtcagagcgccagttattaatccccatcagttctgtaaattaaaactgaaaaggagctattactggggagagctgatgtcccagttattaacttggaagaaagattttcaccaagaggcagtacaaagatggaagataacttcattgaaaagaaatacagtgtaaagagcttattgtaggaaaatagggaggagtgggttcatagtgcatgaaaacagcctaagagtcctgtgcagggaattttattttggacttcttcacattcctgcctctgtctcaagtctatgcttgttttccttggttttcctgctactgccttaggtccctgacttgccccacttaggcttgtgggacctcctgttgattgaggtacacgtggggtgatgaatctgaatccactctggcaccaacctccttcctgccatcccaggcaggctgacagcagtcacgtttgtatctactgcacctgcctcttttgaatgtctttctctgccctaatctgtacttatggtgccaggtttctcttaggaatgtcccctttgtccttcttatcagcatgtagctagcaatattctgacatttttattgcagagtgaatgatgattggggcatcttaagagaagttctagggtgtttctgcgtaggtacctcttctccctcctaaccacaattgacaagtgcccatcctctccagcactggagatgctactaatatgtgcatttttggtggtccctccaggtgagccttcacagactttcccttttccag

SEQ ID NO: 32957 - DNA, 870 bp, Artificial sequence
  DNA replication origin
ccagggtcaacgtcagtgacaggctgggcttccgttccagctcctcctccttcagacagtgctgtgggggtcgggctttgaagaagtctgagatgtagcagacctggtagagcagagggtggtgagaatgggcagggggctgtccaggtaccagggacatgggcatgagcaggagggggaggaacagggtcccaggtgggagcgaggggcctaggtgggaaatgagaggagtagtgcctggggtgggaagagagcgctcttagtggaggaccagtggggagcactgaggagctgacaggccccgggaagaactgcagtagggccaggggtccagagaaggactggggtgcacggaaaggagtcctgtgcactggggtgcaggggaggaatgggggcatggaggggggtccagggaaggactgggattggggggaaggggtcccaggggaggactttgggggtaatgaagagggtccaggtaaggactgggactggggagaaggggtccaggggaggactggggggaaggatggggtaaagggaaggactggggttgggggaaggggtcccagggaggactgacagggaggaggcccaaggaaggactcagtggggcaagggtacccagggcagcactagggttggctggggagtggtctctggacaacacaggggatagagttagggttagaagctcacagtgagggcagccaccagtgccccctgcaggaggccaacaaggacatcgctccagtggtgtttgtaatcagacacgcgggtgtagcccacgtagagggcaaaggccaccaggaagaactggactgtgggtcgcagcagccgtgcccacttccaacagagtcgtgcctgcac

SEQ ID NO: 32958 - DNA, 1694 bp, Artificial sequence
  DNA replication origin
ctcagggatcaaagacacattcaggagccacttatggaaggtgctgccatggcactggggctcctggggccctgctgagctgagggtggccagggaagcaggagtcatctacggagaacggggcagagggcaggcgcacaacaaaagcccgggtcggctagcccagagacaaaccaaggcagggcatcctttggcccagcagggcaagtacaaaagggtgtggcttttctaagttctgaatgtcagcggaggggcagggagccccacactcctcccgacatgctaactccaagggccctaggacaccgtacaccttccatgctggctaagtctggggaaataatctggtgaagaaaacagaggcctgcctcaccgagcaagaaaggtgagggaatgcagaacagaatgggcaggcccggcgtggtggctcagcactttgggaggccgaggcgggcagatcacgaggtcaggagatcgagaccatcctggctaacacggtgaaaccccaactctactaaaaatacaaaaattatctgggtgtggcggtgtcccagctcctcgggaggctgaggcaggagaatcgtttgaactcaggaggcagaggttgcagtgagccgagattgcaccactgcacaccagcctggcgacagggcgagactctgtctcaagaaagaaaaaaaaagggcagcgccagggcctggaggcagggcaggacggcggagagggcgggatgtaagaacctgccttctgctcccacacaggaggggctggagctgctgtgaagggagaggccttggaggaggctcctgcagttgccggccgggtggaaagtcagggttacgagatgcccagaagggagtgcagcccgaccacagctcttatcgggcggaggctcacacaggttagcctccgtttccgacctccctgccccagcaactccaactagagacgcaggcacccccataacgacaggcgccgggcttccctcggcctggaaagctctccctggggtccccaaaacagacaccttctcttcatttagcccccgggagccctcccgccctcacactgccctcatgccagcatctggaacctcagtgttgactgaactgtggtgtgctcaagcttccagcatagaggtgcactcggcctggccaccacccctggcacacagcagcaacagccaaccccatctcggctgtacctcccgctgctgtgtgacctccggcaggtgactcagcacctccctcacaggctgttgtaagggaaatgtttgttatttgcatgttgcttagttcctggcatacagaaagtgccacctaaatgtttacataaataacaccataggtgctcaggaaatggtaccacgggctggcagacacccacagggacttcttgctgtcacctggcccaccctaaaaaagggtctccttccggaggtaagaggacttggcctctgctgtgagatggcagagaagcaggaaacacgttggggaggagggcaccccccagagatagaattccagggccattgtctgtgcagccacagagcaaacactcggcctttgttcccgggaccctgcgggaggggggcctcgggatgcccattccgccagtgtggcccgcaaacccgccggacaggtttggttctcctggcctcccggccccccgccaccccgttcacccgaagcctg

SEQ ID NO: 32959 - DNA, 1165 bp, Artificial sequence
  DNA replication origin
gacgtggagaaggaggacgagcagcggcgggaccggccccgcgggacggttcccgactttcctcctcagggagtggcagccgcgccgtgtgcgcctggaaactccgacagcaggaggcaccttaaagtggaaggggcgacgtggcttcatttcaggagtttcttttctcctaatactcaaaatcctggcgcgtccttggacccctggcacgttagaagctcgagttcctcggcacccaccttgcgacggcgtagggtgtccaggcgcagccctgtgcccaggcaccgttcctatcagcgcacttgctgtcccatttcacagaagagcacgggggcgccaggagctgggaaccccatgaaatggcgccggggtctgtgcccccaccaggtcgtggggagccctgagctgagggtgcctggggattgagggcacctgagccagggaaacccaggcccaagggacccacactgggtcctttcggctgggaccatccgggaggcctcaggagtgtcagacccacgtttccggagtccagccttgacctctgccactcacggtcacttaaatgggaagtggcaggcctggggtcagaaacaaggctgctgggccccagatccgctgccaccctgaccctcctctaaaacccgttcagcaccaccatcagccccctgccccagcaacaccaaaacagggtgcgtctcagcaactggacttcaactgggagctcctcgaccctgcttcccggatggtcagacacctgcacgtggggcaggggggcatcatgagggaactccaagggcaaggggctcttgggagacagcaaaggcacccagagtggtgctgggtgggaagacggtgcaagctgacctgtggccctccaagggcagggttgaggtgctcccttgctgcactcacggtggggtgggggggctctagctcccgtcggaattaggattgtgagggttctggtgcctagcatcaatgctacataaatgtagggttcagcgtcactactgcgctttcccccacacttcaccctgtctgcaaatgagtgaccactgctgtcagtgtagtcttgacagccaacgcacattttctcctaagatggagagggtgcaacatctactggagtcaaggaaaggcggtgttcttcattgagcaccta

SEQ ID NO: 32960 - DNA, 2486 bp, Artificial sequence
  DNA replication origin
ccacgcctggggttgctgagggaccccaccccaaccgctcaggatcggggagcagggatggagggggaagaggcaggtgggggtgtaaagtgcggcttttcctgaagtggagacgatggggtgggaaggcgaggctggggtgggggccggacagcgaggtatatggctctgtgccccacggggttggcactgagtagcagctgcccacgacccccagggctggggcagcccgcggccctgccgggtgtggagagacagagccaagcagggagctgagggcgccccggcggaggctgctggtgcggggcagggcgtcctgcccgtctccccgccggggcagtgacgccttccctcgcctctgctggctggaagggactaggtggccggctctgccctgcgtcccaacggcggggtctcttctgtccccggctgcccgacggatcccacgtgcaggcagcggcccggacccgggtggcagtgccgggcgctgacggcgctgggtggggccgtgggtccattctgtgtggacaggggcaagggctcacggcccagccacctcaccccagtcctgacgtgttctgaagcagaaggaggtgctaccccaaggcccggggggtggggaaggggtcaggaagactgacagaggcgggcccagcggcagcgctaagtccagtctgggccgcatacgccgcccgcggccaggagtcagcaggtcatcacgttacagctgcaggggagagaccaagagagacgcagagagtgtcagtgcggccccacgtgcctgcacagcccagtgctgagcgctggactcgagactcccagccttgcctcccccacagcctatggcagccgggcccggggtgccctgaggggagctggtggctggagcaggggtgggacagcctggcacctgctcccatttgtggagaatgtggaccacatgaatgtattctccagtcaaaaaatacatacaagtaaagaataaacctaaagacacactgagagcctgctcgtggagccacactgtcctcgggtccttggggcaaatgcctcccaccctcctctgctcagcctgagggctggggggacctggttggagtgttgcggaggctccgggcatggggtggcactcactgtgacaggggctccgagtgtagcccgggggccgggcacgtggggtgggcggccaggaaggggttcacgtccccaatgccgatgagtccaaactcggtgaccgacaaagccacctgtgctggggccacagtctcctccggatccccgctgaggtccacatggctggagatgaggggcagctccttgggcagggcgaagtccacggccagccttgggctggcgtctggctccggagcagtgacagctggctggtatgaggctgggtcggccagggctgggggccgatgggacaggggtacagcgggggactcatccagctgctggaaggaacacggccctggctccgaggacgggagtccatcagaggccactccgggctcatcgagaccaccggccgtgccatccacgctcagtggatctgtgaaagagaacgcaacagagggtggggcctgcccacagccgcggatcctgtgcaggctcctgcctaactttgctgggtccagcaaagcctgtggatccctccccagaaaagcctccacacaaatacaaaagacaccagttacactgaaatccgcgagccccaggttaagggtctcagctttagaagtagattttagttcatcagaccaacagtgggtcacaacccacatctttaaaaagagcagaatacaatagacataggtgtaaacaatgccgggggcactgcagagggtaaatacagggtctgtggaatacacagacttaggtgtaaacaatgccgggggcgctgcgagggctaatacagggtctttggaagttttgttcccacaggcagcgcaaggggcctcaccacaattctaggaagtagccgaggtggacaccctttggcaaacaaaccatggaaacaaccagactctggaaatgggggaccctcccagactcaaccatctaaacacagagccagaaagcaaaggatcctcgtttgcaccctccccgtgtgggtctccaccttcggacgccacatcagacaccaccatcggacatggtccctacccgaggccctgctgtgctccgtcatggcctcaggtgcaagatcctggcgacggctccggacaccctgtccttcctgagtgtcctggtgacgggctaagtccccaccctggggcaggaaggccctccccggagactgaggcctggtaaataccccaacctcaccatacggggctccccagcagtggggccacatgcacccctccagcaagcccagagggtaagcgtaatccctgccctcccctctcccagccaggtgtacagagcggcatccacatcacgtggctgccctccgccacccagacgcccactcctcctggcga

SEQ ID NO: 32961 - DNA, 1450 bp, Artificial sequence
  DNA replication origin
ctggactctgggccgtgtttctatggactccgtgtttctgtagctccgggctgtgtttctacagctccgggccatgttcctatagctccgggccgtgtttctatagctctgggctgtgtttctggagcttcgggctgtgtttctggactctgggctgtttctatagctccgggctgtgtttctatagctcccggctgtgtttctgcagctcccggccgtgtttctatagctccgggccgtgtttctgcagctccgggccgtgtttctatagctcagggccgcgtttttgtaactcccggccgtgtttctggagctccgggcaggtcctggcccagccgcgaggggccgtgtgtagccagcacacgttggtcagcctgagccagtgcgtatttcaccctggcccttcacagaagagctccctcgtggcgtgcgtttgaggtttgccctgcagggaggttgtctcggtctcgcccccaggcaggaccccacgttgttctcgcagcggtgagcatggggcatcctcgttctgggtggcggtgggttagttggcccagagcatgtccaggtgagggggtcttttccgccatcaccagcagtggccacagcctcaagctctctgtgggatgagcctcccgggtggagatgttggaggtgttgccaggtgtgcgcccagctctgtgccaggtgccacatggaacacacttgctgtgtgtcccttctcgtgtccctgaagccttgtgtgcgtgtgtgtgtgtgtcccttctcgtctccctgaagccttgtgtgcgtgtgtgtgtgtgtcccttctcgtctccctgaagccttgtgtgcgtgtgtgtgtctcttctcgtctccctgaagccttgtgtgcgtgtgtgtgtgtgtcccttctcgtgtccctgaagccttgtgtgcgtgtgtgtcccttctcgtctccctgaagccttgtgtgcgtgtgtgtgtgtgtcccttctcgtctccctgaagccttgtgtgtgtgtgtgtgtgtcccttctcgtctccctgaagccttgtgtgcgtgtgtgtgtgtcccttctcgtgtccctgaagccttgtgtgcgtgtgtgtgtcccttctcgtctccctgaagccttgtgtgtgtgtgtgtgtgtgtgtcccttctcgtctccctgaagccttgtgtgcgtgtgtgtgtcccttctcgtctccctgaagccttgtgtgtgtgtgtgtgtgtgtcccttctcgtctccctgaagcctgtgtgcatgtgtgtttggccctttatgtgctacgttgggaattttgtcgggttcacagaacccatgtgtccttctgcggtgtcttctgtgcacttgggaagcattcgctgggccctggagggatgtgttcggtgggaaagcaggcgccgcgggcttgtgcctcttcctcccggggaaggggctcagtccaggagtctgtggacccg

SEQ ID NO: 32962 - DNA, 1701 bp, Artificial sequence
  DNA replication origin
ctacacctctatccagggagtgacatcaggggccgtccacaccaccctcctgggcgatgtcagggccacctacacctctatccagggagtgacatcaggggccgtccacaccaccctcctgggcgatgtcagggccacctacacctctatccagggactggcatcaggggccgtccacaccaccctcctgggcgatgtcagagccacctacacctctatccagggactggcatcaggggccgtccacaccatcctcctgggcgatgtcagggccacctacacctctatccagggagtgacatcaggggtgtctacatccccttgcaggatacccggaggcgtctacacctcctccctgatacgtggttttaattggccccccttctgacctgagtagctgttccagtgccctggcccccacacacctgacccctgccctcccctctgccctccctggcccctggaggcactggggtgtgagctctggcccacgccacggcagccctcagcccctctgtccccggcatggcagcccccacctgctcactgtctttcacggcttctccctctgggagctgaggcccggccatctcgtgccaacgccgcttcaccgccctgtacaggaactcctccacctccctctcagggaggacgctggggtcccagagcagctggtcttcgttctcgtagactgcacaagcagagggcaaaggtcagcttgcaggaacccaatctgcacccacacacgccaggacaagcaaagcagccaactcagcccctgacagggaggaggcactgtccgtcctccctttcccaagccctgggccgccatccctgtgctcctcctgggcttggtgctgctgtgctcaattcaactaccgagtgggtccagagcaggctctgggcaccacacacaggcctgtatcccaacgaccaagtgcagggagccatgagcagtcagcaggggcgcctgatccagccaaggggtcagaggaagctgtggacagcctagatctggggcaggggaattctaagcaaggactctgcagagggggttctaagtagtgagaccagtgaggtgaggctggcttcaggctgcacagctacaagggcacctgaaatgcagaggcctgagggagcagcaaggacgcccccgactctgcataaaggcagctgagacttgggcccgtggacaagcgggagcccccacagttaggcactgtcgcgctctaaccctgggagctgaagagccacggccagaaggtgcatcacctctggggagacatcctgcccccggtagctggtgtggatggcagatgtgctcacagaggggaggaaaagtccacgacctcagatgcaattggctttcggcaaagggagggacgcagcctccagctgtggtgagggacgtgactggggacaaggcaggggagagctcagggccaggtctggcaaggctcaagtgccagcacctctcaattatccaggaaagaggcacaggatcccaaacaaagcaaaccaacaaataaaaaacaaaatcagtgcacgggaagaaatgtgaaaaacgcactggggaaaacagctccacacgggagtctccactgccgggggctgacgcggtaactagctcccaggttggtgctgtgccccaccaagcaggggcctctcccggtcctcatggccatgaggaaaacaggcaga

SEQ ID NO: 32963 - DNA, 1638 bp, Artificial sequence
  DNA replication origin
gggccggaggggcgcggggctccatcggcggccgcccccggccggcccccaccccccaactcccccggctgccacatcgcgggctgcagtgcgcatgcgcggcggcgcggggcgggcgggggccggggtgggggaggggagggacgcggggcggggctggtgtcgggggtccggtgggcgcgcggctccgttccagggtccggctccggttcccggccccggcccgggccccgcggcgcgcaggcctcccctcccgcgcctttgccaactttgccgagtgctggggccgccaggcgccccgcgctccccatcgggatcccggtggacccaccgcgcctccgccgcccgcgagccccccggcggggctgggtcagaccccgggcgggatttgaactcccgacgcggacccgcctggcgcgaactgggcgcagggtgggtgggtctgccggggcctagagagcgtcggggctgatctcagaagagttggaccagcctctcccgggcacgaagttacttctggagcctcctccctcgtccaggaaacaagcccgggaccctttatctgaaatgtttgggaccagctatattttggaatccagaatttttccaatttgaggatctgtgggattttggactgtgatgtttgatcaaacccacctaggactgtctaggataagacaacagatagcttcgtgtcaggtcaaaccaggaaggaagaaactttcgcttttgaagctttttttgattttggagtggtggatgagcctgtgtggacttgctttcaccttggagggccctggtgaagatggaaagagataatgtaggtgaaggtgcggcggctgcgaggtgctcagtcagtgggactcagtgcatgacttctgtgcgcagaagttacgacaggcgggcagactcaagagctgatcctatctctgggatagagcccaaaggaaaaggtgcccacccagccaggcacagccgcctcgtgggaagccgggattggaactgcggcctggccgtggtgccacgttgcgtgtttatgtcttgggcgttgtgggaggcaggactggccattctctccccctggtgacgacctcaggggcagtaacaggccctgtgtttatgccaaagacggtgtaggtgtctcgatactaggccagaccaccggccagttccttcatcgagaattagttcttcttgagacgcttagggagactgagtccccatgcagatggtggctgtcctccagggtcggaggcagaagccgcgtctcccagtggccctgcagcgacgtggtggtcgaatgagttgtgctcctggaatctgggcaacacacgtggcctgacaggtagctctgtgtctgggatggcacaagtcagactcccaagccagcctcccccagagctgccatgtggctgttctgccctgctctaggctgagctccgtaaatgtgcacagcagcttgtggtccggctgctcctgttaaccctgttttacactttggggtggtgccctgttgagtgaatttgatttgattttctaaggaggtcccgctctgtcctcggcctgaggatctgggagtgaatggagcagacagggcctctcctacagggatgcagagtctggtcagagagagacgtg

SEQ ID NO: 32964 - DNA, 2052 bp, Artificial sequence
  DNA replication origin
cccccgacaccagccccgccccgcgtccctcccctcccccaccccggcccccgcccgccccgcgccgccgcgcatgcgcactgcagcccgcgatgtggcagccgggggagttggggggtgggggccggccgggggcggccgccgatggagccccgcgcccctccggccccggacgggccaggcgccccggccggcctcagagctccagagcggggctctccgtccctggggcccacgacgaggccgagccacggcggcggggggcgcggacgcgcgggggcggggggccggctcccccggcccgctcactcacctccgccatggccgtgtgtgcgcgggaggcggtggccgcgccgggatccccggatgaggggccgcgcactcattggctgtggagcctggagggcggggcagggggcggagcctggagggggcggagagcgggccgggcgcgtagtaggtgcgcgggcgcgggcgcgggcgcgcagccgagcgtggccggcggcttctggcgagcttgcggtgtctttccggccgtctctgctggaccctgatcttggccttggccttggcggaggagactgcattccataaaaatacgaattcctgataatcacacctgcgtggggaccacgtggtcctgtgtgacctcttcattccctcggctgctcgctgttaataccccgcgtggcagactaggaaactgaggcccagggcgacgggccacccagagtgtcagtgatagagccagaattggtgtccgggctgcgtggttctggaattttctgcactttcgcacccgtgatgagcaaactagcgcgcggaggaaccaatcggggagcttgcgaacgcgcaccagtcggagaggttttagaaacggtggccccgcgccggagagcccaaggcgggaggcagggaggtgggcttgaccccagggccatttggttctgcagtccgtcgtttcgcagattgaacatttctggaacacgtgcacgttctgatcctgagggtttgaaggagacagccctaacgcctgtcttcagggcgtttagagtggaggatgggaaggcaaggactcgccacaccttaaatttgagacggataagtgccgtgaatcttcggggcgcacgatgcagagagaggataggaagcaggggtggggcgtgaagaggcaggggccaggtgggagctgtggggcctggaccagagtgcagagagacttgagaaggtggacaccacaagactcgctgatggagggaagctggagagagtgaaggatggcctccagatgtctggcttgcgcaaatgagtggagggcggttcctactgagaccaggaagaagagaactggagaccaggaagaagggaattggggaccaggaggaagggaattggggaccaggaagaagagaatgagtctcattcctgtttcccagtgatcagccaatgaatagtgagaacttgacatgcatcagccttgattcctgatgcaaaatcattactcagtcctctgagaattcaccaaccaagagatagaagaaccactctggaggggtctaccctcactccttttttggtttacatcattgagattgagggttctggccctcgtgttgaagagtcctcactgatttgtgcaagagttggttccttcctttattattcatttgttattattcattcagtcattcagtgaactaaacacatatcttatgcagtcctcaactgggtgctgggtagccagaggtcctgtgaagcagggagaagcatgaacagataagagagtgaggtgctgtgctgtaacaggtggaggggcccgaagacaagggcttgagtccacctggcaaaacgagggaagactcttaggagagggcttggcaagaatcatcacatagatgtcaaatgaggacttgggtgaagagaagggtattgtggcttggaacggtgactcacacctctaatcctaacacttggggaggcagaggcaggaggatcacttgaggtcaggagtttgagaccagcctgggcaacagggtgaaaccctgtctctac

SEQ ID NO: 32965 - DNA, 1125 bp, Artificial sequence
  DNA replication origin
tatatccgtgtgtgcacatgcatgtgtttgtgcgtgtgcatgcgtgtgtgagagaatgacggagggttgaggcttccacccactcatagttgggaccaccttttttttttttgagatggagtcttgctctgtcgcccaggctggagtgcagtggcgcgatctcggctcactgcaagctccgcctcctgggttcacacattctcctgcctcggcttcccgagtagctgggactacgggagcctgccatcactcctggctaatttttgtatttttagtagagacaggttttcaccatgttggccaggctggtcttgaactcctgacctcatgatccgcccacctcggcctcccaaagtgctgggattacaggcatgacaccgctcctggccaggaagcagcatttttaaaacgtgaagcagaccagcaaatgaagtgcactgacctatgtggggttagagcgagagtgtggctgtttgtgctcacacttgctgtgtgggggtaagagtgtggctgtatgtgctcacacttgctgtgtggtgggggtaagagtgagtgtgtggctgtgtgtgctcacacttgctgtgtggtgggggtaagagcgagtgtgtggctgtgtgtgctcgcacttgctatgtgggggtaagagtgtggctgtatgtgctcacacttgctgtgtggtgggggtaagagcgagtgtgtggctgtgtgtgtgtgctcacacttgctgtgtggtgggggtaagagcgagtgtgtggctgtgctgtttctctgtgcgtgctcacgcttgctatgtgggctcagttgctgctgctcgggagtgctggaaactcaacagagtttcaaagcccagatgcctactaaattctcacagaggagttcaaagaaggctaggctctgggcacggttcttccagcccccttagggtcaccagggccccactgcttggcccccttaccctgcacaagggcatctgccgggcagagctcgcatccacccggaaggtgcagaagagacaattagcatgcagagcaggggccagagaagcactcacacctgtaccagtatatggatgtttatattcacgacgtgtgtgtgtggtgagcgcgggtgcgtgcaggatggtct

SEQ ID NO: 32966 - DNA, 1159 bp, Artificial sequence
  DNA replication origin
atgggagtggcagggctggaacagcagcccagcaccgtggctcctcaacggggctcaatacagatccagggacccacaggctgggaaaatgggttttgttctgaagttagtacaagcctggggtttccaggggcctagtgatgactgtaggtctaaagtcaagaacagcacaggagagaactggactgttattctcctctatggggaactctcgaagtgtctcatttgaaggtatctatgatacctcaataccaaattcctctcaagaaaagcatggaaatcattgtggaagggaaagcaaagggtctttttgtaaattcttgccccgatttggccctatcctagagagtgttccccatgcccctcacccccaggaccagtctcagctctagctcctcaggggacagactccagtggggaggacagaggctccgaggagatggggcaagggaggccagaagtatctagatggggcggggcaggttccctggaggccggcagccgggggcaggggtctcagcaggcacgggctccacctaccgggcactgtgatggtgagggtggtgtcctcaaggaaccgctcggtccagtacacagagggcctggaataagcggacggctcagggcaagggaggcagagagccctggccctgcccggaaacaagcctgggtctctgccaggagggtggccgaggtggggtgtggagttgctgggagagggggtaggccagagaaggacagtgggggggccggcgggacgcgtggattattgtgagcaaggctgatgtccagagaaggaggtagctgggggagaagcatagctaagaagagggcccagggccacctcctgggagcagacccaggtcacaagggtggagagccccacatctgaggagccctccctgatcctcctccctggagagaggagggtggctggagtgaaggggtcccctggaacctgacacgtgtcccccagcataggcacacggcggagacagccctggacttaccagcagagacagaagtgcaagctcatcttacatggggagatccaggcataccccttaccacagcgtcccttcctgcgaggagacagggtccgagccccactgcctcttgccctgggtctcccgtttgctcccaaactcctcactctcct

SEQ ID NO: 32967 - DNA, 1052 bp, Artificial sequence
  DNA replication origin
accccacacatcccacagcccggtccccgtccccctctattttctgctcaaagcaacatcacacaacattcagaaatcatgcacttccttggctgtgaacgtcttgcttttccacaggatgttggagcagacgtggaccctccaactctcccccgagtgcgggcagagttctgctgtccccgcgcgctcctgagctcctccggctcctgccgtagagacatccagccctgactcccccgagaaggtgccgggtgcagctccaccagccgcgtggccctgggagcttccccatgaccctggagcgctcatctgcctctcctctccacaacgggctgccatgagggctaaacgcgctgcagcctgggtgctgcctgggtgctgagagccggaggctgccagacccccaaccgcgcctccctggagtagggttagggagcagcctcggggtgcggcgccctgctctgaacgaggtctcctggaaacactgcagtggccacaggccctccagcggcaacaatgcctaactcatctctttgtgaaaggcacccgcagatcttgatccagtttaacttaagagagaaaagtaaatcattgagtgcaaggtaagggtttacgagacttccggccaagaaaggggattttcccatggcctccttgatgggaccggatcctccccggggcccttctgcctggagtcctccgagagacccctttcctgacagaggtggtggtgaggctgcgtctgggagcagagcatcagggagatgggatgggagctggagagggctttgtgtgtgtcgatgaactgggtctcttgcgtgccgagtggtcaccatgcccggagggccggccccacgctggtggcaggggtgagggacagagcagtcctcggggtgggctagcactgggtgggggtaggggtgggggtcctaggcctgggagcccagaaaggggagggatggtcagggactctccctgcgtgggggaccgacaggcttgagtcttcaatgatgagtagaaaaccaccaagcacagaagggtgaaaggctggg

SEQ ID NO: 32968 - DNA, 1360 bp, Artificial sequence
  DNA replication origin
caaggaggccatgggaaaatcccctttcttggccggaagtctcgtaaacccttaccttgcactcaatgatttacttttctctcttaagttaaactggatcaagatctgcgggtgcctttcacaaagagatgagttaggcattgttgccgctggagggcctgtggccactgcagtgtttccaggagacctcgttcagagcagggcgccgcaccccgaggctgctccctaaccctactccagggaggcgcggttgggggtctggcagcctccggctctcagcacccaggcagcacccaggctgcagcgcgtttagccctcatggcagcccgttgtggagaggagaggcagatgagcgctccagggtcatggggaagctcccagggccacgcggctggtggagctgcacccggcaccttctcgggggagtcagggctggatgtctctacggcaggagccggaggagctcaggagcgcgcggggacagcagaactctgcccgcactcgggggagagttggagggtccacgtctgctccaacatcctgtggaaaagcaagacgttcacagccaaggaagtgcatgatttctgaatgttgtgtgatgttgctttgagcagaaaatagagggggacggggaccgggctgtgggatgtgtggggttctgactgcccggacctggggcgtccgcctggcagaaaataaaccaggtccctactgtgttcctctctgctgtggccgccttaacacatatcacaagcagaggctccagcaacactgagcgattacctggccgccctgggctcagaagcccaacatggatctcactggactcaagccacggtgtgggcagggctggttcctgcagccttcagaggaaggcccgtctcctgctcatttggtggccacagaattcagtgccttgtggtcgtaggactgagatctgcgttcttgctgtgtgtgtcagccgggggcccttcccagcgttgctgtgtgtgtcagctgggggccccccagcacccagaggccaccgctcttctcagtcctggcccctcgctccattttcaaagccagcaacggccagtcaagccccctcacatggatgctccactggcactcatctctgagcagggctgggaaacccgtttggttattacggaaacaggtgattgaaggtcagcctggataagccaggtgctctgaccctccacgtctgcaaccccagtcccacctgcgaagtccattttgccacataaaataacatgctcccagtgtcaaactcaaacgagcacatagagaggcatttttacgtaagacattttgtttgggaaaatacataaaaacagaattgagacctggcgcggtg

SEQ ID NO: 32969 - DNA, 2695 bp, Artificial sequence
  DNA replication origin
cacaacttcaaaacttacagaaaaaaatgaatgtgaccatgcttttgcgctccatgtagggagtaatttttttaacaagacatgtagagtgctaatcatacacgaccaataagtcggccatattaaactgaagcctcatgttcaggactcctcaaaaaagtggaaacagaagccacgaatgggaatgcagcatctgtcacatctataattgattagtacccaccatgaataaatagctcctataaatgaataagaaaatagatgagtgctggctgggtgcggtgactcacgcctgtaatcccagcactttgggaggccaaggcaggcggatcacaacgccaagagatagagaccatcctggccagcatggtgaaccccgtctctactaaaaatacaaaaacttagctgggcgtggtggcgggcgtctgtaatctcagctacttaggaggctgaggcaggagaatgacttgaacccaggaggcggagtttgcagtgagccaagatcctgccactgcactgcggcctgggttacagagtgagactcctctcaaaaaaaaaaaaaaagagcagaaccctggtgatgagcagatgtaggacgtggggcagaaccgtggtgattgatgagcagatgtaggaggtggagcagaaccgtggtgattgataagcagatgtaggaggtggagcagaaccgtggtgatgagcagatgtagggggtggggcagaaccgtggtgatgagcagatgtaggaggtggagcagaatcgtggtgattgataagcagatgtaggaggtggagcagaaccgtggtgatgagcagatgtaggaggtggagcagaatcgtggtgattgataagcagatgtaggaggtggagcagaaccgtggtgatgagcagatgtaggaggtggagcagaaccgtggtgattgataagcagatgtaggaggtggagcagaaccgtggtgatgagcagatgtaggaggtggagcagaaccgtggtgattgatgagcagatgtaggaggtggagcagaaccgtggtgattgatgagcagatgtaggaggtggagcagaaccgtggtgattgatgagcagatgtaggaggtggggcagaaccgtggtgatgagcagatgtaggaggtggagcagaaccgtggtgattgatgagcagatgtaggaggtggagcagaaccgtggtgattgatgagcagatgtaggaggtggagcagaaccatggtgattgatgagcagatgtaggaggtggagcagaaccgtggtgatgagcagatgtaggaggtggagcagaaccgtggtgatgagcagatgtaggaggtggggcagaaccgtggtgatgagctgatgtaggatgtggagcagaaccgtggtgatgagcagatgtaggaggtggagcagaaccgtggtgattgatgagcagatgtaggaggtggagcagaaccgtggtgattgatgagcagatgtaggaggtggagcagaaccgtggtgattgataagcagatgtaggaggtggagcagaaccgtggtgatgagcagatgtagggggtggggcagaaccgtggtgatgagcagatgtaggaggtggagcagaatcgtggtgattgataagcagatgtaagaggtggagcagaaccgtggtgatgagcagatgtaggaggtggagcagaatcgtggtgattgataagcagatgtaggaggtggagcagaaccgtggtgatgagcagatgtaggaggtggggcagaaccgtggtgatgagcagatgtaggaggtggagcagaaccgtggtgatgagcagatgtaggaggtggggcagaaccgtggtgatgagctgatgtaggaggtggagcagaaccgtggtgattgatgagcagatgtaggtggtggggcagaaccgtggtgatgagcagatgtaggacgtggggcagaactgtggtgattgatgagcagatgtaggaggtggagcagaaccgtggtgatgagcagatgtagggggtggggcagaaccgtggtgatgagcagatgtagggggtggagcagaaccgtggtgatgagcagatgtaggaggtggagcagaaccgtggtgatgagcagatgtaggaggtggagcagaatcgtggtgatgagcagatgtaggaggtggagcagaaccgtggtgattgatgagcagatgtaggaggtggagcagaaccgtggtgatgagcagatgtaggaggtggagcagaaccgtggtgatgagcagatgtaggaggtggagcagaaccgtggtgatgagcagatgtaggaggtggagcagaatcgtggtgatgagcagatgtaggaggtggagcagaaccgtggtgattgatgagcagatgtaggaggtggagcagaaccgtggtgatgagcagatgtaggaggtggagcagaaccgtggtgatgagcagatgtaggaggtggggcagaaccgtggtgatgagctgatgtaggaggtggagcagaaccgtggtgattcataagcagatgtattaggtgttgctgttgctggggctgtggcaggaagtggttgatcacattcctattctccagttgggtaatgagctcatggttgaatcgtgaatgggtaaatgaatgggtggatggaaataattatggttcacctaattttatgcccctaaggtccttgcaaaagaaaacggagggaggagag

SEQ ID NO: 32970 - DNA, 664 bp, Artificial sequence
  DNA replication origin
ctctcagaccacttggccttggctaagggttgagaagggttctgaggccttgccagggctcagagggaaacagtgtggccctcagcattcggctgctgatgtctgcctcaggctggccatggcgtgggcgcagtgtgctgtgtgtctgtgtccagccctcgtgtgcacagatgaggaacggcctccttctgaggctcttggcaagcgcggaggaagcagagcccggttgcccagtccgcgggcttgaccgcaccccaatgctggggagaaggggctgccacatcagagctgctcacagccgggccctggggagccaccgatgtccctgcacctccgcgttcccatctgtgacagggagcaatggtggctgcaccttcagggctgctcgaggactcgcctcagtgttcccatctgtgacagggagcaatggtggctgtcttggtgttcccatctgtgacagggagcaatggtggctgtgccttcagggctgctcgaggactgagtgggaggatgttgctacacggagttttgttgatggcatctgtagttgtacagtgaccctactctcaggctacatgggctgcatctgttacagccatgggtctgcattgttcagaatcatgtcttggaggccacgctctacccacctctgtctcccattacc

SEQ ID NO: 32971 - DNA, 885 bp, Artificial sequence
  DNA replication origin
gcgtctctctaagatgaggagtgggctcacaacactctcaggggcaacggccgtgcaaggacagaggcagagactggactgaggcatctacaggccgagggccaccggccaccaccaccagctggagaaggacacagacgcagtctccctctgagcctctggaagaagccagccctgccgacacctggatggcaaagctctggcctccagaaccgggaggacacatctctgctgtgggaacacccaggccatgtgcctttgctacggcagccccaggtggcagctgctcagtccgcgaggaggggcagcactggccacgtccaaaagcttccggaagagcgggcagggtcctgcacagctgttcattcacccgcgagtacgtcaagcatacattgggcaccgactgtgtgccacgcccgtcccggcagaggccctggggacccagctgtgaacaaaatcggcaaaatccctgccctcctggaggtggcgtcttagtggggaagacaggcaagaaacacgattggtgaattgccgggagaacgcggcagggaggagatggtagagtcgtggggaaggcaggaaggtagggaggtcggagaggccttcccaggaaggggactttggacaaagacagaagtgaaggaggtgaggaagggactgggaggtgatcaggggagagtgcaccaggaggaaaagcctggaggtgggatggggccagagcctgcagggacagcggggagataccaatacacaatggggtgagtggggctggggaggagggcatcggcgtggtccccattccgtggggcccgtggctctacaggaacagccgtccctgagtttggatagacgtctatgcagccctgtgccaggcaggcacctccc

SEQ ID NO: 32972 - DNA, 3758 bp, Artificial sequence
  DNA replication origin
ggggaaggcaggaaggtagggaggtcggagaggccttcccaggaaggggactttggacaaagacagaagtgaaggaggtgaggaagggactgggaggtgatcaggggagagtgcaccaggaggaaaagcctggaggtgggatggggccagagcctgcagggacagcggggagataccaatacacaatggggtgagtggggctggggaggagggcatcggcgtggtccccattccgtggggcccgtggctctacaggaacagccgtccctgagtttggatagacgtctatgcagccctgtgccaggcaggcacctccctctctgcagcagctctctctgggcctgcaggctcctcagaacacgcatgcctcgaaggtcttccctggccttaggggtggagtgtgtgagggtctccacgtgagggaccacgtgggcaggcagtgccggcagccctgccccatgtgctggtgtaatctgaggtttgctctcccgtcgcccaccctcattattgtgcaattaaacacttgaggcagaggatgacgaggttaaaaatagcccttcctttcagccagagagagcccgtgagtgtgagtgggtgtgaggagggcctgggggccgtggaggtggtgtctgcagctgcctgtgaaggtgggaagaggccccaggcccccatcctgttgatttctcagaaaaacatctgagcaccttggccatcacacacatttattccgctaaaacttgaacacttgctgtgtgtcaagcacggttctgggcctgggaagaggctgggaggtggtcctggcccccacagagtgctgagaagaaagcaaaggagagttgggggaggatggaggcagggaaggccactgaggtgaaggccgtgagggtgtctaggaagagcacagcatgagcaaagactctgagaccaacgtgcctgctgtgcagatggaaccaaaagcaggcccatgtggctgcagcagactgagtaagggagagaaagggaggaggtgagagcaaggaggtggccaggcaggtcattcagggcctggtgggaatgggaaggagttgggtttttaccgtgacagagatgggagagacggaggtcagtgtacagagtcagcaggtggcaggcctggtgctcacagtccagagaccagggatgaggcaacagagctggtctagggacaaacaatggaacagatgataaggaaggatggtgggggtgtgtgatgatggggaaggatgacggtgaaggatgataggaaaggatggtgggaaaggatgatggagaaggatggtggggataggtggtgatggggaaggatgatggagaaggatgatgggaaggatgatggagaaggatggtgggaaggatgatggggaaggatgatgggaaggttgatgggaaggatgatgggaaggatgatgggaaggatgatgggaaggatgatggagaaggatgatgggaaggatggtggggataggtggtgatggggaaggatgatggagaaggatgatgggaaggatgatggagaaggatgatgggaaggatgatggagaaggatgatgggaaggatgatggagaaggatgatgggaaggatgatggagaaggatgatggagaaggatggtggggataggtggtgatggggaaggatgatggggaaggatgatggagaaggatgatgggaaggatgatggagaaggatgatgggaaggttcatgggaaggatgatgggaaggatgatgggaaggatgacgggaaggatgatggggaaggatgatggggaaggatgatggggaaggatgatgggaaggttcatgggaaggatgatgggaaggatgatgggaaggatgacgggaaggatgatggggaaggatgatggggaaggatgatgggaaggatgatgggaaggatgatgggaagggtgatggagaagggtgatgggaaggatgatggggaaggttgatgggaaggatgatgggaaggatgatggggaaggatgatgggaaggtgatggagaaggatgatgggaaaggtgatggtgaaagatgacaggatgggtgatgggaaggatgataatgagaaggataatgagaaggacaatggggaaagatgatggggaaggatgactggaaagacaatgggagagatggggaaggaggatgggaagaatgacagggaaggatgatgggaggatgactggagaggatttaacagaagagaggatggagaaggaagatgggaaggatgatggggaaggatgatggagaaggatgatggggaaggatgatgggaaggatgatggagaaggatgaagggaaggatgatggagaaggatgatggggaaagatgatgggaaggatgatgaggaaagatgatgggaaggatgatggggaaagatgatgggaaggatgatggggaaagatgatgggaaggatgatggagaaggatgggaaggatgatggagaaggatgatggggaaagatgatgggaaggatgatggggaaagatgatgggaaggatgatggggaaagatgatgggaaggatgatggagaaggatgggaaggatgatggagaaggatgatggggaaagatgatgggaaggatgatggggaaagatgatgggaaggatgatggggaaggatgattgagaaggatgatgggaaggatgggaaggatgatggagaaggatgacggagaaggatgatggggaaagataatgggaaggatgatggggaaagatgatgggaaggatgatggggaaggatgatggagaaggatgatgggagggatgatggagaaggatgatgggaaggatgatgggaaggatgatggggaaagatgatgggaaggatgatggggaaagatgatgggaaggatgatggagaaggatgatggggaaggttgatgggaaggatgatgggaaggataatgggaaagatgatggggaaggatgatggggaaggatgatgggaaggatgatggagaaggatgatggggaaggttgatgggaaggatgatgggaaggataatgggaaagatgatggggaaggatgatggggaaggatgatgggaaggatgatggagaaggatgatggggaaggttgatgggaaggatgatgggaaggataatgggaaagatgatggggaaggatgatggggaaggatgatgggaaggatgatgggaaggatgatggggaaggatgatggaggatgatggagaagggtgatggggaaggatgatgggaagaattatggagaaggacgatgggaaggatgatgggaaggatgatggggaaggatgatgggaaggatgatggggaaggttgatgggaaggttgatgggaaggatgatgggaaggatgatgggaaggataatggaggatgatggagaagggtgatggagaaggacgatgggaaggatgaatggagaaggacgatgggaaggatgaatagagaaggacgatgggaaggatgaatggagaaggatgatgggaaggatgaatggagaaggatgatgtgaaggatgaatggagaaggacgacaggaaggatgaatggagaaggacgatgggaaggatgatgggaaggacaatgggaaggatgatgggaaggatgaatggagaagtatgatgggaaggatgaatggagaaggacgatgggaaggatgaatggagaaggttgatgggaaggacgacgggaaggatgaatggaatgggtgattgggcaccaagtgagagcattcggtgacacctt

SEQ ID NO: 32973 - DNA, 867 bp, Artificial sequence
  DNA replication origin
cccgtcccccccacacccctcagggcaggaccccgtcccccccccacacccctcagggcaggaccccgtcccccccacacccctcagggcaggaccccgtcccccccacacccctcagggcaggaccccgtccccccctcagacccctcggggcaggaccccgtcccccccacacccctcagggcaggaccccgtcccccccacacccctcagggcaggaccccgtccccccctcacacccctcggggcaggacccgtccctgtgctctcagcccaggctgggctgctctgtctctcctgctgcccatggggtccagatgtctctgccatctcaaatccaccaggagcttttgggaattggggttcagcgtagcccggcctcctgaccgcggcctggtgagccccagtcagggcctgggacgggttgacagggctacgggcgccttgtagcctcttcagccccagccactcatcgctaggctgcacgggtgtgtgcgtgtgcgtgccaggtaggtgcacacacgtcgccatgtgcttccgcatgtgtgtgcagtgtgactgcgtgtgccgttaccgtgctcatctgttgggcgtatgtgacagtgccaggtgagcgcctgcaggcactcgagtatagctgcctgtgtgctggcgtgtgcacgtgtaagcacgtgagccgtgtatgcatgtgtgaccctgtgtgcgcttgtgtgtgcctgtgtcgctgctggtgtgcacttgtgtgtgcgtttgtgtgtgctggtgtctgggagctgcagctgcccatgccctcccccctccacttccaagtgggcgtcatccagggattctgcgcctgcgtggtgtctcgccctgcctcaggtcttg

SEQ ID NO: 32974 - DNA, 1102 bp, Artificial sequence
  DNA replication origin
aggggtgtgggggggacggggtcctgccctgaggggtctgagggggagacgggtcctgccctgaggggtgtggaggggggatggggtcctgccctgaggggtctgagggggggacgggtcctgccccgaggggtgtggaggggggaacggggtcctgccctgaggggtgtggggggaacggggtcctgccctgaggggtgtggaggggggatggggtcctgccctgaggggtgtggaggggggacggggtcctgccctgaggggtgtgagggggggacggggtcctgccctgaggggtgtgagggggggacggggtcctgtcccgaggggtgtgggggggggacggggtcctgccctgaggggtgtggggggaacggggtcctgccctgaggggtgtggggggaacggggtcctgccctgaggggtgtggaggggggatggggtcctgccctgaggggtgtgaggggaacggggtcctgccctgaggggtgtggggggaacggggtcctgccctgaggggtgtgagggggatacggggctgtgtctagagggggtctgtggagacagggtcctgtctgaaggttctgaggggaggcgggacccaccctgtagggaccgtgtggggtccgagtcctgtttcctgacatccatgtagtcaagagctggaaccgtgaagcagaacccagacctgccgctccaagggaggtggtttatcaggggctgggctcctgcccccgcctgcctccacccggggcaggagaatgcggagggcagtggaaaggaccttgccaatctggaatcctcttctccttcctccctggagttcaccgcagaactctctcgttattaaacagccagggaagccaacctccacccccgtattcccgaaacacctttattgcactataaacagcatttataaacaaacacagctggggagtgtcttaaagatttacccacagtcaacctcagacactaagatatcaaagagtgcaggggggctactaaacgggggaccccagggagaacagggcctgggaggggtgagcatcagagaaggcggggagcgccggcgtctctctccatgcagggcaccctcccc

SEQ ID NO: 32975 - DNA, 1084 bp, Artificial sequence
  DNA replication origin
cacactcaggctgggctgggcgctgatgctgtagctgacgcagggtttcctgggtcacccgatgctgactggagtattatttttcatgaattaatttctcctttggaggaggaggaggaggaggagaggggcctcgggggaagagaaggggccacttcgcggggcagagggtccccctttgcccctccacactgcctcgcgcctttcacgcagagttctagaaggaggttctcaggggttcaggaatccgtgcatgtggccagggcggggccgtggacagggaggtgacaagtcttggagcccacagtctccttcactgcacgtgtgtcttcctcccccacagcctgccgccatccagttcccaccccgcggagagcagggcctcgcggccacaccaggcccaggctctgcccgggacgccccctcccaggggtcaggcttggctctgggagaccccagcttcccaggctccggtggggagtggggccaggcgagggtgccctgacgagggtgggcgcggagggagcagccgctgccacagtcggagcagaggaggtcttggcagaggtccgcggggaggagacggctctcctggcctgttttcctccaacactgtcgccgctggctttttgggtacaggcccgtctggccatttctgctgtggcgccggagggtcttgctcagagatgcccagagagcagccctatggcccatccgtcctcgctgggggctgccaccccgtcgcccttttgtccagcgtctgcagctgggagcgacacgcagtgattgacggccgtggctttgacgccacgtgtgtaaataggctgtggctacggtgggtgggtcggagcccaggaggcagctggggggacctggctatggcctttcctgctgttaggtggctgcaaggcttccattgtgtggttatgtgggtccttgaatgattttggggaggtttccagctcagaatgatgcagaaatgataagactcaaagcaggggccaggccaggccagtgccttcgcctctcccggctgctggtgggcacggaggaaccagggcacatctgtggtacccagggacgt

SEQ ID NO: 32976 - DNA, 887 bp, Artificial sequence
  DNA replication origin
cgtggggagcacacggtccacgtgggccctcggggcagcgtgcggctgctggccgagtacgaggccggccaggcccgcctgcgggtgcacctgctggccgccgagggcctctacgaccgcctgtgcgacgcccgcagcatcaactgctgcgtgggcctgtgcctggtgccgggcaagctgcagaagcagcgcagcaccatcgtgaagaacagccgccgccccgtcttcaacgaggatttcttcttcgacggcctggggcccgccagcgtccggaaactggccctcaggatcaaggtggtgaacaagggcagcagcctcaagcgggacacgctgctcggggagaaggagctgcccctgacctccctgctccccttcctgtagagcggggacctgctcgctgtccgctcgggtgcagagggcagaccccggtctctcctccacaccgggtgctggcgggcgggtccgctggcttgggctggggctggccggggaggggctcacactcaggctgggctgggcgctgatgctgtagctgacgcagggtttcctgggtcacccgatgctgactggagtattatttttcatgaattaatttctcctttggaggaggaggaggaggaggagaggggcctcgggggaagagaaggggccacttcgcggggcagagggtccccctttgcccctccacactgcctcgcgcctttcacgcagagttctagaaggaggttctcaggggttcaggaatccgtgcatgtggccagggcggggccgtggacagggaggtgacaagtcttggagcccacagtctccttcactgcacgtgtgtcttcctcccccacagcctgccgccatccagttcccaccccgcggagagcagggcctcgcgg

SEQ ID NO: 32977 - DNA, 1037 bp, Artificial sequence
  DNA replication origin
cgtactcggccagcagccgcacgctgccccgagggcccacgtggaccgtgtgctccccacgcgcctggcccgactcggggccaggttccgggggtgcccggcgggtcaggcggcgccggctcccggggctggcgtccggggtgctgtcgtccgcagacagggagccgtggcggcccacggagtgccggagctggctcaccttggcctggctgtcctgggcgaaacctttgagcagagacacggagcgggacagcagaggggacccgaagggggaggactcggccgaggaccctgtgtcgctctccccgccactgaagtagcggccggggctcatgagggccccgccagcctccctggggcccccatcacccccgttggccttggcagctgcccggcggcgcccggcccctggggagcccacctgggccagagccccgtgctcactgtggaacagagactccttgcgcctcgtgtgggggctctcagccagcatggcgaagccgtaggacgtctgggccttgggcaccgagggcagggacatggcaccctgggcctgggggtcggcgtcagtggcctcctcggacagccagtcctcggcactctcgatctggatcacgtgccgggtggctgccttcagcaggctcttgctctcggctgccagcttggcaggcagccgggggctccgtggggtctggcggggggccgcagaggccaggttctgttccgacgtggaggggcccagcgcggcctgtccctcgccctccgcggggcccgagggcagcttgggggggatgaaaaagtcggggatcttgtcgggcgtcaacacattgctgtacaggggccccttggaggccttgtcccccgcctcactccccacgccccgggcagcaccgttttccccagacccccgaagccgctccaagaaccacatgttggtttttctcatgggggcggcaggcaagaggcccggacaggggctgcagcgtctgggaagagaagcaggggtcaggagcagtggggggcggctggcagagggc

SEQ ID NO: 32978 - DNA, 1884 bp, Artificial sequence
  DNA replication origin
cccacccacctgtggctcctccctggaccggagggccaggcgttcggggtgggggaagggaggggcggtaggtctggggccgagagagcagcgagtcgactccccggtgtccccccgcccccagccctccccgactccgcttggggtggggggtggggtcccggcggtccccgcagaccgggcggggtccccggacttacctgcccggggtgatggcccgaggccggaggtctgttcgcagacacgcaggggtctcggcgcgcaggctcccggggctggcgcgggggacgcggccggagcttcgatgcgggcggcggcggcggcggcagcgcagtcggactcattcacccgcggcgggaaaccgcccagccccgccgccgccgccgccgtattcctccgagtacggccgcccgcgcccgcgcccgcgcccccgcccccgcgggaagggggtggggccgtctccccgcagcccccggaggctggtggcagggaggagcctcgccagggcccgggggctgactgggggccggtgggagacaagcaggtggtcacggttggctgacggccacccccggcgctcacgcccgcagattccgggaagtcggactcccaagcccctgcctccgtataccggaagagggtcccagaccccctactcgctgccggcgaggagctttcccgactaacgacgacgaattaaatgacggcaacagtaataaatgcagctgggtttatgatggagcgtttcctccctgccagcctcccagcgtcctggcgggtctctgactctcacacaacccagtacgcaggtcctactgcaattctcaatctgtagatgaggaaggtggggggtttccttccagaaacaaggaccgaacagctaggacagcaggtcttactaaatgggcaacctctcagcagccctacaagaagcctggaaggggggggctccttcatttcatggacaaacgtttcctgagcacccgcttgatgctggacagtgacctggccaccggggacacagctgggacggagggaggtggccccagccctggtgatgcaggggcaggatgcccacagagcgtacaggtgcagcttagaactgcaggggtggtgacgcccggaacaggaatacagcaggaaagcgtgagggtcggggcgaagagagaaggcacatgcgtgtgattcacggatggagaaacccatagggggcaagaccaggtccaaacccaggcttcctggcagttcctgagaccacagggtccccccctcctgaggccccgacccccctcctgccagctgcttcgtgatctgccagccccggccttcactgcttccttctctccctccctccctgccctccccgcctcagtttcctcttctggaaccgagctgagcagttcccagcctcctcgtgcttggagccagcaagataacatatccccaggaccaacccggagccggcggacgcctggcgctttattgaattattgattgtccaggagcctcctgcattctgggaatgtccccaagtctggatgtggcccaagctgggaggagcggctgctgccacagtggtagaagaggggtccaggagggcgagagagctgggctgaggcctccccactctccacgtacccttgcaataaggggttagagtcctgccgtccagaggggaaagtgaaacccggaggagctgtgaccccatctaagctttgctcacccagcaaacgttgatgagccctcatttttgtgctggggcaaccgcgacgcagccccgaagtctgacaaggaggcagacaccgaggaattctccccttcaccgccgccgcctccaggaagcctgggcaggccccaccacagactagcagggcccccgaaccc

SEQ ID NO: 32979 - DNA, 1725 bp, Artificial sequence
  DNA replication origin
actggcgatggtggccctccagggccctcccactgggctaacccgtgatgcacgaatcagtcaggtccctcctgggagctcgcagacagtcctgctcctgggattgttttattgttacgccgtcccctccctttcctgaggctcccagggtaagtcttcaagctgcacagctacccagtggcctcctcagcattggagctcggattgcagccctcccctttttaaaccacctccctgtaggtcctccaagcctgttatcctggaggccactgtggggcagccttggattcaggcctggctctgggaagccccgggtccctggtggggcccccacctggggggatggagggccaaagcctcccagcatgaggcgccacgactcagggcggagaggggctggtcgataccacctgggcccctcctccagcttgagcccgaatctgcagcatcctggtctcccatcctggagggctgcagcgaggctgctgcagagggaagcagaaggttctgttgaccaggagaggctcctgtttacttaccgatggtgcagagctaagcagccagaaggccccgggctccctgcccctgccccacccagggtggggtctgcgtccgtccacagggcaggtgttaggacccatcccaggtacttttcaggcctatgtttccccagcccccaaatgtgataggatgtggggatggggtggggcttctggccaagccaggctgtggtggggtcagggctctggggtgcactttgaggtctgggccagctcccccctggttgagacccttcctgacctgcagaagcgtctgagggagagggcgactgacgcctgcctcgcacacatggtggggtgctgtaggcactttgcacatagtgatctgttgagccctccctcgagagccgtggtgccctgggctgctgaagagacagaggtctggatgcttgtccagcgtcacacagtgggaagggttggcaccaggattcaagccctgattgaccagctctggatttgtgtcctagcatggagacaggcatagtgtaaactcagtgcctcatcccccaacccagctggcaggagaggctctgcccccacctgggctgggcaggggtgccggagagcgaacccccaatacctggggctggcctgatgtcaggagacccgtcactgccccttcctaggacccaagctgtccgcttccctccccaggccctgctgtccttgtctgcaatggaggagggtggctctgtggcccctgaggccccctctcctcgggcctgctgaaagagcactgtttcggggccatcgtggcgatgctattcacccatttgtttggcaaatgtttactggagacatggctggcctgtgccttggggccactacagggacaggacctccaggaccctcctcccggctcgggcccagcagagacggtggacagacccccaggatccgggcccagcagagacggtggacagacccccaggatccgggcccagcaggggcggtggacagacccccaggatccgggcccagcagagacggtggacagacccccaggatccgggcccagcaggggcggtggacagacccccaggatccgggcccagcaggggcggtggacagacccccaggatccgggcccagcaggggcggtggacagacccccaggatccgtgcccagcaggggcggtggacagacccccaggatccgggccca

SEQ ID NO: 32980 - DNA, 1012 bp, Artificial sequence
  DNA replication origin
atccatgcatccacctgtctatcgctcatccatcgcctgttcattttcattcccttcactgctccatccatccacccacccaccgtctttcagcatgcttgcattgagtatcttttacctgcttgagtatcttttatctgtcaggagctctggtgggcaaacaagatgcagtaatgaccaaaacagatctgcccttgtggagttaatggccaagtgacattaatccgcaaatcaccactcaacataaaatcacaactgtggagtgggcgcggtggctcacgcctgtaatcccagcactttgggaggctgaggcgggcagatcacctgaggtcaggagttcaagaccagcctggccaacatgtcaaaaccccatgtctgctggaaatacaaaaattagctgggcgtggtggtgcacgcctatagtcccagctactcgggaggctgaggcaggaaaatcgcttgaacccgggaggcggaggttacagtgagctgagatcgcaccactgcactccagcttggaggacagagcgagactccatctcaaaacaaacaactgtggaaaagagtgcgtcatggagcttagaaatcccaggaaatccaggtgaagaaagtagagctctgggcagaggagatggcgtgggcagaggagatggcgtgtgcaaaggccctgtggtgtgttcagccagcacgttcagggagcagaagggtggccagtgtggccgaggtgaggtcagaagcggggtgaggacacagagcttgggggaggcctggtgccaggaagagctgccaggggtcttgagcacaggggtgataacattccctgtgggaagtaaactgttgggaattgcggggagggcaaggaggaggcgctggaccagaggagtgctggggagtagggagtgtcagattcccaagatgcataggatagaggggtctaaatgcacttcattcattcattcatagccctgggccctgggcccaagttgcccatccacactccacctctgtctgt

SEQ ID NO: 32981 - DNA, 1046 bp, Artificial sequence
  DNA replication origin
gcccagagctctactttcttcacctggatttcctgggatttctaagctccatgacgcactcttttccacagttgtttgttttgagatggagtctcgctctgtcctccaagctggagtgcagtggtgcgatctcagctcactgtaacctccgcctcccgggttcaagcgattttcctgcctcagcctcccgagtagctgggactataggcgtgcaccaccacgcccagctaatttttgtatttccagcagacatggggttttgacatgttggccaggctggtcttgaactcctgacctcaggtgatctgcccgcctcagcctcccaaagtgctgggattacaggcgtgagccaccgcgcccactccacagttgtgattttatgttgagtggtgatttgcggattaatgtcacttggccattaactccacaagggcagatctgttttggtcattactgcatcttgtttgcccaccagagctcctgacagataaaagatactcaagcaggtaaaagatactcaatgcaagcatgctgaaagacggtgggtgggtggatggatggagcagtgaagggaatgaaaatgaacaggcgatggatgagcgatagacaggtggatgcatggatgatgaatggatggacagatggaaaatggatagatggaataatgatggaggcttaggccgatggatgggggaccaggtgggtgaatggatagatggatggctgggttactgatgggtgtagatggggcgatgaatgggtgactggatggatggatgactgaaggatgtgtacatgtggagatggatggatggctggatatgcagatggatggttggatggatgagtgggttactgatggatgtgtagatgggggatgggtaggtggattacttgatgtgtaaatgggatggatgtatggttggatgtgtagatggatggatgggtggattactgatggatgtgtagataggggatggatgagtaggttactgatggatttatagatggatgatgcatgatggatggatggatgatggatggat

SEQ ID NO: 32982 - DNA, 1624 bp, Artificial sequence
  DNA replication origin
atttttttagtggagatggggtttcactatattggccaggctgttctcaaacttctgacctcgtgatccacccgcctcggcctcccaaagtgctgggattacaggcgtgagccactgcgcccggcccttctttcttactcttttctctctctctcttttctttcttcttttcttcctttcctttctttctttcttgatggagtctcgctctgtcacccaggctggagtgcagtggcgcaatctcagctcactgtaacctccacttcccgggttcaagcgattctcctgcctcagcctcccgagtagctgagactacaggcgcccaccaccacgcctgactaatttttgtatttttagtagagacggggtatcaccatgttggccaggttggtctcgaactcctgaccttgtgatccacccacctcagcctcccaaagtgctgggattacaggcgtgagccaccgcgcccggcctaactgcttcagttctaagatatacactctccccgcctgaattttgatatctctagagtctggattttgtttaaaaaccatcaattgcatatttgaagtgcatcattattttacagggaggtttttctcttctctctcctcctggtacctaaaatcatggcgcatcttacagttgctctgggccaatgagatttagtaatctccagcttctaaagcatttaaaggtttacaaagcattttccaatttacaaggagttctagggtttatgaagcgttttgagcgtccgagggctgcacaggttatttcccaggtgaggaggtgctagagggttcggaggcctctcagagcgtaggaggcgttttcagccatccagctgaatcctcaggtggctcttgggctggtgtgagcctggtctctgcgtgaagcacacggcggcgggcgggcaggtgggggctcttgtgcaccccggcctgggacagagctggagggggcagggcttgggcgagagctgcctgttctcccagttcctgagccccctcagactgtttctggtgtccccgccactgcctagcctctagcctggtgtgtgatacctcagttctttcccaggccagattttctctgttaaatggatcgctggggtcagaccggcagccactacacctggagaagcttcagaacgtctaccagtaccttgttaaaaggcagattcccagctcccattcccagtgccacacagaaggacgtgattgtgccacaggcctaggaatgtgtatttgtccctgttccgcacgtgaagtgtgcacagggcccccagcctcacccgggaactgctcggcagccgtggatttacccctgcttcccacgtgaaatgtgcacagggcccccagcctcactcaggagctgctcggcagccgtgggacacagggtctcttggttttgcatccagttccagcgctcggtagcgctaagagggtctcgttcaaaaatgcagctggattttgatttggcgattcagattttcaggcctgtgtctccaggatttcaggggtgtgtttcctggagctgcaaaccaaatgaccacacacgaagtggcttaaagcagcagaggttcattctcacagctctggaggccagaagtccgaactca

SEQ ID NO: 32983 - DNA, 1015 bp, Artificial sequence
  DNA replication origin
acagggtctggctgtgaatccacatgaacgtgaggctgcactagcccttgctgggtgacgagggcagaggggcttctcccccgccttcccagtctaccaagaggggcacagattctctcagcttcttagggtcaggatgggtgagagggaagaaacgcagttccaagagtccggggagggaggacgacagtgcgagaggcagagtccggggagggaggacgacaccgagaggggcagagtccggggagggaggacgacaccgagaggggcagagtccggggagggaggacgacaccgagagaggcagagtccggggagggaggacgacagcacgagaggcagagtccggggagggaggacgacaccgagagaggcagagtccggggagggaggacgacaccgagaggggcagagtccggggagggaggacgacaccgagaggggcagagtccggggagggaggacgacaccgagaggggcagagtccggggagggaggacgacaccgagaggggcagagtccggggagggaggacgacaccgagaggggcagagtccggggagggaggacgacaccgagaggggcagagtccggggagggaggacgacaccgagaggggcagagtccggggagggaggacgacaccgagaggggcagagtccggggagggaggacgacagtgcgaggggcagagtccggggagggaggacgacagtgcgagacgcaggcgggtggaggaatccctggaccctggacccgcgctatgggcacatttgtaggagttcttggccagagaatcgggaagggcatgagtgcaagtgagaacagcccgggtgtgggcacaggggcagggaacgctggcgagcccccggtccggggtgagcagccagcatcccagaggaacgtgcgccaggaccagagcacagctgggcaccgggtgggcactcgatggctcgagtttctctgaccagctcgagggctctgacgcttggcagcgaaatgccagattgtttgg

SEQ ID NO: 32984 - DNA, 1181 bp, Artificial sequence
  DNA replication origin
ggacgacagtgcgagacgcaggcgggtggaggaatccctggaccctggacccgcgctatgggcacatttgtaggagttcttggccagagaatcgggaagggcatgagtgcaagtgagaacagcccgggtgtgggcacaggggcagggaacgctggcgagcccccggtccggggtgagcagccagcatcccagaggaacgtgcgccaggaccagagcacagctgggcaccgggtgggcactcgatggctcgagtttctctgaccagctcgagggctctgacgcttggcagcgaaatgccagattgtttgggaagatctaaaaaaagctcaacacagatgttagcaaggctgttaggaaacaggcagccgcaggcggggctggtgggcgagccgactgcacagccgcctccagggtggactggcaccgccggtaacgtgattaaggccggcgctccgtgacccggcagttcccggctcagcatgcactggagagaagggctcgtgggaacgaggggcgcctgccgcggagctacctgagggagcgggaaggatcctcaatgcccatcaggaatggcttgggtaagggggaattgcacacggcacagggaaggggaattgcacacggcacagggaaggggaattgcgcacggcacagggaaggggaattgcgcacggcacagggaaggggaattgcgcacggcacagggaagggggaactgcacacggcgcagggaaggggaattgcgcacggcacaggtaaggggacaggggacggcgcacagcacacggaagggggcggcacagggaagggggaactgcacacggcgcagggaaggggaattgcgcacggcacagggaagggggaactgcacacggcgcagggaaggggaattgcgcacggcacaggtaaggggacaggggacggcgcacagcacacggaagggggcggcacagggaagggggaactgcacacggcacagggaagggggaactgcacacggcacagagaagggggaactgcacacggcgcagggaagggggaactgcacacggcacaggaaaagggaggccacatggcacaggggaggggacggcacagggaagagaaattgcaccccgcacagggaagggaggatctcttgagcccagggctttgagatcagcctgggaaacagtgagacc

SEQ ID NO: 32985 - DNA, 1891 bp, Artificial sequence
  DNA replication origin
gtgctggctccccctcagtctttctcctctctgcttatttcacattaatctatgagatcgtcttgctcctaacactctgctgagattttcatcatcagtgtctgtttttcctgcacacactagattccttgcatgttgggtataagtactacattatccacacggtattaggtttccgtgcatgttgggtataggtactgtgtcatccacatggtattaggtgtccatgcatgttggatataggtactgcgtcttccacacggtattaggtctctgtgcatgttgagatataggtgccgcgtcatccacacggtattaggtttctgtgcacgttggggtataggtactgcgtcatccacacggtattaggtttccgtgcacgttggatatacatactgcgtcatccacacggtattaggtttctgtgcacgttggggtataggtactgcgtcatccacacggtatcaggtttccgtgcatgttgggatataggtactgcgtcatccacacggtattaggtttccgtgcacgttgggatataggtactgcgtcatccacacggtattaggtttccgtgcacgttggggtataggtactgcgtcatccacacggtgttaggtttccgtgcatgttgggtataggtactgcgtcatccacatggtattaggtttctgtgcacgttgggtgtagatactgtgtcatccacacggtattaggtttctctgcacgttggatataggtactgcgtcatccacacggtgttaggtttctgtgcgtgttgggtataggtactgtgtcatccacacggtatgaggtttccgtgcatgttgggtataggtactgcgtcatccacacggtgttaggtttccgagcatgttgggtataggtactgcgtcatccacacggtgttaggtttccgtgcatgttgggtataggtactgcgtcatccacacggtatgagatttccgtgcatgttgggtataggtactgtgtcatccacacggtattaggtttctctgcatgttgggtataggtactgcgtcatccacacggtgttaggtttctgtgcacgttggatataggtactgcgtcatccacacggtgttaggtttccgtgcacgttgggtataggtactgcgtcatccacacggtattaggtttctgtgcacgttgggtgtagatactgtgtcatccacacggtattaggtttctctgcatgttggatataggtactgcgtcatccacacggtgttaggtttccgtgcgtgttgggtataggtactgcgtcatccacacggtgttaggtttccgtgcatgttgggtataggtactgcgtcatccacacggtatgaggtttccgtgcatgttgggtataggtactgtgtcatccacacggtattaggtttctctgcatgttggatataggtactgcgtcatccacacggtgttaggtttctgtgcatgttggatataggtactgcatcatccacacagtgttaggtttccgtgcacgttgggtataggtaccgcatcatccacacggtatgaggtttctgtgcatgttgggatataggtactgcgtcatccacacggtattaggtttctttgcatgttggatataggtactgcgtcatccacacggtgttaggtttccgtgcacgttgggtataggtactgcgtcatccacacggtatgaggtttccgtgcatgttgggatataggtactgcgtcatccacacggtatgaggtttctgtgcatgttgggtataggtactgcgtcatccacacagtattaggtttctgtgcacgttgggtgtagatactgtgtcatccacacagtattaggtttctctgcatgttggatataggtactgcattcgtccacatggtt

SEQ ID NO: 32986 - DNA, 3448 bp, Artificial sequence
  DNA replication origin
agagaaggagatgggccctggaaacagagcagtgagaggttccccggtgtgtgcaagcccctcttcctggctctggacccccagtctccccgcccggccctcttagatggctggagacttaggggtggggagcacagccctggccctcccattgctctctcactctgtaactaggccccctgggtctgccgcccacctctgccgtggccttccccgccttctctccacctcggaaggtggtcagcacatcctgccaccttgcaatggctgttccccctgcctggataaccttccccgctctgctctcccaggcagctcctattcaccagtcagggctctacccaaatgccgcttcctcagggaaggcctccggaccgccctacagagtgtatgtccccatggacatcctcactgcctctctggtggacttaccaaggccctgattaaatcattgccgtatttatttagtgtctgagggtagaagtcatgtctgaaatgccacctcgtctaatgtgtccagaggaggccgggcagatagatggcgcttcatcgtgagtgagatcgtgagtgagagttagaggaggccgggcagatagatggcgcttcatcgtgagtgagatcgtgagtgagagatagaggaggccaggcagatagatggcacttcatcgtgagtgagatcgtgagtgagagttagaggaggccgggcagatggcgcttcatcgtgagtgagatcgtgagtgagagatagaggaggccgggcagatggcgcttcatcgtgagtgagatcgtgagtgagagatagaggaggccgggcagatggcgcttcatcgtgagtgagatcgtgagtgagagatagaggaggccgggcagatagatggcgcttcatcgtgagtgagatcgtgagtgagagatagaggaggcggggcagatagatggcgcttcatcgtgagtgagatcgtgagtgagagatagaggaggccgggcagatagatagcgcttcatcgtgagtgagatcgtgagtgagagttagaggaggccgggcagatagatggcgcttcatcgtgagtgagatcgtgagtgagagttagaggaggccgggcagatagatggcgcttcatcgtgagtgagatcgtgagtgagagttagaggaggccgggcagatggcgcttcatcgtgagtgagatcgtgagtgagagatagaggaggccaggcagatagatggcgcttcatcgtgagtgagatcgtgagtgagagatagaggaggcggggcagatagatggcgcttcatcgtgagtgagatcgtgagtgagagatagaggaggccgggcagatagatggcgcttcatcgtgagtgagatcgtgagtgagagatagaggaggccgggcagatagatggcgcttcatcgtgagtgagatcgtgagtgagagatagaggaggccgggcagatacatggcgcttcatcgtgagtgagatcgtgagtgagagttagaggaggccgggcagatagatggcgcttcatcgtgagtgagatcgtgagtgagagttagaggaggccgggcagatagatggcgcttcatcgtgagtgagatcgtgagtgagagatagaggaggcggggcagatagatggcgcttcatcgtgagtgagatcgtgagtgagagttagaggaggccgggcagatagatggcgcttcatcgtgagtgagatcgtgagtgagagatagaggaggccgggcagatagatggcgcttcatcgtgagtgagatcgtgagtgagagatagaggaggccgggcagatagatggcgcttcatcgtgagtgagatcgtgagtgagagatagaggaggccgggcagatagatggcgcttcatcgtgagtgagatcgtgagtgagagatagaggaggccgggcagatagatggcgcttcatcgtgagtgagatcgtgagtgagagatagaggaggccgggcagatagatggcgcttcatcgtgagtgagatcgtgagtgagagatagaggaggccgggcagatagatggcgcttcatcgtgagtgagatcgtgagtgagagatagaggaggccgggcagatagatggcgcttcatcgtgagtgagatcgtgagtgagagttagaggaggccgggcagatagatggcgcttcatcgtgagtgagatcgtgagtgagagttagaggaggccgggcagatggcgcttcatcgtgagtgagatcgtgagtgagagatagaggaggccgggcagatagatggcgcttcatcgtgagtgagatcgtgagtgagagatagaggaggccaggcagatagatggcgcttcatcgtgagtgagatcgtgagtgagagatagaggaggcggggcagatagatggcgcttcatcgtgagtgagatcgtgagtgagagatagaggaggccgggcagatagatggcgcttcatcgtgagtgagatcgtgagtgagagatagaggaggcagggcagatagatggcgcttcatcgtgagtgagatcgtgagtgagagttagaggaggccgggcagatagatggcgcttcatcgtgagtgagatcgtgagtgagagatagaggaggcggggcagatagatggcgcttcatcgtgagtgagatcgtgagtgagagttagaggaggccgggcagatagatggcgcttcatcgtgagtgagatcgtgagtgagagttagaggaggccgggcagatggcgcttcatcgtgagtgagatcgtgagtgagagatagaggaggccgggcagatagatggcgcttcatcgtgagtgagatcgtgagtgagagttagaggaggccgggcagatggcgcttcatcgtgagtgagatagtgagtgagagatagaggaggccgggcagatagatggcgcttcatcgtgagtgagatagtgagtgagagatagaggaggccgggcagatagatggcgcttcatcgtgagtgagatcgtgagtgagagttagaggaggccgggcagatagatggcgcttcatcgtgagtgagatcgtgagtgagagttagaggaggccgggcagatagatggcgcttcatcgtgagtgagatcgtgagtgagagttagaggaggcggggcagatagatggcgcttcatcgtgagtgagatcgtgagtgagagatagaggaggcggggcagatagatggcgcttcatcgtgagtgagatcgtgagtgagagatagaggaggccgggcagatagatggcgcttcatcgtgagtgagatcgtgagtgagagatagaggaggccgggcagatagatggcgcttcatcgtgagtgagatcgtgagtgagagttagaggaggccgggcagatagatggcgcttcatcgtgagtgagatcgtgagtgagagttagaggaggccgggcagatggcgcttcatcgtgagtgagatagtgagtgagagatagag

SEQ ID NO: 32987 - DNA, 783 bp, Artificial sequence
  DNA replication origin
tgcactccagcctgggcaacagagtgagactctgtctcaaaaaaccaaaaaacaaaaaactataattgcagaaatagaggaaataacagattttaggaagcattgtgaggccaggtgaggggtgtcctgagcatgtgctgggctctgggtgctagaagagacttcctggagggctctgggaggtggtgaggaggggaatctcaggtgtggctgaaagaggaggcatcgccttgtcggagaagttagcatggatcatcgtgaggagtttggggtgagacagcatctctgagctggtgtggtggcagcaggtggcggtgaggggcagctggggctccagggaggaggctagagaaggatggagctggcgggggggtgactgagggccatttccacgcaatttccatctctgcccccaccctgcgaggcatggacccctgaccactatatggacaggatactgaggctccaagcagaccctcctggctgggccggggttggcaaggggagagcctcgagggtccctatgggggctgagaagtggatgttctgtagggaggactcaggacgtggctggtatcgggggcttactggggcctagagggatttgagtgacgggaagcaaatgaagcaggaccatgcaaatgagcatgcaaacaagcacgcagacgagcacacaaacaagcacacagatgagcatgcaaacaagcacgcagatgagcatgcagatgagcacacagacgagcacgcagatgagcacacagacgagcacgcagacgagcacgc

SEQ ID NO: 32988 - DNA, 1045 bp, Artificial sequence
  DNA replication origin
gcctcctaggactcctggcccctctgggggtctggggacgccaggcgaagagggcagacccacctggcgcgtggcaggcacggagaggctgaggccatcagtggagatgtggatggagatgctcatgccggcaaagcgaaggttgctcttgcccaggacggacgccagggccttgttgggggcctgagttgggggcggagcacagcgagggcggctgtgggtgggggctgtcgaggggctcccaggatggccgcagcgtccccacagcccccgactgccccaccagccccacgagagaccacaagcctcactcacctttttcttccaggatccccggacgccaggcacggcctcatggagccggttgatggcttccctggggttgggaggagggggcttagagagtgtggtgggggtggccatggagggagctggggaggaaggggtcagagagggcgggggtctggggagggggcaggagctcagagaagggcgagagagaggggagaggaaggcagagagggaggggtgggagaggatcagggggcctaaagtgggcagggagggggctggggaacctgggggaggagtgccccacaggacaggtgcagcttgggcaccagcccactccacgtgcgtccttgcatccggcagaggcccggcccccagctctggcccctctaccaccctctttcccagggaccagtgtgtccctggcctcggcccacaaggaaggctcggcatcagatgtgggggttggagcagcgagcaggaggccctgagcctgacgcggggtccgtgtcgagatcctgtctgcagcctgagtggtggcaggagctgaccccaaacaagagcgcctcagaccactggtccccaggagaggttagaagtctacagggtcctgaaggggccccggaaatgtcggcgtcacgtggagaaaccagatcccccacccagggcatgtgggaattttcacagcacggccactgtggaaaacagcctgggggctcctcaaaaggttaaaaattggccagatgcagcggct

SEQ ID NO: 32989 - DNA, 2422 bp, Artificial sequence
  DNA replication origin
tcccagtcctgagggtggagccctcatagcctcctcacctcccaaaggcccacctttaaataccctcacagtggggcataggtttccacagagggattttgaggggggcacagatattcagccctagatcgatatttacaaactgggagaatttcacagaaaagccctgaatttctggtctcttttttaaaaaagcacatggccggcagcactgggcgccgtggagcgtgggacatgcagtgagctgaggtccccgcctcttcccgtcgtgcagggggagcagtgcagatcctggagcccaggggtgtgggttcaggacccagctctgcgggccgtgtggcccaggaggtcagtcaccctcccacccgggcctgtttcccgaggggccattgctgcccatggcatgtggatttgcgtggagtggattaacagaccacgtgcacagtgtgtccacagcagagcctcacacgtgacaagcgccctgagttagcgaggtgttggtatcattaccggatctgcgtgcagtggattaaaggatgctgtgcacagcgtgtccgcagcagagacttacacgtgacaagcgccctgagttagcgaggtgtcggtatcgttactgcattgcatcctacctcgtgtgtttacctggctgatcctgaaggctgtaggcatctgagtttgcagtccctgttctcaaccgaataggatattgcatttcctctcgtgagctgccgtgggccacagagggtttgccccccacctcccccgtgcactaggctggtgtccccacaacgggacccatggaccacacagttcagggtttcagccgcacaaccggagtgggctacgtgttaataagggggcaggtaagggaatgagaatccctcaccctatggccctgtagcgccagacactggcacagacatcatcccagaggcacatgctctgcctgagagaagacagccattgagcagccagcatcccaccaaagctgcctcctcagtgggagaatccagtgctagggacagggaccatggctaattcctttaggtatgacctgtctactacatgcctagagtccattcatctgttcatccattcatccatctactcatccacccacccatccatccatccattcatccacccaccaatccacccatctgtccacccatccaaccatccacctgtccatccatccaccctccatccatccacccatccacccacccatccatccatccgtccatccacccatccacctacacatccatccacccatccatccatctgtccatccatccaaccatccgtccatccatccaccctccatccacccacccatccattcacccgtccatccatccatccatccacccacccatccatccatccacccacccatccacctacacatccatccacccatccatccgtccatccatccacccatgcactcatccacccacccatccatccacctattcatccacccacccatccatccatccatccacccatctgtccacccatccaaccatccgtccatccatccacccacccatccactcacccgtccatccatccattcatccacccacccatccatccatccattcatccacccatctgtccacccatccaaccatccatctgtccatccatccacccacccatccactcacccgtccatccatccattcatccacccacccgtccatccacccatccacctacacatccatccacccatccatccatctgtccatccatccacccatccactcatccacccacccatccatccatccattcatccacccatctgtccacccatccaaccatccatctgtccatccatccacccacccatccactcacccgtccatccatccattcatccacccacccatccatccatccgtccatccacccatccacctacacatccatccacccatccatccatccacccatccactcatccacccacccatccatgcacctattcatccacccacccatccatccatctgtccacccatccaactatccatctgtccatccattcacccatccactcatctacccacccatccacccatgcactcatctacccacccatccatccatccattcatccacccacccatctacccatctgtccacccatccaaccacccatctgtccatccatccaccctccatccatccacccacccatccactcatccacccacccgtccatccatccattcatccacccacccacccattcatccatccatccacccacccatgcatccatccatccacccatccacccacccgtccatccatccattcacccacccatccatccacccatccacccacccgtccatccatccattcatccacccacccatccactcatctatccacc

SEQ ID NO: 32990 - DNA, 1195 bp, Artificial sequence
  DNA replication origin
ccctggttttccattaaaataaatatattaataaaatgaaaagtgtccattcacacaagaaccctaaggttttgctaaaaccagtgcgtgaaggtttgctgggagctgggagccaggatgtctgcacagtgtcaacatctgtctccccagatcacgttccagggaaggaagaccggatgccggggccagggctggggaggccgcaggcagcgcttgggctggaaacgtgcacggcctggcctgcgagtggctcccggggcgtgcactgcgacgtccccatgcacccgagtcccaattccacgagtccccgcagatcttcctcattataagggaaataaacagagctttacgggggagaaaagtcaccttcaccaagtacattcatttcccagggctgccgtgagcaaaggccacacctgggggccacgggagcggatcctctccacgtcccagagccgggagtctgaggtcaagctgcgggcagggcctcgctccctctgaagccccgggggagggtccttcctgcctcttccagcttctgggggctcccggcgtcccgggcttgtggccgtgttactccatctctgcctcctccacacagctgtctccttctgtgcagatttccctcttcttagaggacacgagccattgcatttaggccccaccctatttcagtaactccagtgtggcctcatcttaactaaccacgtctgcaaaggaccttttccaaataaggacgtgagttttggggaacaccgttcgccccaggacactaggtgatcaaagtctccagcaccagtatcaggacaaaccagcacccgggggcctcctgacacgaagggctgggaaaacacagcacccctctgtgcgtcctgccaaaaacacaacctcgactcaactgcaggcaaacaccaggcagacacaaactgagggacggcagcccagcagccggtgtgcactcttcaacactactggctccatggatcccaggacggaacaactgtgaggctaaaggtggtaaaagagacaggacggacggggcaagtggctcacgcctctaatcccagcactgtgggaggccgaggcagacagacggcttgagttcaggagttcaagaccagcctgggcaacatggtgaaaccccgtctctacaaaaaaaaaaaaatacaaaaatacaaaaagtagccaggcatgg

SEQ ID NO: 32991 - DNA, 1088 bp, Artificial sequence
  DNA replication origin
gtggtgaggagtgggggtggttttaagtagggggtggcgcagagtgtgcagttttgaaagcccttccaggggccgtgtggaagtgttgctgagggaggaggagggtctggaagggcagcagagacccgggaggaggctgcgagggacggcggtggcccaggccaggggacctaggtgaggggagaagtggacaatgagcctgtgttggagcccggaggagttgctgatggaccaggggccctggcccccagggagcctgaccggcctcagcccccagcgctgtcccccaggagccccgtctcccagcacctacatcacagcaggcacagggacagccggtccctcctggtcacagggaagcttgagttaaggaggggaatagccaagccccatcacccgggggctgcggccggcggctcaggcccgcagggctcttccacactggagggaccctgtgcactgagggaaactgaggcacagagaggccgagctgtgtctgaggttacgcagtgaaaagcaggaccagaacccggggctgagggtcctcctgcgggagccggagagaacattctgagggcactcgtcacgcacgcacctgtgtggggcacagcaacggccccgtgtccacatccaccctcggattctgtgaaggtgcccctcacacggcgacaggggacctgcaggtgggaccgagtgagcaaccctgagatgggatgatttgggggcccggtgtcctcgcagcagggggtgagagtcagagagagaccggaagaggctgcgctgtggctgctaaccgggaggaaggggcccccagccaagggatgtgggcccctcaggacgctgggaaaggcggagcagattgggaaccaactctgcccacaccttgattttagacttctgagctctagacataagcggattagctcgcgttgtttggagccactcaatttgtggtgattggtgatagcagcaagagggagtggatgggccgggcgactcagccggcatcgcagaaccccccagaatcctgcagcgatcccggtgtgtgggagagaagttggacgccggataatcagcggcgtgggccc

SEQ ID NO: 32992 - DNA, 4386 bp, Artificial sequence
  DNA replication origin
gggtcgcgggggtcgcggggcgggcggggggcggcggggtccggggacgccgccgccgccgccgagtggatccggaagggcagcttcatccacaaacccgcgcacggctggctacaccccgacgccagggtcctggggcccggggtctcctacgtcgtgcgggtgagtcccccccaccccccccgggagcccgttcgcggcggcctcccctcccccaccctctcctccgggacccccggaccccgcgagccaggtgtcccctccccatccttcctgctctcccgccaccccggacccccatccccggccggcggccggcggctgcccccacccggaggcgctggggtccgggttcccacggcgtcacgtggggaggggcggggagagggcggcgggggaggggcgcgcatgcgcaggtgcaccgccccccactcggactgggcgggcgaggccgagagcggcgagcggccggggcgtctctgccaccggagccccccggacagctgttcacgaatgacagacggggcccgagacgctggcctgcggtgggggtgcgggaaggggtgtttggaaaggggctggcgcccggacagaccccaggattccagatgggaggcagcagggacttccagggcggccaaggaagcggcctttgtttatttaccttgggtcttatgataaatgaaccttttcaaacacacggggaagtcgggcgcctggacacagcacgcctccacctaggagggtaaccttcccctctgctgacgggtctgcccctctctgtggtttatagtaaaccgtgtgaagtcacctgcaggggtgacagcgccgtgcatagtcccccgtcttctgagagagcagctgtcctacagctgcagtcattacggcgtctgggaaaatgatcagccactcccgcacgccactaccggtgggtgctcccagctcctcccggcctctgcggccaggaacattagcctgtgttcacattgggttgtgtctttgcttttctggacactgagttcagtagggtccttccctctacactgagttgagaagggtccttccccttacactgagttcagtggggtccttccccctacgctgagttcagtggggtccttccccctacgctgagttcagtagggtccttccctctacactgagttgagaagggtccttccccctacgctgggttcagtggggtccttccccctacgctgagttgagaggggtccttccccctacgctgggttcagtggggtccttccccctacgctgggttcagtggggtccttccccctacgctggcttcagtggggtccttccccctacgctggcttcagtggggtccttccccctacgctgggttcagtggggtccttccccctacgctggcttcagtggggtccttccccctacaccgagttgagaggggtccttccccctacgctgggttcagtggggtccttccccctacgctgggttcagtggggtccttccccctacaccgagttgagaagggtccccctacaattcctgtgccgtaggagtctgaccttattaccttatattgggaacagggtccttgcagatgtaacctagtcaagatgaggcctacctggatcaggggtctctgtaaggagaaggaactttagactcagatgcacagaggagcgggccgttaggagacaggcagaggtgggggcctcaagcccgggcccaccaaagcctgtgggagcccccagaagctggctgtgaaacctcactcccccacgtgtggtccccaggcgcgctcggcctgcgcagtacaaccggcttctgcctccccaggacccgcttccgcctccccggaaccctcttccgcctccccaagacccgcttccgcctccccaggacccgcttccgcctccccggaacccgcctccgcctccccgggacccgcttccgcctccccggaacccacttccgcctccccaagacccgcttccgcctccccggaacccgcttccccctcccccggaacccacttccgcctccccaagaccggcttccgcctccccggaacccgcgtccgcctccctggaacccacttccccgtcccccggaacccgcttccgcctccccaggacccgcttccacctccccggaacccgaatccgcctccccaggacccgcttccgcctccccggaacctgcttccccgtcccccggaacatgcgtctgcctccccggaacccacttccgcctccccaagacccgcttctgcctccccaggacccgcttccgcctccccggaacccgattccgcctccccgggacccgcttccgcctccccggaacccgcttctgtctccccggaacccgcttccgcctccccaagacccgcttccgcctccccgggacccacttccgcctccccaagacccgcttccgcctccccggaacccacttccccctccgccggaacccgcgtctgcctccccggaacccacttccccgtcccccggaacatgcgtctgcctccccggaacccgcttccgtctccccggaacccacttccgcctccccaagacccgcttctgcctccccgggacccacttccgcctccccaagacccgcttccgcctccccaagacccgcttccgcctccccggaacctacttccgcctccccaagaccctcttctgcctccccgggaccggcttccgcctccccaggacccgcttccgcctccccgggacccacttccgcctcccccgggtctgtgcggatgccaggcctggttgggtctgttttccctggtggcatcgggccgccctcgccgtctcccggcggtttgtcctacaagtttaacgccgacggccggcgtgttccacggaggacgcgtgcgcttccttcacaccacatccattgggaccagtcaggtgtggccattggccgtggatgtgggatttagaatgttcagaattcagacgccagggttgttggggctccggatgttgggggataactgctgctttccgtcactgcaggaaatatttagcatacgcttcccctgcccggcacagatgatgagtagacaatgagagacctcgttcctgctctcaaggagcttggattccagtaggagagacagtcaatcagaagaggacaaacagatgaggaaataggttctggtagcggctctgcagagctaaaatcgtgtgatattagagcaggaggctgggcggctgcccctcccaggaggcgaccttgaagctgagacctgagccatggaaaccccggccgtggggtttgcagacatagttctagacggggcacagcaggtgcaggtgcaaaggcctgatatggtgggtttgcagacagagatctagggggggtacagcaggtgcaggtgcaaaggcctgatgtggtggggtttgcagacagagttctagtcggggcacagcaggtgcaggtgcaaaggcctgatgtggtggggtttgcagacagagttctagtcggggcacagcaggtgctggtgcaaaggcctgatgtggtggggtttgcagacagagttctagtcggggcacagcaggtgcaggtgcaaaggcctgatgtggtggggtttgcagacagagttctaggcggggcacagcaggtgcaaaggccccacgcggtgggtttacagacagagttctaggcggggcacagcagctgcaggtgcaaaggcctgactgtggagtttacagacagagttctaggggcggggcacagcaggtgcaaaggccccacgcagtgggtttacagacagagttctaggcaggggcacagcaggtgcaaaggccccacgtggtggggattgcagacagagttccaggcaggggcacagcaggtgcaaaggccccacgtggtggggattgcagacagagttctagacggggcacagcaggtgcaggtgcaaaggcctgacgcggtggagtttgcagacagagttctagggggggcacagcaggtgcaaaggccccacgcagggagcggacctggtgcgtgtgcgtcacggcaaggagagccatgagactggagctgatggagagggagcgggactctctctgtgggctgtggtgaggagtgggggtggttttaagtagggggtggcgcagagtgtgcagttttgaaagcccttccaggggccgtgtggaagtgttgctgagggaggaggagggtctggaagggcagcagagacccgggaggaggctgcgagggacggcggtggcccaggccaggggacctaggtgaggggagaagtggacaatgagcctgtgttggagcccggaggagttgctgatggaccaggggccctggcccccagggagcctgaccggcctcagcccccagcgctgtccc

SEQ ID NO: 32993 - DNA, 1416 bp, Artificial sequence
  DNA replication origin
actcaggggagcgggctggagggtcgcggcccttcttccctcacttctggggagcccagtcccgcaccagctcatctgagctctgggcctcagcctcccaggccggtcgctccatccccagcctcaacctctccgagaccggccgcaccttccctggcctcaagggtcggttccttctgcaccagaaaacggggtgtcactgtcaccccgggacccagcctcctggcccgacttggctggagctcccctgcacctgccccgccccaagcagggctgattgccgggaacaaagggaggggccgggacgcgctggcaggtggggagggagggaggggcgaggctgcccggagcccgatcgataattcaggggatgagatcacagccggcgccgcccgcggggccggggaggtgggggaggggagcgaggcgcgcggtcgcgatcggccgtctctgccgcggcgcgtgtcggactcagcccctgcgcgtccgcgggaggagcagatcgtgggcgcgattggtcgggctggagccgcggctggacctgcgcgcggtgtgtgtgttgtgcgcagggtgtacgctgtgtctgggtgcgtgtccaggcatatgcaggggatccaggctgctgggtcctggggtgtgttcacctaatgggtaaagggtgggacaggtttggcggccctaggctgagggctgtgggctgaggagagagcagccccaccaccccctctctgcgccctgcatgcctcccaggctgcatccctcagggaggtcccggggcagtgtcgcaccctcccaagctccgggattagggtctttctggatgggaggtttgtaaggtggtccaggtgccatccctccctggcacacagagggctcagtcacacggcacccccggtgtgtttccttcctgtcccttggagacagtggcaggaactcagtccaacatccagagttcaaatcctgacatcagactgaggtgggggctcacagcatgccccaggacaaatgtccagtctctccaaagcaccatttcctctcagtagatgcccctggtcctgagttgctatgaagcctagatgatctttattaatatccaaaacatagcaagcagctactgatggcagatattagaatacctcaagctcctatacatccttcaaaacccagcttcaatattgcctcttccaggaagcctacctggctgcctgctcaaaagcttggctccacctccggcctcccctcgccctgggtctctcttctggtctctcagaccccctggccactggagggctacgggtctggctctggagggcggcgttcgggtctcttttctgtgacatcaatagacacgttaaggccgggctcggtggctcatgcctgtaatcccagcactttgggaggccaaggcaggaggat

SEQ ID NO: 32994 - DNA, 1028 bp, Artificial sequence
  DNA replication origin
tcaccctgggctgccgcctccccctgaagcccctggacacctcagcccctgcccctaatgcctacaccatgccccctctgtggggctcacagatcttcaccaagcccagcagccccagctacacggtggtgggccgcaccccccccgcccgccccccgcaggatcctgctgagataccaggcccgggccagtacgacagcccggacgcaaacacctaccgccagcgcctgcctgccttcaccatgctggggcggccccgggccccgcgacccctggaggagacccccggccctggcgcccactgcccagagcaggtcaccgtgaacaaagccagggctccagcgttctctatgggcatccgccactcgaaacgggccagcaccatggccgccaccacgccctcccggcctgcggggcacaggctgcccggccgctgctgctaggccaggcctgtttcccacacagtgaacggggggctggcgggcctctcctggggcctggctttggctggaggggctagaaggcgagaggggctgggaaaggagtcttccctcccctttcctgaactgtccaggtccttctaggacacctgatccttccagtccctgggggctgtgacccatggccctgtgcagggtgcagggtgagtctccttccagtgccccagtttcttccaggtcacgccaggccaggccaggccaggtggggaaagggacaccttccggccctccccagtagctggctggagatggagcttcctgtgtcccagaactcggcgtccagctccactagggcctggatccccatcacagcttgggttagccccggtcccagcccaaactcaggctggaggcagccccgaggcctgtgcctttcccactccaccttctacagttgcttagccaataaacctttcctgggctggagagctgtcagcatcacatgtgcttactcatttaatgtgtcttttttttttttttttttttgagacggagtctcgcactcccgcccagactgaagtgcagtgg

SEQ ID NO: 32995 - DNA, 1332 bp, Artificial sequence
  DNA replication origin
tgcaccctgcacagggccatgggtcacagcccccagggactggaaggatcaggtgtcctagaaggacctggacagttcaggaaaggggagggaagactcctttcccagcccctctcgccttctagcccctccagccaaagccaggccccaggagaggcccgccagccccccgttcactgtgtgggaaacaggcctggcctagcagcagcggccgggcagcctgtgccccgcaggccgggagggcgtggtggcggccatggtgctggcccgtttcgagtggcggatgcccatagagaacgctggagccctggctttgttcacggtgacctgctctgggcagtgggcgccagggccgggggtctcctccaggggtcgcggggcccggggccgccccagcatggtgaaggcaggcaggcgctggcggtaggtgtttgcgtccgggctgtcgtactggcccgggcctggtatctcagcaggatcctgcggggggcgggcggggggggtgcggcccaccaccgtgtagctggggctgctgggcttggtgaagatctgtgagccccacagagggggcatggtgtaggcattaggggcaggggctgaggtgtccaggggcttcagggggaggcggcagcccagggtgaaagccggcggtgtccgatggcgcacagggggcaccttctctgggctgtaggccccagggcctggcgtcacctccggacctgagagagtggggaaggaaaggtggcactgatgtcctcacctgcccagagacccggcctggctccccatggcccacatgcaccctggagcttacaacgcttctcaagcagcctgggtgcctttctctcccttccccatcctccatacacatggtctgtgtttcaagcctccaggactttgcccaagctggacccagggccaagcacgccttcattttccacccctcctccctgctgccttccccagcccatccagggtagagccctcacagcccttccagagccccacagcctgggttttcccctctctccagacgtgagcacactgaggtgggatggtctgcacctgcatctaactgccccaccagactgggatcccataaaaaggaaggcatgtcaaatttactccaactctccagcagttgactgtctgagttgatgggtgaacaggataggtaggaggtgagtggttgagcggggagtgaatggttcatgaagggatttgtaaatggatggatgagtggatgatggatggatggatggatggatggatggatggatggatggaacggttgataggtagaaggaaaaaaggaaggattcatagatgagt

SEQ ID NO: 32996 - DNA, 1619 bp, Artificial sequence
  DNA replication origin
agatggaggggtgggtgggtaggtgggtggatggatgagtggatggacgggtggatagatggttgggtggagggtggatggatgggtggatagatggatgagtggatgggtggatggttgggtgggtggatggatgagtggattgatggatgggtagatggttgggtggatggtggaaggatgggtggatagatggatgggtgggtgggtgggtgggtggatggatgagtggatggacgggtggatagatggctgggtggagggtggatggacgggtggatagatggttgggtggagggtggatgggcgggtggatagatggatgggtgggtggttgggtgggtgggtagatggatgagtgtatggacgggtggatagatggttgggtggagggtggaaggatgggtggatagatggatgggtgggtgggtgggtggatggatgagtggatggacgggtggatagatagttgggtggagggtggatgggcgggtggatagatggatgggtgggtggttgggtgggtgggtggatggatgaatggatggacgggtggaaagatggttggtggagggtggatggacgggtgggtagatggttgggtggagggtggatggatagatggtgggtgagtgggcaggtggatgggagaatggagtcaggcaggtgtgtcaggtgtgcgggcaaactgttgggtgcctgtgaaggatactgccgatttgccacagtccccattcacctctcacctcctgacacctaggccagctgcctctgtggccatgtgtgcccagggcctctgtcatcctgacccacttcactcattcagttctcccagccccagtgggcactgcagtggcggcccctcctccgtgtcccttggatttgatcactccaaagactctgcattctaagaactccaaggataagagggggagggaggacagggcaggagagtcgctgagaccctggaaagcaggtccttgtgcggctgcttggctccagtactcaccccgagacttggcccggccctgcatggagtaggcaggggtgcagctgcggccaaagcgtgtgactttggggtccaagaagtagatggggcccgggctggtgtcctgaggtggtgctggggagaggagcccagagtgctgagagtgattctgaagacagtgcctgccccaccgcccggcctcagtgcccctcttggccccgagacactcccaccaggtcagaggccaccccagtcccatctcggaggggtcaccccaggggccctgagttgtggctgcctgaactgggtgcctcaggtctctgctctgactctgtctcctcacagtcaaagtgattctgctctgctgctgtttgtagccacctctgcccctctaacctctgcgcaggtgtgggctggagaaccagctcgtgggtttgttggaactggacataattaggctgggtgtggtggtgcacacctgtaatcccagcactttcagaggccgaggcaggagggtcacttgagctcaggactttgagaccagcatgggcaacacagcaagatcccgtctctactaaaaatttaaaacttagccagacatgttgacatgcacctggggtcccagctcctc

SEQ ID NO: 32997 - DNA, 1241 bp, Artificial sequence
  DNA replication origin
ggtggagcaggttgtacagcccagccctgcctgcttcctgccgcactaactgggggcctggatctaaggggtaaggagacccatcagtgctcctggggggagattggaggatcagggaagcctccagccgcccactcgcccgccttaccctcactgggcctccggacgagcgagtaggcgggactggccaccctggtgcagtcgtggttgatgaagcccacggtggacggcaggacatacaagcctggccccgagcctgcagcccaaagccctcaggtcacctcctgggcccagattccccgaagaaggagccctggacccagctcctgagccttagcctgggttcccctctccctccatggtgaggattgggggccccggggagcaagaggctgctgcccgtcggggacaaaatgtgatgcctgcattgtgagtcagacatgaatcacagaggaaaagctggggacagcagcccccctcaccctggggcacagacagggagactggggcctgagcctcccagagatacacggtcacaggtggggaaactgaggcctgagcctcccagagatacacggtcacagatggggagactgaggcccaggcagagatacacggtcacagatggggaaactgaggcccaggcagagatacacggtcacagatggggaaactgaggcctaggcagagatacatggtcacagatggggagactgaggcccaggcagagatacatggtcacagatggggaaactgaggcccaggcagagatacatggtcacagatggggaaactgaggcccaggcagagatacacggtcacagatggggagactgaggcccaggcagagatacacggtcacagatcgggaaactgaggcctgagcctcccagagatacacggtcacagatggggagactgaggcctgagcctcccagagatacacggtcacagatggggagactgaggcctaggcagagatacatggtcacagatggggagactgaggcctgagcctcccagagatacacggtcacagatggggaaactgaggcctaggcagagatacatggtcacagatggggagactgaggcccaggcagagatacatggtcacagatggggaaactgaggcccaggcagagatacacggtcacaggtggggaaactgaggcccaggcagagatacacgatcacagatggggagactgaggcctgagcctcccagagatacacggtca

SEQ ID NO: 32998 - DNA, 1062 bp, Artificial sequence
  DNA replication origin
gcagagatacacggtcacagatcgggaaactgaggcctgagcctcccagagatacacggtcacagatggggagactgaggcctgagcctcccagagatacacggtcacagatggggagactgaggcctaggcagagatacatggtcacagatggggagactgaggcctgagcctcccagagatacacggtcacagatggggaaactgaggcctaggcagagatacatggtcacagatggggagactgaggcccaggcagagatacatggtcacagatggggaaactgaggcccaggcagagatacacggtcacaggtggggaaactgaggcccaggcagagatacacgatcacagatggggagactgaggcctgagcctcccagagatacacggtcacagatggggaaactgagggccaggcagagaaacacggtcacagatggggagactgaggcccaggcagagatacacggtcacagatcgggaaactgaggcccaggcagagatacacagtcacagatggggagactgaggcctgagcctcccagagatacacggtcacagatggggagactgaggcccaggcagagatacatggtcacagatggggaaactgaggcccaggcagagatacacgatcacagatggggagactgaggcccaggcagagatacacgatcacagatggggagactgaggcctgagcctcccagagatacacggtcacagatggggaaactgagggccaggcagagatacacggtcacagatggggagactgaggcccaggcagagatacacggtcacagatggggaaactgaggcccaggcagagatacacggtcacagatggggaaactgaggcccaggcagagatacacggtcacagatggggaaactgaggcccaggcagagatacacgatcacagatggggagactgaggcctgagcctcccagagatacacggtcacagacgccatgtgttgtggcttctgcagaatctcgatgccacagggatcaggagagaccacagaaccagcccgaggacctggcttggggc

SEQ ID NO: 32999 - DNA, 1027 bp, Artificial sequence
  DNA replication origin
tggagtcgcagctgagggtccccatggtgggcaggcgatggcccccacagcacccacggggcctggtgctaccttctgagccgcagcagctctggcggccacaggcccaggcaccgtccccaccttcacggcctcaccacaccctcccacgaccacagccgcacagacggcctcttgtcccgcagcagggagtcgtggggccctggcccaaggcaggctggtcggccggacactggcctggaagtggggccgggatcgagtgtcggccaggcggctggatggtccaggaaagagtccggtgtcagcagagtgcgtctcccgggagccggcagagctgggcagctggggccagggccggccccagggaactagacctgcaaacatgacacccacagccttgcagcaggagggcctggcggggtcgtgggtggcgtggccccgtttctacacctggggaaactgaggcacagcccaaggtcatacagcaagtacacaactctgggagtttcagctctgagccaagaagcattcactgcctcatcctgtcactcattcctgccaaagcatgtactgggcacctactgtgtaccagcctctgttgggggtggtgagaactggacacgaacagacggaaaagaaggagatgttctcaggatgggagagagaaagtcgtcagtaaatgtgataagtgaacacagtctggtgtatgaggaggcactgaacgtgagggaaaacgcagacaggtttggggcccagggtagcagtgtgggtgtgggtgagccccacggagaaggtaaaactgaacagtcccaaagcaggtgaggaggcagccgtgcagaggccctggggcagcggcgaggacagcggggaggtgagagccgtcctcactgcctcccagatgcctccgagatttaaaccacaatggattttgatacattcaaggcgaccactgcgtgaggctccaagaagaggctcagaaaactgccagatgagatgcacgttcctgtctcttccttgtttgtttctg

SEQ ID NO: 33000 - DNA, 2428 bp, Artificial sequence
  DNA replication origin
tgtatttttagtagagacggggtttctccatgttggccaggctggtctcgatctcctgacctcgtgatccgcctgcctcggcctcccaaagtgctgggattacaggcgtgagccaccgtgcccggctaattttgtatttttagtagagacgggggtttctccatgttggccaggctggtctcgatctcctgaccttgtgatccgcctgcctcggcctcccaaagtgctgggatgacaggcgtgagccaccatgcccggccccttcttctctctttccttctctcttcttcttccccacgttgcccttcctttaaaatagttacttttaagtttttatttctatttaaaagtttcctttgtttcttgttatcattttctacgtttgtcccttcgttcagtcttataatgacggtctcaggcagtaactgtggcggtcagccacagggtggttggtggtgtgagcgtctgcgatgtgaactgggaggtcgggagcctcgcggagaaggtcacgctccagcagagaccagaggagaagccgaactcgggaggcgggcgaggcattccaggctgacaggaactgcacgcacagaggccctggggcaggacctgcctggtgtgtaggagaaacagcgacgaggcccgtgcagctggagcagcgtgagcaaggagaagaggagccgggaggaagccgatgcggcgggtcctgcacggcctgtggactgtggggacacgggtgacgtgtgagcagggacgcgtcccaatcagagctcacaagcgccctctggtgacatctgggagagcaaaacgtgggcggtgccgggagagggcgtcacatgctgggaaggatgatgaggatggatgacaggaaggatgataggggaggatgatgggaaggatgatggggaaggatgatggtaaggatgatggagaaggatgatggggaaggatgatggggaaggatgatggggaaggatgatggagaacgatgatggagaacgatgatggagaaggaatgtgggaaggtgatggggaaggatgatgggaaggatgatggggaaggatgatggtaaggatgatggagaaggatgatggagaaggatgatggagaacgatgatggagaacgatgatggagaaggaatgtgggaaggatgatgggaaggatgatggagaacgatgatggagaacgatgatggaaaacgatgatggagaatgatgatgcagaaggaatgtaggaaggatgatggggaaggatgatggaaaggatgatgggaaggatgatggagaacgatgatggaaaacgatgatggagaacgatgatggagaaggaatgtgggaaggatgatggggaaggatgatgggaaggatgatggagaaggaatgtgggaaggatgatggggaaggatgatggagaacgatgatggaaaacgatgacggagaatgatgatggagaaggaatgtgggaaggatgatggggaaggatgatggaaaggatgatgggaaggatgatggagaacgatgatggagaacgatgatggagaaggaatgtgggaaggatgatggggaaggatgatgggaaggatgatgggaaggatgatggagaaggaatgtgggaaggatgatggggaaggatgatgagaaggatgatggggaaggatgatgggaaggatgatgggaaggatgatgggaaaagatgatgggaaagtatgatgggaaggatgatgggaaggatgatggagaacgatgatggagaaggatgatggagaaggatgatgggaaggatgatggagaacgatgatggagaaggaatgtgggaaggatgatggggaaggatgatgggaaggatgatggagaaggatgatggggaaggatgatggggaaggatgatgggaaggatgatggggaaggatgatgggaaggatgatgggaaggatgatggggaaggatgatggggaaggatgatggaggatgatggagaaggatgatgggaaggatggtgggaaggatgatggagaaggatgatgggaaggacaatgggaggatgaccgagaaggatgattggaggatgatgggaaaggataatgggaaggatgatggcaaccaagaccaactcatcttcaccaagctcatggtgtagccagaaagttgatcacccacagcagcactgcccaccagaaacagactgagaacctcctactttttttttttttttttttttgagacaatatgttgctctatcacccaggctggagagtgcagtggtgcaatcatagctcactggagcctccaacttctgggctgaagtgatcttcccacttcagcctctggagtagctaggactataggcatgtgtcaccatccctggctaatttcttttttgtgtgtggagatgggatcttgctatgttgcccaggctggtctttaactcct

SEQ ID NO: 33001 - DNA, 1297 bp, Artificial sequence
  DNA replication origin
gaggaagagctgatggctctctgctgcagggtcttccgcaggccctgtggacatcccaggtggggtggtcccggccactgcagggtgcctagcggcatccctgcccccactcaccccatgccaggagctcccccagtcgtgacgaccacaggtgtccttggacactgcccagcgtcccctgggggcaatcacctgggttgggaacccctggtctgttgatttcagcccaccatgatctcatagctccgtgtcactggaacgagggtgagcctgcatgcctgggggagtggtgagggaactcaggcaggtggaggtctgtcggggaggagcctgtgctagacgcagtggcagccaggatgggcgtctgtagggcttcccatggtcatgtctgaagagctggctctggctgacatagagtggccttttggggctgggagaggcgtcccagggatccctgaggaggtgggggtgggtgttggggggggatggggccctggactgggccgtggctgtgaggtggagagcagcagtcagctgctgagtgggctttggatccaggaagcggccccaggggtttggatccaagtcagcatgggtctggaggtgccatttgctggagtgagggaaggctggaagaggatgtttgaatgataaggggccagatgcccttgtcttcagagtgaccctgtggagtcaggctgacatatgcccgtttttcagaggaggaaacacatgcacagtggtgcagtgattcatcagggaccacacagtgtctaatccagaaaccctggttcatgggcgcaggaggtctgcctgggaagttcactgcaggaaattgtaaaggaggtgaagtgggaatagcctcggtgcccgtcgaggggcggggctggggtgctcgtatgatggcggccagggtgggtgacattcagactggcaggtgtaggtgggcaggacagtgcagggccaagaacattctggacttgagtcctaggtccacactcctgctggctttgtgacctccgcctctgtccatggtgataggcatggaacagctcgtggggtggcgcctgtgagcacagagctggcagcagagccgttctgcatgagtaatctgctgtatgccaaggacgccctgccgatctcaccctgtatgcagtaggcgattaataagtgcccatccactaaggcagcatttccccatcttgacaccattgacatttgagggtcttctcttgggaggaacagcgttgtagttctccagtcactagatgtcatcagcactcctggtcctggcagc

SEQ ID NO: 33002 - DNA, 1086 bp, Artificial sequence
  DNA replication origin
agggggcgtccccgccgcgagtcttccagcgcgctggtcccgggaggcctggccgttcgcccaaggagcctggtgtccccgggcggagactgggaagccgggtcctgttccccggcgctgggctcgctgcgggggtcggggccgcagggcccggtcggggatccaggttccgggacgcggattctggagtaggggctgcggggcttccggcccgcttcgcgggtcagggtcaccgggaggccgtggttgcgttgggggtacccggacgtcagtcccagcagcgcgagggacgagggcgctcgttagttccacactgatttacttgttatttttttgagacggagtctcgctctgtcgcccaggctggagtgcagtggcgccatctcggctcaccgcaagctccgcctcccgggttcacgccattctcctgcctcagcctcccgagtagctgggactacaggcgcctgccaccacgcccggctaattgtttgtatttttagtagagacggggtttcaccgtgttagccaggatggtctcgatctcctgacctcgtgatctgcccgcctcagcctcccgaggagctgggattacaggcttcagccaccaagcccggccttttttttttgtatttttagtagagatagtgtagcaggaagagccgcagacaaaactcctcagacacccagttagagaaggaagcggtttattcggccggggccatcggcaagactcctgtcccaagagccgagctccccgagtgagcaattcctgtccctcttcagggctcacaactctcagggggtccgcgtgagagggtcgtgatcgattgaacaagcagggggtacgtgactgggggctgcatgcaccggcaatcagatcggaacagaacaggacaagggttttcacagtgcttttccatacaatgtctggaatctatagataacgtaacccagtaggtcaggggtcgctctttaactaccaggcccagggcacagcgccgggctgtctgcctgtggatttcatttctgccttttagtttttacttctttctttggaggcagaaattgggcataagacaatatgag

SEQ ID NO: 33003 - DNA, 1648 bp, Artificial sequence
  DNA replication origin
ccccgcagtgggaacgcgaggagaccgaccacggggcgagacagccgccagggcgtccgcgccgcccgccccaagcccgcatcagcccgccacgaactcggaggaccgcgggctagagcggccccgccagcgcgcaaagccttgtgggccacacgccccggcgccccgcgctccgcggcatggcgggagttgtggttcagctgcgggggccgcgcgggagctgccgggagctgtgggcggggtgggtgcgcgcgcagtggcagggccagtgagctgcacccgcggaaaaggagggggagcggctggtcagctgcgccctgcgggtcgagaatgtcatcagcagggatggcggcgctttgagtgctgagcgcggccccgaccgggaccccctacccttgacccaccctcgcaggccgagccccgactcccgacccgccgtcgcagcccgcggccccgacctctgacccgccctcgcagcccgcggccccgacctctgacccgccctcccagccagaccctctacgcccgacccgccctcgcagcccatggcccatcggcccggcagtggacgcagagcctcggccccgttccctccccggaccccccggacccgctctccgtcctccctgcagagccgagggccttggcccagccccgcatcctccccgaccgtgctcgatccagcccgggtgtgctgcacccgaaacaggctcccgggggccgtcgggcctgtgggtgaccgtgcaggccaggatctcccccttcccagtcgtgacaaccacagatggccccagatgccacgttagggttagtgcctcctgggggcgggattgcggccgggggagaaccaccctcccaacccgttaggaactgcagggacggagagcgcgctcgggatgtccagcactcagcgcgggttgggtggcgaatggagagcgagtcgtcctcagaggccgccggcctgcaggcgagaaccctcccagccaggaggctgcggctctgcctgaaccccgacccagggcgaacacccacatttggcccctgcccggtgctgagagaggccagagcggcgtccccagaagcggagcgggagccccacgtccggcggccacgatagaaagaagaaaagaaatgggtggtagtaagtaaaataaatcgtatgaaacataaaacaaggccgggcgcgttggctcacgcctgtaatcccagcactgtgggaggccgaggcaggtggatcacctgaggtcaggagtttgagaccagcctggccaacatggcaaaacctcgtctctactaaaaatacaaaaattagccgggcgtggtggcgcatgcctgtggtcccacctacttggaaggccgtcacagtagaatcacttgaacccgtgaggtggaggttgcagtgagccgagatagcaccactgtactccagcctgggcgacaagagtgaaactccagctaaaaaaaaaagaaagaaagaaacgtaaaacaaagatgtatctttatcttatttaatccactgtgtccaaaatactatcctttcgattcataagcaatacatgttgagatgctgtacactctttgttcacgctgagcgttcagagcccagtgtgtattttgcacatttgtgtccacttcctaattctcacag

SEQ ID NO: 33004 - DNA, 1122 bp, Artificial sequence
  DNA replication origin
cctagaggaggggctgggtgcaaaggagagaaactgaggcctagaggagggaaactgaggcccggggtggggaaacagtcccctcagaggtgagggcccaggtgtgtgagctcacagccctgtctccctgggtcccatccccctcctgcccaggctggtgccgggaaaggcctcaccggaaagcagactccgaggaggggccctccccaggccggaggtgcaggcccttcccgggaagctgggcccttaacccgggcggggggcagcaggcctggtgaatgggctgtttcccagcccccgaccctacttcctgcaggtggggagggaccactgggcgccaggagggctgaggccccttgcagggtgtgtcccagctctccagggccctgtcccccgcccgcccgctgggtcacgcgtggtgatcacgctgctcacagtccccgtgtgccgagccctcacatccacaggcttgtgggggcggggagacaacaaagctggggtccccctgaggacagggcaggtgggatggacacaggaaggaggagggagggttcccagaggcagagggacccgcaggtttcaacggccagaggtggggaaggcgggggtgagggagacacagagacagagagagagagacagagacacagagagacagagacagagtgaggaagagagacatagggagacagagacacagagagggagagacagatcaaggaagagagacaaggcagagagacacagggagatagagacacagagagacagagacagagcgaggaagagagaaggcagagagacacagggagacagagacagagacacagagaggcagaggcagagggatggagagaccgaggtgggccagcagcctgagggccggggaggaccctgagacccctgggtctgagtcctagtcccacaggaaggcctacaccgtatcttccgccggcaacggggacctcctttttgtccttgggagactcgaccccgcccccaacatcaatccccttcccggcattgtcctcggcggcctccgtcaggaagcccccttcccatggagggtcccagccaggaagccccccttcccatggagggtcccagccatcccaccagccc

SEQ ID NO: 33005 - DNA, 980 bp, Artificial sequence
  DNA replication origin
tcatcttccaaacgcactggaatccacccacctgttcctccaagccccgcacactggttctgtctccgctggtggcttgtttacccccctgcatcaccgggaccctcccagggcctctgggactctgcccgggctgctcctcaccttacccaggttctgcccaccccctcaccccctcgccccccaccctcctccgctgtggttcccagggtgctctgctcctagctcaatgagggcctgtggtggcagtcgtgatggctggctcccctccacccaggggccggtcctgtgaccctggaccccatgcaccgcaggcacgcgggaataaaatgatggagcattcctgctgacctcagggtctgtctgtgcctcagtttccctggccatggaataaaaagcagcagccagtccatggggttccaagcattgccaatcggcttacctgtcagaggagggaaactgaggcccaggggcagggctgggaccagaggagggaaactgaggcccaggggcggggctgggaccagaggaggaaaactgaggcccagaggaggggctgggatcagaggagggaaactgaggcccaggggcggggctgggaccagaggagggaaactgaggcccagaggaggggctgggatcagaggagggaaactgaggcccaggggtggggctgggaccagaggagggaaactgagatccagggcagggcctgggtgcaaaggagggaaactgaggcctaggggaggggctgggtgcagaggaggcaaaatgaggctcgggggaggggctgggtgctgaggagggaaactgaggcctagaggaggggctgggtgcaaaggagagaaactgaggcctagaggagggaaactgaggcccggggtggggaaacagtcccctcagaggtgagggcccaggtgtgtgagctcacagccctgtctccctgggtcccatccccctcctgcccaggctggtgccgg

SEQ ID NO: 33006 - DNA, 967 bp, Artificial sequence
  DNA replication origin
tcctctgatcccagcccctcctctgggcctcagtttccctcctctggtcccagccccgcccctgggcctcagtttccctcctctgatcccagcccctcctctgggcctcagttttcctcctctggtcccagccccgcccctgggcctcagtttccctcctctggtcccagccctgcccctgggcctcagtttccctcctctgacaggtaagccgattggcaatgcttggaaccccatggactggctgctgctttttattccatggccagggaaactgaggcacagacagaccctgaggtcagcaggaatgctccatcattttattcccgcgtgcctgcggtgcatggggtccagggtcacaggaccggcccctgggtggaggggagccagccatcacgactgccaccacaggccctcattgagctaggagcagagcaccctgggaaccacagcggaggagggtggggggcgagggggtgagggggtgggcagaacctgggtaaggtgaggagcagcccgggcagagtcccagaggccctgggagggtcccggtgatgcaggggggtaaacaagccaccagcggagacagaaccagtgtgcggggcttggaggaacaggtgggtggattccagtgcgtttggaagatgaggttcccaggactcgctgatggcagctgtgagtgggagtccagccagcatcccttccagatccctcttgtggaccgagatccaggtctcagtgtagaccaaggaacagaggcagcccctactcgggctcccaggctccagccaggcctgctaggtgggcggcctctgcccgtgtgatggaaggaagccaggctcagagatggggtgacttgtcccacgtcctggagggtctcacagctccaccacggccaggagacttcagtccagggggcctccatccccagcgaccttcacctgacccccaggggaccccagccaac

SEQ ID NO: 33007 - DNA, 1853 bp, Artificial sequence
  DNA replication origin
cggggcttggaggaacaggtgggtggattccagtgcgtttggaagatgaggttcccaggactcgctgatggcagctgtgagtgggagtccagccagcatcccttccagatccctcttgtggaccgagatccaggtctcagtgtagaccaaggaacagaggcagcccctactcgggctcccaggctccagccaggcctgctaggtgggcggcctctgcccgtgtgatggaaggaagccaggctcagagatggggtgacttgtcccacgtcctggagggtctcacagctccaccacggccaggagacttcagtccagggggcctccatccccagcgaccttcacctgacccccaggggaccccagccaacaagacccggcctgcagctccggaacgggggagggctgctctccaccgcccctgtgcggccgcccgggaaagtgcaggcgggccgggcgcggtggctcacgcctgtgatctcagcactttgggaggccgaggtgggcggatcacctgaggtcgggagttcgaggccagcctgcccaacatggagaaaccctgtctctactaaagatacaaaattagccaggcgtggtgacgcatgcctgtaatcccagctactggagtggctgaggcaggagaatcgcttgagcccgggagacagaggttgcggtgagctgagatcgcaccattgcactccagcctgggcaacaagagcgaaactcagaaaaaaaagaaaagaaagtgcaggggacccgccgtcggggtgggggcggcgctgcccagcctctgtcccacttccatgcacttgacctcgaccctccggcctccgtctgcgatcttcccgtgcctgaatatgaggcttggaacagacccagaccttcctgcctgcccgtcctgagtggccccgggaccccgccccatctttggcccccagcccctgcctctctgccgcctccagggtcgggggtcaggccaggaaagccccttgggaagcccccggggagcagctggagcggggtcgccgggcggcgggaaggagtgggcgcctctatttaagcggcttccccgcggcctcgggacagaggggactgagcatggatttcggactggccctcctgctggcggggcttctggggctcctcctcggtgagaaggggagggggcgcgggagagaggagtgagttaggagggggctcaggagagaggagggggctcaggagaggggagggggctcaggagagaggagagggcccgggagagaggagggggcccaggagaggggagggggctcagtagagtgggggggctcaggagagaggagggacgcaggagagaggaggggcgcaggagagaggagggggctcaggagagtggagggggctcaggagagaggaggggcgcaggagagaggagggggcgcgggagagaggagggggcgcggaggggagggggcgcaggagagaggagggggcgcaggagagtggagggggcgcgggagagaggagggggcgcgggagaggggagggggctcgggggagaggaaggggcgcggtgagcggggaggggacgcgggagagaggagggagttaggagggggctcaggagaggggagggggctcagtagagtgggggggctcaggagagaggagggacgcaggagagaggaggggcgcaggggagaggagggggcgcaggagagtggagggggctcaggagagagaaggggctcaggagagagaaggggcgcaggagagaggaggggcgcggaggggagggggcgcaggagagagcagggggcgcagtaaagtgaagaggactcaggagagaggagggggcgcgggagaggggaggg

SEQ ID NO: 33008 - DNA, 970 bp, Artificial sequence
  DNA replication origin
tgtgggcccccgggaggacttgggctttgaccccaaggcaagagccatggagcgctgtgggcaggggaggggtgggacctgtgctggggggcaggtgctcggcaaatacatgttgcgtcgatgaatgtcgctgtcgctgcgtgggggaatccagtcctcccagcgccccacagcacaggtgctgcccccccacccccccaccccgtcccgaagtgcttgtcaaggctggcgagcgggtgggtctccagggcacccagcggactcaccggggatggcctggcggtggctgagctccaagccaggcagcctcatcgtggcctggcagtagagggcgggcgggacaggggtccccaggggcggcagccgccagcgctctgtcaccctgaacagcacgtcctcgtccccctggggctcctcctcctcctcctgcacctccgggcccagggcttgcgccccctccagttcctggcccccgacgagcagggagaaggagagcgcgttggggtccacgggcgtgactttgtgggccgtacaggccacctccgggtcaccaggcaccagggctgctggggagacggtcagctggtccgggaaggctgtgatggagggtcgggggtgagggctgagcccagagtcagggctggacgtgatggaggggccggagcccggaggggcttggagctggggccaaggatgcgtgggggctgctgatgaacaggcagtagggacggcctgtgcgcaggccccgtggccccaccctgggaggctggaatagacaggaggatgggccagggccggccctgggagagttggggtgagttggagggaagcgaaggccggggacctggcttcggggagctgtgcatggagctgggaccctgcctgcaatctgggaggcttccaggaagaggtggcatagggaaggagccgggagtccaagggtcagagaggcagggcgcggggggacgcc

SEQ ID NO: 33009 - DNA, 1411 bp, Artificial sequence
  DNA replication origin
ggcattccaggtcccccactcactggcaacatcaccccagcagcctccttaatctccacgtgcctcagtttcctcaactgtcaaaggggtgagagtcacctctttgggctgccctgagagcgagtgggtcccgcgtttattatgatgggctgtggacgaggagagttgggaggaggctggcgtggagagagaaggtgcttgggggctttctgccctggccttctgctccatcccctgtgggactgatggggagactgaggcccgtgagggcccgtgttctgtaaaatatccctcaaatccagcctcctctctgcccaccccagccccacccccaccacaaagacctcccgggtctcccagcttctgctttatccccgggagccctttgcttgaaactcacgacctcacgtccattaacatgggtatcagggtgccccatgggaggacaaatccctttttctttagtgggagaagccggcaggggcttcgggattggacagagcgtgaagggagcaccgccagggcaccggcccacattaaatgtcttcatccgagcattcagcaagggtttattgagcacctgctatgccccaggccctgttctagcttctgtggacacagccgtgcgcgacacaagattcccacctggggagccacagtgggagaaggtcatggaaaagagaatgtacgggactgggggatgtcagatgttatccaaggtgtcaagaaacgaaacagaagggaaagggggctcacacgcgtgtgcgtgtttgtacacgcgtgtgcctgtgtgcctgtgtttgtacacgcgtgtgggtgtgtgcgtttgttcccgtgtgtgcttgtgtgcctgtttgtacacgcgtgtgcgtgtgtgcctgtgtgcacgcgtgtgtgtgtctgtgtttgtacatgtgtgtgcttgtgtgcctatgtttgtacacgttggggatcaggggttgaccctttaaacgggaatccagggaagcctcacggaggaggcaacattctacagagacctgagggggaggaggagagagccgtggaaagatccggaagaagggtattcccggcagagggcacagccgtgcaaaggccccggggcaggatcacgcctggtgtgttggaggaacagcgaggaggcgaggaggcccgtgtggctgcagcagaatgaggagggggagaaagggtggagggaggacaggaaggggacagggtaggtcgtgcaggttcctgtgggcccccgggaggacttgggctttgaccccaaggcaagagccatggagcgctgtgggcaggggaggggtgggacctgtgctggggggcaggtgctcggcaaatacatgttgcgtcgatgaatgtcgctgtcgctgcgtgggggaatccagtcctcccagcgccccacagcaca

SEQ ID NO: 33010 - DNA, 844 bp, Artificial sequence
  DNA replication origin
aaccaggagtccccgaaagcagtgagggaagatccacagaggtcgcctggggaaacacacccagaggcggcttatggaggagactgcttgtgttttgaggtggctgcgggctgcggagggttgggagggccgggagggcggccggaagcgaggtcaggcgatgaaggcctggaggtgccagcccgggggccctggagagccatggcagagtttacagctctggaggctgcggtgtcagaaagctccctctggcggtcagggggtaacagcgcgggatgctcgcccgtgtggccgccaataggggctcagcgcagctgcagcggagctggggagggggcttctcccacgaggtgagctacgcactcagacgttgactgagttaggcggaaggccaggctgagctcgacccccagcaccaaggctcagagatgaacatgagaaaagggtctgggggccgggcgcggggctgggtccagcagtcctgggcaggtccagccccgcgcatgctccgtcaggcttctctgctaaccagggagactggttgctaggagaccatgctaatgaaggactcgctcactacccaaatggcaagcaatccggctttgtgccagaaacgaagcacttccgaggcagccattttggagtctggcaaaattcaggaccgaggccaaagccaggagagccaatcaatatacacaaagagggaggagaagagagagtgccaataaggacacaaggaaagtggtagcgtacccttgtcacttcccaaagtctcccagcgggataccggtgccctctgcccttaatcaagatggccgccttgggggggctctagcgcacagtg

SEQ ID NO: 33011 - DNA, 2533 bp, Artificial sequence
  DNA replication origin
tgcttccggtcccgctgccctcagcgaagatggcggcagtggagaagcggcggcaagcggtaccaccgccggccggtttcacggacagcggccgccagtcggtatcccgggcggcgggggcggccgagagcgaggaggacttcctgcggcaggtcggcgtgacggaaatgctacgtgcggccctgctgaaggtgctggaggcgcggcccgaggagccgatcgccttcctggctcactacttcgagaacatgggcctgcgctcgcctgtaaacggcggcgccggggagcccccgggccagctcctgctgcagcagcagcgcctgggccgcgcgctatggcaccttcgcctggcccaccactcccagaggtgcgcagtgggccggcttgggcgggtggggcagcgatggacttcaactcccagcatgccgcgcgcggctccctacccgcagcgccggcgcaggggcccggggcttgctgggagttgtagtgcgcgatgccttcttgggtgggatggatcggacaaggtgggctggagggtccgggcttcggtccggcgctaggcagcgcgctgcatgcggcgcgagtccttctggccggcttcgccttctgtgatgcctttttgcaggtgctgagtttccccttgcagttcatgattttcaaaatcgtgcagctcaagaggacttggcccgaggtcgcagagccagcccccgagccaggtcctcctagtcgcctccttagcagcctcatgttatccccgtccattcagccagaacgtgaatatttacagagagcagcgcagtcacccagggcccccatcttaggggacaggctcccagcgggcaggtggggattcctggaagagcctggcgatgtgcgggcgggttgcagggaagaggcccagcaggtgcaaatttagaccccgagtgtggggcacacgggaggcgggaaagccacggaatttggctgaagcatgcgaggctgcaggtgcctacgcgcggtgtcccctggctggggccagttctgagcccagggaaggtggttggggactatctgttggcgttggggatggatgggctgatgtcttttgttggggggggggtccccagaagcggagcctgaggtaggcattgtgtgtgcaggtgattttacaagggggtgcgcccaagagaacccaggaagggggtgggaagagcaggcagggaaggatgccaagcaaaggtgccctttcagcctcataaccagggcataagcgcccaccatggcagccctcgccagagtcccagagaagttcggggggagaagagagatggggagtgtcccccctaccacgttcagggtgcacaggtgtccaagatcatactcagataagggtggcagggtgttgggtacctggacaaggagcagacttgctccggtggcccagtggctctgaaggccccgcccgatgatttgctggagccaggtgggaggggagcgggcaagggcaggcccagagggtcagtggagccgtttactgcgatggaaggcccctggtttgaagaagctgccagagccacttgcggattaagttggaggctgggaggagcctggagacaggaaggtagaaagaagcgtctgcaactgacgtggggccaggacagaagactgaactggaggggtcctgaagtcttcaggagagatgagaagagctcaggaccccactctgagggcacctagcccagagagcccaccagagagggtgagaacgtgagaccagaggtgaacggggagcaggaggaagatggcctcccaggacatccggaagagaatctcccaaggaggaaaaggggtcaacagcaggcccaccacgtatggttgttcaggttgagcactgcacaagccactcaccccgtagacactgcagatgaggatatttatatttatattaatttccgagggctgctggaacaaattacctccaacttagtggcttaaaacaacagaaatttattctctcacagttctggagggcagaagtctgaaatcggagtgtcaggaggaccacactccctctggaggctccagggaaggagccttccttgcctccccagcctccagtggcggccagcagtctttggcttgtggccacattgctgcagtctctgcctccgtcgtcacgtggcctcctgtgtgtctctgttctgtgttccctcataaggacaccactaggccccaccctactccagtgtgacctcaaccgcctacatctgcaaagctgctgtctcaaataagctctcagtctgaggttctggatgggcgtgagtttggtgggcaccagtcaccccaggacaggagtggagccattggctggaagagttctcatagcagggactcagggcaagggtggtgctggtggcagatgcatcccggccctgggctcgcctgggctccccagagacacagccagtggggaatgcagaagacaggtgcacagacctgcgtggcatctgattctgtgctcatggagccaggcctgctcccgtcctcccagcag

SEQ ID NO: 33012 - DNA, 1510 bp, Artificial sequence
  DNA replication origin
cagacaagcccttggtggggggtgggtgggggtgccgtggctcctgcctgtgagcccagcactttgggaggccgaggcaggaggattgcttgagtccaggagttcgaaaccagcctgggcaacatagtgagatcctgtctctacaaaaatttaaaaatcagccaggtgtggtgacgtgcgtctgtggtcccgggtacttgggaggctgaggtgggaggatcccttgagcccaggcggtcgaggctgcagtgagctgggattgcaccactgcactgcaggctgcgtgacagcaagaccctggctcaaaaagaaaactgggccaggcacagtggcttatgcctgtaatcccagcactttgggaggccgaggcgggtggatcacttgaggtcaggagttcaagaccagcctggccaacatggtgaaaccccgtctctactaaaaatacaaaaattagccgggtgtggtgggggcgcctgtagtcccagctactcgggaggctgaggcaggagaatggcgtcaacccaggaggcggaacttgtagtgagccgagatcgcgccactgcactccagcctgggtgacagaaccagactccatctcaaaaaaaacaacaaaaaaacaactggacgtcccctgcagagtaagcgagaagagttttgcttgtgttgaagccactgaggtttggggttgttggttcctgtcgtgctcgcagcttctgactgacaggtctgtgggccgggattacccagcgccatccaccaccacttctgcataaatgctctcctctctgggggcggcagccctggtccagctccgcaagcatccacgcggcccctcggtgtgcagggctctgtgcctggcccaggcctgcctcgggtgttcgtctgcccctcccagctgtgtgcactctccttttctgcacctggccttgtgcatctacggagtgggggttcttgtgaggacgggagaacggggctggagccaggtgctcaggacagcagctggcatacgtgtgggaggccccacctgcttattttgggctgtaattagggctgcagctcagccacagctgccttgaggggcaggaagacacacaaagaggtaattacagcctggtgagatcacagccatgatgacggcaggagacaggaaggtgacagcccacttcaaggcggccgcatacccgcccctcctgggctcccgggcggctcccagcagaatcatcgggtgagggaggaggaggaagaggaaggcagcaagctctgggctcggaggaggaggccggggctggaacgtcagctctgcctgtgacggtggcctctgggccttggtttccctgattgcaaaatggaaagcgggagcccagccagggctccgtctgtgtcggctcctacacagagcggtttgtaaggcgtgtgagcatttgttaatacaggaaagattctatttatggaacgtctccagaaagagacaggagccaccctacaccttagacttctgcttcccactcct

SEQ ID NO: 33013 - DNA, 1054 bp, Artificial sequence
  DNA replication origin
gtcagcgcggcggcccgagctcccatcacgcctgacctctccgcatgacccagcaggagccgcaccggggcccctctcatcaggatctgctgtgaggccgggcaggctgctgccgcctcacagatcacaccccaaacctagaggcccaaaaccaacaagcatttactattgacacagcgtctcggcggcggctttgctgcgaggctctggcttggggtctcttaggaggttgccgtggccacactcccccggggctcgacgcgaggcggcccagtcccccgcaggggaacccgcgcggctcttggcagcggctgcaggtgctccctgggagctgcgcgagcgaccccaccgcatggcggctgcccagccgagccagcaacccacccaggagggagggggacaccacgatgtccttcgtgacccgcctcggaggccacactctgtccgttgcttctgcagtcccgttccggctgtgcagggggaagggacggcaccaggccgtgaaccccgggagccgaggcttgcaggggcatctcgaaggctggcgacggcagcgctgctccgcggatccctccgccacttctccacccgccacttctccaccccgccgagggtgagcctctgggccttgctttgccccctgaaacgtgcgagggggcgtggcccactttcagcgggaatgttaagagccatcgtgctacttctcagtccacttctctgtggtcatgattgcaggtgcgtgtcaagatcagacaagcccttggtggggggtgggtgggggtgccgtggctcctgcctgtgagcccagcactttgggaggccgaggcaggaggattgcttgagtccaggagttcgaaaccagcctgggcaacatagtgagatcctgtctctacaaaaatttaaaaatcagccaggtgtggtgacgtgcgtctgtggtcccgggtacttgggaggctgaggtgggaggatcccttgagcccaggcggtcgaggctgcagtgagctgggattgcaccactgcactgcaggctgcgtgacagcaagaccctggctca

SEQ ID NO: 33014 - DNA, 1942 bp, Artificial sequence
  DNA replication origin
cactatctggccccttacagaagaaggctgtcagccctgctgccggctctggggtgggttcgattccctgccccagtgaggagcctgaggccttactacgtgccactcgtgtgctggtagtgtgacacacactcccgtggagggcaccagggagtggccagggagcaccgtggccagcgtgggggccgctgcaggaccctgggtgggctgcttaaccccctggcctcactccccccatcagttcccggccaggcctcatgctagtggcctgttacttcctctgggacatatagggaaactgaggctcagggcagccccatggtctggccaagggtcccagagaggaagtggccaacctcagggcttacgcttttcccttctgggagctcagcttcatggtgaggagggcagccttccctccggcatgacctgggcacacgacttcacctttctgtgggccacctgtggtaggtgccggggaagtgctaagccagcatgcagtaggtgctcagtaaatgcagggttggtgtgcagcaggtgctcagtaatgcagggctggtacacagtaggtgctcagtgatgctgggccagaatgcaataggtgctcagtaaatgtggggctggtgtgcaataggtactcagtaatgctggggcggtgtgcagtgggtgctcagtaaatgctgggccagtaagcaataggtgcttagtaaacgtggggtcggtgtgcagtgggtgctcagtaatacagggccggtgtagagtaggtgctcagtgaatgcagggccagtacacggtaggtactcagtaatgctggggcggtgtgcagtgggagtgaagtaaatgctgggccagcatgcaataggtgctcagtaaatgtagggtcagtgtgcagtgggtgctcagtaatacagggctggtgtacagtaggtgcttagtgaatgcagggctggtacatagtaggtgctcagcaaatgtggggccagtgtgcagtgggtgctcagtaatgctgggtctgtgtacagtgggtgctcagtaaatgctgggccagcatgcaataggtgctcagtaaatgtggggccggggcaggttggtgtgcagcaggtgctcagtaatgcaggactagtgcacagtaggtgctcagtaatgctggggttgtgtgcagtgggtgctcactaaatgctgggccaggatgcaataggtgctcagtaaatgtggggccagtgtgcagtaggtgctcagtaaatgtggggctggtgtgcagtaggtactcagtaatgctgggctggtgtgcagtaggtactcagtaatgctgggctggtgtgcagtaggtactcagtaatgctgggctggtgtgcagtaggtactcagtaatgcagggccagtatgcagtaggtgctcagtaatgctgggctggtgtgcagtaggtgttcagtaatgcagggccggcatgcagtaggtgctcagtaaatgctgggcgggtgcacagtaggtgctcagtaatgctgggccggtgcacggtgggtgcctggtgaacacgtgcctccctggtcatcactgctgctcagttcagggcttagggatggacgtgccatctcagcgagctcgagggtcaaagctctgctatggaggaggaaactgaggcccagaggcaggagggcagcgacctgcaattcaactctaggcccatctggctgtacgctccttttccctcccaagtagtaaaggccccatttgttggcccttataatccgctgggcgcttttaccatccatgaggtcatccccaaaatgcgctgggggcagtcgcagtgtcagcgcggcggcccgagctcccatcacgcctgacctctccgcatgacccagcaggagccgcaccggggcccctctcatcaggatctgctgtgaggccgggcaggctgctgccgcctcacagatcacacccc

SEQ ID NO: 33015 - DNA, 1660 bp, Artificial sequence
  DNA replication origin
gaagaaaacaggaggaaaggagttaggggtcaggggaggcgacatttgaggagagacctggaggagaccagggaggaggtgagggagatctgggggaaggcagtgtcacggcccttgcagaggccctgaggccggtccagttggagctgggaagccagggctggatgggagctgcggggaggagaggcctgagctgggtggaggctgggaggggggaggccaggctgggtgggggctgggaggggggaggccaggctgggtgggggctggccaggctgggtgggggctgggaggatggaggccaggatgggtgggggctggaaggggggaggcccaggctggggggtgctgggaggacggaggccaggctgggtgggggctgggaggggggaggccaggatgggtgggggctgggaggagggaggccaggctgggtgggggctagaaggggggagacccaggctggggggtgctgggaggacggaggccaggctgggtgggggctgggaggggggaggccaggctggggggtgctgggaggaggaggccgaggctgggtaggggctgggacgggggaggccaggctgggtggaggcggggatgagggagacccaggttgggaggaggaggccgaggctgggggtgctggtggggaggggaggcccgggctgggcggtgctgggaggagggaggccaggctgggtgggggctgggaggaggaggcccaggctgggtagaggctgggaggagggagatccaggttgggaggaggcccaggctgggtagaggctgggaggagggagatccaggttgggaggaggccgaggctgggggtgctggtggggaggggaggcccaggctgagggggtgctgggaggaggaaggcctggctgggtgggtgctgggaggagggagccccgggctggggggtgctgggaggaaggaggccaggctgggtgggagctgggaggagggaggcccaggctgggagtgctggtggggtggggaggggaggcccaggttgagtaggggctgggaagagggaggccccggctgggtaggggctgggaggagggaggccaggctgggtgggagctgggaggaggggaggtccaggctgggtaggggctgggaggagggaggcccaggctgggagtgctggtggggtggggaggggaggcccaggttgagtaggggctgggaagagggaggcccgggctgggtaggggctgggaggagggaggcctgggcttgggatactggggggaggagaggccagggctgggagggggctgagaggaggaggcctgggctggagatgctgggggaggagaggcccaggctggggatgcttgggggagggaggcctgggctgggaggggactgggaggagggaggcctgggctggggatgctggggggaggagaggcccgggctggggatgcttgggggaggagaggcccgggctggggatgctgcggggaggagaggccctagctgggagaagggaggcgggggctcaagagaggagcttcagggatagagggtgaggaggaggggaggccggggatggggggtaggaggagaggggaggccagggctggctggggggtcggggaggctagggcataggcctggcgaggaggggaggctggggctg

SEQ ID NO: 33016 - DNA, 2111 bp, Artificial sequence
  DNA replication origin
ggctgaggcccgtgggccgcgcggatccgggatctgcgctggggggtccccgcgtgcggggcgcgcggagccttcccttcgccctggtgaggccctgccataaccaggcgcccagccctgcggaggaggccggggctcccaggaagcggacgcccggtccccacacagcgccgcggccgcccctccacccccgcgggagcccctgccccacgctaataaaatgtgttgcgaggctgacgctggtgtgtatgcgagcgcccgcctcccagccccggtgcccgcagaagacgcttttccccagcaggtcacccacggccccggaaccgcggcgactggaggctggattcgaggccggaaacgccgggacccctggacccggcctggtgggagcagcggagggggacgccccacggggccctgcggagcctgaagccggagagcaggcggctcttctggaacgcagggcccgggccctccagccccgcccggcccaggtatcctccctgagcctcagtctccccagatgtcaaatgaagaggccagctgggcagatggtagtgacattggtgagacaacagccctaacacttcccaggaactgaagtgcctcatgtgattgattcccaggcccaggcagcggaggttacaccctcagcaagggctcagctgggatctgcgcccggcctgctccagaacgcagcccactcgccaccggtggggagggtcgtccggtatcccccagtgcccaccaccaccaaccagaatcacttctcagactgcaagagcgaatccagccgggcgtggtggctcacacctgtaaccccagcactttgggaggctaaggcggcggatcacttgaggtcaggagttcaagatcagcctgaccaacatggtgaaaccctgtctctactaaaaatacgaaaaaaaaaaaaagctgggctgtggtggcaggcgcctgtaatcccagctactcaggaggctgaggcaggagaataacttgaacccaggaggcagaagtggcagtgagccgagattgagccactgcactccaatctgtgcgacagagtgagaccctgtctcaaaaacaaaacaacaacaacaaaaaaaaaacaggccagacgcagtggcccacgcctgtcatcccagcactttgggaggcagaggcaggtggataacgaggtcaggagatggagaccatcctggctaacatggtgaaaccttgtctctactaaaaatacaaaaaatgagccgggcgtggtggcgggcacctgtagtcccagctactctggaggctgaggcaggagaatggcgtgcaccgaggaggcggagcttgcagtgagccgagatcgcgccactgcactccagcctgggtgacagagcgagactccgtctcaaaaaaataaaaaaataaaaagtgaatccagaactccagctccagttgctggcaggtgacttcactcccttggcctcagtgtctcctgttaaatgggagtccccacagcctgttctggtggagggggtccaatcggacatagagaacactcaagccttgtttctcccctgctgtcaccgccacatcacagtcatccacacagaaaagacttctgtgaccacatgtgggagcgttttttcccacacaccaaccagcagacgccagccgggtgtcctcttaattcagctctgacgccttctacccagagatagtgtcagatcccacaggccgagggctcagtccccgagcctctccctcttcagacaccagttgcgaatctgggcttccaggacttcggtctggccgggttcaagttggggttcccagcacccctttgggttcaattaatttgctggagcagctcactgaactcggaaacacttgtgtttcctggtttactataaaggatgtggcaaagatagcagaagaagggaccacaggtgaggtacgtgtagggtggggattggagtgccatgaggatgcacagggcaccatctcagagcttccaggcatctccacatgttcagctcttggaagctccccagaacccagttctctagggtttcgtggttttttgtttgtttgttcatttttgagacggagtcttgctctgccaccca

SEQ ID NO: 33017 - DNA, 1159 bp, Artificial sequence
  DNA replication origin
aatgccgctgagcccccggcccgtgctcaccggaaatgccgctgagcccccggcccgtgctcaccggaaatgccgctgagcccccggcccgtgctcaccggaaatgctgcggagcccccggcccgtgctcactggaaatgctgagcccccggcccgtgctcaccggaaatgctgctgagcccccggcccgtgctcaccggaaatgctgctgagcccccggcccgtgctcaccggaaatgctgagcccccggcccgtgctcaccggaaatgctgctgagcccccggcccgtgctcaccggaaatgctgcggagcacccggcccgtgctcactggaaatgccgagcccccggcccgtgctcactgaaatgctgagcccccggcccgtgctcaccggaattgctgctgagccctcggcccgtgctcaccggaaatgctgagcccccggcccgtgctcaccggaaatgctgctgagcccccggcccgtgctcactgaaatgctctggcgtatgacctgtaaggctcacacctgtaaggggcgtttgtggtagcctaacagcacctgtggatggagtgggcacctttcattaatctttgttactcattgctgcgtaatgaatcaccccaaatttggtagcctagaaccacaactgtcatttattcagctcctgagtctgcacagcaggagctgccgtcagcgcaggcatcgcagctggtgcccagtccagagggtgagcgtcccgcaggggccctgccttggaaggagctccagtcccgcagggggatgcggattctacctctccatctgcctctgcggcggggagtggaaccattattgtggctttttttgggaaacaggcgatttgccaggattcattcctgtattgattcattggttcattgatcacctatcctaagcccagctcagtgctgggaaactgggagacaggagtggtctctgccatcgtggaacttgtaaaaatttaaaaattctgttcccggccagacacggtggctcatgcctgtaatctcagcactttgggaggctaaggtgtgtggattacaaggtcaggagttcaagaccagcctgaccaacatggtgaaaccccatctctactaaaaatacaaaaattagccaggcacggtggcacgtgcctgtgat

SEQ ID NO: 33018 - DNA, 2245 bp, Artificial sequence
  DNA replication origin
gagactggaagaggttgcgctcttggaggtgaagggggaggaagggcctggagctgagggatgcgggcgcctctggactctgggaaaggaggaaacaggttctccctggagcccccaggagggaccagccctgttcatgcctcgattttagaagttctgccttccagagctgtgagatggtacgtccacgctaagtcactaaatttgttactacagctacagggattaacacacctcaatgacttccagcttcttcctaggggaaaattgcttccttctttccctcccttcctctccccctctcttcccttcccctcccttcccctcccctcctcctcccctcccctctgctcccttcccctccccctcccctctcttcccatccccctcccctctcttcctatccccctcccctcctttcccctcctttcccctcctttcccctcccctcccctccactccccttcccttccattcccttccccttcccttcccttgccctccttccctctctccttctcttccttctcttctatgtgtaaatctaggttctggggattgagcagtgaacaaaagcagtaaacttcttgcccttgggttcacagggagagaggccacaaaccagcatataaatacataaataagcagtttctaaagaatgccaggggttagagagccaccgggatggtgtaggaaggcatcttggactcaggaggtgacatataagcagagacccaggtggcgtggggaagcagcaggcaggtctgcgggaacagtgctgcagggagagggaacagcacgtccaggggccctgaggtggggacagcccgactggctagaggcccagggtctgggtggtgagtgcgggacagaggtgagaagacgctggggagcctcccgctcagctgtcctgagtgccggctttattcgcagacatggcggaggtgagggctgcaaagtctagcccatgcacccaacccagccgcccagcactgcgctcccggaaacagctcccggctgcatctcactggccagctgggtttctctgaacccatcgctgaggctgggggagggatgctttgactggctggtggggactgggagtccatttgggcgagggtgttggctggaccagccgggggcggtgaagggctgggggtccaggtgggagagggtgttggctggaccagccgggggcgcggtgaagggctgggggtccaggtgggagagggtgttggctggaccagccgggggcggtgaagggctgggggtccaggtgggagagggtgttggctggaccagccgggggcggtgaagggctgggggtccaggtgggagagggtgttggctggaccagccgggggcggtgaagggctgggggtccaggtgggcgagggtgttggctggaccagccgggggcggtgaagggctgggggtccaggtgggagagggtgttggctggaccagccgggggcgtggtgaagggctgggggtccaggtgggcgagggtgttggctggaccagccgggggcggtgaagggctgggggtccaggtgggcgagggtgttggctggaccagccgggggcagtgaagggagggcaggcagggtgcctcaggatgaggtgtggtgagggccgctgtggagcccgggaaggcgtctggccgtggtctcagtgctcagtggatcgggtgagaggcttccacagagaccagaaactctggaggagcccggggtccagggagccggccggaagctccgtcttggatgtgtcaggcttgggatgtccccagggagccagcagaggactgttgggaggaggggaggccctggatgaagccaccagaggagctggggagagagaggaagcttccaagggggactgtggggtggggcaggagcctgtgggtgctgccagaggggattgccgcgctctatgctgctgtgaggccagggaggacgcgtcagcttccgggctgcgctggtaagggtcatgccgggattaggacagacggggtcctcgggacctgagggcgggcacagtgggcggcacagggtcagggatcaggggaggccccggggagctgggcggggcaggggaggtgggcttcggtcggccttggcctcaagggaccggggcggagtgtgaggtgcaccctgggaccagctttggtgtcctctgattggtcactcctggaagcctccgtgccctgcgtccctgtccgggtgtccaggatttaagccca

SEQ ID NO: 33019 - DNA, 1066 bp, Artificial sequence
  DNA replication origin
tgttcccgcagacctgcctgctgcttccccacgccacctgggtctctgcttatatgtcacctcctgagtccaagatgccttcctacaccatcccggtggctctctaacccctggcattctttagaaactgcttatttatgtatttatatgctggtttgtggcctctctccctgtgaacccaagggcaagaagtttactgcttttgttcactgctcaatccccagaacctagatttacacatagaagagaaggaagagaaggagagagggaaggagggcaagggaagggaaggggaagggaatggaagggaaggggagtggaggggaggggaggggaaaggaggggaaaggaggggaaaggaggggagggggataggaagagaggggagggggatgggaagagaggggagggggaggggaagggagcagaggggaggggaggaggaggggaggggaagggaggggaagggaagagagggggagaggaagggagggaaagaaggaagcaattttcccctaggaagaagctggaagtcattgaggtgtgttaatccctgtagctgtagtaacaaatttagtgacttagcgtggacgtaccatctcacagctctggaaggcagaacttctaaaatcgaggcatgaacagggctggtccctcctgggggctccagggagaacctgtttcctcctttcccagagtccagaggcgcccgcatccctcagctccaggcccttcctcccccttcacctccaagagcgcaacctcttccagtctctgactctcggcgcccgccccccaccgccctcttaaacggaccctgtgaggacatgggcccccatcaccccggatgctctgccgtctcagggttcttatcacacctgtagagtcccttttgccacctgaggtggtacagccacagattctggggatcaggatgtggatgtcttgggggccttattccctcttccacggtgaggaactggcccgggactgcacagaggaaagctgacctggaagcctgttctgatgcatctggaagcacacgggccccacagccttttgcgtt

SEQ ID NO: 33020 - DNA, 1529 bp, Artificial sequence
  DNA replication origin
aggggcctgagggaggaggcccagaggcccttacgggtgaggacgcctcggcctcggccctggacagctctggaagtgaccgctcggcccagagctctttcttggatccctccctccctctccactcctgatgctgttttcctttccccagacaggtttgcctgctggtcctcttccggggaccagactcatgaagccggggccaggtgttggggcacctgcgggacagagtggccctggtcccagactggtttttgtttttggttttttttttttttgagacggagtctctgtcgcccaggctggagcgcagtggcgctatctagactcactgcaagctccgcctcccgggctcacgccattctcctgcctcagcctcccgagtagctgggactacgggcgcccgccaccacgcccagataattttttgtatttttagtagagacggggtttcaccatattagccacaatggtctcgatctcctgacattgtgatccgcccgcctcggccccccaaagtgttgggatcacaggcgtgagccaccgtgcccggcctgtatgttgatgcagctgtgtgtacccagggcatagcaacaatgccactggcacagtccgagggcagggccacccgtcacgggcacgactcaggggaggctgggctgccccgtcctcaccacggccagttctcccgaccaagcttcacagcaaggagcatgtgggtgtctgggcagccactgagccaggtcagaagtcaggtggggtcacagtgatgcccggaatcagctggggtcaagactcaggtgggctgggcgcggtggctcatgcctataatcccagcatttgggaggccgacgcagacggatccctttattagtccaaactgcatcctccccttcctttcaaaacctaacaacacacttgaggtcaggggttcgagaccagcctggccaacatggtgaaaccccatctctacttaaaatacaaaattagccggacgtggtggcgggcacctgtaatctcagctactcgggaggctgaggcggacactagcttgaacccgggaggcggaggttgcagtgagattgtgccactgcactccagcctgggccacagaacgagactctgtctcatttaaaaaaaaaaaaaaaaaaaagactcgggtaggacaaaggtcaggctgggaggagggcacagccaggctcgggctcagcttggggtgggggctccgtggggctggcgcctctcccgggtcaggtgctgagccgatgctggccggcgtaggcctctttcccagtttctctggggggcaggagcaccttgccaacctctgatggctccagcgcctgcactcgcctcacaccacatggtgacttcaacggggaccagggaagccctcgcccctcccacccctcagagccctccccgacctcgcccacttctcagagctcccgctgtcgggggaaccgaggcagcgccgcgcctggaagccaggtctgcggatcccgcctcgctcccgccccttcctccct

SEQ ID NO: 33021 - DNA, 986 bp, Artificial sequence
  DNA replication origin
cctgcccgcctccttgcgcacagcgtccgcggtgctggtcgagcagggggcgacggcggcggcctcggggatcggaagagcccggggctgcgcgctcgaaccctccctcccggcggaggcgctcggcgccgtaggcgggaccggggccgggactccacctcccggcgtcccctgcggccgggcgcgcaggcgcaagtcggacctggccgcggagcgcaggcgcagtcggggccaggcggtgcgcgcaggcgcagcggggggcggggcgcgcgggcccggccaaggcaagcgccggtggggcggcggcgccagagctgctggagcgctcggggtccccgggcggcggcggcggcgcagaggaggaggcaggcggcggccccggtggctcccccccggacggtgcgcggcccggcccgtctcgcgaactcgcggtggtcgcgcggccccgcgctgctccgaccccgggcccctccgccgccgccatggctcggccgctagtgcccagctcgcagaaggcgctgctgctggagctcaaggggctgcaggaagagccggtcgagggattccgcgtgacactggtggacgagggcgatctatacaactgggaggtggccatcttcgggccccccaacacctactacgagggcggctacttcaaggtgagcgcggcgacccccgcccgggtcccggagcccacgagcgacctcgggcgccgggaaccagctccctgccccgcggtcctagcgctgttgctgggcgggccccgaagcctcctggcttgggctcgtttcccttctatggccacgttcccccacccagctctgcccggccccctcctcggaccgtctcggggaccttcagcctctgctgcagtcctcgaaaatccccagttcccttcaaggcatcgtccggtcccctgttaggctcttggcccccggaggggtggccgggggccctccctgtagcatctgggcgtggggctcttg

SEQ ID NO: 33022 - DNA, 2067 bp, Artificial sequence
  DNA replication origin
caccagcagacagaatggactggcaggggctccaggctccccttggatggagctgaagcccaggaccagggctgcacctccagggccttggcagccagggtgtggggagggttagcacagatgattgctcagttagcaaacacttgtgacacctgccctggcccaggccgtgggaggggatgagtcagtatggccgtctgccctcaggtgtccggtcttggggggtcaggcaggcagacccataggtcacagaaacctggcaggactccttccctgtcagcatcgccccctgtggtcacccaggccctggaggtccagatctgctggcaaggacggccacagagggaggcctgaagccacgtgccaggtgacagagctgtctggcctgcagcctggggcgtgatgccacccacggccctcctgggccacagcaggtaaacaaggaagcctcactgttttcctgctgggccccagtgccagacacagaggttgtctgggtcaggggtcctggtggcactcagcactccaaggcacgagagcagcacccccagagcgatcgtggtggaagcctggacagggagggcactcagggggtcttggatcgtgggcgaggtctggacagggagggcactcagggggtcttggatcgtgggcgaggtctggacagggagggcactcgggggtcttggatcatgggcgaggtctggacagggagggcactcgggggtcttggatcgtgggcgaggtctggacagggagggcactcgggggtcttggatcgtgggcgaggtctggacagggagggcactcgggggtcttggatcgtgggcgaggtctggacagggagggcactcgggggtcttggatcgtgggcgaggtctggacagggcgggcactcgggggtcttggatcgtgggcgaggccttgacagggagggtactcgggggtcttggattgtgggcgaggtctggacagggagggcactcagggggtcttggatcgtgggtgaggtctggacagggagggcactcagggggtcttggatcgtgggcgaggtctggacagggagggtactcgggggtcttggattgtgggcgaggcccctcccggacaggcagggcactttgggggtcttggatcgtggacgggcccctcctggacagggagggcacgcggggtgtcttggggggtgtcctctgtttgacagggaactcactggtgccccgtaaggcaagtgacttggccgcggccacagagcaaggctggaacttcagtctcagaactgtcctgcggttccccaagacttcaggccccccaagcctggtgctgggtttcaggcggcaatccttgacaacagccaaggcctcatctgtaccaaaccccaccaagtcccaatgagcctcttattttgggcacctctaagaatgtcttttccccggagcaaacccaggctcagaaaaggaaagcgccctgccaagggcagacagcaagtcggctgtggagggctctctctggcggcccctgccccagggctcactttggctcctgaaggaacagcagctgcaggcagtggctgggcagcagcggccctgggcactcagcaggttctgtatttccacgctcccccaactccctcccaggcacagcgggaagggagagtcctcgtgggtggcagcacccccgtctcaacactggcttctgaggactgaccctgtggcagatgtctagaggccccctccctgggaaatccggaaaaccggattatcccctaatgctggcccaggaagctctgcccacaatccctggcaaccggtctggtgggcacagcagccagaaacccccatcccctccttccagaacagcagccgcctcacaggcctggcttcgaggtggggctgcggctcctcagccagctgctcccccaagcagacagaaggggctggcggaggagctgctaaaaccatttggcaacctcgagacccaaactctgttccctgtgtggggacgcaggattccagatgcagaacccacgggcgtcccactctctgctcaggaatcgcccccagc

SEQ ID NO: 33023 - DNA, 910 bp, Artificial sequence
  DNA replication origin
ggccccgtgaaagcacctaccgtgcaggtacagcgaggcccaggaccgccagctggcaggtcccgaatcaggccttggcgccacagcctgtgggggagcccggcctacctgatggtctgggtggatacgggacggagcccggcctacctgatgttctgggtggacacagggggttgggccggcttacctgacgttctgcgtggggttccacctctctgagggcagctccccgctctgggggtcgtccaccggcgggtggaggatggagatacacacgtcccccgtctgcacaagaagaagacaggtcagaacaggtcagaggtcagcacgggctcccagtgccccaggtcccggaggatgaggacgtggaggacgaggacgtgaggctcccagcgccccgggtcccggaaggacgaggacatgaggctcccagcgcctcgggtcccggaaggacgaggacgtgaggctcccagcgccccgggtcccggaggacgaggacgtgaggctcccagcgccccgggtcccggaaggatgaggacgtgaggctcccagcaccctgggtcccggaggatgaggacttgaggcccgtgggggccgcgctcacctcgtagatgttagggtgccacatcttggtcaggaaccgaaaggctggtggagagtatgggtagtcgatggggaacttgaggcgcgcctgcaggggcagaaggcaggtggctcagtccagcccagccccaagacctgccccagctcacaaggtgcccaaggccatcccactcccagtgctggtgcctgagggtgtgtgtgagggacaccgtatcctgcccaaggcagggactctcacaggcctggggtcaagtccccagaaggctgcctgaagccttttctgagtcacccgagctgatcccagctc

SEQ ID NO: 33024 - DNA, 1170 bp, Artificial sequence
  DNA replication origin
ccgccggtggacgacccccagagcggggagctgccctcagagaggtggaaccccacgcagaacgtcaggtaagccggcccaaccccctgtgtccacccagaacatcaggtaggccgggctccgtcccgtatccacccagaccatcaggtaggccgggctcccccacaggctgtggcgccaaggcctgattcgggacctgccagctggcggtcctgggcctcgctgtacctgcacggtaggtgctttcacggggcctgcggcaccgtgtgtcggtgcagactcccaccaggaccccaggccggccccaccgtctggaaccacctagaggtgtcccgccatcctcagtcctggggccttctccttacccagccgtctctgggttggtcacctcgtgccacgtgtgccgcctgggcctcgtccccaggtacaagcactgggccgtgttgcccgtgtgtcctggagtgtagtctaggcaggacgtgcgggtgtgagggcagccccgggtctgacggaggggtctgcaccttgctgccctccctggtcttggcgtgggagggaggagactgatgcaggtccagcccctgctgttctgggggcctgagacagaagcagaggccatgaggccaggtgaaggtcacctgctgggtgggtccaggcgtccccgtgaccctcagggccagagaagagccggaaggctggggtgccccgggccgccccactccgacccactctccccacaggaccattctcctgagtgtgatctccctcctgaacgagcccaacaccttctcgcccgcaaacgtggacgcctccgtgatgtacaggaagtggaaagagagcaaggggaaggatcgggagtacacagacatcatccggtgagggcgggcgggggcgtcacgggaggagagactcagatccggcctgcaccccggcccctggtcccacggccgcccagccccaccttcctggtgagggtggcggagcttcctggtgcccatttacagggtgccagtcacagatggaggccgggccgagtggcggagggtccagccaggttcaagcccagcttcttgccccttttcctctttttttttgtttgagacagagtctctctctgtcacccaggctggagtgcagtggcgcgatctcggctcactgcaagctccgcct

SEQ ID NO: 33025 - DNA, 1238 bp, Artificial sequence
  DNA replication origin
ctgttcagcaagaccaacatccctgaccaagccgggctccacggcagcctgcccgacacagctcagcgggacttgggctgccacgaggccaacacgcacacagatgaaaaaacaggcagaaacggcgaccacagcagagtccacatggcacatgtgtgttggcccacagggagttttgagggataaaaatagtgtggcttttatttctgtgctgggatctcaaggaggtggtgcctcagggaggtggccgggaagaaccgggccaaggagccagccacctgggccaggtgacacgaccggaccggggccaccgaggacatctgcaccagagggacggccagggcagctaccctgtgacctccagaggccagcaggtgcttgcaggccacttcccaggaggccgcacggggcccgcccaccatggctgctcagagccgagaccgcccagcaccaggatgctgccccgagatgaccccacgacaccaggtaccagcgagtgcaggatggaaggtgccctggatgctcctgggtcctggggcgaggaagacacatgcattatgtgtgcaatattttaaaagttgtttttaagattctgtttatacaaaataccaacaaaaataggtgaggcctctgtgaggaaatctatgcaatatcactctgagaaaaaaaaaaaatggataggaagggcctctatgtaacaggaagagcaggaaccattaaggccgtcaacccgtaaagaaagccttgtctttgtacacagacacgcacgtgtttacacattcatgtgaacacaggcacccaagagaaggggctgtggggctcagctctggggcatgagggcgatgggaggagagggagagccgtgggtcaccacacacagccacgcaagctaagtggactgcaggtacagaaggcgccggtaggcgactgcacagctgtacccagagctcaccaggccaagagcctgcagggacgcactccagacatgagtaaggccaacacccctgactaacagtcagtcactgggcacacacagcacgaccccattttttcattaaagcacagacacatgttccctaacagtcagtcactgggcacacacagcacgaccccatttcttcattaaggcacagacacatgttccctaacagtcagtcactgggcacacacagcacgaccccatttcttcattaaagcacagacatgcgttaaactgaaaagcctggaagaatctatga

SEQ ID NO: 33026 - DNA, 1066 bp, Artificial sequence
  DNA replication origin
cccccggctccacctccaggacacgcgtcaagaatgtccccccaggactggaagcaaaggggcttccgggggtggcacagcagggccaggcggcacgctgaccccatttgacagaaaacaggaacgaggctgcagccgcaggcaatgggctcgagcccctatcaccgaccaggcacggctctgggctctggggctggctgctaccagggtgtgcgggtcccacagtgcccgcatgggagggcaccagggagcagacagacagccccaagcccagcccacaagcccagtgctttttatggggatgcatgacgcgtggagggcaggcgtctggcctcagggacgtccctgggtggcgggacccagcggacgccaagctttgctttccaagctctccgatgggctgggggggtgactgacagtgccccggggacggcactgcacgggtggcagcagtggggagacgcaggggagggccagggtggacgggctgggggggtgacggtgccccggggacggcaccgcagaggtggcggctgtggggagacgcaggggagggccagggtgggaactgacctgcaccgtggaggtgccgccggcacaccgccagcatgagctggaggacggtctggaggtcctgttcagcaagaccaacatccctgaccaagccgggctccacggcagcctgcccgacacagctcagcgggacttgggctgccacgaggccaacacgcacacagatgaaaaaacaggcagaaacggcgaccacagcagagtccacatggcacatgtgtgttggcccacagggagttttgagggataaaaatagtgtggcttttatttctgtgctgggatctcaaggaggtggtgcctcagggaggtggccgggaagaaccgggccaaggagccagccacctgggccaggtgacacgaccggaccggggccaccgaggacatctgcaccagagggacggccagggcagctaccctgtgacctccagaggccagcaggtgcttgcaggccacttcccaggaggccgcacggggcccgcccaccatggctgctcag

SEQ ID NO: 33027 - DNA, 837 bp, Artificial sequence
  DNA replication origin
tcctgcctcctgtccttgggccctcccagctgcttcctttgctcctgcgctgaggaaggcttttgccccccagtggggcagcatgggccctccctgttgccggcatcgttattttctcccagctcctgatgggtcccttgggttgtgcttcggggcggggcaggcgggtgtgactgcactgcgcccgtccagcctcccacccgcacctcctgcccttcccgagccccctcctctgtcatttctccccctggagttcctcacgcacagggctttgtcctaagtggtcgccacacgccgttttaagagaaacctgagcgttggggtgagcgtcggacctgggggaggggggccgggcaggggccgagtccaggcacgtgggtggcgccctcacccaccctgtccccccaggaagcaggtcctggggaccaaggtggacgcggagcgtgacggcgtgaaggtgcccaccacgctggccgagtactgcgtgaagaccaaggcgccggcgcccgacgagggctcagacctcttctacgacgactactacgaggacggcgaggtggaggaggaggccgacagctgcttcggggacgatgaggatgactctggcacggaggagtcctgacaccaccagaataaacttgccgagtttacctcactagggccggacccgtggctccttagacgacagactacctcacggaggttttgtgctggtccccgtctcctctggttgtttcgttttggctttttctccctccccatgtctgttctgggttttcacgtgcttcagagaagaggggctgccccaccgccactcacgtcactcggggctcggtg

SEQ ID NO: 33028 - DNA, 1069 bp, Artificial sequence
  DNA replication origin
gtggccgactcttttccctgctttggtttgtttgaaatctaaataaaactactttatgagaggccagagaagctgtgcttgggagggagaggcagcctccacgtccatgagtgactgcacacggccagtcccactgggaccctggctacgccaggtgtggatctgggaggcctgtcctgggaggcacggggagcagccgggtcccgcggcctgtacgttcccatgacttgggtcagacaggcctgggcagcatcccccagcctgcgggacaggggcggccagaaagcccccagagttcctcctccctgtgaccaggtgcatctagtgggacgggagctgcctctgcaggcatccagcaaagcttcgtcgcgggtccacagccgcctgggcgttgatctcagcgtctcagggctcccaggaccacagatgcccccgatcagcactccggcggctccagctccgtccaggcacaccctcggggtggggagccgtggccctgggcacacagggcaggcacctcacgtcctggtgtcaggaagtccccagcatcgttttattacatgtcatggaggaaagctcggagctcccatgccctcccggggcaccgccttccaggaacctgcctgcgttccgcttctgggcacccggaaagtcgctcagtggctgattcagggtcgaggagctgtgaggatgaggtttcccaccaagttgggacagaaaatggggccctggggtctcagcaaaccatggccctcgggaccaaacctggcgtccgcccctattgtgagtgaagtgttactggcacagccacacccaggtctcaggatcatccatagctgcttggtttggtttggttttgtttttgagacacagtcttgtgttgcccaggctggagtgcagtggtgcgatctcgcctcctgggttcaagtgattctcctgcctcagcctcctgagtagctgggactacaggctcccaccaccatgcccagctgatttttgtatttttagtagagatggggtttcaccatgttggccaggatggtctcgaactcccaacctcaggtgatcg

SEQ ID NO: 33029 - DNA, 2078 bp, Artificial sequence
  DNA replication origin
tgctgggatgacaggcgtgagccactgtgcccagcaagaaatgtagtctttaaataagtaaattgtatagtgcataatttcctaataaagctgtacaaaaattattttaaatcaatcataaatataaaaggattgatttcataatgtaacgtaaatcagctcaaaatcttctctgaatccccatcatgctttgaaaatcaagtccccgcttgcgggccggtgcagtggctcacgcctataatcccagcactttgggaggtcaaggtgggcagacagcctgaggtcaggagttggagatcagcctggccaatgtggtaaaaccccgtctgtactaaaaatacagaaattaaggccgggtgcggtggctcacgcctgtaatcccagcactttgggaggccgaggcaggtggatcacgaggtcaggagatcgagaccatcctggctaacacggtgaaaccccgtctctactaaaaatacaaaaaattagccgggcgaggtggcgggcatctgtaatctcagctacttgggaggctgagacaggagaatcgcttgaacccgggaggcagaggttgtggtgagccgagatcgtgccattgcactccagcctgggcaagaatagcagaactccatcttaaaaaaaaaaaataggccgggcgcggtggctcacgcctgtaatcccagcgctttgggaggccgaggcaggcggatcacctgaggttgggagtttgagaccagcctgaccaacacggggaaaccctgtctctactaaaaatacaaaattagcccggcatggtggcaggcgcctgtaatcccagctactcgggaggctgaggcaggagaatcgcttgaaaccaggaggcggaggctgcagtgagccgagatggcaccatcgcactccagcctgggtgacaagagtgcaagtctagctgtgcctgcaagctgcctgcaccctgggcctttgtctgtctcacttagctgcctgcgtacctttcccccaccggcttcctcccttggtttatgctcgtctcctgcaacggccccccacccgccctcttgccctccgtgtttcctccgctctgcacagtctcatgcctggcctgtctcttccagtcagacaggagggcaggcctagaacagcacgagccctgcaaatacggatggatacacagaagcacgggagaaaggaaggagggatggaaggaggaatggatgatggatggatgggagggaggagggaaggaggggggaaaggaagagagaggcatgatggatggatgggtggatacatggaaggagggagggaaggatgacgggtggagggaaggagggaggttgaaaggagggatggatgatggatggacgggtgggtggaagaatgggaggaaggaggaatgatgggtggatggactggcggagggaaggaagggggaacgaaaggagggagggagggatggatgatggacccatgggtagagggatggatgatggatgggtgggtggaagaatggaaggaggaatgatgggtggacggacgggtagagggaaggaaggggagatgagggagggagggagggagggagggagggatgatggacccatgggtggaaggaaataaaaatgggaggaaggatgatgatgactgacggctggattcctacctctgtccatcttcttgggtccccaactcatcaagagcccctgtcactcagtccagctggaatgcaggggagccgccacccacctcccttctccctcactgctgggcacctagtcccagccaagcccttggtggtggcaggcagccagcggggatcgagtcccagctctgccctcccagctgggcagtcctaggtcagcatctccttcgccaagtctcagtctcctactctgcacctcgggtgtgagcgtgacccctgccttctggctgctgccgggaggatgggcgaggtgagccggtggacaccacactctcccacggtcccgggatgtccactcggggtgaagcgtgaggagctcgggatgccccaggcctcagtccccctccaaacaaggatgaatctccgctcttacacccaggat

SEQ ID NO: 33030 - DNA, 1057 bp, Artificial sequence
  DNA replication origin
atacctgtaatcccagcactttgggaggctgagatgggtggatcacaaggtcaggagttcgagaccagcctggctaacatggtgaaaccccatctgtactaaaaatacaaaaattatccaggcgtggtggcaggtgcctgtagtcccagctactcgggagactgagtcaggagaatggcatgaacccaggaggcggagcttgcagtgagccgagatcgtgccattgcactccagcctgggtgacagagcgagactctgtctcaaaaaaaaagaaaaaaaaagttttttttaagagactgggtcttgctgtgtcgcccaggctggtctcgaactcctggcctcaagtgatcctccctcctcagcctcccgaagtgctgggatcacaggggtgagccacccacatccggcctgatgtgcgttttgaaggactcctgtggctgtggggcccagtggggcctggggaggtcctggagaggggattgggaggtggcctggggggaacatgatgggggtgatgagagggggatgggagggatgaagggcagcccacacgtatcagcctaaaagtttcggggaacactggggacttcattaggatggcacatctgcttggggtcctgggcctctgagctgggcaaggacagtcgcagcaggcagcaggggcatgtagccccaacctggctctttgtcccccatcctggcaggcagctcctttgggacccagatcatcgggggccgggaggtgatcccccactcgcgcccgtacatggcctcactgcagagaaatggctcccacctgtgcgggggtgtcctggtgcacccaaagtgggtgctgacggctgcccactgcctggcccagcggtgagtaccctgccctgcccaccccaggggtccggggaatccatccgacggcgcccattctctgcagggggtgggctctgggagatttaggcccattgtgggacccccgtcccctcccggtgacgacttaggcaggtttaagtgacctgcggctgtgggactcctggagaaggtttactccttgcaagaggcactg

SEQ ID NO: 33031 - DNA, 1402 bp, Artificial sequence
  DNA replication origin
attcccccagccccacccgggcgcccctcaccttgcagggagcctggtccttggagtcggccgccaggcagaccatgctgggggagaggctgccgttccagaagcggctgttgttacacatgcgggtgtccagcacttggaggtccagctcccgcagcacccgggacaggcgcccgccctggtgggtcagcccccagccggccatgctgcaccgagtccctgctgccaccacctggcgcttactgggcagggccaacggccggatggtccggctgggcttcactttcccgtccagctacgagtgacaggaaggggcaggtgagcagggggagggggtgagagtgcgggggcggggggcggcagcggggggaggggtggcagtggggggagggtgggcaatgggggagggggcagtagtgcggggggaggggcagcagtgcggggggagggtcggcagcggggggagggcgcagtgggggtgaggggcacccgtgggggacaggagggtgcccagttctccctgtcccgtccctgcacacctgaagcagcgcgaggtcgttctccagggcagggacgggcttgtagcgagggtgctggatggctgccttgatgtggaaggtgagaccggggctgtccagggtgtggagccccagcaccagcctcagctgggccatcctggggacagagggaatcagggtgctgcggcctggcccggcgtggacgacccgccacatgcagtcccggcccccactgtgcccgttgtccatggccatcactcacagccgctgcccctcacaggccttggcttggccagtccttccctgtgtctttgcaacccacctcctccaggaagccctccctgctctcacccctgccccagacttctgcccggccctggccccaggcaagggctgtgtgtccaaaaatccaaccccaagcctacagcttcacgaaaaccagccctgggaattcccttcacttggggccccaggctcaaccacagtgatttgtacaggggttgacacatgccaatcctcctaagtgtgccccaactttagagagccaagccctctttccatgggactgaggagggtcaatctttccaccttgtgagacaggcttcctggtagtgcagcagagctgggagacagatgggctccacagcgcctcctgtgagcacctggatcaagccgcacctgaagccaggcctcctcctagactttgcagttacacaagccggcagatccctttttgttactttgaccatcttgatctgggctctgtatgacggaccagtcctgaggtagggcaactccatgatgggtcatttagcggcttcctgatccccgggaaccaggtcgattcccgagccactctcgaaggccggcttcgacctcctggc

SEQ ID NO: 33032 - DNA, 1350 bp, Artificial sequence
  DNA replication origin
ccaccctccccccactgccacccctccccccgctgccgccccccgcccccgcactctcaccccctccccctgctcacctgccccttcctgtcactcgtagctggacgggaaagtgaagcccagccggaccatccggccgttggccctgcccagtaagcgccaggtggtggcagcagggactcggtgcagcatggccggctgggggctgacccaccagggcgggcgcctgtcccgggtgctgcgggagctggacctccaagtgctggacacccgcatgtgtaacaacagccgcttctggaacggcagcctctcccccagcatggtctgcctggcggccgactccaaggaccaggctccctgcaaggtgaggggcgcccgggtggggctgggggaatgaggctggcgggagggccggggccagggcagccgccgggcaggttcctggctctcccgttctctggggagtcctgtcaggggctggggggcggggaagcactggcaggggtcccgtttctcaggtgcagaaactgaggctcagacaggtttagcaacctgcgcaagaccacacagccgggaagcggcagagctgtgacttctgctccagccaagacggtccggcgggggaagaaggagcagggttcacagggccagcgggagatggggaggggacacgcgtgggccgggagcagcccctgtgtctccttgagcctggggataacaggcctggccctgctcccctcggcgggccctgctcccctcgtcccctcagcaggtgcagaggctgagctgcggtgtgtcgtccctgcagggtgactcgggcgggcccctggtgtgtggcaaaggccgggtgttggccagagtcctgtccttcagctccagggtctgcactgacatcttcaagcctcccgtggccaccgctgtggcgccttacgtgtcctggatcaggaaggtcaccggccgatcggcctgatgccctggggtgatggggaccccctcgctgtctccacaggacccttcccctccaggggtgcagtggggtgggtgaggacgggtgggagggacagggagggaccaataaatcataatgaagaaacgctcagagcccgcctgagtcccagcccacctctgtccatgctggctgtggggcttccgacaaacctgtttccctcagcctcccgagtaactgggtctacaggcgcccgccaccacgccaggctaacttttggtatttttagtagagaaggggtttctccatgtttgtcaggctggtctccaactcttgaccttgtgatctgcccacctcggcctcccaaagtgctgggattacaggcgtgagccaccgcgcccggc

SEQ ID NO: 33033 - DNA, 1481 bp, Artificial sequence
  DNA replication origin
aggggaggggaggagaggggaggggaggggaaggggagacggggaagaaaggaaagaaaggaaagaaagaaagagagaggaggggaggggaggggagagaaggggaagggagggaaagagaagaaggggaagggagggaaagagaagaaggggaagaaagggaagaaagaaaagaaaagaaagaaagagttggtagtgaaattaaaagattctgcaggaaaacagcgcggcgctgaaacagagtcactgaacagcccgagatgccactcccacgggtctaatctggagggaggaaggagcaggtaggtccacacgaaaacgcacacaggcggctcccagcaaagcttcagacggacggacgcagacgaagccgcccagatgtgcacccagggacgcacccacaaacgcagcgaggcccccctcgagctggagctcgaccccccggagcaggagcacggctcggacccagccagcgcgcgggtgcagcttgaggacgtcacgctcagcgggagacgccagacacagaaggccacgcagcgtgatcccctgtccatgaaatgtcagcacaggcccatccagagacagggaggggatgtgagggcaccggggctggggtggggacggggagtgacggccgatggggacgagcctccttttggggtgctggggtgacagtggggacagagtctattttcggggtgctggaatgacaatgggggtggggcttccttttggggtgctggggtgatagagatggggcctgttttcgggctgctggggtgacagtggggacaggcctgttttcgggctgctgggatgacagtggggacgggcctgttttcggggtgctggggtgacagtggggacagggctgttttcggggtgctggggtgacagtggggacaggcctgttttcggggtgctggggtgacagggggacaggcctgttttcggggtgctggggtgacaggcctgttttcggggtgctggggtgacagtggggacgggcctgttttcggggtgctggggtgacagtggggacaggcctgttttcggggtgctggggtgacagtggggacagggctgttttcggggtgctggggtgacaggactgttttcagggtgctggggtgacaggggacaggcctgttttcggggtgctggggtgactggggacgggcctgttttcggggtgctggggtgactggggacgggcctgttttcggggtgctggggtgactggggacgggcctgttttcggggtgctggggtgactggggacgggcctgttttcggggtgctggggtgacatgtcacggtggtggttgcccagctctgtgcaggtaccaaaggcccctgaatcgcagtttacagggagactcatctgctatgtgagttgtaacttgataaaagctgttactaaaaaagaagatcctgggatgctgttcaaggcccagccccaggagccacgcggggaggac

SEQ ID NO: 33034 - DNA, 819 bp, Artificial sequence
  DNA replication origin
aaataaaataataaaaaaccattaacgtgggcacagtggctcatgcctgtaatcccagcactttgggagggcgaggtgggcgggtcacctgaggtcaggagttcaagaccagcctggtcaacgtggtgaaacctgtgtttctattagtctctactaaaaatacaaaaaaagttagctgggcgtggtggtgcacgtctgtgatccctcagctactcaggtggctgagacacaagcatcgcttgaacctgagatggcttgcagtgagccgagatcgtgccactgcactccagcccgggtgacgcactgagactccatcagaagaaaagaaaggaaaataaaagaaaaaaagaaaagaaaagaaagaaagaaagaaagaaagagaggaggggaggagaggggaggggaggagaggggaggggaggggaaggggagacggggaagaaaggaaagaaaggaaagaaagaaagagagaggaggggaggggaggggagagaaggggaagggagggaaagagaagaaggggaagggagggaaagagaagaaggggaagaaagggaagaaagaaaagaaaagaaagaaagagttggtagtgaaattaaaagattctgcaggaaaacagcgcggcgctgaaacagagtcactgaacagcccgagatgccactcccacgggtctaatctggagggaggaaggagcaggtaggtccacacgaaaacgcacacaggcggctcccagcaaagcttcagacggacggacgcagacgaagccgcccagatgtgcacccagggacgcacccacaaacgcagcgaggcccccctcga

SEQ ID NO: 33035 - DNA, 1158 bp, Artificial sequence
  DNA replication origin
acacactgtgtgatcccatgtctatgaaatgtccaggacaggcccatccacagagacagggaggggacgtgtgggtgctggggggctgaggaggggatgaggcgcggtgactcacgcctgtcatcccagcactttcggaggccgaggcgggcggatcacctgaggctgggagttcgagaccagcctgaccaacatggagaaaccccgtctctactaaaaatacaaaattagccgggcctggtggcgggctcctgtagtcccagctacttaagaggctgaggcaggagaatcctttgaacctgggagacggaggttgcagtgagccaagatcgcaccactgcactccatcctgaggaacaagagcaaaactccgtctctaaataaataaatagggtgatgtgcgtaaccgaggggccagcacacggtgggcaggggcagaaaaccccatccagggcgaaggctgggcccagccagggtgggaagatgctgggggccgagggcctggacggggctgagggcttcactctgggagacccccgcttcccactctgggagaccccctctcggggatggcttcggatcaggggacttggagcctcagaaccaccggtgccaaagagctcccacctggggggccacaggcttggaaagtcctcatgggggcggggggtggagggggagggtctgaagctacgtgcagaacgaggacacagacgcggatgaggcccagcagggccagctgccttcaaagcccctccagggttgtaaacaaccacagggcctggcccaattcctgccccctccgcagccctcccctggcaaggccccaatctggcctgaggtcagttctcctgggaacttggtctttgtttacaaaataaagcctgtggccgccttcaacaccctgtttcctggtcccttccctggaaagccttccctgaccctcaggcagagccagggacccccttgcccccgacccaaaacccccgagcctgctctgctcagttctggccccagaagcaagaagatcccagtcctcttttatctgccaaggagagggtcttcaggaccaccccctgtagggcctcatttagcaaataaaaatacccagttaatttaaatttcagagtttattttattttattttttttgaggcag

SEQ ID NO: 33036 - DNA, 1726 bp, Artificial sequence
  DNA replication origin
gatagagaccctcggagtctgtgggtgtgtgggatatagaccctcggagtctgtgggtgtgtgggatagagaccctcggagtctgtgggtgtgtgggatagagaccctcggagtctgtgggtgtgtggggatagagaccctcggagtctgtgggtgtgtggggatagagaccctcggagtctgtgggtgtgtgggatagagaccctcggagtctgtgggtgtgtgggatagagaccctcggagtctgtgggtgtgtggggatagagaccctcggagtctgtgggtgtgtgggatagagaccctcgaagtctgtgggtgtgtgcgatagagaccctcggagtctgtgggtgtgtggggatagagaccctcggagtctgtgggtgtgtgggatagagaccctcggagtctgtgggtgtgtgggatagagaccctcggagtctgtgggtgtgtgggatagagaccctcgaagtctgtgggtgtgtgcgatagagaccctcggagtctgtgggtgtgtggggatagagaccctcggagtctgtgggtgtgtgggatagagaccctcggagtctgtgggtgtgtgggatagagaccctcggagtctgtgggtgtgtgggatagagaccctcggagtctgtgggtgtgtgggatagagaccctcggagtctgtgggtgtgtggggatagagaccctcggagtctgtgggtgtgtgcgatagagaccctcggagtctgtgggtgtgtgggatagagaccctcggagtctgtgggtgtgtgggatagagaccctcggagtctgtgggtgtgtgggatagagaccctcggagtctgtgggtgtgtgggatagagaccctcggagtctgtgggtgtgtgggatatatgccctcggagtctgtgggtgtgtgggatagaggccctcggagtctgtgggtgtgtgggatagagaccctcggagtctgtgggtgtgtggggatagagaccctcggagtctgtgggtgtgtgggatatatgccctcagagtctgtgggtgtgtgggatagagaccctcggagtctgtgggtgtgtgggatagagaccctcggagtctgtgggtgtgtggggatagagaccctcggagtctgtgggtgtgtgggatatatgccctcggagtctgtgggtgtgtgggatagagaccctcggagtctgtgggtgtgtgggatagagaccctcggagtctgtgggtgtgtgggatagagaccctcggagtctgtgggtgtgtgggatagagaccctcggagtctgtgggtgtgtgggatagagaccctcggagtctgtgggtgtgtggggatagagaccctcggagtctgtgggtgtgtgggatagagaccctcggagtctgtgggtgtgtggggatagagaccctcggagtctgtgggtgtgtgggatagagaccctcggagtctgtgggtgtgtggggatagagaccctcggagtctgtgggtgtgtggggatagagaccctcggagtctgtgggtgtgtgggatagagaccctcggagtctgtgggtgtgtgggatagagacccttggagtctgtgggtgtgtgggatagagacccttggagtctgtgggtgtgtgggatagagaccctcgctaggcaaatgtggatggttgcatcgtgtgcagaaaagctaataagcaaaccctaaagaggcaacctcccggggaagaaacccagggttgaggccattcc

SEQ ID NO: 33037 - DNA, 1500 bp, Artificial sequence
  DNA replication origin
aggcggggcgaccggcgtccccggcgctcgccccgcccccgagatgacgccgtgcgtgcgcgcgcccggtccgcgcctccgccgctttttatagcggccgcgggcggcggcggcagcggttggaggttgtaggaccggcgaggaataggaatcatggcggctgcgctgttcgtgctgctgggattcgcgctgctgggcacccacggagcctccggggctggtgaggagcgggtagggggcgggggtgcggtcctgcaggggccgggaatggaggccgcggtgccgacccgaagccgacgggagcctggggcctcggcgcggggcggcctggggtgcgaaaggccggccccgggggcttcccgcgccagcatggagcttgggggtgaagtcccagggtttgaggggggactagaggttcctcccggcgcggcctgccgggctcccccgggcgctccggcctcgagcccggcctctgtgtgtgggcgtgaagctccctgcttggaggcgggagccagggggtcctggccaggccggtcttggtcaggggaggtgggcgtcttgcttttcggtcacctggggttgggggtgacctgcttcctgggtgagggcgtctgcgaaggcggttggaggtggcccgcccgccggtcccatcggccaggagaagggagacccaaagcctgggtgagcgtcccctttggcctggagccaggggtcaggggctggttggtgcctgcccaacccgtcctgctggggctggactccgcaggacctggggaaagcggcctgggcgtggaatctggagacgggtccaccctgcctgcgagtgttagggtcagagaccctcccctgagactctctggggcccccgcaagggcccgtgcggcctggagcgatcatcttggcgctcccttctggaaaaggggcttttgtcctccaagagcacatggaggctctgagtgggtcagccctccggatcgggaagggattaccgttcttcacgggatttagccctggcgtcttgcctagggcgtgcacctgcccccgggtgttctcccagactcttaagacctcgcaggctccctcgaggggccctgcgtggaagggaaggcggaatctccctctgattctgcctggattcagcacccagaatgaggtggtctctgaacgcccctcctcctttacaggcgaggaaacagccctgtgggaagtcgaggttccaaggtcacagtgagggggccctggccacccgattcagcgcaggaaatagtgagaaagtcgtttttagccgactctgacccgcattcggtttccagtgctgtcttaggagggccgtgtgttgagggtgggcaaacgtggtttggagagcgcatttgggaaatggattgaggtgtgtttttccgggagaaaagcatgacatcctttcttgcttcatagaaaatttcttcctttgttgagacccccatttggttctgggttaaagatttatagtgaggccgggcg

SEQ ID NO: 33038 - DNA, 845 bp, Artificial sequence
  DNA replication origin
cagcggtgtagccgtgtgtgcgcgtgtgtgtgtgtggtgagaaaccccacttttgctggggactgactcgtgaagaccacaaggtctgggcaacacagccttggcccgtgtggggtggacactgctgtttgctctgtgaattcgtgactgtgtttgcctctcctgaaacttgcttcaggggcgtctgcgggttggtggggcacagccgggtggggtgagtgcccaaggttggccgtccgcgtctcctgtgggcttgtcggggaccggagggccggggtgtgctagctgggtcccgagggtggagggcttcacccccgagcctcagatgagaggagtgggagtgcctggctgcggccggtgggggtgggtgggggaggtgcccgaggctgcttcccagagctgttctcgctggctgctgtctgagcactggggtgggtggggaggagggcgggtgggggcgggcagccttatcctgcggggctgcttgtgtacaagtaccacgcggcctgcctggccctgagccctgggcaaggaggcggaggctgtttttagatgaaggtgactttacttgagaacatgggttacgtctcatgtggccagaatcgaattctaacctttctggggctgtggccgagggtcaggcgccgtccctcctcctgctgctcatgggtggaggctcctggtgcggcgggcgagatggggtggtccgtggggtgggggcgctctgcattgtccccgaggagcctctatggaggctttctcttccggacgcccccccacccccagtgacacgtcaatacacagacaccagcatcatcagcatccggagggacacagggttgttc

SEQ ID NO: 33039 - DNA, 1568 bp, Artificial sequence
  DNA replication origin
ctggaggtggggtgaggtgagtcaggggccagccctctcctagcacccctgggtgaggaggatgtggagcccagccctgcaggtctggaggatgaggagaggggctgctgcagggcaggaaggagcttgccagctgggcagcctctggctgtgcttcctgccctgactcacctcgcccagctctgcacatagctgccagtgttgcagtctgggaaatcttaactcccaagaaatgtaggttaccaggaggagatccctttgtgaaaatggcactgccagccaggcgcggtggctcacgcctgtaatcccagcactttgggaggcccaagagggtggatcacgaggtcaggggttcaataccagcctggccaaaatggtgaaaccccgtctctactaaaaatacaaaatattagctgagtgtggtggcaggcacctgtaatcccagctacttgggaggctgaggcaggagaattgcttgaacccgggaggcagaggttgcggtgagctgagattacaccactgctgaacagagtgagactctgtctcaaaaaaaaaaaaaagaagaagaggagaaagaaaatggcgctgccaaaacttgtcaactgcgcctgcccagagctcacctgaggtgctcagacgtgaacattcctgtccccgtggccttgggggccgtgacctgtgcactgccacgcagcctcggagccgtgtgcacgcatatgcacgtgtgtatgtgttgtgtgtgtttgcagacgtgtgtccttgtgtgtgtgtgtgtgttgtagcggtgcctggggagtctgacctcagaaggtgctgtggggagggctgcaaggtcctggcgggaggaggcactccccacgcttccccttgggctgggctgttcctggcaggcgagtgctaggcacagtgtgaggttctgtgtggattctgctgtgctccttggcagctctgggggccttcccttgcatttcgaaggaaggggaggcgtgtggctggaggtgagaggccctgaggccctgcctggctcccagcttcccaaatccgcctctctctgggtcgccgccctcagagattgctgaggacacgagctttccacccacgggctgtcctaacggagccgggctaggggcttctggacagaggccgcctgcccctttgggctttggggtttgtttttctcagcagctcacccgggtctctggggtcagggtatcgggcagaagtcagaggacggtgcgcttgggacctgagctctgggcagccctcggggctcaggactcctggctcttctgcccagtttcatgtgttttgtgttttgaaaccacgtgtggtcccacagttgtgccctcagaagccgccgtggctgccgtgaggtagcagtggacgggacgcccacggtctttcccatgccatgctgtttccagccgggccccatcactctcccacaagctgaaaggaagtggcttctccaccagccctggctgggagtcctgtgggcgaggccttccccaggagctgccctcccaagtgccccaggcactaacaagaccccacgcgtgctctcccca

SEQ ID NO: 33040 - DNA, 1268 bp, Artificial sequence
  DNA replication origin
cgtgagaaggggcaggtggcggcatggcgtggtcaggcactcacttgaactccgttttctggccgggcagcgcgtcctccttcagcaccacgccccccttcagccagcggtgccctgtgacctctgtggcgctgtcattcaaggagcaggtgaggagtatcttggagccaaggtcttctacggtagtgaagactgtgccggctgcaaggcccggcgagacgcggtcagcagagtggaggagcacggcccgcgctgcctgcctgacccccaggaacctgcggctcctccccgggaaggactggttttcatcccaaaaatacaccgtggcccttacgccccgaggaccggaggcccaaggggaacttctggccacgcctccgggaagggaagagcccagcgcctgctgaggaggccccttcgggaaggcacccccttcgggaaggcacccttcgctggcagctggcgggccctgggctaaggcgctgggaacccagaggccccgcctggcgatgttcctgcccagagacacacgaggctgggaccagggtgtggggacagacaaggcacccacccacgtccctgagcagggaccagggcatcgagctcttgtagcagccccagcacaaactggaaattcttttctaaaaacgtagccagctgggcgcggtggtggccgggcgcggaggctcacgcctgtaatcccagcactttgggaggccaaggcgggtggatctcgaggtcgggagatcgagaccatcctggctaacacggtgaaaccccgtctcttctaaaaatacaaaaaattagctgggcatgttggctcatgcctgtaatcccagctactcaggaggctgaggcagaagaatcgcttgaacccgggaggcggaagttgcagtgagccgagattgtgccaccacactccacctgggaacagcaagactccatctccaggaaaaaaaaaaaaaatagccacagcacccccggccaaggctcccgtgcccttctctaggaggcactcaggtggccccacatccccccagccccaggctgacggcactccagcagtgctgggagcaccccggttcttctgccaatccccaaccaagcaaatctcttggttcttggttagtttacaatattcccgctaggaattgaaatttgaaaatcccttagaacgagatgctgcgaaggacacagaaggttctgagacctgcaagcctgggctgagcttggagggcccctcaggcttgcagtatggacgctcaggg

SEQ ID NO: 33041 - DNA, 1035 bp, Artificial sequence
  DNA replication origin
gagtagctgggattacaggcatgagccaacatgcccagctaattttttgtatttttagaagagacggggtttcaccgtgttagccaggatggtctcgatctcccgacctcgagatccacccgccttggcctcccaaagtgctgggattacaggcgtgagcctccgcgcccggccaccaccgcgcccagctggctacgtttttagaaaagaatttccagtttgtgctggggctgctacaagagctcgatgccctggtccctgctcagggacgtgggtgggtgccttgtctgtccccacaccctggtcccagcctcgtgtgtctctgggcaggaacatcgccaggcggggcctctgggttcccagcgccttagcccagggcccgccagctgccagcgaagggtgccttcccgaagggggtgccttcccgaaggggcctcctcagcaggcgctgggctcttcccttcccggaggcgtggccagaagttccccttgggcctccggtcctcggggcgtaagggccacggtgtatttttgggatgaaaaccagtccttcccggggaggagccgcaggttcctgggggtcaggcaggcagcgcgggccgtgctcctccactctgctgaccgcgtctcgccgggccttgcagccggcacagtcttcactaccgtagaagaccttggctccaagatactcctcacctgctccttgaatgacagcgccacagaggtcacagggcaccgctggctgaaggggggcgtggtgctgaaggaggacgcgctgcccggccagaaaacggagttcaagtgagtgcctgaccacgccatgccgccacctgccccttctcacggctctcttgccgccagcggcctgtggtccgtgagaacaaaagaccggtcggcaggcttgatccaggcggaagttagggaccagctccgcgcagacccccagagggaaaccccagggaggggtctgaggggcgtccttgtgaggcagggggctccagcagccctggcaggagtccccattgcttgctcctc

SEQ ID NO: 33042 - DNA, 1308 bp, Artificial sequence
  DNA replication origin
ccgggccttgcagccggcacagtcttcactaccgtagaagaccttggctccaagatactcctcacctgctccttgaatgacagcgccacagaggtcacagggcaccgctggctgaaggggggcgtggtgctgaaggaggacgcgctgcccggccagaaaacggagttcaagtgagtgcctgaccacgccatgccgccacctgccccttctcacggctctcttgccgccagcggcctgtggtccgtgagaacaaaagaccggtcggcaggcttgatccaggcggaagttagggaccagctccgcgcagacccccagagggaaaccccagggaggggtctgaggggcgtccttgtgaggcagggggctccagcagccctggcaggagtccccattgcttgctcctcactaggtcccgggcacgaaagggcgccacactgccaggtcccgggcacgtgtgcgggcctcccaggctctgtgctcctggcacaagagggcaccacactgaggcatgccctgctcggaccccagacgctgtcatggccggagctttgtcataactggggctgggacggccctgggagcacagagccttttgttttcaggctgactgggaagacggtcacagggtgtggggtgcagagcagggaccagaggtgtggggttcatcagtcggggagaagggggtctgttggttctctcacctgtggggtcttgccagcctggctctgtccttggggccgcacggggaccccaggagttcttttgaggttcagacttgactgggacagttttgctttttcactgtgccgtggttgggcccctggagaaccctgggtccttggaggcgtcctgcagagctggtacgcggctcacctgcctgctgtggttgcagggtggactccgacgaccagtggggagagtactcctgcgtcttcctccccgagcccatgggcacggccaacatccagctccacggtgagtcctgcagccaggggtaccgggcaccaccgactgtcgggagaagttgttggcctgaggcacccggcacatcccagagccctggccccctgctccctggaggggaacagccctcctgcgggaggccggggatgggggcgggcctgcggttccaggctcctctctctcaccctcctgtcagggcctcccagagtgaaggctgtgaagtcgtcagaacacatcaacgagggggagacggccatgctggtctgcaagtcagagtccgtgccacctgtcactgactgggcctggtacaagatcactgactctgaggacaaggtgagaagccaa

SEQ ID NO: 33043 - DNA, 1136 bp, Artificial sequence
  DNA replication origin
tcagaacacatcaacgagggggagacggccatgctggtctgcaagtcagagtccgtgccacctgtcactgactgggcctggtacaagatcactgactctgaggacaaggtgagaagccaaggaggctgggggtcctggacccagccctcaggactgggtgagaggcctagactgggggtcccggacccagccctcaggactgggtgaggggcctagactgggggtcccggacccagccctcaggactgggtgaggggcctagactgggggtcccggacccagccctccggactgggtgaggggcctagactgggggtcccggacccagccctccggactgggtgaggggcctagactgggggtcccggacccagccctctggactgcagccctccagactgggtgaggggcctagactgggggtcccggacccagccctcaggactgggtgaggggcctagactgggggtcccggacccagccctccggactgggtgaggggcctagactgggggtcccggactcagccctccggactgggtgaggggcctagactgggggtcccggactcagccctcaggactgggtgaggggcctagactgggggtcctggactcagcccttgcctttggtcccctaggccctcatgaacggctccgagagcaggttcttcgtgagttcctcgcagggccggtcagagctacacattgagaacctgaacatggaggccgaccccggccagtaccggtgcaacggcaccagctccaagggctccgaccaggccatcatcacgctccgcgtgcgcagccacctggccgccctctggcccttcctgggcatcgtggctgaggtgctggtgctggtcaccatcatcttcatctacgagaagcgccggaagcccgaggacgtcctggatggtgagccgtctgccctcctgcccacatgccctgctctcggggtggcccagggccactcctggtccgtccctgccagccccaccgctgacccagagcttggaactgaggagccccaggcagggagttgatgggaccccgaaagaaagtgtgggatggagggtctagccccgggcagctgcggctcagtgggcagcgggaccccgggaggaggaggcggca

SEQ ID NO: 33044 - DNA, 2444 bp, Artificial sequence
  DNA replication origin
tcgggaacctgaggtcagccatgctgtgctccggcagcccctgcctgcctcctcgcggagcccttctgccccttgggctgcgtgtgccggggcgaggcctgtgtggggcctgtgatggcagctcctggaaaacgctgtggggcaggggtgaggcccacgaggccatggggacagctcaccatggggagcacacctgcaggtggggagggctgcctttccccacagcactcagaagatgcacgtggccggggctgatgagctgccccgagccacccctgggggtcactgagggcagggctggcagcacagatgcccctgctcggggcctgagtggggccagtgctgacaggctgtcctctcgtcctctttttcatggcggcggtccttcttcagatgacgacgccggctctgcacccctgtaagttccagctgtgggggtcgggggtcccaaggagcggcctgctgccccaggcctttaaaacacaaaggcagagcccctgggcttcagtattcgggggtcctgggggccggggtgggcaggggtgacttggagagagtgacttgcgggggacaccctctcacccggcccctcgtgccccaggaagagcagcgggcagcaccagaatgacaaaggcaagaacgtccgccagaggaactcttcctgaggcaggtgcggtgggcgggagctcctcctgagccaggtgtggtgggtgggtgggcgggaactcctgagccaggtgtggtgggcgggatctgctagccaggtgtgggctcctgggtcccgcctgtgggtcgctgggaggtgggtccagtctgagcgcccctccctgtccacaggtggcccgaggacgctccctgctccacgtctgcgccgccgccggagtccactcccagtgcttgcaagattccaagttctcacctcttaaagaaaacccaccccgtagattcccatcatacacttccttcttttttaaaaaagttgggttttctccattcaggattctgttccttaggtttttttccttctgaagtgtttcacgagagcccgggagctgctgccctgcggccccgtctgtggctttcagcctctgggtctgagtcatggccgggtgggcggcacagccttctccactggccggagtcagtgccaggtccttgccctttgtggaaagtcacaggtcacacgaggggccccgtgtcctgcctgtctgaagccaatgctgtctggttgcgccatttttgtgcttttatgtttaattttatgagggccacgggtctgtgttcgactcagcctcagggacgactctgacctcttggccacagaggactcacttgcccacaccgagggcgaccccgtcacagcctcaagtcactcccaagccccctccttgtctgtgcatccgggggcagctctggagggggtttgctggggaactggcgccatcgccgggactccagaaccgcagaagcctccccagctcacccctggaggacggccggctctctatagcaccagggctcacgtgggaacccccctcccacccaccgccacaataaagatcgcccccacctccaccctcaccctctcctggctcctgtctgtgcctgacggggttgggttttccgagagcaggtgcaccctgggctctggtggtcacagcaggggtgcgtccagtactgggatttcacatgcgaggacgggtctgctgagaccgcagtgggtgttgggtggctcggggcatgggctggacagggcctgaggctgtcagccggactgggaacttggaaggtggctggggccgaccccgtgcctcagagccacacagaagagagtgggcactgacctgagccttctctgagcctgttactcctctcggcatgttttgggcctgacaaaggctgaggctttctgctgcctgccctgcagctgcctgcacccacccacctgggcgggctgcttgggcaaggttcaggggtggtcctggctgctcctggagagtgggtgtgtgaagctggtgcccagaggctgagggatgcccagcccctgcccgcccagcacacggaacagatgtggttgcagggctggagagcttgggggaccaggagcttagagcgtggaggttgcaagttgcaggaccagtaactgggtctggagggaggtttgcagcggctgtgtcagccctgcaggccgagtgtggcactgggccttctgctggtctgagcgggggtctcagggtggaggtcagcaaaagaggcttagtgggggcttagggagcctgggtgggttcccagagaagctaggaatcagatgggaagatgggaaggcagtgtgtttccgtgttgggcaaatccagcgttttcatgccacggaagccaagaaagggctcacggcctccggcctcacagggctacgcaaagggggagttgaataaacacggtgacgg

SEQ ID NO: 33045 - DNA, 1115 bp, Artificial sequence
  DNA replication origin
cttagtgggggcttagggagcctgggtgggttcccagagaagctaggaatcagatgggaagatgggaaggcagtgtgtttccgtgttgggcaaatccagcgttttcatgccacggaagccaagaaagggctcacggcctccggcctcacagggctacgcaaagggggagttgaataaacacggtgacgggccccgggcggcagctgctcccggcactgatcctgctgggccagcggtggacttgcagggcccacatccggagctgcccactggtcctcgtgctgcacagccttggaggatctgaggctggctcagggtccctggcagcaactgccctgctaggtgggggctgctgggttccacagctgggccctccctgccggctgccaccaggcggcgctgcacgcccacgctgagtggggcaggccctggagcccctctgcccgggcagcctgacggcccctcctcctcggctgagaccgcagagtcccaggcatcacccactgaaagtgtgctcagtgacctgtgaatagggatgccacgtctgcgtgcagacattgattaggcgcctgtggtatacctggagctggagggtgtgcgtggacaacaggcagaaaggtccagtgggatggaggctgccaacaggacgatggggaaggggcgcgttggggacatcgccgggcacgcggcccaggtgggcccctggctcaggtctccccccacctccctgcctgggctctgtccatctttctgccgcaccctcagccccaggtgtgggcccaccgtgcttgtggacgcctcatgctctgtaccgggtgggaggtgtgggagttacaggtcagggcagccttgggagacgggcaggtttcctggggtgcttaccggcagatggggcgcctgggtccgtgcagggtcgtccgcccgagaaagcagcccctcacccctgggcactaacttcatcttttttctttgcacacagaaacgtaaacctgattcacaaaagtataaccactcagcatgtagctttgtacacctgccctcagcatttagtgtcctcgttcatccaacaagcatctaataagcactggggtacgcagtggtgggtgtccgccccg

SEQ ID NO: 33046 - DNA, 2138 bp, Artificial sequence
  DNA replication origin
gaggctgaggcaggagagtcgcttgaactcaggagccagatggtgcagtgagctgagatcacaccattgcactccagcgcttggtgatagagcaagactccgtctcagaaaaaaaaaaaaaaaaaagccgggcgcggtggctcacgcctgtaatcccagcactttgggaggccgaggcaggcggatcagttgaggtcaggagttcgagaccatcgtggccaacatagcaaaaccctgtttctaataaaaaatataaaaattagccggatgtggtggcacatgcctgtaatctcagctactcaggaggatgaggcaggagaatcgcttgaacctgggaggtgcagcgagtcaggatggcaccactgctctccagcctgggtgacacagcgagactctgtctcaaaaaaaaaaaaaaaaaaaatcaacaaaaacttattaagcacctactccaggccgagtattgactcagaggccagtacagctgactcagagagccagccaggggagaaagctgggtatcacagtcaaccttatgagtagcaagtaagatactgtccagcagaaggtggtgagcattgtccaaacactcagggtggggagggggccaggtgctgggagaaggcctgaaggagggggtgcggcccgggaagctgcaggaagctctgggcaggcggcatagcctgtgcgagggtcctgaggtgggaccgcacctggcttgtgtagggagcatggagccccagggcctggcccctcagtcagtcacatcggtctgtggcctaaaaccactcacagctcccagtgcctttggaagaaagcccgggtccctccagcagcttgtactcctccgcccgagtctggcctttgtgtgcctgggtcactggaccccgaactcccagacccctcctcgctgaacctccccaggccctgccattccctccccagggtcttccccatctccccgccccctgcagcctctctcggcattgtttaccggatttaccaacctcggacctacatttcccacttagtcaggacaggtccaggtcgcacgccctgaaagcttatacaattttggggcctttggagtgaaaagcagtttaagaccaggaagacaaaatcaggccagggcaggcactgagcccgcctggaaaatctgcagtttgactcaataaatactaaacgagccagggggaggggtgcgtgtcatctgtggtcccaggttcttgggaggctgaggtgggaggatcacttgagcccaggaggtcgaggctgcagcgagccgagatcaacaccactgcacaaacagcctgggtgacagaatgagacccttgtctcaaaaaaaaaaaagaaaattaaagagatgagctgtgcatggcaggcctgggcccacatttacagcggaggaaacagaggcttaggaaagggggtggcatcccagtctcagccacacacgcaagctccatctctgcaggagcacagccctgagggcccctgccccaggcctccgtgtctgcagcgtctgcgatgagagcagggcccccagtcctgctggcctgggattcacacaagtttccttctccctgctgggctcaccttgccccaggagcctggtgaaaaatatggggaagaccaaagtctttccgcacgggccagttccatgtcagcagctccttctcactccttcagctctgccctccacggcgggaccttggatgagtcactgtccctgccctgagcccctagagtgggacgtgctgcttagagccacagcccagagtggaggggatggggcaggccctgtccttgtgggctcccactggggtggggggtaagagggaggagaggccaatttgcccaggacaggaataggcagcccagctttggggccgcggtggggtccagcccatgaacaaacacttgttcctctggccgccccaaccctacccctgcccactgggagctgggactcctgagaccccaaggttcccaggggagccctgaggccttttcctgatacttggcaaggatgatctaatctcatctcatgacctggcggtggtgacttccccatctcacctctggggaaaccgaggcaggcttcagcgagttgccaccaagagcacccagggacggggtgg

SEQ ID NO: 33047 - DNA, 1428 bp, Artificial sequence
  DNA replication origin
ggcggcggcggcggccccggcgcgggggtcgcgcccgggctctccccgggccgcccgccgcccccgcgcgcgtccatggcgaggcggcgccgggcagtgcggagcggagccgccgccgccgccgccggccggagcccgagggaggggggaggcgggggcggggcggggcggagccgcggggggcggagcctcgcggcgggggaggggcgggggaggggcgggggcgggagacccgcctcggctgcgccccctccccgcgcgccgcctccgctcggcgccgggaaactcgggccgcggggtcgggggcgccccaaggtcacgcggcccgaggcctcggagccccgcgcgggcctctccccaggaggggaaactgaggcccgcgacgtgtaaggacgcgcccaaggtcaccgggccccgctgcccggccggagccgcctctcctgcgccgcggcttccacctctgtccggagggcaccggcgcggggagggtggacgcgggcctgggagacgggagaggccgccacggccagcgcctccttgctttctgtgaggtttgaagacttccacgacgaaagggtgtttctaaaggtcacaggagcccttgctgggtcgcctgtgggccctggacagagacccttgagtgcgtggggaggggcaggccggcttgggcgccgttctgggagactcaggcactcctctccctggtctgcatttgaggaaactgaggccaagcccagccagacaaggaaaactggaaaagccacccgagggtgtggggttcccacccacccctcaaacagtgccctggggagccgtgcggcgggggtctcctctaggtctggtgggctttagattggggtcacagggagacccaaagcccactagcgccttcgcacgggtaccagagccccctgccccggggttgcctcctttccccgacccctcggactccgggtgcagctgtgcccccagtgcctccagtccccagctctgagacaggtgcttcccaaggctctgcttctgggccgaagccggctgggcgtgggtgctgcttggtgccaggtgacatgaggcctctgtccctagccacccagcccaccagacagccgggagggggcaggtgaggaagctggcaagtgagagagaggagacagacagtcacactcgaagaagtggaggctgaacatccccacctggaggcaggaggccctcctgggaccctcctggcacctggcctgacgtcctctcagccacgatgtcccgtgtgccgggtgccccccacccatctgcacctcgaggccaccggggcagagatggccctcttcctacacccaggaggcactcagtggtacttgagggagggccagcatgtgcccggctgacagtggatgggctgagcccgaccgtgtctctcgcctcggcctggct

SEQ ID NO: 33048 - DNA, 997 bp, Artificial sequence
  DNA replication origin
gccgtccttggagcgcctggggagggcggggcggcgcgccgggccggtgacctcggggctcctcggtgacctcgggcgtgtccgggacccgccccggagtgaccccggcgcgcgaggctccgcctctgggggggctccccgggtgaccgcggagcgcccccctcccacgcaccccgacatcctccgccctgcggcgcggcgggtggggtgggccgcagggccagggtctgagcgcagaggggcagagaggacgaatagaggggaacgtgggccccagagaggcggcggagcgggagggaggaggaacgaagggcgcccgggaaggacgcgccccagggaggccgggggagagggggttaagcggctcccacggcgtccacccgcgccccgcctgcgaggaggcgcgcccggggccgcgggcctggaaagcgtgcgggtccccaggctgtgtccccgggagccgctccacccgagccgcgggcggtgcgcgcatgcggcggtgggtgtgtagacgccgctgtggatccagccggctaatgcgtggaaggctcggagcagggccggcgcggggccaccgccactgatgtttgcggtcgtggttcctgggctgtgcgtgctgtggccggagagcgagaccggcgcgtgtccccgtgggctgtgtgtgaacaggggcccgtgaccgcggcggggttcccggggcgcgagcctgtggccggagaggtgtgtctccaggagtgtgtttgcgtggtggtcgcgggcgtgtgcgcctccggtgggtttattttggtgggacgtgtggtttgtgtgtgttgggaccaggtggcgggcgtgcgcgtgtacgcccggggccggtgtgcaccggtgggcagtagtgtgagccgcaggcaggtctcacacacgcgaccatggagggatgcgtgtgtgtttgtgtatccacgagtggggtgtgaggtggggtgtggagggtgcaggtggagggtgtaggtggggcccgccg

SEQ ID NO: 33049 - DNA, 2122 bp, Artificial sequence
  DNA replication origin
accgccactgatgtttgcggtcgtggttcctgggctgtgcgtgctgtggccggagagcgagaccggcgcgtgtccccgtgggctgtgtgtgaacaggggcccgtgaccgcggcggggttcccggggcgcgagcctgtggccggagaggtgtgtctccaggagtgtgtttgcgtggtggtcgcgggcgtgtgcgcctccggtgggtttattttggtgggacgtgtggtttgtgtgtgttgggaccaggtggcgggcgtgcgcgtgtacgcccggggccggtgtgcaccggtgggcagtagtgtgagccgcaggcaggtctcacacacgcgaccatggagggatgcgtgtgtgtttgtgtatccacgagtggggtgtgaggtggggtgtggagggtgcaggtggagggtgtaggtggggcccgccgggctagcgaggccgggcgcgcgggacgggcgcggtttcagcaccacggacagcgcgccggacctgggaagcctgcggttttcccgcctgtctctcctcctccaggcctgggcgccccaggacagcccccacggaccctggacccccggaactgggcagggaggctgtggggttctctcttcccctggattctctgcacccctagtgcttgactggagaaactgaggcctggggcacatgcgtcctggacagagcctggaggaaggccctggaatcctcctcccaccccaggccttcctgagaggtgaatacagctttgaccagaagcctggatttcgagacaggccaggggtgggaggagccccgaaatccccagaggggctgtgtccggcccctcccaccctgcctctgtgccccaccgggagagcttggtcagcatctgggctctggcctgcgaaatgtggacagtgagcgggaaggactggacttccagggctgctggtcggcctggccccacttccagtcgggcagtggcaccccctgaccggagagggacgcggtggagagggagctgtagaacgtgcccactcccctccgtcccctccagcatgaccttcgacagagatgggtgcaccgcagcgtgggggctggcaggtggaggcccacaccagccactccctcccctgggcagctccagcgaccccctggctgcagaggggcggtcggtggcctggggggcaggtgggcagatggctgatcccggggcttggggggaaggccggtggtaggagtgaagccctctcatccttccaccctccttgggcgtggtcgcctggaggcctgggcaggctgtggccccgctctgtgctctgaggcatagagggctcagaggcccctgtgtggaccaagtgcagccccaccccggcagatgagtgttgaagtggaactgagcaggcagggaatggggttagcggggcctgtcttcgggactaggggagtcacggcagtcagattttaaaaaaggatttcgatgttgccaagctgggtgcacggggcccctaggaccctccccaggcttgggacctgtgccagtgtggaatcagtgtggaaaaagacccccaagaatatctcaaaagctccctaagcaggcggccggaccctgctgtggagggtgttttggggcagcccacagcaagcgaaggggcctctacgtttgcagctgactcaggagcctggccccaactggcttcgggcccaaggcctcctgtgcctggctgggtgtcttgggtcctcgctgggcccctctgcctcagtttccccaattgcacggtggggatggtatgagggagaaggatggggtctttcacagccttgccagtgtctcagcctcacgtctcacactctcttcacctccccttcctgctgagagagtgctgtgctccttgcccagcctgtgccccccaggcacgccctcaccccggttcttcctcgctgcccagctgtctccgccacgcccaagtccaccctgctcccgtgctcggaagtggcctctttcacgccccacgtcccagtcccagtatacagcaggtgccacatatttgctgaattttctgaggggcagagcatgggtcctgggctgacgtgggtccagatttcggctctcaggcctgggcggctggcccctttggaagtgcagttg

SEQ ID NO: 33050 - DNA, 2051 bp, Artificial sequence
  DNA replication origin
tccaacagccgcccagcctctctctcggctctgacacggaaactgaggctcctccagccataagtgaaacagtgggatgggaacccagacagaccatgtcattctcctgccccgagctcagggttcttcccctgaagttcccaaagccgacgcaggtccccgtctctccagggctggatgaagcttgggggaggaggccgccgacccggctcccaaaccccacgaggacaccaggtctcctggcaacagaaggcccaggaccctcagccccttggatcccaggggagggcctgcccagggggtcttcagcccctgctggagcctgagtcccgggttggggaacgggcgagggcagccaggccctccccgcaggagcccagcctcaggccggaggccgtccaggatttacagatggggacaatccgggagaggattaggggccggaggtcggtgattaagggagagcctcgggccgggggattaggagacggcactctcagctgtggagtcatggccagatccgtggcaggtgcccaggattaagaaagggagctgctacgggtgggggagatctcgggttcccgggtgatcccgacggggcagatgttcaccgaactctcgccgggcgccggggcacacgatgaccacacaggcccagccccaagacagacacatgggatgggcctgtcagccccaggcaggtgggagggctccttggaggaggtggcgtgtgggtggatgagatggtgaggggagggcagtggctgaagaggggcagcaggtgcggaggttgatgctccgggttcccttcaaggccggtgggcggcctcgggaccaggggacatgactggggagggctggagccagggaggaggtagaggtgacagggaaagaaggaccgatgtctggagaggcccatgctgacagccgggaggccagaaagggggacggggaggcatctggcaggagagaggcggccagcgcacagggtgcgaggctgaaccgtggggtggggggtgaggcagggcccggcccaagtgagtggggggctgatgaaggtgacttgaatatgtgggtttttaggttttttttatttttttgagacagggtctcactctgtttcccgggccggagtgcagtggcacgatcatagctcactgcagcctcaacctcctgggctcaggtgatcctcccgcctcagcctccagagtagctgggactacaggtgcacgccaccacgcctggctaattttttaactttttgtagagatgggggtcttgctatgttgcccaggctggtctcgaactcctgggctcaagcgatcctcccgcctccgcctcccaaagtactggcattacaggcatgagccacagtgcctggacaaagatgtccgttttcgagcagggaacatagggaaggccctgaagagagcggggaggccttggccaccccgacccctgacccctccacgcagaccagagggcaggccaccgccacctgggatatgggtccatgcacaccccaccatcctgcacacgctgggccttcctgccgtgaccagagccagacaaaccctcgcctcgccctgcccccggggccatccccccaggataatggggggtttattcccacgccctaatgctgggattcatcactgcggatttgcagagctgcacccccaggctgatctcccgctgacccactcagccatctgaggcggggcccaggggccgcctgtcctggtggggtcttggagcagctcctccccgaccagtcctctcggggaccccaggggacataacagatcctggctttggggagcatctcgtctgtctcccctcacacggggcctccccagctgaagacaattcagaaacacagacctgcaagtcagcagcagcaggagacggcagggcggccacagggcacttagccctggaactggaccgagggcagtcaggaagccgccagcctctctccacccgacacctgccctgtgccccccagagctcccagggcacaaaccccggatctgcccaggtctccaccc

SEQ ID NO: 33051 - DNA, 1695 bp, Artificial sequence
  DNA replication origin
cactgtttcacttatggctggaggagcctcagtttccgtgtcagagccgagagagaggctgggcggctgttggaggagggctgagctcacatcggtgtcaggtgccgggggccccactgaagccactctggagtgagagggggtccgaggcttcttccggtcccccaggtgtgagagctgaggccggaaggtttccccagggacccagcctcatcccggcctccggagctggtctccctccctgcctgcgagggccaagctggacaaagtggcaggacccccgcgtttccgaggaaggggccctcgtagaggcctcactgttacctgtcggggatgggttttaaatacaggatttaatgatggtcactgatgtttctgtgacagctgaggggggcctgtccctgctcagcactggggttggacaaggagggcacagggtgcccggggagtgctggggcccgcctgggtccctatggtggccggatggggaaagggctgccggacgcggctgcacagagtgtgagggggagtggggttgggctttgggccttcccctgaccccaggtcccctctctggggtcctgtcttctggagctgcctccccctccccagggcgagaggcaggagagggtctcccaaggtcactcagtctagtgttgggcaaggagagggttggggtggagagggttggggtgcaccggcagagacagtgacgccctgcagggctctggggtcccctctgccccaggcctcggtttccccttggtaggggacatgcgtgggcgcccttcttccttctgacctctggctggtgacgacgagggttgcggccccaagccctgcttggaggcattgtggttggaacgggcaggcccagccccacaagggaccctcagggtggccaccccacctgtcccttctcctaggcccctctgctctgacccccgtaatccccaggaatactgccctgctgggcaagatgggctgaggagtcctttctggggacacaggagcagaaggctcaagggaggtggtttccagacagtgtgggccgtggataagaggacagtcctggggtctcatcctgcagtcccacttccatcagaggggaggtgtggtacctgcccccagctcaccccaagaataaagggggagaatgtctgttaatcatcacctggaaaggaggccttcatgttatatggccgtttaaaaccaggtaccccttggcggtttctaggtcctcctggtggtttctaggtctccttggcggtttctaggtcccccttgacagtttctaggtctccttggtggtttctaggtcttcctggtggtttgtagatctccttggcggtttctaggtcctcctggtggtttctaggtcccccttggtggtttctaggtcctcctcgtggtttctaggtctccttggcggtttctaggtcccccttgacagtttctaggtctccttggtggtttctaggtcttcctggtggtttctaggtcctcctggtggtttctaggtcctcctggtggtttctaggtcccccttggtggtttctaggccctcctggtggtttctaggtctccttggcagtttctaggtcctcctggtggtttctaggtctccttggcggtttctaggtctccttggcagtttctaggtcccccttggtggtctctggagccccctgggag

SEQ ID NO: 33052 - DNA, 1698 bp, Artificial sequence
  DNA replication origin
actgggacttcaccatgctgctgttcatggtgggaaacctcatcatcatcccagtgggcatcaccttcttcaaggatgagaccactgccccgtggatcgtgttcaacgtggtctcggacaccttcttcctcatggacctggtgttgaacttccgcaccggcattgtgatcgaggacaacacggagatcatcctggaccccgagaagatcaagaagaagtatctgcgcacgtggttcgtggtggacttcgtgtcctccatccccgtggactacatcttccttatcgtggagaagggcattgactccgaggtctacaagacggcacgcgccctgcgcatcgtgcgcttcaccaagatcctcagcctcctgcggctgctgcgcctctcacgcctgatccgctacatccatcagtgggaggaggtgaggtggggcgggggcggggccaaggcagcaggggcggggctataatggtgcatgggcggggccaaggcagcaggggcggggctataatggtgcatgggtggggccaaggcagcaggggtggggctatgagagatctgggtggggtcaaggccccaggggtggggctatgggagatctgggtggggtcaaggccccagggatggggctatgagagatctgagtggggtcaaggccccagggatggggctatgagagatctgggtggggtcaaggccccaggggtggggctatgggagatctgggtggggtcaaggccccagggatggggctatgagagatctgggtggggtcaaggccccaggggtggggctatgagggtgcaggggtggagctacaatggtgcagtggtagagccaagacagcaggggtggggctatcaggttgctgagcagggtcgaggcagcaggggcagggctatgatgctgctggggtggagtcaagcagcaggggtggggccgtgatatctgggtggggtcaaggagcaggggcagggctgtgagggtgctgggcggggtcaaggcatcaggggcggggctatgagggttgtgctgagcggggtcagacatccgagtggagatatgagggttgtgctgggcggggtcaggcagcaagggcgggactatgagggttgtgctgggcggggtcaggcagcaggggcggggcaatgcgggttttgctggggcagggccagacatcaggggtggggatatgagggttgtgctggggcggtgtcagacatcaggggtggggagctgtggatttggggggtgtcctagggcgggggctgtggatttgggggggtcctgcagtgaaggctgtagaggtgggcggggtcctggggtgggggctgtgggtttggagggcgggggtcccggggcagggctgcagggtggggcgggggtcctgtgcggggccttggatttgggggagggggccaggagctcccgcagtgggggcgcacggggctggggctctgaaggtgggggccgggggtcagcgggtagggtgggctcacggcgccttcctgcagatcttccacatgacctatgacctggccagcgcggtgatgaggatctgcaatctcatcagcatgatgctgctgctctgccactgggacggctgcctgcagttcctggtgcctatgctgcaggacttcccgcgcaactgctgggtgtccatcaatggcatggtggtgagcgccgcgggccctgacgga

SEQ ID NO: 33053 - DNA, 2677 bp, Artificial sequence
  DNA replication origin
cacagagcaagacctgatctctaacaactaaagaaaaatttacaacatggccctgaattgggaaagtggtatcaccatgccaaagaaataataaatgggccaggcatggctgctcatgcctgtaatcccagcactttgggaggctgaggcaggcggatcacctgaggtcaggagtttgagaccagcctgaccaacatgctgaaaccccgtctctactaaaaataaaaaattagccaggcgtggtggcgcgcacctgtaattccagctactgtagaggctgaggcaggagaatcgcttgaacccgggagcagaggttgcagcgagctgagatcacaccattgcactccagcctgggcaacagagccagactttgtctcaaaaaaaataaataaaaataagtaaaagcaaaaggaagaggccgggcgcggtggctcacgcctgtaatcccagcactttgggaggccgaggtggggctgatcacctgaggtcaggagtttgagaccagcctgaccaacatggagaaaccccgtctctactaaaaatacaaaactagcttggcgtggtggcgcatgcctgtaatcccagctacttgagaggccaaggcaggagaatcgcttgaacccgggagcggaggctgccgtgagccaagatcgtgccactgcactccagcctgggcgacaagagcgaaactccgtcaaaaaagaaggaataataaatgaagttaggtcccagatactccttgcttcctagctgagatgtgctgactgttaagaagggttagttatgggagccctcggccgctacagtcaggttagtggccagtgagcctttgtccctgcctggggagtgctgtgccccagcgtccagccacatatgggacttgggatgtgtttggtttggacacagagcaggtgggcattgatggggtcaggagctacagagggaagacccgccagtgcccctccccagagcctggcacagctgcccaggctgaggcagcccattgtctggctgccacccgcacatgcggtcccatttcctgaacagagccccgcggctcccctttcccggccgggtcagctgaggacttggtgcggcaggacctcctgggccggcctggtgtctctgcccgccctgcccctctgctctggcccagatgctccctggaacttttgccccctcttgacctcacagatgctctgatctcagaggctgcaaaaggcgggacccagactctcgcccttggggtctcagtttccccaggagtgaagcgggcaggtagaatcagccctggccctcctgccaactcactgtgacaagtgtgcaaaccatgtcatctacctgggtctccatttctcttggttacctctgaacatggggagctcaccacctccagtgcttggcagagggtgggcgctgggcccttgaggaccgagggctcctggggcgtgagcacctgcccaccaccgcccctcctgctggccttgcagaaccactcgtggagtgaactgtactccttcgcactcttcaaggccatgagccacatgctgtgcatcgggtacggccggcaggcgcccgagagcatgacggacatctggctgaccatgctcagcatgattgtgggtgccacctgctacgccatgttcatcggccacgccactgccctcatccagtcgctggactcctcgcggcgccagtaccaggagaaggtctgagggaggcgggccccggcctgggttctgatgggggaggcgggcctggatctggggtctgagagagagtcaggccaggccctggggtctgatggagggaggcaggcccggtcctggggtctgaggctggagggaggccttgccctggggtctgagggcggaggtagtccttgtcccggggtctgaggggaggggcgggcccggccccggggtctgaggggagaggcagtctcagcccttcactcagcttcaagtggcgcgctcagggcagagaccgcgtgatggggagcaggggaccctgggggtctgtggctgtgattaggaggagaaacggccggtggtgagaggttctctgaccctgtgacagggagggaggtccagagcctggagatggacgtggggcgggggctggggaggggatgcaggctgggcaggaaggggtgagttgggatcagggcaggacagggtcagtctttggacatcgggaagcccccgggctgaaggggcattgccaggaggctgggcccacctgggggtctctaggccggctcaggatggggctgggttagggaagggcctggcggggtctgagaggcctggggttgcttcaggacacgccggtggccggcagtcagggccaggcttcagggagagcaaggctgccccactgctcagatgcggcctctggcctgcagcgtccattgggttaatcctaggcttggcagtggaggggacacgggggagctgggaggggtggagggagattaggattggccccattggcagcccctggagttgggcctcatgcaccactctgtgcctcagtttccccatgttaggcggctggctggtcctggctgggagccaagtgcccccctctcccgcgccccgagcagtggctggctgggtcagctgggccccgtgccaggcgccctgctgtccggaagccacgggcctcacaccca

SEQ ID NO: 33054 - DNA, 1059 bp, Artificial sequence
  DNA replication origin
gcttcagggagagcaaggctgccccactgctcagatgcggcctctggcctgcagcgtccattgggttaatcctaggcttggcagtggaggggacacgggggagctgggaggggtggagggagattaggattggccccattggcagcccctggagttgggcctcatgcaccactctgtgcctcagtttccccatgttaggcggctggctggtcctggctgggagccaagtgcccccctctcccgcgccccgagcagtggctggctgggtcagctgggccccgtgccaggcgccctgctgtccggaagccacgggcctcacacccaaacataagctggtgccaccacccgcccgccgtcacgggttccgctgagctcagggcagctgcggccgggcggggctggggcggaagtgaggctggagctgccggggggcaccgtcctggggacagcagggcctggcacccccgcccagcacccacgctcccttccctgctcaggaggggctgacccgatggtttctggaaagatcatcagggaagggccagagcccccgggaagggggtcctgtgtgtcagggtacctggggcctctcctcgtagagtcaggtgcccacccattcctcagggatagggttgctagataaagttcagggcacccggcctggtgcagtggctcctgcctgtaatcccggcactctgggaggccgagacaggccgatcgcctgaggtcaggagtttaagaccagcctgagcaacacggcgagacctcatcgctacaaaaaattaaaaaattagcagggcagggtggtgcacacctgtaatccccactactcaggaggccgaggtgggaggatcccttgagcccaggagttcaagaccagcctgtgcaatatggcgagacctcatctccacaaaaaataaaagaatcagccaggcgtggtggcgcacacctgcagtccctgctactcaggaggctgaggtgggaggattgcttgagcccataggcggaggctgcagtgagctgtgattgcaccactgcactccagcgtgggccacagag

SEQ ID NO: 33055 - DNA, 1754 bp, Artificial sequence
  DNA replication origin
ccagcctcgcctccccacagtacaagcaggtgcccctgtgcccgctgcaggccgggggcggtgtctgacccagcctcgcctcctccccacagtacaagcaggtggagcagtacatgtccttccacaagctgccagctgacttccgccagaagatccacgactactatgagcaccgttaccagggcaagatgtttgacgaggacagcatcctgggcgagctcaacgggcccctgcgggaggtgaggcgggcgccgggcgggcgggaggcagcctccggtacagggccggcctccctctcctggagcccaggagccggtccctgagggaggcgaggtgcctaggctgcagcaggagggactcgagctagacctgcgtacacaccctcccctccccgccccgtgagcctctgcacccccaggacccccgccacccccgccttgcttcccgctgcccccttagcagaactgcctgggtctgtgcctgacagggcggggcagaagcagggcagggggtggggagggaggagccgcagaggccccgctgagcaccaggtcctgggggcactgaggctgattggagcgggtttaactcccagctctgttccggtagcctgagtgaccctgggcaagtttcccagggttgcgggaacaaatacccacaggctgagtggcttgaacagcggagattcggcctcccaccgtcctggaggccggaagcccaacatcaaggcgtgggccgggccgtgctacccccccggagcccctggggaggatccttcctgcctcttccggcgtctggggctccaggcgcccttggcttgcagattgatctccctgatctctgcctccatctgctcacagccttctcccctgtgtgtctctgtctcttcttgtaaattcatccgtcgttggatcagggcccacccggttcctcgtggcctcgccttaactgggccatgtctgcagagaccctatttccacataaggtcctattcacaggaaccgggggtcaggatgtcagcctgtctttctgggagatgtagttcaacccacaacacacatcaaacagttattgagcgccgactgcgtgccctgccgtgtgcttgaaggtcccaccctcaggaagcggggcctagggatggcggccgtgatcacgcaggcagcagagagcagctctgggaagcggggagggacgaggacggggaggcgacatcagcaaggccgtgtgtgagccaggcagggtgtccccggtgtagcacctggctcgggcagaggccccgaggaggggctggaggagctgggcgaggaggcgggcaggacgggcctgacactagggacctcgggccccgggaatgcctctgggggggcgtgtacacccgttgctcccaggaggcacacactgcggttcgcttcgccaagaatgtttaattgcatttgatgactacggtttccattcattcatttgtagagatataacactcagaccacaaaatgcataaaatgcggtggcttttagtattaacagagtgctgcacccgataccacagcctcactccagaacattctcatgggcccaaaaggagacctggggtgttagtcaccagctcactccccgtccccagcccctggcaacccacgctacttagtcattatttaggtgtttaggagttgcaaagtcaaatctttaaacccacatatggccaggcgtggtggctcacgcctgtaatcccagcactttcagaggccgagacgggc

SEQ ID NO: 33056 - DNA, 1867 bp, Artificial sequence
  DNA replication origin
gaaggcgcgccgcatcatggggtactcctccagcacctcgttgaagttgtccacgctcagcgaatagaggcggcagtaggtgtcagcccgcacgctcgccgtgcggcggccccgggtgagcaggcagatctctgcacgtggcgcgcaggggggggttgctggacgaggcgggcgccgcggccctccccgcccaggcacacggcccggcctctgcaccttggccagcgtgggcgcttcccacccaggctctccctggtgccggccccggccccatccccggccccatccccggccccatccccggccccatccccatccccggccccatccccatccccatccccggccccatccccatccccatccccatccccggccccatccccatccccatccccatccccggccccggccccggccccggccccctggctctgcacaccgcgggggtcgcgtgccccctccccctccaggcgcgcccccctcaagctcacccccgaagtaggagccatcggacagcttcatctccttgttgcccttagtgagcacgctgaccacgccgtgctggatgaagtacatcttcttcccgatggtgccttcgcggatgatgtagtcacccggctggaagacctcgaacttgagcttggtcagcatggccgtgacgaagttggggtcggcgttggcgaacagcggcatggaggccaccagcttccggcagttgaagttgacgatctcctgcaggggggaggcagggctgggtccgctgcggaccccactcccgcttccccctcgccctgcctctgggaccggctcacctctcggaccccagtttcctcgtctgagagacgggctcagccccgtagccggaaccgagctgctgccgccaaggacgggagaaagaaaaaacgctcagtgccccttcgccgtttgacaccgtattggcgacatctgccaatacaatcggaccaggaggggcggctgtagacaagagcggtggaaaggaggccgggtgcgggggctcacgcgtgtgatctcagcatttgcggaggccgaggcgggaggatcgcttgagcccaggagttctagaccagcctgggcaacacggtaagacccccgtctctaccggaaaaaaaaaaaacagccaggcgtggtggtgcaggaagtcgaggctgcagtgagccgtgatccccacaccactgccctccagcctgagcgcagaacaagaccctgactcaaaaaaaaaaaaaaagaaaatgggggaaaaataaggccgggcgtggtggctcacacctgtaatcccagcactctgggaggccaaggtgggtggatcgcctgatgtcaggagttcgagaccagcctggccaacatggtgaaaccccatctctactaaaaatacaaaaaattagctgggtgtggtggcgggtgcctgtaatcccagctactcgggaggctgaggcacgagtctcttgaacccgggaggaggaggttacagtgaaccaagatcacacaactgcactggagcccgggtgacagagcgagactccatctctctctcacacacacacacacacacacacacacacacacaccagtggaaagctacattcggtcagactatcaggtgatttttgaaaaatcaacatgaaaaccaagggtctggagatgaatcaatggtgtgggaagtcagggcaattccccttagcaaaggcagcttctaaggacggcaggaacgttccagcttcgttctgtgtggtggttacaccacgttccctttagggaccagctatcgagctgtgcccttatgacctggggcactttttggtactttttttttttttgagacggagtctcgctctgttgtccaggc

SEQ ID NO: 33057 - DNA, 1900 bp, Artificial sequence
  DNA replication origin
tcgaggtcttccagccgggtgactacatcatccgcgaaggcaccatcgggaagaagatgtacttcatccagcacggcgtggtcagcgtgctcactaagggcaacaaggagatgaagctgtccgatggctcctacttcgggggtgagcttgaggggggcgcgcctggagggggagggggcacgcgacccccgcggtgtgcagagccagggggccggggccggggccggggccggggatggggatggggatggggatggggccggggatggggatggggatggggatggggccggggatggggatggggatggggccggggatggggatggggccggggatggggccggggatggggccggggatggggccggggccggcaccagggagagcctgggtgggaagcgcccacgctggccaaggtgcagaggccgggccgtgtgcctgggcggggagggccgcggcgcccgcctcgtccagcaacccccccctgcgcgccacgtgcagagatctgcctgctcacccggggccgccgcacggcgagcgtgcgggctgacacctactgccgcctctattcgctgagcgtggacaacttcaacgaggtgctggaggagtaccccatgatgcggcgcgccttcgagacggtggccatcgaccgcctggaccgcatcggtgagcgggccgggggcgtggccggggcgggtgccctggcgggggaggggcgtggccaaggcatcaggagagtggcttggacagtggcagggggaagggcgtggctgtggcatcaggggcacggttggggcagagacgtggccaaggcatcaggagtgtggccatggcagcaggggcgtggctggggcaggggcagcggctggccgctcctaggacccctttgggtctagaggctgattttctgacctattgtcctacttcagccagaggcagcctgtttcccaagggagggaatgcacagggtgtttgcggttgtgccgaatgctcggtgagcacctgctgtgtgctgggggtgcaggggacagacccgggggcccactcagactcccagggaggcttatggactggtgatgaaatcacacacgactgggctgtgtgccagcagggcaggtggggccggtgggcttccctgagttgggaatgcagagtggagaccagggtaagggatgccatgtggaaacggggaggaagatgtgttcgtggagtggacacagcacatcccaaggccctgaggtggaaaagaggcctagagtccagagagccagggaggcctggaggaggttggggaagaaggggaggccagacacacagggcccagtgggcggcagggagagtttagactaaatcaggagcatcagggagccatggagggttctaggtgggcggaggacctggtcagattgtatccgccaaggcgggccgtgtccaggagggagacggtgacctggcctctcaggggggcagtctctggggcagggaggggcagagccctgatgactggatgtaggcgccagagagatggcggctcatgctgctgttcgtgggaatgggaatgaagaccatggctgaaacgcaggacaggtgcgacggagtggtgtcagggagctccctggtgtacagtaggaagctctccacaacttgctctatacagtgagtatgcaacccgttcctgagtatcaggtgcttaggttataacttctgtatacagcaggtgctcagcacaggctgtgtacaggcaggtgttttcggtatgcctgtggcacactggaggcagtcattacataatcagcgtatacaggtggtacacatgcatacttggtgcacagtgatacctgctccatgtacacagcaggcattaaatacctgtttactgccaggcgcggtggctcac

SEQ ID NO: 33058 - DNA, 1058 bp, Artificial sequence
  DNA replication origin
acgagaggcgcgagcgcgcggagtcctgggggtccaggccgccggcggcgccgggtgaggccgagtccctgcggtccgggctgggcgcggcggcccgggcagcgggcgtgggccccaagcgcggtgtggagctgctggccgggcgtgtggaggccgcggggccgggggcgccgtgaggcagcgagggctgcgaggcggacagtgggcgcgacgcgcggctcaggcggcgcgcgggcagggcgggcccagcaaggggggcggcgggcaggccgccgtagggcgaggtccgcggtgcccgggggctggcgggcgcgcccggggggctggcggggggcgggggcccgggtgaggcggcggcaggtgcgggccccgggggcgggcggcgcacgaggcgcggcgagccgagcgccagcggccccacgagcggccgcgccacctgcgggcagaagctcatggccgccgcctgctgcagcgtggcgatggccgaggtgacctgcggcggcggcggcggcggcgggaagaggcccacgcgctgacccagctcggcctgctgcaccatctcgcggtcgtacttgacgatctcctggatgatggcgttctcctggttgttgaatacgcccgagttgaggtcatgctgcaccttgtgcaggaggatggaattcttcttgcctgcgggagagggggcgttagcgtgtgcacagggagcgcctgctgcgtacagcgggcaccgagcacctactctgcaccgcgggtgcgcacacagtgcttgccgtgtagagcaagcatgcatttaccacctactgtatacaataagcacatatgtagcatctctggcctatagtatggatattgagtacctgccatatacaggctgagcacctgctatgcacagccagcatgcatgaagcacctgcatacagaaagcagggcttttgttttgctttgtttctgagacggagtcttgctctgtcgcccgggctggagtgcagtggcgcgatctcggcccactgcaaggtccacctcccgggttcacaccattctcctgcctcatcctcccg

SEQ ID NO: 33059 - DNA, 1156 bp, Artificial sequence
  DNA replication origin
actcctcccacatgatgctcaccgccctgcactgctacaggtgggcgtctccggacggcgtgggtgccgctcgcctcccaggggcgtcttctggctagcagggcacagctggcaaggctgggtctagctgggggcagggactgggcagagtggatctgctgtgtctgtggggcctgtgtagaggccctgaggctgtgtgccccgaatgtaggtggtcctggcagctcccctcctgtggcccgacagggagagccgagcatgggcgctgccccttcctgctgggcatttcttggcaccgcgatgtgtggttagatctggagcacgtggaggtcgttccagcagaatctaccggccacgggagctgggaatgctcaggatgcggggtggtggccctggcaggaggggacctcgtagccgccctcggagctgaggctcccacagcagcgtggggggcggcaggggtggggcgaggaggcttctgggaacatttcctccccctgtactgatacctaacccaggatgtttggggaggggcggggcgaggggtggggcgaggcctgcaggagggtgggcttccctggacctcaagtggagggggctgagcgcagggccaggatgctggtcactgggtggccctgtgagctcccctcccttcaggagtcctccgctctgccacaggaagggcctgaccttcgtctctgtgcacgactgttactggactcacgcagctgatgtctccgtcatgaaccaggtgcccccgtagtctgagcctcagtccacccatgggtggggcccccacactggggcgttgggtaggggtggtgcccagagcctgcctgatcacccctggggatcctctgactcctgcccaggtgtgccgggagcagtttgtccgcttgcacagcgagcccatcctgcaggacctgtccagattcctggtcaagcggttctgctctgagtaaggcgctccctgaccccaactacctggattccccccccaccccaaaacctggcctcagcctcaccccaccctgcttccaaccccaggccccagaagatcttggaggccagccagctgaaggagacactgcaggcggtgcccaagccaggtaggcgggtgggcagcctcgcaagggtggctcgaactgcgggccag

SEQ ID NO: 33060 - DNA, 2281 bp, Artificial sequence
  DNA replication origin
aaccgcttgaccaggaatctggacaggtcctgcaggatgggctcgctgtgcaagcggacaaactgctcccggcacacctgggcaggagtcagaggatccccaggggtgatcaggcaggctctgggcaccacccctacccaacgccccagtgtgggggccccacccatgggtggactgaggctcagactacgggggcacctggttcatgacggagacatcagctgcgtgagtccagtaacagtcgtgcacagagacgaaggtcaggcccttcctgtggcagagcggaggactcctgaagggaggggagctcacagggccacccagtgaccagcatcctggccctgcgctcagccccctccacttgaggtccagggaagcccaccctcctgcaggcctcgccccacccctcgccccgcccctccccaaacatcctgggttaggtatcagtacagggggaggaaatgttcccagaagcctcctcgccccacccctgccgccccccacgctgctgtgggagcctcagctccgagggcggctacgaggtcccctcctgccagggccaccaccccgcatcctgagcattcccagctcccgtggccggtagattctgctggaacgacctccacgtgctccagatctaaccacacatcgcggtgccaagaaatgcccagcaggaaggggcagcgcccatgctcggctctccctgtcgggccacaggaggggagctgccaggaccacctacattcggggcacacagcctcagggcctctacacaggccccacagacacagcagatccactctgcccagtccctgcccccagctagacccagccttgccagctgtgccctgctagccagaagacgcccctgggaggcgagcggcacccacgccgtccggagacgcccacctgtagcagtgcagggcggtgagcatcatgtgggaggagtccagcgagtggatgaagttgggcgggaagccgttcttctgcttacgtgtgttgggctttctgaggacggaacaggtgccggtgggggcggcccagggacacccctaactggccgctgtctccaccgtggctgctctccagacccccggccaggccccagcccgggccccccactcaccggctgatgtctccgttgtgggtgtaggtgatgctctgaattccacctcctatttgctaaaaaggggaaggggccggtgagtcccacccgaggcccagcacggtggtggtacattgaggtggtggtacactggggtagtggcacgctaggatggtggcacactggcgcgggatggggtggcacactggggcggtggtacactggggtggtggtacgctggggcactggtacactgggacgctgttacactgggatggtggcacactggggagggatggggtggtacactgaccttgaccttggagtccaggcgatagggctggatgacggggacgcccaggggtgtgacccactccaccacagagcccatgtgggagatgaggcgggcactctcggtcagccagtgctgtgggacacaggccgtctcagggcagggggctcaggccggggatcccgtccacttgcttagggagtcctggccgagcggggacaggacaggacgtacctggatggcccgggtccccgagaacatctcctgtagactcttgaagacctggcgtacgagatagtgagaggcctcccacacgaactcctgcagagggcgggcagcaggtgcaggtcctcaggggctggcccgttcacgccctactcccccctatttcagagccactgaggcccaaggcctagggcctagcaggggggcaggggaatggggcctggcgcccacgcagtcagcaagaaacgcccaagccctaacaggcagccagtggtctgggggagcagccagggctcctgctgggaggctgggtcgggggcacacccgtctgagttttaaatggcagtgaaaccaacgtgttcgcagcgcgacatgcctggcgcacctggggaaagtcgctcagctcccggaggcgcttctcaatctgcaggcgcccgccatagcgcgtgaccccgtacaccaccgtcatcaccgtctgcttcaccaccttgcgggtgatgaaaccttccagcacctgtgccacccgcatgccccgctgggcgtcctgcctacggaacacctccacctgcacggcgggtgggccgggggcgcgggtcagccccgctagcagcccaggggccaccaagcacccatgaagcccccgccccagccccaccaca

SEQ ID NO: 33061 - DNA, 1346 bp, Artificial sequence
  DNA replication origin
ggctgggtcgggggcacacccgtctgagttttaaatggcagtgaaaccaacgtgttcgcagcgcgacatgcctggcgcacctggggaaagtcgctcagctcccggaggcgcttctcaatctgcaggcgcccgccatagcgcgtgaccccgtacaccaccgtcatcaccgtctgcttcaccaccttgcgggtgatgaaaccttccagcacctgtgccacccgcatgccccgctgggcgtcctgcctacggaacacctccacctgcacggcgggtgggccgggggcgcgggtcagccccgctagcagcccaggggccaccaagcacccatgaagcccccgccccagccccaccacatcctcaggacaggccaaggtgagggcacctggggccgagactcagggctcacattgcccccacgccgagatgcccccgggcagcagggcacaccctacctgcgcggccacgccgctgtacacgtcctgcggcacatccgagggctccaggttgacggaggcggcgcccacgctgtcgcggcccagagcagcataatgctgcaggccgttgcaagagccgtcctgaggaaggggcggcaaacgggagatggaagctagagaggcagagacgtgtgggaccccaaaccaccccccaggtcgagccgttcctagggccgtgcaccccccagccaagtgcaccggagcccccgcacgctcccgggagagaccaggagccatggctcccgcacactctaggaccacctccagagaataccacgagcgaaggtgaaatctcacaccctcaagtcgagccccaggcccagtgcacactgcacggcctcgggggccagacccagctggctcacctgatggacggggaggtgggagacataggcggcagggtcggaggcgcgcacagcgttcgccacctccatacagcaggccagcgtctgccagggttcctccgcgcccatccaccactttcggccctgcggggacagcggatggggggcagtgaggcccgggcccgatccctgagcccgctgggaggctgtgttgcggggaggtgggaaatggggaggagacgcacacccgtgatagtgaacacgggacgcatgtgggcgagagacggggcggtggctggatgagttctccatagccacggatggaggatgggagctgcgggtggaccgggctgaaacaagcgtgtccggagctgccgggggaggagggtggacagaggacctgggggcgccgggggaggaagcagctcggcggatgcaggggaggggggaacgtggggaacgcgggggccctggggcaggggagaagggagaagcaggacgggcaggg

SEQ ID NO: 33062 - DNA, 1187 bp, Artificial sequence
  DNA replication origin
tcacctcctccgcaaaggccaggcgcttccgcagcggctcccgcttcttcaaccccgtgagattgaccaggtggatcttgagccaatccaggccgtgcgggccgagcgggcggccctgggcgaactccagcagggcccgcgccacgtcgctgcccaggtggttgaagtgcggcgggcaggggtaggtgcggccgcggaagtccatgttgtgcggcagccagaagacgcggtcccgcaggtgctgcgccagcgagaggcggtacagcgcctccgcccgcaggctgtgcatctcccgggccaccttctggcagtgcgccagctcacggcgcagctcggccttgcgggcgggcgcggcgctgtgcggcaggtgggcctcgggcggctggggcgcctcggagggcggggccggcacgcctagctgggggcagcccttggcctggaagagctgcagcaccaggtccagcacgcgcccgttgacgcgccaggcgcagttgcccagttgggtgagggcgtccagtgcgccatgcagcgcggtgggcgggcaggtttccagcagctcctggtgctgcgtggcgccttccaccgtgcgcatcagcttggtggggctgagcaggaaagcaccagagtgcggcgatgtccagggcagcggggggcaaagcatgggtacatccaccgcctcgaaggtcagcgtgggctccgcggccttctccagcagctgcacgtaggccgggtgcggcttcaggatgccgatctggggtgcgacaggcagacgggtcagggccccggtgctggggctttcctgttcccaccccttaaacttgggtgagaggggccggctccccggccaacaagaaaccagtgtggcctcccacgaacagaagccacctccagaaacggccggacacctgcatggacacccatggtgtgtcccgagtcctgggaggtactgacggctgcgctgagatcaaggctccgcccaaaggcgccaaccccatggggtccctggtcctcccagcgggatgccccccagctcaggagggcactgcctggcacctgctggacgttgcggaaggaatacacgtggtagagcacggggacaagccgagaggaacgatgcggcttgtccaggctgcatggcatctgcgtagcctgcaccagcatctccgccagcagcttgcccagctcca

SEQ ID NO: 33063 - DNA, 1063 bp, Artificial sequence
  DNA replication origin
cgcccctgccaccccctgcacggtgcccagtgtcccttctagaggggtcgaggccaggagggtcaaggcctttggtttgcactgctggcactgactttacccgcagcccgcctttccccgcgtcagcgatagccaccagcaacttgcaggagacgcagaaacgcgtgcacccatgctgtctcggggtcctgggagggcaggtcgccctctggcaagcccccaacctcactacccccatccctgcaggatgggcgtgtgtcctacccgaagctgcacctgcccttgaagaccctgcagtgcctctttgagaagcagctccacatggagctggccagcagggtgtgcgtggtgtccgtggagaagcccacgttgccaagcaaggaggtcaagcacgcggtaggggctgagccggggtcccgtgtccgccgcaggggctgagccggggtcgcgtgtccaccgcacgggctgagccggggtcccgtgtccgccgcaggggctgagccggggtcgcgtgtccgccgcaggggctgagctccgtgtatgcggttgaattgctcatgccctggtctggtcatgcagggcctaggaactcagcctggctgccgctcagggaaaacttgtggggtcccgaggttgggtcttggcctgtgcttctgcgcacactgcagctgggcttttgctcttggctgcgtcaggcacgctgaagccggcagagggcaggccggggtgaggagctacccggaacacacagcagggaccttgagggccatgaggtctctgcagggagctgcggtgacccccgtcctgtgagcctgggtcccaccagctgccacggggctcaccgggcccgttcatcccccgcagcggaagaccctgaagaccctgcgggaccaatgggagaaagcactgtgccgggcgctgcgggagaccaagaaccgcctagagcgcgaggtgtacgagggccggttctcactttaccccttcctgtgcctgctggacgagcgcgaggtggtgcggatgctcctgcaggtgcgtcttcctccgcgcggccgggtccccgggc

SEQ ID NO: 33064 - DNA, 1574 bp, Artificial sequence
  DNA replication origin
caccgagacctgcaggctagcaggaggtggtcacgaggttcccctggggtctgtggaagcccagcgtggggctggcccgtccctcgagcaggccgcctgcaccacaggtgtctggaacagatgagccaggaggggctgaagctgcaggcactcttcaccgccgttctgctgtctgaggaggatcgggccactgttctgaaggccgtgcacaaggtgaagcccaccttcagcctcccgccgcagctgccgcccccggtcaacacctccaagctgctcagggacgtgtatgccaaggtgagcccacgtgggccccggcagacttcagtccttatagctgccctttgggggttcctggagcctcagctcagaccaatgggcctccccggtgcccagggctcacctgggctgggccctgaattcctcccttcctcctctgagaagatgggaggacccagagctgggagggtcttggccctgagggtgtgggctcagggggacgaggtggtcgggggccgcagagagagggtggggtgacaggagagcagtgcgtttgagtggggctgccaggtgcacgcagtgggctcgtctgttactgaggtgtaattcacctgccataaaaccctcttaaaggtgtaattcagcgattttagtgtagtcacggttgtctaattctagaatgttccatcaccctaaaaggaagcctcgtccccatccccgtcactccccatcccctccccatctgtggatgagtctgctctggacattccatagaaatgggaccacacactgcgagaccttttgtgtttggcatctcccactgagcgtgacgtcctcatggtgcctccgggaggcgacctgggtcagggctgagtcatgctccggtgcgtggatggccgcgccgtgcccgtctgttcgtccgtttatgggacgttgggctgtttctacttatcgactgcgagtcatgcagctgtgaacgtttgtgtacaagcttttatgtggacgtgcgtctttgattctcaaagcgctaggctttagttgttatttttaattcatctatttctggatgggtcacattcatacagttctgagtttgaggagaaaacagccaacatctgggggtgcagtgaacggtctccccaggctctgccagctcccagcatcaccgcccctgccaccccctgcacggtgcccagtgtcccttctagaggggtcgaggccaggagggtcaaggcctttggtttgcactgctggcactgactttacccgcagcccgcctttccccgcgtcagcgatagccaccagcaacttgcaggagacgcagaaacgcgtgcacccatgctgtctcggggtcctgggagggcaggtcgccctctggcaagcccccaacctcactacccccatccctgcaggatgggcgtgtgtcctacccgaagctgcacctgcccttgaagaccctgcagtgcctctttgagaagcagctccacatggagctggccagcagggtgtgcgtggtgtccgtggagaagcccacgttgccaagcaaggaggtcaagcacgcggtaggggctgagccg

SEQ ID NO: 33065 - DNA, 1097 bp, Artificial sequence
  DNA replication origin
agtcactgcaacctctgcctcccaggctcaagcaattctcctgcctcagcctcccaagtagctggtactatagacacatgccaccacgcccagctaattttttggatttctaatagagacggggtttcaccatgttggccaggctggtctcgaactcctgaccttaggtgatcttcctgcctcggcctcccaaagtgctgggatgaccgacgtgagccgccatgcccggccagcaatagatttccaacaaggcttctttaaagagatacagaacacttaggcattgattggttggcaaaaatgcaacctgaggcggcacgagcaggagccgcgttttccctgcgagctagtggctcagcgtccaccggtgtagacactgggagcctaggagtgtgtgtgtggcagctccaccagctgggggggtcttgctgaggcggggtgcgaacttgcaggccatggttgagccagggagtgggcggttcagggtcctgggagtctgtgcagaggccctgagctagacagtgagaggggcaggggaggcgggggccacctggatagattctggaggcaagcccagaggaggtactgagaggtggacggagggagttgtcacagaccccgggttctgggcctgtgcacctggagggtctgagcggccagtgaccggggagacgtggtgctgcaggtttcggtggcagcttgttagggctgctgagttctgtgaggctcgggtggggaggtgcggaggtggtggggtgcgtgtgtctggaaagcagcgggcagaccttacaacgttgttggcaagtatgaggaattcacgccttgggtcccagcgagctcagccacctgcacctcctggcctggctcagggtccagagagacgggtgctcgaatggggagggggtccctctcatgtcctcgccttctgcccctcacagtgctccaggcgcgggtgcggcagctgcaggctgagagcgtgtcggaggtggtggtgaacagggtggatgtggcgcggctcccagaatgtggcagtggagatggtagcctccagccacccaggaaggtccagatgggggccaaggatgccaccccggtgc

SEQ ID NO: 33066 - DNA, 1453 bp, Artificial sequence
  DNA replication origin
cgctctcgtctttcccgcagggaccgccggtggcgtctgcggccccaggaggagctcgtccgccagcccccaggagcaagaccaagaccgcaggaaggactggggccacgtggagctgctggagggtgagcgcgacccccacggcggcccgggagaggagagtccgctccctgctgccgggagaaaaggcaaaggctcagattctgagacaggctgagggcggtctccacctctcgggtcccaggacacgcccagacggcgttgctgaaacatctcttgcaccgctcatgggccctgtccttgctgagcaggctccttcctggagctctcgtaattccccctccccagaaccccaccaggtgctcccactttccagggacataggtgaggcccaagattatgtctggagagaccccccccccggccccgccgccaaggccacatgtgcagagccaggatgtgaaccctgaactgactcagctgtcctggcttggctctggggggtaggcgcctaatggagactggatgactgcgaaacttgggagggacagcccaggctccagcggtggcaggccctcgtcctggcctggctggtggtgtgggagggaggtgggagcttccctgtgcttgcttcccgccggtgcttctgtcccacatcctgtctgcgtccattaggcagccgggaagggagaggcgggagaacctttataaagggaaaaaacctggccaggtgcggtggctcacgcctgtaatcccagcacttttgggtggccgaggtgggcggatcaagaggtcgggggttcgaggcctggtgcggtggctcacgcctgtactcccagcacttttgggtggccaaggtgggcggatcaagaggtcaagggtccgaggcctggtgcggtggctcacgcctgtaatcccagcactttgggaggccgaggcgggcggatcaagaggtcatgagttcaagaccagcctggccaacatggtgaaacactgtctctactaaaaatacaaaaattagctgggcatggtggtgaacgcctgcagtgccagctactcaggaggctgaggcaggaaaatcgcttgaacccggggagactgagacaggagaatcgcttgaacccggaaggtggaggttgcggtgagccgagatcatgccattgcactctagcctgggcaacgagggaaattccatctcaaaaacaaaacaaaacaaaacaaagctctcaactgttaatcctaaaagtatctcctgagttttggagcactctgaaggcggacatcacgcttgtctttttatttcagcaattttttttttcttgagacggattctcaatctgttgctaggctggagtgcaatggtgcgatcttggctcactgcagcctccgcctcccgagttcaagcaattctcctgcctcaacctcccgagtagctggaactacaggcgcgcac

SEQ ID NO: 33067 - DNA, 917 bp, Artificial sequence
  DNA replication origin
agtctccattaggcgcctaccccccagagccaagccaggacagctgagtcagttcagggttcacatcctggctctgcacatgtggccttggcggcggggccggggggggggtctctccagacataatcttgggcctcacctatgtccctggaaagtgggagcacctggtggggttctggggagggggaattacgagagctccaggaaggagcctgctcagcaaggacagggcccatgagcggtgcaagagatgtttcagcaacgccgtctgggcgtgtcctgggacccgagaggtggagaccgccctcagcctgtctcagaatctgagcctttgccttttctcccggcagcagggagcggactctcctctcccgggccgccgtgggggtcgcgctcaccctccagcagctccacgtggccccagtccttcctgcggtcttggtcttgctcctgggggctggcggacgagctcctcctggggccgcagacgccaccggcggtccctgcgggaaagacgagagcggctgagcggggccgggcgtgtgggcgggggcctccataaaggcagaagccgaagggtcgaagggcaaaggagccctaaacgcagcggaaactctcggagcacgggcttaagttggaaagaaactaagacagcgaaggtggaagggccccgccgcggcgaacacgggcgcggaaccgccgagagagggttcctcgcactcgaggtgcagcaggtcaaaggttaagagccctaaacaccacacctggggtcaggaggctgcataagaaaccacgagtcaaaggtcagactgcacggaggagcctcagtcgaaaagcgggcaagggcgagtggaaagcggggccgggtcggtgggctgcgcacgcccaggtgcaaagaggcaaaggtcaaagcgcca

SEQ ID NO: 33068 - DNA, 1595 bp, Artificial sequence
  DNA replication origin
aaggtggaagggccccgccgcggcgaacacgggcgcggaaccgccgagagagggttcctcgcactcgaggtgcagcaggtcaaaggttaagagccctaaacaccacacctggggtcaggaggctgcataagaaaccacgagtcaaaggtcagactgcacggaggagcctcagtcgaaaagcgggcaagggcgagtggaaagcggggccgggtcggtgggctgcgcacgcccaggtgcaaagaggcaaaggtcaaagcgccaaaggccccggccgcgcggggaggagcccacgccgtggcccccgggctgcctggccgtctccctttgtgttaccttctttgccggggagtcccgggcggccgcaaggccgtagggctcgtttgagccccgccgctccgcggccccagcaaagtgccgacattacgcacgccgctccaggccaccccaccggcccgcgcctgcgcatgcgcccgcgccgcctgccgggagttgtggtttcatggtcgacggaggctgcgaagggaaaccccagccggaagtagactcccaggatgcagcggaggcgcgaaggcatgcgccggtggacgctctgattggttcctcctgctgtttttaaagggagggggcgggacagagctgttgccgtggcaactgggaggcactctcaggctgttttcccgaggacctcaaatccggactttttttctgtttttctttcttttttggttttgttttggacgcgttgtggcccaggctggagtgcagtggcgtgatcatagctcagtgcagcttcgaactgctggggtaaagagatcctcgcccctcggcttcccaaagcgctgggattgcagacgccgccaccgtgcccggctttttttttttttttttcaaggcatactcatctaataacgaggacagcatctgcaatttagagattcctgtccgcaaccttcattgctccaacgacaacttttgggtaagagtcattaggatgccgtctatcatggaggaagctgaggctcagagagggccaccaagttgctggaagacacagcacgtgcgacctcagggaggctgcaaggagagaaagccccagtccgcgagactcccagcctccagcttcagtttaccctccaatccccaagccctcaggggcaggagccgaatggagcggcaggcttggattcacctgctaagtggggtgaggtcaagggaatgaaataaacctcggagcctagagcctgccctggtctccgcgtgatcctgcctaggaggagcagggcgggagctttagaatggaacctggaaggtgtgcccacctgtgtcgttcagccggggcagcaggccagaggcgggagcgcctgctgtggggcagtaggcttgggaagggtgagaataggaatatctgggggtaactgtgttccaggctaatatcccagttgcaaaggggagctggtttggtggctcaggcctgtcatcccagcactttgggaggctgaggcgggcggatcacctaaggtcagagttcgagaccagcttggcaaatacgcaagcatgcctggcaacatggcaaaaccccgtctctagtaaaaata

SEQ ID NO: 33069 - DNA, 1041 bp, Artificial sequence
  DNA replication origin
aggctggagtgcagtggtgcgatcttggctcactgtaacctccacctctcaggttcaagtgattttcctcccttggcctcctgagtagctgggattacaggcacaggccaccatgcccggctaattttcgtatttttagtagagacggggtttcaccatgttggccaggctggtctcaaactcctgacctcacgtgatccgcccgcctcggcctcccaaagtgctgggatctcatcaaataaaagaaaagactaacgcataaggaatggtgaaatagttcagaagtcggtttccacccaagtttctggctctgccagcctgcaggggtgcagggggtgtctgtaggtcttggcacaccaggcctggctgattcagggccaggcaggtgaccccagtagtgggtgaggtctgaggtcacagcccgctggggcaccctgaggtggactgaggcaggtgagggagggtgctgccgtctgtcgaaaacattcccagccggtggcatcagtgcgctcacgcaggcgtcggcagcagcgtctggaatgtgctgtaaggaggctgccaggcccttccagagtgaggtcgagtcctcgttctgggctgatggggaaactgaagtgccagggtttggggatggaggatagcttgagctgaggcccccgagcccccgtgtggtcaggccccctaactgagccccagctacatctttgctccctctccccagccccactctgctcaaattgctcctctgtccacgcttgttcctgcctcagggcctttgcacttgttttgttttgagacagggtcctgttctgtcaacccaggctggagtacagtggcgccatctcagctcactgcagtctaaacctcctgggctcaagcagtcctcctgcctcagcctcccgagtatctgggaccacaggtgtgcaccaccatgcctggctaatttctttttttcctttggtggagactgggtctcagtatctcggttgcccaaggcttgtctggaactcctgggctcaagcgatcctcccgccgcagcct

SEQ ID NO: 33070 - DNA, 1043 bp, Artificial sequence
  DNA replication origin
cttctctccccgcaaattgtagtttcccgaaagccaggcccacaagggtgtgggaatgcgcgggtgggtgggcaggtgacgactggggacgtgtgtttgggcaggtaggtgggcaggagggaggatagccacgtagacctgtcggtggccggctggcggggcacgtcggaggcggcaggaatggggcggccccattcgcacccacacttgctcctcccttagagccataccccaggccccacggggaaccacccagcaaggcggctggcccccacccttcctctgcctgccccatgcgctgggccccaaaaggtgagcacagtgaccctcacagactcacagccaagtggaggcattgacaactggggaaaccgaggcctgagaggggcggcgacctccgctgtggggacacagctcccagcagcccagtcctggccctgcggccacagccccaggtggcacccacctttaaatagcaccaggctgaagacatggcgaccagcctgtcctgccggggagccctctggagggataaccggtctggctggacgctgggatgccttcttggtggctcaggcatctcctgaccctctcttcctggcttaggcgggtcacacagagggtgtggcaggtgccacagtctcagggacaggggtccccatggctgaggtccagcctggcctggcttcccacactagagccctgtggccaacaccccaagcttcggttccgcctctgtaaaatgggccagtaaagagacgtctggaggaagacaatgagaccctccacggagcacgctgggcagagggcgcggcaccagacactgaagaaatgtccaccgccttctcgccagcaggagcccaggtcttcccttcttagagtgtccgccccccaccgcggaagggtgatctgagggccttgtgagaaatgatggggatgggacccacagcggtgagactggccccaccccaggcgtctgagtttctttaatgacacctcggaaacatcactcatataccacacaattcacccacttacactgt

SEQ ID NO: 33071 - DNA, 1102 bp, Artificial sequence
  DNA replication origin
gtggcgccagcgggtgccctgcacgcggccgccgggatccacgcgcaggaagaagtgagtggaggagaagaggcgccgccagcgcacgtcgccctccaggtgcgggtagctgcgcggtccccgcgacgcgctcggggttcccgcggcgtccggcgcccgcgccagcagcagccaggccaggcccagccacaggcggcggcgcatgacccggcacccggttcgctgcgcgctcgtcgctcccgggcgtccgcggctctgccttcgcgcggcggggccaatggggcgcctcgggggcggggccgggttcgctggggcggggacgccggccaatggggtgcctcggggcgggggcggggtccacttgggcgggaccaggctagggcgccggccaatgggacgtctcgggggcgggggccaggtgcacaggggcgcggccgtgcgggactccgcgctcggcctccgcgcgtttgttgtttgtctcgcggggcgtgtccgtgagtcagccgagtccccgggcgggctaggacctcgggttgcgggggcgggagtgtgagacgcgggccgcagagacctggagggagacagagacccggagggagacagagacagaaagacggcggcagtcaagagacacaaggaagatgaccgggagagacgagagagacacagagacagagaggggcagaggcggagatgcttggggacagagatggacacgggaggtcctgccgcgtgcgtcagccgtgggaccagccaggctccggggcatgccctcgtgggacttctctccccgcaaattgtagtttcccgaaagccaggcccacaagggtgtgggaatgcgcgggtgggtgggcaggtgacgactggggacgtgtgtttgggcaggtaggtgggcaggagggaggatagccacgtagacctgtcggtggccggctggcggggcacgtcggaggcggcaggaatggggcggccccattcgcacccacacttgctcctcccttagagccataccccaggccccacggggaaccacccagcaaggcggctggcccccacccttcctctgcctgccccatgcgctgggccccaaaaggtgagcaca

SEQ ID NO: 33072 - DNA, 1651 bp, Artificial sequence
  DNA replication origin
gtggaccccgcccccgccccgaggcaccccattggccggcgtccccgccccagcgaacccggccccgcccccgaggcgccccattggccccgccgcgcgaaggcagagccgcggacgcccgggagcgacgagcgcgcagcgaaccgggtgccgggtcatgcgccgccgcctgtggctgggcctggcctggctgctgctggcgcgggcgccggacgccgcgggaaccccgagcgcgtcgcggggaccgcgcagctacccgcacctggagggcgacgtgcgctggcggcgcctcttctcctccactcacttcttcctgcgcgtggatcccggcggccgcgtgcagggcacccgctggcgccacggccaggacagtgagtgcggggcggcgggggcctggggtggggaggcggcgggtgacggcaacgcggccgccgtcttcacggtgacctgcgcccgcgggggagtcccggaggctcctctgtgcagcctcggcctcagtttccgtggtctgtgagatgggtgcagcctgcctggtgggagggttgcactgttaaagcgaaggctgcagcggcggacccggctcaggggcagagaagcgtccgtgtggtacaaccctgtgggtggggccacccatctgcaggtgggaaactgaggctccagaggggctggggcaggcccagctgcatggcggaagcggcggggggctgacctccggactcctgacatcacagaatccagtcagggctgcctgagtcggggccccctctgcttcttcccagacaccccatctggcaggtgaggacaaggaggcacacagaagggatgggacctgcccagggtcacactgacaggggtggcggagctgggtccccacagggcccaggacgtcacggagcgggcgtctctgtccccagggtctgccgagcacactgaggtaggccctcagtgtttgtggaatgtcaggagcaagaggagaggctgggcacagcaggggatgtgggtacctggaggccaggggagtcggtgtccccgccgggcggggggcactgggaagggggcccgggcccgctggctgccgcctgaatcaccaccatcagggcaggtaatcaccccctgtccttcccaccgctttcatctgggcgccaaggccctcattaggccgcacgtgacgagggcggacaggggactggctgggccggtccatccatggcgggcatggccaggcggggtggcctcgggccggggcagaggcctggctccgctgcctgacctggaacagtctctgcctctctccaagcctcggtttccccagctggacggtgatgggggtgagggctagctgagggctctcctgcccttcgtgcattcgctggtcactaatcgggcaccttgtgggtgctgtgctccgcatgggggacccagtggtgacagagacgcccaccctcctggggctcccagagcagaggcgcgcagcagttagacacgtgaacaagggcgcaggtgggtgcacagaacagtgaacggttggccgggtgcagtggctcacgtcggtaatcccagcactttgggaggccgaggcgggcagatcacgaggtcaggagatcgagaccatcccggctaacacggtgaaaccccgtctctaccaaaaata

SEQ ID NO: 33073 - DNA, 2330 bp, Artificial sequence
  DNA replication origin
ggccaggcggggtggcctcgggccggggcagaggcctggctccgctgcctgacctggaacagtctctgcctctctccaagcctcggtttccccagctggacggtgatgggggtgagggctagctgagggctctcctgcccttcgtgcattcgctggtcactaatcgggcaccttgtgggtgctgtgctccgcatgggggacccagtggtgacagagacgcccaccctcctggggctcccagagcagaggcgcgcagcagttagacacgtgaacaagggcgcaggtgggtgcacagaacagtgaacggttggccgggtgcagtggctcacgtcggtaatcccagcactttgggaggccgaggcgggcagatcacgaggtcaggagatcgagaccatcccggctaacacggtgaaaccccgtctctaccaaaaatacaaaaattagccgggtgtggtggcgggcgcctgtagtcccagctactcgggaggctgaggcaggagaatgacgtgaagccgggaggtggagcttgcagtgagctgagatcgcgccactgccctccaccctgggcgacagagcgagactccgtctcaaaaaaaaaaaaaaaaaaagaacagtgaatgacgtgaacaagggtgcaggtgggtgcgcagaacagtgaacggcggtgttgggaggcaccttgccaggggaggggaggtgcagggcgaggaaggggccaggggagatcgtgacacagacgccccagaacaaccacctcaaagacgttcctgtgtgtcctggaaggtcgggctgggaggctgccccgaggagctttcactttgacagggagctggccgggcacgcagggaactgtacacccagctgacaaagcggcagacacccaggccggggtgagcgagtgtgggtgaggagtggcggctggccccagggtccttgctggacaagacacttcagctcagggtggggcagggctcacccagggctacccacagacgatggcgtccaaatctggctctgccactcccaggcctcaactggcccctctgcaacgtgggctgctgagcgggcttggtaggacagctggcatacagtcggcgctcaagcatgtctgtggtgtcccataaaccaccggtgtcccactctaggccactgccagcccggcctccagtccagagtcccagtccggagtcccagtgactgtgcgtgggccgggcagctgagctgtgagggccgggctgggggctccatatggggtggtgtgagctgtgagggccgggctgggggctccatatggggtggtgtgagctgtgagggccgggctgggggctccatatggggtggtgtgagctgtgagggccgggctgggggctccatatggggtggtgtgagctgtgagggccgggctggggggtccctggggtggtgtgagctgtgagggccgggctggggggtctctggggtggtgtgagctgtgagggccgggctgggggctccatatggggtggtgtgagctgtgagggccgggctgggggctccatatggggtggtgtgagctgtgagggccgggctggggggtccctggggtggtgtgagctgtgagggccgggctgggggctccctggggtggtgtgagctctgagggccgggctggggggtctctggggtggtgtgagctgtgagggccgggctgggggctccatatggggtggtgtgagctctgagggccgggctgggggctccctggggtgctgctggtcgctggctcattgacagttatcagtggtctgggtgggccctgccccttctgactcccacatcccaggaaccctttcccaaccttcctcgtggtgttgctgcccccctgacgtccgtccctctgggtgtgtgggagcccccccgccatacacacacacagatgctgctcttgggctgagctgcagggacagcgctgacctggccctcccacggggtcctcatcgatctctgcactcccccagctcgtgggggccgtcctgcttcccgttccctctgcctgctccttgctcctccctcacatgctggggggggctcctggtgtcagtcacggctctgggggatcctgagtgtccgtcgtggtcgggaggggactcgtggtcccgggggtctcctggtatctgtcgtggtcctgagggccctgcacgaagcacagcggacagcagcggtgctgggggtgagccagcaaggccctccccgacccccgcctcccccaggcatcctggagatccgctctgtacacgtgggcgtcgtggtcatcaaagcagtgtcctcaggcttctacgtggccatgaacc

SEQ ID NO: 33074 - DNA, 1189 bp, Artificial sequence
  DNA replication origin
ggctgggcggcgcgggcagggtggggagggtgggccggcctcacccccgcccgcagcgactctacaccgtggactgcaggttccgggagcgcatcgaagagaacggccacaacacctacgcctcacagcgctggcgccgccgcggccagcccatgttcctggcgctggacaggaggggggggccccggccaggcggccggacgcggcggtaccacctgtccgcccacttcctgcccgtcctggtctcctgaggccctgagaggccggcggctccccaaggtgcctgggctggtggcgaggggcccggccacgcttgttcttccccctgcgggctctgtaagcgctgagtgcccaccgtgtgcgggcgctgtggacacagcccaggagccctccaggggggtcccagcctgagggggtggtggccaccaagcaggttcaatcctgagttggggacctcgaggacccaacagggcgcctctcgggctgaaggacgcagacgtcgaaaggtcgagggggacgtcccaggcagggcccggcagaggcaggggctcggggtggggagcacgttgggagtgggggcaggagcggaggggaggggagggggccggggagacggtgacagacgccgcagaacaccagcctcgaagccggtcccgtcccgggaatctgcaaatacaacgccttgcgaggacaaaggcacctgcaggtgggacggagatggaggagcatccagggtggggggtccagggccccagtgtcctcacagggtcctcacgacaggaggcgggacagtgagagccagagagagatggggatgggccgcgctgtggccgtgaaggggaggaagggccctaagctgagggacgtgggtgcctccagatgctggggaaggcgggaacggttccgcactggagcccccgggagggaccggcctgctcctgccttgatatgagcccagtgggacccagtttggactctggcctccagaaccgccagaaaataaacgtagtaagccatcaactttgtggtcttttgttacagcagacgtcggaaatatgcacacggtgtctgaaactgttctcatgacaaaataagcctcagatcccccggggaagggcggaggccaacgcctcggtgttcctccgatcccccgggaagggcggaggccgacgcctcggtgttcctcgga

SEQ ID NO: 33075 - DNA, 2187 bp, Artificial sequence
  DNA replication origin
atgcctggcccggggtgcagccagctcgggcacagctggcaaggcgtggggacctgcgggctcagggggccggggcagtgggttcatctcagttgctgatgatcccaccatcctgggatccaagaatcagacgatggagacagctaacggagaggagcctccagcaggaccacccgtgtccctccacggtagacggctcctgcgcgtgggaggcgcgtgccccacgcccctacctgttctccaaagactcccgccctccgctctgcaccacactcttcactgtgtcccgcgacgtgtctgcgtcagcccccttggccaggtaactcggatcccacctgtccggaccgtgcgcagggcaccttctgggctgctgccgcaacgccgtggcgggccctcctggtggccgccctctggggtcgcgcgtggcgggccctcctggtggccgccctctggggtcgtgcgtggcgggccctcctcgtggccgccctctggggttgcggagccgagagaagcgttgggacttccatgactgtggccgccagggcagagtgccagccctgagggcgtccacatctcaaccccaggacccgcggactcggctcctcacgaggtaacgtacccggtgccctaagacgaggttgcatggaggacaccgaggtagggaggttacctcggatcgtccttgatctccggactgagagaacaagtgttttaggccccgagtctgcgcgacaggctgggccgcctgctccgggtcacagtcccccggccgagccgttttcctgttggaagatggagttttgagtcaggaggcgttgagggagacaaggctcgggttctgtgtgtccgtggtggttcttgggagttggagttggagctggagaggagggctgggcaggtgaggcttgcagcggcgggacctggagactcggaactggagggcctttgtcagagatgctgccggggtgtgcgcctgcctgtgaggctgggacttccctcgcgtggagtggccagaggagcaggaccgattggttcgccccacccaggcatgagcctcgggggcgctgggcccagaggacaccggcaccctggtgggggctgtgaggccgcattgctcgaggtcagacagcagtaagaagtggccgcccctggtgtcttccctgccccaggagcctgctgcacgacaggacagggccctggtaaggcccgcacccctgcgtccccgggcccctcgcgcctgcagccgccctctccccatccgccctgccgctcaggagtgcttcgtaagcggaagcacagtttgcaacagtttggggttgtcttattttcactgctggcgatttcctggggagccgctggttctgtgcccccaggccgctcctctctgttggggggcccccacctcactgcctgaggacaacgggggtccccaggtttgggcttgcgaataagctgctgagggctctgtgtgaaccgggatttcactgccctgggatgtgcggagctgtacgcccattccacgctctgttttagaaacaaagaaacaactgctgacctgtttcttttttttttttttttttgagacggagtctcgctctgtcgcccaggctggagtgcagtggcgcgatctcagctcactgcaacctccgcctcccggattcaagcgattccccgcctcagcctctcaagtagctggaattacaggcgcccgccaccacgcccggctaattttttgtatttttagtagacacggggtttcaccatgttgaccaagatggccttgatctcctgacctcgtgatccacccgcctcggcctcccaaagtgctgggatgacaggcgtgagcccccgcgcccggcctgctgacccgtttcttcgaggcacatgttacgttcctgcgtggggtgccagcaagttttatttcagctgtggtgacctgtgcagctcccagtgacaactcaagtggcgacgccctccgactggccaacgtgggccgatctcccctcacactgccaacctggggacatcctgggtgcagccctgtcctccacccactccatgccagccaaagatgtccccagaggccgcctggtgtcccctggggtggggctcgcttctgtctgcagggtgagcagaagctctcgggccgggcacgaccctcccttcccagaagggttttccgtgtca

SEQ ID NO: 33076 - DNA, 1304 bp, Artificial sequence
  DNA replication origin
aaccaccacggacacacagaacccgagccttgtctccctcaacgcctcctgactcaaaactccatcttccaacaggaaaacggctcggccgggggactgtgacccggagcaggcggcccagcctgtcgcgcagactcggggcctaaaacacttgttctctcagtccggagatcaaggacgatccgaggtaacctccctacctcggtgtcctccatgcaacctcgtcttagggcaccgggtacgttacctcgtgaggagccgagtccgcgggtcctggggttgagatgtggacgccctcagggctggcactctgccctggcggccacagtcatggaagtcccaacgcttctctcggctccgcaaccccagagggcggccacgaggagggcccgccacgcacgaccccagagggcggccaccaggagggcccgccacgcgcgaccccagagggcggccaccaggagggcccgccacggcgttgcggcagcagcccagaaggtgccctgcgcacggtccggacaggtgggatccgagttacctggccaagggggctgacgcagacacgtcgcgggacacagtgaagagtgtggtgcagagcggagggcgggagtctttggagaacaggtaggggcgtggggcacgcgcctcccacgcgcaggagccgtctaccgtggagggacacgggtggtcctgctggaggctcctctccgttagctgtctccatcgtctgattcttggatcccaggatggtgggatcatcagcaactgagatgaacccactgccccggccccctgagcccgcaggtccccacgccttgccagctgtgcccgagctggctgcaccccgggccaggcatccagcaaccttgagcagtggggtccggcttttcagaaggggccaggaacccgcgtggctgaggtgtgaccgaagcgtggggcagaggcgctgggccctggcgctttaacgctggtgtttctggttttaaatttcacgacccagtgacactgccaccctgctacctcgccagcagccctcctgggcttaacttcgggagagcagttttgctagccggccctgggtgccaagccctgcaggaggcgcagacccctggagacaggaccggactctgcagagcccgaccagcctcccagcttggccttttcctgacgcacgggcgcagaaggaaagccacagcaccggcttctctttgtaagtagtgtattttaaatagctttcaagatacacatattttttcctttaaaaaagtctgttggagcagttttgttcttgaattttgctggtc

SEQ ID NO: 33077 - DNA, 1496 bp, Artificial sequence
  DNA replication origin
tattttttcctttaaaaaagtctgttggagcagttttgttcttgaattttgctggtcatcctcatggtcccgagcccccctactccgggtcgtggaggcggccgagggggaggctgggggcccacgtggcccgtcctggcggcacctgcagcactgggggagccgctgaaccccgtgcttcagcgctgggggagccgctgggccccgtcttccgccacaaaccatgcatggccgccacgtgagctcaaacgtccgtttatttcaaagcagtaataatttaaaattataaaaatctttccaccgctgaacgtttagagggtgaggttagacagaggacggggaggctggggacgccccagaggggaccatgtggcccacgccttcccaagccagggggccggtgggccgggcccgggtcctgccctggaacaggcgggacctgcagcgctgaccagccaagcgtggcgccgccggggcacccagtctgtgggtgccgtgtggcgctggctgagggtgggtgggaaaggccccgtgctttcccgacggccgacgtgggctcacgagttgcttgtggcgttctcgttgctgggcgagctggaggaggacgatgacgacgaggaggagaagctcaccccagtgaggccaggggggttcgtggccgtgttctgtcccgtgaggctttttcggcagacggggcagctgtcgtgctttgtggggacagaggcagggacgggagaaggggcaggttagaggcgggagggccgcggtcggggtgggggggcgggtgggcggggcactcacctgctccagccagggcacgatgcagccgtcgtggaacaggtggttgcagggcagctgccgcacacgctcacccagcgcgtagtcgtccttgcacacagggcactcgagcccggagcctgcgggagtgtgcagctgcggtcacagcgggcgtggggggcctgccgagccttcaagggcaggctactccacagcctcagccggaggccgcccctgagcccagcgaggggagaaaagccgtgtgtgtgtcccccgggctgccagaggggacctggacagaaccctctcctcccagcccaccttcagggaaatgctcgaggccgggtgcggtggctcacgcctgtcatcccagcactttgggaggccgaggcaggaggatcacctgaggtcaggagttcgagacctgcctgaccaacatggtgaaaccctgtctctactgaaaatacaagtatgagccaggcgtggcggcgggtgcctgtaattcccactactcgggaggctgagctctcatacctacgtgctcctcagtgacggggacggtggggagggcctggattttctctttatctgccggtggggggcctgtgttttcaaactgattgaggagctgaaagacaagaggcgagagtgccgggagctcctcgggggcccggcccggggctctgaaacgcgaggctgcaggacctgcaaaagcaccg

SEQ ID NO: 33078 - DNA, 1306 bp, Artificial sequence
  DNA replication origin
gtcaggagttcgagacctgcctgaccaacatggtgaaaccctgtctctactgaaaatacaagtatgagccaggcgtggcggcgggtgcctgtaattcccactactcgggaggctgagctctcatacctacgtgctcctcagtgacggggacggtggggagggcctggattttctctttatctgccggtggggggcctgtgttttcaaactgattgaggagctgaaagacaagaggcgagagtgccgggagctcctcgggggcccggcccggggctctgaaacgcgaggctgcaggacctgcaaaagcaccgaggccgcgtttgtcctgggccctgggccccttggagcccgcccggggtcggagatcactgtggagcccacgcggcccccccgctcctgggtcccctgacggtggaatgggggaatgggcggaggcccgcgctcctgggtccctgacagcggaatgggggggggggccgcgctcctgagtgccctgacggcggaatgggggggccgtgctccggctggtgggctactgtgagggtcgggtcctgccagtgacaaaatgctccaagggctcctcagcaaggctgagacgggtggcacttggaagcaggtcagggcgcgacctctcgggaagagggaccgcgtggcctcctgaccatgtgactgtgggcgagtcctccccgcggttttgctacaacgttccgcgtgaacacaggagaacccccaaagttgccaagactcagaaatggcaggaggaaggccggagctgccccctgtgcccgccagagcgtggaggctgtgcccgcatcccctttgacctttgtggggcttcgtgggtccaggcagtggggcagctcccaggggtgggcagcccagccctcccccagcaggcactctgggccgtggccacgctgtacctgtgtgatgatggcatccaggccgttggccccccaggcgtagtccatagggtttgagtgcaggactcccctggaggtggaaggtggggttcaagtggctgacgggcagctggggcaggtgcgtctatccaccccactcaccaggggcccaggctggggatggggacaggcaccccctcctactcaccagggaccctggctggggatggggacaggcacccccacccactcaccaggggcccaggctggggatgggaacaggcaccccctcctactcaccagggaccctggctggggatggggacaggcacccccacccactcaccaggggcccaggctggggatggggacaggcacccccacccactcaccaggggcccagg

SEQ ID NO: 33079 - DNA, 1838 bp, Artificial sequence
  DNA replication origin
gctgcttggttggtttcttggatgaaagcgaaacttccaccgaggcatctcacaccagcggggcaggctctgcccaattcctgcctccctgtctgcgtctccctcccacccggcacccagcagggcccgtcttgctttctcctttgtctttgtgccctagcgcccccagcagactgcacgggcctgagcccccgaggtcacgcccccctcctctccccagcacgtggaccagcacctgttcacgctgccgcagggctacggacagtttgctttcggcatcttcgatgacagcttcgagatccccacgttccctcctggggcgcaggctgacgacggcagggaccctgagagccggcgggagagagaccatccgtcccggcaccggtacggcgcccgacagccccgcgcccgcctcaccacgcggcgggccaccggccggcacgaaggcgtccccacgctggaagggtgagggggccccgggggtggccgcgagggccccacgccttgaggtcggaagttctggcgcttagaatccagcacgggttccacggaaacgtggcatcatccataggctctctggagaggccgcccggccaggccctccagccccctgtgactccccacacggcccttcggagacagaagtatgccggttcagggtgtgtgggttgaccacagagtggggcaccgtgtgcctgccaggcccacgtgctctggagactgctgtccacacgcgtgtcgtcaaacgctgtccaggccttgggcccagaacagagcctgggggagccgtcgcagggccccactcctggtggaacggagcctgggggagccgtcgcagggccccactcctggtggaacggagcctgggggagccgtcgcagggccccattcctggtggaacagagcctgggggagccgtcgctgggccctgctcctggtggaacagagcctgggggagccgtcgcagggccctactcctggcggttgatgcttttatggttgtgtgtctcacctgctggaaatgtcatctttaaaagtggctaattttgccaggcacggtggctcagtgctgtatttgcagttctctgggaggtcaaagagggaggatctcttgaggacaggagtttaagaccagcctgagcaatgtagggaggccccatctctaatttttaaaaagtagctgaggctgggtgaggtggctcacacctgtaatcctagcactttgggaggccgaggcgggcagatcactgaggtcaggagtttgagaccagcctgaccaatatgatgaaactccgtctctactaagaatacaaaaattagccaggcatggcggtgggcgcctgtaatcccagctactcaggaggctgaggcaggagaatcacttgaacccgggaggcagaggttgcagtcagccgaggtcgtgccattgcactccagcctgggcaacaagagtgaaactctgtctcaaaaaaaaaaaaaaaaaaaaaaaaagtagccgagagtggtggacctcttctgtggtcccagctacttgggaggctgaggcgggaggatcgcttaagcccagcaggttggggctgcagtgaaccaagatcaagctgcttctctcctgcctcggcattagagtgagaccctggctcatagtaaaataaataaatagaagctaatctagaagctgatgctggccctgcccttggtgctcaccacggacctggcaggcctggcgcctctcctgtgcgtggggcggcctcaccccgtgactggcgctctcttttccaggatcatccagcagctcgtcaacggcatcatcacgcccgccaccatccccagcctgggcc

SEQ ID NO: 33080 - DNA, 1720 bp, Artificial sequence
  DNA replication origin
gcgacggctcccccaggctccgttccaccaggagtggggccctgcgacggctcccccaggctctgttctgggcccaaggcctggacagcgtttgacgacacgcgtgtggacagcagtctccagagcacgtgggcctggcaggcacacggtgccccactctgtggtcaacccacacaccctgaaccggcatacttctgtctccgaagggccgtgtggggagtcacagggggctggagggcctggccgggcggcctctccagagagcctatggatgatgccacgtttccgtggaacccgtgctggattctaagcgccagaacttccgacctcaaggcgtggggccctcgcggccacccccggggccccctcacccttccagcgtggggacgccttcgtgccggccggtggcccgccgcgtggtgaggcgggcgcggggctgtcgggcgccgtaccggtgccgggacggatggtctctctcccgccggctctcagggtccctgccgtcgtcagcctgcgccccaggagggaacgtggggatctcgaagctgtcatcgaagatgccgaaagcaaactgtccgtagccctgcggcagcgtgaacaggtgctggtccacgtgctggggagaggaggggggcgtgacctcgggggctcaggcccgtgcagtctgctgggggcgctagggcacaaagacaaaggagaaagcaagacgggccctgctgggtgccgggtgggagggagacgcagacagggaggcaggaattgggcagagcctgccccgctggtgtgagatgcctcggtggaagtttcgctttcatccaagaaaccaaccaagcagcgtgggccgccccaatccctggcccgggcccctggagggaaaaatttcctccgccgtgcgggcagggagagccggggaggcgaggtggggacaggctggcgctcggggccccgagcaaggctgacacgatcgggaagcacgaggggcgggcgactcacctccaacggtggccggctctggtctgtgggagctgtggagggggcagaaccattttctgtgctcctggggagagagtgcaggtcagcagtgccggctaccctgtgcccccatgcgccaggcgctccctcccctcaaaagcctatgttgggagagcaggaattgtccttggcactgcttcccacccgccaccgccccagcatttggtgccgtaacccgctgctgcttccctcgccagtaaaccacgggtttctcgataaaccggtgcagaccccaacagcctcctaagcgtgagaatgtgggtagggcccccgtggccccttccccggagggcctgggtcaccagattagccgccgaggctgagggaggtgagcggctgcacaggttgccggcactcccctctggccccggcccggccatcacagaagagaacggcacgctgctgtctgcacagagaaaagtgctcccggagccacagacaccagggcctgacggccccacactcggcggggcggacgccagcacagcccacacccctacaacagctgaggcccggctggctcttccagcctcttcaacagggggctgcattacctggtctcttccggaagctcctcgataaaaccagactcgcatcttggacagatataatcctgcaggagagaacaggaggccgggtcacggtgacgccggcatcacctgcaaacccccccaagtgtgaggacaga

SEQ ID NO: 33081 - DNA, 1691 bp, Artificial sequence
  DNA replication origin
gagtagctgggattacaggtacgtgccaccacgcctggctaacatttgtatttttagtagagacggggtttctccatgttgtccaggctggtctcgaactcctggcctcaggtgattcgcctgcctcggcctcccaaagtgccaggattacaggtatgagacaccgcgcccggccagcactttttttttttttttttttttttttttttttttttttgagacggagtcttgctccctcgcccaggctgcagtgcaatggcacaatctcagctcactgcaacctccgcctcccgggctcaagcaattctcctgcctcagcctcccaagtagctgggattacaggcgcccgccaccacacccggctaatttttgtatttttagtagagacagagtttcaccatgttggccaggctggtctccaactcctgatctcagatgatccgcccgcctcggcctcccgaagtgccaggattacaggcctgagccaccgcgcccccggtgatggcggagcgtgccgagaattcgtggggcgtgggctgaaacgcatgtggtgcctcccggcctcaccaggagccgggccgcactttttctatattgtagatggtgcctcttcactctcccctcacggtgggttcatgtgcatctggcatcgtttgctcaccctggccttagtccctccccacccagcctgtgcttcagtggcaggagcaggtgaggcaggcacggcgtggtgtgggcgggggcccagctgtcggccctccccttgggcactgcacgccagacccccgcttctccccagagtcagtgggtgaggccgggatcttgcttgctggagaggtcccagcccctgcccctgcgaagactgaacagccccggtgcaacctgcatccccagagcctggggtcgaccttggctcccctcacagcactcccccatgcacggtgggagccttgtctcctgtttttgtctgtgttacctgggggtggtcttgggacccccatgtgagcccctggcgtgatgacacgtgccgtgtgaggccattttcacgttgctgcgatggagcacttgagactgggtcgttcatagagagcagttgatttagcttccagtttccagttctgcaggctgtgcgggaagtgtgtgtcggcatctgcccagcccctggtgaggccgggaggcaccatgcacgtttcagcccaggccccacgaatgctcggcacgctccgccatcaccaggggcccagccatccatgaggagtccgccctgtgagccagtgtctccagcaggcccttcagccctggggatcccgttgcagtgtgagatccacaggggatggcatccgtcctgctcggcacagctgtggcttgaggctggtgctggggaactgtgaacgtggttttgggactcacccacggctgtccctgggcagggtcctcacgtctcctctgggacatcaccatgttggccttgtgttgtccttggctctagggggacctggggatggggtcttgcaggggtgtggccagcgtggacgtggcctcccccgagccaggggaacgggctgtgtgcggggctgccagagcgtcctggaaatgccactgtggggtattggggcacccctccgagtggtgccacctgtgtgaggaggtgcccaggcactggtgacgcccgtcacggtggggcaggtcgg

SEQ ID NO: 33082 - DNA, 1349 bp, Artificial sequence
  DNA replication origin
gccactgaagcacaggctgggtggggagggactaaggccagggtgagcaaacgatgccagatgcacatgaacccaccgtgaggggagagtgaagaggcaccatctacaatatagaaaaagtgcggcccggctcctggtgaggccgggaggcaccacatgcgtttcagcccacgccccacgaattctcggcacgctccgccatcaccgggggcgcggtggctcaggcctgtaatcctggcacttcgggaggccgaggcgggcggatcatctgagatcaggagttggagaccagcctggccaacatggtgaaactctgtctctactaaaaatacaaaaattagccgggtgtggtggcgggcgcctgtaatcccagctacttgggaggctgaggcaggagaattgcttgagcccgggaggcggaggttgcagtgagctgagattgtgccattgcactgcagcctgggcgagggagcaagactccgtctcaaaaaaaaaaaaaaaaaaaaaaaaaaaaaaaaaaaaagtgctggccgggcgcggtgtctcatacctgtaatcctggcactttgggaggccgaggcaggcgaatcacctgaggccaggagttcgagaccagcctggacaacatggagaaaccccgtctctactaaaaatacaaatgttagccaggcgtggtggcacgtacctgtaatcccagctactcaggaggctgagacaggagaatcgcttgaacctaggaggcggaggctgcaacgagccgagatcatgacattgtaactccagcctgggcgacagagtgagactccgtatcgggaaaaaaaaaagtgcttacaactcaaaagaaagaaagaaagaaagaaaaaaaagcccaggccaggtgcagcagctcacacctgtgatcccagtactttgggaagccaaggtgggcagaccatttgaggtcaggagcttgagaccagcctagccaacatggccaaaccccatttctacaaaaaacaaattagctgggtatgctggggtgggtctgtagctccagctactaaggagggggaggagacaggcaggagcgggaggcaggaggcagaatggcttgagtccaggagatcgagaccgcagtgagctgtggtcccaccactgcgctagcctgggtgacagaaccagaccctgccaaaaaaaaaaagaaaaagagaaacagacaacgcaactaaaaacgggcaaagtcgggaggctgaggcaggagaacggcttgaacctgggaggcagagcttgcagtgagccgagatcgcgccactgcactctagcccgggcgacagagtgacactccatctcaaaaaaaaagaaaagtgggg

SEQ ID NO: 33083 - DNA, 1163 bp, Artificial sequence
  DNA replication origin
ccagagccctgacaatacgcaggagttgggtcgcagcccttggcgtcctcgatggcacccggatttcagatatgagtgagtgtccaggctgtcctctgtgacagggcagaggcttggagcagagaggtgacctttgaaacccctagggtgggcgttccagcagcagggccgacgtgcacaggccccgacgctggagtgggtgctgcagagagagggttctggacagtgctgtggcaccaggccccacggccgctgcgggcaggacagcgggggccaagaggaggccagggctggggcagatgagtgtgtatgtggccaggtcgggctgtcgtgagccggcagtgcgggtggcgggagcatgcgttgtgccctggactgagacgggaacccgggagcccgacagaaagccagtgatgcacagaggggctgagctcggcacatggggaccagagcggccgagcgctgtgccaggccacgtgggcgtgtgcagggcctcgtgcttgtccaggagagattcggggctggggctggcaagccagggtcctcagagggagacagcttctccctcaggcccttctggggctgcctgaccttgtggatgcacccagcaggagagatggtggtcggggcagctgcacagctgacttacgtcctgccctcagtgggggccagtgcagctgttccaggtccactgggtggtgctagcctggggagtcaccatgcagggagagcctgagccctgagctacccctccattcccagagacccacccaggcgatggagcggccctgggctcccggtcagctggcgggcggacggcggcaacccctgagcccagaggagccccgatagacccgacaccggcagaaaccaggggttcagatttgactgtgaagtctcagcgtgtttacgtggggcgtcccaatcccgacaccccaaacacaccccaagaaccgacgcctggggagagttgtcacggccactgtggcagagccacactgctcccacactaagctcagggccacagtggtggtcgttggctgcttccccttcccctttccctttttctttttctttttctgacacggtctcactctgtggcccaggctggagtgcagtggtatgatctcggctcactgcaacctctgcctgccgggtttaag

SEQ ID NO: 33084 - DNA, 1496 bp, Artificial sequence
  DNA replication origin
gttgcagtgagccgagattgtgccactgcagtccagcctgggtgacagagcaagactccttccaaaaaaaaaaaaaaaaggcgatgacgagggtgtctgggtgtctgagcagcaaagggagcgtcagccagagtggggcgtgtggcggcaggaaccagacaggccagctggagctcaggccacaggcggctgcgcagacccagactcgagcctgctgaggaggcactgactggagctgtgactgtagggtgtgggcgagagctgctgagggcactgagcccccaggaaccaggcgggcgcagggaggtggccctgcgtgccgtccttgcccctgacctccccgtctctgggtggttcctagggtggttccagctctgcctgccgaccccccacccccgaacgcctgcaacctccgcagtgtccccaagtggcggtgagaggacggtgggggtgctgggccctgccgcccacggtggcggggaagagccggcgtgggcggggagccaccaggaagtgagggctgctacggccagtgtcactgatggggccaggcgggaagtctccccagctgccccccggcccaccctgtcttctcctggtccctgcggcggcctggcccgagtcttcagaagacggcctgggtctgtctctggccgctgcttgctctgtgtgtctgcggttgtgccagataccgtgacagtgacagcctgcccctgcctctcaagcgtccggccagcaccctggagcggctctgcacagctgggttctccggaacgggctccctgcagcaccctgtgaacatggagcctggcgttgtgatcgggcaccagcaataccccgggaacctgtggatgtcggctgccctctctggccggctggcgctggggtctgcctcgggcagatgccggtgctgaatttcctcccacttagaactctgccaccatgaggaccttcctctgagcctcgggcgagccgtagcacccctggcactggcacggatgggcacctgtggggttccagtccctagtggtggtgcctgaagccacctgggaagaagaaggcagagttcggggcctgggccgaggcacgccctggggtgtgaggcggggccccagcctgggctgaggcagtggcttcgctcacgcctcgtccatccagcttgtcttgggagtgtgtggtgcgtggggcccagggacagacggtgtgaatgtgggatgtggtggcagctgctgagggcgggaagaaaggggtgcaggcgccgcacgtgcccgtgcctctggggctgcggggcccacacactgtggatcagccgggaagctttgggcaccctttaggaaaacagtagccagcacgggggctcctaccgaggccgagcactgcaccatgactctccctggggtctcctgatgtgcacagcttcccgagggccctgccacccacaggggccgagtcactgtcaccaggggcctgcctgccctggtcactgtcagtcatct

SEQ ID NO: 33085 - DNA, 1288 bp, Artificial sequence
  DNA replication origin
gggctgaggtggtgggaggagcgcttgagcctgggaggtggaggctgcggtgagccgtgatggtgccagtgcactccagcctgggtgacaagcaagacgctgtctcaaaaacgaattttttatgctgggaaatgggcacacctggcgtttgttctggggagggacggctgctccgtatctggcaatggggaaagtccccagccacaaccagtgccctcgaaacggggcgtctctgccgctggggagcttgcccggcggctgagtcaggggcggcactgctgctgctgagacacctgggctggctgtcgggaagctcctgcctgcctctgacgcaggggggactggctgccatgggctgtgtgcctgcccacgagggcttctcccaggcagctgggccgttccgggcctcctttgctgtcctgggctctgggatcaggctgaggccccgcgcagctgggtcattctctgctgggcagccttggcctcagtctcctcacctgccaagtgggtttagtgatgcgattcgctccccgtggcatctggtgggcacgtgtgtgcagagtggccggcacctggccgctctcctggtgactcgtgagggtgtcctgagcggggagccacacttgcggtcgggggctcaggcgacgacggcacaggggcagcagttgcccccatgaaaggctgtgatgaggccgagcgcggtggctcacgcctgtggtcccatcgctttgggaggctgaggtggacggatcacctgaggtcaggagttcgagaccagcctggctaacatggtaaaaccccatccctactaaaaatacaaaagattggccaggcgtggtggcaggcacctgtagtcccagtgacttaggaggctgaggcgggagaattgcttgaacctggaaggcggaggttgcagtgagccgagattgtgccactgcagtccagcctgggtgacagagcaagactccttccaaaaaaaaaaaaaaaaggcgatgacgagggtgtctgggtgtctgagcagcaaagggagcgtcagccagagtggggcgtgtggcggcaggaaccagacaggccagctggagctcaggccacaggcggctgcgcagacccagactcgagcctgctgaggaggcactgactggagctgtgactgtagggtgtgggcgagagctgctgagggcactgagcccccaggaaccaggcgggcgcagggaggtggccctgcgtgccgtccttgcccctgacctccccgtctctgggtggttcctagggtggttccagctctgcc

SEQ ID NO: 33086 - DNA, 2357 bp, Artificial sequence
  DNA replication origin
cggcccaggctgaatccgcggggagcccgggcggtgcgcgcgcgaaccccgtcctgtacatgcgggagactgaggcccgggcgggaggcagggcctggccggagcggcgcagcgggatcgcggccgggtgaccccacatccgcggcgttcccgacccgagaggccgcgaggatcccaggtgggatccctaagcccggtgagcctggttttgcaaacggagaaactgaggcccggcgagcagagagagggtattgcccggtggcgcggcgcggggcaggggctgggcctggcggggctcggaccccgagaataacgccaggggacccccgccgagcgcgtggttgggggcgccggcgcctcgctgcaggctcgcctcgtggagccctggccgccgccttggaggcaggcccaggcccggaacgccccaggcactgtcccggggtccgaccgcggcccgccggcggggctttgtgagcagagcctgcgttcctcccctcccggggcttggctgcgcagcccacccttcctccaggtgtttacagccgcccctcaccgaagaggaccctgggcctgggcgtgccgagtgctacttcctgctcgtttagggcagtgtttcccacgcggacctgatgtcaccttgggggaggtgggagcagcgctcgttgaaggtgctatttccaggccccttttccagggtttcggagtcagtaggtgtggaatgcgctcagcagtctgcatttctaatattatttttaggaatggggtctccctgtgttgcccaggctggtcttgaactcctgggctcaagcgattcttctggctcagcctcccaaaacgctgggattacaggtgtgagccaccgtgcccggcggtggtctgcatttttaacccgtgttgcccttcgccaggctgacgtgcaaagtggtgatttagtcgagccacccgtgctttatagatggggaaactgaggcgcgtggtggctcagcgggaaagtggcagagccggctcagtcgggagccgcttggccagcttgaggggagcagccgcaggaggtggaggggtctggactccccaccctgtgcccaggggaagaggctgcaggcattgaggatttactgtgctgtgtacgtagccgcccggctgttgctacgctttgacccgtaagagaagtccaagccccccagaagcagtgcagttccccgggagtagagacccaggaaggggctggagggagtcaggagaagccgcctgtctctgggtcacagaggaggagcgagtgctagagttggggcatggcgggagagcggggccaggcccaggagtggaaagagagaggtgtggtttcctctctactgaagccacagggcttcccctccccagcaggaggaacaaataaagtgaaatctcgggtgtggggcgaaggttggggagctgagactgagccttgccttactcctctgtctcccaggggtctcgctcttgcctcttccagctttctgtccccactggccgtggcaggagaggctggttgcctgacagcccgccagcctgggtgagttgcagggcagccccttgcagccccttgagccctgggacaggcctgggaagcccctgggaagcctggagtggtggctgtggggggccgacactgccttgactcggctgcacatttagctgctcctagagcccgcacaggactggatcctggtgtggtggagccacttcctcgccccgtggccttggacacggaggaccttgacctcctccgactgtcactgggcctggggagggccttcctgtagtgaaaggaactctgtggtgacaggccgctgtggtctttgccctcacagaatttacaggctggccagggagccagcatggaacagtgattgacaaatatttaatcatggacgttggtagattccttaagagcaaataactgcagagagggctgcgggggcctgcccgtgtccaccccgcgggtgatcccaagggcatctgcttgtgcctttggagcaggacgcaacaaggcgcccgtagacagcatggcagtgtcagaacttctccgtacgtggcaggaccctgtctctacagaagactaaaacaattagtggggtgtgttgttgcactcctggagtcccagctactggcgggggctgaggtggtgggaggagcgcttgagcctgggaggtggaggctgcggtgagccgtgatggtgccagtgcactccagcctgggtgacaagcaagacgctgtctcaaaaacgaattttttatgctgggaaatgggcacacctggcgtttgttctggggagggacggctgctccgtatctggcaatggggaaagtccccagcca

SEQ ID NO: 33087 - DNA, 1327 bp, Artificial sequence
  DNA replication origin
cgcccgggctccccgcggattcagcctgggccggcgctgccccgagcctcagttttcccgtcgtggtcagctcgcgcaagaggcgggcgcaagcgacccccaccccggccccggccttgcctcaggcctgcggcgcagaccctgccgcccgccgccccggcccgggcctcaccggcaggcgcgggacgatctccacggagcagcagtggcagaagtaccgtccgggatgcggcgacgcctcggccatggccgccgccacctactccgcgccgcccgccccccgcgcggcacccgccgccggccgtttgctgctccctcgccggccgacgcgcccgcgcacgctcacgcacggcacgcacggcacgcggggcggagcgggggcgcgggagcggcgaaagctgcgtactcggcgggcagcggcccgggcgacggtggccgctgagagacaaactaggcccggccgttgggcggggctccaagcgggggcggggcttccggcgggggcggggccaaagcaggcggcggaagagacgagaagcggggcgtgcgcggggcggggccgaggccctcctcccctcccgaagctgcccaggccttcgtgtccctcagtgcttccctacctcatcgccgtctcccctcacggtacttcagcccactgtccccaccgttcctggggctcgccaggcgccctctcccccgcccgctgcccggtgcagcgctctcccgacgcccgcgtggctttcttccaggtctttgctcaaatgtcagcttacaaggtcttctctgctgccctcctgctccgtggcactgattccctcccgatgcactgtcaggtcagctgcgcagcaaagggatttttggacccgcagcagcgcctgacacacagcaggcattccctcagcgctgcggaatacaggcagacccggggctcagggcgctgtctgggcctcactgggacccgtggggtcagacagaggctgaggtctgtgggttgtggccttgtttccaagatgctccacgggctgacggcccaggcgcctctcgggtgcggagaaggcaggaaacctaacccctgcttccaaatttaatcagtagaaacggtatcatcacccagcacaggccaggatcatttctgaggttagttctggcccaatcatgcatgcatttcttttttctttttttttttgagacggagtctcactctgtcacccaggctggggtgcaatggcccgatctcggctcactgcaacctccgcctgccgagggttcaagcgattctcccgcctcagcctctcgagtagctaggactagaggcacccgccaccac

SEQ ID NO: 33088 - DNA, 1533 bp, Artificial sequence
  DNA replication origin
ggggtcagacagaggctgaggtctgtgggttgtggccttgtttccaagatgctccacgggctgacggcccaggcgcctctcgggtgcggagaaggcaggaaacctaacccctgcttccaaatttaatcagtagaaacggtatcatcacccagcacaggccaggatcatttctgaggttagttctggcccaatcatgcatgcatttcttttttctttttttttttgagacggagtctcactctgtcacccaggctggggtgcaatggcccgatctcggctcactgcaacctccgcctgccgagggttcaagcgattctcccgcctcagcctctcgagtagctaggactagaggcacccgccaccacaccggctaatttttgtatttttagtagaaacggggtttcactatatttggccaggctggtcttgaactcctgacctcgtgatccgcccgcctcggcctcccaaagtgctgggattacaggcatgagccaccgcgcccggcctcatgcgtgtatttctttcttcactcaacactcattgagcaactactgcacaccagaccctatgctgaatgcacgcagatacccccagtcccatgagattggacaggagcgtggaactcaagggtgactctggctctgcctggggaaagagagagagggcttccgaggggtaaggacattggaaccagggctgagggatgaataggatttggttggagttggacttcctgcaaaatgaggcattggagcgagactgttgaggaattaagagttggagcctgtgcatttagattttttgtttgtttgtttgttttttagagatggagtctggctctgttgcccaggctgcagtgcaatggcgcaatctcggttcactgtaacctccgcctcccgggttcaagtgattctcctgcctcaggctcccgagttgctgggattacaggctgggcaccaccacgcccgcctaatttttgtatttttagtagacggggtttcactatgttggccaggctggtctcaaactcctgacctcaggtgatccgcccgcctcggcctgccatagtgctgggattacaggcgtaagccaccgcgcccggcctgcatttagggttttgaatgtccagaggttggggacaggggcttcagcctccttccagtcgtctttgcagcagcgcgaatccagtcattcctgctctgaccaccagagagcgcacgggccccgtccctgggaatccaggaaaaccccaggctggggaggggcgaggcttgccagacgcagcccctgcaccagccttcacgctccgcaagtgcaggaggagcagcaggcctggttcaaacgacgccaaaccacgaactggctgtgtgtccctaggcaagtggcctaacctctgagaaggcggcagaacctgacggttttccgttggctcggagcagacatgaggaccgctggcacctcctcagccctctctgtgctctgctgcctgccccgagtcacctgcccctcgctgacccctccccagcctcactg

SEQ ID NO: 33089 - DNA, 1417 bp, Artificial sequence
  DNA replication origin
ctgacccgggcctgggggagactgaggaaggcttcccagaggaaagagacgttgaggttgagactcgaacgtcagacggagcggcaggggtgtgcgctggaaacagacgcttgtgctgtgagtgagggggagagcagtggggggtggtcagcagaacggcggtcccagagaccatggggccctcatccctagaacccgtgggtgtcccaccctccctggccaaaggggctctgcagatgggactgagttgagggctttcacacaggggttcatcctgggttatacggatggcccactgtcctggaagggtccgtagaagaggagatgcctggccgggcgcggtggttcacacctgtgaaccaccaacacattaggttcacacctgtgaacctccaacacattaggaggccgaggcaggcagatcacttgaggtcaggagttcgagactagcctggccaacatggtaaaaccctgtctctactaaaaatacaaaaaaattaggtgggcctggtggtgtgcgcctgtaatcccagcactttgggaggccgaggcaggaggatcacttgaagtcaggagttcgagactagcctggccaacatggtaaaaccccgtctctactaaaaatacaaaaaaattaggtgggcctggtattgtgcacctgtaatcccagctacttgggaggctgaggcaggagaatcacttgaacctgggaggcagaggttgaagtgacccgagatcgtgccactgcactgcagcctgggtgacagagcgagactctgtctcaaaaaaaaaaaaaaaaaaaaggagacgcctgccctctatggttagagacaggataagagaaggacttggctgccattgcgggatttggagatggaggaagggggctcaagccagggaatgtgggcggcctctaggagcctggaaaggcgcggaacagattctctcctggagctgccagaaggaatgcagctctgccaacacctcgatcttctcccagccagacccgtgtggaacttttttttttttttttttgagacgtagtctcgttctgttgcttaggctggagtgcaatggcgcgatctcggctcactgcaacctccgcccccgggttcaagcaatccttctgcgtcagcctcacgagtagctgggattgtaggcacctgccaccacaactggctaatttttgtattcttagtagagacgcggtttcgccatgttggccaggctggtcttgaactcctgacctcagtgattcacccgccttggcctcccaaagtgctggggttacaggtgtgagccaccatgcctggccatttttatttttttgagacagggcctcactctgttgtccaggctggagtgcagaggtgcgatctcggctcactgcaacctcagcctccagactaagtgggat

SEQ ID NO: 33090 - DNA, 1232 bp, Artificial sequence
  DNA replication origin
gggagcagggcagggacgggaccctgtgttctcactgaggggggacaccccgccgtctcgacctggccttggcctctggcatttcccccgggaatctccccggcttggggagtggggcaggcacaggaccctgtgttctcactgacgggggacaccccgccgtctcgacctggccttggcctctggcattcccccgggactctcccgggattggggagtggggcagggatgggaccctgtgttctcactgaggatgtgcgggggctggacagtgtgaccttggccaagacctgaccccgccgtggcttggccactccggcctgggctgtgcgaatcaaagggtcattgtctggctggcgtgggttccggccctctccggggaaaccgaggccagctgccagtggcctcctgctcccggctctgtcttccctaacccagaggctctgtgcagggtgacctctaacaggtcactgaccctttccagagcgccgcctcctcctgagaccccagtgatgacctcccctctcccggctctgcccctctccccaccctatccaggcccgaggctcatcctaggacttccagcccgcagcctggcccctgcggcccacttcctaccccagctgccataacacttctccctggctcagacacccaccgtggctcctcgtggcctctgctcaccccccaggcttctgtctccctccaggtacatcctgacaggtaaacagacagtgacaatccagtgttgttctgtggcggaggatgcccagatggcaaaggtgccccaggcctgacccgggcctgggggagactgaggaaggcttcccagaggaaagagacgttgaggttgagactcgaacgtcagacggagcggcaggggtgtgcgctggaaacagacgcttgtgctgtgagtgagggggagagcagtggggggtggtcagcagaacggcggtcccagagaccatggggccctcatccctagaacccgtgggtgtcccaccctccctggccaaaggggctctgcagatgggactgagttgagggctttcacacaggggttcatcctgggttatacggatggcccactgtcctggaagggtccgtagaagaggagatgcctggccgggcgcggtggttcacacctgtgaaccaccaacacattaggttcacacctgtgaacctccaacacattaggaggccgaggcaggcagatcacttgaggtcaggag

SEQ ID NO: 33091 - DNA, 1842 bp, Artificial sequence
  DNA replication origin
gcgctcaataaatgtcagcggtcattgtgattagaaacctctgctctgctgacctcttggtgaccctccttcagaccttcccggctccagcttgcgccggacaccgccctcgcccccgccgccgccgccgcgccccccgacgtccccccggccgcattccgcgcagccccacgtgggtggcccgccccgcccgcccctctggccgccccactcaccgggcgcggggttccccgagcccatggagctcacgaagcccacggcccaagccagggccccccagggcagaggccagagtggccctggcgccccgggacgcatggcgaacgcagagacggcagcggcaccgacttcccagcgcgcggccggcgctccctataaaggtcccgcgggccgcgggcggggcggggcgcggggcggggcgcggcgcgggagtggcgggggcgaggccgtgtcccgcgcggggtgggcaggcgccgggcccggccgctgcggggggcagttgggggcgagcgcccgggtccccttccggagccagagaatgcatttggggagatgtggctggacccagggcggaaccgggacaggggtgtgggttcgaggtggtggcagccttttgggtggatcgaggggccgtctccaggaattaaagtgggtttgggggtcttcagtttcaggggtggcggtgaggtaacggggacccaagaggagcacgtctgtggatccctgcatcccgtttctgtgatttgcatgtggtcactttcatggtccaagtgtggtctgagccccccaacccggcctccttgttcccgacccgccccacacacccaaaacctcagctggatatggttccctgctcacagcgcgggccgcgcacccgtccacctggccgctggagccggcctgtgggtggggagtggttgggtgtgggacagaacggggtgcggccgggacagacccagagacacagctccttccagcatctcggacaacagcaggcctcgcccagccacggcccccagggaggccactgcgtgtgtgtgtgtgtgtgtgtgtgtgtgtgcgcgcgcacgcctggcctttgtcctgggcccctgggcagctctgccccatcagccctccaagcctttgcagacattcccccagatcacctcaacaagaatgtttactaggttttttcctctccctccaagattcagcaaacactgtttccagcagaggcgtttccaacaatgtatgacagcgacatctgcgtgggcctggaggcgctgcgcccgagggggctttcgtgcagccagacacatttcctactctggagctgattctgtcatgggggcctccagatttgtcaggcgcccttggcgagcgcaggggagcccctctgttcctgcttctagggcatcagtgaacatctcttttggccagagggaccctgcggggtgctggggtgccacggtgaccaaggcagaccccatcacaccctcaccgagctcctggtttggacaacaaaatgcagagacaaattaatctataacttcaaggagtggtaaatgctttcaggaaaatacagaaggttgaggtggtggagagcggttgggtgtctgctgggcatgcctgtgtctggccactcgctgtgccggcattgcccaccccgcaggtggaaacggacgtgtccagcagccccacggcacagccccttctctggcctgagtgagatctgtgcccacagaagacacacctgtaccctttcctccaccttagctgcccagcctgtgtcccccagcagccagtggccaggggccaagttctgccttagtggcactgaggggggacaccccgccgtct

SEQ ID NO: 33092 - DNA, 1076 bp, Artificial sequence
  DNA replication origin
ccacccaaaaggctgccaccacctcgaacccacacccctgtcccggttccgccctgggtccagccacatctccccaaatgcattctctggctccggaaggggacccgggcgctcgcccccaactgccccccgcagcggccgggcccggcgcctgcccaccccgcgcgggacacggcctcgcccccgccactcccgcgccgcgccccgccccgcgccccgccccgcccgcggcccgcgggacctttatagggagcgccggccgcgcgctgggaagtcggtgccgctgccgtctctgcgttcgccatgcgtcccggggcgccagggccactctggcctctgccctggggggccctggcttgggccgtgggcttcgtgagctccatgggctcggggaaccccgcgcccggtgagtggggcggccagaggggcgggcggggcgggccacccacgtggggctgcgcggaatgcggccggggggacgtcggggggcgcggcggcggcggcgggggcgagggcggtgtccggcgcaagctggagccgggaaggtctgaaggagggtcaccaagaggtcagcagagcagaggtttctaatcacaatgaccgctgacatttattgagcgcttagtgtctacctctcccctccctgaacctgtgccatcccgatagtgccggagctctcttcatctccgtcttccagatggggaaactgaggctcagggtcacacagcctgtagcaggcaaagccagggttctagccgcgaccgtccgggtcggtcctggtgccgagaggtagtgctgggtgtcgggagccaggccctccagctggggctgagagctttcccgggtcctgggtagacggggcatggagtctcacacctgggacttgccgggaggtgccaggcaggagacggccccactcctggcctcagtttcccctcctatgatgggtgccaaggtgctgcgttccacaagctggtccctggcagtgtctgtgaaccagcaagcgctctgggatgggggctgtggccgttcctgcccccagggacgggggaagaaatggggggctctctggctcc

SEQ ID NO: 33093 - DNA, 1622 bp, Artificial sequence
  DNA replication origin
ctttcccgggtcctgggtagacggggcatggagtctcacacctgggacttgccgggaggtgccaggcaggagacggccccactcctggcctcagtttcccctcctatgatgggtgccaaggtgctgcgttccacaagctggtccctggcagtgtctgtgaaccagcaagcgctctgggatgggggctgtggccgttcctgcccccagggacgggggaagaaatggggggctctctggctccccaccccccatccctgcagccccaccccaccccagccctgcgccaaagggagagcagagccccctccccgaaggccacgtccctggggagacagtgagctcatgcaaggggaatgttcccaagttggagtgagtaagaggcgggccaggcggtgggggggctgccaggcgcggggctccgcgtgccctcgccctcgggtgctgtctagacagagggcagaggcgggagaagcggctccagggcctgctgaccctgacatgcccagtgcctggtgtttggtggtgtttgaggggttgggcagggtgccagcccctggcctgggggcttggagggtacgggaagggacctcctggggtgggtgggggttggtggtgaggctgtgggggggggcacgtggagctcagaggggaggagacatttccagggttctggagccagggtggggacacccatgtggttttctgccccttcttcctgggtgggggtagatcattccgtgcgtaactactcagcaccacctgcatgcatctgtgggcgggccagaagctgggtgtcaggagtggcccaggagagcaccccgttccccggcccgcaggtggtgtttgctggctccagcagggccaggaggccacctgcagcctggtgctccagactgatgtcacccgggccgagtgctgtgcctccggcaacattgacaccgcctggtccaacctcacccacccggggaacaagatcaacctcctcggcttcttgggccttgtccactgccttccctgcaaaggtgagacctcaggccagaagcagggcagacgtctcagctcaggaccagccacaaacagtcatggtggtcgagggccgaacgtccagggactgagcccgtcacaggggtatgtaggaggctgcagggggatcccagcctcagagagggactggggggacttcccggttcccaggctccagcctcttgcagctcaggactcaggaagagaccacgtggctccagcctttgctggggctgagctctctgcctgggtggctcttcccacctggtcgataaatgtctggcttgcacctagctcctgggaaggtgggtttgccattctggcctgtgaccccaaatgtccacaccagggaccttcactgcagactccagggtctgcggtggggttacagctgcatgtttaacaagcatttgcctcgggaccctgttttgagaggatgcctcccacatcagactaggggctcttggttggcgagtggcacagaacgaatgaataagattctccgcactggaggatgatggttttttttttttttttttttttttttcctgagatggagcctcgctctgtcacccaggctggagtgcagtggtgcgatt

SEQ ID NO: 33094 - DNA, 1033 bp, Artificial sequence
  DNA replication origin
ggggagcgattccaggggagggggccccccacagccctaggcctctgaaccaggagctgccccgcagccccgctgctcagacagggatattgaggtcctgctagggaagctctctctggggtccccgcccccgctttcaatgtgaatgctcatcgcctcctaggcttatcgcatcttcccaagtcatcattttacagatggggaaactgaggccgggtcgcagctatgagtgcaggggcccaagcacctcagtttgaaagctgcagccaggacccagatgaccaaccccctttctgttatctgggggtctggtagggcctctgaacacagctgttgagtttatgtgccagcctcagtttctctgtgtgtaaagtggggctgacgagggagccccacttccaaggcagtgcggcactccttaggggatggccagcgcccgccacgcagcccttgcagggcatgtgggccgcacctgggcggccccggcacagcggctcacaggcacatctggaaatgctcggccagggtggcttttatgcgagcgagaacggaagggggcctgagttccgtccccagggccagatgaggttgggggtggggggtcctgggccgtctcatgcccaggccaggcactttttgaagactgtccttctcccagaagccagaggggggtctggagggagcaggggtatgtggcagtgagttcaggaccacccagccaggctgatctgggattaatcacatctcagaggccagcagagttcctcagcctggccttcgggtctgcagccctcagcttcagcctccccttggctcctctgcctgaccccacccaccaggacctaacctcaagccatgttctctcctgatccactctcccataccggccccatctggcaaactcctagacatcccccaacaccccagctctaatgcccacctccttcaagatgtgccccaacaggccaggcatggtggctcacgcctgtaatcccagcactttgggaggccaaggctggcagatcacttgagg

SEQ ID NO: 33095 - DNA, 921 bp, Artificial sequence
  DNA replication origin
aggacacgcgcgtggggccgggcgcgggagggtcccgggcgtggggccgcgcgaaggcctcggggcccctccctgcgccccttctgcagggcggaggcgggggcgccgtcccaggtcagggtcagtcggagtcggggccctcgggttcccaggggcagggctcagggtccgggcgcgggaccggtggggccgaggtccgcgctgcgcctgcgctggggggcgggggctgggctcggtgcgcgcgggccggggcgggggggggtctctgcccggaatcggggtccagcggagctacgcagccccgggccgctcctccttgcagctggctgacgtctgctcccgatgcacgcgctcttctgggaaggccggaggggccccagctgcgtcagcctggggtgttccgcccttgccaggcgcgagtctggggctgccaggaccttcccccaggaggcgtcggggagggcggggcgctggacggccctcctggcctggggagcgattccaggggagggggccccccacagccctaggcctctgaaccaggagctgccccgcagccccgctgctcagacagggatattgaggtcctgctagggaagctctctctggggtccccgcccccgctttcaatgtgaatgctcatcgcctcctaggcttatcgcatcttcccaagtcatcattttacagatggggaaactgaggccgggtcgcagctatgagtgcaggggcccaagcacctcagtttgaaagctgcagccaggacccagatgaccaaccccctttctgttatctgggggtctggtagggcctctgaacacagctgttgagtttatgtgccagcctcagtttctctgtgtgtaaagtggggctgacgagggagccccacttccaaggcagtgcggcactccttaggggatggcc

SEQ ID NO: 33096 - DNA, 1095 bp, Artificial sequence
  DNA replication origin
ccctcccgcgcccggccccacgcgcgtgtcctctgtccgcagattcgtgcgacggcgtggagtgcggcccgggcaaggcgtgccgcatgctggggggccgcccgcgctgcgagtgcgcgcccgactgctcggggctcccggcgcggctgcaggtctgcggctcagacggcgccacctaccgcgacgagtgcgagctgcgcgccgcgcgctgccgcggccacccggacctgagcgtcatgtaccggggccgctgccgcagtacgtgggggcgtggtctgtggaggggcggggcgggacctaccggacctgcgcgtcatgtatcgaggctgctgccgcagtaggcgggggcggggcctggggcgggaccacccggacctgagcgtgacgtatcggggctgctaccgcaatgcgtgagggccaggcctgcgggggcggggcctgctggaggggcggggcctgctggaggggcggggccgctgccgcagtgcgtaggggcggggcctccagcccaggacaggtcacatgggtggcggtggggcctgagtaagggcgtctttatacttccgagggagtatcacggggtagggtcttttgtagggttgggatttggaaaatagtgggcctctgggggctcacactgggcaagaggtatgtggcatggtcagagcgggagcgtgactcagagaggggcttgtgggtgtaaccagaggggcatgatggaaccaggggggtgagactgggtcatgtaaggggcggggctcttggctggggcgtggttcctgggtggagatgggcggggatttgtgggtggagtttgggtgggcggccccgcagtcgcggaggggcggggctttgggtagcataaggggcaggagctcacgaaagaggtgtggctcctgggtacaatgggaagggcagggcttgtgggtggagcctgaggggtggaatggagaggggggctcacggggggcgggggggtgcttgtgtctcctaccagagggttttcgcatcttgggggttaagggtgggtcttggggccaagagccctgcggggttctcagcgagatgtcccctgaacttcccctggcacccggc

SEQ ID NO: 33097 - DNA, 1401 bp, Artificial sequence
  DNA replication origin
ggtggaatggagaggggggctcacggggggcgggggggtgcttgtgtctcctaccagagggttttcgcatcttgggggttaagggtgggtcttggggccaagagccctgcggggttctcagcgagatgtcccctgaacttcccctggcacccggcctgcagagtcctgtgagcacgtggtgtgcccgcggccacagtcgtgcgtcgtggaccagacgggcagcgcccactgcgtggtgtgtcgagcggcgccctgccctgtgccctccagccccggccaggagctttgcggcaacaacaacgtcacctacatctcctcgtgccacatgcgccaggccacctgcttcctgggccgctccatcggcgtgcgccacgcgggcagctgcgcaggtgcagacgcagggcgggggcacaggcctgtcctgggggccggagaaccccctgccctgcgccctcaatgctcttatcgacccttgcaggcacccctgaggagccgccaggtggtgagtctgcagaagaggaagagaacttcgtgtgagcctgcaggacaggcctgggcctggtgcccgaggccccccatcatcccctgttatttattgccacagcagagtctaatttatatgccacggacactccttagagcccggattcggaccacttggggatcccagaacctccctgacgatatcctggaaggactgaggaagggaggcctgggggccggctggtgggtgggatagacctgcgttccggacactgagcgcctgatttagggcccttctctaggatgccccagcccctaccctaagacctattgccggggaggattccacacttccgctcctttggggataaacctattaattattgctactatcaagagggctgggcattctctgctggtaattcctgaagaggcatgactgcttttctcagccccaagcctctagtctgggtgtgtacggagggtctagcctgggtgtgtacggagggtctagcctgggtgagtacggagggtctagcctgggtgagtacggagggtctagcctgggtgagtacggagggtctagcctgggtgtgtatggaggatctagcctgggtgagtatggagggtctagcctgggtgagtatggagggtctagcctgggtgtgtatggagggtctagcctgggtgagtatggagggtctagcctgggtgtgtatggagggtctagcctgggtgagtatggagggtctagcctgggtgtgtacggagggtctagtctgagtgcgtgtggggacctcagaacactgtgaccttagcccagcaagccaggcccttcatgaaggccaagaaggctgccaccattccctgccagcccaagaactccagcttccccactgcctctgtgtgcccctttgc

SEQ ID NO: 33098 - DNA, 1309 bp, Artificial sequence
  DNA replication origin
ttcagagtcttgctctgttgtccaggctggaatgcagtggcgcaatctcggctcacggcaacctccgcctcccgggttcaagcgattctcctgcctcagcctctggaatttaattttgggatgctgggtagaagcgtcagggaaggggtcgtccctcgagcaggagggggccaggcgggtctgcatggatgcaccacgtgtgggaggagcagcttcccacccggaggactccacccagggacttttttttttttttcagatggagtctcactctgtcacccaggctggagtgcagtggcacgatctcggctcacggcaacctctgcctcccaggttcaagtgattctcctgcctcagcctcccgagtagctgggatgactggcacccaccaccaggctcagctaatttttttatttttagtagagatggggtttcaccacgttggccagtctggtttcaaactcctgacctcaaatgatctacccgcctcggcctcccaaagtgctggggttacaggtgtgagccaccacgcccggccccacacagggactttaagcgtctcctccacacagggcaggggcccgagaggcacattcattccatttcagcataaactttgagcgcctgctgtgtgccataaatggccataaaggtgataaaaaatccctgcccgttaggttcagaggaagcgggaatgaggaagcgggtggtccaggggttagcaggtgacaagcaggtgacgacggggccggaagggtggtccaggggttagcaggtgacgacggtgctagaagggtggtccaggggttagcaggtgacgacggggctggaagggtggtccacaggttagcaggtgacgacggggtggtccaggggttagcaggagatgacggggccggaagggtggtccaggggttagcaggtgatgacggggctggaacagggttgcagggagggggtatgtggtccagggcggcctcctgggaaggtaacatttgagcaaagacttgacaggcgtgaggggaaaggctcgcggtgtctggggaactggtgcactgggtacagctggtgcagagctcggagcggagactgtgctggggatgggatggcccatccgggaggtctgctggcctcgagtcagaaaggtgacaggcatggattagcagggcctgtgggcaccaggaggatttgtcctgcaggaggtgggagccactggggggtccagggcacaggaggaatgggacctgacgtccaactgtctttaaaacctaagtcaggccaggcgcagcagctcaggtttgtaatccca

SEQ ID NO: 33099 - DNA, 1320 bp, Artificial sequence
  DNA replication origin
ggggtgagattagagacggagagacccagagagctggagacagagcccagacaagccccccagatgcgctgggaggggctcccgagcccgggagatccagggctgggctgggcagagaccccggccggatttccatccatttccagcagaggcagccacgggggctcggcagatggagcaggtggagctctccccagggttctcccgggactgggggttcccgggtgtggcccccgtacggggacttggcgggggcctgggtggggatcccggggggctcctcaccggggggcttcacgggcagcatcagggcggtggccacagtcagcagaggacgtccccagcccctcaacccgagccccatggcagacgcaggctggcgtctccccgcagaggtcttcgggccgtggctcccaccctcagccaacggccggaaagggggagcctggctgtggcctgtggtcgggaggccccaccagcaacgcctggagcccaggcgggcgtttctgagaaatcgatggtctcaggtggtggctggtaataatcatgttgataataatcattgtcccctagtccggaaacagggagaggaggagacagctctggggctgcaagtgacctcgggaaggcaattgacccttctgtgcctcagtttacccagcctccacgtggcccagcatgtgtggggagctttccgaggaaccgaggtcacagcggcactcgagacccgcagctcgcctccggcccccaccccgcaaaccccagtcttcccatctccaaacccagggccgacctcagggctgtggggacagcgaggaaggccggtctcctgggaagctctgatgatttctgcctttattttattttatttttataggtggggttttgctatgttgcccaggctggtctcgaactcctgggctccagcgatcctccctcctcggccttccaaagtgctgagatcacagaagacagccactgcacctggcagatttctgcctttattcagcagttattgagtgcctagtgtataccagacctcatgctaggaggtgaggatgaggcagtgaccgcaccccagcctgtagcactgacgttctgtgggatccggagtccagtgggacatggctgtacatgggggtcttcaccttttttttcttttctttttttttttgagatggagtcttgctcttgttgcccaggctagagtggaatggcaccatctcggctcaccgcaacctctacctcccgggttcgagtgattctcgttcctcagcctcccgagtaactggaactacaggcgcccgccaccacagccgg

SEQ ID NO: 33100 - DNA, 1155 bp, Artificial sequence
  DNA replication origin
atagcaaacgccaggcacggtggctcacgcctgtaatcccagcactttgggaggtcgaggcaggtgaatcacctaaggtcaggagctccagaccagtctggccaacacggtgaaacctcgtctctactaaaaatacaaaaattagccaggcatgatggtgggcacctgtaatcccagctactcaggaggctaaggtggaaggatggcttgaacccaggaggtggaggttgcagtgagctgaggttgcgccattgccctccagcctgggcaacagagcaagactctgtctcaaaaaaaaaaaattagccacgtgtggtggtgcacacctgtagtcccagatactcaggaggctgaggtgggaggattacctgatgggggaggtcgaggctgcagtgagccaagatcacatcactgcactccagcctgggtggcagagtgagaccctatcttattcaaaaaaataaaaacaacaagggtaccgagggcacccagtgacaatggggaagctggggaagttctcccagaggaacacacaaggcgtctaacagcaggtgtctggatggctgaagcccaagctggttgtggggcaaggagaggtgagcagggaagagacaggattgtctgggctcagctttgccttgtggggctgcagggcactggggaaccatagatggtgtttgagctggggcaggccagggcatatttctctggtgaaagagtggagtagggagaggaggtggggagacccggaggcgacatggctcagggttggggtgggggccataaggcctcagctaaagtcatggctggggagaggcgaggggggtctctgactcagggacaggggaggagtgaggttttgggacccacctatagcttccggtcgtccaaggctccagagggtggccagatctgcaaggagtggtggggcgtgctgggcggagccccggggtagagctctacggaagtaggaagggcaggggcgccctcagggaaacctcactcctcccctgtccctgagtccaggaaggggtcaggccaacgtcgctctggaagcctggaggcggggccgaggtgcaggggcggggccgacattgcctgggaggcggggctgaggtgcaggggcggggcctacattgcctgggaggcggggct

SEQ ID NO: 33101 - DNA, 1321 bp, Artificial sequence
  DNA replication origin
tcatggctggggagaggcgaggggggtctctgactcagggacaggggaggagtgaggttttgggacccacctatagcttccggtcgtccaaggctccagagggtggccagatctgcaaggagtggtggggcgtgctgggcggagccccggggtagagctctacggaagtaggaagggcaggggcgccctcagggaaacctcactcctcccctgtccctgagtccaggaaggggtcaggccaacgtcgctctggaagcctggaggcggggccgaggtgcaggggcggggccgacattgcctgggaggcggggctgaggtgcaggggcggggcctacattgcctgggaggcggggctgaggttcaggggcggggccgacattgcctgggaggcgaggccgaggcacagggggcggggccaatgtgcaggggcggggccgacattgcctgggatgcagggaggtggggccgatgtcgggggcggggccatggtgcagggggcggggtcggggcggggccgagatggcctaggctgctgggaggcgggactagggtgcagggtgcgaggctagcggggtgatgcgggggccgagattgcccaggaggcgggtccgaggttcagggggcggggctagggcgcagggggcggggccgacattgcttcggaagctgggagtggggaccgaggtgcaggaggcagagcctcagtgcagtgactgctccccacaggacgcggatgggcgctgcagtgcctgtgggtgggtgagcgcagtgaggcggtggaagtgagggtgtgaagggcaactcgaggcagcttctctccggtccactacacaccccaccttgtcccacctccacacctttgccaggccgttccggccacctggaacgtctccctccaccgtttgcccggcccatttccccggttcaagtggcatcacctccaggcctgtgtgtgctggagtcgggaggtgtgggcggcgcgagtttttcgtgcagggccttgagagtggcaggaggactttagcttttgctcggagggaggtgtgagtcctggaggtttagagctggggcggtgggagaaatgatcccagcagtcccttaccctccccacggcctcctcacttcctcctatttttacacaaaatgcctccaccacccttcaaaccctgaatcttttattttattttatttttgagatagggtctggctctgtcacccaggctggagtgcagtggtgtcttcacagctcaccgtagcctcgatctcctgggtccaactgatcctcctacctcagcctgtgagtaactggaactacagatgc

SEQ ID NO: 33102 - DNA, 1855 bp, Artificial sequence
  DNA replication origin
ctccccgccgaggtccgggtgggtccgcggtgccgggcgggggcgggcgcgggtggcgcgcgggggaggggaggggagggggacgcggcctggcgggggccggggcgggctaaggcctggcggccggggctgcgcggcgcgggggcggcggcaccggctcgggcatcgccccgcgcaaagctgctgtttattgtccgggcggcggcgggcgcggggggtgggctgggcgcgcgcgtctccggcgcgctcccctctccctcccgcccgccccgctccccgccccgctcccctcccacctccccgcgctgcgagcgggcgctgcgcctcctgccggctgcgccgccgccgccccccgccccgcgcgccccgccccggggcacccctgagaagggcctaggtctgggcgcggtgctgggacccggctgtcaccaagtcccgcccctccccagctcctgggccagagccgggaccctcgcgaagtcagacaagcaaaggcctttctcgagagcccagacgccgagagggacacacatttcagggcgagcgaggggataggggggtcctggggaggccgctgcgaggagctgacagctccctgcacccccggccccgctcgcagggtccccaggcctcctttgccggagtatctggtggagggcgctgtgcctgcaaaggccgggggttggggtggagacaaccgcaggtgctgatctgtctgtgccctggctgggagctgagcctggtccccggggctggaatttaatcggccccagggcccccatggcacactcactaaaggcccagcgaccagacgaccagagtgagtgagagggacggtggagaatcagggagagctcaggctttgtcctcagagcactggggagccacagcaggagacaggcaggacctgtcttccccaacatgtaggccttgggcccagcttcctggtttcccgtgagaacactgcagaccagccccagcacacctactcatgggggtccagggtgggcaggaaggaaagattcttccaaacttcttagttttcttataaaacggttctcctctgccgatgtttgctgaatggctgtagatttaaaggaaagtagccccggatgagctgtggagaaagatacggcaggatgtaccccaggctgaagaaggccgtcaacaccttttctttattcctccctttttacaatgaatgtgtattcattttagcatttaagacaataagataaattagcaaaggttaacaaagctaagatcctaaagaatatcaggggtcccgggtctgtctgattcccagctcacccatctccaagctgtgtgaccctgggtctgtttctcaacctctcggagccttattcccccccacccccctgcccccacccttaaggctgtgggagggttaactgagtgagcacacacaaagggcttggcacagggcccagcacacactagctcagggtttggcaaactttttctgtaaagggccagagagtaaatattttcagcattgcaggccacagtctctgcggcaatgactctgctctgccatcgcagagtgaaagtagccagagacaatatgtaaaaccatgggcatggctctgtgcccataaaactttatttacaaaaacaggcagtgggccagagcttatcccagggccgtagtgtactgacccctgcactaggcacccaataaaactttatttacaaaaacaggcagagggccagagctgatccgagggccgtagtgtactgacccctgcactaggcacccaataaaactgacctgtgagtcgtttcttcacttccccttggcctctgtgttcttttagtccaaagtgatttattg

SEQ ID NO: 33103 - DNA, 1472 bp, Artificial sequence
  DNA replication origin
gtgctcgggtgcccctctgcccctcactcccacaggtgggcactgcacgggcaggggtcaggaggctcctcctggggtcacccacctgcccacttcaggacaggggagccagctgccctgctgaggcccgggtccccaccccagcccgaggaccgaagaccggatctggaggccgcctgtggccccctgcccttcccactgggcgtgttttctaagccgccaactttccccggggattcacccgtgacccgccacgcccgcggctgggtgggggccgctgcctccctccctccctgggaaagcgagacacccagtgtcctctgcttttgaaaacccagacaaaggcctgacccctctccccgtcaccccgccccgggagctcagccaggggctcaggggagccagggcccagacttgcctgctccacacccccaccccccagccttgtttatctgccctgctcgccaggccccggaggagcctctgggcctctgacagccaggcctgggcagggtgtggctgtggggagggggctgcctaggaggacgacggagatctccctcccagaggaggggtgtcagcgaacactccgggtcgggcccattgtttccttcctgccaccccttcctttcccacgggggatactgaggcccagagaggagctgctgccccccccccaccccccctccatcacacagcacctggggccggggggcctcggtgcctcctgctctgctccacggtttctccgtcctgggtcagagggtggcccacaggtcccccattgggtcatcattgcttttggggatgcagacatgggacaggcacccagtgttaaccggctgctgtgagccgccattcgaggacgactctctccccggttcccgggctgacaatgggtggggacaggcccatctggtgccgcccggccttggacacctgccccctcgttcttctccccggcgggcttcaggcacgaaggccccgtccgctagaacgtgatcgcttgcctcctcccgtttccacagattttccagtcgaagacacgggagctggctgtggtttgtggtggtgcccgtctcgctggaaagtttcacaaatgaatttaagaatttaaagaattttaaatgtcattcaagaacaggttattttttgttaatgtgaggatttaaggagaactagcgggttgctaaccacagggccgatgctgccaaggtgaggagaacgtccaggaaggagctggggagaatctctgcttcggagagaatctctgtgctctgggagggtttgtgtggcccctgcgtgacacatggtctggctggtaaaataaagatattttggcctggagcagccattctccagcacccacagccctgtcctgggtacaggcaaggctcaaacccccgggatagggaggagaacagacttgggcctggacagatggtcaagaccggcccagactcctccctgct

SEQ ID NO: 33104 - DNA, 1428 bp, Artificial sequence
  DNA replication origin
aaaggcgtggaaaagctcagggcggcggcggtcctggtgctgctgggggtcccagggcaggtgctgggggtcccggggcaggtgctgggtctccgagcctccctggctcccggcagccgcgcagagcccctggagcgccacgccccccgcccgacgcccaccccggcgcgcacaggcctcccgtccccgcgatgctttttacggcgtgtggcggtgtgggcggctcggggcccggcgagggcgtcgtctggagcgcgtgagatagtcctgctccaggagatgagttcatgaggcccaaacccgacgggagccccgcagaggcctccgcggtgcggggcgttggtgttggaagggcccagagaggttacgcaacggccaaggtcacccagcgagcagggcgggccctgtccgaggcgggaggggcgtgtgtgggatgggggcgtcgcactcgtccttccagaacccacgcccgggcagctccagccagaacgagggggtccctgcccgggcaggcgccgagcccagcgccgggaacattcctgctgctaattgaaaggaaagagctgacggtgaccttggccattgtggggggtgggggagtcacgcggggctgcgaggtgtggggtgcgggggcagcaggggatggagttcggggagtctggaccccagctgcttcccagtcccggtgatcctcggtcctcagagcctgtgtctcccctgagcgctggcacccccggccctgcttcctccaccgccctgccctgctccaagccccggagtccaagccccaatgtcagcccctcacccttcatcagctcccagcttcccctttcccttctccaccgccaagatcagctcaagcacagccacctcctccaggcagccttccaggaaggaacctcctcccagccctcccaggatgcagcacggaggcccccagggccatcccagtctctggggcaccgagaaccctaaacgggttacggcagagaggcatcaccccgggggagaggagaagacggaggtcaaagcaggccacagatgcagagaagcaaacctgttgcctattaacctggggtgggaagggaccctgcccgggccctcaggggaagacggggcagtgaggcgtgaacggggccttccctggctttcagcagggtctcagggcaaaccctgctgcagaggccccatggtccctccccacgcgactgcactccagccacactcctgagacgtcccacagagctcccactgcagggccattgtgctggctgcattgctgcctggtgcacggtcacccagacctccccgggcctcaggcccaaggcctttctgcagacgtcacctcctcatttaggcctcttctgtcctaattttcagccccaggcacccctgcagctgtcaccacccggatcactttacttatct

SEQ ID NO: 33105 - DNA, 986 bp, Artificial sequence
  DNA replication origin
gacccggcgcccccctcacctctccccaggcccgggcgccccctcgcctttccccaggacacgcaggatgcgccccccttgcccctccccagacccggcgcccccctcgcccctccccagacccggcgcccccctcgcccctccccgggcctggacgccccctcgcctttccccaggacacgcaggatgcgcccccctcgcccctccccagacccgggcgccgccgccccggtgatggatggaggggcccgcgggaggcggtcgccgtggcaaccgcgccgtccccatggcaacgccgaggcccggcgcgcgggggtggggccggcgcagcatctcccgcccccggcctgtgcttggggggattggggggggccgaggcttcgggcctggggcggcctagacgggcgggaggggtcgggaatttctcccccgcgctgcggctgggggaggggaggggggtccccgtctgggcgtccggggggcgcccgcccaggaaggggcttccatccgggaggggtgtggacccgcccccgacgccgggtagccaaggtcaggccgacagaacgctccacgtcacagattggaaaaattaagcgaaatatgaccacgacgcacggatcaaaacggccacaaaccgagaacgcctcccccagcgctcgctccctcctgcggccgggtcagccccatttcaccgacggggaaactgaggccgggcagggcggccttctcccggcgttcatcctcctgcgggcggggcccgccaggcgcgggggagtctcattcccgtgtgatcggcgaggctgggaccaggaccccggcgcaggggtcacggaaggaagcggaggtcggatcacaaaaggtcttacatgctgggcggaggagctgagtcccgggcaaaggcgtggaaaagctcagggcggcggcggtcctggtgctgctgggggtcccagggcaggtgctgggggtcccggggcaggtgctgggtc

SEQ ID NO: 33106 - DNA, 938 bp, Artificial sequence
  DNA replication origin
tggggagaggtgaggggggcgccgggtctggggaggggcgagaggggcgcccgggcctggggagagtgaagggggcgccgggtctggggaggggcgaggggggcgccgggtctggggaggggcgaggggggcgcccgtgactgcgggggccaggggggcgcgtcctggggaggggcctgcgccctggggctgcttcccgcgcgttccctgcccgcccgcctgacattcccccgccctggccggccgggcagggacaggctgccccagacactaccgccttgtctccagcctgggaggcggccacacagccacactctgtccccgggtccggtctgagcggccacctgcctgccgggtggggacctgggcagtcggcgaccagcctgatcctggggcccaggagttccgccgttttgtggacctcccgccccagctctgctccctccggggtggccccgagcccacttagagctggaaaccaggactgtggggtggcccggggctgggcggttgttgttccaatctggctgtgcccagggccacgctgtgccctccctggacgtggcttccagccatgggaagaaggtgccgggcagggggaaccgtgtgtgagaggccctggggtaggaggcttggtgcatagccagggggccctgcaggagtagaccaacgggggaagtgaaggggccgacctgagggttcctctaagggctgatgggagccagggagcctctagagctggagagggacagggtctgattaattattattattattattgttattttgagatagggtttcactctgtcccccaggctagagtgcggtggcacgatctcggctcactgcaacctccacctcccgggttcaagtgatcctcctgcctcagcctcccgagtagctgggattacaggcgcctggcaccacccccagctaat

SEQ ID NO: 33107 - DNA, 1031 bp, Artificial sequence
  DNA replication origin
ggtgtcagggcccagagccagccctgcctccaaagagccctcgtgcctctctgggcctcagtttccccatccacgcaaacacggaggcacagatgcctgcagctctaaggcctcctatgacgtcccccttgtgcccccatcccctcccccagttcagcagagaaaatgaaactgcacagtgcactggctcacccccagccccgcctgggaggctgctccgggtcaagacctccctggagcccgaggcgccccgcctgcccaccccactcgggtttggtttcctggccctgctgaggcctgtgaagttgtccagctcccatgccccagaggtgaccccaccggctcctcccttcctggcaggtgacacctacccttcccggtgcctcccaggggcccgggaacaccagctgcgccctctgtggctttcccttctccctcctcagggaggctgggttcagctgccttcaccgggtggggttcaggaaaggcttgatccagctttctggcttgggggcccttcctgaatagccagctcagctggagttctcggtcagccccagcaacgggtgatgcaggcagtgaaccatccactgtgcgttcccttgaggcccgggccctcgcttcctgcctaccccaagttccccaccctagcccaggcctctagtgttccctgccaactccctgccccctcacagctccctctccacccgccagccagaggcagcttctcaaaaagagaatcagaccctaggccaggtgtggtggctcaagcctgtaattccagcattttgggaggtgaaggccagtggatcgcttgagcccaggagttcgagaccagcctgggcaacatagcaagagcctgtctctacaaaaataactaactaactaaataaataaaaagccaggtgtggtggtatgtccctgtggtcccagctacttgggaggctgaggtgggaggatcacttgaatccaggaggttgaggctgggtcgagccgtgattgtgccactgtctccagcctaggtgacagag

SEQ ID NO: 33108 - DNA, 1033 bp, Artificial sequence
  DNA replication origin
ggggctgcagagtaggtcttggtgggcaggagggtgcagagaggactgtcctgatctgtcttatggtctgggccaggaggtgatacacttccttcttcccgaaacacccttctctggcctttgatgcctggtgaactcctatgtatccttggtggccctgcctcaatgtccccttctccccaaacccttcctggtcgctaggcagagcctcgtcccctcctgtcctggcttccttggccgctgagggggcagggagggccccactttacagaaggggaaactggggttcagagatgaaatcccttgccctggttacccctaggggaagaggcagagctgggatttgaaccgcgtctgacggacagcagggctcagtgaaccagagcttgaccttatctccctcccgcagggtcctggcggcagagaccacgtcccagcaggagcggctgcaggccatcgcagtgagtttccgccgccccgcagacggtgtggtcagggtggggaagtggggggacctggggtctcgggccctggacctgtcctaggacctggaaccagggcatggtgggtggtgagttatttgcttgggaaacttggatcctgctgacccgcagagaatggaagtggagaccccctgagtcggcagctcctggacccccggcctcgctctgcctgatgggtcggtggggaaactgaggctggcattccctggaaccctgccctcgtcctgcaggaaaataaactttggtgatgggagcacagatgtgctttggtgccatcttggtggcctctggcccaagaaggccctcttggtgtccgcagacccctctctgtgacccgaccctcctgtgacgtggcccgattcctgggttcaagtgactctcctgcctcagcctctcgagtagctgggattatgagtgaccgccacgacgctgggctaattgttgtatttttagtagagatggggtttcaccatgttggccaggctggtcttgaactcctgaactcaagtgatcctcccgccttggcctcc

SEQ ID NO: 33109 - DNA, 950 bp, Artificial sequence
  DNA replication origin
acgagctcgacgtcacgtcccccgctggccagctccagggacccaggagctcgacgccacgtccctcgctggctcaaacgagggcggtgggaagggaaaggggtatctccctgcctgaggccacgcagccagcctctgcccccagcaagctgccccagacccaggtggatgccccaacctgatctgtcccgtcctgcgtccccctcaaagcatgttgggtcctggcctgcccggtccacgcatctccctcaaagcacactgacgactcttcccagcccacaccctcccgggagccagcggcccccgaggccccacccagcccggtggcacccacgctgcagcccccacctggacaccgagtcctccagcagccgtgtcttctgctcgtcgtcctgcatctgcctcctcaggtcctcatccccctctgaggccgaggacggcgtcccctccagcagccagcgctcccgcagtgccttggactgagcagcagggatccaggtcagagtcgtgggcaggaccagggccagggttaagacttaagactgaggtcagggtcaggatcagggtcggggttgaggcaggaccaaggttggggtcagggttatggttgggatcagtgctgaggtcagaatcacaatcgaggttgggggtcagggtctgggtcagagtcaaggtcagggtcaggattgaggttggggtcaggtcagggtcagagtcaggactgagatcagggtcagggtcggggtcagggtcaggttggggtcagggtcggggtcaggttggggtcagggtcggggtcggggtcggggtcagggtcggggtcagggtcagggctggaggcagggtcagggtcaggttgggattggggtcagggtcagggttgggcaggagtccggggcctccgcctcacagccgcctgcactccctgaccctgggtccctgccccgctc

SEQ ID NO: 33110 - DNA, 1160 bp, Artificial sequence
  DNA replication origin
gaggacctgaggaggcagatgcaggacgacgagcagaagacacggctgctggaggactcggtgtccaggtgggggctgcagcgtgggtgccaccgggctgggtggggcctcgggggccgctggctcccgggagggtgtgggctgggaagagtcgtcagtgtgctttgagggagatgcgtggaccgggcaggccaggacccaacatgctttgagggggacgcaggacgggacagatcaggttggggcatccacctgggtctggggcagcttgctgggggcagaggctggctgcgtggcctcaggcagggagatacccctttcccttcccaccgccctcgtttgagccagcgagggacgtggcgtcgagctcctgggtccctggagctggccagcgggggacgtgacgtcgagctcgtgggtccctggagctgggtgttgccggcattggcctccctgggggcttcctggcgccagcccagctggcgggcaagcgctcccatggttcgaacgggatggatgcagagcagctgggcccgcaggaagctcgggcgggggcaggaaggggacaggatggggaaagtggcaatccctgtgggggctgggaccaaaggcctggagtttccggcgggcgggaggcccaggctgtgctcgggggcagcagggtcagggtggagggaagtgacgaccaagattccaaacgtctgccctggccagggaaggtgcccagaggcgggaggccggccggatcacacggacctcgcaggcccttcccagacgctgggttctgaccccgtgggggcccctccctgcccagttctgcccatttgctttgaagaaagcacgttgggggtgttcgggatggacttccctcctgggcagggcgtgtaaaggcatggacaggccgggtgcggtggttcacacccctgatcccagcactttgggaagccgaggcaggaggatcacttgagatcagaggttcgagaccaacctgaccaacatcgtgaaaccccatctttactaaaaatacaaaaattagcctggtgtggtggtgcccagcctgtaatcccagctactccggaggctgaggcagaagaaggccaggcgcggtggctcaagcctgtaatcctggcactttgggagaccgaggtgggtgaatcacg

SEQ ID NO: 33111 - DNA, 1072 bp, Artificial sequence
  DNA replication origin
ctgatgcccccaggtgggtctcctgcttccctgagcccttctgatgcccccaggtgggtctcctgcttccctgagtccttctgatgcccccagcggtggctgctctgattactcccccatcttacagatggggaaaccgaggcccagcaaggcgaaaccacgtgtcccggctcacacagctgggaagtggctccggtgagctggaaatcaagtgcctggctctagtctgtgcctgtcccctcagctacgctgacatggaagggctggggcctcgctctggggccagcgggagtgggtgcctggggatccgctccccccagtcacccccttacctgctgtgaattcatcaccacctctgtcttgcgctcctccttggctggactcggggctggggcccggactgggctcggggccgccgcgttctccttggcagtggctggggcggagtctccacgctccagcacctcaatttccttctccaacctggggagagggtgtgcctgtgagggtgactcctgcatccccggtggggctctgggcaccttctgtacgacagctccccagtgtcttttttttgagacagattctcgctcttgttgcccaggctggagtgcaatggcgtgatcttggctcgctgcaacctccacctcccgggttcaagtgatcctcctgcctcagggtctcgagtagctgggattacaggcgtgcaccaccacacccagctaattttttgtatttttagcagagacagggtttcaccatgttggccaggctggtcttgaactcccgacctcaggtgatctgcccgcctcatcctcccaaagtgctgggattccaggcgtgacccaccgcactcggcctagctctctgaatttaaggctcccaggcagccccaagaggcatcgtgctctttcatgatgggggaaactgaggcacggagtgcaaaagccacatggccagcaggtagcagaggcgggatccaaaccagggctgactccctgtgtcccctgacccctggcctgcgctgtttatgtcactgtctgtatcaaatgaactctcctttcccgctcaa

SEQ ID NO: 33112 - DNA, 1540 bp, Artificial sequence
  DNA replication origin
ccagtggctcagacctgtaaccccagcgctctgggaggctgagacaggtggatcccttgaggtcaggagttcaagaccagcctggccaacatagtgaaaccccgtctctactaaaaatacaaaaattagccgtgtgtgctgcacgcctgtagtcccagctgctcgggaggctgaggtgggaggatcacttgagcccaggaggttgagctgtgatcgcaccactgcaccccagcctgggcgacagagcgagaccctgtctgtaaactgcatttcacggaacgtgtccgcttctgtatcgatagcgggacagccaccagccgggattgacgctggcgtctgaagtgcttctggcctggtttgttgtgtgttaattattcataaggagagtgtcttcttgtcttactgtagaattaaaaattaatcattaaaaaaatccagacaggcctctcagggattttgtgaaaatcactgggctgaggatgaggaatgaactgtgaggctgcctgtgggattttctaggggttgcggtgggggtccaggtgcctgtgtctgtgcggggcctgtgtctgggggcccaggtgcctgtgtcctggtgtctgggtggggtctgtgtgtctgggggcccaggtgcctgtgtcctggtgtctgggtggggtctgtgtgtctgggggcccaggtgcctgtgtttgggtgtctcggtggggtctgtgtgtctgggggcccaggtgcttgtctggatgtctgggggcccacaggtgcctgtgtccgggtgtctgggtgggatctgtgtgtctgagggcccaggtgcctgtctggatgtctgggggcccaggttcctgtgtccgggtgtctggatgggatccgtgtgtctgagggcccaggtgcctgtctggatgtctgggggcccaggtgcctgtgtccgggtgtctgggtgggatctgtgtgtctgagggcccaggtgcctgtctgggtgtctgggggcccaggttcctgtgtctgggtgtctgggtgggatccgtgtgtctgagggcccaggtgcctgtctgggtgtctgggggcccaggtgcctgtgtccgggtgtctgggtgggatccgtgtgtctgagggcccaggtgcctgtctgggtgtctgggggcccaggttcctgtgtctgggtgtctgggtgggatccgtgtgtctgagggcccaggtgcctgtctgggtgtctgggggcccaggtgcctgtgtccgggtgtctgggtgggatctgtgtgtctgagggcccaggtgcctgtctgggtgtctgggggcccaggttcctgtgtctgggtggggtctgggtgtcaaaggcccaggtgcatgtgggagtccggatgcacttctgtgaaggggcgttgggctgtctggggggtccatgtgacctctcctctgaccctcatctctctctccgcttccacctcccgtgcagacaagcgagtctccaacacgcccctgaggacggttgacggctcccccatgatgaaggcaggtgggttggcccccaggctctgggccccagatc

SEQ ID NO: 33113 - DNA, 1117 bp, Artificial sequence
  DNA replication origin
gggtgtctgggggcccaggttcctgtgtctgggtgtctgggtgggatccgtgtgtctgagggcccaggtgcctgtctgggtgtctgggggcccaggtgcctgtgtccgggtgtctgggtgggatctgtgtgtctgagggcccaggtgcctgtctgggtgtctgggggcccaggttcctgtgtctgggtggggtctgggtgtcaaaggcccaggtgcatgtgggagtccggatgcacttctgtgaaggggcgttgggctgtctggggggtccatgtgacctctcctctgaccctcatctctctctccgcttccacctcccgtgcagacaagcgagtctccaacacgcccctgaggacggttgacggctcccccatgatgaaggcaggtgggttggcccccaggctctgggccccagatccagccgctgtcagggaccaagtctcggtccggggggccgggtggggcgggggcgacaccgacctgctctccgcagcgtctgacggggccgtggttatgggggtggcagctggaccgaggccgaggctccgagcctggggtgggggccccctctgctttgttgccctggtcccacgccggcccacgcttccccgagaagacgggccccacgcatggcggctctaaccgacgcgacctcacggctttcattccaccctaatctcacggctccctcctggggcccgctgggggtggcgctcacgcctgaacatgctcgctgcaaatcttacctgctccagtcctcgggcagtaggactggctgccccgggagaaagtgggtgccccgtccctggaggcaaccaagccaggtccccagcaccgctgcgcttccgagaagcaggggaaggtgggggttgacgctgagtgccacacggtgctcaagtcaggctcgaacccctggtctgccgccttgaatttctccgcctgccagaggggtgggacctcagtacgccatcctggggcccggcacaggacaggagcccaataatgagaaatcgtcgcagtgggcaaaaccactgctatgtgagtgagctggaacagcacagaaagaaggcagagggccgggcgtggtggctcacacctgtaacccaccccagcactt

SEQ ID NO: 33114 - DNA, 1836 bp, Artificial sequence
  DNA replication origin
cttacctgctccagtcctcgggcagtaggactggctgccccgggagaaagtgggtgccccgtccctggaggcaaccaagccaggtccccagcaccgctgcgcttccgagaagcaggggaaggtgggggttgacgctgagtgccacacggtgctcaagtcaggctcgaacccctggtctgccgccttgaatttctccgcctgccagaggggtgggacctcagtacgccatcctggggcccggcacaggacaggagcccaataatgagaaatcgtcgcagtgggcaaaaccactgctatgtgagtgagctggaacagcacagaaagaaggcagagggccgggcgtggtggctcacacctgtaacccaccccagcactttgggaggccgaggcgggcagatcgcctgaggtcaggagttcgaaaccagcctggccaacatggcgaaaccccatctctactaaaatacaaaaattagccgggcatggtggtgcacgcctgtaatcccagctactcgggacgctgaggcaggagaatcgcttgaacctgggaggcggagtttgtagtgagccaaggtcgtgccactgcactccagcctgggcgacaagagcaagactccgtctcagaaaaggcagcaaggcagggaggtgaagaaggactctggggtggctgcccaggacgggacagggctggaaggaaggagagccacccggaggcccaggtctccagcacggtccagggtgggggttgccccaggatgcagcagacagaggcatttgtcagagcaggtggtgcctgtgggcctctgtgccagtgagaccagccctggcagacaccgaggcccaggtcccccgctgatccccgtggccactgactttgtgcagtgcacaacctgctcaacagtgtgggcagctctggactagctgtctggggtggagggctgaggctgtgcagagctatagagttgaaaaacagtcgtcccttcacccagaatgcctttcaagcgcctgctgcatgccaggcattgggggagagggtattctaatgagggccacaacctctactacggtagaaaagtgaggccaaggacgttgagctggaggaaggagaatttgaaccagagggctcaggggaggggagcgttcaacgtaagaggtgacgtctgagcaaagacccagaggtgctgagggagcaaggcacgcagctatctggaggaaggtgtccaaggcacgcagctatctggggaaaggtgttccaggcagagggcacggccagtgcaaaggccccggggcaggactgcgcctggggtgttggaggaacggccaggagatccgtgtggctggagcagcgtgaggagggggagagggcggaggagagatgatggagagattgttgagggccctgtggcaggggcgggaggggacgtgggcttttcccgggagggaggcaggaaccatggggggctgcaggcaaagccgggactgccccgactccgtgctcacccacgccctctggtgactgcagggagaacagaccgtggacggtgccaggtggaggggacagggctgctgggggaggaggctgggatgggccgtggaggggcgagcagtgggcggttccttatgttctgaaggtggagcccccagggtttgaggagaaacgaggtgtcagggaggactggccaggcacggtggctcacgcctgtaatcccagcacctttggaggccaaggcgggcagatcatttgaggtcaggagttcaagaccagcctgagcaacatggtgaaaccccgtctctactaaaaaatagaaaaattagccaggcgtggtggctcacccctgt

SEQ ID NO: 33115 - DNA, 1702 bp, Artificial sequence
  DNA replication origin
ctgggggaggaggctgggatgggccgtggaggggcgagcagtgggcggttccttatgttctgaaggtggagcccccagggtttgaggagaaacgaggtgtcagggaggactggccaggcacggtggctcacgcctgtaatcccagcacctttggaggccaaggcgggcagatcatttgaggtcaggagttcaagaccagcctgagcaacatggtgaaaccccgtctctactaaaaaatagaaaaattagccaggcgtggtggctcacccctgtaatcccagcactttgggaggccgaggggggcagatcatgaggtcaggagatcgagaccatcttggctaacacggtgaaaccctgtctctagtaaaaatacaaaaaattagctgggcatggtggcaggtgcctgtaatcccagctgctcgggagccttaggcaggagaatcggttgaacctgggaggcagagattgcagtgatctgagatcacgccactgcactccagcctgggcaacaagagcaaaactttgtctcaaaaaaaaaaagagggaggactgagctgcccccaacgggtgggaagagccagggtgggggcaggtgtagggggcagattgggagtagtgttatggacgtgtgagagtggggcccctgtggataggggctgagtccaggtcaaggtccaggtggggatgggtgtgcgggagattagagccgagtgcctgggcgaggtccccggcgcagagcagagtccagggccgcagccgggcctaagcgtcgaggttgggtgggaggagggaaacgaggtggctatgggggccgaggggccaggcgatggcagggctgcccacgatggggaccgatggcccctcagaagtggtgaggacatgcagctatctggggggtgtgccaggcattgggaacagcctgtgcaaaggccctgaggctgggccgcacctggggtgcagtgtcatgggtcaggccagtcctggcagccctgttcagctcccgctgcggggcggggtctcagggaggtgcctggtgatccccagtgctcgtcatcttcaagcaggcctgggggtggcgggcagccaccagtcgctgttaggatgcaggctctgtgtggtttctgcaggaatgatttttacagagtggggcgaggtgctggctgtggagttagggccctgatgagtagcaagttcgactatctcaggagggttccttcattctgagtctaaatagatgacggcgtgtccaaccgttggctggaaggaggcgtcaagtcctgggagcttggatggtcggggcgggggctgtgggtctgcagactgagccccagtctccgccgtgaccccgggcaaggcaggatctctctgggattcacctgctcctctgagaaaccaggaatggtggggctcgagggctcacgtttataatcccagggctttgggaggctgaggtgggaggattgcttgagcccaggagtttgagaccagcctgggcaacatagtgagacccccatttccaaaaaagataaataaattagccgggtgtggtggcgcacacctgtggtcccagctacttgggaggctgaggtgggagaatggggtgagccaggaaggtcatgactgcagtgagctgtgatcgtgccgctccactccagcctggccaacagagggagaccctgtatctatttaaataataggctgg

SEQ ID NO: 33116 - DNA, 903 bp, Artificial sequence
  DNA replication origin
cggatttccctccagagcccagctgggtacctggtgcccggctcagctttcaggcagctttctggagtggatgaatgattgggcagtgagcccagggctgaacgacctctgagcccagctgtgggccacagggggtgaggccctggcctgaacagcgtcatctgcttcacatcgaatcggggtcctgattccggggcagacgccagacccacacgctgggagcacacgtgttcggggctctggcccaggtggagggagggcaggggccggggtgctcgtacctttggtctcgtcctcgtagactttgatgcccagagggagcggctgccgagggagcagcgtggtgctggacagcaccctggtctcccctgtcaccttgtccttctccacagtgatctcaaccgagtacatggctggcacgagagtcacggggttacaccacggcctgcccgcccccgcacccccccgccgggctgcggccaagccagggaggggggagccagcagcgcagagccaagcagcgatggggcaggcggagccggggatgcctgggcaccttctcgacgcggccctccccaactctacatccctccatagctccccagtgcctggagacgaccagtctgaacacctctccttggcatttgaggcccatcctgctgtccgcccagatggtcctcgtccctgtactctgcactgtgtcctctgtttcgccaccaaactattgtctgtcaagctcaggttccagcccagcccatctggaaagccttcattgttcccggatctttttaatttttttgagatggagccgccttgctctgtcgccccggctggagcacagtggtgtgatctggactcacctcccggttctagcgattctcctgcctcagccttccacgtagc

SEQ ID NO: 33117 - DNA, 981 bp, Artificial sequence
  DNA replication origin
gcttgagcccagaagtttgagaccagcctgggcagcatagcaaggctccgtctctaccaaaaaaaaaaaaaaaaaaaaattaccctggcatggtggtgcgtgcctgtggtcccagctacttgggaggctgagatgggaggatcacttgggcccaggaggttgaggctgtagtgagccgtgatcgcaccactgcactccaacctgggcaacagagtgagaccctgtctcttaagaataaaaaataataataaagaattgctagcgtgacagaagccacagaaaatgcacatccagggggctgtgagaagtctcacagggtgaggatggggccgggggaggcttcccagaggaggcaagcaggggctcatcagagacacgcagtgcatgggaaccacacctggcagagccgcagcccctgcaaaggccctgaggtaggatggagtcagctgggctggagggctgaggggagttgggctgcaggagtgaggggagacgggctgcaggggtgaggggagacgggctgcaggggtgaggggagacgggctgcaggggtgaggggagacgggctgcaggggtgaggggagctgggctgcaggggtgaggggagacggggtgaggggagacgggctgcaggggtgaggggagacgggctgcaggggtgagggggaaccaggttggtcagggagttgaggagctgggctcacgcagggaggagaagggtgctttgcctggaggcagggggacaggcggggccgtgtcctgagggctttgggaagccttgggtgcgttgggtcctgacggtgctgaggtctaatttggttttaagggctcctcctagaggtcaagaggcaaacaggctgtgggagatgccagggaccccaggaggaggagggaagctccacactgaagccccactctctctctttctttttctttttatttatttactttctgaagaaagagtttcactctgtcgcccgg

SEQ ID NO: 33118 - DNA, 857 bp, Artificial sequence
  DNA replication origin
tgtggggtgggggccggggtctcgggggccggctcacatgatggagcagcatttacaacggtgcttcttcatgtcgaggtcctgggggtcgctggtggtggcctcgggccccgcctgattctcttccctggaggcggcctccgtgggaggctcggcagcactgccgttgggtggtgcaggctccttgggctcagccgcgtcttcgatgaccaccagctccgccgtgatggtatcttgaaggcccagcaccttcttggtctcggcctcatcctccacgttctggtaacccatgaagatcattgtgaccgggggctcctggccgggctggatccccggcgggccggacgtggcctcgcctggctgtgcctgcacaccggtgatctcccgccgggagggcgtggtccgggctgccccctccacagccccccgggtctctgccgccccggccgtggaccctgcctcgctcagcgtgacctcgtccgctttgtggatgagttcgtccacctcggaggagctcagggggtggatcccgttctcggcggtgccgtccacagcatggaccactgtacaaggagagacagagagaatgacccagctccaggcaggagggacagagagagtgacctggctcaggcaggagggaaaccttggcaaggcttgtatcctcctccaggctaaagaggaaatcacgaactagattacaccgtcagaactgacagacaattaaagccccctgttggcatctgtggatgcagccaatgccgtacaatgaggaaaaaaaattttttttgagacggagtctcactctgtcgcccaggctggagtgcaatggcgtgatctcagctcactgcaagctc

SEQ ID NO: 33119 - DNA, 1085 bp, Artificial sequence
  DNA replication origin
aggaggaaggagggcccagtgggggcgggagctcgggacaaggagtggctcactcggtccctgccctgtgcagggggcaggtcaatgacccctggttcgccccgtctagaagatagcccaggggttaccggcccctcccgggtgggggcatgtccccggggttccccctcccccagactccattgtccactggttgggcccacacagggcataggggcacagcagaggggcctgtcctccacccaagacctttagcccccaaagaggcacggcctcaccccaactgcctgagattggggggccagcgccttggccagggaaccccatagagcctcacttccagggcctgagcaggcctcagtacccacccccggctcccggggccctctctggcggggtgtcccctcagagaaaggcacaggtaggaggcccagagggtggcaggctggcctgggccgcgtggaggctgcgggtcccacccgccaggaccccggtgggcgcgagccgcgtctgtgaagctgccgtgacatggggggtccttgtctcgggaaaagcgggtctgtcctgtctctctcctaccaggcacaagtgcacggctctggttcggggggagtgttggggcgtggtgacgggtgggggcccctgtccctctttccagcgaaagaaaactcggaaggaacatgtaacaacacgccaagtcctggacccgtgaggctgtgggtggagggtgggcaggcgccgggaggggccgggctggtgggtgtctgtggtgtggggtgggggccggggtctcgggggccggctcacatgatggagcagcatttacaacggtgcttcttcatgtcgaggtcctgggggtcgctggtggtggcctcgggccccgcctgattctcttccctggaggcggcctccgtgggaggctcggcagcactgccgttgggtggtgcaggctccttgggctcagccgcgtcttcgatgaccaccagctccgccgtgatggtatcttgaaggcccagcaccttcttggtctcggcctcatcctccacgttctggtaacccatgaagatcattgtgaccgggggctc

SEQ ID NO: 33120 - DNA, 2375 bp, Artificial sequence
  DNA replication origin
gggcccgaggccaccaccagcgacccccaggacctcgacatgaagaagcaccgttgtaaatgctgctccatcatgtgagccggcccccgagaccccggcccccaccccacaccacagacacccaccagcccggcccctcccggcgcctgcccaccctccacccacagcctcacgggtccaggacttggcgtgttgttacatgttccttccgagttttctttcgctggaaagagggacaggggcccccacccgtcaccacgccccaacactccccccgaaccagagccgtgcacttgtgcctggtaggagagagacaggacagacccgcttttcccgagacaaggaccccccatgtcacggcagcttcacagacgcggctcgcgcccaccggggtcctggcgggtgggacccgcagcctccacgcggcccaggccagcctgccaccctctgggcctcctacctgtgcctttctctgaggggacaccccgccagagagggccccgggagccgggggtgggtactgaggcctgctcaggccctggaagtgaggctctatggggttccctggccaaggcgctggccccccaatctcaggcagttggggtgaggccgtgcctctttgggggctaaaggtcttgggtggaggacaggcccctctgctgtgcccctatgccctgtgtgggcccaaccagtggacaatggagtctgggggagggggaaccccggggacatgcccccacccgggaggggccggtaacccctgggctatcttctagacggggcgaaccaggggtcattgacctgccccctgcacagggcagggaccgagtgagccactccttgtcccgagctcccgcccccactgggccctccttcctcctggtgctaatttggggaccccaggggccgcccccggcctcttctccatcctgcttggaccagggtcctgggtcttcccaaccataccccgagatcaggccccacctgccagctctactgggcttggagcacgtccgggcagtggagggagggacacagcctgggacaggaagcctcttgggttggagcaggagaccctcatttgccacccagaccaatgtgagcctgcccccagccccctctcattggaagtggcaaggggcttccctcctgggggcagctacactcgtccccagaggcacattcgtgcacattctcacagacaccgtctcacacgttggctttggacaaccaggccccaacttggtccctgccctagggacctccagcctggtgcccagtgctcaggccacctcctggtccagtcaccacctgcagcctcggcagggcaggtacaggggccacctcggatgggagcctgggtccctgcctccgctctgcccctgggtggctgggaggagaggccctctcgggggtgacctgggcgtcagccgtggaaccccctcctcctccctggagtctgcctgagtccctcgagccgcgagccttcgctgaagtgcccttgctataaccccctctgcttctggtgtgtgacgaggcccccgatgttcttgattttcccagagaagcaaataaacagcgtgaacagccccagttcctggagttcttgcctttcaacctggcgaggaaggcgtggccaggccagggggtggggcctgccggcctttgagccattaaagggaggctgagcagggttgcggtgtgctggcttcacctgcctgcacccgctcaccctgagcgccttggggtggtgggaggcgctggaatccccactgtgcaggtaaggcctggctgtaaggggctgctgtgggggggcaggactggcttcccggggggccctcgggttctgcggccgccccgtcctgtcctttgttcctccctttgctgggctcacagcccctgggtgatgacagagggtcccctggacacccacaagctctgtagagaagccggcccctgggaaatacacaggaggcctggggaggaggtgtctgtagagaccagtgtcatgctcacgggaaggtgctgccccgccagccccactctctcacgctgtagtcttggagaagtcgctgcctcctctgggcctcagttttcccatctgtaaaataagccttcgtggccgggcacggtgtttcacacctgcaatcctagtactttgggaggccgaggtgggcggatcacaaggtcaagagatcgataccatcctggccaacatactgaaaccctgtctctactaaaaatacaaaaacttagccgggcgtggtggctcacgcctgtaatcctagctattcaggaggctgaggcaggagaatcgcttgaacctgggaggcggaggctgcagtgagctgagatcgtgccactgcactccaacc

SEQ ID NO: 33121 - DNA, 1178 bp, Artificial sequence
  DNA replication origin
gatcacctgaagtcaggagttcaagaccagcctggccaacatggtgaaacccgtctctactaacaatacaaaaattagccgggtgtcctggctgggcgcggtggctcacgcctgtaatcccaacactttgggaggccgaggcgggaggatcacgaggtcaggagatcaagaccatcctggctaatatggtgaaaccccgtctctactaaaaatacaaaaaattagccaggcgtggtggcgggcgcccgtagtcccagctctagggaggctgaggcaggagaatggcgtgaacctgggaggcagagcttgcagggagccgagatcgcgccactgcactccagcctgggcgacagagtgagactccgcctcaaaaaaaagaaaaaattagccgggtgtgggggcgggtgcccgtagtcccagctactcaggaggctgaggcaggagaattgcttgaacccgggaggtggagattgcagtgagctgagatcacgctaccgcagtccagcctgtgcatcgcagcgagactctgtctcaaaacaaaagacaatacctaagacgggtgctgggtacaaggcctgacatgaaggaggtgttcagatgatggctctgggggaggggcaatctgggttacttcctggaggaggtgtccatgggcttcagcagaggaagccgtggagaagcagaaacaggcagcctcgagacagagagagctgcaggtagaggaggagggcgaggtttggggtggaggaagagggcctggtttggggtggaagaggagggtctggtttgggttggaggaagagggcctggtttgggtggaagaggagggtctggtttgggtggaagaggagggtctggtttggggtggaagaggagggcctggcttggggtggaggaagagggcctggtttggggtggaagaggagggcctggtttggggtggaagaggagggtctggtttggggtagaagaggagggcctggcttggggtggaggtgcccacagaaattggggtttcgtgctaaggccaggagcagggtgtgagaactgtgccctgcagatgccaggagccacagaagcgatgcgagcaggtgtgtgacctccgggaaggctcctggaactgagcccagcagcaacctggacccttgggagagggcgagagccggaaggcactgggt

SEQ ID NO: 33122 - DNA, 770 bp, Artificial sequence
  DNA replication origin
acaggcagcctcgagacagagagagctgcaggtagaggaggagggcgaggtttggggtggaggaagagggcctggtttggggtggaagaggagggtctggtttgggttggaggaagagggcctggtttgggtggaagaggagggtctggtttgggtggaagaggagggtctggtttggggtggaagaggagggcctggcttggggtggaggaagagggcctggtttggggtggaagaggagggcctggtttggggtggaagaggagggtctggtttggggtagaagaggagggcctggcttggggtggaggtgcccacagaaattggggtttcgtgctaaggccaggagcagggtgtgagaactgtgccctgcagatgccaggagccacagaagcgatgcgagcaggtgtgtgacctccgggaaggctcctggaactgagcccagcagcaacctggacccttgggagagggcgagagccggaaggcactgggtcagggtgtcacccgctcgctccacggccccacctgggcccagcgggacaaggtccacggtgttcctttgcccatcctggctttatggcgacaaggcccaggcggggatgttgtctcagatgggacgaggtgtccagctgggcagggcagggtggagaaccaggatgtgggagccgggaaactggagttgctgtcagtccttctctctgggcctcagtttctccatttgacatcccttagcaaggggccatctgtaattgtcagatggaaaaatccca

SEQ ID NO: 33123 - DNA, 1124 bp, Artificial sequence
  DNA replication origin
ataaaatagaggctgggagtggtggctcacgcctgtaatcccagcactttgggatcacctgaggtcaagagttcgagaccatcctggccaacatggcaaaaccctgtctctgctaaaaacacaaaaattagctgggcgtggtggcttgtgcctgtaatctcagctacttgggaggctgaggcaggagaagcgcttgaacccaggagccggaggttgcagtgagtcgagattgtgccactgtgctccagcctgggcaacagagcgagagttcgaatcaaaacaaacaaaaaaagccacaggcggccacacatagaccgtcactgacctcctggagcttctcttctcagggaaaggaacttccagactcagaaaactggggcaggaaacatccaggccagtttttccagcccaccggatctcaggcagcttccaggaggattgcctgaactcgctgaaattgcccaattccctcctgggcacatggttttcagatgatgaacacacaccctgcaccggggctgaggcctcaccctggcgtttgaatcctgggccccgggtttagtccacaggaggagaagccacactggctgctgggagggaatgggaagcgggcagccgccgtggaaaacatggatcagtgcttcagaaagccagacagcggcgccgtctaaccccaccgtgcggctccgaggaatccaccccagataaccgaacacagcggctctcaataaacatgttcacagcagcatgagccacgggagccaggggtggacggaaacagtggcacgagccacaggagccaggcgtggaaggaaacagtggcacgagttacgagagccaagcgtggaaggaaacagcagcatgattcacgggagccaggcatggacggagtccacaggagccaggcgtggaaggaaacagtggcacgattcacgggagccaggcgtggatggaaacggagaggagcagagagcaaggctctgacgccagccacagcgcagatgcaccctgaggatgtagggctcagacggatgcccgacacgaaaggccacacagcgtgtgatcccatttccatgaaatgtccagggccaggcgtggtggctcacgcctgtgatcccagcact

SEQ ID NO: 33124 - DNA, 992 bp, Artificial sequence
  DNA replication origin
gctggggcagtgagacgctctgaaggccacaggcccccaggatcccaccccgtccgtctctccctccctgctgtccctctgtgagccacaccctgcggctgtcagcggcagtgatgggggctgcaggggctggggacagagggggatgagtttccagccaggcggcctgggagggtagctttaatccccacctcggttttgtcttagaagcagttgcatggctgtgctccaggccgtccagggttcaggctgagccaccgtctaggtctagacgtcagtgtccatcaggacctggcgtgccctgcaagcagacatgtgctccttcgacctccgtcaaccctggagatgaagcagggaaggggccctggctggaggcttggacatccatccggaggggcggagtggcctcgaggcggtgtgtgagtccccggggaagatgcaggggacgctgggtggccggtggcacgagtgaggctcggggtcccgcagccccccgtggtgtgggtgcctgagttggggggtcctcgaggaggacaagggagggaactgaagggggccaggacacccggtagcttggctgccgggggctctgtgatatgctaagtccctcctgctcaccactaaacccaagaggaaaaggaattcctggcagagtccaatttaaagtcaacaaacaaacaatgtgggaaggagagaaggaatcccaggaatgtgggcgaggtcctcctcccgccggggccaccctggacccggcgagaaatcgaaggtcccccaaggacccacgtccaggagccaacagcctctctgtgcaaaccagacaaccctgcaggaactgtgcttgaagaaaccgtggaaactgcccccaaccctcccgtctctatttctttctctgttttattatctcattcttggctgtgaggtaaacaggagaaaatgagaaggtggttctggaggacccgaccgaatttgctttcgtgacagggtcaagcgcc

SEQ ID NO: 33125 - DNA, 1707 bp, Artificial sequence
  DNA replication origin
aggccaggggggtgggggctcacacctgtcattcccagccctttgggaaacccaggcgggaggatcccttgaggccaggagttcaaggctgtagttagctgggatcccaccactgcactccatcctgggccacagagtgagatcccatctcaaaaaattaaataaagccaggcccagtggctcacgcctgtaatcctagcacttcgggagcccgaggcaggcagatcgcctgaaaaccctgtctcggccgggtgtggtggctcatgcctgtaatcccagcagtttgggaggctgaggtgggtggatcacctgaggtcgggagttcaagaccagcctgaccaacatggtgaaaccctttctctactaaaaatacaaaattagccaggtgtggtggtgcatgcctgtaatcccagctactcgggaggctgaggcaggagaatcgcttgaacctgggaggcggaggttgcagtgagctgagatcgcaccattgcactccagcctggtgacagagtaagactctgtctcaaaaaaaaaaaaaaaggaaaggatggagtgaagtgggtagttgttcatgcctataatcccatcacttcgggagggcgaggcacgaggattgcttgaggccaggactttgaaaccaccctgggcaacatggcaaaaccctgtataaacaaaagtcaaagaatcagctgggcgtggtggtgcacgcctgtggtctcagctattcaggaggctaaggccgtagtctcaccagagcccaggagatggaggctgcagtgaaccgagatttcgccactgcactccagcctggatgacagggcaaaatccagtctctaaagcaacagaaaaagcaaataaacaaataaggaagggggggcaggggtctttctgtcaagtgaccacccacagcagcttgtggttcggacggagacgcagggcctactgggtccctgctcctgctgggaggtcctgcgggcaatgagctgtgttagaagccaggggttgccgacgatggacatgaaacaggtacaggacagggcgccgccgggagctgcagccagccccgcaggaaacagccgcagccagagagaaaggcaggaagggcccgggagggtcaggaaggcctcgctgaggaggcagaatttgatctgagggggaagggccggccacaaaggcaaactccccggggtggggtgaattgagttccctcaaagatctgtctttgcgtgaaccccaggcacctacaaatgggaccttatgtggaaatagggtttctgcagatgtaattagttaggatgagatcattagggcgggcaccaccgcagtgacaggcgacttcgggagacaagggaaatttggacacagatgcagaggagaccgccgtggggcagcagaggcagaattgggagggaagcggccgcaagtccaggagggtcagaggtggctgtcggcaccaggagctggaagaggccgggagggtactcgcctggcaccttgcacaccttcacttcagacttccggcctccagagacgagagtgtatttgtgttgttttaagccgcacagcctgcttacctggtcccagcaggccccggaagcccattcatcctgcggggacttaggccagccaggcgtgctggggcctcgtgtggtgatggggatgggagacagacgtgggccagagcgctggcccccctccacggccttg

SEQ ID NO: 33126 - DNA, 1466 bp, Artificial sequence
  DNA replication origin
cctgagggccggcccccagtgctggcacatccccaagccaagccccacccctcttttttttttttgagacagagtcttgctccgtcacccatgctagagtgcaatggccccatctcggctcactgcaacctccgcctcctgagttcaagcaattctcctgcctcagtctcccgaggagctgaggttacaggcacccaccaccatgcccagataatttttgtttttttagtgggagacggggtttccccatgttggccaggctgatcttgaactcctgatctcagggatccacgcacctcagcaccctctttggaagttcctagcaagttctctgcctgagttcagacccacagggcctcttaggggacgggggagggtcagggcccagctctagctgaactcccccggggggaggggggaggggggaggctcaggacccagctctaggggggattgaggaggatcagggcccagctctagctgaactcccctgggggtagggaggagggtcagggcccagctccagctgaactcccctgggtggggtggggaaagagggtcaggctggggaggggagcacagaatggcggggtgccaggcctgggggagaggcggatggggtggggaaggatgggtctgggcagataacgctgtggccttttcctgttggcctgagggcccagggtgggggtggggagaggctggtctccctgaggtctgggcatagggaggtgtcctgggatgagaagactcttgagaagtgactttgataattcgggggcagatccttgggcccaccaccccttgcagggacaggggtccttcttggggtgggggatgaacagagactggagagggtgggggagaaaggagttgaggggctaatttacaggacctctcaggccgggtgtggcagctcacacctgtcatcccagcacactgggcagctgaggcaggaggaccccttgagcccaggagtttgagaccagcctgggtaacacggtgagattctgtgtctacaaaacattttttaaaatgagccaggcgtggtggaactacttgcttatagccccagctaccgagaggctgaggcgggaggatcacctgagctggggaggttggggctgtggggagccgagactgtgcctctgcactccagcctgggcaacagagtgagaccctgcctcaaaaaaataaataaacaaaaaataaataaagcccccattccctttaggatctctacttcctataccaacccactgtcccagcttggaggggcgggaccagcctcgagccgcagttgattcccagagcacagagcacaggacggaagtggttctgcatggggtatagtgaggccagggaatagcaatgcattcctgtccgtgagtcctggccatcaggccttggggtggcctcaccgaacccccactccaagctccgttcaacagaaatccaggaaatgg

SEQ ID NO: 33127 - DNA, 1421 bp, Artificial sequence
  DNA replication origin
ttatactttgagcaagacaggaggcctggcggggccacgatcagaagtgggttttaacacgattccgaagggttagactggtgcttggaacctggtggtctctactgctgccagctgccactcagacccccggccgcccctgcctgtctgctttcagggcggggcccatcccaggcactccgcgaacagacagaagcggctggttctggtggtgtgaggatgggggtctccaggggagcaaatccacagtaacacactgggcttctcccagatccaccggacattcctgatgagtgaccctggctgcagatggctcttggtgagtctccgttgaccgggtggttcgggccaaaggaccttgccgtgcgatgcctccatggagctcggcggccacccctaatccgggctggaatcctctggcaccagacgcccggcggggctccaaggctcctgggcccacgccaggccccggcctgaaacgcagcactgctggaataaaacacgccagagaagcagggcgctaggctcgcctggatttggggaaacgagaattgtcatgtcttctccctccgtaggttggtgttaatgaaaaacccccttttcagcatggactaaatcccgctaattctatttagggagcagtgtctactccgggccgggaactgctccggtttccaaccgcagcctcccgtgagggtcccagtgtggagggccggggtcatcccctcactctgggatggctcccaacccgctgacctggcctccccgtcaggcaccctcacagctctgtcagactcttcatgtgatcagcgctcctgggaacattagtttagggtgttttctgctgctgggatggtggcccgggagggaccctcctggtgaccctgctgggcctggccctcagtttccccagccgtaggctggcagcctcgaactgtacgagctccaggccacagtttccccagctgtaggtcagtgggccagggactgtagggggctcgggcctcagtttccccagctgtaggcgggtggcttgggcctcagtttccccacctgtaggcgggcggccttggattgtatggagcccgggcctcagtttctccagctgtaggcggatggccgtggactgtgtgtggcctgggcctcagtttcccccgctgtaggcagatggccgtggactgtgtgtggctttggcctcagtttccccagctgtaggcggatggccgtggactgtgtgtggcccggacctcagcttccccagctttaggcggttggccgcggactgtgcaaagtccaggcctcagtttccccagctgtaagcgggcggccgcccactgtacaaggtccaggcctcagtttccccagctgtaggtgagaggccgcggactgtacaaggtccaggcctcagtttccccagctgt

SEQ ID NO: 33128 - DNA, 1350 bp, Artificial sequence
  DNA replication origin
ccggcggccgccccagccccgcctgcgcttccggggctgcgccgggggcagagtccgggcggcgggaaaggcgcgcgcccccgatggcggccgcgcacgcgcgctggggccaacggggacgcgcgacgggctacgcaggcgcacgaggggagcggacgggaggcgggaagggccatccgggcgcgcgagggccggacgggaagcgggaagggccgcgcgccgccgaggcggggcaaaggcgaagtgcggggacgcgcgcggagggggaggggcgcgggaggccgcgtgcgctagggacggggcgcgcgggggccggaagcgggccggacgggggatggggacgcggccagacccccgggaagcccctgacccgccccgcacccgcgcccgccacgcggagaggaaggggagagcccgccgccccctcccgcccgagagggggcgagatcggccccggggaggccggcgcggcggcgggggcagggctgcggcgcggggagggcggtggggcgcggggcgacgtgcgactcacccgtccatggcacacagagcagacccgcgggggacggagtggaggcgccggaatagcaggaaccgacccaacggctccgagttatagactcacaaaatggcggagacgcccgcacacgtcccccgcgcgcgctgcccattggctcccgctgcagccagggggcggggagagccccgcgggcccccgccagcacctcccactggccagaaggccgcccgggggcgggacccagagaaatcgcaggcgcctattgggggaggcggttattcctcaaggccgaaggcggaaacggcttgtgtagtcgggggagggggagaaaatgggatcacgtgacggcgtctgagccagtcagctggcgcgtggctttgcgggagacgccatcttgagagtgggtacgtggcgagtcaggcggcgggaagcgtgctttgcccaggctgccgccatcttgcaagtgggcaggacccgcccgcctgggccgtgagggcaaagggagtcgcatcgccatcttggagtcgggcaggaaaccctcagggctccatgttggttgtgggcacatggccaaaaagtccgattcaaactgagcgctcacatctgggtgatcgcgcggggagggaaaggccgcgtcgcgtcccggacacgccagggctgtttccacagtggccacagatactgcgggcgcgccatgatccggggtcacccccgaccgttctttgttcgccccggaacagcgaatcccgactgcggagatagggaaactgaggtccgggccccgcacagtccgcggccggctgcctacagctgggaaaactgaggcctgg

SEQ ID NO: 33129 - DNA, 1807 bp, Artificial sequence
  DNA replication origin
tctgtcctccgccccggggccggaggggcctctccagggacccccgcgggcgccgtcatggggaggggccttcccggctctcgggccggggcagcctttccgggcggctttgctgggcgggcttcccttgggagaggtgggagccccctccagaaaggccgtgtcccgccgagcgcttcctgcgcgaggccctccctgggaataggaagcgggagaggctggagatgtttcgcattctttccgttttcctgagaagtttttcttgggttcagtcacttttaaaagtctgttaaacgtggtccgtgcagtctgtggtgtcagaagaggcgcagccctagagtgggtctggaccccttagcatgcgtgcgggcaggtgggtcctgcagacggcgagacgagggctccccgctctcggacccagcaccgcgggctcgggggccgcgcactcgcctcccggagtgaggcaggaggcccggaggctgcccttccgacggacgctccgagtcacttagggcctcgccgggagttgcagtggccgggagaagccgtggggagctcactgttgggtcaggacctggccggggctgaagggagggcctcggacagtccggctttctatccaccttccccccggggtgtcccgaggagggagagtcgggtcgggcggggctcgggttgatcagtaactgaggctgtgttctggtcggtctgttaatttttattgacggtttccacggccgcctcctgctctcctcggtggatcgggctccactctgctgagaggcaccctcttgggggcccacccctacccgggtggaagctctggcccaggcctgtgagtttgccagtttcagcctctccgaggcgtttccaacttactggaaagcacacagcagcccttgaaccctctcagcggcatctagcattcctcggggcttccgatgggggtgtctttgtcttggaacgtgtggggcctggtccagaggtggggcctggggtcctgctgggagggaggggcgccaaaggacaatggtggccccttttcaagttgcagtcaagtggacggctcacttccctgcccttctgagctttctctagcggggcctcgtgcagccagagggagccctgcggaggtggcagctgcagggacctacgggctctcctggcccggggacagctgggtgctcctgctgctgagtggccaccaggctaacgttgtctcctttctttctctctacagcattgtcccagatatagccgttggtacaaaggtaggcacttctcactttgcttctccgtgacgctcctctgaccttgtgccgaccccgggggccaccccccagcgctgttgcgttggctagagggcgcttttccattcctaaggggcactacccttggtctggaatctggagttgggcggtagggtttgaaccccgggctccagtgcccgtgagttttgggggcttgggtttgctggccgcccctcaggtctggaatctgagctgctcttcggttcttgctgtcagcagcgagggctctgtgtgccccaggcctgcctttggaacttctgcctctagaggctggaatcgtgccgttcagtgggaaacctcatgttgtggctgcctgggagactcttggttttgataggaaaagagccacctggctgtggaggggacctggatagaatccagcctatttgagtggctaggatgggcatttactggttgattttgacgttaagtttttttgtttttgtttttgttttttatttttgagatggagtcttgctttgtcaccaggctggagt

SEQ ID NO: 33130 - DNA, 1109 bp, Artificial sequence
  DNA replication origin
tttggaacttctgcctctagaggctggaatcgtgccgttcagtgggaaacctcatgttgtggctgcctgggagactcttggttttgataggaaaagagccacctggctgtggaggggacctggatagaatccagcctatttgagtggctaggatgggcatttactggttgattttgacgttaagtttttttgtttttgtttttgttttttatttttgagatggagtcttgctttgtcaccaggctggagtgcagtggtgtgatcttggctcactgcaacctccacctctcaggttcaagcgattctcctgcctcaacctcctgagtagccgggattacaggtgcccaccaccatgcccagctaatttttgtattttttttttttttttttggtaaagatggggtttcgaacattgttggccaggctggtctggaacacaggtgatgcaccccccttggcctcccacagtgctgggattacagttgtgagccgccagacccggctgacattaagtatctttgatggcatctggttagaacagcagcaaactgtcaaaggtggtgtttggggcaagagaaaaatgaatgtgccacgtctctggggtgtgcgaatcttgcagccccatggagggtgaggccagggctcagcatgtgaggaaagggggtcagaacctggagaagaagaaggtcctggggaggcgattctcgagggagctgtagtcctcgcttagctggggtagttggttaatgattctgctggtcattgtgggttgagggggctcccgacttcagggcttgtgccccgagagcctcccgcagggcgagcccacagtggtggcgtcctgagccagcagccagttggtttctggtcagtcagcagtggtgcctgggccaggtttcggtttttcccaagtggactgctgtctttacgcgctgcctgccccgatcttcctggagataaaacctgtttgttcagtgtgggaggagggagaggtactttcatctgaagcatttgcaacaatccctagatgtgtctggcttgcaggcagtcgtctcttccctgcttctgtgggcctgctttccagctggagtggccctcagcttccatcg

SEQ ID NO: 33131 - DNA, 2101 bp, Artificial sequence
  DNA replication origin
gacccagatgataccccccctcccccccaccaccagggagccctcagctgacctgggcccacacctggctacgctgtcctttagcccaggacagagcaagctcttgttcagtgtggggttaaagacacctaggaactgtgctgtagggccccagctgcagactggaagtcctggggcgtttcctgtcaatctgtgtgcttcaggacaggtgccctgaagggaccctcctggggtacctggcagctgctgtgaaggcagtggaggcgctaggcccagctcgtgtctcctggttgctgccctgtggagcctcggagcctccaggtgtcccttccgttctgctggggcgccgttgagctgagccaagccggcctgtgccgcctgggcaggcatggagtttgctgccgcagacagttgtgggcaatgccaggccacttgcccatgggaatgagattagggcttcaggcaggcggccaagaggaccgctcagaggaagcggccccgcccaccactccagtcaaagacagggtccaagatgccctttttaaggtttgtgcagccagcacatgggagccgcatgggcgcttggccactctccagcttgggggaggaccagccctggtgtcctggacggggtcggctcctgggctcccccagcctctgagctggaggggagagcagacaggaagcgacttcctgtgggaggcgaaggttggaggccctgcgtctcaggtgcacccatcctcccttcctcccgtcctcccttcctccggtcctggcactgctgtgttttctgatcgcgtggtttccacctgaggcggctggctctgacccctttcccctgggcctgcgcagccccgccttgtgctcatagggggccccagactctgaaagcgagaggactcgagggtctgttttcagtatttggcttcatctgtgtccggccggaacctcagggccgccgtgacactggacactgttcattctctgaccctaaagtcttggggactgaacaggtgccatttgggtgggcgccgggcctgtggaccctgagtgattcctggttccggcccttgtggctgctcgattgcttgtttggtgacgccctgagtgcttgtgggattggtgggagactcagggctgcagttagaggtctcattggcaagggccagtccctgttccccatcctccttgagcaggtgccggagtctcccgaggctcttgccgtccgcgtcgggaggaggcagctgtggggctttggaggctcgggcagtcttccttccaggaagctcttgagccagggccagggcaggagtggagctgaacgtgggtggaggggaggcggccttaagagaagaccaagcgcaggctcggggaggccagcgttggtgggggctctttggccaggtgtgggggcagctccttgaccaggcatgggggtgtgtggagctgggggttgtctgaggggggacagggtgtgatatccactggttctttctgatgcgatggccctgggcccttcagcaggtgggggcaggctcttggcctcaatcctgatacgggagatggaggctcctttgttccctgggatggccctgtcctggggggcctgggcgttgctgccctcagcgcctgcagaggctcgctttgcagaccaagcgcctgtgctccaaggtcctcagacccgagctttgttttctgtgtaactaagggccgtaaccaacgtctcctccaatttcactctttgaataaacgtgtgtcttcaatccttgcagcgggggggatgtctgccgtcctgagcctaggatcagtctagtgcaattcttagaagttgatccaattacatagaaataaccagtgaatagattgtttctggagagaaaatggacaggtcagaagtgatggagccgctgtggagctcccccggccctagtcacggccgcgataccagcggatcactgggcgggaggccgtgtctctagtcctcagtctcgcgtgtgcagagacggaggtcgggtttcttttccgggctggaaaacaggagaggaggggctcctgcgagagtgagggaggcagcgctataatttggttctcttgcgaggcc

SEQ ID NO: 33132 - DNA, 1669 bp, Artificial sequence
  DNA replication origin
tctttgaataaacgtgtgtcttcaatccttgcagcgggggggatgtctgccgtcctgagcctaggatcagtctagtgcaattcttagaagttgatccaattacatagaaataaccagtgaatagattgtttctggagagaaaatggacaggtcagaagtgatggagccgctgtggagctcccccggccctagtcacggccgcgataccagcggatcactgggcgggaggccgtgtctctagtcctcagtctcgcgtgtgcagagacggaggtcgggtttcttttccgggctggaaaacaggagaggaggggctcctgcgagagtgagggaggcagcgctataatttggttctcttgcgaggccaccagaagtgaggacggctgcctgggccctgccgtgtgctgctgggggggctggctccatggagggggtcctctgccctgctggctggtggctgaggccccaggcctgtgcccagggccgctggcagcacagtgaggccacgtccacagcagagttggccgtggagatagtgtacgtggtgccctccgtagctgagagcctcccagccccacactggctgagtacccagggcttccagaatttggaaaaaggagcagtgttttggtcgtggagctgtggggtgccgtgcgcgtccatgggctgggtctgcgctcaggctgccctgccgtggaagtgtgggtgtgggtatgggttgggggtctgggaccccaggcagcccaagtgggagcagggccggccggtggggaagggaggctctggcctggtgggaagtgcagctccgcgttgtcccttctcttgcagcggggatctgacgagcttttctctacttgtgtcactaacggaccgtttatcatgagcagcaactcggcttctgcaggtaaggccgggactcggcccagggcaagacccgtgggtgtctttccctggaacaacgttacgttcttgttctgggactctactttccatctccaactgcaggggcccatggtccacgctacagacccaggtccaagttctcgctgcagagaatttccagggaggcgctggatggatggtccaggctggcacttggacctgtgggcgggttgtcaggagctgtcgggagcaggggtcctgactgtgcaggtcttggcctctcgcgctgctggttcacatgcaccctcctggggctcagggttggtctccgtagcaggcagggctctagggggatagcagggaccttcctctgtgggctcctgcgagttggtgcctgcatctcatggcacccccttttcagcaaacggaaatgacagcaagaagttcaaaggtgacagccgaagtgcaggcgtcccctctagagtgatccacatccggaagctccccatcgacgtcacggagggggaagtcatctccctggggctgccctttgggaaggtcaccaacctcctgatgctgaaggggaaaaaccaggtacctgagccgcgtttctccggggtgctcacaccgtgcaggcggggacgaggagggcccagcgctcactgcctccccaacaggccttcatcgagatgaacacggaggaggctgccaacaccatggtgaactactacacctcggtgacccctgtgctgcgcggccagcccatctacatccagttctccaaccacaa

SEQ ID NO: 33133 - DNA, 1065 bp, Artificial sequence
  DNA replication origin
ggcactcgagtgcccagtccgcccaggctgccgccgtggatgcggagctgcctgggaaggtggtgtgggcatgcagtcgctggggaaccaagaccaagcgtttgaatacctgcagcttgaggaatggcaaaggtgggagggaaaccagctcctgcatacggagaggctgagattataccaggtgcacctagaaataaatgagacactaatcatcgcacccacaacctccaccgcgagcgggcgctgtgctgcgggatgggccccaacccggccggcgggcggccccggcagagccttcgcgggcagatccgctgctccagggggggccgtggtcccgacgtgggggacactggaccgtgctgtgctggccgtgcagagagcagcaggtgcatcaccctggtgcagggccgggcccgtgccgccggggctccggactgagcggccctaatagaccactctgcacactggcgccgcgtcgggcagcctcttaccgaaggccgcggccatggtctggtccagcgagggctggctgtccccggaaggcaggtctgggcgtgtgtagtcacggctcttgtcattgttgtacttgacgttgaggctggtgagcttggaaaagtcgatgcgcagcgtgcagcaggcgttgtagatgttctgcccgtccagcgactgaggggagagggaccgtgagacgtcgccgggccagggccagggcgggcgccgtcccgggagccccactcaccagcttggcgtgctgggcgctcacggggtccgcatactgcagcagggcctggaactggttgttcttggtgaaggtgatgatcttcaacactgtgccgaacttggagaaaatctgcaggtcccgggccacagcatgagctcctgcccggtgcccaccagccctgccaggcccctcccgtgtgcctgtgcccacagcaatagcagccgacctgccctggcggtgatgggaccacctcacctggtgcagcacatccagggtcacagggtagaagaggttctccacgatgatcctgagcacggggctctgcccggccatcgccatccctg

SEQ ID NO: 33134 - DNA, 1055 bp, Artificial sequence
  DNA replication origin
ccgccgccgccgaggggatggccaggggggccagggcgccgtggacgttcggaacggaaaggcctggaaaagcaggaggtgagatgagcggcggcgcccccgactccaccgcagagtgggagaggccgacgctccccgtcctcatgcaccgaggagccgagccgcgcgggaggcggccctggctctggccctaccctgggtgcctgtggggtcgtccgacccccgcacagccacccgccggctcctgcaccagcgcccgcctctcctcacagcacgggccgggccgggcctgggctcatctgcatgcgccccgcccacagcacagaaaagctccggctccgccagcacagacacggggccctcggcaagcagggcccgtcccgggaccaccgcgcatgcgcgcccatgcctccatgcagacgaggcggccgccgggcggcacgcgctgctccgtccacggccagcactggggcggccgggccccggtcccagaagggaagcgggaggacggccacgcacacacgtcccgccgccggtcatgctgctcagcctcgggccgcgcgcttaccaggccactcaaattcaactactagagacatccctccaaccactggcggtcctcgcgctcgcccggaggtgcttgaagggaaccagaccacaaagactgtgcgattagcggcttctggctggcgccgtccacacgtgggcctccacagccctgtcctaccactgccctggccaagcctgctctgtggacgtggcgtcccctctcccgggaagggcccctgacctggcactcgagtgcccagtccgcccaggctgccgccgtggatgcggagctgcctgggaaggtggtgtgggcatgcagtcgctggggaaccaagaccaagcgtttgaatacctgcagcttgaggaatggcaaaggtgggagggaaaccagctcctgcatacggagaggctgagattataccaggtgcacctagaaataaatgagacactaatcatcgcacccacaacctccaccgcgagcgggcgctgtgctgcgggatgggccc

SEQ ID NO: 33135 - DNA, 825 bp, Artificial sequence
  DNA replication origin
ccggagagcagggtttgagggggaatttttgttttttatttgtttatgtttttgttttgtttcaagcaacaacaggaagcagaagtaccgtgcagtcagttggcaaagaaattccggatcagggcaagaaaaaaaatagggaaaggggaaggggagaaaagaaaaaaagtagcaaaaaaacacaggtcagtaaatacataagaatcaggtagtgttctatcagtcacactccacacacattccagttacaggtttacctcgacgggcacacggtaagagaagcaccttcactcacatgccggcagagacagcgctgctggaggggctcccagaagccgatcccaaccacgccccccaggagcgcgcgtgcagctccgctcgcggccacctcagccaagccctgcagcagcgctgtctcccgcagctgtggcacaagtcagtctctaaggacgattacaggcgtgaagggagatcgagtctgttagtgcacggcctcgctcaggaggagctggagggacagcacccggctcgtggtaagaggcacaggcagggagtgcgtcctgggcccccgcgagggagggccaggctgggcaccgccttgaggaagtcacaggagttgccgggaaacagaacagcctgaaatgctgattccaggaggatcccatccatcaagagttacatattttgggcctcttgtttcacccaagctctccccgaggggaatttaaccattctgggaaataacggatccaccagttaagtgacaggctctcgagccacaggggctgcccacaccccgccgcgctaaccctgtgtgtcccgctg

SEQ ID NO: 33136 - DNA, 1160 bp, Artificial sequence
  DNA replication origin
gcagcttgtgcccgttcaggtggctcatggctgggggagcagcacccgcgtgaccaggcgcccgagagggaacgcagcccccgcccctgccccctccaccccggggccgccccggcctcttacccagctgggcctggttgccgtccgccatctgcactagggcgttctccttcttattgaacaggatcttcacgcgctgcacgtcaccgtagacgccttcaaaagcccagggatggggcctgagtctcctgctgcctgccccgcccatctccccgtcagccccggccccgcgcacccccacaaggcccggctcagcccggccgggtttgctttatcggccactgcggagctgcgtctcgcagccacagggcgcgctaacaggagcagctccgttcagcaaagtcatagcatccaggacaggtaagctgccagcgggtggccacggtggcatatgccaccgacaggtctaactctgaaaagcatgcagggcgataaaccatgcgtacgtatctacgggaccaaataaaattcgcaaaccgaaagcaaaccataaaacgaggcggatgccacggagcatcagagtgccaaaccgcaaactcataatacgtctcagggcatcaaaatcatctcaattaatgaaaacaaggtaataaaagtgtgaacgataacataccgaaaagaataaagaggctttggggtgtgactctctttagagacagcagagcaaggcagcggagggacaggggagagggagaggtcaaggggggcgagttgccaatcgtccacacgaggaagacagtccccgcaggcgtgcagtggttgatggatgatgaagttgtcaggatgttaatattcaagggcaggttggtttccggagagcagggtttgagggggaatttttgttttttatttgtttatgtttttgttttgtttcaagcaacaacaggaagcagaagtaccgtgcagtcagttggcaaagaaattccggatcagggcaagaaaaaaaatagggaaaggggaaggggagaaaagaaaaaaagtagcaaaaaaacacaggtcagtaaatacataagaatcaggtagtgttctatcagtcacactccacacacattccagttacaggtttacctcgacgggcacacggtaagagaagcaccttc

SEQ ID NO: 33137 - DNA, 1220 bp, Artificial sequence
  DNA replication origin
tgggggacctggcgcgcggcttccgcggcggggccaagcccccgggcgtgtcccccggctcgtcggtcagcgacgtggaccaggaggagccgcggttcggggccgtggccaccgtcaacctggccacgggcgaggggctgcccccgctgggcgcggccgatggggcgctgggcccgggcagccgggagtccacgctgcggcgccacgcgggcggcctggggctggcggagcgcgaggcggaggcggaggccgagggctacttccgcaagatgcaggcgcgccgcttccccgactagcgcggcggggccgggggcgggcggggggcgggccgagggcgcgggcggccgcgcggatgctcaataaagcggcagaaaccgaggtccggctcttggtcattcgctctggcccgcacgccccacgcagggacccccactctcagggccgggcccaccccgcccgtggccccacctggcgcttcggcggacacccgggcgggagtcggggccgcccgcggcacagaaagaggaagccagcaacgaaggcggaacggagcgaggatacagaagatttattcgaagtccaggtacagactggccaacctgcctctacagcgtccacagcgaacacagggctagacaagggaggagtttctcaaacggttttaatcggttctctccgcgtcacaagccatcgggtaaggcaacggaatgtgcgtggggtcccctgtggctccgcggtcacaatactgagcctggaattgctgttagcaaaatatacatttgtgtcaccataaaaaaccgcgccgccgcccctcgggtctcacaacaggtataaaaaattataaatatttacacccttgttacacgcttttacggaaaggggatcctaggagagcccccgggacaggacgcgggggcggtagaaagagcacagagaagacaggaggagcgcccgccttccgggtcccagcatcagaggcaggcaaaacacagaaatgagactttggtccaaaatttgaaggaagaaaaaaccctgaagtttgagagcaagttttctaggcgactgcaggtgaaggcgtggtgtaaggcaaccggaggcgatgccagaggcggcgacacgcccgccccttccctgaagctcaggggctctaagataggaccggggctccctgtgcctgacccactgggcggccccgcctgctctctggaaactgggtcctg

SEQ ID NO: 33138 - DNA, 1848 bp, Artificial sequence
  DNA replication origin
cgaggagctcatcccgctgctgatgctgctcagcttggccttcgcggcccctgccgcctcggtgagcacctgcaccggggcctgtgccagcctgtgggcaccacggctgggagcccacccccgccacctcggtgaacatccacactggggcctgtcggtgaacatccacaccggggcctgtgccagcctgtgggcaccgcagccactgccacctcggtgaacatccacaccggggcctgtgccagcctgtgggcaccacggctgggagcccacccccgccacctcggtgaacatccacaccggggcctgtgccagcctgtgggcactgcagatgggagcccgcctgagcgccccctccctgtgggcaccgaggcctgagcgccccctccctgttggcagatcatggtggccgagggcatgttgtactgtctgcagtcccggctgtggggccgtgccggggggcccgccggggcggagggcagcatcaacgccggcggctgcaacttcaactccttcctgcggcgtacggtgcggtttgtgggtgagttgcgggacgcgccccgaccctgagctacctccacatgcagggggtggggctgtcccgggtccccagctccccgcctggccgagccttccgccctgcaggtgtccacgtgttcggcctgtgtgccacagccctggtgacggacgtgatccagctggccacgggttaccacactcccttcttcctcaccgtctgcaagcccaactacactctcctgggcacgtcctgcgaggtcaacccctacatcacgcaggacatctgctccggccacgacatccacgccatcctgtctgcacggtgagccggacccccaactcccctgactgggagccttcttccgccccggtgaacatgcggggaaacagagacacagagaggccactggagctggggtccccaggtgggcggggctcacgctggacgcctcttacaggaagaccttcccgtcccagcacgccacgctgtcagccttcgccgcggtctatgtgtcggtgagtccggcccctcactgcccttcccaggccctcttgctgacccgtggggagccctccctgaccccaacccccatgccccagatgtacttcaactcggtcatctcggacaccaccaagctgctgaagcccatcctggtcttcgcctttgccatcgccgcgggcgtatgcgggctcacgcagatcacgcagtaccgcagccaccctgtggacgtgtatgccggcttcctcatcggggcgggcatcgctgcctacctggtgagtggcaggttctgatgggggtcggcatgggttcccaggggatctgaggggggaggcatgagtgcccacagggcctgagtggggaggctggcccaggggtctgaggtgggaggcaggctcagggggtctgacaggggaggctggtagcctgaggggtgaggcatggttcccaggggttctggcggggggctggcccagagggtctgaggggggaggcatgggtgcccaggggctctaggggggaggcacgggtgcccagggtgtctgaggggatagacgtgggtcccgaaggggtcttagggggaaggcatgggtgctgaagtgtctcgcccttggaatgctggagtcagaatcccgtgggctcagacctgcccgatgtgctgggtcagcaaccttggggtgggaaccggtcccactggacaagagcttgccagcccccacccccggtccagagccccccgcggcaagtccaacgatcacaggggaggagccctctgagccccaggcctcacccccagacccctctccccgacaggcctgccacgcggtggg

SEQ ID NO: 33139 - DNA, 1733 bp, Artificial sequence
  DNA replication origin
tactaaaaatacaaaaaattagccaggtgtggtagtgcacgcttgtaattccagctacttggagggctgaggtgggaggatctcttgaacctggaggcggagtttgcagtgagccgagattgcaccactgcactccaggctgcgtgacagagtgggggaaaaaaaaaggcttgaggccatggctgggtgcggtgcctcacgcctctaatcccagcactttgggaggccaaggcgggtgtatcacttgagcctaggagttcgagaccagcctgggcaacatgacgataccctgtctctactaaaaatacaaaaacccaggaggcagaggttgcagtgagttgagatggcaccactgcactgcagcctgggcaacagagcaagactgttgtggatggacagatgggtagatggatgagtaggtggatagatgggtaggttggtagatgggtgggtgggagggtggatagatggatggatggatgggtgatcaatggatggatgggtggatggataggtggatgggtgggtgggtggatgggtggatggatggacagttgggtgggtggatagatggatggctgcatgggtggatgatggatggatgaatggatagatgaatgaatggctaggtgatggatggatggatggatgggtactgttgggtgcatgggtggagaatgggtggatggatgatgggtgggtggatggatggatgaatgaatggctgggtaatgaatggacggatggatggacggttgggtgggtggatagatggatggtaccattgggtgcatgagtggatgatggatggatggatagatgaatgaatggctggatgatgaatgggtggatgatggatggatggatagatgaatgaatggctgggtgatgaatggatggatggatggatgggtaccactgggggcatgggtggaggatgggtggatggatggatgggtgaatgaatggctgggtaatgaatggatggatggacggttggatggatgggtaggtgggtagatgggtgggtgggtgcatgggtggagaatgggtggatggatgatgggtgggtggatggatggatgaatggctgggtaatgaatggacggatggatgggtgggtgggtggatggatggacagttgggtgggtggatagatggatggctgcatgggtggatgatggatggatggatggacagatgaatgaatggctaggtgatggatggatggatggatgggtaccgttgggtgcatgggtggagaatgggtggatagatgatgggtgggtgggtggatggatgaatggatggatggttcccagtggatggatgggtgggtgatgggtcggtgagtgggtggatgttgggggcataggtgtttgggtggatggaggatgagtgagtgggtgtgtgatgtgtagatggtcgagttacagatggagcatctgtggatggatgaataactcatgggggaaagagtggctgggagcgggttggatctgtggataggtgagtgagacggtggatggccctgaattcatggagggctggacagacgcctccgcgagggagagcagggtgaacctggcccaccttgtccccacagctgcccatagtggcttcttccatcgtatccttgtacttcctggagctgaccgacctcttcaagccggccaaggtgggcttccagtgctatgaccgcactctctccatgccctacgtggagaccaacg

SEQ ID NO: 33140 - DNA, 1102 bp, Artificial sequence
  DNA replication origin
gttctcccggatgccccccaccaccacgcggggactggctcccgcccggagaccccccgccctcctcggcgatcccggccccgaccccccgatcccgggtgtaggggcgcccggaagccgcgtgctgggccggggcgcggggaggccacgcggacgccgctctctgcagcctcagtttccccgaccgcccctcccccgccggcgccggccaccgtgtctcccccgggctccgcctgcgcgcccccctccagcgccgctttctcccctccagccacggcctgcggcgcccgcggcaccatgatctccaccaaggagaagaacaagatcccgaaggacagcatgacgcttctgccctgcttctacttcgtggaggtgggtgggggtcgcgctggggcccgggggagacgcctcggttccgcccgcccgcagagacccccgcgctgggggaccggagccggcgcagctgccccggcagtggcctcggggcggggcaggaccggggtgtccggcggatggggggtggggcagaggacttgggctgtgcgggtcgagtaggagctccagaggaaccgaggggggtccaggccgtgggaactgtgggcaggtgctaggaggggagcccttctgaccaaggtgtggtcagaggggctgggggtcgggggctgggggcctggagggggcggggaggccggagggggtggggttgggtgcaggtgccgcgtgggctccgaagcctcagggtctgagttcacctctgctaatggtgaggctggtgccctgcccctaacctctctgggcctccgcttttccactcctggagctgataggaattaatatctacagaatacggaaacgtgttaggcacatagtgaggagtttatgaccataaatggaaccccttgccctgtgcggtggctcacgcctgtaatcccagcactttgggaggccaaggcgggtggatcacctaggtcaggagttcaagaccagcctagccaacatggtgaaacccctctccattaaaaatacaaaaattaggctgggcactgtggctcacgcctgtaatcccagcactttgggaggccgaggtgggcagatcacctga

SEQ ID NO: 33141 - DNA, 1501 bp, Artificial sequence
  DNA replication origin
ggggctcgggggtcgcgtcctcctcccttcgggcctgcggcggtgacggtcccgtcctcccctcccgggtggctgcggtcggcccggggggcgccatcgagacgggggcggaggcgggggcgggggttggggtttcggggtctctgactgtctccgtgtctctcacggtctctcgccggctccgactgcccccgccccgcgcctccgcccgcccctccgcggagcccgccgctcgctggtgcgcgtttccatggcgaggctcccagggcgcccggagcatcggagacaaaagagctgggggagggggactggggggtctcccggtgcctccctcccttccccccgcactcaccctcgccccctccgccgcgccggggtccaccctccgcctggccgcagccgctcggtgcgcacggcgggattgcggggcgcggggctgggggctgggggctgcgggatgcgggcagggccctcgggacccgcactcgggcagtgcctgctgtctgcgtgcatttcctcctccatatgcgcagccctgcggggtaggggctggttgacccccgttgtagggatggggaaactgaggcttgggcaccctgggtcgcaatccgaggtctccgggccccaaacggcaggatttacaaaaatcggtttttgggccgtgcgcggtggctcaggcctgtaatcccagcactttgggaggtcgaggcgggcggatcacgagggcaggagttcgagaccagcctggacaacatggtgaaaccccgtctctactaaaaatacaaaaatttttagggtgtggtggctcatgcctgtaatcccagctactcgggaggctgaggcaggagaatcgcttgaacctgggaagcggaggttgcagtgagccgagatcgtgccactgcactccagcctgggcaacaagagcgagactctgtctcaaaacaaacaaacaaacaaacaaacaaagagtgacttccaggctgggtgcagtggctcaggcctataatcccagcactttgggaggcagaggcgggaggatcccttgaggccaggagttccagaccagcctggccaacatggtgaaaccccatctctactaaaaatataaaaattagccggacatggtggcaggcgcctgtaatcccagccagatgggaggctgaggcaggagaattgcttgaacctgggaggcggaggttgcagtgagccgagatggcaccattgccctccagcctgggcgacagaaggagactctatctcaaaaaaaaaaaaaaaaacaaacaaacagtgactccagagggttggagccctgctagataccttagtttgctcataacaggcactgctgcccccgggaagagggtcgcctgccataaatgcggaaacagttaaatggcgatgggaataggatgggaactcaatggtgttgctacctttggatggactcggaggcagcccagcttcctgggacaggactgcacggactgcctggggaggggtc

SEQ ID NO: 33142 - DNA, 1400 bp, Artificial sequence
  DNA replication origin
gaagcgggcatggatcagggcacccccgcagaagtgcctgccttgattctgaatggaggccaggaacgggaactggcggggcctcgccttccggccgccaacgatgtccaaaagggggctggagcctgggtcggggggagacagctctgagatccccaagaatccacacagtggccgggagggcgtgtgaagctgcagcctcagctctatccacccagtggggctgcggggggacccaccctcccccatcgtcccactccctaagaggacagggggcccctgagtcccgcacaccgtccgccctcacgcctttcgcgggatcgtccaggccgggctggctgtgtgacccaggccaagccgcttgccttctctgtgctttaagtctgagttctgccctggcagccgggccctagcacagatgggggaccaccggcacagagaggcactcaccggccctcgaggacgccagcagaccagccagcagggccaggactgtcagccgggtcatggcggggcaggtctgtggctaaggcggcggctgcccttatacacaggccttggcagttggtggcgtccccgcccaggcccagggacagccccactcagtgggaacacgggaaattgcccaaggcctccaccgccaactgctccctgggccagcctgggctccccctacattctgcactgatcctcagtttccctctctagaagatggccacacccccaggggcaggtgagggtgtcaggaaccagtggatcccggagcccagcacatggcgggcatgcagccagcacccaggaacattgccagctcagagtcccagtctccccatcccaagccactggggctccagcactgcccgctgggcctggcaccggggggctcagggcagtggagctggcagtcctgcgttgagtcctgcgcgtctgtatgggtgattattattattattattattattattattttgagacggagtttcgctcttgttgcccaggctggagtgcaatggtgtgatctcgactcactgcaacctccgcctcccaggctcaagtgattctcctgtctcagcctcctgagtagctaggattacagttgtccaccaccacgcctggctaattttttgtatttttagtagagatggggtttcactatattggccaggctggtctcaaactcccgacctcaggtgatccacccacctcggcctcccaaaatgctgggattacaggtgtgaaacactgtgcccgattgggtgatttttttaaactttttcaacagctttattgagatataattgacaagctgggtgcggtggctcacacctgtaatcctagcactctgggaggccgaggcaggcagatcacctgaggttgggcgttcaagaccagcctgacca

SEQ ID NO: 33143 - DNA, 2451 bp, Artificial sequence
  DNA replication origin
ttcctgggtgctggctgcatgcccgccatgtgctgggctccgggatccactggttcctgacaccctcacctgcccctgggggtgtggccatcttctagagagggaaactgaggatcagtgcagaatgtagggggagcccaggctggcccagggagcagttggcggtggaggccttgggcaatttcccgtgttcccactgagtggggctgtccctgggcctgggcggggacgccaccaactgccaaggcctgtgtataagggcagccgccgccttagccacagacctgccccgccatgacccggctgacagtcctggccctgctggctggtctgctggcgtcctcgagggccggtgagtgcctctctgtgccggtggtcccccatctgtgctagggcccggctgccagggcagaactcagacttaaagcacagagaaggcaagcggcttggcctgggtcacacagccagcccggcctggacgatcccgcgaaaggcgtgagggcggacggtgtgcgggactcaggggccccctgtcctcttagggagtgggacgatgggggagggtgggtccccccgcagccccactgggtggatagagctgaggctgcagcttcacacgccctcccggccactgtgtggattcttggggatctcagagctgtctccccccgacccaggctccagcccccttttggacatcgttggcggccggaaggcgaggccccgccagttcccgttcctggcctccattcagaatcaaggcaggcacttctgcgggggtgccctgatccatgcccgcttcgtgatgaccgcggccagctgcttccaaagccagtgaggggtcctggggagggggcctagggggcattggggctcagagaaggggcttggggggcttaggcattcagtgggggtgcttggtaggtgaggaggggaggggattgcaaaaggaggggctcagggaaaggagggggcttggagagggaaatggggactgagttgaggagggacccaaggatattggggggctcagatggaggaggcccagagaagggaagggggtcagatggaggaggcccagagaaaggaagaggctcagatggaggaggtgcagtgaaggaaagggggtcagatgggggaggcccagagaagggaaggggctcagatggaggagggggcccagagaaaggaaggggctcagatggaggaggtgcagagaagggaagggggtcagatgggggaggcccagagaagggaaggggctcagatggaggaggtgcagagaagggaaggggctcagatggaggaggtgcagagaagagaagggcctcagatggaggaggtgcagagaagggaagggcctcagatggaggaggtgcggagaagggaagggggtcagatggaggaggtgcagagaagggaagggggtcagatgggggaggcccagggaagggaaggggctcagatggaggaggggcagagaagggaagggggtcagatgggggaggcccagggaagggaaggggctcagatgggggaggcgcagagaagggaagggggtcagatggaggaggtgcagagaagggaagggggtcagatgggggaggcccagataagggaatggggtcagatgggggaggtgcagagaagggaagggggtcagatgggggaggcccagataagggaaggggctcagatggaggaggtgcagagaaggggagggggtcagatggaggaggctcagagaagggaagggactcagatggaggagggggcgcagagaagagaaggggctcagatggaggaggaggcgcagagaagggaaggggctcaagatgggaagggggccctggaaagtctcggctctgcttctgtaaaagcgggggagttttcagggtgaaggattgcagtctgcaggctgggatcccccctaatttgcaagccggcttgctctgtgcccaggccccagcctggtgtcctccctctgccctttcctccgctactctcaggaaccccggggttagcaccgtggtgctgggtgcctatgacctgaggcggcgggagaggcagtcccgccagacgttttccatcagcagcatgagcgagaatggctacgacccccagcagaacctgaacgacctgatgctgcttcaggtgagaggatggtgccacctgtgatcccagcacctcgggaggccgacgttagccagggaaacaagtccaaacttggtctctacaaaaaaatacaaaaattagccgggagtggtggcgcgcacctgtggcccctgtgcttcaggaggccgaggcggaaggacggcttgaggtcaggagttcgagaccagcctgggcaacatggccaaactcagtctctacaaaaatatatatgtgtgtgtgtgtgtgtgtgtgtgtgtgtgtgtgtgtgtatcttgccgggtgaggtggctcatgcct

SEQ ID NO: 33144 - DNA, 1096 bp, Artificial sequence
  DNA replication origin
caggaatcccgccccagcagggggaccctcatgaccgaacgtggccccgagccgggggcaccagaagcccttgaaccccaatcctgccttgggcctcagtttccccatctgaacaatgatcaggcagtggctttgcctctccaaacccaggcagggcccccaccggctgggctcctgagccattggcacccctctctaggcttagtttccccctctgtaaagagaacccgttggccgggcgcggtggctcacgcctgtcatcccagcactttgggaggctgaggcgggcggatcacgaggtcaggagatcgagaccatcctggctaacacggtgaaaccccgtctctactaaaaatacaaaaaattagccgggcacggtggcgggtgcctgtagtcccagctactcgggaggctgaggcaggagaatggcgtgaacccgggaggtggaggttgcagtgagccgagatcgcgccactggactccagcctgggcgacagagcgagactccgtctcaaaaaaaaaaaaaaaaaaggacccgttatacccacaaaagaaagaaaagcagcagttccaacacaaacctgcacatgagtgtccacagcagtgagggtcacagtggccggaagtggagaggctcagacgtccatccacaggggcctcgagcagcacagtgaggcctccaggcgtggcaacaggacgcagccgtgaaacggacccagctgtgacccgaccacggcgcggaggcaccgtgaggacgtcacgctccgtgagagacgccggacacgaaagaccacatagtgtgtgatcccattgctatgaaatgtccaggacaagcccatccacagagacaggaagaggacgcgtgggtgccgcggactggggaggggacagggagtgacggctgatggggacagggattcctttggcggtgatgaaatattctggaactcaacagaggtcatgaccacacaacattgtgagtgtaccgaagaccattgaattgcacacttcattttattttattttattttttattttattgagacagagtctcactctatcccctagcctgcagtgcggtggctcaatcttggct

SEQ ID NO: 33145 - DNA, 976 bp, Artificial sequence
  DNA replication origin
caggcgtgagccactgtgcccggcctcctttcctctcctctttataaaggaaaaccttctctccctgagtgacgggaagatgctggttcgcccgcgaggctcagcctcgcagtggttgtgttttgtgtgtgttttgtgccgaccgttgaccttcccgtgtgcttggggccctgacacccggccgccttccacaccccccaggcccatccacccacctgtcccctgatgccccctctcacgggatttctaagccaaacccagacatttcacaatctgttctgagaattccgaaaatttaaaaaccttctcaagacaccagtgagtggggccgggtagaggggcacagagaagaaacagaacagctgtttttagcctgagcacagctggctctgccaggaggctgcacgcgtcggggcctggacggggctgcggggtgggggctgcacgcacgcgtcggggcctggacggggctgcggggtgggggctgcacgcgtcggggcctggacggggctgcggggtggcgggtgggtccacggatgggaccccgttctatgtccctgaaatccgaggcgcggagaggactcgggctgcccacagtcacacgcagccccgctctgagggccctgcagccgggctgaccgctaccaggggaacccgagaacagcacccttgggcccaggaagggggagcagcaggggctggggggaggagggcagaaaccgcctctggcaggaatcccgccccagcagggggaccctcatgaccgaacgtggccccgagccgggggcaccagaagcccttgaaccccaatcctgccttgggcctcagtttccccatctgaacaatgatcaggcagtggctttgcctctccaaacccaggcagggcccccaccggctgggctcctgagccattggcacccctctctaggcttagtttccccctctgtaaagagaacccgttggccgggcgcggtgg

SEQ ID NO: 33146 - DNA, 876 bp, Artificial sequence
  DNA replication origin
gtttggagaggcaaagccactgcctgatcattgttcagatggggaaactgaggcccaaggcaggattggggttcaagggcttctggtgcccccggctcggggccacgttcggtcatgagggtccccctgctggggcgggattcctgccagaggcggtttctgccctcctccccccagcccctgctgctcccccttcctgggcccaagggtgctgttctcgggttcccctggtagcggtcagcccggctgcagggccctcagagcggggctgcgtgtgactgtgggcagcccgagtcctctccgcgcctcggatttcagggacatagaacggggtcccatccgtggacccacccgccaccccgcagccccgtccaggccccgacgcgtgcagcccccaccccgcagccccgtccaggccccgacgcgtgcgtgcagcccccaccccgcagccccgtccaggccccgacgcgtgcagcctcctggcagagccagctgtgctcaggctaaaaacagctgttctgtttcttctctgtgcccctctacccggccccactcactggtgtcttgagaaggtttttaaattttcggaattctcagaacagattgtgaaatgtctgggtttggcttagaaatcccgtgagagggggcatcaggggacaggtgggtggatgggcctggggggtgtggaaggcggccgggtgtcagggccccaagcacacgggaaggtcaacggtcggcacaaaacacacacaaaacacaaccactgcgaggctgagcctcgcgggcgaaccagcatcttcccgtcactcagggagagaaggttttcctttataaagaggagaggaaaggaggccgggcacagtggctcacgcctgt

SEQ ID NO: 33147 - DNA, 1016 bp, Artificial sequence
  DNA replication origin
cgaactcctgacctcaggtgatccgccggcctcagcctcccaaagtgctgggattacaggcgtgagccaccgcgccctgcctttttttttttttaatagagaggggtcttgctatgctgcccaggctcgtctggaactcctgggctccagcgatcctcccccaccatctggccactaccgaattgttaagtgggtgaattgcttggtgtgtgtgaaggacatctcaataaagctgtcaaccaaaaaaaaaagaaaagaaagaaaagaaagaccttgcacacacactgctggatctagcacacgcgagagctgcccagggggctgccccgtcctcactgtacgtgggcttccccgtcaggatctgtttccacgcaaggctgatgcagcccggtcctgaccggagggtcccagcaccgtcccgcgggccccgggtcctccaggctccctgtgcgtcctggggggactcaaaagcacaggccagggcgacaggagcgctgggagcgggtagcagggagggttccgtggaacacgctgggggctttgcaggggtcggcctgggggcagaggtagtgggggccccttcctgtaccaaccgtaggtggcgcaactggtaacggcttcagggatcgcaggtgacgccgcctggggccgaggggagacccatgcggggctcaggcctgtgtctctgtctctgtctctctccccgccctctttctgtctccttctctgtctctgtctctgtctccctctgtctctgtctctctgtctcagtctgtctctgtctccctatatctgtctgtctcttcatctctgtgtctgtgtctgtgtctctctgtgtcatcgctgtctcccttttttaaaactatctctctcagtctctctggctctgtccctctttttccgtctctctctgtctctgtgtctctgtccgtctctgtctctccatctttcttgttctctcttttttctctcctctactactttctttttctttctttctttctttttttttttga

SEQ ID NO: 33148 - DNA, 1395 bp, Artificial sequence
  DNA replication origin
tcgagaccagcctggccaatatagtgaaaccccgtctttactaaaaatacaaaaaaaaaaaaaaattagccaggcgtggtggtgggcgtctataatcccagctatacaggaggctgaggcaggagaattgtttgaacccgggaggcggagattgcagtgagctgagatcgcaccactgctctccagcctggtgacagagcgagactctgtctcaaaaaaaaaaaaaaatccaaaggggaaaacagtaactggacagtgcaggaaccggcagatgccctgaccacgtggtcaaggttattaccatcagcacgagacaggccgaagccatgggcttcgacgtggggggcctgagacagacacacgccacgcccgggactccctccattgagtcctgaggccacccaggaccatccccacggagggacgctctgcagagtgaccaccagctctcctcaatggtcccaagggctgagggagggcagagggactgcgcccgctggaggagaccctgacatctgaagatgggtggcttgtgtacccaggacccagcaaagggtggctggtgatactcagggggctggggcagagggggccatttggaatcaactttcgcgccctggcttcgatcacagcctggagggttgagcaagaggacagaatttagggaagctgggggagggaggccgggggagggagtttggggagcggggagggagtttggaccctttggacttctgtaagcgtgaaatcctttccaaatgaaacgttaaaaagctttttttctttttggcctccaagttcattcagtgcttctctccatttcactgtaggtttaaaccgttcagttataaataaataattttatcctctgtcctcggctttcccccgtttccggcactgcagacatgggggctggatttgtctctgcggcggggccatcctgggcactgcagggccctgccaggagctccctccaagtcgtgacaaccacggatgtctccaggcctcacacagggacccctgggggcagaatcaccccagggttagaggattccacagaccccaagagactctgagtcccatgatcctctgccctgctgaggtcccaggaggctgcacacattgaaatccacaccctgagtgggagggagagaggaggcgagtcccgggagctggggtcccccgggtttatgccgtacgccccatcgggagtttattctggtgtccggtgtgagcagggggcagactggattttttattttttatttttatttatttatgttttgagatggagtcttgctctgttgcccaggctggagtgcagtggcacgatcttggctccctgcaaccttcgcctcccaggctcaagtgattctcctgcctcagcctcctgag

SEQ ID NO: 33149 - DNA, 1231 bp, Artificial sequence
  DNA replication origin
ttcgttcactcattcactcattcactcattcattcactcactcattgattcattcactcattcatttgttcactcattcactcactcactcattcattcactcattcattcattcatgcatattcactgagcatttgctgaaggctgggtgctgtccaggaattcgcctgttactagctaattcccaaaacagctcctcaggagggaagggctgggttttgcccgttttacagataggcaactgagtcaaatggccagggctcccccttgcccttgtcctccccacccctgcaagcgttggtcccgagcagtgagtggagtctcccctgaccctgcctcagtttccccagctgtgccagaagggctttggatggacctcgtggtggatatttccccacaatccaccggggcctggaggctggatggatgggcacgtggctcactcaccgctcagcagcaaggccagcagcacggacgccagggcagggctggggggccggtgagccatggtggggtccagggtgcacccacggtcaagctcctcttatagcccaatgccagaggccgttgagttgcccaatgcccaggctgggtccccacttcctccttttgccttgggagcctgggagtcagaacggactccggggaggaggtgggggctttgggctcaaggtcccaacctttgtgggggcggggaggctggctgtcacccacccaagtcgggggtccctggccaggtgggcaacatggccacagccctcagagcaacacatgcccacgtgccacccacaaggagacgcctccctgacgaggtccctgtggccccagcaaagccggccgtggcaggtgtgtcccgtgggtgggtgagctggaaacggacagacagcaggacgtagcaggggacaggatgcagagctcgggaaggcagggccccaccacgagtgccctcagtgcctcacctgaggccccagcgaacatcctcctgccagttttgtctgggggttttcttccccctttaaggccaggattctcaatcaagaggtgattctgcccccaggggaccctgggcgaggtctgaggacacctgtggctgtcacgaaaggggagctcctggcatggagtgggtggaggccaaggatgatgcctagcaccctgcagtgcccaggacgggcctgccccagagaaggatccagccccgatgtccacagggcccaggggagagaccagtgtt

SEQ ID NO: 33150 - DNA, 1548 bp, Artificial sequence
  DNA replication origin
gcagcggcctcggtcgtggcccggtatacagtgggtgctcaatgaatgctggctgcaggaatgggggtcccggagccctctggccgtgcccctccgagccctcgcggccctgcccgcccacctggatgaggagaacgtcgttcagtttgttctccgcgtcgtagttgttcagaaacacctgagccaccgagaagtgctgctgggtgggctcctgcgtccgcacgttgtgggctccgagcaccacgttcaccaggcgctggggtctgcgggggtggggtggtcactcctcggcgccctggacactcgccgccgcccacagccggcccttcccgaggccgcggtgcagccccagacccctccctcggcgaccctgccccgggcctccccccagaactgcccacgcgcgcggggcctggggtctgcagacggggcttagctgggtcctccccgggcagagggacagtggccgggccagggctggaggaagagggcggggcgggcggacaggggtgtggaggcggccgctcacatgtcccgcaggcagtgcgcggccgtcagcacgaagctggggtggatcaaggtgcctccgcagaagtggctgcccgggttcccccgcatctgcagggaggccatgtagggccgggagtgtggctgcgcctcgtgcccgcccacgatctccgcagctcgggcagcacctgcagggggggagtccaggcgtcagggagcccccaggctgcagggaaaggggggatggcagagcagcccctgggcctctccgagcctccgtctcccgatctgcaacccggtcagtgcctgctggctggtgggaaggactcagcgcccaggccgggggggttataattacgacgatttccaaaggcgccctggtggcagctttcagtcctgagagtcaggaaggcttttaagacgcagaccaggtggctgggtgcagtggctcacgcctgtaatcccaacactttgggaggccgaggcaggaggctcccttgagctcaggagttcaagaccagcctgggcaaaattgtgaggaccccatctctacaaaaaattttaaaattagccaggcatggtggtgtgcacctgtcgtcccagctacttgggaggctgaggagggaggatcgcttgagcccaggaggtcaaggctgcagtgaactgagatcacaccactgcactccagcctgggcaacagagcaagaccctgtctctaaaacaaaatttaaaaaaatgtttttaaagaagcagaaaaattggtcgggtgcggttggcccacgcctgtaatcccaatactttgggaggccgaggtgggtggatcacctgaggtcaagagatggagaccatcctggccaacatggtgaaaccctgtctctactaaaaatacaaacattagctgggcgtggtggcacgtgcctgtagtcccagctactccggaggttgacgcaggagaatcgcttgaacccaggaagcggaggttgtggtgagccaagatcgccccactgcactccagcctggcaacagaatgacactccgtct

SEQ ID NO: 33151 - DNA, 2073 bp, Artificial sequence
  DNA replication origin
ccaccccgctgagcctgcccgttgggtgttgggtgtgcccaccttccaggtggggagactgaggcacagcatgaagccacacagctaagaggtggcgtggaaccctggccgccgccctcctcccctcatggcagcccggtgcccggggtgggggcacggttacttacgaagcagatgccggccttgcggcgagggacgaaagtgcaaatgttatgtggccggcagaagaaggtgaccacggtgacattgagctcctgcaggacctgggctggggggtcgtgggcacccacgcggccccagcccatggccaggcactgggtgccgtggggcactggctggtcctgctgtggcagctggactgtggcgacggaggcactgaggttggctgggctgctcagctggggcagaaggcaggcggcggtgagacgctgcttccaggtcacggtggccgcccgggccgccctcccaccacacccaccacacccaccacctcaaaacgccgcggatgccgctccctccgcctgggccccacgaccccctttgtcccatttgtcactattgtattcattcattttctttccttctttctttcttttgagatggagtcttgctctgccacccaggctggaatgcagtggcgtgatctcggctcactggaacctcccggagccatcccattgggtgaggtggccagcctggtctcaaactcccaacctcaagtgatctgccttcctcagcctccgaaagtgctgggattacaagtgtgagccatagtgcccggccattcattcatgttttctttctttctttcttttcttttttttttttttgagatggagtttcgctcttgttgcccaggctagagtgcagtggcacaatctcggctcactgcaacctctgcctcctgggttcaagcaattctgctgcctcagcctcccaagtagctgggactacagacacctgccgtcacgcccagctaatttttgtatttttagtagacacggggtttgccatatcgatcaggctggtctcaaactcctgacctcaggcgatccgcccgcctcggcctcccaaagtgctgggattacagccaccgcccctggcccattcattcatcttcaaagcactttttttttgagatggggtcttgctctgtcgccgaggctggagtgtggtggcatgatcacagctcactgcagcctcaacctcctgggctcaagtgatcctcccatctcagctcatgagtggcttggcgtgtgctaccatgcccggttgatttttaaatttttcttttgtaggctggacgcggtggctctctcctataatcccagcactttgggaggctgaggagagcagatcacttgaggtcaggagttcgagaccagcctggccaacgtggcaaaacaccgtctctactaaaaatacaaaaattagccaagcgtgttggtgcatgcctgtaatcccagctactcaggaggctgaggcaggagaattacttgaacctggaaggcagaggtggcagtgagccgagattgcaccactgcactccagcctggatgactgagtgagactctgtctaaaaaaaaaaaaaaaaaaaatgtcttttatagagatggggtctcactaggttggtcaggctgctcccaaactcctggcctcaagtgatcctcccatcccagcctcccaaagtactgggagtacaggcgtgagccacagtgcccagccccaagcacttactgagcaccacctgtatgcccagtcccgttctaagccacatgagtccaataacgaacaacacagacaaaaatcctctgccctggggagctgatctttctgggtgggaggaggctaggagggccccatgaatgagaggagcacgcggttcagtggagaacagtgaatcggggagggctgtggctgtcctcgccacttccagtgaggtcaggggaggcgccggaggaggcgagggcacctggctttctgggggaacagcacaccgggcggaggcgcaggcaggggagaggggcaggcaggggagaggcgcgcaggggagaggcgcgggcgggggagagg

SEQ ID NO: 33152 - DNA, 1437 bp, Artificial sequence
  DNA replication origin
cgcccctgaaccgcccctcccacagcgctggccgggaccccgagcctggctccaaaccctcgaggcggatctttggacagaagcagctcttccccgaacactgtggcgtccgggacggccccacccgtccccccacactccctcccacggggctccgggagacaggccggccctgcacctcaccccaccgtgacctcaataaacgttgaaactccccctggctcctgtctgtccttcccatatagggaggggagggggaactgcccaccgtgacctcaataaacgttgaaactccccctggctcctgtctgtccttcccatatagggagggaaccagggagaggtcccctgggttcaagtccccgagccccaaactcaggatggggggagtcggagcgggggatgggggcccaggttgcagggggtctctctcctggatgctcgtggctgtgggttctaacccggccccatcagggtggccctgggcaggttgttattcatctccgtgcctcagtttcctcatctggaaaatggactcgccccagacgtttcctagaactgtccctgctggctcagggactccttgaggaaggggatggggatggggaagcagcctggggggcttcctggaggaggtggcagtgccagagctgcatatcaaggtgtgaacagaaacatccgaagggctgccaggcagggggcacagtccaggcagagacctgagggctagaggccaggggacggggaggagggcaggcaggggagggatgtgggtgcaggggaggggtaatggggttggagcgctatttctcgtaggaggggtaggcagggcaggagttccctggtagaagcatgagcaatgaactgggtgggggggtggccagaggggaggtccgaggcggggaagaggtgggactcacagtccagctcaaagacgggcaagtggccactagaaggaggcattagccacagagaggggacgacctgctccaggacacgtgtagagaagaaatgaagctcattgctggtgttttttttttctttttaatatttttttgagacagagtctcgctctgtcacccaggctggagtgcagtggtgtgatctcggctcactgcaagctccgccacccgggttgaagcgattctcctgcctcagcctccggagtagctgggactacaggcacagaccaccacgcccagttaatttttatatttttagtacagacagggtttcaccacgttgtccaggctggtctcgaactcctgacctcaggtggtccacccgcctcagcttcccaaagtgctgggtttacaggcgtgagcctacttacttatttacagctggcctacttatttatttttgagacagggtctcactctgtcgcccagtctgtagtgcagtggtgcaatcttggcttaccgcagcctcaacctc

SEQ ID NO: 33153 - DNA, 2633 bp, Artificial sequence
  DNA replication origin
atacagctggtgctcaataaatgcagctgacgccaagtctgatctccgtgctggaggccaagccccttccaaagatacggcgtcccccacccctgaaatccccccacccccgacttgaaacagggctgtgtagacagtaggcgcttactaagtgcactgtggtgatgttaaggcagcaaggtgggaaccctgccaaaaggggaggggagaaggcagggtagtgtgtgtctgattaagctgaggacagggcagacatggactgagcgcctgctgtgtgccaggctctgggagggcagggccattgtctccctaacccgagagccatgggggtccacttgcctgtggtcacgtcaggactccagcctggcccaggctctgcgtgtccccgggtgccctcgccccgcctattcctggagacaggcccgttggttcccttcccctccccttgtcctggagccaggaggacgttggttcttgcgacagccttggcccggccgttgcagctggaacatcgtgggggagatgggaagaggaacggggcccggagcccggggctgggtcctgggaatccctttcccgcagctgggactccagctcccctgccagttcctccaggcggaagccctcaggcttggtcctcactccagcctcccggcctggacaggaattctctctccagcagccctgccagatgcccgcccagcccctgcctcaggcggggagggcttcagggaagctcaccaaggcagaagggcgggagagattgtcagagccccagctggtgtccagggactgaccgtgagcctgggtgaaagtgagttccccgttggaggcaacagacgaggagaggatggaaggcctggcccccaagaatgagccctgaggttcagggagcggctggagtgagccggccccagatctccgtccagctgcgggtcccagaggcctgggttacactcgcagctcctgggggaggcccttgacgtgcctcagttcccaaacaggaaccctgggaaggaccagagaagtgcctattgcgcagtgagtgcccgacacagctgcatgtggccggtatcacagggccctgggtaaactgaggcaggcgacacagctgcatgtggccggtatcacagggccctgggtaaactgaggcaggcgacacagctgcatgtggccggtatcacagggccctgggtaaactgaggcaggcgacacagctgcatgtggccgtatcacagggccctgggtaaactgaggcaggtgacacagctgcatgtggccggtatcacggggccctggataaacagaggcaggcgacacagctgcatgtggccggtatcacggggccctgggtaaactgaggcaggcgaggccacccccatcaagtccctcaggtctaggtttggcaggtttggcaaaaacacagcaacgctcggttaaatctgaatttcgggtaagtatatcctgggcctcatttggaagagacttagattaaaaaaaaaacgtcgagaccagcccggccaacacggtgaaaccccgtctctactaaaaatacaaaaaattagccaggcgcagtggctcacgcctgtgatcccagcactctgggaggctgaggcaggcggatcacccgaggtcagatgttcaagaccagcctggccgacagggcgaaacactgtctctactacaaatacaaaaattagccgggagtggtggcaggtgcctgtaatctcagctattcaggaggctgaggcaggagaatcacttgaacctgggaggcggaggttgccgtgagccgggatcacgccaccgcactccagcctgggcgatagagcaagactctgtctccaaaaaaataaattaaaaaacccacattgattatctgacatttgaatgcgattgtgcatcctgaattttgtctggaggccccacccgagccaatccagcgtcttgtcccccttctcccccttttcatcaacgccctgtgccaggggagaggaagtggagggcgctggccggccgtggggcaatgcaacggcctcccagcacagggctataagaggagccgggcgggcacggaggggcagagaccccggagccccagccccaccatgaccctcggccgccgactcgcgtgtcttttcctcgcctgtgtcctgccggccttgctgctggggggtgagtttttgagtccaacctcccgctgctccctctgtcccgggttctgttcccacctctccatagagggccccaccagtgtgggtccctcatcctcacaggggaggtgccagctgggacaaggagaccagaagagactgaggttctgagcggtgaagccaccaccaggagcccagagttggggtttgaaaaccggggagggggggggggtcgcaggtcgccctctgggttcaagtccaggtctgtctgtgccttggaggggcaccgtggggaggtccctttgcctctccgtgcctcagtttcctcatctgaacaacaggggtgcgaacggccccgatcccgtgggttcccggtgggggatcccgtgggttcccggtgggggatcccgtgggttcctggtgggggatccagaggccccgtggccgggaggggacaggctccttggcaggcactcagca

SEQ ID NO: 33154 - DNA, 1378 bp, Artificial sequence
  DNA replication origin
cgtgggttcctggtgggggatccagaggccccgtggccgggaggggacaggctccttggcaggcactcagcacccgcacccggtgtgtccccaggcaccgcgctggcctcggagattgtggggggccggcgagcgcggccccacgcgtggcccttcatggtgtccctgcagctgcgcggaggccacttctgcggcgccaccctgattgcgcccaacttcgtcatgtcggccgcgcactgcgtggcgaatgtgtgagtagccgggagtgtgcgcgcccggctcggaccccgcgtcccggtctgtgaggtgggtggggggaggccggggccggggctgctggcgggggggggtccgtccagggcccgcggggcccctcgagcaccttcgccctcaggcccgtcgccggatggggacgacaaggcgcggctgagccccgacccccggggccgcccctgagccccgcctctccctccccggcagaaacgtccgcgcggtgcgggtggtcctgggagcccataacctctcgcggcgggagcccacccggcaggtgttcgccgtgcagcgcatcttcgaaaacggctacgaccccgtaaacttgctcaacgacatcgtgattctccaggtgccgccgggcggggcggggggcgcaggggcggaggccagaggcctggggagggtggaggctgcgacggaggggcgcgtcggggccgctcgtggggacctggggtggcatcgtgggctgggtggtcccctctccgcgcctcggtctgcacctctgtgaaacgggaaaatacccgccatgggccgttgaggggttaaatgagatcctgcagggaggccccgatctgctgtcaatcaacaaacttactgagaagggaggccccgatctgttgtcaatcaacaaacttactgagaagggaggccccgatctgttgtcaatcaacaaacttactgagaagggaggccccgatctgctgtcaatcaacaaacttactgagaagggaggccccgatctgttgtcaatcaacaaacttactgagaagggaggccccgatctgctgtcaatcaacaaacttactgagaagggaggccccgatctgttgtcaatcaacaaacttactgagaagggaggccccgatctgctgtcaatcaacaaacttactgagaagggaggccccgatctgttgtcaatcaacaaacttactgagaagggaggccccgatctgctgtcaatcaacaaacttactgagattctttgtgtctctccattcaccagtcctgtggcccagggcaggggccgcctctgtctttgggaaaaggggcaaaagtccccacctttccacccctgtccgcggcttgcagttctggttatttcctg

SEQ ID NO: 33155 - DNA, 1971 bp, Artificial sequence
  DNA replication origin
gcccaggctggagtgcaatggagcgatcttggctcactgcaacctccaccttccagaattcaggtgattctcctgcctcaggcttcccgagtagctgggattacaggcatgcaccaccacgcccggctaattttgtatttttagtagatatggggtttctccatgttggtcaggctggtctcgaactttagacctcagatgatccgcctgcctgggcctcccaaagagctgggattacaggcacgagccaccgcaccggtattttttttttttttttttttttttgagacggagtctctctgtgttgcccaggctggagtgcagtggcgtaatctcggctcactacagccttcgcctcgcaggttcaagcgattctcctgcctcagcctcccacgcgccacgacgccaagctaattttttttgtatttatagtagagatggggtttcaccacgttggcagactagtcttgaactcccgacctcaggtgatctgccagcctcggcctcccaaagtgctgggattgcaggcgtaagccactgggccaggcttggaccattttattttattttattttatttatttatttttttttaatggagcgggggttttgccatgttgcccaggctggtcttgaactcctgagctcaagtgatccgcctgcctcaacctcccaaagtgctgggattacaggtgtgagccaccacgcccgacctactgaccattttcaacacccaatcacacagccaaggagcatcaaacacattctacaaaacagagaatgtttattgtgccagatgctggagagtgtgggtgtgggcagctgaggtgacccgggcagcccttctcagtgggtcctgctggccgggtccgggtcccgggggtggggacaggggttgtcctcggagcgttggatgatagagtcgatccagtttacaaactgtgccaccggggcaaaggcatcggggtagagccctgaggcgcagcctccccggacgaaggaggcaattccgtggattagcccgttgcagaccaaggggctgccggagtccccctgtggaggcagacaaggtggggaagctggactgcgaggccctgcccacctgcccgccgcctgtcagggttgggaagtccctcctagggtctagccacggtgcctgttgctgcagtccgggctgggagcgggtggggagcagagggacacccagggcacgtacgaaacagacgccggcctgccggcccctcacgagagtgcagacgttgctgcgacggcagagggacgtcaccaccgtcacgttgagctcctgcaggacgctggcgatcccacggttcctgcccagaaggccccagcccatggccaggcactgcaccccgttgcccaggcggcgtccctgagccggcagctgggccacctgcacgttggcgttgatggtggccgacccgttgagctgtggcggtggggacagatcgtcagcgcgtcacacggggcagtgatgatgaccctcccctctccgggcctcagtttccccatctcaggttccactgtggttctgggatcctgcagggcaggatacccaccccacactctgctccccaaggcaagcctcggtttccccatctgtagagtgggagccgtcaccaaggctcagggcgttggaggttgtccctggatgtggcttgagtgcaggaagcagtaggtgctcagttaacaaaaaaactacagccgggcgcggtggctcatgcttgtaagcccagcactttgggagggcgaggcaggaggatcacttgaggccaggcattcaagaccagcctgggcaatgtggcaaagccccatgtctacaaaaataataaaaaaaaattgccaggtgcggtggctcacgcctataatcccagcattttgggaggctgaggtgggccaatcaaaaggtcaggagatcaagaccatcctggctaacatggttaaaccccgtctc

SEQ ID NO: 33156 - DNA, 1326 bp, Artificial sequence
  DNA replication origin
ggacataagagaaatggggctgacccagccagtgcctgggccagcccagtcagccacgcagatgaagttttccacgcagacgttcagactctgtctgcaagaaaagctgactccagaaagttccgatttccaatctgaattttctagaatttttcagcgttcagagccttccattagtgaggagagacacccccttcctgcccacctggaggggctggaggaccgtccgtgtgacggaagggagcaccacgcccctacacagccctgtccctcaccccaggcccaggcctcctcaccgcaggcggccgctcctaggaggaccagaactgccaggcgctcccagctgtgcatggtgaagccgctgtggctgagacactgacccaggcagggccctgggggtgcttttatgagggtggagggggcgggccgctccccgggtgggcagcggcccagctggggaaaggggaactcgcccgcccagcctccgccctccccgggactgggttacctcctgccagactcacaccagagtcgacaagtcgctgggagaccctcgggcctctgtgagcctgacagcctgctggccctggtggggggcagtccctcagatgggcaggaggcagagaggggggctgcacccaccccggccccaacttcaccacacccagagtcccccagggtgtttcacaatcctagctggaggccacagcgtgtaaacaacccactttcttgtcctgctaccctcccttcttttcctcctctatattagagagaaggtctgttgggggtaggaaggtcacttgacacctttgtctctgtccctgtggcctctggggcttgacaccctgacgaatagaaagttggaaaggccaaggcagaggcagctgggaagactggctacaagggacaggaaaacccagacaaactgggtggagcctgaatcatgaaagttatatggaaagttcagggatgtccgccttcaggtgtggcttgatccaggtgcctgaacaatgtccagtgtctgcttctggcttctcctttcttctctgatggcttctttcctcaccagcctcccctggtgtgtttccagggaccccacactcaacccagtggctcagtgggcccctcctaaaattcttcctcactccagccaagtctcaagggtgccttgggttggtggagcctggatcacacgccccctcccaaactgttcactgagggcaggttctgatgaacagagtcagggctggccgggcacagtggctcccacctaccatcccggcacattgagagacccagataggagcatctcttgagcccaggaat

SEQ ID NO: 33157 - DNA, 1486 bp, Artificial sequence
  DNA replication origin
ccaccctaacccacaggtccttccacatcccacccgttcctgccctttctgcccgccctgacccttcttcagccccaccctctccagaggccccgtaccttctccaggcctcgcccccaaggccccaccctacccacatgccccgccccctcatacaggccccgcccacgggccaccctcatgctccgcccatcttccagttcccgccccctacgcgccccgccccttccctgggccctgttcctacttgccccccgcttcgcgctccctctgcaggcccttcccggggcctgcaggccccgcgtctcctcccaggcctgaaggctcaccttgcagctgtcccggcgattgctctccgcgcacatcaagcgctcggtgatggcgccgtcgtggtgcgtgcgccggttgcaggtggcgcggtccagcactggcaagagcacgtgctgcaggctgtccgggcggcggcccgcgtggttgactatgccccagccggccacgtcgcagagagttcccggtgccacgtcgcggtccacgcgctgccagggcagggggcgcacagcagggcccagtgtggccttctccgacagctgagggtggaggcggacgtcagggttggggtgcgggggtgcgaggctggggagaatgccgctaggctcggggagacgggacgggggaggtgggcatcagggcaggggcgtgggtctcagtgcagcaggagagatttaggctagaccctgggtgggggtgcaggtggggatggggtgggtgcgaggctcaccagtgcagctgcaaaggtcgaggctggaaccgggatggggatgcagggggagcggggggtggggggctcccagtgcagccgcagaggtcgaggctagacccggggtgagggtgcgggggttgtagggcggggtccccatgcagcaggagaggtcgaggctggacccggggtgagggtgcagggggtgggggggctccgagcgcagcaagagaggtcgaggctagacccggggtgagggtgtgggggttgtggggcggggtccccatgcagcaggagagttcgaggctggacccggggtgagggtgcagagggtgggggggctccgagcgcagcaagagaggtcgaggctagacccggggtgagggtgtgggggttgtggggcggggtccccatgcagcaggagaggtcgaggctggacccggggcgcggtgtaggcggggtggagtgagggtgggccggggatcccagcgccgcaggagggactgcgctacacggggccgacctgtagcagcaggaggtcgtggtcgatggtgtcgggctggctgtccgggtggggcactgcgcggagcacgtcgtacaggcgcttggagggctccggctgcgacagggagtgcgcgcccaggagaacctgcaccttcccgtcggccctggggaccggacggagtccgcggtcggtgccagccgactccccccaccgcacccgggctc

SEQ ID NO: 33158 - DNA, 2228 bp, Artificial sequence
  DNA replication origin
tctcctgctgcatggggaccccgccctacaacccccgcaccctcaccccgggtctagcctcgacctctgcggctgcactgggagccccccaccccccgctccccctgcatccccatcccggttccagcctcgacctttgcagctgcactggtgagcctcgcacccaccccatccccacctgcacccccacccagggtctagcctaaatctctcctgctgcactgagacccacgcccctgccctgatgcccacctcccccgtcccgtctccccgagcctagcggcattctccccagcctcgcacccccgcaccccaaccctgacgtccgcctccaccctcagctgtcggagaaggccacactgggccctgctgtgcgccccctgccctggcagcgcgtggaccgcgacgtggcaccgggaactctctgcgacgtggccggctggggcatagtcaaccacgcgggccgccgcccggacagcctgcagcacgtgctcttgccagtgctggaccgcgccacctgcaaccggcgcacgcaccacgacggcgccatcaccgagcgcttgatgtgcgcggagagcaatcgccgggacagctgcaaggtgagccttcaggcctgggaggagacgcggggcctgcaggccccgggaagggcctgcagagggagcgcgaagcggggggcaagtaggaacagggcccagggaaggggcggggcgcgtagggggcgggaactggaagatgggcggagcatgagggtggcccgtgggcggggcctgtatgagggggcggggcatgtgggtagggtggggccttgggggcgaggcctggagaaggtacggggcctctggagagggtggggctgaagaagggtcagggcgggcagaaagggcaggaacgggtgggatgtggaaggacctgtgggttagggtgggaatagggggcggggctcgaggagggggcggagtccagtaatagcgggactgcaagggggcgaggccaggaagagggttggggcatgaggggcagggcatggaggaaggggcggtacctgtggggagggtggggctggagaagggtcagggcgggcaaaagggcaggtggcagagaaagggtgggaggtatagggggcgggcacgtggaggaaggggcggggcatggggacggggcggggcaggtggaaggggcgggaacctctgaaggggcagggctggtgcggagcgggatccctgctgtggcagggaagagaaggggtcctgagcagggcagaggtttaagaccagccgaggcttgcatggtagccggggccaagattgggtggggcttaagggaggggcgtggcctgaggtgagtggggactgagcagagcaggtggccactgagacgcgttagggcagaagtgggatccacggcaagtcaaagcttggaagagcaggaatgaggtgtgggacccccatactggaaagggcttggagcggggtggggtcgggggaacacgtggtgaggttgaggccagagggggtgtggccaggagctgggggcgggcctagaggggcgtggcttgtggttgtggcctaggcgataggcgtggcgcggggctattgactagtgaagaccaaattaacacgggagggatgagcgagcattgtggggcgggagcggcagccaggtgagggggtctaacacgtgaggccggggtgggcgcgggccgcccctcacggccccgtcctgttccggcagggtgactccgggggcccgctggtgtgcgggggcgtgctcgagggcgtggtcacctcgggctcgcgcgtttgcggcaaccgcaagaagcccgggatctacacccgcgtggcgagctatgcggcctggatcgacagcgtcctggcctagggtgccggggcctgaaggtcagggtcacccaagcaacaaagtcccgagcaatgaagtcatccactcctgcatctggttggtctttattgagcacctactatatgcagaaggggaggccgaggtgggaggatcattggatctcaggagttcgagatcagcatgggccacgtagcgcgactccatctctacaaataaataaaaaattagctgggcaattggcgggcatggaggtgggtgcttgtagttccagctactcaggaggctgaggtgggaggatgacttgaacgcaggaggctgaggctgcagtgagttgtgattgcaccactgccctccagcctgggcaacag

SEQ ID NO: 33159 - DNA, 1010 bp, Artificial sequence
  DNA replication origin
gctcatgcctgtaatcccagcactttgggaggccgaggcgggcagatcacaaggtcaggagattgagaccatcctggccaacacggtgaaatcccatctccactaaaaatacaaaaaaattagccgggcgtggtggcggatgcctgtagtcccagctacttgggaggctgaggcaggagaatagcttgaatccaggaggtgaagcttgcagtgagccgagatagcaccactgcatttcaacctgggcaacagaaggagactccatctcaaaaagaaagaaaaaaaaaaaaaagagaaaagaaaaagtgactgatgggccgggtgccggtggctcacgcctgtcatcccagcactttgggaggctgaggcgggcagatcatgaggtcaggagatcgagaccatcctggctaacacggtgaaaccccgtctctactaaaaatacaaaaaattagccgggcgtggtggcaggcacctgtagtcccagctgctcgggacgctgaggcagaatggcgtgaacccgggaggtggaggttgcagtgagtggagatcacaccactacactgcagcctgggtgacagagcgagattccatctcaaaaaaaaaaaaaagactgatgatctgagaggcaggtccgctgggaaaaggggggatggattgatgaacactgtgcttgggtgtttttggggctatggaacactcacctaggaatcacactgacgtgcaagcacgtattgagcacttactgtgtgcagagccctgggccgggcacggtaagacacatctaagccccagccctgctcttaggaatttggtaaatactgcactgcacggaagggggcccattcagccgtctggtgaccaccacgaagttggagctcactgtgtgaatttcacgtttttgtttttgttgtttttgagacggagtctctctcgtcgcccaggctggagtgcaatggcacgatctcggctcactgcaacctctgcctgatggttcaagcgattctcctgcc

SEQ ID NO: 33160 - DNA, 1424 bp, Artificial sequence
  DNA replication origin
caaagcaagtgacagacagaacacagtgggccctggcgggtggttgggggcggcttttgtccgggtgtctgcggcgtttccatgtggctctgcagagaccagagtgcaggagcgctggcgaggggtgcgggcccgcagtgggtggacggagaggagatgggagcgctggcgaggggtgcgggcccgcagtgggtggacggagaggagatgggagcgctggcgaggggtgcgggcccgcagtgggcggacggagaggagatgggagcgctggtgaggggtgcgggcccgcggcgggtggacggggaggacatgggagcgctggtgaggggtgcaggcccgcggcgggtggacggggaggagatgggagcgctggcgaggggtgcaggcccgcggcgggtggacggggaggacatgggagcgctggcgaggggtgcaggcccgcggcgggtggacggggaggacatgggagcgctggcgaggggtgcaggcccgcggcgggtggacggggaggagatgggagcgctggcgaggggtgcaggcctgcggcgggtggacggggaggagatgggagcactggtgagggtgcccatgcgttgtgggacgcaggctcgtgggcagcttcaggggccgggagatcagagtcacccagtgcccgactcagaagtgaaaatgcctctagctgaccccagccccccgtggttctggtgacctggctgaggtctggacgcgtggagtggggacaggatgccccctggtcccatcagttcctgaccacttgagccggggtgggctttgcgtcactaggtggggggggggtctgtcagaccactgtcacaagctggctgtcatgagcttctacctcactcaggtacagtggggtgggcgaggcaggcagggcatgggggtgctgagaggcggcctgtggccctgaagctctgctgtccccgcccccggcttcccaaggtcctcgtcgcctcgcggttcccccaggggtcctcaaaatctccctaagagccagggacgttggggccccgagatacagatgaggaaacagaggccatatatatggcagtgcggagactggaccgcgtctcaactcagaggactatgtggtgcccagatgttcccgtcctgcatcctccccaccactcctgttccaccgcctcctaaaccgtctcctcctccggaaccctccgtagctcctgcggaccaaaggatgcaaagatgcccaggcaggccggatgcagcagctcacgcaccagcaccataagagacccaggcaggaggatcacttgagcctgggagttcaagaccaacctggggcaacatggcgagacctcatctctacaaaaatcttaaaaattagctgggtggccaggcgaggtggctcatgcctgtaactccagcactttgggaggccgagg

SEQ ID NO: 33161 - DNA, 1037 bp, Artificial sequence
  DNA replication origin
cagggtggcttctgtccaggcatctgcctttcagtgtgttgtctgcctgtctctatactgtctctgcgtgctctccttgtttctgcgtgtctctggtatctctgcacttctctgtgtatggtctctgtgtctctgcatgctgtttctgtgtctctgcctgactctgtccctgttatgtttctccagctgctctctgctggaggttgcttagcccctgggccaagtttctgccgtttctgttgctgtccccaggggtcccgccttccgtctccagcaggccttcccagcacagtggtgcccctgctgtgtgccgacggactcctcctttctgcagctctggggagggcagcgagggtggggtgagtgcccagtgccggctcgcgaggcgggagctcaggcaccccgtcacctggctgaggcactcccactttaaggcccccccactttaaggcccccccactttaaggcccccgtcctcggccgcagactccaagctctgctgggacaccgagccccgtctcaccgtccccctggccatcctctgagggacagaccctagggcagctcccggccccactcctgcgacctcctctcgagctcaggagtgtgtgggcctccatctcccccagtcactcagcatgtgtggggcgccttgtggatgccaggggtgtccaaagcaagtgacagacagaacacagtgggccctggcgggtggttgggggcggcttttgtccgggtgtctgcggcgtttccatgtggctctgcagagaccagagtgcaggagcgctggcgaggggtgcgggcccgcagtgggtggacggagaggagatgggagcgctggcgaggggtgcgggcccgcagtgggtggacggagaggagatgggagcgctggcgaggggtgcgggcccgcagtgggcggacggagaggagatgggagcgctggtgaggggtgcgggcccgcggcgggtggacggggaggacatgggagcgctggtgaggggtgcaggcccgcggcgggtggacggggaggagatggg

SEQ ID NO: 33162 - DNA, 969 bp, Artificial sequence
  DNA replication origin
ctccgtccacccactgcgggcccgcacccctcgccagcgctcctgcactctggtctctgcagagccacatggaaacgccgcagacacccggacaaaagccgcccccaaccacccgccagggcccactgtgttctgtctgtcacttgctttggacacccctggcatccacaaggcgccccacacatgctgagtgactgggggagatggaggcccacacactcctgagctcgagaggaggtcgcaggagtggggccgggagctgccctagggtctgtccctcagaggatggccagggggacggtgagacggggctcggtgtcccagcagagcttggagtctgcggccgaggacgggggccttaaagtgggggggccttaaagtgggggggccttaaagtgggagtgcctcagccaggtgacggggtgcctgagctcccgcctcgcgagccggcactgggcactcaccccaccctcgctgccctccccagagctgcagaaaggaggagtccgtcggcacacagcaggggcaccactgtgctgggaaggcctgctggagacggaaggcgggacccctggggacagcaacagaaacggcagaaacttggcccaggggctaagcaacctccagcagagagcagctggagaaacataacagggacagagtcaggcagagacacagaaacagcatgcagagacacagagaccatacacagagaagtgcagagataccagagacacgcagaaacaaggagagcacgcagagacagtatagagacaggcagacaacacactgaaaggcagatgcctggacagaagccaccctgacgatggccgccccatcccatccaccggcctgctgtgtcctgtccccactgctcactttggatacccccagactcggcatccactaggtgccccataaatgctgaaggatttaaagacaggccaagaggacacaggctcccggcac

SEQ ID NO: 33163 - DNA, 2598 bp, Artificial sequence
  DNA replication origin
acgcagagacagtatagagacaggcagacaacacactgaaaggcagatgcctggacagaagccaccctgacgatggccgccccatcccatccaccggcctgctgtgtcctgtccccactgctcactttggatacccccagactcggcatccactaggtgccccataaatgctgaaggatttaaagacaggccaagaggacacaggctcccggcaccaaatcgaggtcgtgggtggggtcgggggcaccgacggcagggacgcgggcctgggcgcagagggcgtttattggacctgtccttcccagccgctgcttgtccaggttcagcgctctccgcgggtgaggcaaggaaaccgaggagacgcccgagccgggtcaccacaaggtccgcctggacccccggccgtcacggacggtcctctggatgcagatggtccagggatctgggggtcctgggagagtggtgtgtggactgcgggcccagctggacaaaggcaggggcttcctcagaagctctgctggtcacgcaggcgtccggcccacggccttcaacagccctgcagggcgggctgaggttaaccgcgccgaggagagtccagggcgagcggtggctcttgcagcagccgggctcaggggcagctgaggggtagctgaggagtagctgaggggcagctgggctcaggggtagctgaggggcacccgccaccagagcccaccgcacaggcagttcttgatccagcgctgctcccactgcttcaccgccgtggttctgttgggcgacttgagcatggtgacacagccgcacctgcggggaggcaggcactgagcgggttcccacttccaggcgggcctcccttacgcctgccccacttttgcttccaggcaggtctccctctgctcgccgtccctcacgcctgctccccacgtccccacctgccacagggcctctgcccatgcttctcctccccccagcaatgctgctccctgaactagccccgccacaccaagttaactgctccacatcctgggatcctggctccaacactccctctgggacgtgctccctccaccacccttgaccgtctggagcgctgggtgggggctagaatcagctgagccatccccagcggcacatctctgggagtcagcggttccgggggcccctcacctggtgcaggccttgcattcctccgtggggcaagcgccaaggtgcagcctccgcaggtggtcgatcttgggctggcctggggccctggcgggagaggggagaacgtgagggaggcctgggcaccacgaggccaggttccggcaggggcatctgtccacaggcgggggtggagggaatggccggcctcacaccatctgccaggtgggcccagatgtctgtgaacagtgaggtgggaggtgcgggaccacctgagacaggcccagtaaagggggcgggaccccccacacggaggagggttggtctcccaggtgcctggggagcttgaggcttagagacccagtaaaggggacggggcccacacagggacgagggtcggtccgccacgtgcccggggagcctgaggtgcagggaaggtgcttgtgacgctcccatttgaggctggacagaagcaggtacatggggacttccacaccacctctgcccagacacccggcctggaggtgccgggacctctgaacgacaagattctggtggcaaaagctgccctcggtggtgggtgggggacctgggtctgggtgggggtgggccggcttattctgctctcattaaatatctgaaattttcccagtttacaagcctctgacgtaaccgtcctctctttccatcaagtcttttcctgaaacccaaaccctcgtgtgtgactcattaggaggcccctcccacagtgagcacgaggaagaaaatgctggaggtcctagagccaagccagggcgccttcccggaggtcccggagccaagccgggggtgccttccctggaggtcctggagccgagccggggccttccccggagcagggctgctggaggttcacttcattttcttccttttgctcatctgtgttttctaaaattccagccctgagcaatcagtggctcagagggtttgcatgtgctccttgtcaaacgtgtgtctgaaacaggctgggggtctgacgggcctgggttcaaatcctgactcggccacttcctgaccgcgtgaccccagatgagtggggtgacaaggtcccaccctttccaggctgggtttcctcaccgtgaaatggggtgacaaggtcccacctcacagggctgctgggcagccagggtcagctcagcacacttgggttgcccaaaccccgcacattccagagaaaggccagccccgggccctgcaaggtgacctcttgcccccgggagatcctcctgatgaggtgtctgctcagcagggccctgggccatatgctaaggcgtctctctccatccacagagggatctacggcgaggcctgacatccaggggggccagagactaagggcagaggctaaggcagggcgccctgtacagcgaggccaacacacaatcaggaaacaccaaggcaaggccggggcggtgg

SEQ ID NO: 33164 - DNA, 1132 bp, Artificial sequence
  DNA replication origin
ccagatgagtggggtgacaaggtcccaccctttccaggctgggtttcctcaccgtgaaatggggtgacaaggtcccacctcacagggctgctgggcagccagggtcagctcagcacacttgggttgcccaaaccccgcacattccagagaaaggccagccccgggccctgcaaggtgacctcttgcccccgggagatcctcctgatgaggtgtctgctcagcagggccctgggccatatgctaaggcgtctctctccatccacagagggatctacggcgaggcctgacatccaggggggccagagactaagggcagaggctaaggcagggcgccctgtacagcgaggccaacacacaatcaggaaacaccaaggcaaggccggggcggtggctcacacctgtaatcccagcactttgggagggcgaggcaggtggatcacctgaggtcaggagttcaagaccagcctggccaacattgcaaaaccgcctctataccaaaaatacaaaaaatacctaggtgtggtggctcatgcctgtaatcccagctactgggaaggctgaggtaggagaatcatttgaacccgagaggcagacgttgcagtgggccaagacggcactactgcactccagcctgggcaacagagtgagaccctgtcggggagacaaaaaaaaaaaaaaaaagggagagggtgaatggaagggctgggtgcccgtgttgggggtggttcgtgacacagcagaagacaccactaggggatggagttaggggcacctagaaggaagcagcagtcatggccatgactggagaacatggagggaaggagccgtatggattcgggggggtcctggggcaggacatggagggagggagccgtgtggattcggggggacccggggcaggacatggagggagggagccgtgtggattcggggggtcccggggcaggacatggagggagggagccgtgtggattcggggggtcccgggcaggacatggaggcggggagccgtgtggattcggggggacctggggcaggacatgcagggagggagccgtgtggattcgggggtcccggggcaggacacggaggaaggagtcctgtgtttggggaccaatgcagggacacacgc

SEQ ID NO: 33165 - DNA, 787 bp, Artificial sequence
  DNA replication origin
acacagagcatggacctgtgctaggaactggggaaatagcagatatcaaggcagagccactgccacctgcaggggcttatgttctggcggggggctcaggcaggacttgtgttttggtagggagaggggagcggggagaggggagaggggagagcggggagaagggagagcggggagaggggagagcggggagaggggagagcggggagaggggagagcggggagcggggagcggggagaggggagagcggggagcggggagaggggaggggcgggcgggggtgcctcacagcagatccagagcttggtgagcaggcggaagagcagggacatgctgtcctgggtatccgaggtggccgtatacacgggcaggcagctgggcttcagaaggccccagatgcggatgaccaccatcaattcccgaagcatgcccagcgaggtgccgtcccgcagaaagctgtggcccggcctcagcagggaaccctgcccgaaagaggcatcggtgtggctggggcggcggggggcagatggcgatgggatgaagtgtcttggggtcggtggaaccccgaccggggggcaatgggcagggtctgggacatttgtggtggtcaggactggggtgcttctggcaccgagtgggtggatgccggggacgctgctcagagccctgcagggcccaggacagccccatttgcagagtcgtcccatccctgagagtccacaagactaagacgaggctctggctgaggccaatatccccacctgcacgtggaggagcagccgcccc

SEQ ID NO: 33166 - DNA, 1792 bp, Artificial sequence
  DNA replication origin
ccgaggtggccgtatacacgggcaggcagctgggcttcagaaggccccagatgcggatgaccaccatcaattcccgaagcatgcccagcgaggtgccgtcccgcagaaagctgtggcccggcctcagcagggaaccctgcccgaaagaggcatcggtgtggctggggcggcggggggcagatggcgatgggatgaagtgtcttggggtcggtggaaccccgaccggggggcaatgggcagggtctgggacatttgtggtggtcaggactggggtgcttctggcaccgagtgggtggatgccggggacgctgctcagagccctgcagggcccaggacagccccatttgcagagtcgtcccatccctgagagtccacaagactaagacgaggctctggctgaggccaatatccccacctgcacgtggaggagcagccgccccctcctacagctgcgggcccgggcccctggtgactgtactgggagctgagaggaccagggaagggaggccccaggggtggcccctggcagcctaaagccccacaaaaagaagagagggacttcaaaccgtccgtgatgggcgcggtggagaagggcgggccccagggcaggatgaagccgggtgggtggggcagaagaaatcacagctggggcaggacagagtgtaccggcgggggggtgggggcgaggttggagccctggtcaggggcgcacaagccgcagaactgaaggtggaggtgtggatggagacttgatttcaaggccgcccaccccaggcgcagggagctggggagggtaaggggtgggggcagcagcagcagaagcaaggcgaaccggccttcgtgtaggggtggggctgagaaggagcagggcctgggaggcggggctttgagaatgggcaggaagggtgtggccaaggaaaggcttcttacagcagaggcttcatggagaggagggctccgaggtgggggagggctccgaggtggggcagggctccgaggtgggggagggctccgaggtgggggagggctccgaggtggggcagggctccgaggtggggcagggctccgaggtggggcagggctccgaggtgggggagggctccgaggtgggggagggctccgaggtggggcagggctccgagatggggcagggctccgaggtggggcagggctaggaagtggggcagggctaggaagtggggcagggctaggaagtgggggtttaagaagagacagactcaggaagtgggactccaagtaggggtgggactccaaccaggggcggggctgaggtgggactccaagcaggggcgggactccaagtaggggcgggactccaagtaggggcgggactccaactaggggcggggctgaggtggttttgaggggcaggggcagggaagcggggtcctgatgagatgggggcccaggtggggggcggggccttaggggagagcatggcgcacctggttgggtaggctggccagcaggtacagcacgaagtcgcccacccactgcaagagctgctgcagcgcctgcagtgtgttcatgtccagcacaaattcctccgtcttgaggttgatcatgaccttgtcaatgtctacaaggagacgtgggtcgggtcagctcgggcctcttgtacacacagggtgacctaactgcacccctcggtccttcgacctgcactgagtgcccacccagtaccaggacacaaggggacccacaccgggaacgagaagggggcgatggcgttgccggacggagaggaactgggagcccactgcctgccccc

SEQ ID NO: 33167 - DNA, 767 bp, Artificial sequence
  DNA replication origin
ggggccctgtggcaggtgggggccccgtggcaggtggggccccgtggcaggtgggggccccgtggcaggtggtcccgtgccaggtggggctgtccctgtggcaggcaggggccccgtggtcagtaaagtgccagcagcagggagggagttcccttggagggtggaggaggtctctgcagcagttgtagaggtccccacggcagatgtgggggttgtggcagctggaggggtttccctgcggcaggttgggggctctatggcaggcggagggcaagaggggcaggtagcctgtggcaggtgaggctgcgtgtggggtgtgctcccagaggcccgtccaggaaagctgcacctcagagaagcagtttccttccttacctgggaagtttcttctgtaacacgttaagccccacaggtaaggcctgatcccccctggacggctcccctctccagtgttcccagtctggaggtatctttctaagccatcctctcagaatgtgatgggtaccaggatgcacacccggtggccctgtggtgtgaggcctcagcaaacacggtcagaagatgaacacacagagacccgcccgtcggaaggagaggagggagcggatacggaggcccacgtgccagaagggtcccttgcagtggtgtggttatgtgcctgcaatcccagagtgtcctcgaaggacctcagatctaacgagctcagccggcagctgcacgtgggaccagccctctgagcttcacttgttttcctctgtgccatcaga

SEQ ID NO: 33168 - DNA, 838 bp, Artificial sequence
  DNA replication origin
cacatgcgcgcacacaggcccacacacgggcgtgcgcgcacacagatccacacacgtgccgcagccccagggccccattcctctcccggctgagggcgcagccccatctcaccgggctctccttgggctctgtctctggcagctgagcgtgctccgcctctcaccttccatgggccacccgctggaggtggggctggcgctgcggcacctgctcttcctgctggagtactgcatggtgaccggctacgactggtgggacatcctgctgcacgtgcagcccagtatggtacagagcctggtggagaagctgcacgaggagtacacgcgccagaccgctgccctgcagcaggtgggggcccgtggcaggtggggccccgtggcaggtgggggccctgtggcaggtgggggccccgtggcaggtggggccccgtggcaggtgggggccccgtggcaggtggtcccgtgccaggtggggctgtccctgtggcaggcaggggccccgtggtcagtaaagtgccagcagcagggagggagttcccttggagggtggaggaggtctctgcagcagttgtagaggtccccacggcagatgtgggggttgtggcagctggaggggtttccctgcggcaggttgggggctctatggcaggcggagggcaagaggggcaggtagcctgtggcaggtgaggctgcgtgtggggtgtgctcccagaggcccgtccaggaaagctgcacctcagagaagcagtttccttccttacctgggaagtttcttctgtaacacgttaagccccacaggtaaggcctgatcccccctggacggctcccctctccagtg

SEQ ID NO: 33169 - DNA, 3274 bp, Artificial sequence
  DNA replication origin
ttggtcccccacctgtagtgcccccctcccctgcgctccttgaggggcgtgtcagccaggacatgggcccagctgggaggggcggggaggggctgggagcagtgtggccaaggctgctggctcctgctcccctggtgctcagggactgtgtaactaaagaaagagtggctgggggcacgggcgctggatgccgattggcgggggctgaccccctggatgggcagccccggctctccacaccctgcagagcaggaggcccctcccccggcgggcgtgtcctgggccctgcccatgtctaagcagtgcctgtgccccacagggctggccctggccttccacgacggcagcgtccacatcgtgcaccggctctcactgcagaccatggccgtcttctacagctccgcggccccgaggcctgtggatgagccggccatgaagcgcccccgcaccgcgggccccgccgtccacttaaaggctatgcagctatcgtggacgtcactggccctggtggggattgacagccacgggaaggtgagctgctggggcacgtggggccggggctggtgggcattgacaaccaggggaaggcgagctgctgggcattgacaaccaggggaaggtgagctgctggggcacgtggggctggccctggtggggattgacagccaggggaaggcgagctgctggggcacgtggggctggggctggtgggcattgacaaccaggggaaggcgagctgctgggcattgacaaccaggggaaggcgagctgctggggcacgtggggctggggctggtgggcattgacaaccaggggaacgtgagctgctggggcacgtggggctgggcttggggggcattgacaaccacgggaaggtgagctgctgggcattgacaaccaggggaaggcgagctgctggggcgtggccctggtaggcattgacaaccagggaaaggcgagctgctggggcacgtggggctggggctggtgggcattgacaaccaggggaaggcgagctgctggggcacgtggggctggggttggtgggcattgacaaccagggaaaggtgagctgctggggcatgtgcggctggggctggtgggcattgacaaccaggggaaggtgagctgctggggcacgtggggctgggcttggtgggcattgacaaccatgggaaggtgagctgctgggcattgacaaccagaggaaggcgagctgctggggcatgtggggctcggcttggtgggcattgacaaccatgggaaggtgagctgctgggcattgacaaccaggggaaggcgagctgctggggcacgtggggctggggctggggctggggctggggggtattgacaaccaggggaaggcgagctgctggggcacgtggggctggggctggggctggtgggcattgacaaccgggggaaggtgagctgctgggacatgtggggctggggctggggctggtgggcattgatagccaggggaaggtgagctgctggggcacgtggagctgcggccggggccggggccggggccggggccggggctggtggacattgacaaccagggaaaggtgagctgctggggcacgtggggctggggctggggctggggctggtgggcattgacaaccaggggaaggggagctgctggggcacgtggggctggggctggtgggcattgacaaccaggggaaggggagctgctggggcacgtggggctggccctggtggggattgacaaccaggggaaggcgagctgctggggcacgtggggttggggctgttgggcattgacaaccaggggaaggtgagctgctggggcacgtggggctggggttgtggctggtgggcgttgacaaccacgggaaggtgagctgctggggcatgtggggctggggctggggctggtgggcattgacaaccacgggaaggtgagctgctggggcacgtggggctggggctggtgggcattgacagccaggggaaggtgagctgctggggcacgtggggccggggccggggccggggctggggctggtggacattgacaaccagggaaaggtgagctgctggggcacgtggggctggggctggggctggggctggtgggcattgacaaccacgggaaggtgagctgctggggcacgtggggctggggctggtgggcattgacaaccaggggaaggcgagctgctggggcccgtggggctggggctggggctggggctggtgggcattgacaaccaggggaaggtgagctgctggggcacgtggggctgggctcggtgggcattgacaaccacgggaaggtgagctgctgagcattgacaaccaggggaaggtgagttgctggggcacgtggcgctggggctggggctggggggcattgacagccaggggaaggcgagctgctggggcacgtggggctggggctggggctggtgggcgttgacaaccacggaaaggtgagctgctggggcacgtggggctggggctggggctggggctggtgggcattgacaaccacgggaaggtgagctgctggggcacgtggggctggggctggtgggcattgacaaccaggggaaggcgagctgctggggcatgtggggctgggcttggtgggcattgacaaccacgggaaggcgagctgctggggcacgtggggctggggctggggctggggctggggctggtgggcattgacaaccaggggaaggtgagctgctggggcacgtggggcaggggctggtgggcattgacaaccaggggaaggcgagctgctggggcacgtgggtctggggctggggctggggctgggagggtgccagagggaggcgcccccgggggaagggaccacaggtgcaagcccctcgccagcccctgcctgcgctgccttgtctgtgtgatgggttcgtcttgttgagcgaggtcagtggggtggctcacagcacgtattaggagcttcgtaactaggagctgttgagaggaccgcctttcacggggtagactcctcaggtaaagcagacgagtgtaagcctggctcggcatccagtgcagtcggggctcagggaggtttccttccctgttcccagaggcattgtgcatgaccctgacagaaaggtacagacgctacagacacatgcgcgcacacaggcccacacacgggcgtgcgcgcacacagatccacacacgtgccgcagccccagggccccattcctctcccggctgagggcgcagccccatctcaccgggctctccttgggct

SEQ ID NO: 33170 - DNA, 999 bp, Artificial sequence
  DNA replication origin
tggctgtcaatccccaccagggccagtgacgtccacgatagctgcatagcctttaagtggacggcggggcccgcggtgcgggggcgcttcatggccggctcatccacaggcctcggggccgcggagctgtagaagacggccatggtctgcagtgagagccggtgcacgatgtggacgctgccgtcgtggaaggccagggccagccctgtggggcacaggcactgcttagacatgggcagggcccaggacacgcccgccgggggaggggcctcctgctctgcagggtgtggagagccggggctgcccatccagggggtcagcccccgccaatcggcatccagcgcccgtgcccccagccactctttctttagttacacagtccctgagcaccaggggagcaggagccagcagccttggccacactgctcccagcccctccccgcccctcccagctgggcccatgtcctggctgacacgcccctcaaggagcgcaggggaggggggcactacaggtgggggaccaagggttggggctcctggcgtcccaaagagaggcatcttagggtggtgggctggggctgtcactcacactggggtctgccattgtacgagggccggggggaggtggggtccagagcccaaagctcatggaaaagagaatatgaaaggagtccctgcagtagagaggctgcaaagccgggcgcggtggctcacgcctgtaatcctagcactttgggaggctgaggcgggcagattgcctgagctcaggggttcgagaccagcctgggcaacaccggtgaaaccccgtctctactaaaatacaaaaaattagccgggcgtggcagcacgcgcctgtagtcccagctactcgggaggctgaggcaggaaggagaatcgcttgaacccaggaggcggaggttgcagtgagccgagatcacaccactgcactccagcctgggcaacagaatgagactccaactcaaaaaaaaaaagaaaaaa

SEQ ID NO: 33171 - DNA, 764 bp, Artificial sequence
  DNA replication origin
ggtcttctgggcatgggagcagggcggcatgagacctgggaagggccctgggcaggttgcacaccaggccatgctggactcctgcggctgtctcagcctgtctttactccattgccttcctgttttcctgcccctgatttttcagttggcgacaaacagcccacaattctcaaatggcggatcctatcggccaccaacgatctggaccgtgtgtcggccgtggcgctgcccaagctgcccatctcgctcaccaacaccgacctcaaggtggccagcgacacacagttctaccctggcctcggtacggtggagccagcggcagccacgcggggcctcagttcacaccaggggagttgggccctgagcacaggccacggggtcgtgggagctcacaccagaggacgtgggctctgagcacaggccatggggctgtaggagctcagccttctgggttctgatgggttcccaattaggaggcagatctcatctttcgggatctgtgaggctggcagacagatccagtgttctttaatatgtaaagagtcattgcaaatcaacaagggagcctggggaacttggtggaactccttcctgggtaggcggcatgtgtcctctctgtgctgcagcagccataatgtggtcctgagctcaaaccgtggcatccgtgcccatgagtgagtctgcacactcttcagtgcctaccctatttgctcagctgtaaaatgtggacaagtcggccctagctcaggccctttcttccccca

SEQ ID NO: 33172 - DNA, 3748 bp, Artificial sequence
  DNA replication origin
aatgtgacatggccgggcacagcagctcacatctgccaccccaagactttgggaagccaacgccagaggatggcttgagtccaggagttcaagaccagcctggacaacacagcaagaccccattctctacaaaaaaaacacagtaaacattagctgtgtgtggtggtgatgcacgcctgcacacgcctgtagtcccagctactcaggaggctgaggtaggattgctcgagcccaggaagatgaggctgcagtgagccaagatcacgccactgcactccagcctgggcaacacagcaagagcctagctcaaaaacaaaaaacaaaaacagtggcccagagagcacgtgtggggggtcctgctgtggctgcatgtgggacacggagggcagctggagccggcctgctggagcatgtgcggccagtggacaggccacgccacctcggctgctaaccgcagacacgtgggaaccaggagagcgcagctgaggcagccacagaaacagaaacagtgcagggctgctggcctgagctgctcagtttggggctggcttgttactcggctgaagctgactaccacgcagctgctctgtgccacccgcatcatgaggtctctgccccggacgggccatcacggtcacagagccttgacctcctgcaaacccgtataggggtcctgtgagcagcattccctggggggaaacaggcccagagagtggctgagacgcccagagggcacacagtggtcaggggtggctggccctcatggaattgagcctctcataggaaagacaggaaactcaacgccccagcgccgggggaggcagctgccatgacgaccacacccccagctagtggccagggtaccctcacagcacgatttacatcccctcctccatccaactgacggctgcggtcagcattcctaaatgaggggggacttgaggcagggagaagctaagctgctaagtggggatgtggggcagtgggtgaagagctgggcatggtaggaaccgaagcctggcatggtgggcacgtggggcggtgcgtgaagagctgggcatggcggggaccgaagcctggcatggtgggcacgtggggcggtgggtgaagagctgggcatggcggggaccgaagcctggcacggtgggcacgtggggtggtgggtgaagagctgggcatggcggggaccgaagcctggcacggtgggcacgtggggcggtgcgtgaagagctgggcatggcggggaccaaagcctggcatggtgggcacgtggggcggtagggggagagatgggggagagatgggtgcggtggggactgtcccagtgacccccagctgccagggatgtgagacctgagaaaggctgtggcatgtgtgtgagacgtggctctcgggcgggtaacagctgggccagcaggtgaggacggctgcaggagacgaggaggagtgtcggagcccaggactgcccagtggcttggctgtgggcagatggtagacacagacgtgcccagcgggggcaccgggcagtgaaggtgcaggtctgtgcagccacacggggtggcgccaggtgctgctgcaggagccagcgcagcccaaactgcctggtgactcaccacgaggcccaggggaaggaatgaggcccaacaaggccctggggaccgggcgaaggaacgagccctgggagaaggaatggcagcagccctcttcacctgcctggtgactcactacaagccctgggggaaggaatggcagtggccctcttcacctttactgcctctgcggccacaatgggcagttgacataaccacctgcaggccccgggagccatcggggcctcttgacacgtgctcattagtggcttctgaggagcgcctgccccacctgccccacgtgcccccacgtctggccactccagggtccattagcgctaatcggcaaatgcctgtgctctcatctaccgggaaaacatctcccttctccagagcggaggccagcctaaaaaccaggcccgcagcctccgaggctctgaaaaccaagcggctgttctggtccccggtcatagcaggcgggcgtccctgcttcgctccagccccaggattttgtgccggaggtggggatgacgggcttggctccgtgggtgcggggggcccatcgggcggatagagatgggaatgggggccccagaagaggctgctggagaggtggggtggggtggggggcgtgttctcagcagcctcagctgacccgctgagccttggcttcctctccctgaaccaggttccggaggattccgtgcaccgcccctgcccggtctggcctgtcccctgctgcccgacggccccacccacagacccacgctccacagccgcccacacgcctgcagcccctcacggtgtccccgctggctgagcaacgacacctctcagcctcggcctcgcacagaatggtggcagccgccgcagcgggcgtggaaggatggaggagtctatacgcctaacacactcagaatgctggcaggcgcgcggtcacacccgagatcctagcactactggagatcgaggcgagacgatcgcttagggccggggttcaggaccaccctgggtgacacagcaagacctgcctccaaaataaaaaccaaccgcccccgagggcaggcccagggcctccgcagccggcgggagactcacccacgggggagatctgctggaagatgttgttcacggggagtccctccttgcgcagggaccagcactccacgatgctgctggtctggctggacgcgcacaaaagcacctgcgggggaggtgggggtgagggctgacccggcactgctgtggtggccacgccaccaccggagcctgagctgcgggaccctggggccacgcactgctgggcctgtctcttcagccacgcctgcccctcgggccctcctggattccagcccaggcctgtccccagagcccaacatccactcacaggaacgcaaatgtccccggatggtgccctcccacagggacagcaaagggacacagggaaccaagtcaggggcttcaaggagtttggggcgttactgattcctaattacaacaggaatccaggcgacctggtgtggtcggctcaacagtggcccccagaacatcccatcctcagccctaggaccggtggctgggccgcctctcacagagaagggacctgcgggtgggattcggttcgggacactgagacgggagagcacgttggggggggtccgggggccccagtgtcctcacagggtcctcaggagagaatgtgggaggttgagattcagagacaggaagaggctgcgctgtggccacgaagcgggaggaaggcgccccgaaccgagggattgggcgcctccagatgctgggaaaggcagaaaatgggttctcccctggagcccccgggagggaccggccctgcccacaccacggtttagcccgtggaggcccgcgcgggtctccacccccaggaccctgagaagcagtgcttcattccaagcctgccagcccacgtgatggcctgcgcccgttcacctgctccgacatgtcccgggccaggaacttgaggtgggtgatggcgggaaacttgtccttgcggttgaggtcggtggtgcagcgcatgaacagggagggcaggatctccgtgtcgatacggcacttctcgctcaccacgctcacgcacaccttgtagaactgcacgggcgacgcgctgctgccgtccgccgtgg

SEQ ID NO: 33173 - DNA, 1604 bp, Artificial sequence
  DNA replication origin
ccccgggagggaccggccctgcccacaccacggtttagcccgtggaggcccgcgcgggtctccacccccaggaccctgagaagcagtgcttcattccaagcctgccagcccacgtgatggcctgcgcccgttcacctgctccgacatgtcccgggccaggaacttgaggtgggtgatggcgggaaacttgtccttgcggttgaggtcggtggtgcagcgcatgaacagggagggcaggatctccgtgtcgatacggcacttctcgctcaccacgctcacgcacaccttgtagaactgcacgggcgacgcgctgctgccgtccgccgtggccaccacgatgttgccgccgccggtgaaggcgatgtcggccagggccacgcggccgcgcagccggcacaggctctcggtggacgtcagcacctgcccgctgggcttcagcagggacacggtgaccaggccgctgaccgtcaccgcgatccagccctccatgggcttgccgccgaacagcgtgagcgacggtgagaacttgactcgggagaacttctccccgaagctggaggcgcccgactgtggagaagggagggagggaggaggggccgctcaggctcatgggggctgccccatgacccccagaaacacgcgcacagaagaaccacgcagaagccaggagtgtgtgcacctgggttcagatcctgactcggccacctgagccgtgtgggatgtgatcccctctgaccctccgtctcctcatctgtaaggtggaaggaacggcacctttgctttagaggacagtggggaggattaaacgggtgaacgtgtgcgcaacgggagtcacctcccctttctgtaaagggacagacagcagcatgctcggttctgggagccaggtggtccctgttgcaacgacttggctctggctctgccgtggcggcacacaggcagctggtgccaatgagccacactcacaaacccaggcgggggccgtcaggccctgggccgcactgtgcagacctgagctatagcactcaggaagtgctgtgtaagcaccagcggctgctgcgggcactatttgatttcaaatcaaatttgtcaagtcattattgacatacggaaacatccacccttctttcaacgtgagtcttttaaaagatggggtcttggctgcgcacggtggctctcgcctataatcccagcactttggggggctgaggcaggtggatcccctgaggtcagcagttcaagaccagcctggccaacacagtaaaagcctgttgctaataaaaaatacaaaaaaattagccgggcatggtagcgggtgcctataatcccagctactcaggaggctgaggcaggagaattgctggaatccaggaggtggtgattgcagtgagccgagatcacaccattacactctggcctgggcaacgagagcaaaactttgtctcaaaaacaaaaaaaaaaagaacaagaaaaatgtctctacgttgtgaaaaaatgcgaggaagagaagtgtatcatacgtatcgtacggctccattctaagttacaagttaaaaaaaaacacttcttatagcaagaagcaggtccagaagtccaggaagcaa

SEQ ID NO: 33174 - DNA, 1741 bp, Artificial sequence
  DNA replication origin
ccacagaaaattggaatcaaatcggggtgcaaaaaagccacctattatctgctgtggagaggctcccactgttcacatttcggagtcattttcttctaatctggttttaaagacacagttgtggcgcctcacaggcctgctctgttcctgcggggggacagcctgttccctgagctgtcgactcggctgacagcagttctgtgaccttcctggggtgggacacacaccggcttacctggagcctgcctggagtcatcgtcatcgtctgcaggctgtggtgccaggccgtgctgaccatgccccgtccccacagacctgacccgcatgatccacatcctggacacggagcacccctgggacctgcactcgatcccctcagagcaccacgaggccatcacctgcctggagtgggaccagtcaggtgaggcgctggtcccacgtggccaggggtggcgacccggatcccggagcaggggggccctgtgtttctccggtcagtctggagtccggcgctgggtctagagcccctggtctgcagctttgcacctgctgctctttccatagtggcccgaatcattcttgttcagggtgtctcagggcatctctggagtgcgccttgtgccacctgctgtgccctacctgggccgagacctctccactgggctggcttcccccaggcgctgtgccgtcctgcaacgcagtgctctgcccatccctggaaggttcgcaatgatggcttcttgccctcaggctcccggctcctgtcagcagatgccgacgggcagatcaagtgctggagcatggcggaccacctggctaatagctgggagagctcagtgggcagcctagtggagggggaccccattgtggccctgtcctggctgcacaatggtgtgaaactggccctgcacgtggagaaggtgagtgtcctgcccgagtgagcggatgaggcagatgagatgtcaccctacccagccacccgccagcccctctcctctccatcaccagcatcccctggttttttggaccttgcacttggctcccacctgcagtccggctgtcattagcacctgtgtgttcagtggcctctcatttaactgagggtggctgttcacttggcccccacctgcagtctggctgtcattggcacctgcgtgttcagtggcccctcatttaactgagggtggccgttcttagtgagttatctctttcactggaggctactgtccttaggtagctgcatgtataactggtggctgctgtcttctgaatgcagcccaccctctgatttagtaacatcccagagcccctctctatgctccctgtgattcggccccacaggtaagagtaggcgtggccagggttgggggggacagttaagataggcgtggccagggttgggggggacagttaagagtaggcgtggccagggttggggacagttaagaagtaggcgtggccagggttggggacagttaagagtaggcgtggccagggttgggggggacagttaagagtaggcgtggccagggttgggggggcacctgggttcaggctctgactcctcacctctgtgtgtcagtttcctcactgacggcagggtctcggggatgttcgtggcaaaggcctcacagccaccccagcttcgtgcctctgtgcgtctgcttgtgctggggctctcgcaggaactaggaggccttcctggagggatgcagtggacaagatcttttctctcgtccct

SEQ ID NO: 33175 - DNA, 3168 bp, Artificial sequence
  DNA replication origin
agttattgactggagttgagaaagtgctcgttgttctaccaaatatagctacggtggctgctgggaattactggaaatggtcgtatgcaaatagccccggaggcggggcagagcctgagccgcaccgccctcccagaagtctttgggaggcggccccacgcctcaggcgactggttgttaccgaggaagatggcggcgccagacccgaggcgctagggaagatcgcaccgcggacgcccgctgagcttggcgcacgggccgaccaggtgagtgcggggctgcgggggcccggcgagggcggacggacccctgaccgtgtccacggacccgagggaacgcggcgcagccgtggcggggcctgcggggtcgggggcgtggccgggagcaaaggctgctgggtaggcggcctggggcgcggggcgcggggcgcggggcgcggggcgcggggcgcggggcgcggggcgcggggctcggggctcagggtttgcggcggaaacctgggggaggcctgaggcccgcggggctgggttcggggcggggcctaaggagagtttggggcgaggctgaaggcgcttggtgggacttcgggggcggggcctggagtgggtttggggtcgccggggtggagcctggggactggggggctgtagaggcagggcctggagactgcggggttatcggtgcggggcctggagagggaatagggtccctagggtggagactggggactgcggagttataggggtctggagagggtagggggtccctgggatggaccctggagattgggggttataggggcggggcctgaagaggctatggggtccctgggatgaagcctcgtatttgggggcaataggggaagggcctggagagtacgtggggtccccggggtggagtctggggactggggagttttaggggttgggcctggagagctaagggcgttggaggctggacctggagagtacatgggacccctacggtgaagcctgagaatttagggtgaggccgtgggctcaaggggtgaaatgaagtgtgggaagcaaagggggtcaggggtggggctgaaagacttttagaggcttgtggcggagccttgggggtctggggcaggccctgaagaagtagggagccggggttagggtttgaggagaacctggttgcgggtgattccaggctccctgggcttttgcctttgcgaagcgaaacagcccgtctggatgccaggcgcttagaaagcctcgaggaggtgccccctctgttccctgtgacactcagcccccgcctcggccacaggtgttccccaacacactcagccccgcctcggccacaggtgttccccgtcacactcagccccgcctcggccacaggtgttccccgtcacactcagcccccggctcggccacaggtgttccccatcacactcagccccgcctcggccacaggtgttccccgtcacactcagcccccgcctcggccacaggtgttccccgtcacactcagccccgcctcggccacaggtgttccccgtcacactcagccccgcctcggccacaggtgttccccgtcacactcagcccccgcctcggccacaggtgttccctgtcagtcagccccgcctcggccacaggtgttccccgtcacactcagccccgcctcggccacaggtgttccccgtcacactcagcccccgcctcggccacaggtgttccctgtcactcagccccgcctcggccacaggtgttccctgtcactcagccccgcctcggctacagggagccgccccaccgcttgcctgtctgcgggctcttccttcgggagagagctagtgtccacttgctgcccccatcatcactcacctgggccagcgcagaccctccgctgcgtctcccggctgtgcccttggcccccatggtctgttccctagacagccagaggggtcctggtgaaacccaaataggtcccagccctcccgggctcccaccttactgagagtagaagcccacaggcccaggactggccctgacctctccatgttccccctcggccccagccccaggctctgtctggcctccgggcctttgcatcggctgttccctctaccacgggcctccattgttttcccacttctggcctggcactccacatgccctgggtgctcagccaacatagacgtcccaccacacctccctcccgcaggagctggtgactgccctcatgtgtgatttgcggcggccagcggcaggtgggatgatggacttggcctacgtctgtgagtgggagaaatggtccaagagcacccactgcccatcggtgcccctggcctgcgcctggtcctgccgaaatctcatcgccttcaccatggacctgcgcagcgatgaccagggtgcgtccccctcccacctgcttcccctcccggccgcatggtgtcccgccctgttccccaggtgcccggcccactgccttgaagggactcggtctctcaggccacctctcactcaccctggccctcctctgtaacttgtgtgagagcctcagcctcctgggggtacagagggtggattcagtgccccccaaacctggtgccaggagacatgagatcgccccgtgtgcgggatcgaatcgggctggagcgttggttgacggaggcttgttggagacacgtgccccagttttctagacggtgtgtgtcactggtttttgaaaggtgcgtggtggctgtgcccgtcttctctccattgtttgagtaataggcactcataatacgtggtcattagagaaaactagaaaaccacagaaaattggaatcaaatcggggtgcaaaaaagccacctattatctgctgtggagaggctcccactgttcacatttcggagtcattttcttctaatctggttttaaagacacagttgtggcgcctcacaggcctgctctgttcctgcggggggacagcctgttccctgagctgtcgactcggctgacagcagttctgtgaccttcctggggtgggacacacaccggcttacctggagcctgcctggagtcatcgtcatcgtctgcaggctgtggtgccaggccgtgctgaccatgccccgtccccacagacctgacccgcatgatccacatcctggacacggagcacccctgggacctgcactcgatccc

SEQ ID NO: 33176 - DNA, 919 bp, Artificial sequence
  DNA replication origin
attccctctccaggccccgcaccgataaccccgcagtctccaggccctgcctctacagccccccagtccccaggctccaccccggcgaccccaaacccactccaggccccgcccccgaagtcccaccaagcgccttcagcctcgccccaaactctccttaggccccgccccgaacccagccccgcgggcctcaggcctcccccaggtttccgccgcaaaccctgagccccgagccccgcgccccgcgccccgcgccccgcgccccgcgccccgcgccccgcgccccgcgccccaggccgcctacccagcagcctttgctcccggccacgcccccgaccccgcaggccccgccacggctgcgccgcgttccctcgggtccgtggacacggtcaggggtccgtccgccctcgccgggcccccgcagccccgcactcacctggtcggcccgtgcgccaagctcagcgggcgtccgcggtgcgatcttccctagcgcctcgggtctggcgccgccatcttcctcggtaacaaccagtcgcctgaggcgtggggccgcctcccaaagacttctgggagggcggtgcggctcaggctctgccccgcctccggggctatttgcatacgaccatttccagtaattcccagcagccaccgtagctatatttggtagaacaacgagcactttctcaactccagtcaataactacgttagttgcattacacattgggctaatataaatagaggttaaatctctaggtcatttaagagaagtcggcctatgtgtacagacatttgttccaggggctttaaatagctggtggtggaactcaatattcgtgctcgcttcggcagcacatatactaaaattggaacgatacagagaagattagcatggcccctgcgcaaggatgacacgcaaat

SEQ ID NO: 33177 - DNA, 1044 bp, Artificial sequence
  DNA replication origin
gccctggttggtttcaaactcctgggctcaagcgatcctcctgccttggcctcccaaggtgctgggatcacaggcatgagctactgcactggccttctgtcgtttcaagccccctgtgtgagaccctccattacaggggccccaaggcactcgtacaagccactcactcaaggtctacaggggccccaaggcactcctacaagctcctcacccaaggtcacacggcaggcatgtggcagagccagggtttgaatccaggcaaccaagggcagaggagccaggggggcacctgcagcccttggtggccaggacctactaagcccccggccctgccccgaagaaaaacacacatagcccgaggccagagcaccagaaatttattaaattccccactttcccccaaaacacaattacccacacgcagcaagggggtgcggaggccccccagcctggctcctgcagcctgggccaggaggaccagcatggggacacaggagctatcaggcaggagtcaggctgggggacgaggggacacgggatggggtgacagacaaggtagtgcaagggcagaggcttctggctggaagtcctggacccccagcataaaggaggggaggaaaggaagggggctcatataaagcaggagaccctgagccccgacacaggtggcgtgggggaggacacgcagaatgacgaggataaaaccggctcttaggaccgtggcttctgtcctgggtctcagggcacacgcgcgcacacatatacaacacaagatgcttctggcatgaggggcagggtcccagagaccccaccctcattcaagctaaaaactgggaggggctgagcaggggctgggaccaagacccatgttttaccagtggggcgagtttttttggtttttctctccaaaagggaaatttaaaaatctacaacaaatcacaccaaattcattaaaagtgataaaaacccagcctccccctcctcacttgagcttcagaccgggccagaaaagctcaacgatgaagaaacaggaacatgcccagg

SEQ ID NO: 33178 - DNA, 785 bp, Artificial sequence
  DNA replication origin
gccttgaattcaccagaagctccctgcatatgcggccccacgcagggtgaccgcagacacaaccaggctgctggacacagacactcctccatctgcatcttcggggcccggggtgggggtgatgaagcctggatttgagggacctcccagagccagagataagatggggggacgcagtgtctggaaggtttgcatttaactctaaggcctcccacataccacacgtgggacctcaggcgagaccccctactggcccctgcgctccacttttccaacggggcgcagtctcagaactcacccccgtagtgaacgtctgtgcaggcgccgccggccccaggcaccccatctggtcctgagcctctcacacctgtctctgccgccccgcctggagttgccgaggtgacagtttccatggcaaccggacgatgcctccctctgttccctctgtgggagacgcagcccccatgcctgcctctgctcagaacatccggccttggctgggggtgcggggcttggagcttggtgggtgtggagctgtggtcctgacacggaagaggaggggtcccagcaagatggggagtagaggacgggggggtcccaggcagaggggactgctgaggcgcggagctcacatgggacgtggctctttttttttgttttggttggttaggtttggtttttttgagacagtctcattctgccacccaggctggagtgcagtggcgtaatctttactcactgcaacctccacctccgggttcaagcgattctcctgcctcagcctc

SEQ ID NO: 33179 - DNA, 1033 bp, Artificial sequence
  DNA replication origin
tacagacagcggcaccagggccctgagtaggagggcgggggcaacgaaggcgggcactgcagggtgtgtaggagtttcctccacggaaggcacaggcaggaggtggcatggtggcctcagagacacttaagcagcctcacgtggtgggtcagaggtcatgtttgagcccagcgctgtgggctcctgggggccctggacctccctggccccccacccacaggtcccgcagttccctgaccaccgggccgctctccccaggaaacgctggagacctgggaggagcggctgcttcggttcttctccgtgtccccccaggccgtgtacacagcaatgctagacaacaggtaagggggggcggccaggcgagcggaccctccgaggctgcggccaggtgggcggacaccccacgctgcagcccctgcacggcgctcactgcccgttccccacagcttcgagaggcttctgctgcacgctgtctgccagtacatggacctcatctcggccagtaagtgccggtggcccccaagaccccaagttggccagctcaacctgggaaagtggccagggtcccaggggcctggttcctcagagtggggcttggtggggaggtggggaagggggctggagtggggacgctacgaactcaggggtggcagtgggaccctgccttgaattcaccagaagctccctgcatatgcggccccacgcagggtgaccgcagacacaaccaggctgctggacacagacactcctccatctgcatcttcggggcccggggtgggggtgatgaagcctggatttgagggacctcccagagccagagataagatggggggacgcagtgtctggaaggtttgcatttaactctaaggcctcccacataccacacgtgggacctcaggcgagaccccctactggcccctgcgctccacttttccaacggggcgcagtctcagaactcacccccgtagtgaacgtctgtgcaggcgccgccggccccaggcaccccatctggtcctgagcctctcacacc

SEQ ID NO: 33180 - DNA, 1638 bp, Artificial sequence
  DNA replication origin
aatccccaccccacccctggaaccttcgagctcctggattcacctgcccaacacgtttgggaaccctccaacgattgcaggagtgtttcacctcaatcccccccaccccgagacagctgggcccaccccggttccccgcttccctgcgctcagctcagggcccgacacaagcagcggcccctcagtggacagaggtgaccgcaggagcgcgtccacgtgcttggcggccttaccgtgcccatttgcccggggatgtcagcgcagccccagtgtttcatggcaagcctgcctccctgcctctcttccaggtctggaacgatttcatgaaccgctccggggaggagcaggagcgggttcttcgctacctggaggatgagggcaggagcaaggcgcggaggaggggccctggccgtggggaggaccggaggagaggtgcgggcctggctggggcgggtatgggtggggccagggtatggatgggggcgtggcctggggtgggtggggccgggatgggggggcaggatatggatggggtgtgggcgggacctggagtgggttggacctagtatgttgggcccaggtatggatgggggatgggggcgaggcctggggtgggtggggccgcgatggggggcaggatatggatggggtgtgggcgggacctggagtgggttggacctagtgtgtgggtgaggccagggtatggatggggacagggcaatggggtgtgtggggccaggatggggtaggtaggatatggatggggcgggacatggagtggatgtggccagcatgtgggggcaggatctggatggcagtgggtaggggtggggctagctggcttgtgtgggcctggagtgggtggggcctcatgtctagctggggtgaacatacaggtgagggtagggtcagctggatgggttggggtcagggcctcgtgggggtagggtctgctggctggatggggccacagtatcgttgaaggtgtggtttggtgggcaggagaggccaaggcacagatgggcgtggtcttccctgggtgggcgtggtctggcaggtgggcagggccaggacgagcaccccaagactgccccttgttcccccactcctgcagaggaccccgcctatacaccccgcgagtgcttccagcgcatcagccggcgtctgcgagccgtcctcaagcgcagccgcatccccatggtgagtgggggattgccgggcctcccttttctacctgcctggtcttttttgaaggcccgtttcccaggcacaggttctcacccggtgcaggtcgtgtcaggggaaacagggcaggatacagacagcggcaccagggccctgagtaggagggcgggggcaacgaaggcgggcactgcagggtgtgtaggagtttcctccacggaaggcacaggcaggaggtggcatggtggcctcagagacacttaagcagcctcacgtggtgggtcagaggtcatgtttgagcccagcgctgtgggctcctgggggccctggacctccctggccccccacccacaggtcccgcagttccctgaccaccgggccgctctccccaggaaacgctggagacctgggaggagcggctgcttcggttcttctccgtgtccccccaggccgtgt

SEQ ID NO: 33181 - DNA, 1725 bp, Artificial sequence
  DNA replication origin
gccccccatcgcggccccacccaccccaggcctcgcccccatcccccatccatacctgggcccaacatactaggtccaacccactccaggtcccgcccacaccccatccatatcctgcccccccatcccggccccacccaccccaggccacgcccccatccataccctggccccacccatacccgccccagccaggcccgcacctctcctccggtcctccccacggccagggcccctcctccgcgccttgctcctgccctcatcctccaggtagcgaagaacccgctcctgctcctccccggagcggttcatgaaatcgttccagacctggaagagaggcagggaggcaggcttgccatgaaacactggggctgcgctgacatccccgggcaaatgggcacggtaaggccgccaagcacgtggacgcgctcctgcggtcacctctgtccactgaggggccgctgcttgtgtcgggccctgagctgagcgcagggaagcggggaaccggggtgggcccagctgtctcggggtgggggggattgaggtgaaacactcctgcaatcgttggagggttcccaaacgtgttgggcaggtgaatccaggagctcgaaggttccaggggtggggtggggattctggcctggtctggggaccccgaaggagactgaggggccttcattaggagatcagaagtgggcgggtgcttctggcgggggacgggcacaggcgatggcctggccgtaggagaactgccggggtccccgtgtggagggagtgagggggttgggggccacacctccacataggtggcgttgttgcaggcctcggcaaagatgcctggtgatgcagggggtgccaagtccccatcctccaggccaggcaggcccccgtctgtctccagcagggtcaggaggtactgggctaggtggaaacagatgctctctgggccggggtggcatttggggacccccaggcaccatggggacccaagaactagccttcctccttttttatcatctcaacctccgcacctccatgctccaactgtcttccccagaaggtacagagaccacctagaccccaggttctggattgtcgaactcctatatatcctttaaagccccagctccaatgcccggggcgccctcccacccagccctgatccaagagtccagggggcgcctgtgtctggctctatttatatggtcccccggcctacagctgacacctctttgggtccccagccccacccaggcacagctcatgggaggggtaacagataacaccaatatgcatgccattctacaaggcccaggagcccccaggaggcgcctcccgacccctgctcactgttctccaggcgctggaggctcttccgccccttggccttgggcacgaggtctgagttccgcactgcctggttgatgaagtgctgtttccgcctggaagccgagagtctcttcacctgggagctggctagggcaggcaggcagctgggaaggggcctgtgggccggggcaggggtggtcctcagggtcaaggccggccaggatctccgagaagggccctaccacagccatggcccgcttggtttcccccagcaatggagagctcacccctacggtgtgtgaagtcctgggcccttaaaatcctattttgtttcatcctcacatcacaggaagcagatacaattgtgaagacgggctgggtgtggtggctcatgcc

SEQ ID NO: 33182 - DNA, 1278 bp, Artificial sequence
  DNA replication origin
tttttttttttgaggccaagtctcgctctgttcaccaggctggagtgcagtggcacaatcttggctcactgcaacctctgcttcccaggttcaagcaattctcctgcctcagcctcctgtgtaactggaattacaggtgcatgccaccacgcccggcttattttttgtatttttagtagagacggggtttcaccatgttggccagggtggtcttgaactcctgacctcaagtgatccacctaccttggcctcccaaagtgctgggaacacaggtgtgagccaccacgcccggccaatcagcttgtttacttttgattgagatgtaacagctggtctgtaaagtgcacagacttaaggcttgaggactctttacatgtgtgtggaccctggagagcattgccctcatttctgacccccttgactgcattttttttttcttttttaagacagagtcttggtctgtcacccaggctggagtgcagtggtacgatctcatctcactgcagcctccaccttctgggctcaagtgatcctccctcctcagcctcctgagcagcggggaccgtgatgttgcccaggctgatcttgaactcctggcctcaagctgtccttcctcctcaccttcccaaagctctgggattacaggcatgagccaccgcgcccagcttgcctcgagtgaatcttgtctcaactggcctagagtttcctagcgttttccagtcttttgggggttgcaggggtggagtgggttgcttttaatttttgtgttgggaactctggatgctattagggattttcgactgtgggctctcttggaatcacagaatttttattgaggattgatttggtggttatttttctgagcgtctcctgtgaacgaggcttggctgtgagtgccggcggtgggggttacagccagccagcaaacccgagccgcctgtgcgaaggtccgaggcgggacgggaaatcgtgtcttggaagcagcagcggccaggaggtgccactgtggggttggagcagaatgtgtttcaggtggggtggagttaggagataagggtggagccgatcctggtacccccagaccctggaggccatggtcagccctgtggtgtgggggtttgtgagcccagtggagctagcattacggttttttgtttgtttggcttttgagacagagtctcgctctgtcgtccaggctggagcgcagtggcacgatctcggctcactgcaagctctgcctccccggttcacaccattctcctgcctcagcctcccgag

SEQ ID NO: 33183 - DNA, 1746 bp, Artificial sequence
  DNA replication origin
ttctggagaggagtgtcggtgactcccaggcccccctgtctaccccagaggccagatgtttttttgtttttgtttttgtttttgtttttttgggagacagagtcttgctgtgtcactcaggctggagtgcagtggtgcgatctcagctcactgcaacctccacttcccaggtccaagcgattctcctgcctcagcctcccaagtagctgggactacaggcgtgcgccaccactcctggctaatttttgtatttttgtagagacagggttttaccatgttggccaggatggtctccatctcttgacctcatgatccgcccgcctcggcctcccaaagtgctgggatgacaagcttgaagatgtttcttaatttcctgctggaaactggttgaagtcagccagctccatctgatggtgggactcgatttccagtgctcagctcagcactagagacccaggggagggtggcgagccctcagataccaaacaaaacaggcgaaagccctcgtgttgcagtgctaggccaagggggagccaggcctggccctgggatgctggggagccatgggctgtgctggagcaggggaaggaccaggcaggtccttgtgggcctggaggagaggcctgtggggctttggtatgaggggtggtgagggaagcagggtagctctggggttctgggtcagacccaggttcacatccagctccttgcattgtctgggtggtgacgggggacagccccacctctccaagcctcagatccttcatctgtaatatggggtgataccaggccccttgctgggagggcttgagctgtgtcaccgagccccgccccctctgacttccccgagggctcccctcggatgtcacttctgttatcggccctgtccagctgctggggtggagaagtaggccccggggcctcagggggggctgtgggtgaatctggggcatgggacagagtgctccggcctcagggaggcagcttcaggctgatccagcttcagagacgctggcttaacatgaccctgtattcccactgagtacccgtcggctgctgtgctctgtgctgagggcatggtccaccacctccttctccagctgccctctttgcagcaatgggagcttgggcggtgactttgtgccttggtttacaaatctgtataatgagggccgggcgtggtagctcatgcctgtaatcccagcactttgggaggctgaggcaggcggatcacttaaggtcaggagttcaagaccagcctgccaacatggtgaaaccccgtctctactgaaaatacaaaaattaaccaggcgtggtggtgggcgcctataatcccagctactcgggaggctgaggcaggagactcggttgagccagggaggtggaggttgcagtgagcagagatggcacaactgcactgcagcctgggcaacagagtgagactccatctcaaaacaaaacaaaacaaaacaaaaaaaccccaaatctgtataatgggcatcaaagtaatagaacttgcctccccggggacagcacaggtgacaggaaatgagcccaatgtggggaaaatactcagtccagcgacacttacgatcaaaagcagtgtggcatggctgaggggtgagttccccatcataggaggaaaacaagcaagtggcagctgagatgaggggaattcatcccaggcccttttggctctgagtacccctcccaaaccaacttgttcccactttttgagagggggct

SEQ ID NO: 33184 - DNA, 1217 bp, Artificial sequence
  DNA replication origin
cccccgcacagaccgccccgcttccgggtcccccgggaaggacgcgcgggctcctgcttgccaggttttaacccacaagggttgtagggatttacccaaaggagagcaaggagccgggtctgcccggaaaggcagggggcgcggacaagcccagagggcgagtggggccgggcgtgcggcagggaccaggctggagcgcatggccacgtgggtgaaccccgacccgcggacaggggcccaggaccctctggcgggaggctccatggctggcacctcggggcccggggagtgggggggcagacccgggagtgggggcgcggccccggggaggtgggggggggggtggaccagggagttggggggcggactggggaggtggggggacggacccgggagtgtggggggcggaccagggagttgggggactgaccggggagtggggggacagacccgggagtgggggcgcggccccggggaggtggggggggtggaccagggagttggggggcggactggggagtggggggacagacccgggagtcggggcgtgggccagggcagtgggggggtcggacagaggagttggggggcgggcccgggagtgggggcgcggacccgggagtgggggcgaagaccagagagtaggggcacggaccagggagttggggggtggaaccgaggagttggggggctgacccgaggagttgcggggcggacccaggaatgggggcaagaaccaggggagtgggggggtggagcagggagtggggggacggacccaggagtgggggcgtggatcagggcagtgggggggcgcggacccgggagtggggggagtcggacccgggaagtgggggcgcggaccggagagtgggggcacggaccgaggagttggggggcggacccggagagtgagggggtggacccgggaatggaggcgcggaccagtgcagtgggggggcggaccggggagtggggcgcggaccggggattagggggcggaccggggagtagggggcggaacaggtaaatggggacgtggatccgggtcccctcccccagcgagcccccggagcgccaggagggtgtccccgctgagtaacaatgaagaccccccacccagcctgggggtccacagcgggcgagaagggaaggcaggacaggctgaagccccggaagatgagcaacgggagcgaggggaacgaagggaacgaggg

SEQ ID NO: 33185 - DNA, 1215 bp, Artificial sequence
  DNA replication origin
gcgccaggagggtgtccccgctgagtaacaatgaagaccccccacccagcctgggggtccacagcgggcgagaagggaaggcaggacaggctgaagccccggaagatgagcaacgggagcgaggggaacgaagggaacgaggggagggaagggaaaggaggggaggggaggcggggagaggatctcaggggagggagcccagcccgcccccggcgcccgccgcgccccgcccgcccgcgctcacagcagccgccgcccgcccggggtgccctccgccgcctccgggccgcactcggggttctccagcgcgaccatggctcgcacgctgtcgccgccgccgccgcccggcagggccttcaccgggccgggcaggaagtgacgggcgcccggaggcgggcaggggcggggcctggggctgcgcggcggggcgggggcgcccacctcccggctgccgggaacgaacgcggaaacccaggcgcgcggggaggggatccagcccctggggggacgaacggggaaaccgaggcgcgcggggcggggatccagccaacagggaacgaacggggaaaccgaggcaggcggggccgggatccagccatcagggaacgaacggggaaaccgaggcaggcggggccgggatccagcccctggggggacgaacggggagactgaggcgggaggcggggccggccacgatccctacacccagaaatctagctccgggaaggagggacacctaggcgaggggtcgaaaactcaaccacaaccctgcgtcccgatccgggctgcggactgagccaggaatccagcccagggaggcgaggagacacggacagggaaactaaggcctgagcatcgacgagggaggggacgttcttcttggaggcagaggatggcggaaattaaaactgcccgagccttccttccacctgcccctcccagccctggagcctcggctaggcaaccccttcccctgcttagcctcagtttactcttctctaaaattaggcctggtggccaacgtggtggctcacgcctgtaatcccagcactttgggaagccaaggccagtggatcacttgagtccaggtgtctgagactagcttgggcaacatgatgaaaacccatctctaaaataaaaagaaagggccgggcgcggtggctcacacctgtaatcccagcactttgggaggccgaggtgggcggatcacgagga

SEQ ID NO: 33186 - DNA, 818 bp, Artificial sequence
  DNA replication origin
tcttcttggaggcagaggatggcggaaattaaaactgcccgagccttccttccacctgcccctcccagccctggagcctcggctaggcaaccccttcccctgcttagcctcagtttactcttctctaaaattaggcctggtggccaacgtggtggctcacgcctgtaatcccagcactttgggaagccaaggccagtggatcacttgagtccaggtgtctgagactagcttgggcaacatgatgaaaacccatctctaaaataaaaagaaagggccgggcgcggtggctcacacctgtaatcccagcactttgggaggccgaggtgggcggatcacgaggacaggagatcgagaccatcctggctaacacagtgaaaccccctctctactaaaaatacaaaaaattagccgggcgtggtggcgggggcctgtagtcccagctactcgggaggctgaggcaggagaatggcgtgaacccgggaggcggagcttgcagtgagccgagatcgtgccactgcactccagtctgggcgaggagcgagactccatctcaaaaaaataaaataaaataaaataaagcaagagggaggctgggcacggtggctcgcacctgtaataccagcactttgagaggccaaggccagtggatcacttgaggtcaggagtttgagaccagcctggccaacatggcaaaaccctatctctactaaaactacaaaaattagccgggcgtggtggtatgcacccatagtcccagctacatgggaggctgaggcacaagaatcgcttgaacatgggaggcaaaagttgcagggagc

SEQ ID NO: 33187 - DNA, 1158 bp, Artificial sequence
  DNA replication origin
gagcccccgggacggcagcaggtgcggcgcagcgcccgcactcaccgatgtagaagttggtcacggtccgcatcggcttgtggcggcagatgacgtagatgaccagcgagttccccaccaggcccagcagcatcagcgccgcgaagaagagcggcacgagccaggcgtccacggcccgcggcgaagggactgggccgtccgaggcgttggcgccacagcccgggcagccggaggcgttggccggtgccccccaggacgcgttgggtccggacgtagccacggtgtgcatggccgcgcgcacctcctcctcccggccgccctccaggattgcgccctggcaccgccccggggacccctccgcccgaccgcccgggggctgcgcctgtggaactcaggaaggggctcggctggggtccgcagggtccagagggcagctgtgctgggctcggcggctcctctgccggcgccgctgcggccgagcgtttatagcccgtgcccccctcccctggccttgccttcccgcctctccggcagccgctcgccactccctcccctgcccacgcgccctctattcacccagcggcaacccccctattccctcctcccggtgcaaggtcggagtgagagcgcgggagggggctggagggggcggagcaggcagggggtgggccgcgtggaggccgctgtggacctggaaggaccgaccttaaccagcgagtagacgctcagcccggactaggagcccagccaaggcgcgaactctaaggcctgtgaatatgggaagggctttgaccctcgtaggggctggggctccagggggtgggcccagcctggcggggaggccagccctcagcggagaccctgagtgaggatagcttgggtttgtccccaggaccctggagagccatggaaagttcagggcaggtgagggacgtccccgatctggtggtttgggactgaatgtgtcccacatgactgacaaggggtgtctgatacccgcagggacactagcagcgggaaccaggtggagggcaccttgcaaacgccacagcctcattattattattattattactgatttatgtatttatttatttttttgagacagagtttcgctcaggtcgcccaggctggagtgcagtggctccatctcggctc

SEQ ID NO: 33188 - DNA, 996 bp, Artificial sequence
  DNA replication origin
caggggtcagggccaggagcgctgggcggttcccgcggccagtggcgcccacgcccagcgcccgcgcatccccaccgcagccaacctggcggccacggacgtgaccttcctcctgtgctgcgtccccttcacggccctgctgtacccgctgcccggctgggtgctgggcgacttcatgtgcaagttcgtcaactacatccagcaggtgcgctccggagcaggaggggagagggcgcacttggggacgggcgggggtgcgctccgcagtgggaggggaggggacgcacttggggacaggcgggagtgcgctccgcagtgggaggggaggggatcgtacgtggggacggggagggggggtgcgctgcggagcaggaggggagggagcgcacgtggggacggagggagatgcactcagaagctggaggggagggggcgcatggtggggcggggcaggggtgcactctggagcaggaggggaggaggcgcacgtggggacgaggagaggggatgagctccggagcggggggcgggcgcatgtggggagggggagcccacgtgggaagggaggacggaccttgggcggggcgcgaggcaacgcataggagaaccaggggctggggtgcccagcttgcgggaaggggctgggcggtggtgcagcctagaactggagtggggggcgggaatgggggagggatgcagacggggacccgggtcactggtgaggaagggctactgaggccctgaggcttcttgccccgcctgtccctccatcccacgcagcccccctgtctcagactcggggtatcagccgccccccaagggctccctcacttccccaatcctcctgccctcctctcccagtctccccaccttctgtcccctcaacccgcactggacactcctcccaggacacttcccgtgtatgtgcctgagtgttcgcacacgtagggggatcagcagggcgggcggacagggcaggctcccaaccgcgcaggt

SEQ ID NO: 33189 - DNA, 1894 bp, Artificial sequence
  DNA replication origin
gcgctggggagccgggcagagtggacggaaattttcaggtcgcggcccctttaaaggataataaataataaacgggaaggggaacagcgccgcgggaggccccgcccccggcctagggacggtgggcaaagtgcgcgacgcggccccaagcgcagagggtgccgggggcaggggctggggcgggagcgccccgggggaagaagaggggactgactggggctccgcctgggcgggctggccggaggcatcggagccagatccgggaccaagtctcttcccttcttacggagcacctacgctgggcctcgtggactcggagtttcaccttcgccccttagacggagagaccctgagagagtgacttcactctccggagccgccgtttccaagtctgagaaatgggcttgaaagacccggtgcagagctgggcgggcggcgtcggagggagggaaccagggtcccgccggcctccctctggggagggacgggctgcagacgggggctcggcgcgggcgtggggaggtgcgcgctgggacccggagcccctttgtgaaaccaggacgaccctgcccggcccggctgtcaccagcgtcgggagctcggctgcccaccacccccccgtgaaggtggtgatgacttacacggtctgagcggtcgcttgcccaaccacgtgccccgcgcctccctccagggaggtccctgcacgtctccagccctcactcctctctgtagttggcaaccttcttgtcgccactgcgcagagcaggaaactgaggcaccgagcggggtgcaaggaaggcggtcgggagggggacgcgtgctctgcagggagctgtgtgcgcgggaagcgaccccagggggctaagcgcagaggcccaggctccagcccggacgtgagccccaggggagcctggagggcgggcaggggccaccccgggggaccctcacttgtggagggtctctggcgggctcgggtccccggtcctgagtgttgggggcggggttgtagtcgtctccctcccctttccctagactagcacacggcattgcaactttctctctgtccttccacctagttgcacctcctccctccacaaaactgcaaccggggccggcgcggtggctcacgcctgtcatcttaacaccttgggaggcggaggtgggcggatcatcagaggtcaggagttcgagaccagcctggccaacaaggtgaaaccccatctgtactaaaaatacagaaatcagccgggcatggtggcgcgcgcctgtagtcccagctacttgggaggctgaggtaggagaatcgcttgaatccgggaggtggaagtcgcagtgagccgagatcgcgccactgcactccagcctgggtgacacagtgagactccacctcaaaaacaaaacaaaacaaaaaactgccggcaggagagctgcccccgacaacaaggcctgaatccagccttccagccccagggccacgtgtaacctaatggcggcaggtgtctgagaggcctccaccataaggctatattaaacaccaaacccagctgccacccctatctccgatggagaggcctgagacacctgccccaggttgggggtgctttggagagacgctccctgcagcgggataaaggggtgtgggagtacccccttctcgggccaggacccagctcaggtctgaaggtgcaggaagtccctcccacctacgatggagcacctggaggccagcagacccgaaaggcacctggagggcaggtgcatgggcctgtctgtgcctcagtttatccctctataaaatgggccaatgttaattcaaccctttcaccatcctgttctggattaggctgccctttgttcaaagggaagggcacagggtgggggcataattaccccc

SEQ ID NO: 33190 - DNA, 756 bp, Artificial sequence
  DNA replication origin
attatttattatcctttaaaggggccgcgacctgaaaatttccgtccactctgcccggctccccagcgcccccgggctggttgcgcgtcgtcagaccgcgggaggggggcgagggggcgtgcggggaaaagtggggagccctggcgaggccctcccgcgcccgggccgcggcgctgaatcaccggccaggtatttgcatccgagagcgactcgtcccctggtgatttgtctgggggtgggggaggggcggggcgggggccggccgcgcgcggggcgcctcttaccaatcgggcggaggggtgtagacgcggacgcggctggcggctcggtgagtcggcgcgcggcacagccccgtgggtcgggggccgggagccagcggcgcgcaccggcggctggaagccaggcgggcccgggcaggccgaccccaggcgcggggcgcgcgccccactacgagccgccctgcgcggtaaggctggggagcgcgctggccgttcccagcgcgggttccggtgccggggtgggcgcagtgcgtcctggaagccaaagaagggggtccccaaagttgggcggagatgttggtgggggtcccggactgggaaggcggccctggcgggctggggttcggggagttttctctgcaccccgcttggagacttcactccccactggatcaatcgctcaggggcgagcaggggcgatcgggggtcgcgagtgcgcgcccccccctccccagcggaaggaaatggtctctgcgcg

SEQ ID NO: 33191 - DNA, 2550 bp, Artificial sequence
  DNA replication origin
ctcggcgccggccccgggcggcgggttcaattatcttccgtttttaggcgctcgggctggaggggttcccccccccatgcaaatcggccgctttccaagaagcctttgaaatccggaccagggtttctgtcttcttatttcttctccttcttgagtttttttctcacttcctccaggcccccccaacccaggactttcttagccccctccccagctttctgccccgcccctccccctcctcttcccttcgtggagtgaggggcccctttcgccacccgcgggcccggggccttgcacaactctttaaataaccatgttttgcaaggcccgcgccgagcgggtgacctctctccggaggcctggggggaggagggtgtggcccaggatccctccgccccccacccctgcctggtccaacgaccacccagcgccccgtcccagcctctcccttggggctgtcataaaatgggggtgggggtcgaggacaaagggctcttggggggaggggtctgaagggggtgggcgtagctagtttagggttatggcggcgatgggggggcacccagccctgacctaggggggaatctgggatccccacctgccccctccaccggccccaacgtggaggtctgtcctgctcccctcccccacccggcgacccggaagggtcattaaacccagcagggctcggagcgggctggtggggggagtggcttcctttggcctcttccttctgtgcccccaaagagggggggctttgcttggagctcttccgtggggggggccttgtcttgaagttgtcccaggtgggggaggggcgacagacccgaccagaccctgagtcagaaatgccccctcagcactttcttgggttgggtgggtggggggtgacctccagcctggggatggggggctgggtgccgccctggtggcctccggaccgccaggctctcctggtcacaacccagcgctatggccctgaggtctttgtgacctgggacctctgtccccacaacagatggaacagaggctattttggaacatgccctcctcgctttctcccaggggccacccacctgccccccactgccttttcacccatggggccgaaagactcaggggtctgggtaaagggtgtctagggcagaggggccacaggactctcttgtccggtgactggggaggcttgggggtgtctgctgtgcaacactgacctgggtggggtcgggtcacaggagggatctgagtcccaggggtccctgcctcctcgtctctccaggccttgtctgcccaggagctgtgtatgagtcttgggggctcctttgccagggtaagggttgggggtggcctcctgggcccagctgcctctcgggagggtggagctttgccccctccgctgtccccatgatgtgccttccctctggggtgtcactccaggcctgttgggttctgcccggcctgttttattggcggcctgggcgggtggaggtgtggcctgggctagggggtggctcgggtgggacccaggccccaggagtctctgttcttcacccaggccattaggactggccctgggtggaaggcactctaggctgggtgagtgtgttgccgtccgagacatctggcccactcgggatcccagaggaccgggaaactccagacccctgttgccctgcagagattgtggggtctgcgtgggaggctctgtggtcacccagacctgggttcaaatcccaccgccatgtctccaagcagaggatccctgagcctcagttgtcctcaaccatgaaatgggaccgccctggtgcccccttctctgacacctgttggtgcccaccttaacctcctgaactcgattcatccctccttgagtgccatgggttgggggggtactgttacccacactgttttgcaggtagggaacctgaggtccagagaagttgtggcttgggcgttgctgttgagttgtgtgatggggggagggttagcccagggcccgtatacaacaggcgctcaatctccagtctggcctgagatgggaggatacctagatacctggaggccaggctgggccgctccaacagggactcaggcagcgactggaacttagaacccacctgactggggcccggagcccgctggccaatcacaggccaggaacgcccattcccccaccctgcttgtgaagcaataatccaagatctcctggggcagacagtctggccacagcgtgtttctctgtggccccgtgcggggcgaccttgctacccaggcccacagtaggctgtatgcgaagagcctgcgcctctgcctccaagaaggcctccaggtctgcatcctgcatgagatggacatgagagctgatccccagggccttcatggggaaggaaggagggggcttgaggagctcaggcctgctctgactgtgccttttttccccctcaggtttctgcaaatgcgtgaatgagccggatgccagcctctgtcccctggagcccagcgtgaggaagaggcatgccccatcagccttcagcttgagcccggcggccc

SEQ ID NO: 33192 - DNA, 1322 bp, Artificial sequence
  DNA replication origin
cagcgtgaggaagaggcatgccccatcagccttcagcttgagcccggcggcccccgcccccgccccctgccaccctgcactgccccggctcccccgcggcccccacgctgcagtgcggccgggccccctccccgcaggggccgcccccgccgcccacccctagcgcccgtggtggtggtggtggtggtggtggtggtggcccgggccgcagggccatgaaactacaggccgtgatggagacgctgttgcagcggcagcagcgggcgcgccaggagctggaggcccggcagcagctgccccccgatccccctgctgcaccccccggccgggcccgggctgcccccgacgaggacagagagcccgagagtgcccggatgcagcgggctcagatggccgcactggcagccatgcgggctgcagctgcgggcctgggacacccagccagccccggcggctctgaggatgggcccccaggctcggaggaggaggacgcggcccgggaggggacaccgggctcacccgggcgaggcagagaagggccaggagaggagcactttgaggacatggcctccgacgaggacatgtgagttggggtctggggcagggccttctgggggctgttactggctctgagtgtcactctgctcatctgcagaatgggagtaagggtcaggtcgcgggatctccttcctgtaattccagcagtttgagaggccgacgtgggaggatcacgtgggcccaggggttggagaccagcctgggcaacatagcaagaccccatctccgcaaaaaattaaaaaattagccaggcatggtggtgcacctgtggtcccagctactggggaggctgaggcaggaggatcccttgagaacagaagttgagttgtgattgtgccactgcactccagcctggatgacagagatagacccagtctcaaaagaaaaatggtttttttagccgggtgctgtggcttacgcccgtaatcccagcactttgggaggtcgaggtgggtggatcacctgaggtcaggagctcaagaccagcccggccaacatggcgaaaccccatctctactaaaaatacaaaaattagccaggcgtggtggcagaagcctgtaaacccagctactcgggaggctgaggcaggagaatggcttgaacctgggaggtgaagattgcagtgagccaagaatgtgggttttttttttttttttagacagagtcttgctcttttcgcccaggctggagtgcagtggcgtgatctcagctcactgcaacctcctcctcccgggttcacaccattctcctgcctcagcctcccg

SEQ ID NO: 33193 - DNA, 1279 bp, Artificial sequence
  DNA replication origin
tcgagaggccgaggcggaaggactgcttgagctcaggaggtcaagactgcactgagctgtgatcacaccactgcactccagcctgggcaacagagaagaccctgtctcaaaaaacaaaactggccgggtgcagtggctcatgcctgtaatcccagctactcaggaggctgaggaggagaatcgcttgaacctgggaggcagaggttgcagtgagccgagatcgtgcctttgcactccagcctgggcaacaaagtgagactgtgtctcaaaaaaaaaaaaaaaacaaccaaacaaaacctagcagcaaagaagcaggtgatatcaggttgtacaaacagctgccaatggctgggcgtggtggctcacgcctgtaatcccagcactttgggaggccgaggtgggcggatcacgaggtcaggagatcgagaccatcctggctcacacggtgaaaccccgtctccactaaaaatacaaaaaaattagccaggcgtggtggcgggcgcctgtagtcccagctacttgggaggctgaggcaggagaatggcatgaacccgggaggcggagcttgcagtgagccgagattgcgccgttgcactccagcctggacgacagagcgagactccctctcaaaaaaaagacaaaaaaaaaaaaacggctgccaagaaagtctaggagggtgccgtggaggggcagtggcgagggtggggcggatttcagatggcggtgggagaattctccctgtggagggaaggggaggtggagctgggacagcatgcatggtgcaggatgcaggaaccagcctgccgtaatgattccctttttttttttcccaagagagtcttgctctgtggcccaggctggagtgcagtggtgccatcatagctcactacagcctccatctcctgggctcaagggatcctcccgccttggcctcccagagtgctgccgggattataggtgtgcgccaccgtggctgcctgcgtgatgcttttcaaggccccaaaattcacgctgtagggacggcttgtgctgttctgggctaattggaaacaaagtgggcgtcacgggtgccccacgctgtgctcatgagcgctctctgcagtctgagctggcggcggccggctcttcctatttccagagagggaaactgaggctgggcggggagtgggtctttccttgggctgggacgagccagcaccttctcccctgactcctgccctctgctcaccccaggaagcccaaatgggaggaggaggagatggaggaagacctcggggag

SEQ ID NO: 33194 - DNA, 1318 bp, Artificial sequence
  DNA replication origin
taattggaaacaaagtgggcgtcacgggtgccccacgctgtgctcatgagcgctctctgcagtctgagctggcggcggccggctcttcctatttccagagagggaaactgaggctgggcggggagtgggtctttccttgggctgggacgagccagcaccttctcccctgactcctgccctctgctcaccccaggaagcccaaatgggaggaggaggagatggaggaagacctcggggaggatgaggaggaggaggaggaggattacgaggatgaggaggaggaggaggacgaggaggggctgggccccccaggccctgccagcttgggcaccacggcactgttcccccgaaaggcccagccaccccaggccttccgcggcgatggcgttcccagggtgctggggggccaggagcggccggggcctggccctgcccaccccggaggggccgcccacgtagccccgcagctgcagccgcctgaccacggcgactggacttacgaggagcagtttaagcaggtgagtgggcgcgtcccgcgtggcggctgaggcacctgctcctgggccagtggggccctttgaaggcccacgttgcacggggtgtgtgctgagccgggcgtcgagttgagagctgggggttcctgcggtagctgtgcttcctgtgcttccctcctgggcgtgggctcgaccagctggctgttcattgctctgatgtgggatgtgtgaggagcacccggccgggtaggagaaacctggggggctccacggcccccatatcggaggtgatggggcagagatggaaaggtgggcctgggagggagaggctggcgccggcccgagctgggcttgggttggaggaaccaggcctgcgggcgatgcgggcagagaggccggggccttggtgacgtggtgacttggcctcctctgtcccctggcatctgtggagagccgtggggggttgcgggctgcagctggcagccgaggggatgtgggggtggctcaggtgtggctgcaggagacgcaggagccagggcctgtgaggctccgagtgggcggttaaggctggggccggcagggggtctcagggaccccaggctgaaggaggaagtaggggccgccccagcctttccccgcaggcggccaggccagaggaagtggccgggcgggggatgctttgaagttgggccgtgctgggccgggcagatggaaaccagatggtggccaggctcacattccagccctcgtccagctgggctctgcctcgacctctgggcgcggctggggggagccacctcctcgcccggggctggagctggtct

SEQ ID NO: 33195 - DNA, 1744 bp, Artificial sequence
  DNA replication origin
gctcaggtgtggctgcaggagacgcaggagccagggcctgtgaggctccgagtgggcggttaaggctggggccggcagggggtctcagggaccccaggctgaaggaggaagtaggggccgccccagcctttccccgcaggcggccaggccagaggaagtggccgggcgggggatgctttgaagttgggccgtgctgggccgggcagatggaaaccagatggtggccaggctcacattccagccctcgtccagctgggctctgcctcgacctctgggcgcggctggggggagccacctcctcgcccggggctggagctggtctgggctcccgcagggaggtggatgatggacacgctgggacatgcctgcctcggggcagccccttcggccctgggcttccagaatccgctctgaggagcctcctaggaggggccaaggcacagacacccaggggggcctccccggggctcctgactccaggggtgccgggtagcttaaggggcggccctaaccccagcagccctcaagagacttaaggttgggctgcctggaaactcacaaatagtaaagagctgaaagccggacacggtgtgggagaatggccagggcagcggcggggactcggtggggggggggggcgtctcgctgattccaccctgctctgtgactcagtttcccactcctgcagaaggggatgctccacgggccacactgccgcgcgtcccattctgccagtgagaaaacagaggctcagtgttgggaggaggggtcttgtgatcttttctgggtttaagatgatacggatgagcatgctgagagtggattctctttaatttcattaatttaattcaccaattaatttaacattcacccaatattcgccatctgcccgggactcagcccgcagggagccctgggctggaggggcgggcaggagccggacggagacctccatccccgcagggttatagccaagccgagagggagggtcaaggccccccattcagtcggtccttcgggggtcagaggtgaatgggaccccctgaccctggacacacgccccgcccagacagccccggcctccaaggcccaaagccgatgggggagttttggggtgactggcccagaccaggcagggatgaggggccaggcgccctgaccccacagcccgcagcatgtcctgagcgaaggcaggaggcagaagccactgtctaccttgtctgggcgacaccgcgggtcagggttgtaggtgccatgtggggtttttctgcagcgggaagccgagatggggaaactgaggccagtgcagggaggggggtcactgtgtcaccggcagcctcaggtattcctggagatcctgccgccccgcacctgccccctgggtgtaccgggcagtgcagaggccctgaggtggactaaagctcggcttgtgtgtagggaccgggtgccgcctctgggtcttgcgggagacgggattggaactccgagaagatgagggcctagggatggtcgtgggcagcgggggtggggggaggcccccgccctgcagtcctgtgacttttttttctctagagaagggctttcacggtgttgcccaggttggtctcaaactcctgggctcaagtgatctgcctcactcagcttcccaaagtgctgggattacaggcctgagccacggtgcccagccagtcctgggatcttatcctgggctgttcgtggcaggtccagccgccgatgccgccgc

SEQ ID NO: 33196 - DNA, 1796 bp, Artificial sequence
  DNA replication origin
tttttttttttgagacggagtcttgttttgtcacccaggctgcagtgcaatggtgcaatctcagctcactgcaacctctgcttactgggttcaagtcattctcctgcctcagcctcccaaatagctgtgactacaggcgcgtgccaccacacctggcctatttatttatttatttatttatttatttattattattattttagacggagtcttgctctgtcaccagcctggaatgcagtggcgccatctcggctcactgcaacctccgcctctcgggttcaagcaattctcctgcctcagcctccagagtagctgggactacaggcgcccaccaccacacccagcttatttttgtatttttagtagagacggggtttcaccatgttgcccagggtggtctcgtattcctgacctcgtgatctgcccgcctcggcctcccagagtgctgggatgacaggcctgagccaccgcgcccggcctctcgatacacttttggttccagaagtaacacttgacactcttcttgcagagaggaagaaaatggaacgtttacagggagccccgagtccctcccttgacctctagggcatgagccgcatgttctccaggcctttctctgcccactcacacccaggaatgtgacctgggaggtatctaacgtgtgatcttccgggcaggtcgggaggttcctcccgccgctgccttcgaggagctgtttatcttgggtgcgttcgcgtcgtaattgggatgttccgagccacctggttcttttcagctgtatggacgttcccctcgtggcgctggacacccccacgtccacacacttccctcggtcatttccctgttgtaagcaatactgtaacgaacatcttcggggcgtgagagttgcttggagcagtgtggggaggaggtggggagctggaattgccagggctctgggagaatcggcaacacgttttcttcgtcgtgccccggagacccccagactggtgggagacagagctggatgtgaaggtagcactggggtctgccgtggcctcgccacgtccatttcagactgaggcttaggggcgctgctgggcttccccacatccctcgaggggtcagggctgggctagaggggattgagggggaggctgccaagaggaaggggcattggggctggggctttgcaggatgtgtaagagtttgttagcgagccacagcagggcagggcctgcctctgggatcactgtgactggagcgtaatgtgtggggccagggtggccaactttttggcttccctgggctacattggaagaagaagaattgtcttggaccacatgtaaaatacagtaacactaatgatacctgatgagccaaaaaaaattgcaaaaaaactctcatcgtgcgctaagaaatgtacgcgtttgcactgggccgcatttacagccgtcctgggccgcgggtcagtcaagctctcggtgtagcaggaggggtgggcagagcttgagggcacttggcagggtttggagctgggagaaggaggctgggaggacccttctggagcctgttttggagacagaacggaggcacccttggtccaggcaggagtagaagaggccaacactgcagctgggcttctggggcctgagaagaaggagaaggaggagaattttcccagcacaggcgggtgctctaggcagatggtgcagctggggcctttgcccagaggtcaggcagcaggttccgagcacacagaggcagcggctgtgtttgagacagagtgtgtttgtcaagagagccccgagccaggc

SEQ ID NO: 33197 - DNA, 1509 bp, Artificial sequence
  DNA replication origin
cggctgcacgtgagccgccgggagggctgtcgggaagccccctgggcacctggtcctccccaccggggcagcgcccgcctcatcaaagccactgtggctgctggcgccgggccagctgggccctggcgggcgaggggtgggtgggtgcccgccagcccctggcactgtgccccggcccgtgcccgtgccaggagcgtcgctgactcagccggaagagccttatctggcccctgcgccaccgcctggccgtcgggtcaccgccgcggggtcaccgccgccgcggcctggccccacgcccaccgccggcgtcccaccctggtggctgctgccaagcgccggccccgccccatgctttctaataacacacgcggcagcccgagggagcggtgcccgcaggcagagagtgtccccgcgtggtgcctgggcgggggaatgggcgtggtgagccgccgtggcgtgcgtgcgagtgtgcacgctggggctgtggccgggcggctcgtgggtcctgtctcgtgggaccctgcctgggagggaatcttgctccagacacagcatcttcggaccctccaaggcctctgcccaccgggcacctgctggattctgtgggtctcgtgtgtggggctgtgtgcacccagccagcggcacctcacgcgcccgcctgcgtgtccccagccagcaccacggtgttcgtttaggtctctgtgtgccgagtgacgtggcaaacttcccacgtccctgttttgcgtggacctgttggtgagtgtgtccagacgtgtgtctgccctgacgtcctttgtgaatgtctatgttggggtgatgatctcctgtgtgtgcatttttttaactataaagatggggtcttgccatcatgttgcccagcctggtctcaaactcctgggctcaagtgatcctcccgcctcggtctctgaaagtgctgggattacaggcgtgagctgctgtgccggactggtctcttgtgttttgtgtggatgtggctgtgtgtgtgtgtgtgtgtgtgtgtgtgtcaggggtggctgcaagcgtatgtgtgtgtgcacgtcgaggctggagagtgtgtgtccaaaagcgtgcctgcttgggctcgccacgtgtgcgcacgtgtgcccgtgacagacgaccttcctgtgtgcctgagcatttgggagcctcgtgctggaccctgaagcatgaggtcgcggtggggcctattaaccattagacccccggggctgctagagagtggcgctgtctgtcttggtcagcagcgcgcgtcggccgcggggcacagatcagcgcctcccctgcccgccatgggctctggagccagcctagccgatgatggagccccagtggccaccgagctatggacagggccgctgggggtgcacccccaccctctccgaccccgaggagctgccggcagagccctgtccactcttgcctcagtttccctgctggacacaaagggctgaagtccaggtcccttcgatggcccaaattacctgactg

SEQ ID NO: 33198 - DNA, 3375 bp, Artificial sequence
  DNA replication origin
taaccattagacccccggggctgctagagagtggcgctgtctgtcttggtcagcagcgcgcgtcggccgcggggcacagatcagcgcctcccctgcccgccatgggctctggagccagcctagccgatgatggagccccagtggccaccgagctatggacagggccgctgggggtgcacccccaccctctccgaccccgaggagctgccggcagagccctgtccactcttgcctcagtttccctgctggacacaaagggctgaagtccaggtcccttcgatggcccaaattacctgactgtcgatcctgactggggcggtggcgacatggcccccgcagctgcccggcggtggcacccaggggcgtcacccacgagggacgcttgactcaaggtcctctccactggccgccgggagccgggccgggagccgctgcggtgccgacctggtgggtggcacacggggggcgggtgcggaccgcctcttctccgctctgccggctgcacatggccagaggacaattgggggtcacagggttaaacgctgactaatctggccattgaaggcccaagcgccgggatatgcagccttgccccttggtcagggctgggctgggggtccgtgggcacaggtgggtgggcagggagtaggtggaggccgcccctcccactgccccgcaggccctggttctggccaggctcaggaagtgagctccctggggacccaggccccatgtccagaagccacgctggacatagtgcccagattccatgcccagcagcctcctctgccaccctcagagacggagaacgtgagagcaagtaagaacccgccttccgggaggagccccgtctggattggatggcatcgcccaaaactcacgtccacccagaacctcaagatgggactgcatttggaaatagggtctctgaagatgttagtttcagtgaggtcctgcagcgtacggtggccccaaatcccatgccggtcggttgtcctctaagggggaggtcacacctgtgatccccgcgctttggaaggccaagacgggagtttcgcttgagcccaggagcttgagaccagcctcagcaacagagtgagacccctgtctctacacaaattagctgggtgtggtggtgcgtgcctgtggtcccagctactctggaggctaaggcaggaggattgcttgagcccaggaagtcgaggctgtagtgagctatagtggcacgactgcactccagactgggcgacagggcaggaccctgtgtcaaaaaaagaaaaaaaaaaaaaaaaggacgggcgcgcagtgtctcatgcctgtaatcccagcactttgggaggccgaggagggcggatcacctgtggtcagaagtttgagaccagcctgaccaacatggtgaaaccccgtctctactaaaaatacaaaattagccgggcgtggtggcgggtgcctgtaatcccagctacttgggaagctgaggcaggagaattgtttgaacccaggaggcggaggctgcagtgagctgagatcgcaccactacactccagcctgggtgacagagcgagactctgtctcaaaaaaaaaaagaaaagaaaaaagagaaatttggacacggacacgtagggagatagctgtgtggagacagaggcagaggctggagcgatgtggccacaagccaaggacacctggagcccccagaagctgggagaggagggaaggaccctcccctggagccccagtgacacgctgatgtcagacttgtggagagaagaaacctctgctgacgtggcaccgtgccctgggcaaggttagggcagaaacaccaggctgtgcctccctgggcacacatgtgtctgagcccgaccctttcatgggcacttacggagcacctgctgtatgccagcccgaccctctcatgggcacttacggggcacctgctgtatgccagcccgaccctctcatgggcacttacggggcacctgctgtatgccagcccgaccctctcatgggcacttatggggcacctgttgtatgccagcctgaccctctcatgggcacttacggggcatctgtatgccagcccgaccctctcatgggcacctacagggtacctgctgtatgccagcctgaccctctcatgggcacttacggggcacctgctgtatgccagcctgcctgcgtactggggacacagccgtgcatgaagcagaagctcctgccgccggcactggagtcctgacgtcggcagcgcggtggagggcgggcctgtctcgccgttatctcccaggcgtgtctgctccccgtgtgtctggctgcaggggcgcgtccagggggtgtgtgtgtgtgtgtgtgtgtgtctgcgtgggagtgtctggctgtgtggctgcacggaggcctgtctgggtaggagtgtcggtgggggcggtcccacacggccatggtttgtgtctgccacggcctcagccccgttgcttcggtcgatgcccccaaaccttgacccatctcaggggcaccacgctcactgctacaaatgtgggtcttccgggcaagtgagcgtcccccacccaggacccccgaccccggccctgggagggcccgactgccagcctggctgaacctccttcattgtctggttttcgggggtggattttgagacagggtctcgtgctgtcacccaggctggagtgccgcggtgcagtcatagctcactgcagcctcgacctcccgggctccggtgatcttcccgtgtcagcctcctgagtagctgggaccacagacactcgccaccacacccggctaacttcattttattttttggagacagggtcttgctgcgttgcccaggctgaactcctgagctcttaggggagccgggatgtccctgggtcctgcggtcgctctctgtctccatctcttctttctcctctcccctctccctgtctctgccacccgccccgtcccttccaccacgtcgccctgtaattcttccctgacggccatttttccgggagtggctgggcgtctctgccctagctggcgccctgcccagccactgcccccacccctcagttggccacatgcccatctcgtgggggcccttggacctggttcttggggaagaactagacagatcacctctgtggttattcattgctttaatgccacctggggggagagagcctgggcacaccaacatgcagagatcccagctctgcccgacctgggcctggtgcctgtgacctcctcctctcggcctcagtttccccgcccgtaagacggggatggtatcagaaggagtgcagctcttgtgactttgttttcatccttggcctttacggttcaccaggtttctcctgtaactcctgtagagagggg

SEQ ID NO: 33199 - DNA, 1270 bp, Artificial sequence
  DNA replication origin
aggccgggggattttgaatctcgctgtttttcccgtcccggaaactcccaggactgacagaggcagcagagctgagcgtggaccacagggccagccacacggggctgtcagtccacagcgtttctgccaggacagggcactctgcagccattattgagcacctcctgtgtgtcctggactatcttgtatgctggggagatgcagtgtccaaaaagggcccggacttcccggttcagggagcaggaggaagaggtcagctggggcgggtgggctgtgaagggaaacaccaggggacaggcggccccgaccgacctggactgatgggtcgggggagggcagggtcacccacacccagcaggcgcttacttagctagcgtctgctgtgtgacctcaggcccttccccgccctctctgggctctgcctggccatgggttgctcctcgtgcacctgaccagccggggggctcccccgcctgcctaagccacgaggtcctttcaattcccgtcagcacagccaggcctcggcggatgcagatgctgagagccccgccgggcgtggggaaattggggaagtgattctgggcagggccgaacatctgccggctccactcccccggccctgatgggccccgagtcccctctctggaaatacacagcgccgcacccacggggcggatattaataacactctccagaaatgacaatgaagcgcggcccgggaagctggcgtggtgaaggtgcttctctgtggatttccagatcacgagattccgggggagcttgctgacgccagaccctcctcattctcccgtgacgggcccttcgtgcgatcgccaccctggcacctcggtcttctcatctgtgaaacggtcccggggcatctgggtgggggctgagacatggatgggggagtcccttgctcagggaggagacgctgaccggccgccagcccgtttcacagttggggaaactgaggcccacgagtccaggacggcagcgacaggcctggtgctgagatgtggccggggtgggatcagctgacaggcacttccagaaagttggtgcagaggaggcaggaggcagccccatggcggcgagatatgacgtggaaatctggggcccgcagtccctaatagagtctccgccgagggcactggccttaagcagcccctctatctgccaggaaacccgtttcacagatgcagacacagacacagatctgggctgacggcagggggtgccccaggccacacacagacacaccccaccc

SEQ ID NO: 33200 - DNA, 1229 bp, Artificial sequence
  DNA replication origin
tgcctccccacacccctggggccctgctctgcatttggggaactgaggcagggaggggtccacacctctctggtaaccaggtttgcagagtaccagcaacctgcaaagcccttcacttgtccacagtccggagaggcgggaaggaggcggccagagtgcacccccgcagccacatcactgctgtagactccaggatggccacgcgcggtggctcatgcctgtaatcccataatcccagtactttgggaggccgaggcgggcggatcacctgaggtcaggagtttgagaccagcccggccaacatggcaaaaccctgtctctactaaaatacaaaaattagccgggcgtggtggcgcacgcctgtagtcccagctactcgggaggctgaggcaggagaatcacttgaatccgggaggcggaggttgcagtgagctgagatcgtgccactgcactccagcctgggcgacagagtgaaactttgtctcaaaaaaaaaaaaaaaaaaaaaaaaagactccaggcctcatccctcgtcccctccccacagagtccagaggccaggaatgaacagctggacagatgaggcaggaatgaagaaggaatgaagacggagcagagcctggggctgcaggcgggaggagggcacggggggcaggaggacctggaggacctggagtctcgcgccccagtctgcccattctccgggcctcagtttacccatggtgggggtggggccgaagccatcaagaagcggaagctggcgctgtggccccgcaggaccgcggccccgggaggccgggggattttgaatctcgctgtttttcccgtcccggaaactcccaggactgacagaggcagcagagctgagcgtggaccacagggccagccacacggggctgtcagtccacagcgtttctgccaggacagggcactctgcagccattattgagcacctcctgtgtgtcctggactatcttgtatgctggggagatgcagtgtccaaaaagggcccggacttcccggttcagggagcaggaggaagaggtcagctggggcgggtgggctgtgaagggaaacaccaggggacaggcggccccgaccgacctggactgatgggtcgggggagggcagggtcacccacacccagcaggcgcttacttagctagcgtctgctgtgtgacctcaggcccttccccgccctctctgggctctgcctggccatgggttgctc

SEQ ID NO: 33201 - DNA, 979 bp, Artificial sequence
  DNA replication origin
tcgtgccagtgcactccagcctgggccacagagcgagaccctgtctcaaaaaaaaaaaaaaaaaaaaaaaaaaggaaagaaaatttctcttcttctgacatctctctgccaagtctcgggccaaccctcctggaggctcagtcaggccaaccctcctggaggctcagggctcggcagtccccaaacgctagacacttggattctttcttggatttccctgaattctgtggccaaagagagcgtctgaagggctgcagctgaccaggtgcctcccagctcctgcacccctcccacccctgccgtggcctcatccccaggtggggcctcatggactttggagcctcctgggagactggagggggcctggggggcaaaggttctcccagggggccctgcagacaggcggtttctttacagcctgggcctctgggcccaaggacaccgccctgggccccccgcagctgctgggacctggtgggagtgcccaggtggggcctgcctggggactgagtggggaaaccatagcccccctgtgaccttgggcactgcccacctgtgaccttgggcactgctgggggaggggccgcatgtgctggccccggccaccctcttctgtcctggccaaccctttccttggattttctgcaaacctctggggtctttttctgaccttcctcccacctcccagagccggtgggctggggaggggagtcctgagccggggctgaactccctggttctaggggtggtccgggcagccggggaaccccctccccactcccaggtggccctgggacttatcttgcaccctgtccgccagcagactccactgaccccctcggagctgtcgtttctctgggaggtggggtggagaaaatcatcaacgtttcgccacaaacaagaatttcctgtttgcccttccagggctggggggtggcggttatctcactttttcctcccctcccccaccggcgccacc

SEQ ID NO: 33202 - DNA, 2172 bp, Artificial sequence
  DNA replication origin
tctgtcctggccaaccctttccttggattttctgcaaacctctggggtctttttctgaccttcctcccacctcccagagccggtgggctggggaggggagtcctgagccggggctgaactccctggttctaggggtggtccgggcagccggggaaccccctccccactcccaggtggccctgggacttatcttgcaccctgtccgccagcagactccactgaccccctcggagctgtcgtttctctgggaggtggggtggagaaaatcatcaacgtttcgccacaaacaagaatttcctgtttgcccttccagggctggggggtggcggttatctcactttttcctcccctcccccaccggcgccaccacccgagccccgccaccctctctcctcacaggtgccccctccagaggggcccggtcctcatcaggtgggggcggcacctcccacccccccaggcctcccacacccccccccgtgcagagccgggggagtgtcagggtcgggggccacagcgtcttccctccatccccagagccacggagtgtgtcttgcagatccgtgtaacggggctcgggcgtgcaaccttctgggaagaaaaccaaagaggaatgaaggggtcagaggctgaggggggctgtggagggggctctgtcagaaggcgacgtttgggcgggaaggcaggagccgagcggggacccgggagctgcattccaggcagaaggaacagcgccgcggaggccctggggtgggggcctgtgcgttttacatagaaagacgccaaggctgggtctgggggctcctgcctgtaatcccagcgctgtgggaggctgaggcaggaggatcacttaaggccaggagtttgagaccagcctgagcaatatagcaagaccttgtctctatagaaatacaaaaattagccgagcgtggtggtgcctgcctgtggtctcattggctcaggagaccgaggtgggaggtggaggctgcagtgagctagggtctcaccactgcactccagcctgagtgacagagcgagaccctgtccctaaatagggcagctcaaggccggggcggagggagcaggagagggcagggaggggccaggagggtgctggggggccctgggaggctgtggccgagggagggtcatgctcagatgtctgtgaaaaaccccccaccccacccaactgctgagtggggaagggtctggcaggaggggcggccgggggacctggaggtggcttggctccacgcgctctgtgcctcggtttccccttctccgaagcaggtggtgctgggaaggggagacgatgggcccagccttggtaattaggggtccacaccttccatcccccacagcaggaagtggacagaggggaggggaccccctcagggaaagacccccaggcctgccctgtggccccgcattttcttggcatcgcactgagaaagcaagttcatttaacatgcatttattaggcaactgctgtgtgcccgattttggatgctggcaacaagataagaattccgcatgttccagggcagacagacgagagacaaatgcgtgaatccacacagctggggccatgcgagggctgggggtccaaggggggccgtgagccagaaaccccgtgaggccggtggtcggtaaaggtgggtgggagcagagcatctgcggaggtgatatcggtcctgggaggacggggggctcccctccagggagggaatgaccacaggggacccagacgaagggaaggggctgagaaggcctcgcagacgggaggaacagccggggcgaaggcggccgctcggggctgatggggggcggtgggggtctcagcggaggggcaccttcagaacttcacacccgacccctcccgtgatcagagcaggccccagggaggtcaggcggcgtggaggggagtgcgggccgcttatctcggccctcagcccctggggagggagtttccggagattttgcccaatctccagcctgggtttagggctcctgtgggtgtgtggtgggcggctgatttcagagctttctggttgacgtttcagaggggcagggtttcggccacagaacccaggtgagaaccaaggcctgggtttgccatggggtgtgctgtggcccagcagttcaacccgggatctggcccacaaggggggc

SEQ ID NO: 33203 - DNA, 898 bp, Artificial sequence
  DNA replication origin
cggcccggctgccgccccctcccctccacgttcttcctccgagaccccgtccatcaccgagtcacggatctaggagtgtatctggggtttagtctgttttgttcccagagtctggaatcagccgagcacacagcagttgcctaataaatgctcgttacttgaaccttgattttctcagctgcaaaagtgagccgggcagggcggagagggggacagggcggagagggggacaggacgagcttgccagggaaacgcctgaggcagcaggtactggaatggggaggacttcaccgctggggctgtcctggggtgaacgccatcccccacccaaattcacatcggcccagaacctcagaacgagacgttatttggaaaaagggcctttgcagacgtgatcaaattgagaaaaagtcacagtgaaggccggtgggcactggagacggtcgcacagagacagaggccggccacatgtcaagggactcctggagcccccaggagctgggagaggcggaaggctcctcctgcagcccctggagggagcgcagccctgcggacgcctcgattttggactctgggctccaggacggagggagaacaggtttcgtttgttttacgcccgcggtttgaggtccttcgttacgcagccccccggctaagaaccgcacgtagaggccagcacaccttgggcccttccagggcgagcggaaggtcctctcctctgagattctgacccggtattacggggtctaccctgcctggacccccccttccctggcacagcccctacaagaaacctcaccgcacctcctgcctcagtttccccatctctcaaatagagtgtgtgagaaaacacagcagctttaccccaagcacctggcgccccagctaccctcacatc

SEQ ID NO: 33204 - DNA, 897 bp, Artificial sequence
  DNA replication origin
attccagtacctgctgcctcaggcgtttccctggcaagctcgtcctgtccccctctccgccctgtccccctctccgccctgcccggctcacttttgcagctgagaaaatcaaggttcaagtaacgagcatttattaggcaactgctgtgtgctcggctgattccagactctgggaacaaaacagactaaaccccagatacactcctagatccgtgactcggtgatggacggggtctcggaggaagaacgtggaggggagggggcggcagccgggccggggtcagaggacgaggccgggcgtgtggccatgtgtgcgtgcctgtgctcatgggacccaccggcccggccagccgggtctacctgagggccccacacccctcaggcagctgaaggggaaagggcctccccggccaccataaatcagcgcaggaatgcaggctggccagtctggcgctggccgggttggggcggagacaaagaccaggcagctggacctcgggcagcctcgaccacccagggcagaggtcaggactcctggctgcccccccagccccttcccggaaggcctcactgggcctccaatacacagacggggaaactgaggcccagagaggggcaggacggctgcagggtgatggggcctttggccggcctccccagcacctgggatgtccccgcagcagcaggggctgggcgtgggtctccttctgggccctaatgaccgatcatcccagctgaggcctaattggtggtttcaaggctccccactgcccagccagccacattcccccgagcttaattggcagcctggtatttgtcgcagctcctcctcggcaaattggcccccgcctgaactccgctttctaattatccctgccggctttcccccaccctgcc

SEQ ID NO: 33205 - DNA, 1161 bp, Artificial sequence
  DNA replication origin
tacacagacggggaaactgaggcccagagaggggcaggacggctgcagggtgatggggcctttggccggcctccccagcacctgggatgtccccgcagcagcaggggctgggcgtgggtctccttctgggccctaatgaccgatcatcccagctgaggcctaattggtggtttcaaggctccccactgcccagccagccacattcccccgagcttaattggcagcctggtatttgtcgcagctcctcctcggcaaattggcccccgcctgaactccgctttctaattatccctgccggctttcccccaccctgcccgcccgaacctgtgggtgggggggggcgctgggggacctcctggctccttgtaccccagacggagcctctttcccctctggaagacgttccggggcctggtgatcttcttcctccccagccaccaccctggcaggcagaggcggtcggtggctcatttcatagctggaggctgagactccaggctccaggtgcggggaagccagcaggagacaggaggaccgggatgggaagcagggcggggctctgggccaagtccccagcagcccccaggctctggtcccgcactcgccgctgtgtctcagtttcctcacctgcaaagcagagccagttctcggaacaaatgcgctcccgtccgaccctcaggacagccccgggaggcatgctggtgaatttttgcagcgatttgctgtgtgaactcaggcaggcactgtcctagggtaaattgtgtcccccaaagaaaaggtggagggcggtggctcccgcctgtgaccccagcactttgagaaggcaacacgtgaggatcgagggagcccaggaggtcgagaccagccagggcaacatagaaagacccatctctacaaaagaaaatgtaaaaacttagccgggtgtgatggcgagtgcctgtggtcccagccacttgggcagctgaggcaggagaatcccttgagcccaggaggttgaggctgcagtgagctatgattgcgccactgcactccaggctgggcaacagagtgagaccctgtctccaaaaacaaacaaaaaaaagactttgggaggctgtggcaggcggatcacttgaggtcaggagttcaagaccagcctcgccaaatagtgaaaccctgtct

SEQ ID NO: 33206 - DNA, 1288 bp, Artificial sequence
  DNA replication origin
ccttgatctggggttcccgggcccctggaccgggagaggacactgtcttgtcccaggccacctggtttctggtgcctccttgcagaccctctgggaagctcgttcaccggcatttctgtcttgcagccttgtggttcttcacctgcccagcggggtcttcggctctggcagcggcttgagggtcctaggggtggtgacccctgctcctgtcctcctgacctggcctccagtgcaggagggacatggttcccacacctgagctctggcaccaactaacccatcccctctccaccctcacagctctacgaactcgacggggaccccaagaggaaggaattcctggatgacttgttcagcttcatgcagaagcgaggtgagccctctgcccccaccccgctggagggaggtcacagaaacagggctgtaggaggggccctactggctccaggtatgtcggggcggtggtgagcaccccgtggctggaggcatccaaggctcctaaatcgggagggacttcaggggtgtcttggggggaaacacatcctgccatggaggtttgacgcgggaggcacgcctgtgagtctaaggggtaggtcccttggtggggggcagggcagtctcagggccccaacccagaacagacagtccaggtcatctccttagcatccagggtgcagtgaagtgggggtccccactactgggtaatgggggagtggaaccagcctctgtgtttagggagtggggtcagattcgggctggccaggtgggtgcaggtgcggcaggacagaagccccccgcccggccgcgagatggcttagagtctaatgatctcatggcggccaatgcgacatttgagtcctggcccctcccctcttcccaccagggcctcagtttccccatctgtaaaaacgggccacaaacagtccctgcccaaaactcagtggccagcaggtaccccagatgtgctgagtgcagggccgctgtttactgtgcacacttattgggcaccaacggtataccaggctctgtgcccccaaagtctcctggcctagagagggcaggtctgggctggtgtccaggtggggaaactgaggtccagacacaagacagactcagacgaccaagggtagccggggtgtcccagcggccattcccaggccccaccccagcttagagtgaccacggggcagagagagtgcggcaagggcttccgtctcgcctccaagtcctcgtcggccggagagggtcctaggagcgtctgctgccaggtaggagccgccccaacccc

SEQ ID NO: 33207 - DNA, 780 bp, Artificial sequence
  DNA replication origin
catctgtggttgtcacagcctgggcgggggagtgctcctggcatggagagggcggaggccaggacactcggctccctgcagtgcccaggtggcccccaacctccctctcgccccttcccccagggacacctgtgaaccgcatccccatcatggccaaacaggtccttgacctgttcatgctgtacgtgctggtgacggagaagggcggcctcgtggaggtcatcaacaagaagctgtggcgtgagatcaccaagggcctcaacctgcccacgtccatcaccagtgcagccttcaccctgcggacccagtgagtggcggacggttgtgccgaggtcgggccagggcactctgagcagccagtgcaaggggcctgcagaagagggagggggtggtgggcagctgcagaggagggggcagtgggcagccgcaaagggcacagggccacaccgtgcgtccagggcccgagagcgtcaagtaggggtgcgaggaccacacagtctctggggttgtgcaatcaggggccattgcgaggaacagcattgagatggagggaatgggcaaaggcccagcagctctgggggctgctgagcaagtccaagggaagaaccagggatggtggtgccacagtggggtttactttgtactgaaggccaaagagagccgtaggggtgacccgggtgccatcctcttccctcgtcccacccacagatacatgaagtacctgtacccctacgagtgtgagaagcggggcctcagtaaccccaatgagctccaggcagc

SEQ ID NO: 33208 - DNA, 872 bp, Artificial sequence
  DNA replication origin
gggtgcgaggaccacacagtctctggggttgtgcaatcaggggccattgcgaggaacagcattgagatggagggaatgggcaaaggcccagcagctctgggggctgctgagcaagtccaagggaagaaccagggatggtggtgccacagtggggtttactttgtactgaaggccaaagagagccgtaggggtgacccgggtgccatcctcttccctcgtcccacccacagatacatgaagtacctgtacccctacgagtgtgagaagcggggcctcagtaaccccaatgagctccaggcagccatagacagcaaccgacgggagggccggcgccagagctttggtggctccctctttgcctactcgccaggcggggcacacggcatgctctcctcacccaagctacccgtgtcctccctgggcctggccgcaagcaccaatggcagctccatcacccccgcccctaagatcaagaaaggtaagggcctgtatggggcctggggcgtgttcccaactgagcttcagcctggctgtctgaccttgggggatacctcttcccctctctgggtaaccaggatgaaaaaccctatagttggcatggaaaagggcttccaatctaccagtcctctgcctatggcagacattaccaatccatcaccattttctaattccacacaggtggcaggcagacattgctaatcaatctgtgtttccagtcctgtggccaaggcagacattactaattgatcactgtttttccagtctacactgaggcaggcatcatcagttgatcagttttccctcccactgagcctctgaatcctccataacacagaggtaccaacagcacacacagcagtgtcacctcagtt

SEQ ID NO: 33209 - DNA, 2009 bp, Artificial sequence
  DNA replication origin
tttccacggccagcatggccactgccttcagcgacttccttctcctgggccgggacccagcctcgcgcccaccccccacccaccccgcctgtccctacaatcatcggagttaacagcaggctcaagtcctctgagttagaatccaggtccacccaccgccgggaggccggatcgcccacagacacgacacgcaggattcccgacacacacacgcagcccgagggagacgacccagccctcgaccctgcacggcccctccccaggctccgaggtgggcaggtgcacgggggccccaggggtccagggccgccagatgcagcaggcagccaggccccagtggctgctgcagaccctggtgcacgggaggcgggggagaggcaccccaggggctcagattttggcatcaaaagtcagacctgaggtagacagagataggcagcaggcgcttcccccggcgcggggcccaggcgtgggacgggggtcccgggagaggagccctggaggccgggggacagacacggacagagtccaggtggttctgcgagtggggcccgattgtgtctggaggcaaacagacacccccttcccggggtgattgtgctgctacggtgctggccccaggaagggacaaggaaaacctagacgcccaccaccccctcctggaaagggggtgtgtgtccacggccctgagatccgagaaggaagtgggggtcccctccccaaagacacaggaaagtgacagtcccctcccacagcccgacgggaaagtgaacctagactcaggggctcagaagccccccagccccctccccaggggtctccaaggcaatggggaggtggttgggagtggggggagctggggagtccccttcctcaccaagcccccatgccggtggcctaacagggctcccagggcccaattagagacccaggcttaccctgggaatagctgagttaatccccactgcaccccaagagaaatgaaagcccagagctcccgtgtaggacacgacagccccgcccaacaccacgcgggtccaacgaagtccccagaccctgctgggcatttcagacccagcctttctgctccagcagctccagccaaaataaccccccagctcagctgcggtgaccccactttctccaagccagggggaggggtactgacccacagggtggtggggggcagcctcccttctcggcctcgatttagtcaccgcagaactcggggagctcgcagccccagcacaaaaggggttgggagaagaggaagggacagagcgaggagaatgttggggtgtggggggtgttcaggatgccggggccctgaaatcctcaccctgagtgaggtccggcttcacccccactccccagtattgatagtcctcaaaagcagccctttcgggcaagagaagaatcccaatgagacgccacattcatccctgagacaggagcctgggggcttcgacaagaaccacccccgccccccaggccctttttccagcacttgctactttttagataagatttccagaccgggccagcgtggcggctcatgcctgtaatcccagcactttgggaggccaaggcgggcagatcacctgaggtcaggagttcgagatcagcctgaccaacatggcaaaacccccatctctactaaaaatacaaaaattaactgggcgtggtggcgggcgcctgtaatcccagctactccggaggctgaggcaggagaatcgcttgcacctgggaggtgcaggttgcagtgagccaagatcgcaccattgcactcactccagcctgggcgacaagagcaaaactccgtctcaaaaaaaaaaaaaaaaaaaaatttccaggcccctgactcgagagcccagcagacaagcacggcacaagcaaaagcatcgtggaatatcacagtcagcaattcactgtcaggggcccctggccggtgggaccccagcatgcaccctctgccccagcccggcccatagcacctgagttcattggct

SEQ ID NO: 33210 - DNA, 1305 bp, Artificial sequence
  DNA replication origin
ggactgtcactttcctgtgtctttggggaggggacccccacttccttctcggatctcagggccgtggacacacaccccctttccaggagggggtggtgggcgtctaggttttccttgtcccttcctggggccagcaccgtagcagcacaatcaccccgggaagggggtgtctgtttgcctccagacacaatcgggccccactcgcagaaccacctggactctgtccgtgtctgtcccccggcctccagggctcctctcccgggacccccgtcccacgcctgggccccgcgccgggggaagcgcctgctgcctatctctgtctacctcaggtctgacttttgatgccaaaatctgagcccctggggtgcctctcccccgcctcccgtgcaccagggtctgcagcagccactggggcctggctgcctgctgcatctggcggccctggacccctggggcccccgtgcacctgcccacctcggagcctggggaggggccgtgcagggtcgagggctgggtcgtctccctcgggctgcgtgtgtgtgtcgggaatcctgcgtgtcgtgtctgtgggcgatccggcctcccggcggtgggtggacctggattctaactcagaggacttgagcctgctgttaactccgatgattgtagggacaggcggggtgggtggggggtgggcgcgaggctgggtcccggcccaggagaaggaagtcgctgaaggcagtggccatgctggccgtggaaatgggaggcggttgcagagggtctatggggcccggtcctggatactcggcaggaagccgtgtctgcagaggctcctccctgcctcaggtggccccgttcaaccccagccgtgcccatctcctgccaccgcctgtcggtgggggtttaaattcggtgtggctttctggggtgcagctcagcacccccccttatgcagactgggagggggtcgggcagtcccctcagccacgaggaccctggatgggttctagttcacttgggaccgtggggcctggctgcgtactgagtgggtgccccacagtcaaggccaacgggggctccccctgctctgagatgttgggagaaaggcggcttctggaaccttccgtgggacccgtaagtggctgtccagaaaggcgggagggtgggcacggggcacggggggcagctggggtcgttgttaagggtcacgcatctgtacagttgaatttcctttctcttatcatgttttacccaccttgtcccttttttccccaattgtgcttttgcatttttttccttggcaaatgtaaactcagcctt

SEQ ID NO: 33211 - DNA, 1265 bp, Artificial sequence
  DNA replication origin
ggccgggcagctgagtctgggcctgtccacctccagccacgctgaccctcctccagtcacgtcccctgggcgtgggcaatgggagggtggacagtgggttaggcggcccaggaaaccctttcctgggaaaacgttgcaataccactttctttgggtttgtgggctaagaacgagaggccttttattttttaatttttaattaattaattagttaatgtttttagagacggagtctcgctctatcacccaggctggagtgcagtggcgtgatctcgactcactgcaagctccgcctctgggttcatgccattcccctgcctcagcctccctgagtagctgggactacaggcgcccgccactacgcccagctaatttcttgtatttttagtagagacggggtttcaccatattggccaggctggtctcgatctcctgacctcgtgatccacccgcctcggcctcccaaagggctgggattacaggcatgagccaccacgcccggcctaattaatgtttttagagatggagtcttgctctgtcacccaggctggagtgcagtgggttgatctcagctcactgcaacctctgcctcccagattctagcaattctcctgcctcagcctcccaagaagctgggactacaggtgcacaccaccacgcccagctaattttttttattttagtagagacagggttttgccatgttgcccagaccggtctcgaactcccgagctcaggcaatccacccaccttggcctcccaaagtgctaggattacaggcgtaagccaccgtgcccggccttttattattatttttaagagacagggtcccggctggccctgtgtggccaaggtgggtgttatcatttgaggtcaggagttcgagaccagcctggccaacatggtgaaaacccaacccgttgctactaaaagcacaaaaattagccaggcgtggtgccgcgtgcctgtaatcccagctacctgggaggttgagttgggagaatcgcttgaacccaggaggcagaggttgtaatgagccaagattgtgccattgcactccagcctggttgacacagtgagaccctgattcaaaaaaaaaaaaaaaaggggccaggcacagtggctcatgcctgtaatcccagcactttaggaggccaaggcaggcaaatcacgaggtcaggatatcgaggccatcctggccaacatggtggaaccccatctctactaaaaatacaaaaattagccgggtgtggtggcgggcgcct

SEQ ID NO: 33212 - DNA, 854 bp, Artificial sequence
  DNA replication origin
ctctccagtctggactcttggctggctccgaaaatcggctatcagaggagggtttgagcttcacctccgggagcctcccgccctcctagcaagcacctagcaggcggcccagggaggtggctgggctctgagaggctagggggtggctgggcccttcctgggctggggaggaggtgaggggctgagtccatccctggctggggagggaggtgggggcctggggaggaggtggggggctgagtccctccttggctggggagggaggtgggggcctggggaggaggtggggggctgagtccctccttggctggggagggaggtgggggcctggggaggaggtggggggctgagtccctccttggctggggagggaggtgggggcctggggaggaggtggggggctgagtccctccctggctggggagaggtgggggcctggggaggaggtggggggctgagtccctccctggctggggagagctgggggctgagtccctccctcccaggctggggaactcagaggtgcaccccctccctgactccccgcctctgaggccctcagctgcgggtgaacaagcagggcctgacgatccagtttggggtgggggctttcccagggttcttccctcctctccctggggccggcgggctcctccaggcagtgagtgggactccatctccgggacgcagggtttggcagactcatttctggctggaatggaaaatgccattttcccttccggggccagggtctaacgtgggtttcaggaaccaaccggctgggacaggtgtgggggtgttgttggtccctcgcctccaacacagccctggggagggacgtgtcccggccagcc

SEQ ID NO: 33213 - DNA, 1403 bp, Artificial sequence
  DNA replication origin
ggcctaaaaacagtatgatttaaaatgtgcaattagttgccaaccccttaaaaagggataaaaagggagcattcatttaaaagtcgggatttccgcccgggggttgcagctgacctgggtcgtgtgccctcgagcagcaagaggcaggggctggaggctgcatgcggggtgcggtccccggaggcggtgcgactcctggtccgcggctcccggcggagggcacggccggggcaggaggctggtgccagagcgtgcggcgccgcagccccgctggccgccaggtggcaggcgcgagccaccgaccccgagcccaggccagagggagggcggccccggggacccgcctggtcggcaggaggggccgtttgagcggggagccagcgacccccagagaaccgtgtgcggggcaggcccgtgcgaaggccctggggcaggaccacggagcggggccgggccgtgcagggccgtgtgaacgaggcctggatttcattttatcctgggagggagggagggagtccaatccaaggacctgctgtgcctccagagtttcctccaacctcatttttattttctttctttattttgcgacagtcttgctctgtggcccaggttggagtgcaatggtgcgatctcggctcactgctacctctgcctcccgggttcaagcgattctcctgtctcagcctcccgagtagctgggattacaggtgtgagccgccacgcccagctaagttttgtatttttagtagagacggagtttcaccacgttggccaggctggtctcgaactcctgacctcaggtgatctgcccgtctcggcctctcaaagtgctgggattacaggcgtcagctactgaggccggcctccaacattatttaaaaaacattatttaaaaaaatcggcggggcgtggtggctccggcctgtaatcccagcactttgggagaccgaggtgggtggatcacgagatcaagatcatcctggataacaaggtgaaacccgtctctactaaaaatacaaaaattagctgggcacagtggtgcatgcctgtaatcccagctactcgggaggctgaggcaggagaatcgtgcaatcatggctcactgtagtctccaattcctgggctcaagccatcctcccacctcagcttcccgagtagctggaaccataggaaccacactcaactaattttgtgctttttttttttctttttttgcagcgacagggtcttgctttattgcccagctggtcttaaactcccgggctcaaatgatgctcccaccttggcctcccgaagggttgggattacagacatgagccactgtgcctggccttgttttaatttttactttatttatttttgttttttgtagacaagcaggagaggtggatctcactctgttg

SEQ ID NO: 33214 - DNA, 1198 bp, Artificial sequence
  DNA replication origin
cccgcggccccagcgggtggccgacccgcgcatgcgcccgtgcctcggagagaggggctttcttgtgaagtgggatttcccgcttacctgagactcgagggtcgcgcggcctgcttagagatctggggaggcgacttcttccaaggcccagggtctccggcgatcagttagtagctctagagccggggtacctgacttggccttttcctcctgggcatttttggccaagtgactcaagctcttggattcatttatttttaaatgttcaaataataaagttccgacgtcacaggcctaaatgacacattgcgcctaaaagagagagcgcacacccagcaacatggctagttggcgatgaatacattggaattcactgcttccttatttatttagttttgtagagccagggtctcactgtcctgcccaggctggcctcgaactcctgagctcaagtgatcctcccagctcggcctgccaaagtgctgggattacaggcgtgagccaccgcgcccggcccagtgtttccttattggtcgacatctgcctcccccttgacccctctttaggggcctcaacatctaaattattagtcggatagcttggtgtaggtcaaacaagtcgccagttctgtccgagccaagcagggtctaacttcatgtcacggctgcccgtcacggaccatgtctgaaaacggcattcaaaaaaaaaaaaaggccgggcgctttggctcaggcctgtaatcccagcactttgggaggccgaggtgggtggattacctgagatcaggagttcgagactaccctggccaacatggcgaaaccccgtctttacaaaaagtacaaaaagccgggcgtggtgggaggctgaggcaggagaatcgcttgaacccgggaggcggaggtctcagtgagccgagatcccaggcactccagcctgggcgaatgagactctgtctcaaagaaaaacatatatctattatttatttatactaaatatatatctagtagagatggggggtctcactgtgttgctcaggctggtctccaacacctgggcttaggccttggcctcttaaaccgctgggattacaggcttcagccacaacgtccggcctaaaaacagtatgatttaaaatgtgcaattagttgccaaccccttaaaaagggataaaaagggagcattcatttaaaagtcggga

SEQ ID NO: 33215 - DNA, 1157 bp, Artificial sequence
  DNA replication origin
tttattatttgaacatttaaaaataaatgaatccaagagcttgagtcacttggccaaaaatgcccaggaggaaaaggccaagtcaggtaccccggctctagagctactaactgatcgccggagaccctgggccttggaagaagtcgcctccccagatctctaagcaggccgcgcgaccctcgagtctcaggtaagcgggaaatcccacttcacaagaaagcccctctctccgaggcacgggcgcatgcgcgggtcggccacccgctggggccgcggggccgccgctctggcccgcgtggggcagtcgtccgcgtctcgctcatgatgacgcacgtccggggcggtggggaaggcaagatggcggcgcccatggaggtggccgtgtgtacggactcggcggccccgatgtggagctgcatcgtgtgggaacttcactcgggcgccaacctgctcacctaccgcggcggccaggcgggaccccgcggcctggcgctgctcaatggcgagtatctgctggcggcgcagctgggcaagaattacatcagcgcctgggagctccagcggaaggtgcggcggtgcggtctcgctgctggggtcatggggcgcccgaggctgaagtcgggggatgggttggtgggggccgcgtgcacccttagtcggaattggcgtggggaggggaggtggtctccgttcgggcgctctgcgcatgcgcgggtctgggggctttggggagatacgtgcgacctgttaggccgctctgcgcacgcgcggggctcaggcctgagctgctatgggggcagtgggggaaaatgggagacgctccggggggtcccttggggcaattgcgcatgcacgagttcttggagcgcgaaatttgattaaaaggggcctatgagctctgtggatgttgtggttctggaggaaaagggagaaggaccaaggtctgggggagtctcccatgaaggggtggcgcaggaaactcatgtttattcctccaataaagcaacagatactcaccgtcgcccacagtttcccctctactcccaagcccaaatgcagccagtccctgaagctactcgcttcccccgtgtgcccgctgagatctcttgggactggctctgtgctccagcattgcctgatggagtctacacacaact

SEQ ID NO: 33216 - DNA, 886 bp, Artificial sequence
  DNA replication origin
caggagactgagacaggaggattgcttgaacctgggaggcagaggttgcattgactaccggcatgagccactgcgcccggccgccctttataactttcaagtcacaagtgccaggcgctgccgcctgcgtggaagagatgcccgctagccctggaagatgctgcggtgtgtgagtgccggggactgggctgcaccgggctctatccaagcactcaaggcaggattagggctggtctgggattcgcaagtctcgaggggacctggagaaaggaggcagcagggtgaagcttaggctataacccctgagcagtcacccatcccagggccccaggccgcatggttgttccctggtgccctgcaggcaaagctcagatgggctgagatgtcctgtgggaaacgctcacgctttgctcctcttacctcccacaggtggatgctttctgcaactcctgccaggacgtagagaccattgggtgatgcagtcagacaggtgacaggcccggggcacatgatcttctgctggagctggtcctaaggatgcacagtcagcctcgtgagccccatgcaggacacgggagctactacagcagtggagggcgaggggaggggacgcctgggcaatggctaagtcagagaaccaggaagaggagtcgggagcagggtggtttgagcaaatgcatggtccagcaaggaagtgttcgcccctgcaagaggcttcgaggctggaggtggtagatgtgaggttggtgcttcctctgagggtcagaggggccctgggtgggaggagtacaggaacagaacaaagaggatccagaaggacactggggcccaagagcccagtaggcttgtgccccaatccttctatccataatgtccaacctaagac

SEQ ID NO: 33217 - DNA, 2461 bp, Artificial sequence
  DNA replication origin
ggcaggagacgtcctggtagtgtcgactcaggatgaccagaaggttcccggtggagacctgtgaggggcagagggtatccaggtcaggggaggaaagccccaggggaggaaaggggggctgcagccccaggaacccaccactgcacggccatggccacactgtcgccccctgcctgccctgccccaggactgcggggtgaccctgtcagggcagcggccagcaggtacagcggggcctcgtcgcgcccctgcctgggctgggtgggcacctgttcccgcctcgtccccacctgcatgatggcccaggaaggggcaagtttcctgcccttccctgctgcctcagggaggtgctggtcccctgtgagcctgaccccaggcgtcctgtgtgggccccgtaggaacggctgcactcaggacctgcaggcggctcccaccattcaacaggaagtcgcttctgggcaggctgtggtggcctgacccagggtggtggcagcttaagctccggcaggaagccaggcagctccatctgaggaagaggacagggagccccttccaggacacctggggagggctgagatgctctggtgggggttgtgggttcgagggctgagatgctctggggggggttgtgggttcgaggactgagatgctctggagggggttgtgggttcgaggactgagatgctcttgggggggtttgtgggttcgagggctgagatgctctggggggttgtgggttcgagggctgagaagctctggtgggggttgtgggttcgaggcctgagatgctctgtggggggttgtggattcgagagctgagatgctctggtgggggttgtggattgaatcgtgtttccccccaaaagcatgttaaaagtcccgacctgggacctgtgaatggcctcatttagacgcagtgtctctgcacatatcataagttaagatgaggtggttctggagcgggggcatccatccatgtgtcccggttgttgtaagctgagagaagtgcaaacacacaggggctccacgcggcagtggtggcagcagaggcaggggacagtcacccacaagccaagggtgccaaggggtgccggccaccaccggagaggtgggaaggctcctcccagggcctccaggggcagcgtggccccacagacatcttgatttaggacgtctggcctcaaggatgggggccgagtttctgttgtcgaaagtccctgtgcgtcgtgctttgttggggcaggcagagcctgctgggcccagatctgacagccatgccctctctgggcctcgctttcctcgcatgcaaaacccagggtggctggggagggttaaatggcaccagaggaagcaggatccaggtcagccccaaaccacagagggcagctctggtgaccaccactgcccagggccgggacagaccgggcagcttcagaacatcagtgcctcccgggaggtccctgtccctgtggcgtgggaggggcggaccagctcccgccccacagccctggctctcaggtttccagcccactcctgactcaccgctcacacacccgtcgcctacacagagaacaggaggaggatttcgaccgtggcaggggggtacagtggaggcagtcccggcctgagctctggctatgtgggacaccccttcatggtcacagctcacgggtcagaaactctccaggagggccagctgcagtggctcacgcctgtcatcccagcactttgggaggctgagaagggcggatcacctgagaccaggagttcgaaaccagcctggccaacctggcaaaactccgtctctaataaaaatacaaaaattagccaggcatggtggcgggcgcctcccagctacttgggaggctgaggcaggagaatcgcttgaacctgggagcctgaggttgcagtgatctgagattgagccactgcactccagcccgggcaacagagcgagacttcatctgaaaaaaaaaaaaaaaaaaaaaaactggaggcggctaggggagcaggggtctggcagtgggtgccacccagcacactgtcccgagccaagaacaggaaggggtcccgcctaagacatcccccatggggcgatgacacatttaattcctacccacatgcccctctgcaccagactgacagcaaccagggctaggaggtctactgttaggggtgactcgtgagctactgcttccctgcctcagtttccctctcagcaactgcatcctagtttcaaaatcatggagtgagatgtaaaagccttgggatcccaggcatggtggcacatgcctataatcccagctacctgggaggatcgcttgagcccaggagttcaagagcagctacggcaatgtagtgagaccccatctcaaaaataagtttaaaaattaaatacatacacacgtgtcctgagggtgagataatgatgcctcctgtcattcctgtgctgcctgtcccg

SEQ ID NO: 33218 - DNA, 2212 bp, Artificial sequence
  DNA replication origin
ccgccccacagccagtccacgcccccagccaggccccgccccacgaccagtccacgcccccagccaggccccaccccacagcaaagccagttcacgcccccagccaggccccgccccgtcccagccaggccccgccccgtcccagccaggccccgccccacagtcagtccacgcccccagccaggccccgccccacagccagtccacgcccccagccagtccacgcccccagccaggccccaccccacagcaaacccagttcacgctcccagccaggccccgccccgtcccagccaggccccgccccacagcaaagccagcccacgccccacagccagtccactcccccagccaggccccgccccacagccagtccacgcccccagcccggccccgccccacagcaaaccagtccccgcccccacccaagccaagcccggagctcctgctggctttttcccctgcgcgctggccgcgggccgagcagaggcgcgcccacctttgagggccaccgtccggatgcactgcttgctctgcacgtcccagaggcgcacggtctcgtcgtgggagcctgagagcagcacgctgccgtcagtggacactgacaggcaagtcacctggttcctggacagacagacaggggtcacctgggacgtgccagacaggacgtgcctgggagcccccgccccgttcccacgtccccacctgtgccctttgaagaccttcccggcgtcctgctctgggtggaagctcctctccctctgtccgggctgcgaaggccgagacgtgtgtgagccgcaggcccgatgccctcagccccagggcagggtgcagcccgcagaccgcggcactcacccaggtgaagaggtcgacctggaagatggagccctcactgcccccgcagaacatatggtgctcagccaggtccatggtcactgccatgatggacacgtcaaagaggacggagagcagcagctcccccgaggagacctcccatagctgcgggtgggcaaagggcgtggggctcggcccggcagggggaacccgaggaccccatgggaacaggggcaccagggaggtcaggcgtcggctgtcctctggccctagggcttgcgactttgggtgaaagccgtcaccatgtgggtcttgggggccaggggacatggcctgtgctgaaatggagcttggtctccggctgatgacccctggttctccctcccaggaccaccggtcacgactcaagcatagtgatgacctccgattccccaggcttggccagggagccgggccagaaacggtgaatgagtaggaatttccaggctggcagacctccctggacgtccttgggctcagagcaccaggggattaaaagccgtctggagtcctgacagcagggagcgggaggaggcgattcctgcattcctggctgaggacctgcggctgctgggctccgctcatggaccgtggtggggtgggggcggcgtaccttcaccgtctggtccagtgaggaggtggccacccgggccagggggcccccaaagccgcagtgcaggtccgtgatggggagcgcgtggtgagaccagacgtgcctgggcgccggaatcctggaggggtcggcctgcagcacgctgagcggggtggggcaggtgctcagcaggcggggagcggagggaacagggcagtccacgcctccagcacccacctcacgcacacacctgcctccactcagcagcctggcctgcctcacctgagtaaactcaaggctgggcccccacggcccccagaacaaaccagaccccagtgtgggcagccaggacccctgggatgatcactccgtcctctgcactccagcccccaagagagaagccccttcccgccaggggccttggcgcctcctctccccgcctgagcccgggtgcagttccaggtgcaggcctgagtgcgcaaggcgctacctgcagaggctccaaaccagcaccaggcagtccttgccccctgagatgaagtggctgctgtcccctgtgaactgaaggcaggagacgtcctggtagtgtcgactcaggatgaccagaaggttcccggtggagacctgtgaggggcagagggtatccaggtcaggggaggaaagccccaggggaggaaaggggggctgcagccccaggaacccaccactgcacggccatggccacactgtcgccccctgcctgccctg

SEQ ID NO: 33219 - DNA, 1523 bp, Artificial sequence
  DNA replication origin
cacctgggtgagtgccgcggtctgcgggctgcaccctgccctggggctgagggcatcgggcctgcggctcacacacgtctcggccttcgcagcccggacagagggagaggagcttccacccagagcaggacgccgggaaggtcttcaaagggcacaggtggggacgtgggaacggggcgggggctcccaggcacgtcctgtctggcacgtcccaggtgacccctgtctgtctgtccaggaaccaggtgacttgcctgtcagtgtccactgacggcagcgtgctgctctcaggctcccacgacgagaccgtgcgcctctgggacgtgcagagcaagcagtgcatccggacggtggccctcaaaggtgggcgcgcctctgctcggcccgcggccagcgcgcaggggaaaaagccagcaggagctccgggcttggcttgggtgggggcggggactggtttgctgtggggcggggccgggctgggggcgtggactggctgtggggcggggcctggctgggggagtggactggctgtggggcgtgggctggctttgctgtggggcggggcctggctgggacggggcggggcctggctgggagcgtgaactgggtttgctgtggggtggggcctggctgggggcgtggactggctgggggcgtggactggctgtggggcggggcctggctgggggcgtggactgactgtggggcggggcctggctgggacggggcggggcctggctgggacggggcggggcctggctgggggcgtgaactggctttgctgtggggtggggcctggctgggggcgtggactggtcgtggggcggggcctggctgggggcgtggactggctgtggggcggggactggctgggggcggggactgccctggatggggcggaacttggcttgctgtggggtggggcctggctgggatggggcggggcctgacctccgcgccccccaggcccagtcaccaatgccgccatcctgctggcgcccgtcagcatgctgagctcagacttcaggcccagcctgccgctgccccacttcaacaagcacctgctgggcgccgagcacggggacgagccgcgccacgggggcctcactctgcgcctgggcctccaccagcaggtacggcccccagcagggaacccccactgcccttttgtcccggaagaccccgcgggccctgggctccttcgctcccttggtcctggcgcccgtgcggcggttccccacaagcccggcactggagggcgcgtcctgtgagtgggatggtgatgctcggtggggcctctgcccactctcagtatggacccagaggctctgagaagttaaccacccctcttcccccggccagcagggccgagctgcacgccccacacaccagccttcctgcggctggatatctgacagtcagttaggtctttctgcaaaaggccgatgccccatacttcgggctgtgagagccaaaaggttcacgtctgggctgccgaaggtgcaggagcagccgtgagggca

SEQ ID NO: 33220 - DNA, 966 bp, Artificial sequence
  DNA replication origin
tgcgcctgggcctccaccagcaggtacggcccccagcagggaacccccactgcccttttgtcccggaagaccccgcgggccctgggctccttcgctcccttggtcctggcgcccgtgcggcggttccccacaagcccggcactggagggcgcgtcctgtgagtgggatggtgatgctcggtggggcctctgcccactctcagtatggacccagaggctctgagaagttaaccacccctcttcccccggccagcagggccgagctgcacgccccacacaccagccttcctgcggctggatatctgacagtcagttaggtctttctgcaaaaggccgatgccccatacttcgggctgtgagagccaaaaggttcacgtctgggctgccgaaggtgcaggagcagccgtgagggcagggagcgggtggggccctggtggctgcaggtggctcccacgtgggctgggggcagcctctcggcctggccacagtcacgccctcactccctgcagctcagcaccgacccccgctctgtgcaggtactagggtgggctcccttaccttctgagggtagagtgacttccggaacacttcccaccccagccccaagaccctcatagaagccagtgtggttggctgggctgggctggggtgggggctgggggttccttgggcctggggaggcttcccagtgtgtttccgcctcactccccgaccttcgatgagctgcctgcgtccttggtgtctcacgtcactgtctgtgtccctcgctgggctctggcgcttggcacttctccccacgcgccctcttcttacctgagtacagattgatttttttatctggagggtgcccgacagcctgatggcctgacaggccctgcaccaggagatgccgttatctcccttgtccgtgcttcctcatggagtgacactctgttttcccacatctaccagtgggcttggggcgggc

SEQ ID NO: 33221 - DNA, 2462 bp, Artificial sequence
  DNA replication origin
caggctgccagccgagaggactcagagccccatagaggggacaagaacacaaattagcctaaaagcatgaactcagcgctggcggctggctggactgcggtcattaccacgcccgctaaatcacacggattttctggatcgttaggtaggactgtcagtcgggagcagctttctggaaggttctgggcttctgggctgggatccaggcgctgggtggcagcgtccccagggcagcagggcctgacctccctcaagcccttgatacccacaagcacggcttgtggtgtggcaggggtccaactccctctggggaccggctcagatcgggacaccacccccagacctgctcctgacccatctgacggtcccagcctgcagtggccacctttgctgggtggggcaagccacctctgcctggggaggccgtggcaccttttgcccggagaaccaccctgggttcacccttgggcggctccagctgggccctggggaagccagcaggggccccaaggcacccgagggatgcactgggaggagcctgtgctccaaggccccacccacaccagctccctcctcctgcctggtcctgagccctgcgtttccacagggaccagggacccccgaaaccctccctgagagctgggtcctgcacccggggaaacccctcaaccctggcggctgggtccacccccaaacgtccccaggcccgtctctctacaccaagccacctccttccgggaccccacagggctgtctccactcagaccccctgcacagcagaccggaggggcctggcttcccggttccttcctcaatcccaccaccccggtccagcgccttctcgggagggggcggccatgcaaaggccctcgggcaacagagcagagtcagaactgcaggtgctcggggctccctcttaaagccgcccccgcgaggcctaggttggttaaggcccccacctccggacagagggtgccgagtggggctggggtcccagctgggccgagcagcaggggagctgtgttgcacgcagcaccaggccacacccggacacaaggaggccggagaggaggggcttttcatcctcttttgttaaaaacagactagcaccactgtgacgcgtgccacgagacaccaagacggcccagtcacagaggaaaaacccgaacacgacacagaactgaggagagtccaggcctgggctggtgggggccacacccgcgggccctggttgctgggaggcatggggctcaggcctgggcgcctcgggccggggtctccgggcctcacttggccggccgcgtgatgaagcgcgtggagaagtcgaacaggtcccgattgatcttgcgcaggttgcgcacctcgtcctccagctccgtcacacggacgcgcagctggtcctggccgccgagcacgctctgcgggagaagtcggggtcagagggcagaagtggcctggggtgtgctggaggggggccactcacccccactggccaggactgaccccagcctcaggccccgcccctcccgaggccccgcccaccttctccatggtgctgcacaggacggcctgcagctgctccgtgcggtccaggtagctgggctccgagccctgtaacacagggagccacgtgacctcggggcgcgtcctgtcacacaccacacgctttgcccatcccacccccgccagcgtgggcagccactcagccagggaggggccaccgtgacgcccacagacagaagggaagactgagacgggggcgttcacctccgtcgagcctgcagatgacaaccctgaccctggccatgcagtcattacccagcgcctcagatcctccacgactgcgcccaaggatgtggctggggatgggggtgcagatggccacaccacagacaggggcctgggccagacctggaaggacccgcaagcccagggaaggctctgggacacagggcctggcgagggcctcacagacagtgagcacctccagccatggggagagcctggccggcccagcaaggccactgccctgtacagaggaaccagttacatggagggacgttgctgggggatcagaggtcgggaacccgcctcctggacgaagcgccttgggccccagcagcgcctgtctgtgggacaggccaacattccagtgtcagctggattggaacaagggtcacagaggactagcagccgtcacgggaggaagggagccaggtggggcggctagggaaaggtggcggcattaccggagggcatggcctggccccctccggaatcccactgtggccaactaggtggggttctagggagagcgcttggctgggcaggaatcgtgggaaccgctgctgccctaggaggaggcagtggccgggcaggcgccctagcgtggagctggctctgccgctggaggcctgttttcactccgaaagttccggcactttctgaacaaaaagctcgcc

SEQ ID NO: 33222 - DNA, 1856 bp, Artificial sequence
  DNA replication origin
gaaaccccgtctctactaaaaatacaaaaattagcctgatgtggtggtgggcgcctgtaatcccagctacttgggaggctgaggcaggggaatggcatgaacccgggaggcagaagttgcagtgaacggagaccgggccactgcactccagcctgggggaaagagtgagactcagtctcaaaaaaacaaaaacaaaaacaaaaacaaacaaaaaacctgccagactattttcacagtggatgccccattttatgtccgcaccagggcacgggaaggctgtggcttccccacctcctcgcgcatgatgttttctgctctcagctttgctggcagctgtcccggcgcccgcaagcgcacctcactgtggtctgcacagtcaagccccgccagccgccaggtcacctgtgcacaccggcgtccccgctcgtcaacgccttggcctccccagtcccggcgccgtccctctgagaatctgtggggcctccgggggcggggggtctgaacgatgacgtcaccactgtttccatcgcacccagaccggcaattacgacgcagggtggagccgcggtgcctgagcacgtctgggagctctgggccgagagggtgatgacggtgcgggagcgggcgtggagaggcaccgagggggcttgtgtccaaggacccagcgtgcaggggcacatggagggaaacgcagggaatgaggcgtgagctcctgccgcccccgcccagctcccagccgacccgccgggggacgacccctttctggagacaagaacgtcgagtccgacccggccaggtgtcgcctgtctgaggccaccgggcgattttcgggccctgccccacggtgaactctaaccctgttctgcagcctgcggagagggcagccgacctcagccccggacggccgcgtggtgcaggcagctgcgaagtgacctggatgttcgtgcctggctcaccttgggctcttgcagcggctggagccgagtccgggccctgggagccccaggcagctgtccctctacggctctgcgcaccctcaccccgccctggcaccagccacagggttgtgccgatacccttgagttggtggttgggggtcctgattggtgctgggagggaaatttgggagcctttgggtggtgatgcggaggggggcaggggtcgtgggaatggctccaggggaacagtaggtacagacccagggagatcagccaaccccaagggaccccccagctgcctcaccccaaatccgcgtgctccccgcaggcaggacccagccttgcaggtcagcagagtgagtggttcatgatggaaaaggaacaagctggccgtgcgcccagggggaagggaccctggagtggttctcagggctcggagcagccgaggcagatgtcagtgccaggtgagggcccagctgccctgatgcagtgtggccaggctgccagccgagaggactcagagccccatagaggggacaagaacacaaattagcctaaaagcatgaactcagcgctggcggctggctggactgcggtcattaccacgcccgctaaatcacacggattttctggatcgttaggtaggactgtcagtcgggagcagctttctggaaggttctgggcttctgggctgggatccaggcgctgggtggcagcgtccccagggcagcagggcctgacctccctcaagcccttgatacccacaagcacggcttgtggtgtggcaggggtccaactccctctggggaccggctcagatcgggacaccacccccagacctgctcctgacccatctgacggtcccagcctgcagtggccacctttgctgggtggggcaagccacctctgcctggggag

SEQ ID NO: 33223 - DNA, 1294 bp, Artificial sequence
  DNA replication origin
ccctgaggacaccaggacccagcacctctcgcagacccagggaggggaccccttgtcctgcccccggggacacctggccagggggctggagggggtggcctgcgggttcctggaaccgagccatccctccctccgtccctccccagtcgtctcaaaatccaatccattttactggctggcacttggcattttattcatttcatggaggatttttttcctacctctccaacgctggctccaaaaggagatgacgtttggggtgtgtgtgtgtgtgtgtgtgtgtgtgtgtgtgtgtgtgagaaaatcgccggagtgtagatccattaattagagctgaatgttcccaacacagcggctgttctgctgccccgcgggatctggggagacaccgtcgggaggacaggatgaggaatgcctgggcagggaggaggtcctctgctagatggatagacggatgcagccgcccccatctatcaggcgcctgtgggatgccagggccccagaaggcaccccccgaggcccagaggacataggcaggcttggggactggtagacagcggggagctatggaaggctctagagcactggaggaggggcatgtgagcaagcatccttgtctgggccgttgctcaagccacaagcaattatagagtgcctactgtgtgccagcaaccaaaccagacccaccccaaccctcccagagctgagttgaagagatggtcactaaataagaaggaaatgaacaaaaagatggtaggccgttatggaaatgtgtggaggttgggggtgggtagcagcaggactgaaatggggcagggagtggtgctttctgcattttctcagtggcaagcagggaacgtttttcagggcagggcatttgggactgggttttgaagggtgaagaggagttctgtggcccaagttgcctgcccactgctggagggcagatctactctataggtttccatcagacatgcctgtctcagtttccccagggtgcactggatgttagaacacacccctgggctggcctggttagaaactgacagctccctggatgtgcgagacaagcaagacccttcctgggcctcaacttccctgcctgagcaatggtcgacattggtggaaggggtcagggatcctggagaggaacggggtgggcgtccgggccaattttattttcttattttattttattttttttgagacggagcatcgctctgtcgcccaggctggagtgcagtggcacgatctcggctcactacaacctccgccttccaggttcaagcgattc

SEQ ID NO: 33224 - DNA, 1289 bp, Artificial sequence
  DNA replication origin
accacgcccagttaatttttgtattttttgtagagatggggtctcgccatattgcccaggctggtctcaaactcctgagctcaagctgtcctcccaccttgggctcccacagtgctgggattccaggcgtgagccaccgcacccggccctggatttaacttagtatattaaaggtgggagagctttgccaggcccctcgggttggcagggcgcttcccagggtggaagcagggtgcccagtgctggaggatgggcttgggatggggctcagtccccagggggccaagccagtccctaagacgctaggtcggtcccacgccccggcttgcggcggtgcagctcctggagacggcagcagagggcgccccaggcctgggtttgggccccgcctctcccaccagccctagggcggtggggggacaggggtccccttgacacctggagagctgggctaagagaccccccctctagcgtcagggtctccctccctgaggagagggaggggctggaggggcctctgagtgggttgggaaggaggggcagctggggcatagagctcagccaggcccatgtccggagttgggacctccttgctggccacgggagggggcttgttatctggggcgcagtgagccctgttgggggggacaacagggaccccagaacccagtcaatcgcccttctcttcttccgtttcctcccgggatctgggcctggggtggggttagaagagaggaacttgaaggctgccaggggttggggggtgggaatggagtcggggttggaatgatggaggctgctctgggatcttggaggcctctgggaggggacggggagaatgctggaaggagggagatccagacctgcagaccccgaaactgcacccctagagtgaggagggagaccgcctgtcctccagcccagccacccagagccgggtggggaccaggaggtcccagggaccagggaagggtctgtggggaaggagggaaggggcctgggcaaggaaggggcagaggccacagtggcggggtccccatcaccagggcgctgggaaggggtctgcaggggcgttccaggggcgtccctggagctctcaaccccgcgtctaggtccctgcccctgggtctcttcctctgggttctggtttccttgctccggggacacccgggtcttccccatccctgatccctggggcccgtccagcgtcccgggatcccccttccctgcgtagtcccggcacccccatcctgactccggacgtccccagggctcccgaccccgctccc

SEQ ID NO: 33225 - DNA, 1135 bp, Artificial sequence
  DNA replication origin
ctcacgcctggaatcccagcactgtgggagcccaaggtgggaggacagcttgagctcaggagtttgagaccagcctgggcaatatggcgagaccccatctctacaaaaaatacaaaaattaactgggcgtggtggtgggtgcttgtaatcccagctactcaggatatatatatattggctgggcactgtggctcacgcctgtaatccctgcagtttgggaggccgaggcgggcggatcacgaggtcaggagatcgagaccatcctggctaacatggtgaaaccccgtctttactaaaaatacaaaaaaaaaaaaaaaaaaaaaagctgggagtggtggagcttgcagtgagctgagatcacgccattgcactccagcctgggagacagagcaagactccatctcaaaaaaaaaaaaaaaaaaatccaggagaactttctggatggcactgggcacaagggggcccctcagccctccatgtgcctggcacggggcagtaatgtgtgaaggggatgctaggggaagctacctggtttggctctaagcacaaggccatcggtgggctcacctttatgagccacagctcttggccctagaggggttcccaggcaggtgggtgccaggtgaggtcaggactgtaaaggaatcagggagggacctgaggctggaggcgttccaagctggagcctgggctctgcctggaggatggagaagtctgaatagaggaggagcaatgtgcttgggttttgaaggatgtgtaggagttggtgggcatagagagagaaagatattccatccggggaatggcacatgcaaaaaaaaaacaaaaaacaccaagtgtgcccatgacaagggtagctggagccaagagaggctgggagactgagctttgtggggatggtgatggggaacgatggaagggtttagagcagggctggggctggggggaggtggaggggaggtgcagccatccagctggcatctacttgcggatcacccgctgctggggtgggaagggttttgtgggggtggaggtcgtcaaccctaaccgtggccacccctctcccagaacccattccacctgcagctgcactgggccagccccctggagacgctgctggatgtgctggtggcgg

SEQ ID NO: 33226 - DNA, 1364 bp, Artificial sequence
  DNA replication origin
cggccggccagcaggtccccgaccaggccggtccagcggccgtcccgcagggcgccgtacttgccgtcacccacgaggtacagctcgaagtcgaagggcgtgtcctccgccagccgctccagcaggtcaatgcagtagccgtagcagcacttgcgcagggcacggggcgctgagccgttggccagcgcggcgaacagtgcgtccagggtggccgagtcgttggtgccagggtccaggcacagctgccccgctgggcactgcccgtcttcgtctggatcacgggcaaacacaaatgggtgttccaacagcgttaccacacgcagcttgggccagacctgggcaccctgtgggggcgggggccgtgcagaggcacctcccggttccaagtccagctggccgtcccgccagctgcccaccgtggcccaggccggggcgccccgtgggtcccggcgaaggctccacaccttaaagtgccgagacatgtgtacctgggagctgcctgtcacccacacggggcccgtgcggccctggaaggacgtgttggccaggaacctaggggcagggcggggggggtgtcaggtgtcgaagttcacacccctccatcctctcacccctgcccagcacgtgcccgattcccactggtcgctcttgtccgtatcatgaggacaaacgtggacgctcctggtgtccccaagcctagtccccaagcctaaccccttgatcccggggcatccgtgcccgatgccgtggctgtgcccccactccacatacgcctgaagccagtgactgacacacaagcacccagctggggtcacctgtttccaggagttgttcattctcaggaactcctccagggctcagccagagacccgttccctccctcctagttgttcagctcgttctctgctgtccctgagatagttccccaggtgggcactgcttccggggacctaagacatctaacaaagcatcctgactttgtgtgtttgagacagggtccctgttgcccaggctggagtgcagtggtgcgatctcagctcacagcagcctggacctcacaggctcaagcgattctctcatctcagcctcctgagtagctggaactacaggtgcgtgtcaccacgcccagctaatgttttctattttttggtagagatggggtttcaccatgttggccgggctggtctcaaactcccgagctcaagtgatccgctcgcctcggccttccgaagtgctgggattacaggcgtgagccaccgcgtctggcctcacgttgccttttgtgatccatgagcagtgcagactcagtggcctggacaccctcctaagggaagcagggtccccactcaccgtgccaagaagcg

SEQ ID NO: 33227 - DNA, 3036 bp, Artificial sequence
  DNA replication origin
cgtccttccagggccgcacgggccccgtgtgggtgacaggcagctcccaggtacacatgtctcggcactttaaggtgtggagccttcgccgggacccacggggcgccccggcctgggccacggtgggcagctggcgggacggccagctggacttggaaccgggaggtgcctctgcacggcccccgcccccacagggtgcccaggtctggcccaagctgcgtgtggtaacgctgttggaacacccatttgtgtttgcccgtgatccagacgaagacgggcagtgcccagcggggcagctgtgcctggaccctggcaccaacgactcggccaccctggacgcactgttcgccgcgctggccaacggctcagcgccccgtgccctgcgcaagtgctgctacggctactgcattgacctgctggagcggctggcggaggacacgcccttcgacttcgagctgtacctcgtgggtgacggcaagtacggcgccctgcgggacggccgctggaccggcctggtcggggacctgctggccggccgggcccacatggcggtcaccagcttcagtatcaactccgcccgctcacaggtggtggacttcaccagccccttcttctccaccagcctgggcatcatggtgcgggcacgggacacggcctcacccatcggtgcctttatgtggcccctgcactggtccacgtggctgggcgtctttgcggccctgcacctcaccgcgctcttcctcaccgtgtacgagtggcgtagcccctacggcctcacgccacgtggccgcaaccgcagcaccgtcttctcctactcctcagccctcaacctgtgctacgccatcctcttcagacgcaccgtgtccagcaagacgcccaagtgccccacgggccgcctgctcatgaacctctgggccatcttctgcctgctggtgctgtccagctacacggccaacctggctgccgtcatggtcggggacaagaccttcgaggagctgtcggggatccacgaccccaaggtgggcggcctcggggggctgcgggtggccttggggggctagcggtggccccgggctgggctgtgtggggcaggggtggtcagctggacgtggaggacgtccactaggccaactctggtcccaagagacatttattcaattaatttatttatttaaagaaaaatagccgggcgcggtggctcacgcctgtaatcccagcactttgggagaccaaggcaggcagatcacctgaagtcaggagtctcgaactggagcctggccaacatggtgaaaccccatctttactaaaaaatacaaagaattagctgagcatggtggtgggcacctgtaatcccagctactcgggaggctgaggcaggagaatcacttgaacccaggaggcggaggttgcagtgaatcaagatggcaccattgcactctagcctgggcaacagagcaagactccgtctcaaaaaacaaaaaacaaaacaaaaaacacagagatggggggctggctatgttgttcaggctggtctcaaacgccggggctcaagcagttctcccaccttggcctcccaaagtgctgggattacaggcgtgagccaccgcatccagcctatttttcttttcttttttgagacagtcttgctccatcgcccaggctggagcgcagtggcacgatcttggctcactgcaacctctgcctcctgggctcaagcgattctcctgcctcagcctcccaagtagctgggattacaggtgtgcaccaccaagcctggcttttgtattttcagtagagttggcgggtttcaccatgttggccaggctggtctcgaacccctgacctcgtgatccgcccacctcggcctcccaagtgctgggatcacaggtgtgagccaccacatctggcccgtattattattatttttttttgagacagagtctcactcttgcccagagctggagtgcagtgatctcagctcaccgcaacctccacctcccaggttcaagcaattctcctgcctcagcctcccacagtgctgggattagacgtgagccatcgtgcccggcctccccttgtaatttcttggcaaagtcgggttttctgccccgtagtgtctctgaacttttggatctgcccagtggtgtcccctgggggtgcctggcctgctccccagcccctggtgtcccctgtgaaacggtagtaaagcgtagacgccatgctgtcaggtgagccgactgctgccggcggctcttccaatgtaaacgctgcacagctgagccgtcaaagccttttcatcatacggaaacttccatcagatgctgctgacccacaggcacgatgggattcaagtttgggtttttggtggtgctggaatcccgtggggaggccgtggctggtgtgacctcagcagccagacccacctactcattaggggtctgcaccaggttgccctggcagctgtggggagaacagaccacgggtggtgcagggaggaccccgcagaggggcctgggctggtcgaggatgttgatggggaaggaggctgggttcgacgctgggccccaacctgggtaggagctgtggaggggtgagcagtgggcagttccctgtgttgcaggtggcgccccccagggttttcgggagaaacagggtgtcagaggcagtgacgacagagctgcctccgcctggggtgggaagagcgagtgggggcagatcaggagtggggtcatggacatgttagagtggggctcccgtgggacccccaggggagaggcagaggaggtggtgggataggcgtccagcccagggcgaggtccaggtggagatggacttgccggcgtttagaacagagggtctccacccggggtgatcctgccccccgccccaggggaccctggacagtgtgtgtctagagacagctgtggtggtcacgcctggggtgtgctctgggcatggagtgggtggaggccaggaatgcagcctcggcgccctgcagtgcccaggacggccccaccccggagaacggcgcgcccc

SEQ ID NO: 33228 - DNA, 1400 bp, Artificial sequence
  DNA replication origin
ctggtcctgctgctgctgctgctgctccacctcggggccgctggggacggaaccggcctggtcagtgtccgccggggcagccgtctcgcgccctgggcctctgcagaggccgctgacggcagaggatggccgacaggcacaaccagggagccacggtgtgcacgtccgggggtgggcgggggacctccgggaacctcctgcaccccgcggccggcttcggggcgagctggtggggtggtgggtctgggtggtcctgcatcgtggtccgccccgaccaccacttacctgggctccgcctctgccgtctcctccttcgacccctctggtggctccgtgttgagggcgcggtggattttctaagaccccagacagacccggttggcgaggaggcggggggggtggggccgcccgccgcccacccgctccccacctggctggtgtgcagccagtactgcagcctgctccccttgcggatgcgcggcagcgccaggcggaagaaggcgtgctcgcccagcgagctgagcagagcgctgcccaggcccaggcacagcaacacgaagaggcccgcgaagtggtagatgctcatctgcagggtctgggggcaacacagcaggagccccgcacggtcacgtaatggcaggcccctggggagccttgaactaggggagaacaggttgggccagagagaggggcttggggcagtggagccaggttgggaggcagggactccatggctggggggagtgaggtttcatggaggaaggggcactgcagccggggttttgtagggtgaatagaagtgcgcagaagcagacaaacgcacgtctggggaatgagcactggggttggtcacttcagacaaggctcagggccccccacgcccacccccacccccaccctctgtcccaggccctgccccacctctgtaaccgcaaagacccgcttgccgcaaggcaccatcttgtaccacttgtcgtggagcaggtcgatgaagccggaggacttgtagcggctgatgaactcggacaggttggaggtgagcggcgagttctggggcagtccgatcccatagcctgggggcgcggggccaggcggtggggccaggtgggacagccccaggggaactctgcccgcacacgtgggatttcgccccttcccacctcgaaccctccgtggctccccactgcccccaggaggtccccagagaccccggcgccccgcctcgcccaggtgcctctcaccctcaatggcgaagggctttcccacggtcagcagtttgcagtcggcgtcgatggagacctcgtagtccaggagcgacttgtccatgatgaaggcgttgagcttgggggggtcgctcctgctggggccgggggcgggggtcagccatcgccccgcccacc

SEQ ID NO: 33229 - DNA, 1254 bp, Artificial sequence
  DNA replication origin
atgctgcttcaggcgccgccactgggccccgggacccccacggcgctgcccgatgacatgaacaacaactcgggcgccccggctacagcccctgactctgccggccagccccccgccctgggccccgtctcgcctggggccagcgggagtcccgggcctgtggcagcggcgcccagctccctggtggccgcggcagcctcagtggcagcagctgccggtggtgacctgggttggatggcagagaccgctgccatcatcacagacgcctccttcctgtccggcctgagcgcctccctcctggagcggcgtccagccagcccgctgggccctgctgggggcctcccccacgccccccaggacagtgtccccccgagtgactccgcagcttctgacacaactcccctgggggctgcggtaggcgggcctagcccggcctccatggccccaacggaggcgccctcggaggtggggtcctgagccgcacagctgagccgcctctgacccctgctggctgggcctgaccttcccgagcccgtgggggtgggggaggccagccacctccttcctctgggactgcccagcctgtgtcgggggctttcagggtttcgtggggtttgcccggaaggcggctttcctccccctggtgtgaggtcgcgcccgaggcttgtacccgctagtgaggtgtttgagctggtcagcaaggagagggggtggggttccgcggaaggttctggaggggtcttggtaggtctgcagtgaaccgtcctgaggatggagtggggtcccatggtgcaggtctctgagcaaggcggaggtgtggaggagaggccggcttggggtggggcctcgcgccctagtgccggccggcctcagcccggctctgcctggtgctccctgcagtgccttctccatggccccgccctccccgcgtgtgcgccaggcttggggtccccgggagagcagagcttgcgcctcgggcatagggacgtggggtgcaggcgccaacatcagtggcagcagccagggccgtggtccagtcccactcggggatggagtgggccggcggccaaaccagtcactcggggaggaatgcggaggagcgctcattccattctatttaattgcagtgtacaaaattgtgtttgtatatagaataaactgtctgttgacagcggctcactgcgctgtgtgtgtgtcttgagcccaaacggcccggctgccgcctcattcctggctccccggtcggccagagtg

SEQ ID NO: 33230 - DNA, 1935 bp, Artificial sequence
  DNA replication origin
tcccccacccccacgggctcgggaaggtcaggcccagccagcaggggtcagaggcggctcagctgtgcggctcaggaccccacctccgagggcgcctccgttggggccatggaggccgggctaggcccgcctaccgcagcccccaggggagttgtgtcagaagctgcggagtcactcggggggacactgtcctggggggcgtgggggaggcccccagcagggcccagcgggctggctggacgccgctccaggagggaggcgctcaggccggacaggaaggaggcgtctgtgatgatggcagcggtctctgccatccaacccaggtcaccaccggcagctgctgccactgaggctgccgcggccaccagggagctgggcgccgctgccacaggcccgggactcccgctggccccaggcgagacggggcccagggcggggggctggccggcagagtcaggggctgtagccggggcgcccgagttgttgttcatgtcatcgggcagcgccgtgggggtcccggggcccagtggcggcgcctgaagcagcatctcctggatgcggacctgctgcaggatggcaggcagctcgtagtggtggaagaagtagatcatggaatgctgcgggagggagagtgggagtcaggacgggcccgcccctgccccacccagccgctgctcccagagggcagcccacccgggaccatccacgctacctctgcccgcttgggccgaccccacagggcatcctccccggctgcagcctctcctgcctggaaaggcacggctggcctgccccctgcttgccgcccaggcctcacctggatgaagagccaggaggtgaccagggccaggctgctatactgcccattgaagcggtagtgataggcatagaaggcgaagtggtagagatagaagaacctgcggggcggggtgagggcgtcggggctgcaggtcccaccctgccaggcccagcccctggggttcccgcgtggcgcagccaccacccccgcctccagcgcccctccctctggcagccccctacccctgcccaccagcacccactccaccctgcccccgcgccacgctcaccgcagccaatgccgcttgctggtgctggtgtggcagcagatggcgtcatactggtccgcgagccacacgatgaggatgatgtagaaggcggtggtggtgtcgttgaagaactccgacatgatggcctccatccctgcagggagaggcggcgccggttgaagcgggcggggcggggtgcagcgcggggcgggggaggccgggtggggtcctcaccgacgagggccaggatgacggtcagcaggggcgctgcggggaaggcgatggccatgttcatctccagcatctgcagcaggtccactgcgggcacagggcggcgggcgcccggtgagggcctggaggacgcccgccccgccctgcgccggcgggacactcaccgatgaagacgaagatctggtggtgtgagtaccgcagcagcatggacacgctcagcgtctgcaaggggcgcgcaggaagcgctatgaggggctgcgagggcctgcttggctcccgcccggccagcccccgcacccgccccgaggcactcacgaagatgaccatgatggcgaaggcggccaggtaggacgtccgcgccatccacatgctcacaaagcggtagtgctcgcccgacaccacattccgcaggaagcctgcagcagaaggagccgtgagcgcccgcccccacccgcgccctcgcaccctcggccccggggcatgcctcacccttgttctcctcgttctcggccaggcccttcacgctggacatgaggatgtcatcgtagcccaggaactcatccagcagcaggcggctgaagcggtccccgaagcactggtcccgcgtggggtctgcgggtgggtgaatcagggagcc

SEQ ID NO: 33231 - DNA, 1824 bp, Artificial sequence
  DNA replication origin
gcctgtcagagccgggctgcaggtggcagagcccctccggggttggagtggggcgtcccccggatcctcagtcacttggactatgtgaggggctggcccggtgcagtcagcgtgggagggacccagggtcctcagagcccaattcggcttctggggtttccttcctttccccgtcctgggcgtcccagcgcgccccatcacgccccatcacgtaggcccttgggtgtcggctgcagctggccctggggcgccccactgactgccggccgccccctaggccctgtttgtgctcttcgtcctggcctacatccacatcgtcttctcccgctcgcccatcaactgcctggagcatgtgcgtgacaagtggccgcgtgagggcatcctgcgtgtggaagtgcggcacaactcgagccgcgcgcccgtcttcctacagttctgtgacagcggcggccgcgggagcttcccgggcctggccgtggaaccaggcagcaacctggacatggaagatgaggaggaggaagagctgaccatggagatgtttgggaacagctccatcaaggtgagccaggcctgggctcagctgcagcagaggccagcgccccgtagatgctggtcgctgaaggggcggttcctgacatcgacaggatgttggggttcttgactttcagggacctggcatgcagacaaggccgcccctgcctgccgtggccttttggtggcctgggggctctgaagcaagaccctcggcctgtcgccctgctagaggcctgggcagggcagggggatctcggggaggacttgggctgggcagactcgggcctttgagagtagctgttccggggaggggattggctggggctggggatgcagtgggcagcaatagctgaggaggcctgggggctgaaagctaagagctctgggcccatcctggccgtcctgaggtggccccactgcctgcagaggtgctgggttcccggtcagcttgtggtggccttgggcactggtgggaccaggtggctgtgttgggccccacagcctggtgggagatgtttttgcttcagcagtcagggtttggggtcccacctgttcccacagagccaaccccaagagtttgagtgtttgggcagagcatcatggacccttccatggggtctactgcctgtagctggcccttgcctcagcttcaggattcagagctgtgctggagatggcctcacagcagggcaggcttggtgttgaggtggggtcccagctgaggcgggaggcacacgtagtccaccctggcctggtcagtggtggggcagaggctgaggcttccagtcccttcccattagcaggactgtatcctcaggctgggccctcacagcccgggctggcgctgctgacacccaggtccctggtcgcccacagtttgagctggacatcgagcccaaggtgttcaagccgccgagtagcacagaggccctgaatgacagccaggagttccccttccccgagacgcccaccaaaggtaggccacccaccaaaggtgtactgcctcacggggttgcctcagtcatggggtgctggggtgcaggcggggtccctccgaacatccccagcctgctggctgcatgtcctggaccgttgagggcacccccgtgcctcgatttccccatctgtcagcacaggaggctgtggggacaccccagagcctggggtaactggctcagctcatcctttctgggatcctcgtgaacggcgacttggaggggatggatcccttcggctctgagctcagagttctagcgggctgtgctcagggaagcccccgcccccgccccc

SEQ ID NO: 33232 - DNA, 1272 bp, Artificial sequence
  DNA replication origin
cagctgggtcctcagttttgcggatcggggcagcaggtagacgtgaccctcaccaggctcgggggtgatgcctggacctcaggttgggaggtacagtgggcagccaaaccgccagacggtgaggcgggctccctggaagaggggctgccctgaactgcccctagaggggccccactctgagttgtgcctgcagcacgctggggcgtgggctccccaagccctgtggacgtcggggtggggccgtcctgggcactgcggggtgccgagcagcatccctggcctcacccactccatgccaggagctcccccaattgtgacaaccacagatgtcccaagcatcccctgggcaggagcccccaggtgagagctgctggcaccccagttcataggttgtgcctcgggcacggcagcctcgccctgccgtggggcgctctgcccagccacggaggtccactgtgtccccagcagctgcggctggccccgccaggcctgggagggttgcacagggcgccccgccaggtgagagaagctattttcaggtggtgagatcaggggagtgctggggacgcagcggaaggtgaggcaggaagcagcaggttgggctgtggagggctgtgccctctttcgtagacagtgggtccagctggtggccctggggtggcggcaacacccatgctgctgcttgcagggcgggagccgttggctggcagagggccctggtgtgctccacttggtgggtctgagtccagcctcgtctcctcccaggtttggggggtcctgtgtgcatctgagagggccccggcctgctggcttcgtccggctcacccctgaggaggtgcggggcagtcacaggccttgccgaagccccagggcctgtcagagccgggctgcaggtggcagagcccctccggggttggagtggggcgtcccccggatcctcagtcacttggactatgtgaggggctggcccggtgcagtcagcgtgggagggacccagggtcctcagagcccaattcggcttctggggtttccttcctttccccgtcctgggcgtcccagcgcgccccatcacgccccatcacgtaggcccttgggtgtcggctgcagctggccctggggcgccccactgactgccggccgccccctaggccctgtttgtgctcttcgtcctggcctacatccacatcgtcttctcccgctcgcccatcaactgcctggagcatgtgcgtgacaagtggccgcgtgagggcatcctgcgtgtggaagtgcggc

SEQ ID NO: 33233 - DNA, 2729 bp, Artificial sequence
  DNA replication origin
tagccacagggagtaatggggctcctcttgtggggtcgtgacgattaaagacggggtatgtgagaccccaggggccctgctctgaatgggggacctgtcacattgaggccactgtgaggctgcagtggaaggagaggccccggtggcctggaggcaggaagcaccccgggtggacaaaggggagccccaggtagtgtttcctggctggggctgagggctctgtgtcccacctgggaggagagtgtggctccgcgggcttgtgtgtccgtcggtctgtgggtcagtcaaatacccagagagcgggcaggctgctcctggcactccaggtctgtggggagacaggaaaggaaaggcccacccagtggccgagtgttggggtgccctgagagcctcggccagaacatccaggaagcttcctggaggaggcggtgagcacggccccaggctgggggaggtgctcctgtgggtgcagccgtgtgtgggctgacccggaggaaggaagggtcataggggtggggtgactcctgtgctgggtgggcagggcctcctggaggtgagccacagccagtgggatggggtggggtgtccaggcagctggagagcgtgtgggaaggccgtggggctggagcatgtgggtgcctgctggggagcctgggtcagggacagggtcatggagtgtaggggactggaccacccagggcatgcgagtggctgagccaggttgcgggcagagggtggccaggggcccatgggagcatttgcaggtgagctccctggggagggttactgtgggcgtggacgaggctgcctgggcgtgtggctcagggccgggcctggtgaggtggctgctgcagggtggctgatgacagacaggtcttggggaggaggacccgggactcgggatgagcctgcgtctggctgggtggtgcctgctccttgttttgtggtgggagactgaaggggagctgaggctttggcggcaacgggccttgtccagtggggcatttttctggtcatgctcagtcagggaagaggggccctgagctcggtcagcacggagcacctgatggggcagagacacagtgacgtctgagtcatagcgtctggtggacttgaagtctttgactggagtgtgtgcacattgtgtgaaaacactggtgccctctcatcacgtccgctgtcttcatgggacgggtcactcacaccagtgctgggtgtggcaggatgtgtgtcctgtgccctctcccgctgaccctggaccaagctgaccctgcccagggcaaccccaggagctgctcttccccgtggggccttaattgtgcagactggcactgccctggcccctccctcctggccatgtgacctcagcaggtccaggtctgtcgggacctctgtgtcagttcctcgtatataaaccagggatggtaacagccgtgcgtcccttgtgaagcgttggacagccccgacctcggcccactgtgtatcagcactttttggaacatcttggcacagggtccattgctgtcctgggcacagctcctgctggatgtgtgggcctggaaggcagagcgtggccaccagcagcatccaccatgggcctcgcgggcccctctctcctgagagtgctgagccgaggggctgtggggtcagtgtctctgaccgtgacccaccactgggcccagcctccgtggctcctgtccccagatgccatatggggaaacgctaggctttgaaagcatctcaggctccggggctgccccccttccacactgccctccctgtcttccccaggacacaggggaaccctccccagcagagggccctgccccctccccccgcccacccctcatttgtagctccggcgtctgtgggcggggcctgaatgcctggcggtcagggttctgctcttgcctgtttctgcttaaatctcagcgccgggccagccttcatcccctgcggctcttttggctgtaaggactagaaatgcagttcagatcagcccaagggattctccagctcctggggctggggagtgtgatggggctcgccccaggtgcacgtgcggctagacccagggctttatccgtgctcagactcagggcctcccacaggtcacagcactgcggccgggctggaagtgggttgctttgctgactcggccctttgctcagtctacagagggttctggagaggaggccccagctcactgtgggcgtggaagagttgaggctcctggtggtcttgcctatggctgtgcggccacaggtggctcactgcaccccgggcattggtgcacctgccagcaggtcacgggtcacggaggggccctgtgctccaggctctctggcttgtgattttgagtctgatcaattcttccctgagagtctggggttccatgtggccgtgggcgcccccttggcccagctgggtcctcagttttgcggatcggggcagcaggtagacgtgaccctcaccaggctcgggggtgatgcctggacctcaggttgggaggtacagtgggcagccaaaccgccagacggtgaggcgggctccctggaagaggggctgccctgaactgcccctagaggggccccactctgagttgtgcctgcagcacgctggggcgtgggctccccaagccctgtggacgtcggggtggggccgtcctgggcactgcggggtgccgagcagcatccctggcctcacccactccatgccaggagctcccc

SEQ ID NO: 33234 - DNA, 1543 bp, Artificial sequence
  DNA replication origin
tcggaccaacccctgtcctggaagtcgactccccactcccctctctccctccttgtagcctttcagctgcgttccccgctcctgagcctcaggggaatgtgacttagctgaggtcacctcgctagggttagcggcaaagtcaccggcagcagcgtaccaccccatccccggcctcttcctccgctgggtccccactcccttcctgcttcaggagctcaggttgtgggtctgtcgcccgtgcctcccctatgaggcaccggcctccgcgtcttgggctctgtccccctcccgccctcctcagatggcagaggtctcagccgtgcaggacaggcatcggcctgactccctctgagaaggagtcttgcttgggtgacaagaggggctcagtagcagctgcagcccctcagaaaacaagctggccggggtcctgggccacctggcgaaatggggacgtggccgttttcgttctgcatcagaacaccgccgcgccggggcttgggggctgctgaagttgcgccgtgagctttttggatctagcctgcaaagaggggtccgatgctggcgggccaggctgcgatcgtgggcaagttcccagcctgacacaggttggtcaggagctggctgcttttttgggctcggcaagtggagctggaccttggccgtcctgcggacctgggtgtgggtcccagcctgctgccacttcacggaaggccccccagcctccagatccgtgcctccccaggccagagctcagcccatcatccttcccaccttcctccctgcagccccccagagtggcatggtcgcctcagtaggcacctgagcagggctgtgaagggttacgcaggcaggcggcctttcccggctctggggtccacagacggggcctgaaactgtggacggaggctggtctgtggacgtgggttttccttccatggagtagcctgggaacaggatggagccactgtgtccttaggcttgtggagggtgtgtgctgggtgccaggccaggttcccccgacggagctcagcctccttgggaggtgcatccctgtcgcctgggccctggtcccaccatgtcccggtttggaaagggatcaagcctacccggctccatctccaggccaataccactcacaggtggtcagatggggctgggccagagctggagttccccgtcttctgtgtagggtggagactcttgggaggttctcagtaaccccaatccctcctctctcagcagagggctttggactgtgagatctctgggtggtgaatttttttttttttttttttgagatggagtcttgctctgtcacccaggctggagtgcagtggtttgatctcggctcactgcaaactccacctcctgggttcaagcaattcttctgcctcagcctgcggagtagctaggattaccggtgcccaccatcacaaccggctaatttttttgtctttttagtagagactgggttttgccatgttggctaggctggtctcaaactgctgatttcaggtgatctgcccgcctcggcctcccaaaa

SEQ ID NO: 33235 - DNA, 1468 bp, Artificial sequence
  DNA replication origin
actctggggggctgcagggaggaaggtgggaaggatgatgggctgagctctggcctggggaggcacggatctggaggctggggggccttccgtgaagtggcagcaggctgggacccacacccaggtccgcaggacggccaaggtccagctccacttgccgagcccaaaaaagcagccagctcctgaccaacctgtgtcaggctgggaacttgcccacgatcgcagcctggcccgccagcatcggacccctctttgcaggctagatccaaaaagctcacggcgcaacttcagcagcccccaagccccggcgcggcggtgttctgatgcagaacgaaaacggccacgtccccatttcgccaggtggcccaggaccccggccagcttgttttctgaggggctgcagctgctactgagcccctcttgtcacccaagcaagactccttctcagagggagtcaggccgatgcctgtcctgcacggctgagacctctgccatctgaggagggcgggagggggacagagcccaagacgcggaggccggtgcctcataggggaggcacgggcgacagacccacaacctgagctcctgaagcaggaagggagtggggacccagcggaggaagaggccggggatggggtggtacgctgctgccggtgactttgccgctaaccctagcgaggtgacctcagctaagtcacattcccctgaggctcaggagcggggaacgcagctgaaaggctacaaggagggagagaggggagtggggagtcgacttccaggacaggggttggtccgagggagacctgcgtcaggctgggttctgggccagcacattgggaggggagagaggcctcggaactgagggtctcaggcggcacagtcaggggtcaaagggcgggaggtgctacctcgcaggccaggaccggactccaagcctgggtaggtggggacctgggaaaggcggtcgccggggacaggatgggccctggagggagctgacagtgaggtttccagagtagagaacagcggcttctagtgcagcgggatccggccttcccgggtggacgtccccgggcgggatggggtcacgagacggtgtccctggccaatcccagggtcagaggtcgcgagggagagccctaatcggtagggccgggtataggcctcagggtgcagggtggcgctcgctgtccccagcggggccaggggtcgcggtcggaggtagcagacttgggggtcgggacagccgctggggtcaagggtcgggggtcggggccgcggtcaccttgagcagcacgaagaactcgaagagacggcggaaggcgggcgggaagagccgcgaataggtgacagccatcttgaagaacagcgcgtggaagagccggtcgcgcacgttgatgagggggttggggttgagattgggggtgcgaggcccgcgcgcgggggccgggccgccgccgccgccgtt

SEQ ID NO: 33236 - DNA, 1243 bp, Artificial sequence
  DNA replication origin
aagagacggcggaaggcgggcgggaagagccgcgaataggtgacagccatcttgaagaacagcgcgtggaagagccggtcgcgcacgttgatgagggggttggggttgagattgggggtgcgaggcccgcgcgcgggggccgggccgccgccgccgccgttgggcccgggccccggagctgcgggctccacgtgctccgacatgcctcccagcgtcgcgccctaacgacccgcaagtgtccgagggcgcctcccggccgccatcggccgccctcgcagccgccgctctcctcacggcctcccggccgccgccgccatcttccgctttctcgtccggctgcggcgctgctgacgctagcgagtcgccacgccgggcaagagcggcccccctgcgcccgcagagaacgctgggatgccagcggcgcccgcggaggcctcaccccctacctcggccgctccagggggcgggcctgcatctgggccacctcttttgcatattggcacccacaatccaccgcggctatgaggccagtataaggcggtaaaattacgataagatatgggattttacgtgatcgaagacatcaaagtaagcgtaagcacgaaagttgttctgcaacataccactgtaggaaattatgctaaatatgaaaccgaccataagttatcctaaccaaaagatgatttgattgaagggcttaaaataggtgtgacagtaacccttgagtcgtgctcgcttcggcagcacatatactaaaattggaacgatacagagaagattagcatggcccctgcgcaaggatgacacgcaaattcgtgaagcgttccatatttttgctgtagtctacagctcgtcacctcgtttggcttctcttgcccggatcctgccatgacgtcacagggccagtaacgtcatagtcttcccgtgtccatctcctgtggcgccactaaggttggcggtagaacaatctggcagtctctactcctgcgtggcgctgtgccacctgcccccgtagcttcgcgcagcaatgaataaataagtgctcttcaggggcacttactgagtgccggctgcgtacacaagaggatactatggtttttgggttttttggttgtttgtttgagatggattctcgctctgtcgcccaggctggagcgcagaagcgcgatctcggctctctgcaacccccgcctcccgggttcaagccattctcctgcctcagcctcccaagtagctgggatta

SEQ ID NO: 33237 - DNA, 1293 bp, Artificial sequence
  DNA replication origin
gtctccaagctccctgcccgggaggtgccgggggcgcctgggggctcctgcaccggtcggagcgtgcgacggccgcgctgtcggggggacaaggggcgcccctcactcacccggttcttgacctcggccgacagcccgtacgaggggcccttgttgaactgcgtggagctcatggctggcgggcgggcggcgggacggggccgcacaggacgggacgggacgggaccgccgggctggcgcggggttgggacgcgccgggctccgcgcgccacgcccccgccgctgattggcccggagcgcaaatgtccttataaggcctggaggcgccgaattcctgcggccgcggacttcctgagccccctcggtcgcccccggacccccgcctgggcacagcacccccgtcaccagaggcctggaggggcccctcgccccctttgatgccacgggaaactgaggcagggaggggccgaggccgccgggacgtggcactcctgcgggctctctgctcagagctcgtgggcggctctcactctttctccatctcagacttctcttctgccagaaaggggaggggagaaggctacctttggggcaggaatgagggcccctctctgccacttagaggcgtctaaccccttcccagggaactctactagctgggaggtggaccagggaaccagggcaggttcctcagagaaggggccattggagctggggctttgttggatgagtaggagtttgtcagtccaaaagagaataggattcttactgggtgcggtagcttgcacctggagttctagctacttgggaggctgaggccgaagggggaggatccgttgagcccaagaggtcgaagctgcagtgagttatcatcacaacatgacgctccagcctgggcagcagagcaagagcctctctctaaaaataaataaataaataaaaataaaaatccgagtggctcacgcctgcaatcccagcactttggaaggccgaggcgggcggatcacttgaggtcaggagttccagaccagcttggctaacatggcgaaactccgtctctactaaaaatacaaaaattagccgggcatgggggcacatgcctgtaattccagctactgaggaggctgaggtgggaggatcacttgaagccaggaggcggaggttgtagtaagtcgagatcgcgccactgcactccagcctgggcgacagagcaagactccgtcttaaaaaaaaaaacaaaaaaaaaaaacacaaaaaaaccctaataataataaattattaaaaagtctccgg

SEQ ID NO: 33238 - DNA, 2261 bp, Artificial sequence
  DNA replication origin
catcaaagggggcgaggggcccctccaggcctctggtgacgggggtgctgtgcccaggcgggggtccgggggcgaccgagggggctcaggaagtccgcggccgcaggaattcggcgcctccaggccttataaggacatttgcgctccgggccaatcagcggcgggggcgtggcgcgcggagcccggcgcgtcccaaccccgcgccagcccggcggtcccgtcccgtcccgtcctgtgcggccccgtcccgccgcccgcccgccagccatgagctccacgcagttcaacaagggcccctcgtacgggctgtcggccgaggtcaagaaccgggtgagtgaggggcgccccttgtccccccgacagcgcggccgtcgcacgctccgaccggtgcaggagcccccaggcgcccccggcacctcccgggcagggagcttggagacccggggcggacgggcccttgttctccctgacgcctggtggggggatgtctgcgggcaccccctgaggctcccgcgaatcttggggagcacccaggtctgagatctgggggacgagtgacccattcccccccccaacatctaggggtagttgggtctgacttcgtcccctcgccatggccccaggacccccacgtgtgaagcccctggcgcccactcaaccttcgagaaggtccgttcaaggtccgacaacgctctgggggtctgggggggaccccagcaaccccgtcatctcctggccacacttctgcttttggggcctcttagctttgggaggggaaggggcatggccgagtggtttttgagaagtgttacccccccacaaacaggaatttcctggcctctgggacaccttgggggtgtcttggggggaggggcggtagccgctttgcacggtctttgtctcccatctgactaatttaaacggataacaaagaggttctctgaaggtggccctgagatatgtggggttttgcagcctcgaaagaagagctggggcccggcagggcgcgggggctcacgcccgtaatcccagcactttggggggcggagctgggtggatggcttgagcccagcgagttcgagaccagtctgggcaacatggcgaaaccccatctctataattaaaaacaagccagggctaggggagacactttttaagagagcacttgtggttctagctcagagaggaccagacacttctgcagggtcacacagcagggtcctggacaggattcccagggaaagtggggggcgggggttgtgatgcgagacccacggacaggaccgggacctgaccctccaggaccttccagctggaggggggtgtcgtccccgcccaccccctcccccgacgcccactgggcacctgggaaggtgtccttacagctgacttctgcaggggaaactgcctctgcacgctctgagggcaccggccctgccagccccaacagccacctgcccggcggcactccagggccggcagactggagggagaattcctgcttccccgctgtgagcccctgcaagccttcagaccagctcttggccaaaaagggaggctgaggcttggggtggtcaaggcctgagccagggtccccagcccggggctcacgactcctccttcaaggggccatctgcaccctgcattcatagagccccccgtgcagtggggtgggcaccctgccgcaccctgcatacagccggctaagggcaccggtgtccacagggacccagagacgtcgttccagctgcccagggccacacagcccacaagtgacagggccaagaccggaacccagtacctgctgggcctgcggaagtgggagcgggcacaggagggtggggcggcttccggagacggggtggggtggggtgggggcaggttgatacctgccctggcgggggtgaggacagaggctggaagagccgcttagcaggctccccgcgcaaccctcagtctgtccgtttggagggtgggcgaggcgtcggccagcttgccagggtcacggaagggtcgcctcccaattagaaaccagcttccccctggcttcccgctcacacccgctttaccggctgcttgaaacagccagagacccgccccccgccccgcttccccgtggctcagttgactcccggctggacggcacggaggcagctcggatccacagtgtctgcggccttgcatcccggcttgggggtccggacccgctgggaacagctggttcagatttagccggggaggcagcgcgcattcctggcagt

SEQ ID NO: 33239 - DNA, 2019 bp, Artificial sequence
  DNA replication origin
ccggcttagaactcactgataaacatcagctctaatccactcccggtgcaggacaaacctggccggatctgcctccccgccctgccttctcacctccccgctatatcacacctgacgtttaccacttcaaccacctgaaaccgcaccatttcacagcatttcgtacgtctgcaatgttgtgcaaccatcagctcttttttcttttttattttttttgagacagagtctcactctgtcgcccaggctggagtgcagtggtgcgatctcggctcactgcaagctccgcctccccggttcaggccattctcctgcctcagcctcccgagtagctgggactgcaggcgcccgccaccaggcccagctcattttttgtatttttaatagagacggggtttcaccgtgttagccaagatggtctccatctcctgacctcgtgatctgcccgtctcagccctccaaagtgctgggattacaggtgtgagccaccgcgcccggcccccatcctgcttcttagcaactcccgaaggagctgcccccgaggctgaccgcctctagtcacgcacctggctccttgccaccgattccctgccacctttctgcacccggccattccagctttcttggccttcggtgctctgagacaccgccgtggggaatgggctgtgtgctcctgggcagtgggtgtgcaccagtggggacctcgagtgtccctatccagccactagtgaccgcggagacagcactgaggcagacggcaaagtgtatagggggccataagcatgggggcaggtcgtgtagcgggagcgggagataaacgctggagggagaataaagtagggtttgggctgggtgcggtggctcacacctacaatcccagcactttgggaggccaaggcgggcggatcatctgaggtcaggagttcgagactggcctagcccacatggtgaaatcccgtctgtactaaaatacaaaaatgagctgggcgtggtggtgggcacctgtagtcccagctacttgggaggctgaggcaggagaatcgcttgaacccaggaggcagaggaggcagtgagccaagatcgggccacttcactccagcctggaacagagtgagcctctgtcttaaaaaaaaaaagaaagaaaagagagaaggaaaaaaaaaatcaaatccctctccctgctctgcacccatctccccaggttcccgcggacagctccccactcagcctccgcttcctcatctcttcctgggattatttgggttagggtcccctgacctggacctgcctgggatgatttgggttagggtcccctgagctggacctgcctgggatgatttgggttagggtcccctgagctggacctgcctaggatgatttgggttagggtcccctgagctggacctgcctgggatgatttgggttagggtcccctgagctggacctgcctgggatgatttgggttagggtcccctgagctagacctgcctgggatgatttgggtagggtcccctgacctggacctgcctgggatgatttgggttagggtcccctgagctggacctgcctgggatgatttgggttagggtcccctgagctggacctgcctgggatgatttgggttagggtcccctgagctagatctgcctggaatgatttgggtagggtcccctgagctggacctgcctgggatgatttgggttagggtcccctgagctggacctgcctgggatgatttgggttagggtcccctgagctggacctgcctgggatgatttgggttagggtcccctgagctggacctgcctgggattatttgggatagggtcccctgacctggacctgcctgggattatttgggttagggtcccctgacctggcacctgcctggaaacagctcgtagcccagaggaggcaaaggcggggaggccccccagtaccagctcacagcccacccagcttggctttccacgcccgggggcagccccgccccgccggcaactttgatcccgaggaatgaga

SEQ ID NO: 33240 - DNA, 3261 bp, Artificial sequence
  DNA replication origin
gcggagcagggatggtgctgggggcccatctaacaggtggggagactgaggcccactcactgtccctctcctgcctcttcccagctagaaaacctgtccaacttcatcaaggccatggtcagctacggcatgaaccctgtggacctgttcgaggccaacgacctgtttgagagtgggaacatgacgcaggtgcaggtgtctcttctcgccctggcggggaaggtgaggcccagagaggggcagccacctgcccagagtcacacagcgaggtggatgtagctgctgcattcactcgtttgcaaatttctgtttgtttatttttgagtcggagtctcactctgtcactcaggctggagtgcaatggcgtgatctcagctcactgcaacctccaactcccaggttcaagcgattcttctgcctcagtctcccgagtagctgggattacaggcacctgccaccacgcctggctaatttttgtatttttagtggagactgggtttcaccatgctggccaggctggtcttgaactcttgacttcaggtgatccgcccgcctcggcctccccaagtgctgggattacaggcatgagcccctgtgcccggcctcgtttacaaatatttctgagcatccgtgaggtgccaggtacttcagattccttggtgaacaggaaggacatggtctaccccttatgcagttcagtctgatggcggaggcatgcaaaagtgaacacagcattgtattatgcattatatgtaagctctggccgggcgcagtggctcacacctgtaatcccagcactttgggaggccgaggttggagaattgcttgacaccaggagttcgagaccagcctggccaacatggtgaaaccccatctctactaagaaaacaaaaattacctgggcgtggtggtgcatgcctgtaatcccagctactcgggaggctgagcccaggagttaagaggttgcagtgagctatgaccacaccactgctctccagcctgggcaacagagcaagactctctcaaaaaataatcataacaaaagtaataaataagctctgaactgggagaaatgccttgaaggagaagaatcagacgaatgttgagtgtctagtgatcttcaaacccagaccgggagcgtgggtgggacagtggtgtagaccgggagcgtgggtgggacagtgtctggtgtagaccgggagcgtgggtgggacacggtgtctggtgtagaccgggagcgtgggtgggacacggtgtctggtgtagacggggagcgtgggtgggacggtgtctggtgtagaccgggagcgtgggtgggacacggtgtctggtgtagacggggagcgtgggtgggacggtgtctggtgtagaccggcagcgtgggtgggacacggtgtctggtgtagaccgggagcgtgggtgggacggtgtctggtgtagaccgggagcgtgggtgggacacggtgtctggtgtagacggggagcgtgggtgggacggtgtctggtgtagaccggcagcgtgggtgggacacggtgtctggtgtagacggggagcgtgggtgggacggtgtctggtgtagaccgggagcgtgggtgggacacggtgtctggtgtagaccgggagcgtgggtgggacggtgtctggtgtagaccgggagcgtgggtgggacacattgtctggtgtagaccgggagcgtgggtgggacggtgtctggtgtagaccgggagcgtgggtgggacacggtgtctggtgtagacggtaagcgtgggtgggacacggtgtctggtgtagaccgggagcgtgggtgggacggtgtctggtgtagaccgggagcgtgggtgggacacggtgtctggtgtagaccgggagcgtgggtgggacacggtgtctggtgtagaccgggagcgtgggtgggacggtgtctggtgtagaccgggagcgtgggtgggacacggtgtctggtgtagacggggagcgtgggtgggacggtgtctggtgtagaccggcagcgtgggtgggacacggtgtctggtgtagaccgggagcgtgggtgggacggtgtctggtgtagaccggcagcgtgggtgggacacggtgtctggtgtagacggggagcgtgggtgggacggtgtctggtgtagaccggcagcgtgggtgggacacggtgtctggtgtagacggggagcgtgggtgggacggtgtctggtgtagaccgggagcgtgggtgggacacggtgtctggtgtagaccgggagcgtgggtgggacggtgtctggtgtagaccgggagcgtgggtgggacacattgtctggtgtagaccgggagcgtgggtgggacggtgtctggtgtagaccgggagcatgggtgggacacggtgtctggtgtagacggtaagcgtgggtgggacacggtgtctggtgtagaccgggagcgtgggtgggacggtgtctggtgtagaccgggagcgtgggtgggacacggtgtctggtgtagaccgggagcgtgggtgggacggtgtctggtgtagaccgggagcgtgggtgggacacggtgtctggtgtagaccgggagcgtgggtgggacggtgtctggtgtataccgggagcgtgggtgggacacggtgtctggtgtagacggggagcgtgggtgggacacggtgtctggtgtagacggggagcgtgggtgggacggtgtctggtgtagacggggagcgtgggtgggacacggtgtctggtgtagaccgggagcgtgggtgggacacggtgtctggtgtagaatggaatgggagtgtgtgtttgtgacatggtgtctcacgtagaaggaacagcaaggtcttgacattggaattggctgggctgttagaggaagcgggagctggttttctcctggggtaactgctccaaatggtgttttcagatgccccctgtggctcccagtaacctcacgtggggaatggtggtcagggaggagccgggcgcagacatcccagtgaggggcagagccaatggcctggccatggtgcccggggattgggtcagaggaggtggtggaaggtgagagagaggaagcgaaaaccacgtccccatccccagaattcttggcctgagccctggaaagctgagctgttgcctaagacaaggcacgctgggatgaagcagccccatgggctgggcgcggtggctcacgcctgtaatcccagcacttttggaggttgaggcgggtggataacttgaggccaggagttcaagaccagcctggca

SEQ ID NO: 33241 - DNA, 1432 bp, Artificial sequence
  DNA replication origin
cggggtggggcagtgccaggacatccccagtgcagtgtcccaggaagtcagcgcggtcccgccccgacaccctaccgtgcgcagcagtgacgtcagcagctccgcgacatccagcatgggtggttccagtggagactgcttggttggttgaggctgggctgggggaggagcgcacgggagcatggggctggggggacgttggtctgaggcacccacccccaccctgtgcccatttcacggcccggcaagttgaggctcagagctcagccctgccagaggccccccggcctcctcacccgtgctgcgtgcagccctcagcgtggcgatcagcttccctaggccagccagcgtcctgtgggcactggcccctcccagcacagtgcgggcatcggctagcagccgggagaccctggggacagagagagggcaggaggcggggttccggccggcactgcagccccgagtttgcaggccggccgcacccactgcctctggctcacagggagtcgttgaagttgctcaggcgcccgggctcctcgcccggtgtcagctgcggaaagcaggtgttgttcacattacagatgagaccctggagccagggcacggtgcccgccgatggcagtggcttgtttgggaagtggcctgcggggagacgcctggtgctgaggccctgtggactctgcctgactccacccccatcgggtcgcccggcaccgcttgcatgcctccagcgatggagagctcactcccatgccatgtattggcggcctggtgaaggctccctgacatgcacgggggattcctgtgcacgggtgagccatctgccttcccctacacacacaaagtgcctggtccctgggggggctcacattcatggtgctccaggggcgggtgggagtggcgaacagccaccaggatgaagaagaggaagagaggccacagcaattcgaccaggagctggacctgggggagaataggtgggagacggtgggggacagtgggggctgcctgcccacccggccctggtctcacactggggcgttaccggctgtctccggcgatacatgaaattcttccagagcagcagcatcagctgtgtccagaaggccatggtgagactgggcaggggacgggacagagaggtcaggacaacggtcgggctgaagacgtgcggtgcggctgcgggcaactccctgcccctttctgaacctcattcctttatcccacagcgcagggttcctggaagctctgattagagcgaggcaaacagtagtcactcgataaagaggctccgctaccccaggggtggagtaaaccaatgggagcgcaacccgcagccgtcctcgcatctgattggctgccaggactgtcgctctgagcagggctgacagctggggacttaaagatcatcctctaatcctccagggaccga

SEQ ID NO: 33242 - DNA, 1045 bp, Artificial sequence
  DNA replication origin
tacatggcatgggagtgagctctccatcgctggaggcatgcaagcggtgccgggcgacccgatgggggtggagtcaggcagagtccacagggcctcagcaccaggcgtctccccgcaggccacttcccaaacaagccactgccatcggcgggcaccgtgccctggctccagggtctcatctgtaatgtgaacaacacctgctttccgcagctgacaccgggcgaggagcccgggcgcctgagcaacttcaacgactccctgtgagccagaggcagtgggtgcggccggcctgcaaactcggggctgcagtgccggccggaaccccgcctcctgccctctctctgtccccagggtctcccggctgctagccgatgcccgcactgtgctgggaggggccagtgcccacaggacgctggctggcctagggaagctgatcgccacgctgagggctgcacgcagcacgggtgaggaggccggggggcctctggcagggctgagctctgagcctcaacttgccgggccgtgaaatgggcacagggtgggggtgggtgcctcagaccaacgtccccccagccccatgctcccgtgcgctcctcccccagcccagcctcaaccaaccaagcagtctccactggaaccacccatgctggatgtcgcggagctgctgacgtcactgctgcgcacggtagggtgtcggggcgggaccgcgctgacttcctgggacactgcactggggatgtcctggcactgccccaccccgggccaaggacctcccgttccaggcatccaggctgtccctggtctctgcggtgatgctgcttgtccgtctgggcccccagacagagtgtgtctgacccagtgaggaagactcgtctgtgagatctccaatgagtccctttgcctctcagagcctcagtttccctatttgtaaagtgggggctatgatagtatggtctgcctgggaactggccagagcgctggacccctagtgagtgttcaaaatcattgtcccccttgtggtctttctccccaggaatccctgggg

SEQ ID NO: 33243 - DNA, 994 bp, Artificial sequence
  DNA replication origin
tcctggcgctgcgcagcctggtggagcttcgggcactgctgcagagaccccgagggaccagcggccccctggagttgctgtcagaggccctctgcagtgtcaggggacctagcagcacagtgggcccctccctcaactggtacgaggctagtgacctgatggagctggtggggcaggagccagaatccgccctgccagacagcagcctgagtgagtgactgacctcggtttcccctcttgggaagtggaactctgggcaggggggcagggcctcatggcacccccatcccaggccccgcctgctcggagctgattggagccctggacagccacccgctgtcccgcctgctctggagacgcctgaagcctctgatcctcgggaagctactctttgcaccagatacaccttttacccggaagctcatggcccaggtgggggcagcctggatgctggggtgggagggtggtggccagagcccatccagtaccctcagtccaggtgggccagggccaggccggagggtcacggaaactatttgaagaagtaggagttagccgatggagggggatcagcttgtgcggaggatcagaggcacacgcaggagcaaggcagagggggcagggggtgggcaggggtcctcagaggaggagagggtcatcagtggagggggtgctgtccacaggtgaaccggaccttcgaggagctcaccctgctgagggatgtccgggaggtgtgggagatgctgggaccccggatcttcaccttcatgaacgacagttccaatgtggccatgctgcaggtgtgcgggggtgctggggaggtgggatgtggctccccggtgaggagggtagacaggcccggtggatgggaaggtgggctccgtgcagacccccacttttttttttttttttttgagatggagtctcgctctgtcgcccaagctggaatgcagtggcgtgatctcgactcactgcaacctccacctcccgggtt

SEQ ID NO: 33244 - DNA, 922 bp, Artificial sequence
  DNA replication origin
gagggcctgtccacctgcggggtctgtttcagtggggagggcaggtcccatcctagtgttcccaccctggtgttcccagggggaggcgggcccggccctagtaagagcctgggatttgtagagatctcaggagggagccggccgtgggcctacgaggggaaaacatggcccagccccgaggtccagggggaggagcggagtggtctaggaggcaggcggaccccagcgcctaggactcacccccgcatcccacagtgcctgtccttggacaagctggaggcggcaccctcagaggcagccctggtgtcgcgggccctgcaactgctcgcggaacatcgattctgggccggcgtcgtcttcttgggacctgaggactcttcagaccccacagagcacccaaccccagacctgggccccggccacgtgcgcatcaaaatccgcatggacattgacgtggtcacgaggaccaataagatcagggacaggtcaggcgagggagggggcggggggatgagggactgggcggggccaagagcgtggtgggtggggccaggcagcattcagcctattggagaccatgatagacaggatctgggctgtatcaacagtggtatggtagccagagcccggggctccttagaccaataggggcccgtgatgggcggggcctaggtgcatgaggggcgtggccatgggcctgagataagatgagagcaggtataggttgagggcaatggtgggcggagccaggtgtattattaggtccctggaataagggtggagctaaaattgcaccgggtgctgagcgcagtagatcttgcctgttatctcagaactttgggaggccaaagtgggagaatctcttgaggacaggtattcgagactagcctgggcaacatagtgagaccgcctcccccccgcc

SEQ ID NO: 33245 - DNA, 1778 bp, Artificial sequence
  DNA replication origin
atgcagccacctgcatgcgtgtgccaagaagccccgccttctctccaagggaataagccaccccccacccccaaacggcctggaggccacacccctagctcagcctcccgcaaagcaggtgcgacccggcccggagccccgccccctacggcccacctgggcacacagcttccaggtaccaggtggcgaggccgtagagcgccgcgtccagcagcagaaggccagagacctgggccaggctgaagacgtctgccgtaggccgggtgcccacgttgtgccactgcgcgccctcgccctgctcctccagcagagccaggctctcgcagccgaagccgaaggccacgggcgacagcaggctctgcggaaaagcgggcggtcagtgagcggccgaagcggggggcgtcccccatccacgcccgacccggctctcaccgcggccacgcggccacccgcgggcagccggtcccgccaagccacacacagcacgtagggcaggtagagggagaagtaggccaggccgccgcaggccgcagccaggttggcgcgggagaagaaggcgctgagcaggaagctctgggtcaccgtggccaccgcgaaggctgccaagaacaggaagaccacgcccgggtggctgtaggggaggatgtctcccagctgtgagaggcaacgggagcttagggtgcagctcctggattggcctgggggcgcgcacccacgtggggccgcccctgtctgtcaccctccagcgcacccattctgcagccgggcaggccgaggcgcgcccaccttgagcaccagaaccagcagtgcggcgctgagcaggaagggcccgaggcagctgaggaaccagcctagccagagcaccgcgcggctgagccccatggcgcgcatggtgtcccgcagccgcgtctccttctcccgcaccacggccttcactgtcagtgtcacggagtagatccaggccagcgtcaggaagagcggcagcgaccggctcagcacacgcaggaacctggggtggggacggctggggtggaggctggagaccctccgcagaccccccctccgcccaccatctggcacgactggttcgtgtcccgggatctcaaggcgggaagatttgcctccctgttccttggaacctgatccagccagcctttggctctcaggcatcagtgcagcccaggctgtccctgcgccgggggcccccagaccctcagagtccccccccccaccagaccctcagagtcccctgctcctcccgctgcagcaggtcacgtggagtggtgtaaaggtgcaaagttcgcagcctggaccgcaggaaggttcccaacagagcctgggcccacccccacacccgggaccttcccgccgcggggaagagcggggaggggtgccagagctcacacgtcgtccacatagcacggatagggcatctgctgcaggtagaggccggcccgggggttggcgccgctgagcacgcggacggctgcacgctccaccaggtcttgcaggtacacgaagccgccccacacgtagcgcaggtcggtcagggggtccgcggctgggccagggtcccaaaacctgcgagaggggcatggtggccggttgtagggaagggctagaaactcccggggccccaccctgaataacctttttcttagacagggtcttgctctgtcgcccaggctggagtgaagagctgcaatcatagctcactgcagccttgacctcccgggatcaaacgatccccccagctcggcctcccaagtcgcctggct

SEQ ID NO: 33246 - DNA, 2075 bp, Artificial sequence
  DNA replication origin
ggggagggagtggtggggggttcacggggagggagtggtggggggcctcacggggagggagtggtgggggggctcacggggagggagtggtggggggttcacggggagggagtggtgggggggctcacggggagggagtggtggggggttcacggggagggagtggtggggggctcacggggagggagtggtgggggggctcacggggagggagtggtggggggttcacggggagggagtggtggggggctcacggggagggagtggtgggggggctcacggggtgggagtgggggggctcacggggagggagtggttgggggctcacagggtggtggtcttgccggccccgttgtggcccaggaaggcggtgatgtggccctggtagaagtccaggctgagcccccgcagggctggctgcgggcttccaggaaagcgcttctccaggctgcgaacggagacgccaggactcaggccgggcggtgcctcttctaccagcactgcagagatggggtggactcagccatggaggtcatgggggtcctggggcctgcaagtccctcagagctgggctgtggaatccgggacctgctgggccggggcctataaaagctgcgggagcttggggaccgcagtgtcttcagggcaggtgtgagggttggggtgtccaggtcattgtcattggcatctgtggaatctcgttttgggggggaactgggcatatgtggacaaccagctattaagcctcgtagtgcctcaccctttgggtccagcggggtggggcaaggggctggactcttggggggccgaggtccgcaccagtagctcctccgaaaaggaaaattccatggttcagggatcccgtactggcctgcggggaggggcgcgggttattgcttagcccaccccccaggagtgtaccaggctttttttggggttttgtttttttttttttttgagacggagtcttgctctgttgcccaggctggagtgcagtggcacgattttgactcgctgcaagctccgcctccccagttcacgtcattctcctgcctcagcctcctgagtagctgggactacaggcgcccgccaccatgcctggataattttttgtatttttgggagagacggggtttcaccgtgttagccaggatggtctccatctcctgacctcgtgatctgcccacctcggcctcccaaagtgctgggaaagcaggcgtgagccaccgtgcccggccttgttttttttttttttgtttttttttttttgagactgagtttcactcttgttgcccaggctggagtgcagtggcgcgatctcgactcaccgcaacctccgcctccgggattcaagcatttctcctgcctctgccttccaagtagctaggaaacaggcacccgccaccacacccagctaattttgtatttttagtagagacggggtttctccatgttggtcaggctggtctcgaaatcccgacctcagatgacccgcccgcctcggcctcccaaagtgctgggattacaggcgtgagccaccgcacccagccagctttttttttttttttttttttaaagagatggaggtctcactctgttgcccaggctggtgggatcacggctcacagcagcctcaacctcctgggctcgagtgatcctcccaccccatcctcccgagtagctgggactacaggagcgtgccaccacgcccagcgtgccaccacgcccagctaactttttgtattgatgaggtctcactatattgcccagcctggtctcaaactcctgggctcaagcgattctcctgccttggcctcccaaagtgctgggattacaagcgtgagccacagcgcccggcgactgtgccagcttctggccatacacctggaatcagggcgtccaggtatgaggcggcccagaaaccccgcccacctgcctcaggccccgcccctccaatgcagccacctgcatgcgtgtgccaagaagccccgccttctctccaagggaataagccaccccccacccccaaacggcctggaggccacacccctagctcagcctcccgcaaagcaggt

SEQ ID NO: 33247 - DNA, 1293 bp, Artificial sequence
  DNA replication origin
caccgctgcactctgggcctgccgagacgcacatgtcaaacagcacgttgtactgaggacagacgcccaggtggggccggatggcggccatgctggagcggacgtcgtggcccaggatgaaggcagagccaccactgggtgggaagaggccactcaagatggacctgtggatagaggggtctcagagtagcccccttcacagagtgcactggcagttacagagcttctatttttaatttctgtttttaaaaaatttttaattatttattattattattattattattattattattattatttttgagacggagtttcactctgttgcccaggctggagtgcagcggcacgatctcggctcactgcaagctccacctcccgggttcacgccattctcctgcctcagcctcccgagtagctgggactacaggcgcccgccaccatgtccggctaatttttttgcatttttagtagagacggggtttcactgtttcaccatgttagccaggatgatctcaatctcctgacctcgtgatccacccgcctcggccccccaaagtgctgggattgcaggcctgagccaccacgcctggccacagagcacctattaaatgctacatccaaaaccctgtgatagccttatttttatttatttgtttatttttatttttttgtgacagagtctcactctgttgcccaggctggagtgcaacggcacagtctcggctcactgcaacctccgcctccagggttcaagcagttctcctgcctcagcctcctgagtagctgggattacaggtgcacgccaccatcacacccggctaatttttgtatttttagtagagatggttttgccatattggccaggctgtgtctcaaactctgacctcaggcaatcctcccacctcggcttgcccaagtgctgggattacaggcgtgagccaccactcccgccctatttattttgagacagggtcttactccgttgcccaagctggagtgcagtggcgccattactgctcacagggagggactggtcgggggcctcacagggagctcacagggaggaagtggtggggggctcacagggagggagtggtttgggcggctcacagggagggagtggtgggggactcacagggagggagtggtgggggaactcacagggagggagtggtgggggggctcacagggagggagtggtgggggggctcacggggagggagcggtcggggggctcacagggagggagtggtgggggggctcacggggagggagtggtggggggttcac

SEQ ID NO: 33248 - DNA, 1251 bp, Artificial sequence
  DNA replication origin
actctgcctgccatgtgggtcactctgctctgtgcactggccgcaggctgaccgtggacgagcacgtctggttctatgggcggctgaagggtctgagtgccgctgtagtgggccccgagcaggaccgtctgctgcaggatgtggggctggtctccaagcagagtgtgcagactcgccacctctctggtgagcccatccccaagggaggtcacctcacagggaggggcctggggattcatcctgaaggcagggggaagccgggtactgaggtccacgtgggtaggcaaccttgcccaaggctgggtgtgacacactgaggtcccttccccatctctaccaggtgggatgcaacggaagctgtccgtggccattgcctttgtgggcggctcccaagttgttatcctggacgagcctacggctggcgtggatcctgcttcccgccgcggtatttgggagctgctgctcaaataccgagaaggtaagagctggggattctgctcgaggggccagaaaaggcttctgacaaggaagtgctggggatggggttttgaggaatgagtaggagtttgctacatgtggaccccacttgttgctatggcatttaggggctactgctcaaataccgagacagtaagagttggggatagacagaggttcccctggattctgcctgaagggccagaaaaggtttccaacaaggaggttctggggatgaggttttgagggatgaataggagtttgcttcatggggcagacaactcctggcagaggccccagctcgggcaaagacgcggcggcctgatggtagttgtgggttggtcccccgtgcctaggtcgcacgctgatcctctccacccaccacctggatgaggcagagctgctgggagaccgtgtggccgtggtggcaggtggccgcttgtgctgctgtggctccccactcttcctgcgccgtcacctgggctccggctactacctgacgctggtgaaggcccgcctgcccctgaccaccaatgagaaggtggggaccggccttctcctgacccctgacccccgggactctgttcagccctgaaggccaagccacttggtgcctctctgcccgcaggctgacactgacatggagggcagtgtggacaccaggcaggaaaagaagaatggcagccagggcagcagagtcggtgagggccggggtgggagacccaaggcgggtgggcagtggggtggctgtgccttaacttgaggaggaggagg

SEQ ID NO: 33249 - DNA, 1096 bp, Artificial sequence
  DNA replication origin
gttcagccctgaaggccaagccacttggtgcctctctgcccgcaggctgacactgacatggagggcagtgtggacaccaggcaggaaaagaagaatggcagccagggcagcagagtcggtgagggccggggtgggagacccaaggcgggtgggcagtggggtggctgtgccttaacttgaggaggaggagggggagggggaagaggaggaggagggggaggaagcggcagaggaggttgaggcggaggaggagggggaggaggagggggaggagtaagaggtggaaggggaggcgaaggggaggagtaggagggagaggaggagggggagggagaggaggagggggaggagaaggggggaggaggaggggaagggagaggaggagggggagaagaaggggaggagtaggaggggagcagaaggggaggaataggagggggaggaggagggggagggaaagggggaggagaagggggagaagtaggaggaagaggagggggaggagaagggggaggagtaggagggagaggaggaggagggagaggagggggaggagaaggagaggaggaggagagcacttgagaacctgagatgatgcccccatccctgggctgagccggaaccatgagactaacttgaacactgaccccacctttaacccaaccagggctgagcccagagacaaacctacccctgacctccaacactaggtccagcactgccctcaagatctctttttgtttgtttctgagtcttgctctgtcgcccaggctgtagtgcagtggtgtgatctcagctcactgcaacctctgcctcctgggttcaagcatttctcctccctcagcctctcgagtaactgggattacaggtgggttccaccatgcctggctaatttttgcatttttggtagaaatggggtttcaccatgttggtcaggctggtctcaaactcctgacctcaggtgatctgcctgcttcaaccctcaaagtgctgggattacaggcgtgagccactgcgcccggccgcacctggcctacgttcttaaccctgatctctgtctgccgggacagtcccctcacaggtcaccaatgcctct

SEQ ID NO: 33250 - DNA, 803 bp, Artificial sequence
  DNA replication origin
tggcaggctggggatggagactctggggtccagttgccactggccaagaccttggccacttcagcaggaacttctggtgccgagaacctgcagacaatgggctgtgcacactcaagggcgctgcagggtcaaggtgaaggtctgtgggcacccagcttctgggggttcctggagccacagaggctcccagctcccaggtgggcacaggggatgctccaggtgccccctgaggctccctggccagggaccagatgggaaaactgaggccagagaggggaaaggtccaggccaacaagacgcctcacctgtgggagctatgctgcactgggggctcctccagtcctgcctcctgcagcagcgcctcgagcagccgggcacgtccagggtcccctggggcgtcctcactgtgtgtgaggggagatgtagggtcagggctgtacccccaggtccctagtcttcctgccaccagccccttccttctgcacccacctgaagaaggacacctgagcaccgtacatggtgggactgagccgcagagccgggtagtgcccgaaaggaggcacgatgaggctgaacacgagggccaggcccacaaagagggcaggcagcacgatctgggggaccagcccatcagctgctgcttccatccaccctccaggcttgcttgcacctgtccctgctcctgctctacaaccacccatggctccccagtgccctcaataaatgtgctttgggttgggaatacacacgggggtaagggtttggattaggccactgagtggacggccagggtagggaactca

SEQ ID NO: 33251 - DNA, 1031 bp, Artificial sequence
  DNA replication origin
agacagctgctccttggtgaggttcaaggggtggttgagtgtggtgatgctgtgggcgtggcgggccgggcctgggggcaggtgagcacggaggattgcgttgctggctcggttgacaaaggccaccatggagtgccagcctttgttgttgaaccagatctgggtgggggtcaaggtcatagggtcagagcaatggggttggaccttgctgtgacaggacgcccacctgcccccccagttcccaccttgagactgtcctgagcatccaggctgtgagcccaggctgtgaggtttttcaggacacggtcgagggccccgccaggcaggggactcagcagcgcccacaactcctccactgagcggcccaactcttggcccgagggcaggcctgggtctcggccccccagcgagaagcctccgtatctgtggggccatgcaggcagggaaggggagctgagggccgggggggccgggagagctcccagggggcaggcagagggcatgggagtggaactggggcaggggaccccaagctagacccctcctcacctgacctcattcacccacttcttagtcttcaggctgtgggagagatggacagagacacaggcagacagggatgtgggacagagagagagatggtgagaggggagcacagagtcaagggtggacaaaaacaggaaagaaagccgggcgcggtggctcctgcctgtaatcccaacactttgggaggccaaggcgggtggatcacctgaggtcaggagttcgagaccagcctggcaacacggtgaaaccccatctctactaaaaatacaaaaattagtcgggagtggtggtgcgtgcctgtaatcccagctactcgggaggctgagggaggagaatcgcttgaaactgggaggtggaggttgcaatgagctgagatcacacctctgcactccagcctgggcaacagagggagactccatctcaaaaaaaaaaaaaaaaaaaaagaggaaaggaaggtacgcgagactcccagcccgtagccccaa

SEQ ID NO: 33252 - DNA, 1262 bp, Artificial sequence
  DNA replication origin
gtaagaataggccctgagggactgggggcctcacccatacagtagtagcaacagcaggagagcaggcaggttggcaggggccacatatgccctctgctggaaggccagaaagatgagcaccacgatgcatgctggcaccaagtagttacactgcattggagatggcagttacctttatcagcctaaagaggtgggcactgccaccctcagccctgttcccaccctgacctccttgctttttgagtaggaaggcacaaagtctcccacaatcctcaagactttacccaggccatcttggacaagcccctgcctacaaggggccagacagggcagtggcaagcagtggctgggcccccacccgtccaagcagcccccgcaccatgtcccagagaaagttgccaagccagtagagggtgggggacaggccccccatgagctgcaggtgcttggctcgggtgactcgctcctcaatgaggacaagagtgaagctggccgggacaaaggacatggcaaagaccacacagatggagacgaggacgtccaccgaggaggccatcctggaggtgaagacatgagagctgttgtagggtgagggtgcatgggttgctcagagcagagctgaacacgccattgatgggacaaaggtctatggggcagtcagcagtggcagagatggcaggggcaatttagggatgagggtgcctgggatttggcagcagaggttgtacaggtctcaggcaggataaaggttggtgggatgaggatgtgtgggggaggctggggcccgctgagtctgaggaggtcccatttccctggcttagggagcagaggaacagtttctatcccccatttataaagcaagagtgtgtcagggttcaaatccagctcccaccaccccaaacgacagagaaatggaggcagggtaggacgtgcagggtaggacatgcagggtggagggactcacagtgcaccctcagacagctgctccttggtgaggttcaaggggtggttgagtgtggtgatgctgtgggcgtggcgggccgggcctgggggcaggtgagcacggaggattgcgttgctggctcggttgacaaaggccaccatggagtgccagcctttgttgttgaaccagatctgggtgggggtcaaggtcatagggtcagagcaatggggttggaccttgctgtgacaggacgcccacctgcccccccagttcccaccttgagactgtcctgagcatccaggctgtgagcccaggctgt

SEQ ID NO: 33253 - DNA, 2368 bp, Artificial sequence
  DNA replication origin
cgttctgatcccggcgccgcgtcccacctctgtgtgtccttacaccccggggcctggcgccctcgccccactagggccaggaccccccatcccctgtggccttgtgctttggggctctctctccaggcctggatcaccttaaccacagcccagggcatcagagcccggcccacctatgggaggtgagcatcactgaacggccctcccgcaccacggccaaaaggctgttccaaaggaagcgccgcgcgctggggtccatgcctgtggtcggctcgtcctggggagcacggaagatcccataagcaaggccccgcctccgtcgcaggccccaccccacccaggcaccgctcccacgcaccagaaacaccacggctgggtccccaaccagcgccagggccgtcgccagcttgcgtttgttccctccgctgtaggtgcctgcaggccggtctgcgtaccatgagagtcccagacgcgccaggcccgagccagcggtctgtggggtggggccagagtaggcatggggactcatattgatgagtatggggcagggccacagtgtggcggggccagcattgagtgtggagcaggggcataatgggcatggggcagggcaaatgtgagaatgggacatagtgtggtgggggcagcatgagtatggggcggggccatggtgtgggtggagccagcatgagtatggggcggggccatggtgtgggtggagctgggatgggtgtggggcagggccatagtgtgggtggagccagcatgagtatggggcggggccatggtgtgggtggagacagcatgagtatggggcggggccacactggtggagccagcatgagtatggggcggggccatggtgtgggtggagccagcatgagtatggggcggggccacactggtggagccagcatgagtatgcggcggggccatggtgtgggtagagccagcatgagtatggggcagggccatggtgtgggtggagacagcatgagtatggggtggggccatggtgtgggtggagccagcatgagtatggggcggggccatggtgtgggtggagccagcatgagtatggggcggggccatggtgtgggtggagccagcatgagtatggggcggggccatggtgtgggtggagccagcatgagtatggggtggggccttggtatgggtggagctgggatgggtatggagcagggccatggtgtgggtggagccaacatgggtatgaggcagggccagaaagggcatggggtgggacagtgtgagggtggggcgggccagggcaaagacaagacccccaagcagatggaagaggcagtgaaacggctgcaaactgggaacggccagagtgagaatgtgaccgtgaccccagcgagaaaggcgcgaagccctagggggtaggcagaagaggagcaagtgggcagggccacagaaggcagagtcaaggagagaggggcaacgtgcagcggaaggaagggtgggtggaccaatgagaatggtggaacttggtgttgcggggcaaagaggcgggctagccacatccctattggaccaggatgggggacagaggtataggggaaggaagcacggtctgggggcagggacagggatggagccaaggcgagagagtgcgggattgggccaggctttagaggcacggcctgggtcgggtgggccctgggaggtgagagcggtggggacaaagtgggctcacctgggcaacctgggcctccgggacaccgcgcaggcgcgcaagcagctccaggtgctcgcggcccgtcagcagctcaaagatggcatcggattgagggcagtatcccatgctgaggtgcgcagcactgggttcccgggccacgctggggatgggggcgccgggggctcagagagctggctagtccctgaccatactggtggctaacacaggggtctcagggcccacccatccagggccacgctgataagggacaggggtgtctcagggcctggtccgcgtgtgggaggtagaggtgcaggggtctcagagaccatgcaggtgtggggcagtgagcccagtccattcactggaggtggaggggtggggaagcacaaggacgtcagggccaaccctgccccaccctgaccctacctggcacccctcacctgtggcctgccagcacagcctcgcccctgctggccaatgtgtcccccgtcaccatgcgaaacgtggacgtcttccctgctccattcacacccagcagcccaaaacactacagggatgcccacagatggtgctcagtgaggccccaggccctggttccggcatctctgatttcttttttttttttttttgagaccaagttttgctcttgtttcccaggct

SEQ ID NO: 33254 - DNA, 1205 bp, Artificial sequence
  DNA replication origin
gcttatgggatcttccgtgctccccaggacgagccgaccacaggcatggaccccagcgcgcggcgcttcctttggaacagccttttggccgtggtgcgggagggccgttcagtgatgctcacctcccataggtgggccgggctctgatgccctgggctgtggttaaggtgatccaggcctggagagagagccccaaagcacaaggccacaggggatggggggtcctggccctagtggggcgagggcgccaggccccggggtgtaaggacacacagaggtgggacgcggcgccgggatcagaacggtctggggaagagtggggagatgtccacaccagaagggtggcccaggccgggggaagcaggcagtgtggcgccaggcacaggtggccccggcctcacggagctcgtggtgccgggtcccgacagcatggaggagtgtgaagcgctctgctcgcgcctggccatcatggtgaatgggcggttccgctgcctgggcagcccgcaacatctcaagggcaggtgagccggcgcggcctccaggcaggtgtggggtgagggtgggcacgtaggtaggctcaggggagaggccagacgtagagccgggtgaggaaagtttggctccaactggagagatggccaaggctttagattgtcctgcaggggtgactgagggggcgagacaggctggggtgtgctgggggcgcaggaccaggaggcgtgagccgggggctctgggtggatttagaagacacaatcaggtgtgcgttggagtaggtgcagcctggagaggtgagggtggattgatgggtggagttaggggagggcctggttagtgggcggggccataggaaagtggggcgggggtatttattgtgtgggcgggggtagagtgcaagggcgaaagaggagtgtccgaaaaaggagtcaagtggggtgatagcttcgagagcaacctgggcaacctagggagaccccatctctataaaaaatttaaaaattagctggacatggtggtgtgtgcctgtggtctcagctacgcgggcggggggtggcgggggactgagacgggaggaccacttgatcgctagggtagtacaagtatggggcggggccagagagtattaggggctggagggtgagctgaggtgggacctgggaaaggcccgatccggtagccctggccccactcactgcagattcgcg

SEQ ID NO: 33255 - DNA, 2399 bp, Artificial sequence
  DNA replication origin
aaaaaggagtcaagtggggtgatagcttcgagagcaacctgggcaacctagggagaccccatctctataaaaaatttaaaaattagctggacatggtggtgtgtgcctgtggtctcagctacgcgggcggggggtggcgggggactgagacgggaggaccacttgatcgctagggtagtacaagtatggggcggggccagagagtattaggggctggagggtgagctgaggtgggacctgggaaaggcccgatccggtagccctggccccactcactgcagattcgcggcgggtcacacactgaccctgcgggtgcccgccgcaaggtcccagccggcagcggccttcgtggcggccgagttccctggggcggagctgcgcgaggcacatggaggccgcctgcgcttccagctgccgccgggagggcgctgcgccctggcgcgcgtctttggagagctggcggtgcacggcgcagagcacggcgtggaggacttttccgtgagccagacgatgctggaggaggtgatcacggcgccggggtcgggctgggggaggcaggctgggggccaggcccgtgggctgaccgtccctcttgtcccctctgggctgcccaccgctaggtattcttgtacttctccaaggaccaggggaaggacgaggacaccgaagagcagaaggaggcaggagtgggagtggaccccgcgccaggcctgcagcaccccaaacgcgtcagccagttcctcgatgaccctagcactgccgagactgtgctctgagcctccctcccctgcggggccgcggggaggccctgggaatggcaagggcaaggtagagtgcctaggagccctggactcaggctggcagaggggctggtgccctggagaaaataaagagaaggctggagagaagccgtggtggtgaaaccgtgtgcatgtgtgtccttgagccaggctgcacacatgtccacacagctgcctgcacatgcgtctggatatggctggccccttgcaagctgagtgtgcacatacgggccaagtggcgattcataggacacaggtgtgagcgtgcctacagctgaccggatcccagctgtaaatgcctctgtggccagcccaggagttggggatgtgagtgcgggcctcataagggcctggtcacaccgtccctgtccccacgtccctgcgtgcctatgtggggctggcgcctaagggcggtacctgtaagtgcctggccataaagtggggatgaggtcaggactcaggaatgtcctgggaagcttacaggagcccggtgtcccggagcacaggccagggccgggccagaagcccatccgacatccagctgaccctcaccctctgaccccagccctcagcgccatgagtcgggggcaaagagttctcaagggtctgctgggctgggtttgcacttggacctgggcctggagagccagacttggagcaaggggctgtggccttcatgtcctgtgccccagagatctgcccctcccacccgaggtaggtgggaatggggtttgggaaaggaaagaggttggggttttgggattgggggtggggttctggaaggggacagcagggagacttggggaggggggagagagttcacactgcggggtgggggttgggggaaggtaggaggctgggatctgtatgcctgcagatgccccagctcttggccaatgccgcctcaggctgttatcagcaacgggtgcctgcgtcctgctgcccagcacgtccggtggtccagagtcactggaatgcagcttgggaggcggggctggggaccttagctaagggcaggtctggggcaacatgatatggcccacagggctgctgagaggtaaccaggtgtcctcagcatattctgccgatggtggggtccacaccacactttggggacccctgtgcaggcagcccaggaccaggtggacgtggggacccagacggacgtggggacccagacggacagggcccggtaacctggattgttctgacttcctggacgtctttgcccccagggtttcggttctgggcctcagtttccccacctgtcctcgacctgacccacttcacggggctgcagggcgggtgatgggggggaccctactctgcccggccctgctggggcccggccacaccctagggtctgcaggagaggcggtggagcgggcttgccttcagggaaaagggggctgcaggggcgcagcttcggcctgtgcgtgtgtctggggtctgagggcgaggctccaggggcttggtggcgtctgagcgcgtgtggaggtccgggtctctgcgtgtcatcgtgcacgtgtctgtgcacgcccactcgcgtccgggagtgagagtcagcgccctgcagtcggccgccccgtgcccgccagc

SEQ ID NO: 33256 - DNA, 1313 bp, Artificial sequence
  DNA replication origin
tgcgacctcaccttcgcgcccactccgcagagccgcaggctgaggccgggaagggtcgggggcgaggccgcgtcgccgcctccccgaagccttttcctgttggggggagggcccgccagtgacggccgggcctgtcacgtgggcctgacagctggggagggggtggccggcgacaatgtggtcccgaagcggccagcgccgggagctgcagcgctgagacccccagcccgccccctcgggctcccggccggggccccatcatgttctccaggaagaaacgagagctcatgaaaaccccttccatctcgaaaaagaaccgcgcgggaagccccagcccgcagccctcgggggtgagtggagcccgggtgagacccggagctgacgccgggccgcagggggacagggacccgccctgtgctcggggctcatgctggggcggcggctgggggctcgtgccagctacagcccctaccgggcgggacggcaggggccacagcagagaggccgggaccccggcattcagctcacggtagggaccctgggagtggtggccgcctccctccactccatccagggctggccgcggggcccagggagcaggaagggagggtgccgggttgggacgatgttgtgtttgggccgctgcaggttgggggcttaggcaatctgggggctctaggggccgttgagatgggagggctgtggcctggccattgggctgaaggttgaccgggcagcagatcctctaatgggatccaccaggttcagaggttggggagtgtccccaggcctggggtgtctacaaagctggggggggggtctacagagcttgggggtccgggatgtctacaaggcctggggctgcccataggctctggggttccatggacctttaggggacagacagagtcagaagtgtgttcacttaaagcacctgcgttgtaggagcctgaggggggcttgaagggctgaggaccctccccacccccaccaggaagtggggacccccctcccgcgcctccccgcaggccccgccccggctgtggtttgggcaaggaccgttgtttgtgaaagctctagggaagaggatgttgggtaacaggtgggggggtacactaccaaatctcggccctgtgacctctggcctttgacccctgtggggtcagggtgatggtggccctccacagccccacttcatttctggggaaactgaggccgtgtccaggccggaaaatccctttaacgagctcccctcggacctgcccaaggagctgcccaggaaggatggggctgacgcggtgttccccggacca

SEQ ID NO: 33257 - DNA, 1153 bp, Artificial sequence
  DNA replication origin
ggatgttgggtaacaggtgggggggtacactaccaaatctcggccctgtgacctctggcctttgacccctgtggggtcagggtgatggtggccctccacagccccacttcatttctggggaaactgaggccgtgtccaggccggaaaatccctttaacgagctcccctcggacctgcccaaggagctgcccaggaaggatggggctgacgcggtgttccccggaccaagcctggagccgcccgctgggtcctccggcgtcaaggccacagggaccctcaagcggcccaccagcctgagccgccacgccagcgcggctggcttccccctgtcgggtgctgcctcctggacactgggccggagccaccggagcccactgacagccgccagcccgggcgagctgcccaccgagggtgccggcccggacgtcgtcgaggacatctcccatctgctggcggacgtggcccgcttcgctgagggccttgagaaacttaaggagtgtgtgttgcgtgacggtgagagccacggggacaccgaggcctgggtggaagacagagccagacccaagggaggatggagggagggacttggggaggctcagaagggagggaggctcagatggcagggagggctgtgtggaagaggccatgacagctaaggctctgagggatgtgtaggagtttggtgggggagtccctgagcgtacactggctcaagagggtgcccactttattttttttaaaggatctgatggcaattaggagggaaaggcagaggaaatgtcccatgcacaggctcagaaacacggaaacagagaatgcatttgggggccaaggtgtggggtgccgctggtgtaggatgaaggcatgacaacgccaggcagaagggcaatggggagccatagaaggtgttagagcacaggacagatgggggcagatctgtgtcttggaatgaagcaaactgggggttggctgaggtctgggtggagagagattcaggaggcatggcgaggggcaggatggggtcatcaggcggcggaggtgctgggacccagcggcctgcaggccggcagttccgttttctcctccacgcggccgctgacagccctgcttcctgccgagttattttcatctgcttcctgtttgtccctggcag

SEQ ID NO: 33258 - DNA, 1172 bp, Artificial sequence
  DNA replication origin
gctgggaggccccggccacgccccttctcgggaccttccagccgggcacccggcactccgcgcgcggccggcgcacggacccccggctgtccccgcacaccccctacccgggaagccggcggccggcgcgacccctgcgcagcgcagggatgcccaggtgcgcacggccaggccaggcgcgcggcagccgctgctcccccaccgcgggcggcaaacggcccgagcgccacgtgctcccggacgcggcgggacccagcgcccggcacctgtcccctcacctcgggggcccgcccggcagcgcacggggccctcgtccagcaccgggtgcgccgtcccgcagatacacatggcgcagccgtcggggcgcggagaccgcgagcgcgtggggcctggcagctgaccgatgggggtctccggtggccaaaccggctccggccggtcaggaggccccgcccccgcgagggaaaccccgccctggggtcccgttcgccccagcctgggtccttccttaaccgcagagcttcgaggtggggagggtcgaggacgggcagggaaactgaggcccagacctgaagcccgggaacgaggaagcccgggaagtgtcggggtggcaccgtccatgtgggtcccctcctagctgcctgaacgcgggtccccaagctgtggggtggaccccacaaccatcgctgcatgcaggtggccccattttatagataagtcacctgacacctagagagggaaggggcttgccagggtctcagcagctgagaaacatcgggactagagcccacatcctagccgccagggtcttctctggcctggggcggccccgagacgcacagaaggcgcccccagccgggcgcggtggatcaggcctgttatcccagcactttgggaggcggagccgggagaacggtttttagctcgggagttctagaccagcctgcgcaatatggggagaccccggtctctacaaaaaatacaaaaactggccgggcgcgatggctcacgcctgtaatcctggcgctttgggaggccgaggtgggtggatcacttgagatcaggagttcaagaccagcctggccaaaatggtgaaaccccatctctactaaaaaaaaaaaaaaaagaaagaaaaaaaattagccgggcacggtggcgcgcccctgcaatcc

SEQ ID NO: 33259 - DNA, 3554 bp, Artificial sequence
  DNA replication origin
gcatggcgctttcccagtcctgagagaccatcagtctccctcaacccggagaccagctgcttacaaccgagggaggcacggcttctccccatttctgcagggacagcagtgagcgccgggctcctgggtccttccaggcagagctgggggcgacggggctggagcatctccgacccggcttggcgttggggggggcggcccagcctgcgaggccgcgcatgcgcaggaggccggggcgtgtgcggagctcgccgcagggccctcgctatggggctggggctgggactgcgcctgcgccgaggcccgctgcccgcccccgcccgcccccgcccgcccgcctcaccagcttcctctgggcacggtgccaggcctccttgatctccttcctgcgcttctcgtgttcaagccgccgcagggtcaggggctggggcgagacgggccgtgagtgggtaccccggtgacacccccgcccagcccgccctcccgggcaccacgcacctgcatgaaggtctgggtctgcaaggtgcccaccgcctgcaccatgctgtggccgaactccaggtcctgctccagggccagcgagtagatggacaggagcggcatgtggggctgtgggtggggcaccggctcactgggtggggagggatggaggcagggcggccccagcacccccagccaccagctccctggtccctgcagccacccccgttaatgtagaggggaagcccctgctcttggtccctgggcccttgaaatggggctgagactcacacccgggcccagggacccccgccccgtgcccgcggggcccccacctcctgcatgacgctctgtctgcagttgtgagcgatcttctgcaggcccttggcaaactccatctctgcgggccggagaggggtgtgaggtgctgggacaaggccttcccagctcacccagaaccccctccctccagacccaccctgctgggacaccagctctcacccagcgtcgtccgcttctccaggtagctgatgaggtccttcatgtacttggccatgttcttggcatacagcagtgcggcatccacgcccccctcacagcgctgtagcagcacgtccacctcctcggcgggcaggcagcctgcagggaacgggggcctgctcagcctggcccgacccgcgcaatggcccacccctcaaatgcctgcctgccgctgggtgggggcttaccggcgtcacagtcttccaggctgggaggcgtgccctcactgcccggtccatacaggctttccatggactgtaggacggagacgcaggtgagaccagccccatgcggggccctgggcagtgcccacccttcaggggacggttgctgcctcccccagagagggaaaccaaggcgcacaggggaagcagggtgactgtctgggccctgcagacctgaacccggctggcctccagaagctggacacaggtggccctggcccaccccactcacctggctcgagtccccaggaggcactgctaggagggtgctgctgtccacttcacccatgaggaactcggacactctgcagggccagcgaggtcaccatcgagagacacccgggccccccacgctcccttgccctgccccacaggctcccgtgctcacgtgctactgaaggccacagcaatcgtctccagggccttctcgaactcctgtttctccagatcattgttgctctcataatggaaggctgggaagcagagataaggacaaggaggtgggcccactctgggaggtgaccatccctgcaagaactgaccggagcccttaacccagggggaacaggagggagcttgtgcctgtcaaactcctatgcatccttcaaaacccacttcaaacatcccctcctccaggatgcccttctaggcagagagccctcgcagccctgttccagcaggctgacctttgaccttggcaatgagggtgccggctgcggtgagcgtctccacggtgttcagcagcgggtacttggagatgatctgatgcatgacacgcagagcctcacccaggcactcgtgggcccgcgggcggcgggcctcaaggaggtctgctggggagagtcggagtgagcagtggggtagggcccagtcccagggaaagtctgtccacctcctccctctttagagctcctgttcccagatggggaaactgaggcagaggtggaagacggcagatgcctggggctcatttcgagaccgcggggagggcactgtccctccctgggctaccggccagatcaacaaaggccagacgttggcctaggcactctgctgctcagaacactcttttcttgtccctccagaaagcaaactgcctcttgtccttcaagctacagtcctgcagccccttcctccatgcagcccaccaggctccttccctgccctaactcctcaggactgctcaaagccctgtccaggtctctctctgcccttcctaagtgaggaaactgaggcatagagaggggaagccatttctcaacaatcacacagcttttccatctacgctagctctgaaggcgtgagaacgccaggcagagggatcctgcctggctttatctccagggcaatagggagccatagaaggtgttagaacagaggaggtcagatctgactgttggaacctggctttcactgccctcctcagccaggggtggtggcttacacctgtgaccccagcactttgggaggctgaggcaggaggacgggttgagcccaggaattcaagaccagcctgggcaatacagtaagaccctgtctctgtaagaaataaaataaagaataaaaagctaaatgccctcatcgaacgttctcaattggaagaagaaaaaagcagagagggccaagcacagtgcctcatgcctgtaatcccagcacttggtgaggccgaggcaggcagatcacttgaggtcaggagtttgagaccatcctggccaacatggcgaaaccctgcctctactaaaaatacaaaaagtagcagcgtggtggcactcctctgtaatgccggctactcgggaggctgaggcaggagaatcgcttgaagctgggaggcggaggttgcagtgagccgagatcgcgccactgcactccagctgggtgacagagtgagactcctccatcccaaaaagaaaggaaagaaaagaaagaaagaaaaggaaagaaaagaaaagaaggaaagaaaagaaaaaagcagagagtacaggcgaaacatcgagagccaggcacacaccacgtagtggaaacaaacccacggaattcgtaggaggggaaaggtacccgggaggacagaggccagcgggaggggcagctttgacgcctgactgtaccgctcagaggatgccccaaatacgaaatgaaatctgaaaaagtaagtgccccatccctttcggcaccgaagaccccaggtgaatgtcacctccgggaagagaccgaccgagtcacccgccagagataccccgctggccgccgccgggcctgagaccccggaccggaacatgtcttcgctgctggatgcgaggcggactccgggaa

SEQ ID NO: 33260 - DNA, 1801 bp, Artificial sequence
  DNA replication origin
ccccacccagtgagccggtgccccacccacagccccacatgccgctcctgtccatctactcgctggccctggagcaggacctggagttcggccacagcatggtgcaggcggtgggcaccttgcagacccagaccttcatgcaggtgcgtggtgcccgggagggcgggctgggcgggggtgtcaccggggtacccactcacggcccgtctcgccccagcccctgaccctgcggcggcttgaacacgagaagcgcaggaaggagatcaaggaggcctggcaccgtgcccagaggaagctggtgaggcgggcgggcgggggcgggcgggggcgggcagcgggcctcggcgcaggcgcagtcccagccccagccccatagcgagggccctgcggcgagctccgcacacgccccggcctcctgcgcatgcgcggcctcgcaggctgggccgccccccccaacgccaagccgggtcggagatgctccagccccgtcgcccccagctctgcctggaaggacccaggagcccggcgctcactgctgtccctgcagaaatggggagaagccgtgcctccctcggttgtaagcagctggtctccgggttgagggagactgatggtctctcaggactgggaaagcgccatgctcctgcatgtattctttttttttttttttttgatacggagtctcgctctgtcgcccaggctgcaggctggagtgccatggcaccatctaggctttcactgcaacctccatctccctggttcaaacaattctcctgtcgcagcgtcccgagtagctgggattacagaagcacgccaccacacctggctaatttttgtatttttagtagagacggggtttcaccatagtggtcaggctggtctcgaactcctgacctcaggtgatccacccgcgtcggcctcccaaagtgctgagattacagacgtgagccaccgcacccacccggcctcctgcctgtattctcttcccacttcgcttttgggttatttcaaagacgccggcgcctttttgtttgtttctttgcttgttttgagataaggtctcgctctgtcacccaggctggactgcagtgacgcaatcatacctcactgcagacttgccttcttgggctgcaatgatcctcccacctcagcctcctgagttcctgggtctacaggcaccagccatcacacccagttcatttttttgtattttttgtatactcactatgttgcccagtttttgtttgctttttagctgtgttaacacggtctgcagtgaaacgcaccctcctagctccttccagcacataccggcaaacacatatctgccctgttttgtacacacgaggacagctcacctcatgccctgttctgctcctgatttttatcctcacctccatatagagaggctcacccgatatcagtcagcatgaagcagcctgaaccccttttttcggctgtgcagggctcagctgaggagattgagtaggttatttcatggacgtcttgggagtggctgagctgttgctgttacgaacaccattgctatgacaagcttgtgcccctgtctcaaggatgcctgagggatcagtgcccaaaatagaactgctgggtcaaggggcgtgcgtgtatgagctaccctcccaggccacagccctgcttttcctcttctgtgaaccctcagttcttaacctttgcttagttcttatcctttgcttactttgtactggacagtggcttatcattgatttgtcagagctttttacatattagagaacttaggccttaatcatgtgagttt

SEQ ID NO: 33261 - DNA, 2953 bp, Artificial sequence
  DNA replication origin
cacgatctcctactaccagatgatgcatatgcagacggcgccgctgcccgtgcacttccagatgctgtgtgagagcagcaagctgtatgacccaggccagcagtacgcctcccacgtgcgccagctgcagcgggaccaggagcccgatgtgcactacgactttgagccccacgtctccgccaacgcctggtaccgccacccagctgccctgtccccggcgcacaaggccctgcctgggagccgggcttccctctgtcgggggcatgaagatgaagctgtcttgccccccatcacctcccctccttttcccggtttcttccactaggtcccccgtcatgcgtgcccggaagagcagcttcaacgtgagtgatgtggcgcggccggaggctgccgggagccccccagaagaaggcgggtgcactgagggcacacctgccaaggaccacaggggtgagtgtccggcggggcccaggggcggacgctggctccctgcgacccaccctggcccttcaccagagacgcctctttctccagccgggcgaggacaccaggttcacaagtcatggccgctctcgatctcagactcggacagtgggctggaccccggccctggcgcaggtgagggaggctctctggcgggctggggtgtggagctgcctcctctcctgagcctcagggtttcatcacccaccggggtgatggagggggcccccctggctgggggagtctgaacagtcctgattcccgcccaggggactttaagaagttcgagcggacgtcatccagtggtaccatgtcgtccacggaggagctggtggacccagacggtggagccggggcttcagcctttgagcagggtgagggtcccctgacggggctggagagagaggggggtttggacacagtccatgggcctggccctgagctgccttggtgacaccggctgcctgtgctgcccgcagctgacctcaacggcatgacccccgagctgccggtggccgtgcccagtggaccgttccgccacgaggggctgtccaaggcggcccgtactcaccggctccggaagctccgcacgcccgccaagtgccgcgagtgcaacagctacgtctacttccagggtgctgagtgtgaagaggtgagtgggacgccccgacggacagctgggagccttcgggagcctttggggtgcccagcaccgccggcctgtgtgccctcaggaatgtccggcccagagcagggagcagtcggacgcctttggaaggaagcgaacggagggggtggggtgggctcttttagttctggggagcagggttggctctctgaggcagcgaggcagggggcagacctggagggtgaagagtcctggggctgtggccagaagacctggagggcaaaggccctggagctgtgtccagaaaaccaaggggcgggaaggagaggaggccacagggcaggcgggatcacccctggggtggaagccacgagccactgtccagcttgtgtttgcagaagctgccgtgtgggggctgtgagcgccccggggaggtggggtggagccgctgggggctgcgctgagctgggcgccccggggctgggctcactcactctggccgcccccagtgctgcctggcctgccacaagaaatgtctggagacgctggccatacagtgcgggcacaagaagctgcaaggccgcctgcagctgttcggccaggacttcagccacgcggcccgcagcgcccccgacggcgtgcccttcatcgtcaagaagtgcgtctgcgagatcgagcggcgggcgctgcgcaccaaggtgaggcgggggaggaagcggctcacagcgaggaggcgggagtgggccgaggctgatgggcctccccacccccgggctcccgcagggcatctaccgggtcaatggggtaaagacacgcgtggagaagctgtgccaggccttcgagaacggcaaggagctggtcgagctgtcgcaggcctcgccccacgacatcagcaacgtcctcaagctctacctgcgtcaggtgagacccaccggtggtggccaggcagagcctggaaggggcgtagccaggcaggaggaggcggggtgggggtccgggagctggagcaggactgagctggagcaggactggcgcaagcgggggcctggggaggacagggtgggcgggacagtgcctggcagggcagggctgaggctgggggcgtggtcacggtaggagcgaggcggggccagttctgcgccgaggcacggacagggacaggaggggcggggtggggcttggtcagcacgtggcaggggtgtggccacggcagaggcacacctgacgctgtgcgggggcggggccggggccggggctcggtggggcgtggccagagcaagatgggcgtgttcagcgcttggcagggacccgtatgaggctaggggcggggctgaggctagacaagtgcggggctggcggtggggcctgggcttggtggggcgaggctggggccaggggcgtggtcatccccggggaagggcgggactggggctaggggcgtggtcatgtctggggaagggcggagctgggctgggatgggagtgggaccagcacttcgcaggtggttgggaaggggtcagactatgctgagtggagccggagctcgttagggtacctgcagggcggggcgcgcgtggccagagcgagaaagggagtggagctgcgggcgtggcccgggtaggaggggcagggctcacgctgggctgggaaaggggactgacgccgctctgggtggaacccgagctcggtggggtgtggccagtgctctgtgggggtggggctgaggctgggggcgtggcaggcacacgtgggggctgggccaggcccaccaacacctgctgacccttgactctgcgcagcttcccgagccgctcatctccttccgcctctaccacgagctcg

SEQ ID NO: 33262 - DNA, 1387 bp, Artificial sequence
  DNA replication origin
tctaccacgagctcgtagggctggccaaggacagcctgaaggcagaggccgaggccaaggcggcgtcccggggccggcaggacggctcggagagcgaggcagtggcggtggccctggcaggtcggctgcgggagctcctgcgggacctgccgcctgagaaccgggcctcgctgcagtacctgctgcgtcacctacgcaggtgagtcccggcatatggagtggagggcgcggggtcccgggagccgctcagcacctggcccctgcccaccccgcaggatcgtggaggtggagcaggacaacaagatgacccccgggaacctgggcatcgtgttcgggcccacgctgcttcggccacggcccaccgaggccaccgtgtccctctcctccctggtggattatccccatcaggcccgcgtcatcgagactctcatcgtccactacggcctggtcttcgaggaggagccggaggagacccccgggggccaggtgagggtgtgggcctgaccggggctggccactcggggcttggggagcagggggcgctgctggggacagtcgttgtcggatgaagcccaaggaaccacagggagataatttggtttggacagggctgttcgggaggccactgtctttttgtgtcttttatgcaaaaaactcagcgaggtctgcattgaatctggcagaggtgcaaaggctctgcggccgcccctccactctcccttggggctggccttgggcctcacccttcacccccagcttccttccccgtttcccatcccggtgctgcctgcagccacaagctccacgctggcccggtgtccacagcctgcccgagctgccactgcactccgccgcgaggtcaattccccgcttcagattttcttttctgggagttgtagtttcgctcctgctgcccaggctgaagtgcaatggggcgatctcagcccaccacaacctccgcttcccaggttcaagcgattctcctgcctcagtctcccgcgtagctgggactacaggcgccggccaccacacccggctaatttttgtatttttaacagagatggggtttcactttgttggccaggctggtctcgaactgctgacctcaagtgatccgcaccccccttggcctcctgaagtgctgggattacaggtgtgagccactgcacgcggcgtctcgtattctttcaatccatcttccctgggtgtttaggggctgcggtttctcgggtttgctcttggctgaggacagaccgcctgggcaacagcgggtgtcagtagctgttacgggctgtgtgggtgggtttgttaatttataacatggaaaatggagccccggcccctctatgacttccgttctgcacttgcaggacgagtcatccaacca

SEQ ID NO: 33263 - DNA, 1040 bp, Artificial sequence
  DNA replication origin
gtgggacgtcgaagtccaggcgctctcggcagcgaccccaggacggcgcacctaagctatgccgtggtgcaggggacgtgctggagggacaggagcaggcaagagagaagccacctgtggtcccagccccaccccagctcacacgaattccggctgcctttccctgcaggagcccagtgtcatccgcccgccacggagcctcatggggggcagtggggcctgcagcacgttgttggactggttggtgttgaatcctgagagctgctgggccgggccgtcctcgtccccgtccccgtcctcccgggctgtggcctccagctgctcctcactgccgctgtggctgccagaagccacctctaggctggcctcgctctgctgctgctccaggaagctgaggtggcccagggcactggcctccgatgaggacagcagctcggaggcctcctctaggtccgagtccgaatcgttggacacaactcgggattctaagaaagggagacagatggcggggggagacagacaggagagatggaggagagacaaggggagggacagacaggagagatggggagagacaggagaggggggagagagatggagagacaggagagatggggagagacaggagagatggaggagagacaaggggagggacagacagatggagagacatggcggggaggaggagagagagacaaggggagaaacggaaggagagaggtgttgatagggtctggctctgtgtccccacccaaacctcatcttgtagctcccataattcccacgtgttgtgggagggagctggtggaggatggttgaatcctggaggtgcgtctttcctgggctgttctcatgatagtacgtgggtttcacaagatctgatggtctaaaaactggagtttccggacacaagctctccctttgcctgccaccatccatgcaagatgtgacttgctcctctttgctttctgccatgattgtgaggcctccccagctacatggaactgtaactccattaaacctctttcttttgtaaattg

SEQ ID NO: 33264 - DNA, 1264 bp, Artificial sequence
  DNA replication origin
ggcaggtgtgccctcctcgcgctggcttcaggggtcagtgtctccccaggccctcgccctgccctcccacttcgtgctcctgggtaaggcgtgagcgtgtctgtctcttcccttcccgtgagggtgtggagttgttctctggcttgtgcagctgtggtttgcggccagttcctcttacagacgtttgggatctggctctacttccccgtttgcttactgtctgatttcagaaggcctcgcctgcccaagtttaacctagccacgtggttctctcacagtagctttattaagatgtaattcaccctcgggcggtcggtggtctgtaacgcgcccactgttctgtgcagcagggtccccagatccccaggccgcggactgtgtgtgtgatggggacagtgcttccccttctctccaaatgtacttttttcaaaattgtcttggccaaagcaagccagacccaaagggacaaacactgatgtcactcctaggaggtcactagagtcgtcagagactggaagtaggatgggggttcccgggactggggagttgggtggggatgggggttcccagggctggggaggagggaggggacagagtgtgtcatgtgcacagttttagtttgggaagatgagaaaattctggaggtggccgggcgcggtggctcacgcctgtaatcccagcactttgggaggccgaggtgggcggatcacctgaggtcgggagttcgagaccagcctgaccaacatggcaaaatcccatcactgcaaaaaatacaaaaattacctgggcgtggtggtgcatgcctgtaatcccagctacttgggagctaaggcaggagaatcacttgaacccaggaagtggaggatcgcttgagctcaggagttaaaagaccagcccgggcaacacagagaaaccccccacctctacaaaaaactttaagattacctgggcacagtggctcacacctgtaatcccaacactttgggaggctgaggcgggaggatcatttgagcccaggaggccgaggctgcagtgagctacgattgtgctcctgtactccagcctgggccacagggtcacaccctgtctcaaaaaaaaaaaaaaatgcagttccacaggcgcatgggccacgtttccagtgcttggtggccatgtggggctgacgtgcgaaaccttagagccgggggatacgtccgtcatcgagaacgttttcctggactgccctgggctgcaggtggacgtgacgaggtcattcgatgcctga

SEQ ID NO: 33265 - DNA, 754 bp, Artificial sequence
  DNA replication origin
gtgatgtacctgccagccgtctcactgggccggatgatcttcaccacctgcagagacagagagcaggggctgcgaatgcttgaggggtctcactgcagtcaccagacagcaggcgggcagcacacgggctggggatggccggcaggggtccgagatggctgaccctgggctgtgggacccgctccctgggaacctgggtcacgctcttctctgggcccagtggccctggctttaagagggggatattgggggtgtggtctcgaggtcccctccaggccctggatcaagggggaggggctgtcggggagggacagaagcccccttctccgagtggtcagctcagagcagccccagggccccttctccccacagggctcacctgcccacgctttatcccaaagtagcgcgccacagggtcccccgcctggatcctgggcagctggttctctcggagcttactgcgaagcaccgtcaggaaaatgccagacagggccgttgggggggcaggggtgtgtgtggggggggaacgcggaagtctcgagggacagggaggggcggggccggtggggctggaaaggatactatcgggccagcagctctgtcacctcctccttggtcatgacgacgtgctcagggactagctgccgagagaggaagccaccaggcatcaccaagggctggtgagaccccacgtggctcccaggtgccaccacagcccctgcgccttcagacggacaagagccctgaaccccac

SEQ ID NO: 33266 - DNA, 1054 bp, Artificial sequence
  DNA replication origin
cgcaagcagtacccacaggcggcccacgtgccttgggctttgggccaggccagccagggtgccctggaggatgtggccgggatgtccggcaagccccgaccgcctccctcccaccgcgtccatgggccccaccccaggcagccgccgtcctcccccagctctcaggaggggcgtcagggcggagggcactgtgcctctcgccagctcctgtgggctccagccctcggcctggtgcagattccaggagccggaggttctttatcctgagctgatgtccagggggacttgcagaggaggcccggcacggggtcctccaggggcctatccgtgttccccgtctgtctgtcggacactctggagccaggctgctgtgctgtgacgggcagtcagcagagcagtttagtccctggcccaccagctgtggggttcacgcagccacacagagcagcacccctgtatggggaagaggtcgccctgccagctctgagggccgcccctggaagcgtgtgatggatggaaacacatccgagtttccacggccacttcactgctggatgaggctctcgatgagcagagaggctggggaggggcgggctgttgaaggctcctgggctggcggtggggttttctgattcacgacgtgggtgtgttgttggggcacacgagtaagccccaggtagcttgaggcaggaaatggggttggggttgtctgggcccctccgggccgtgccttagagccgctctcttccagtccctggtcgacatggcccccaagtacatcctggagcagtttctgcagcaggagctgctcatcaacatcacggagcacgaggtgggcgcgcgccgcggaatcccgcctgcgtggggccggcagagatgcagcgtttgtgggtggccaggaagatgtgggatctggggcccagggcaggtgttcctattagtgcatggaggacagggttctcaaagggtggccctgggcctgcagcagccgaacccgggagcttcctagaaatgcagatcccggccgggcgcggtggctcacacatgtaatccc

SEQ ID NO: 33267 - DNA, 1122 bp, Artificial sequence
  DNA replication origin
gcggccctcagagctggcagggcgacctcttccccatacaggggtgctgctctgtgtggctgcgtgaaccccacagctggtgggccagggactaaactgctctgctgactgcccgtcacagcacagcagcctggctccagagtgtccgacagacagacggggaacacggataggcccctggaggaccccgtgccgggcctcctctgcaagtccccctggacatcagctcaggataaagaacctccggctcctggaatctgcaccaggccgagggctggagcccacaggagctggcgagaggcacagtgccctccgccctgacgcccctcctgagagctgggggaggacggcggctgcctggggtggggcccatggacgcggtgggagggaggcggtcggggcttgccggacatcccggccacatcctccagggcaccctggctggcctggcccaaagcccaaggcacgtgggccgcctgtgggtactgcttgcgggaggaggctggggagggggagaggctggcggggtggggcaggggtgcccacctgcttggcggagggtgtcatgccctgctgcaccacgatgagagcccgtgtgatgttctcctcctgcatgcgctggcagtacaccttgatggtcttgatgcccaccttgggctcctctgcagacagagagtgtgctggcctgcacgagcctgggccctcgtggccctcgcccacccagagcccagagcacccaggttccagccccattccacacaggtgtctctcctgctcgggcctcggcttccgcgtttgcaaaacgaggcctgagttgcaggatcccaggacaggggaagagagggctgaaacctctcattcacccggagacagggacagggggctgacacccctcagtcacccagagaccagggagaagcagagaccttcgactctgagaggctcccaccctgggcagttctggggaggcgggtgactcagcaccaacctctccaacaagcagacctcacaccccaggacgctctctttaagaagcatcacctgaggccgggtgcggtggctcacacctgtaatcctagcactttgggaggctgaggcaggtggatcacttgaagtcaacag

SEQ ID NO: 33268 - DNA, 779 bp, Artificial sequence
  DNA replication origin
ccagacggggcctcctgggccaggccaagaagctggaagtgcacccaacggccaggatgggggagccaagggacactagggcaaaggacatggggggctgggggtgagtggggaggcccttgtgactctcctcgttggcaggaagagagaaggggactgagagggaaactagaaagaagctgagcatgagaggggtcagagatcaacggcatcacccacagcaaggaaggggaggggagttttcctcccagactgggcagagagacaaatgctgggcaccaggcgagtgggggtgggtgctagcgaccggctcctcggcaggtgctctggtggcttcaccggaactcccccgggacccgctgctcacctggaaagaacacaaacatctggtcggtggggtcatcgttgtgggccaccagcacggtgaggtccgtgcgccgcggccgcccctcactcggcttgtccccagattgggctttgaactcctccagggtctggtcaagctcgtcctgggtcaccagatagccacggtcgtggcacagctgcagagagaaagaaccagctgaccccagggcagagagaggaaggcggccaaagctcgtgacccggaagtcagacctgcggctgctgcagaggacagaggtgaacagcaaacgggatgaacactcactgtgtgctccatgacagccaccccggcccccacagcctcacaccacaggatgggaccagtatgatcctgagaggctcccagagatgtccagccttgaccaagaccgtct

SEQ ID NO: 33269 - DNA, 959 bp, Artificial sequence
  DNA replication origin
tggcgctgccgatccgagacgttgctgcattcaggcattcgccgacgacagaccagcgcggggcggggttaggcggagggggcctgattcggattcggcgcaggcgcagtccgcgcgggttctcgcgcggagaaggggtgcgagcggcggcggcggcggaggctgccatggacgacgaggaggagacgtaccggctctggaaaatccgcaagaccatcatgcaggtgagccgcgcctggtgttgggggcgggggcgcgggcggcgggtgtaggggcccgaggtggggtcgagcacggcgtctcctcgtactctcgtcggagcagcagcgatgaagggccgggccgatacgggaggcccagaggtcgccggggataccaggcgctggacccgacctgagccggcagcggggaagggagggggtttcgagacgtctgggtgcggtgcttaggggtgggtgggcggcttgggctggtgcggcgcgcgtggcggcgagaggaggaggaagccgcgaatggggacggggggcgcccccagactctgcccttctctgtgattcagcgtcgctatttgtccttgcgtcctgaaccccatggagtcttcagcatccgaggctggcagagttggtggttgggaagcagcgggcgagctggggctttcgatggggacgtggagctcggaacccgtgccttggggtctggggcagatggaggccactgggtcgagtccggtttggaagccgggcacaggcctgaggacctgcggttcagggtattgcctcagccattggggccgtttgagagcttttgctttgtcttgcttcccaccctttgcccttgtcctcagcgaagccccccgcagcctgattcttctttctccgatcctcaaacattgtcagcctgaagtcacatctgtttcggtccctgtcattttttttttttaagagatagggtttcattct

SEQ ID NO: 33270 - DNA, 1092 bp, Artificial sequence
  DNA replication origin
gccttggcctcccgagtagctgggattacaggcgtgagccaccacacctggctaatttttttgtatttttggtagagatggggtttcaccatgttagccaggctggtcttgaacttctgacctcagatcatctgcttgcctcggccttccgaagtgctgagattacaggcgtgagccaccgcacccggccaggaagaccccatttctacaaaaaaatttaaaaattagctgggcgtggtgggcgcacctgtagtcccagttactcgggaggctgaggtgggaagatctaggatcgcctgagcccagcggttgaggctgcagtgagctgtgattgcgccactgcactctagcctgggcgacagagcaagacactgtctccaaacaaacagaaaacaaacaaaaaccagaagaggagagggaggaaacctggggttgcctggggatagctgtatcaggcagacagcacagccaggatagaggctctggggctgtgcctcacctggagtgttcctggcagggaaggggcaggagggggtcagagggcaaggtggggcaggtcccatgaagccttgctggtcagggtaaaatgtctggagctgctgtgttgggaaatgactgttgggagccagggcagaagcaagagaccagggagggagtgggaaggcaaacttgccacaggttggggtggctccaactacggtaggggcaagcacagagcggggagggtgccacagggcgagaaaaagagggagaaagggaacaaagctgtccctgtgagcagtgaaaagaggggtgggagggtggaggcgtgtaggtcgaggtgagctctggagttcagggcaaggtctgggggatggacgtgcaggcagggtggccacgtggtgaagattagagccgggagcctggaccaggtcctgggagcagagcagagtccaggagagtaagtccagccctgctggtgttcagaagcccggagaaggaggggaggcagcagcaggaggggagggaggctcagcacagacactggagcagcccctgagctgcagacctggctgtgtgatctcaggcaggttactcaacctctctgtgcgt

SEQ ID NO: 33271 - DNA, 993 bp, Artificial sequence
  DNA replication origin
gtccctgtgagcagtgaaaagaggggtgggagggtggaggcgtgtaggtcgaggtgagctctggagttcagggcaaggtctgggggatggacgtgcaggcagggtggccacgtggtgaagattagagccgggagcctggaccaggtcctgggagcagagcagagtccaggagagtaagtccagccctgctggtgttcagaagcccggagaaggaggggaggcagcagcaggaggggagggaggctcagcacagacactggagcagcccctgagctgcagacctggctgtgtgatctcaggcaggttactcaacctctctgtgcgtcccctctcccctcccttgtaaaacagggacaagaacagcacccacttcgtagggtaattggctaataattgcaatgtacacagagtggcgcctgacaccagcactgcataagtgttccctaaataggataaagggcaggaggttgccaggtctcctggaaacctggtgaggaaggtgtctaggggcagagggaagggagtggctatgtgatgccaccgccaagtcagcctgaggactgagcagggattcgcctagcagacattgcttgtgactcagggaagggggccagtgcctggcaggacggatttgagggaggagaggaattggagatgtggggcagatacatggggcggggagggtcaggagacggacaggcctcaggagtggattttatgacacaagaaagggcatctggagtaaagaccaagcagtgacctgcaaatctgggggcaggggtggactgagaggctgagcccaagccaggggcggcctggatgataacagcaaagccagaggcccggaagtcaggccatgatccacacacagggcaggtgaaaatgtaagatggtgcagccgctatagaaagcagtctggtcggccaggcgcagtggctcacgcctgtaatccaagcgctctgggaggctgaggcaggcggatcaactgaggtc

SEQ ID NO: 33272 - DNA, 3669 bp, Artificial sequence
  DNA replication origin
aggggttgttccacgcgcgcgggtcgtggtcggggaaggggccgtccaggccgttgcaggcgcgcgtgccggggccggggtcgggggtccaggcttgcagggggcggggtccgggacggctggggcggagctggaccgttgagggccacggcggggcgtctccgggccgagcggggctgctgcgcccgagcggttgggggcgcggagggctggaaatcccggatcacgcgcccccgggcgccgccccgcccccgcaccttggcctagcgcggtggcgtcacagtcgcgcagtcctgactacggcctccgggccctttgtccccgctagcggcgctcggggtgggggagccaggaggggcgggagacgggcgggtatgggccgcgcgggcgcaggctcccccgggcgccgcaggcagcggtgccagagccggggcaggcggcggccgcgagcccctcggcggcggaaggccccagcgtgcaggcgcaggagggcgcggcgccggcggaagaagccctgtccccgcagcttgcgaccggagatccacgaatgtcccaagtcccaggacccggtgcgcgcggggcccccacaccggctaatgtggcacattttggggttggaaccctctcccggcctccgggtctccggtaaaaccggaccagaagtacaagggggcgtgtgcgtttaaggaggaggagcgttcaggtcttcagggccgcagggcctcggtgtccccgccaccgacccgctcccgatcccttcctgcctcagggtcccgggctcagcctcccgtccacgctccctgctcagcttcctttgccttgcagtgcgcgtcccgggacgactggcgctgtgcgcgctccatgcacgagttttccgccaaggacatcgacgggcacatggttaacctggacaagtaccggtgggcgctcgcctggggtggggcgcggggtcgggccctgggagggggccgtgttcttctgcgctgacgccgccgatcctcgcaggggcttcgtgtgcatcgtcaccaacgtggcctcccagtgaggcaagaccgaagtaaactacactcagctcgtcgacctgcacgcccgatacgctgagtgtggtttgcggatcctggccttcccgtgtaaccagttcgggaagcaggtgggctgctgcgtccccggggcccgcagaggcgggtgggtgggggtcggggtgggctccagcctggagagggcctgggagtgtgcagggggcccggactgagggggtgccagcccccgactcactcacacaccttggccgccacaggagccagggagtaacgaagagatcaaagagttcgccgcgggctacaacgtcaaattcgatatgttcagcaagatctgcgtgaacggggacgacgcccacccgctgtggaagtggatgaagatccaacccaagggcaagggcatcctgggaaagtgcgtgacctctggggacagtacggctgctggggtgggggtgggggggctgctgggatgctcacacctccctggggcagaatggctcatggctcggggggcggttgcggggaggtgctgggactctcacatcgcgtggcctcctgggggtaagatggctcagggggacatagagggctgtggaggcagccagggatgcccacacctttgtggcctcctggggacaggatggctcgggggcctgtggggggctgttgggactctcacactgcatggcctcctggggtaagatggctctgggggggcttgggggcactgtggctgtggaggcagccggggaagctcacacccttgtggcctcctggagacaggacagcttggggactgtggggggctgctggggacgctcacgtccatgtgcttcttttccagtgccatcaagtggaacttcaccaaggtaagggggctgtggggggtaggggaccagcttcccctggccacagccgtggcccagatgggcagcggacaggaagggcagcctcagccccttgcaggggtggccccacagtttggacaccgtctctccacagttcctcatcgacaagaacggctgcgtggtgaagcgctacggacccatggaggagcccctggtaggtcctctctagggagcccgcttgaggctcgggggcttgggaggtagctgccctaacccagctttcctccccgacaggtgatagagaaggacctgccccactatttctagctccacaagtgtgtggccccgcccgagcccctgcccacgcccttggagccttccaccggcactcatgacggcctgcctgcaaacctgctggtggggcagacccgaaaatccagcgtgcaccccgccggaggaaggtcccatggcctgctgggcttggctcggcgcccccacccctggctaccttgtgggaataaacagacaaattagcctgctggatctttctgcgtaggggcttggggggcccttttgccaggggcccctccatgtcagggccagttgccgtcagctgccaggctgggggtgccatggaggtggcgtgttgttgccccctcttcctccaggctcggggggctgtgctggctgcagtgctggggtgcagtgagatctgggcccgttggacacccagccctggctcttaatccgtgcagccccacctgctgtgcacaggcagggcctggtgtagtgccgagtcttggaggagataattctaagtggctgtgcttcctggccccgggccttaactgttaggaggtggctactggggcctcccctggccaggaagcagaagtgcagaggcccgaggaacagcgtggccctggtgctggggatgggttgggcacccacaccggcccttggggcctcacctggctggggggtgtgggggtggctgggtggttactgtttgcacagagtccctccgtgagggctggggatggacaggccaggaggggctggtagagcagtaccagccaccgttcatgggacccgggggctgtctggacacggcctggctgcccacctgcacagctagagggactgcagcctgccagggtggctgatcccagctgcccccactgggggtctgtggaatggacggtccatggcacctgccccagacactgggttgagaggtctgtctctcccagccctcgtcccctctcatccacatggggccagcacaggcagtgggcagaaaggcctggtaaccaggagagcctggggggatgcccacacacccctgcccttccctccctgtcccacaggctgaggagcagactccgtgggaagtaggcaaaaggcacatatatttaaaaaagtcctttacatatgtacatcagaacttgctataaatacatagaaaccgcaggcgccaccctgccagctccgcggcctggggcctgggagaggtgagcgggcaataacttaggggtcagggaagggctgggggagggagaattgcatatattagcaggggtctgccccacggagcccccgagacgcggggccctgagcacctggggtttcctgagtttctagctcttgggaccacccggtttcacggatttcaagggtttgggcccactgagcccttgtgggtgcccagtcccagagcagccacccggagccccttcctacttgggaggagaggcacagagagggccctgccacgccccggc

SEQ ID NO: 33273 - DNA, 3211 bp, Artificial sequence
  DNA replication origin
gggacccaagaggcacagaggggcccaagggtccccggggactgtggacccgcgcacttctggagtgtgtgtgtgccaggtgcgggcgcgagtggccgtgtggcgggtggtgtccgcgccccgcaggcctctcgctgccccgggacgtcctggtgacctggagcgggggcctagtgggtgaggaggtggcggcaacgctggggcgggccttgcaccaaccgtgtcccggccccttctttccccctagctcgtggccatcatctcggaggcctccagctcgggtgtctccctccaagccgaccgccgtgtccagaaccagcggcgccgcgtgcacatgaccttggagctgccgtggagcgccgaccgcgccatccagcagttcggtgagtccggccccgcccccagcgctgcctggccccgcccccaacatggtctcggccccgcccccgcctggccgggccctgagagcagctctgcccccaggccgcacccaccggtccaaccaggtctccgcgccagagtatgtcttcctcatctcggagctggccggggagcgccggttcgcctccatcgtggccaagcgcctggagagtctggtgagcaggtgggggtggggctgagaaccagggacaggcccaggaaggctctccaaagctttgtggggtgctagaggccagaccccaggtgaccaactgatggcctccccacccctggcagggggccctgacccacggagaccgccgcgccacggagtcccgtgacctcagcaagtacaactttgagaacaaggtactgcagggaaggcagggttggggggcggggcaggggcaggggtctagggagggccggatctaagagcctgggggagggggtagatgggggctggagaacgtggggctcagtggtctggaggagggccgggtctaggacccccaggggggaagggggcttctaggggctcagggaggtggcatccaggggtctgggggaggacccagtctaggacccccggggaggaggtggctgagagctgggggaggtggggtctaggagtctaggggagggcagggtccaggggcctaggggagggtggggttctggggaggcaggggtccagggaaagccagcctcctccctgggcctcctccccgagtcaccttctccccctagtatggcacccgggccctgcactgtgtcctcaccaccatcctgagccagactgagaacaaagtgcctgtgccccagggataccctggaggggtccccaccttcttccggggtaagctgggctggtgggggtcttcctgggaggggcaggggttgcagagcactgggctccagagcagctggggcagcaggctttgtaggccggttgtgtgttgagtgacccctccccacacacggacagagagggctgtgaaggcaaagggagccaaggcggcccccagcagctgccgggtgggtttccagggcagctgaggggcctggggtttgggtttactccccaagaacatgctgttctcactcctgtaagtcaggcaaaaggctccgctcctggccctggccctggccctaggctgcagctgctccccagccccccagggagctgctggtctctggaaaaggagctaggggcttcgagggaggggcaggggtgggaagaccagcatgtgaggcccctctccccgcagacatgaagcagggcctgctgtctgtgggcattggtggccgggagtcccggaatggctgcctggacgtggagaagggtgagtgccccacacccaggcccagaggcgctcctgtctctcatctcatgcaaccttggcctcgggtggtgagcaaagcagggagagggattcccagcgcagcctgaggcttggctccctcccctaccagactgttccatcaccaagttcctgaaccgcatcctggggctggaggtgcacaagcagaacgccctgttccagtacttctcagacaccttcgaccacctcatcgagatggacaagcgggagggcaaatacgacatgggcatcctgggtgagcacaggtgccggggtgtggtgtgggtgggtgtgggtgcggggctcgtgggaacgccatgcatcctgggtgggctcggggctcgtgggaacaccgggcatcccgggtgggcgaggggctcgtgggaacaccgtgcatcccgggtgggcgaggggctcgtgggaacgccgggcatcccaggtgggctcggggctcgtgggaacaccgtgcattgtgggtgagcacggcgagggcctaggtgggcaaggggctcgtggaagcgccatgcatcctgggtgagcgagggtactgggtgagactgggcggatgcaggcacagggctcgtgggatcaccgtgcacgtctctggaaggtgcccaggctggtgcacgctgcccaccatgctcatccccaggcttcacggggcacctgctacattgttgtgaacgaaaggccggcgagcctgtgcttccagcctcatggggccaggcctgtccatcaggaccacttccctgtgtccagatgagggtcgggtccgggccatggctacttcactcatgagcagtgccgcagccaaccaggctcccacgatcccccacagcctgcttggggtcacccagcacctgagcagcccccaggctcctacaatctcctcacagcctgcttggggttacctaggatctgagcggcccccaggctcccacgatcccccacagcctgctcggggttacataggacctgagcggcccccaggctcccacgatcccccacagcctgctcggggttacctaggacctgagcggttgccaggttggggcccacgtgcaccatccccacgctgggccaggtcaggccaggatccaggacaccctctcctgtgctctcggggggtcgtctctagggtgcgccccggctacgggactgaccctggccccagcccacagtcccaggcctggacaccacttaccctccacccgcccccctagaccttgctcccggtatcgaggagatctacgaggagagccagcaggtgttcctggctcccgggcacccgcaggacgggcaggtggtcttctacaaggtcagcaggaagccccacagcccctcacactctgcccaccccgcccccaccacactcacacccccccaccccgtgccgtggcagatcagcgtggaccgcggcctgaagt

SEQ ID NO: 33274 - DNA, 5374 bp, Artificial sequence
  DNA replication origin
tgcgagcaccctgtgttcttggaaggagctgagcctgtttgccgcgggcgcggagtctgtgcagtttgcagcacggcttccccaccacgagtgttttggtttttcaggtttttgccgtacaggtagaggcagtgcctcttacagtgcacacccccagcacccccatcctgccctaaattccacctggcgtggggatgccttgcccagggctggcggcaggtgggccggggcccgggtcgggagccaggagccacagctcaggggcgccttgtgacgtgtcattgcagtgggccgaggccctgaacgtgttccagcaggcggccgactggatcggcctggagtcgcgcaagtccctgtggggccagttctggtcggcacaccagcgcttcttcaagtatctgtgcatcgcagccaaggtgcgccggctggtggagctggcccgagaggagctggcgcgagacaaggtgagcggctgcggccttcgagggctgagggcggccgggcctgcaggggcggaggctgctcttcttccaggtccttcctggcccctccccagacgtgggcgggggctgcaccctggtgggtgagagacgcccggatgtccgtcttccaatcagagccagccagggtgtcagaacagcggagtgtgaccacacagtgggcagctcaccatcccgagacaggcagccggcagacccccacccagcagtgtgtgttgtaggggggccgtggcccctcctggggaggcgagcacagcagcagagtgagggatgtggccatcaccccaggcctggcaggttctggccccacagaggccccacagcagggctggtggctcacagtcctctgccgtcccacagtgcgtggtcatcgggctgcagtccacgggcgaggcgcgcacgcgggaggtgctgggggagaacgatgggcacctcaactgcttcgtctcggccgctgagtaagtgtcacggtggggacaggactgtgggcttcctgcgctcatggccacccctctctgtggccacctgtggcctgaccctgccccttggccccagcagcaggaggtgctggggtgggctttgctgggcccccagcctcagccacagaggccttcaccgctgctccaggtctaaagcagaggcttggaggtggaccccaggcatggtgggcctggaaggtttgggacatggtctccaggggtctcagaaggaggcttcctgcatctgtgccgttttaacaagggggctgtggattttaggggctggccctcccagctgtctgaagccccagcctctcccctgttggttgagaatgccccgggagggtcacagcagcccccctagatccccccattgcctgggggtcggagctccccaatgcccccagctaccccttcaccctgccccctgcccctgtcctgggagccatcatcatatccggccacattcctcagagcgggggaagcctggtggccgaggtggccctgtgacaccaggaggccagaggagagctcacaggcagcccccagtcctccccagcccactccacacaggagaccctctgcccaggcccggtcctgtccgggacccccacagggacccaggggtgcgtccagctcctggagagcaaccccgcctggcctcagctcctcgtgtgagaataaactccgcgtctcactttcagaggcgtgttcctgtcgctaattcagaagcactttccgtccaccaagagaaagcgggacagaggagcgggcagcaagcggaaacgtaagccctgccccccatggccccacccacccctgcccctctgctttctccccccgggggctggctggtcgctccctgcttcccccactcccccgtccactcagccaaatgcaggtcctgtccgtgccaggcaggctcaaggctccgctgccagtggcaggtcttgcgtggaccctgccatggaacgcttagggaagaggaagcaacagacagcctgaaggacacagacgtgggtgccgagcgagacccggggggcgggacacggacgcgggtgctgagcgagacccctcccaccttccgttttcagggtctccacggtcccttggggagcccattgataacccccaggcttctgtcacagggaagcccagagctgcctgtcgaagtctggtgtgtggcctccccaggcaccccgcgtgtccaccatactggccaggcctgaaaggacgttggatatgggtttattaatattgtcccgttggctgggcgtggtggctcacgcctgtaatcccagcactttgggaggccgaggcgggtggatcacctgaggtcaggagtttaagaccagcctggccaacatggtgagaccctgtctctactaaaaatacaaaaattagctgggcgtggtggtggacgcctataatcccagctacttgggaggctgaggcaggggaatcgcttgaacctgagaggtggagattgcagtgagccgagatcatgccactgcactccaacttgggtgacagaaaaaactcttgtctcaaaaaaattaataaaaataaaatattggctaggtgcagtgggtcacgcctgttgtaatcccagcactttggaaggctgaggcgggcaaatcacctgaggccaggagtttgagaccagcctggccaacatggtgaaactccatctctactaaaaatagaaaaattagccaggtgtggtggtgcatgcttgtaataccagctgctcaggaggctgaggcaggggaattgcttgaacccgggaggtggaggttgcagtgagctgagatcgcaccactgcactccagcctgggcaacagagtgaaactccatctcaaaaataaataaataagccaggcgtggtggttcacgcctataatcccagcactttgggaggctgaggcaggtggatcacgaggtcaggagatcgacaccatcctggccaacatggtgaaaccccatctctactaaaatacaaaagattagccaggcgtggtggtgggcgcctgtaatcccacctactcaggaggctgaggcaggagaatcgcttgaatccaggaggcagagagtgcagtgagatgccaccgttctccagcctggcgacagagtaagactccgtctcaaaagaaaataaataaataaaatatggccccccacaccgtaccctcctggccacagggcacggggttccctagagggcgtccctggagaacagctgagctgcttgcccagaggcagggggttctcggatggacctccccagctcggaccactggccttgctctgtcctgctgcgtctcctccacctgctcctccaccttgctgcggtctggccctcggtgaccctgtccttccctgcagggcgacctcggggacgcggggccaaagccccccggctggcgtgcgagacagcgggcgtcatccgcatcagtgacgacagcagcacggagtcggaccctggcctggacagcgacttcaactcctcccccgagtccctggtggatgacgacgttgtcatcgttgatgcagtcgggctccccagtgacgaccggggtgagggcttgcccaggctggccagccacctgtgggtcaggattccagtccaggctgagcagccacctctgggtcaggattccagcctgaggctcccccggcctcctggcggtcaccacccaccccaggttgtagccctcagtccagcccacctgagcccagctgctgctatggtgcccactttacagatgggggaaactgaggcccagagaggggaggtcaggggttataccactggtcagaggcagagctggggcttggggctgggcagtccctacccctgtggaggcagtgaggtcacagtgtttggtccgcgacaggaggcttagtctcgccccagctggtctcagggagacaagtgcagaaaagcagtcctgggccacggtgccgggcttccccgccaccctgccgtccctcagggttgccccgggccccttgtccttgccctccaggggccagccttgagttaggtgggccctagaaggcagccaacatgtcctgccctgaccctccacctcctccctaggacccctgtgcctcctgcagagagacccgcatggccccggggtcctggagcgggtggagcggctgaagcaggatctgctggacaaagtgcggcggctgggccgggaactgccagtcaacaccctggacgagctcatcgaccagctgggcggcccccagcgggtggcggaggtgggtgggacgtggcagctggagtgtggtgggcggggcatgggcagtgggtggggcttcacgcaggctgtgtgcagctctggtggcccctgctggtcactctgcgtctccgcggccctgcgaggagggggcgtttggggagccctggggcagcagcgtgctgtccagctcggcccgggaggccacgacctcctgtggacggcctgccccatccctctaagccccagatcccccagcctggcctgcgcaggcctctgcttagatcgttgcctgaacgcaccccttggggtgcccagggccaggacacaagcccctgggcctggttctgcggcctcctactccctgcccccgcccagcttcactttttcacttcgtggcgccggctggctgataataccaggccttggacaggcacacatcgcctgggtccagcagtcccgccctccctttcccagcacccccacctcccgtgcacagctgggagcccatgaccactgtaggacatagggaagctgagacacgggtggccagactcctgcgaggccacaacactgacggccggttttgtccctgtctcggctgcagatgaccggcaggaaaggccgcgtggtgtccaggcccgacgggacggtggccttcgagtcgcgggcagagcagggtctgtccatcgaccacgtgaacctcagggagaagcagcgcttcatgagcggcgagaaggtgcggggctgcagtgcactgggcgcggcccacgggacccaagaggcacagaggggcccaagggtccccggggactgtggacccgcgcacttctggagtgtgtgtgtgccaggtgcgggcgcgagtggccgtgtggcgggtggtgtccgcgccccgcaggcctctcgctgccccgggacgtcctggtgacctggagcgggggcctagtgggtgaggaggtggcggcaacgctggggcgggccttgcaccaaccgtgtcccggccccttctttccccctagctcgtggccatcatctcggaggcctccagctcgggtgtctccctccaagccgaccgccgtgtccagaaccagcggcgccgcgtgcacatgaccttggagctgccgtggagcgccgaccgcgccat

SEQ ID NO: 33275 - DNA, 2018 bp, Artificial sequence
  DNA replication origin
cccgcgtgcgcgcctcgcccgtggactgcagcccgatgaccacgcactgtgggacggcagaggactgtgagccaccagccctgctgtggggcctctgtggggccagaacctgccaggcctggggtgatggccacatccctcactctgctgctgtgctcgcctccccaggaggggccacggcccccctacaacacacactgctgggtgggggtctgccggctgcctgtctcgggatggtgagctgcccactgtgtggtcacactccgctgttctgacaccctggctggctctgattggaagacggacatccgggcgtctctcacccaccagggtgcagcccccgcccacgtctggggaggggccaggaaggacctggaagaagagcagcctccgcccctgcaggcccggccgccctcagccctcgaaggccgcagccgctcaccttgtctcgcgccagctcctctcgggccagctccaccagccggcgcaccttggctgcgatgcacagatacttgaagaagcgctggtgtgccgaccagaactggccccacagggacttgcgcgactccaggccgatccagtcggccgcctgctggaacacgttcagggcctcggcccactgcaatgacacgtcacaaggcgcccctgagctgtggctcctggctcccgacccgggccccggcccacctgccgccagccctgggcaaggcatccccacgccaggtggaatttagggcaggatgggggtgctgggggtgtgcactgtaagaggcactgcctctacctgtacggcaaaaacctgaaaaaccaaaacactcgtggtggggaagccgtgctgcaaactgcacagactccgcgcccgcggcaaacaggctcagctccttccaagaacacagggtgctcgcagccacgcctctcttgctttggaccagggtctcacccaggtgtgatcctgtccaggggacactgggcatgtctggggctggctgtggtggtcaggtttgggggctggtcccggcatgactgggtgggctgggttagggtggctgggactctggccacggatgctgctccataccccaaagtgctcaggacggccccaccccggagagcaacccggccctgggggttacgggagatgctggttgtgtcacctaaagaaacgagtgaagaggctgggtgtggtggctcacgcctgtaatcacagcactttgggaggctgaggcggtcagatcgcctgagctcaggagtttgagaccaaccagcctgaccaacatggagaaatcctgtctctaccaaaaatataaaattggccgggctggtggcacatgcctgtaaccccagctacgcgggaggctgaggcaggagaattgcttgaatctggtaggcggaggttgcggtgagccaagatcgtgccattgcactccagcctgggcaacaagagtggaaaccccgtctcaaaaaataaaaaaaaaaaaccatcgaacatacagggctgttgggcgtgagggggagaaaacaggacctgtccaaacatggagggaacgaccaagccacatggcccacagcaatgtggatgctgaacacggctaccaactgccagctgtgggccaggacctgggggcaaagggcttgggcaccacaggaaggggggcggtggtttggtcccatccctcgttatcacagccacataaaaaccccagtgatggccgggcacgtggctcacgcctgtcatcccagcactgtgggaggccgaggcgggcagatcacttgcggtcaggagtttgaaaccaacctggccaacatggagaaacaccgttctctaccaaaaaatacacaaaattagctgggtgtggaggcgggcacctgtaactccagctactcgagaggctgaggggggagaatcgcttaaacccaagaggcagaggttgcagtgaactgagatcacaccacagcactccagcctagatgacagcacgagactgtctcaaaaaaacaacaaaaaaaaaaccccagga

SEQ ID NO: 33276 - DNA, 1751 bp, Artificial sequence
  DNA replication origin
agagcccgtggggatggagccactcggagcgcgaggcagagccagtcgcagagagggcggggtcggcaggagcagagccctggcggccactgaggcagttggcagctgagcctggcggggacggggcaggaagggctgcggaggggctggcttccctgggagtgctgggcagcccgaggcagtgaaacgagcgacccacattcagcacctctgggtgctggggaagcacacgtggcagtgccaggccttgggctgatgggcctgaggcctcctccccaccccccgccgcccctccacgtgggtgagaagggcactcacctcttctcgatggcgtgcaggaactcctcaaagttccggaagggtgtgccctcgccccagatacccaagcggctcatgtagatcatgttccgaggctcagaggcacctgtggggggaagctgccgtcagctccccaacccgggagggcccagaggccgcgtcaggggacgactaagttgggaccacccgacgaggggccctgcggggttggagccatgggcctgaagagagccagcgtggccttgggacaggcgcagaggtgccccagtgtccgaggaggagcagggtgcagacggaggctgagtacgcgtgtgggataccccttcgcggggacagccaggcagaaagacgctgctgcgggtgggtcacgtgggatccgcaccgccccacctgtggcgctggcgtagaccacgcgggccaggggcagcttgttctgcaggtctagcacagccttgcccatcttggtggagccggcattcttggctttgtgacactcgtcgaacacgatctgaggcacacgtgggttaaggagtattctgaaggacgggggcgaccccaggagcccaggtcctgaccacccaagaccccaccttcctggtggggggcaaacgcctgtgcggctgagaactccacgagggaagcccaggtcggagtggcagccggctaccatggggggcgggcgggcaggcggcccccacacgaccattagatgggtgtggcctgggatggctcctcccagactctaaacaacacacaccgaggatggggcctccggcgaggaagggtgggatccctaaaccatgatatcgcaggacgttgccatcggaggaggatacctggaacctgttttcttttttgtttgtttttttgagacagggtcttgctctgtcacccacgctggagtgcagtgatacaatgtcagctcactgcaacctctgcctctcagattcaagtgattctcctgcttcagcctcccaaggagctgggactacaggtgtgtgccaccaccacaaccggctaatttttgtagttttggtagagacggggttggccgtttggttggccagataatctcaaactcctgacctcaagtgacctgcctgcctcagcctcccaaagtgctgggattacaggtgtgagccgtgcccagccctaattctttgtttttttttgagacgaagtctcgctctgtcactaggctggaatgcagcggcgcgatctcagctcactgcaacctccgactccctggttcaagcgattctcctgcctcagcctcctgagtagctgggattacaagtgtgcgccaccacgcccgggtaatttttgtattttcagtagagacggggtttcaccatattggtcaagacagtctggaactctttttttttttagatgagacacagtctcgctctgtcgcctgggctggagagcag

SEQ ID NO: 33277 - DNA, 1867 bp, Artificial sequence
  DNA replication origin
tccgtccttgctcctccagccaagatcgggaagcagcacccagaccgcgtggtggagaccagcacactgtccagcgtcccacccccagacatcacctacaccctggccctgccctcggacagcggggccctgtctgccctgcagctagaggccatcacctacgcctgccaggtgaccgcatgtccccaacccagcccagcctgtgtccgcgaggcccctggggaggggccgggccagcacccccaggccctgacgcctgctctccggcaacagcaacacgaggtcctgctccccagcgggcagcgcgcgggctttctcatcggcgatggggccggcgtgggcaaaggccggacggtggccggagtcatcctggagaaccacctgcgcggccggaagaaagcattgtggtgaggccctgcctggggcagggggcgggagcgggggtggggggcggaagcggggggcgagggggaagggtgggcgcgcctgacgcccccaccccgcaggttcagcgtctccaacgacctcaagtacgatgcggagcgcgacctgcgggacatcgaagccacgggcatcgcggtgcacgcgctcagcaaggtaggggctgtgctcggcaaagtagggggcaaggtggggaccgtgccctgcaaagtgggggctgctcagctgggtgggccagcagccagggcaggctctgcccagcacccttacagatagggagacccaggtccagagcctgctgagccggggccccattccacacctgttctgtgcatccccagatcaagtacggtgacaccactacctcagagggcgtcctcttcgccacctactccgccctgattggggagagccaggccggcggccagcaccgcactcgcctccggcagatcctggactggtgtggggaggccttcgagggcgtcgtatcctgctgggggcaatcgggaggggagggctggattagggggtcggagggaaaaggaggatggaggagtgggagaggaggggtgggagtcaggggagaggagggcaggatgggagagggtaggagcggaggggtggggctggggaagggctggaggccactggagctcactaccctggatgtggccacccagcccccagctttgctcagggtttaggactccggatagaagacttttctggtcctgggaggctggccctgtgggtaccacacaagtgaccatcatcattcaccacagggctccggcttggtttcttggttctgataagtgggatgagtgaccatagatgtggtcctgatgtttgccatgatgccgtgggcagagggtggccactgagctgctccccaagtcaggaaggtgccaaccccagctgatagtgtggtgggcacagttcactccccagcatcccagggctctcgtcggcaggctgcggttcggaggggctcccccacaggagacccaggacagttagcagcaaaggcacggcagggcaccccttggccaggctcagccctggtgctcggccctgcagggtgcaccttgggtgttggggtgttgggagcacaggctcagataagggagggacgttggcctgcagcatccacttcatgcacaggacatggccatggctttgctgttcagttaacgccgagacacagaacattcagactggccagaaacagaacgggagactgctggtgtcttcgcacccggctgaacaatctatgtgcaacaatctacgaaatagcgataaccctgagatcatacctcgctgagctgctacgtggcggcagggccggccgtttaatttgtattctcccagttttccttcctcagactgctttcctggaacttggctttctttcgtcttaaaatat

SEQ ID NO: 33278 - DNA, 1289 bp, Artificial sequence
  DNA replication origin
tgctgggcagagcctgccctggctgctggcccacccagctgagcagcccccactttgcagggcacggtccccaccttgccccctactttgccgagcacagcccctaccttgctgagcgcgtgcaccgcgatgcccgtggcttcgatgtcccgcaggtcgcgctccgcatcgtacttgaggtcgttggagacgctgaacctgcggggtgggggcgtcaggcgcgcccacccttccccctcgccccccgcttccgccccccacccccgctcccgccccctgccccaggcagggcctcaccacaatgctttcttccggccgcgcaggtggttctccaggatgactccggccaccgtccggcctttgcccacgccggccccatcgccgatgagaaagcccgcgcgctgcccgctggggagcaggacctcgtgttgctgttgccggagagcaggcgtcagggcctgggggtgctggcccggcccctccccaggggcctcgcggacacaggctgggctgggttggggacatgcggtcacctggcaggcgtaggtgatggcctctagctgcagggcagacagggccccgctgtccgagggcagggccagggtgtaggtgatgtctgggggtgggacgctggacagtgtgctggtctccaccacgcggtctgggtgctgcttcccgatcttggctggaggagcaaggacggagggcaaggtaaagggtatggccaaggggtgaccagggccggttatggcacgctgggcgggtctggggcgtggccagagctggcggggcagtttgggggcgtggccaggtcccgttgggcgggtcatgggcgtggccaggaatgcctgggtggaggagtggtcagggctggccgggtcgggggtgtggccgcggcctgctgggttggttgggggcgtggccagcggcttgcaggaggggcaaatgcataaaaatcctcccagtgcctctgaggttcctttccacttctcccctctgcgaaccccggttttgtataagcctggattgtagaacctgtccccgggctctccggccctccctgaagcttcacattccctctgtgggctgtgcgggcggtggtcacctgcagggtctcggtcccacaaaagggtttgaacctgtcccagggctgggtgcagccgggccactcacacttggacggcacgtagtcggcgtaggtctctgtgtgccccagctcctccgcctcctcctcctcagcctcgtcctcctcctctggctggctctgcacactctgctcctgcgtgcgt

SEQ ID NO: 33279 - DNA, 2393 bp, Artificial sequence
  DNA replication origin
ggaggagtggtcagggctggccgggtcgggggtgtggccgcggcctgctgggttggttgggggcgtggccagcggcttgcaggaggggcaaatgcataaaaatcctcccagtgcctctgaggttcctttccacttctcccctctgcgaaccccggttttgtataagcctggattgtagaacctgtccccgggctctccggccctccctgaagcttcacattccctctgtgggctgtgcgggcggtggtcacctgcagggtctcggtcccacaaaagggtttgaacctgtcccagggctgggtgcagccgggccactcacacttggacggcacgtagtcggcgtaggtctctgtgtgccccagctcctccgcctcctcctcctcagcctcgtcctcctcctctggctggctctgcacactctgctcctgcgtgcgtggcgggagctcagcggagactgcaggcctgagcggccgcgggcactgggctcccccaggggcaggggccaggctgaccatgggcagctgagtgacccaggggtgggagacggctctgtctgcccctgcagcaaggtgctcccccagggcctccatctcctcagctataaaatgggcactcccagcttctaggccagccaagcgctccccacaatggagatgcctgtgctgagccctctccttaggtcccatgagagggcaggggagggagctctcggctgggcccagctcacctggtagctgacgagaagcggggtgctgtgggagggcagaaagtcctcgaagcctgcaaacggcctgctgagctggaacagctggaaggggagcaggatgtcagcccgggccagacgggacaggtcacagctggtgggccctcgcagcctggccaccagagggaggctccccactgccccgtcctcgcctccccatcctcgctccccagggccctgggtcttgctctcctgctgttctcagggtgaccctggtgcctcccaagcctccccagtgggcacctccctggggcctaaggctcgctcctcctggccagcacctggctgccttctcactgatggccagtgtgcctgcctggagtgcccgggaggaaggtgcccggctagttctgacagacaacacagcttggtcccgcgggagctgccaggaaggctgtggacaggggtctgacaggagagacccactgtgtgccagccccatgcagtgcaggaggccctcgggggcctgggagacaaggggttgggagctccctgtcgagggggaagaggagacagaggcagtgggggcgggcgggcctgggccttgtccctcacccgatggctcccagcacacagggtgggtggcccagggcagccctgcactctccaagaacccccgtgggtgcagtccctgaggcccctcgagggcagcacctcctctgtgagagatggggcaaggatgcctgccactgtagtgaccagagaacacatcccactgcggccccaccctggggagaaggactgcccggagcctcatgcagattcaccagggtgggcagtgacactgtcctcggggagctgaccccaggccttggcagacaggtgtgctgggcctctggatgagtctgtggcccacccaggggtctccgaactgactgggcgtgtaaagcctgtgaacgggtgggtcggggggtggtgtggcccgtcgtcatgcccactgtccagacgccaacactgagacagtgtggaccccgggacggatggctgggggatggtagggtccaaactagggtctgtgtgattctggaatatatccactcttaaaaagcaaaaatcctaacagtaatacgagccataaaaaacgtaagcatggtcagggtacagtggctcacacccgtaaatcccagcactttgggaggccaaggcctcccagagtggaggtcaggatttcgagaccagcctggccagcatgctgaaaccccgtctctactaaagatacaaaaaaaaaaaaattagccaggtgtggtggtgggcgcctgtaatctcagctgatcaggaggctgaggcaggagaatcgcttaaacccaggaggcagaggttgcagtgagctgagatcacgccattgtactccagcctgggtgacagggcgagactccatctcaaaaaaaaaaaaaaaaaaaaagtgagcgtgggccgggcatggtggctcacgcctgtaatcccagcacttcgggaggccaagataggtggatcacctgaggttgggagttcaagaccagcctgaccaaaatggataaaccccatctctactaaaaatacaaaattagccaggcacgatggtacatgcctgtaatctcagctactagggaggctgaggaggcaggagaatctcttgaacctgggaggtgga

SEQ ID NO: 33280 - DNA, 1089 bp, Artificial sequence
  DNA replication origin
catggggctggatgccaccacaggtgctgttcctctgcctggacagccacattgcctgggcccgctgggcgctgcctctccagggggcccttcctgaccacgcttctctgtcccgtcaccttcctgtgcttctctagaccagggactccccgggtgcggtggacacggggcagggtccctctcaggtggggccataatgggcactgcagggcgctgggcagcatcctggccccccccaactccatgccaggagcaccgcccagatgtggtagccacagatgtcctggacgtcgccttctcctattcaggacacaagaggaccctcaactaaccacctcatccatggccacagatggcgccgacagtgacaggcacagccattggcacgcagagtgggggagactgagacctcactggaccgtgtgggtcccgggctggggaggccacgctggtgggtcggggctggctgggggcaccgggcgcactgaccttatcgtgggtggagggggcagggttatcgtcccagatggtggacacctggttgaggctgtcagccggcaggaagtcgggcgtgtccacgatgtccgacagggagtccacggacgaggagaagatggagatgttggagaagtcctcaaaataggaggagtcctggaagacaaggccaggcccggtgagggtggtacgggagacaccaaggcccctccacgcactggagcacgtggggatgggagacaccacggccctccacacactggagcatgtgggaatgggagacaccacggccctcccaggttcaagcaattctcctgcctcatcctcccaagtagcagggattacaggtgtgcgccaccatgcccagctaatttttttgtatttttactagggacggggtttcaccatgttggccagcctggttttgaactcctgacctcaagtgatctgcctgcttcggcatccaaaagtgttgggattacaggcgtgagccaccatgtgacagagcgagagagtgagactccgtctcaaaaaagaaaaaaataaacaagcaatgggtgagaaacaccaaccctcagggccacgcaggacggc

SEQ ID NO: 33281 - DNA, 990 bp, Artificial sequence
  DNA replication origin
acaaagaaaaaaaccaggcatgtcaagggggcgctgtctctccctggaagctgtgggttccgtccccctcaccttgctcagctttgcccactgcccaccctgtcagacccaagcacctgggcactgatcactagggaccttcaggaacctgcccccaaacagagacccccgggacagaggtgtccatgctgcccgcctgaggcccagagccaggtagggtgcagcaccccccaccccaggagggtaggagcagtccacctcccagagcctctggaggccccgatcggcagggttggggagcattcatcccactgaggcccacgagggccctccggacactgcccacccaggctgcagagggcctggtcacgctgacctgtggcccggaccctccgtggaagcatttcccgggcaaggtcaggggctcctgagttggtcaaggccccagccaggagcgggggtgagttgctatcgggcccagaaccgcccaggccttggtggtgcagggagcgcaggcagagcggaggagagctccccaaacccaaatgcgtgggtcacacggccagtccttccccggagctcagcgtggacagagggaagggacctcaggcagagacacctgccccacgccctcaccaggtgcccttggcccaagaagacaggacaacagggtcctcccgcccagggtcctccacccaaaactcctgccccagtctgaggaaacaccagcccgactactccagggcatccacaccacccgaccagccccaggaccgcccaacgcatctgaaacacgggcctctgagaaaccatcacagcccagaggggcctgaggagacgcctaaacaccacgtggggtcctgggcaggaaaggacatgggggaaactgaggcaatccaagcaaagcgtgggcctcaggagttaacggtggcgtacggatgttggttcatcagccgtgacagccacagacgggagatagaacagcaggga

SEQ ID NO: 33282 - DNA, 1941 bp, Artificial sequence
  DNA replication origin
ggcgccggcggcggtgactaaaccgacatgcaaatgcagccgggcggagagccgcccccgtccgccccggccgacccaatgctggggctgctgccgcggtcatgagggagccgctcccgggcagcgcttcctgggggacccctggccccccgagcgccgggaccatgtcccagctgcagctgtggctgcagtttgaggctctgaacaaggtaacactcccttcccggggcgggcgaggccctcgggggcaggggtctgggaggtgggaccccattcaggacggccgggccccctgccggagcagccggcatctcatcctagagtccgaggccgccaggatctaaaaaaatccccaccccgccccgtccgtctcttctggcagtgagagggaatctgccggaaggttccgaggcagagatttaagacttcgggctgggagcggcgccctgtgcgtaggctgggggacccgagcggagtgggggggtcgggctcagccctgcccggacgggggccctcagtgacagtggcagtggctgtcgggagggctgcgtccccctccttctgcccctggggtaggacccagagctgtggctttcctctggagaagcctcaggtggaggggctctgggtgtcttatggggctcttgtagggagcggaggctgggtgggcctggtcagggctggctctggtggcgcaggccggcaaatccctgtggctctgtggctccccatgggtcctggagcacagggcagcggcagcacatcaggtctggagtcagttctggagtcaggtctggagttggctgcccagggcaggaggagctgtgtctgctgcttttgaagcgggcagagccaggtcctcccagccaggtcctcccagctccccacctcagcccagggctcctgaaatgctacagagacaagaaccacagcgggcagccccggccctccctggggccccagaactgggggctggcggggagggatgcaagtgtcacccttgaggggccttggtgcttgccctcactacagactgcagaggggcccggttccctggggaggcactgggtccgctgagctgaggctggagggtgggtgggtcatgtggtgaaggatgcaggagcctgggccggcctggaggggctgtggagggacacacaggcgcgggtgggacttaggctgtctctgaggtgagctggtggctgctaggagtcaaatccagatgtgggcagaggacggagccactgtggggggagctggcctggctctgttcagcttcccacatgtgaacagggccagccctgggaaccccgtctccctctgtccctaatcgctgagggcacctgctagaagtgaaggcttcgagggctcatgcacctggtggggtgtcctgtgctgggaaggaccggacggggagcagggcggggcctcgaggctgcgttcttgaagcctgaaagctgcaagcactccctcattattagactttcacttttatttatttgtttttgtgacagggacttgctctgtcacccaggctggtgtgcagtggcacgatctcggctccctgcaacctccaccaactgggttgaagcaatcctcccacctcagcctcctgagtagctgggactgcaggcacatgctgccatgcccagctaatttttaaacgttctgtagacatggagtcttgctgtgttgcccaggctggtcttgaactcctgggctcaagtgattctttcaccttggctctaaaacagtaggattacaggcatgagccactacgccctgcttgacttttaactttttttttgagatagggtctcgctctgtctcccaggctggcgtgcagtggcgcaattatagctcactgcagcctcgaccacctgggctcaacggatcctcctgcctcagcctcctgagtagcagacgtgagctcccccctgc

SEQ ID NO: 33283 - DNA, 909 bp, Artificial sequence
  DNA replication origin
tccacagcccggccgtcctcccaccccctctggccctggggcctccccagctcctccaaggacaccgagaatgaccgcctgtggcccaatgtgaggtcccatcaggtgtctgccccgcggtgtctaggcccctgtgatgcgccagggtcctcacagtgcgggcaagagtgtggccgcgggcgggctcgcggcccggggttgccccagcaagtgcatcattgacacttggttttctaccaaagcgagaacgttcttttcccaggacgctaccacttgttcctgcccagggggccgaggccgggtctggccagagcctggagaggaggggcccaggctcagctctccctccgccagccccagatcaagggaggccacggggcccgctgaaccccctgggcacggacagcagggaaagagcagggaggggactttgcttcggcggcaggggcttctcggggacctcagcctgcaggggtggggtggggagagccccaggggggcgcagcagggcctgaggtgcgcttggcatgcgtggggtgctgggtgaagggaggcggtcttggccgcagtttccctgcctgtggtttgggggcaccaggaacagcagctggtccccgtggaacggaacccagctccctgcagtctggggagaccgaggcccatgcccacctgggcattctgcacgtccgccgggtgccccaaagggggctggtcctgcggcggggcacgggtggggttgcgtgttgacagcgcctgtgggagatccgccccgtacagtaattctcctcgcactgccggtaattgccctgacttacggggccggcatcatttcctgaaagtcagccccggccttagaggaagtaggcgccggcggcggtgactaaaccgacatgcaaatgcagccgggcg

SEQ ID NO: 33284 - DNA, 1646 bp, Artificial sequence
  DNA replication origin
tcaagtgattctcctgccatggcctcctgagcagctgggaccacaggtgcccgccaccatgcgcagctggtttttgtattttttgtggagatgggatctcactatgttgcccaggctggtcttgaacttcctgggctcaagctgtttgcccacctcagcttcccaaagtgccgggatggcaggtgtgagccactacgctcggccaaatccaccttttttttttttttttttttttttgagacagagtcttgctctgttgcccaggctagagtgcagtggcacgatttcagctcactgtaacctctgcctcccgggttcaagcaattctcctgcctcagcctcccgagtagctgggattgcaggtacccaccaccacacctggctaatttttgtatttttagtagagacggggtttcaccatgctggccaggctggtcttgaactcctgacctcgtgatccacccacctcggcctcccaaagtgctgggattacaggcgtaagccaccgtgccgggcccaaatccacactttaaaaaagtatattcacagagttgtgcaaccaccacctctgtctagttccagaacattccatcatcccacaggaagccccgttcccatcagctgtcactccccagcccatccccaccccctgataacctgaatgcttttcctgtctgtgtggattcctgttcaggacaggacatttcatagaaatggcctcacacactgcgtggccttctgtgtttggcgtctttcactgagtgtgaggtcctcaaggtgcatccgtgctgtggcttgggtcagagccttgctccttttcatggctgggtcgtgttccagtgtgtggacggcctcactgtgctggccctgttcctccgtggtgactgcgctgcaggagccaggctgtcatgagctgtgggtccacctgggagctgagggtccacccgggagctgtgggtccacccgtgagctgtaggtcctgtgagctgtgagtccacccgtgagctgtgggtccaggtgcctatgagctgtgagtccacccgtgagctgtaggtcctgtgagctgtgggtccacctgtgagctgtgagtccacccgtgagctgtgagtccacccgtgagctgtgagtccacccgtgagctgtgggtcctatgggctgtgggtccacccatgagctgtgggtccaggcgcctatgagctgtgggtccacccatgagctatgggtcctgtgagctgtgagtccacccttgagctgtgggtcctgtgggctgtgggtccactcctgagctgtaggttcaggcttttgtgagctgtgggtcctcctgatggcacgtgggagtgcagctgctgggttgttactccccattcgcctcttttgaggagctgcaggatggttcccaggccactgccccgcgtcctcagcagcgcttgtggttgtgggttttttgcgtggagctggtgtggagctgtctctgggagtggctgtgattggctgctgggttgagcggtggctgtgattggctactgggttgagcggtggctgtgattggctgctaggttgagcggtggctgtgattggctgccggattgagcggctccgtgggtttcttccccattggttgttttccattggcgggcggggtgcct

SEQ ID NO: 33285 - DNA, 1035 bp, Artificial sequence
  DNA replication origin
actttgggaagctgaggtgggcaaacagcttgagcccaggaagttcaagaccagcctgggcaacatagtgagatcccatctccacaaaaaatacaaaaaccagctgcgcatggtggcgggcacctgtggtcccagctgctcaggaggccatggcaggagaatcacttgagctagagaggtggaagctgcagtaagttatgatcacaccactgcactccagcctgggcaacagagcaaaatactgtctcaaataaataaagtggattttgtggtatgtgaattttgtctcagtttttaaaagacctggaaagcaacgaaacagaaagaacaagcacagactccgacttgctccccaggccccaatgtgacagcacagcccagggtccctggagcaggtcagactgaggataggggtgcgccgcctagggacctgctgggcactaccccacccacctccggcgccccgcgcccagtcctgggctcccgtggcccggtctctccctccgcctctgtccagggtgcacccctcactgaccagtcccgcagcaacgctgaccgagggctccgtgtaagcctggctgaatgcccgctgcctcagccctcacaggaaccctgccctgcattacagggagggaaacaggctacggggatgggaggggctcctcctggagggggctggggggcagacagaagaggcttccaggtggtcgtggggcacaggtggcacttcctagacactgccagtctttggtggctgggagaagggcccctcagcaggcctggtcactagagtgccccgtgcagagctgaactgtgtccccaaaatggtgtgatcatgtcctggcacctggaagctgtgtgtgtggccttatttgggaatccggtccttgcagatgtgagtggttaaaaaaaaaaaggccgcactggccgagcgggtgttctgtgcctggtgtcctcattcgaaggagacacagtcccggggaggaggccacgggacacagaagcagagatcccagccctgcggccacagccagg

SEQ ID NO: 33286 - DNA, 1256 bp, Artificial sequence
  DNA replication origin
gcgggtgttctgtgcctggtgtcctcattcgaaggagacacagtcccggggaggaggccacgggacacagaagcagagatcccagccctgcggccacagccaggggatgcccggatcccccagatgctggaggggccggaaggagcgcggccctgtccgcaccttgactttggacttccaggctccagggctgggaggggacagagtcctggcctttgaagctgtgtgtgctgcttcctcacagcagccctgggaggctggcacggctccccaggaaactgggctcccttctgtcagggttccggccaggtgcctggtatgggccctggggccgccgcctcagtgtcttctggtgctgcagccgggcagggccgaaccctggcgcacagcttcctgctgagtctccctctctaaggctgtctgtgggcggctctgccggcccctcctgcacctgcccaggccctgggcggaggctcctcctcccgggggggctgtggcctcagcacagaccaggggacagaaggtggctcttcttggccttggctgggtgtgaaccaaagacttcctgtaagaaatccccctctccctctccctccttcgctccctcatctctctccctcttttttgcccaatgccagtaactgtgggggctccgtggtgccggatgggccgaggcatctgacccctgctgaaacgcatctgcagaacagtcaatgctgcctgcctccctgcctgaaagcagccagagtttgcaaagcgcttttctgagccgtgagctcatcctgagcttcccagaagcccccgggctgccaggcagagagtgttgttaccggacagctgcgttcccaatggtccctgcagccccatggggacccgggatggatgcccggcaggtggagaggtcctcacaggacaggtggtgggcaagggggcagcacctggggaatggggatgggctgtgggtgccgagagccccaggagcccagcagagacgcaagggatctgggtgatgtcaggaagggtgaaggagcacccccaccccaggaacaggcggcaagggatgggcgaggggcagtgaggcgagcaggacctggggaatgtcctgtgtaggggcacaggctggggagaggcttgggctggggtgcggttgggggaggctggcactggggtgcagtggaggagaggctcgggctggggtacagtggggggaggctcaggctggggtgaggctcgggccggggtgcggtggggggagg

SEQ ID NO: 33287 - DNA, 1183 bp, Artificial sequence
  DNA replication origin
gtgagactcaattcacgtgacagaaaagtccccatttctaagtgaacgatgctgtggctgttacaaagtccagagctgttcagccatcaccatgtaattctaattccagatcattgtccccctagaggaggccctgtccccgtcagctgtcactccccatccctcccctgccccggcgcccacgcatccccttcccgtctctgtggcttggcctgtcctgcacatttcatagaaatgggatcacacgctgcatggcctcctgcctctggcgtctctcactgagtgtgatgtcctcaaggtacatccgagctatggctgggtcagagcctggctcctgattatggctgagccgtgttccggcacatgaaggggccccaccttgtttgtccatgatggacgcatgcaggacccactgtttttgttcatgatggacgcgtggaggacccactgtttttgttcatgatagacgcgtggaggtaccaggtaccacagtgtctgtctgtgatggacgcgtggaggggcccactgtgtctgtccatgtgtccgtgatggacctgtggagggccccactgtgtctgtctgtgatggacgcgtggaggacccactgtgtctgtccgtgatggacgcatggagggccccactgtgtctgtccgtgatggaggcgtggaggaccaactgtgtctgtccgtgatggaggcgtggagggccccactgtgtctgtccgtgatggaggcgtggaggaccaactgtgtctgtctgtgatggaggcgtggagggccccactgtgtccgtctgtgatggaggcgtggagggccccactgtgtctgtctgtgatggaggcgtggagggccccactgtgtctgtctgtgtgtccgtgatggacgcttgtgctgcttccacccgtggccgtcgtgagttgtgccgccgtgagcacgggtgcaaacttcccagtggacacgttttcgtttctcttgggctcatacccaggagtaggtatgggttgacagcagctgtgaatcgctgttagcagcgtccatatgcaggtccatgtctgtgtgttccaggcatgactgggtctggctggggggtgttgggttcctgctcgaggataaggggcccttgctgctgcagcccaccctctgtgcccagagcctcccgtgggtcccctgctccaggcccagcc

SEQ ID NO: 33288 - DNA, 1407 bp, Artificial sequence
  DNA replication origin
cggacacacagacagacacagtggggccctccacgcctccatcacagacagacacagtggggccctccacgcctccatcacagacggacacagtggggccctccacgcctccatcacagacagacacagttggtcctccacgcctccatcacggacagacacagtggggccctccacgcctccatcacggacagacacagttggtcctccacgcctccatcacggacagacacagtggggccctccatgcgtccatcacggacagacacagtgggtcctccacgcgtccatcacagacagacacagtggggccctccacaggtccatcacggacacatggacagacacagtgggcccctccacgcgtccatcacagacagacactgtggtacctggtacctccacgcgtctatcatgaacaaaaacagtgggtcctccacgcgtccatcatgaacaaaaacagtgggtcctgcatgcgtccatcatggacaaacaaggtggggccccttcatgtgccggaacacggctcagccataatcaggagccaggctctgacccagccatagctcggatgtaccttgaggacatcacactcagtgagagacgccagaggcaggaggccatgcagcgtgtgatcccatttctatgaaatgtgcaggacaggccaagccacagagacgggaaggggatgcgtgggcgccggggcaggggagggatggggagtgacagctgacggggacagggcctcctctagggggacaatgatctggaattagaattacatggtgatggctgaacagctctggactttgtaacagccacagcatcgttcacttagaaatggggacttttctgtcacgtgaattgagtctcacgtgacagaaaaggggcggggcgtggtggctcgcacctgtaatcccgacactttgggaggccgaggcggatggatcacctgagatcacgagtttgagaccaccctggccaacgtggtgaaaccccgtctctactaaaaatacaaaaatcagctgggcgcggtggcgcacacctgtaatcccagctactcgggaggctgaggcaggagaatcacttgaaccaggcaagcagaggctgcagtgagctgagatcgtgccattgcactccagcctgggagacagagtgagactttgtctcaaaaataaataaatatggtgcgcgtctgtaatcccagctactcaggaggctgagacaggagaatcgcttgaacctgggaggcagagtttgccatgagccgagatagatcacaccattgcactccagcttagacaccaaaagcaaaactccatctcaaaacaaaacaaaaaactagagaaaaacagagacagaaaagaaagaaagaaaataaagaagaaatgcaggccgggcgcggtg

SEQ ID NO: 33289 - DNA, 1419 bp, Artificial sequence
  DNA replication origin
taatttttatatttttagtagagatgggatttcgccatgttggccaggatggtctcgaactcctgacctcaggtgatctgcccgtctcccaaagtgctgggattacaggcatgagccaccgcacctggcctattgttttttgagacggagtctcgctctgtcacccaggctggagtgcagtggtgcaatctcggctcactgcaacctctgcctcccaagtgtgagccattcttctgcctcagcctcccgagtagctgggattataggtgtgcgccaccacgcctggctaatttttgtatttttagtagagacggggtttcaccatattggccaggctggtctcgaactcctgacctcaggcgatccgcctggtaactattgatacacctgagccctgagtttcttggcagccagagcaataggagaaagcagatgagccgtggacccgggcagtgcctggggccagtggactccgcagcactgttggttctgctggagagccttcacggcctggggagggaggccactgaggggcagattgattgtggggagggaggtcattgaggggagggttgatcgtgagggaggtcattgagggagggttgatcatgagggaggtcattgagtgagggttgatcatggggagggaggtcattgagtgaggattgatcgtggggagggaggtcattgagggagggttgatcatgagggaggtcactgagtgagggttgatcatgaggagggaggccattgaggggagggttgatcgtgagggaggtcattgaggggagggttgatcatggctcacctggtggtcttcacttcacagactccgagtagggccactgtgcctgggagattctgcccctgggaatgcaggaggtcatgtttgagtcaggactgggcacggtggctcacgcctgtgatcccagcactttgggaggccaaggcgggaggattgtttgagcccaggggtttgagaccagcctgcgcaacatagtgagaccctatctgtataaaaaatagaaaaaattagtcgggcatggtggtgcaagcctgtagtcccagtatttgggtcccatctatttgactgaggcatgaggatcgcttgagtctgggagttcccagtgggaggcccattgtgtttgtccgtgtgtccgtgatggatgcgtggagggccccactgtgtttgtccgtgatggacgcgtggaggggcccactgtgtttgtccatgaaggacacgtggatccagcctgggcaacataatgagacctcatctctatacaaaattaaaaattagatttacaggtcaggcgcagtgctcaagcttgtaaccccagcactttggggggccaaggcgggcagatcacctgagcttaggagtttgagaccatcctggccaacgtggcgaaaccccgt

SEQ ID NO: 33290 - DNA, 1082 bp, Artificial sequence
  DNA replication origin
caacagtgctgcggagtccactggccccaggcactgcccgggtccacggctcatctgctttctcctattgctctggctgccaagaaactcagggctcaggtgtatcaatagttaccaggcggatcgcctgaggtcaggagttcgagaccagcctggccaatatggtgaaaccccgtctctactaaaaatacaaaaattagccaggcgtggtggcgcacacctataatcccagctactcgggaggctgaggcagaagaatggctcacacttgggaggcagaggttgcagtgagccgagattgcaccactgcactccagcctgggtgacagagcgagactccgtctcaaaaaacaataggccaggtgcggtggctcatgcctgtaatcccagcactttgggagacgggcagatcacctgaggtcaggagttcgagaccatcctggccaacatggcgaaatcccatctctactaaaaatataaaaattagccgggcgtggtggtgggtgcctgtagtcccagctacttggtaggctgaggcaggagaatcgcttgaacccgccaggcagaggttgcagttacccaagatggcgccactacactccagcctgggcaagagtaagagtcggtctccagaaaaaaaagtcatgactagctgtctcgttatggcctgtggggttttacattcaccctcactcccagcccaggaacaggttctccctaccaatccctccaggtttatacaacagcaggaaacatttgcagggaatgcacacatgccacaggtcacacgatggctttgaacggtgcctccgtttcccctcgctcccgtgaaaagctactgtcaacctcatggctccaacaagctgaatatggtggctcacgcctgtaatccccatgctttggtaggctcaggcaggagaatcgcttgagcccagaagtttgagaccagcctaggcaacacagtgagacctcatttctacaaaacataaaaaattatctgggtgtggtggtgtgtccttatggtcccagctactggggaagctgaggtgggagcttgagcccaggaggtggaggctgcagtg

SEQ ID NO: 33291 - DNA, 1267 bp, Artificial sequence
  DNA replication origin
gacacggcggcaggtcctggggatcaggacggggacgtcttggaggctgtaaccgtgtggccagcacatttcctcaggtctgagtcgggagcagaggcttccgtggctggctgggctgcgctggggggcacggcgcaaagggcctcgaacaccaggctcaggtctgggctccttcctggctccgcagaaccacgcggcccagcccacaggcctgggctgactcatacccgtcccgtcccacacttggcaccgcgggaccacgcatcccgtcccacactcgacaccacagaaccttgcggcccagcccacaggactgagctgacccacacccgtcccatcccacactcagcactgggggaccacgcggcccggcccacacttggcaccggggtcagacttcctccaaatgaagttctgctgctttaacagggagatttgggtccaagctgccccacatacggacgctggagcatgaggcggctgtaggcagggtgggcagggagccgggcgggcggtgctcacagaaccagcacagtggccccgagggctccgggctgaacagatgcagcagcaattgttcaggaggggaggagcaggagaattcatgagacagagatggagacggagacagagacagagacatggagagagacagagacagggagacagagacgcagagacatagagacatagagacagaggcagagagggaaacagacgaagacagagagggcgacagagacagaggcagagagggaaacagacgaagacagagagggcgacagagacagagagggaaacagacacagaggcagagagggagacaaagagacaggtggagagggagacagagagacagaggcagagacaaagagacagagacagagagggagacagagagacagagacagagagggagacagagagacaggggcagagacaagcagagagggagacacagacagagacagagagggagacagagagacagaggcggagatggagacagagacagagagacagagacagagagggagacagagacaaagagggagacagagacagagactgagagggagacagagagatggagcatagagggagacagagacagaggcagagagagagacagaggcagagaggaagacagaggcagagagggaggcagagacagagagggagataggcagagagagattgagagggagggagacagagagagagactaggagcagggggaagagggagagagagagacagagaaaag

SEQ ID NO: 33292 - DNA, 894 bp, Artificial sequence
  DNA replication origin
agtggggaaaactgggcccggggtccacccggcgagctgtttgcagggcctgggtctgggtgagccctgggacctgaattggctccattctgctgcagccacacctgaccgcttctctctggatctggccggcttgcgcccatccccccaacagctctgaggcccaggcagatctcacatgcccattacacaggggaagcggaggcttgggggagctgagcaccaggtgaccctcgctccccggcaggccctggatgtggtccggcccagcagcagcccctggccccgggtcccacacggaggctgtggtatccgaaccgtcccagggaagccgatctctgtggcactgggtgctccagagctgccgagaggaagctggggcactgggaaccccttggggaaggctgtgagggtgggggtggggtccgcctgatgccgcagtgggaggctgtgagggtgggggtggggtccgcctgatgccgaagggggaggctgggagggtgggggtggggtccgcctgatgccgcagtgggaggctgggagcctccccgcgaccctggggagaaggaggtggaaagttctgttcctttggtatgtgagttccgttttcaggtggctgctaaggggttgggactccaatgtgcagggtgtctggacccgcctagagggagggccgtgggggcaaaggctgccaagggcatctctcccagcaccgccctccccgcaactccctctgtggcattgcccagatgctcgcagggaccccaagggctgggcggggctcactgctgacacgaagggccagtcactggctcttccccaaaaccaagccacatctctgggctcctactgccccaccgtaaaccctgcggccgaggggccaagccgaggtca

SEQ ID NO: 33293 - DNA, 836 bp, Artificial sequence
  DNA replication origin
ggggcgggaggttttctggggtgggtgaaggagggtgggaagggcacttttcccacagagggcagcagctgggctgggttctgcagggggggtaggagttggccaggcgagcagtcgagcaggctgtgcaaagggcttgggagcaggtatagccagagccttgggagactccaggagattgtggagcagctgtttgtggcccgggagtggagtggatgcttctttcctgctggtgtttgcaaacctttctatgcaggaggagagtggcccccaggcggtccctgccctgggagcaggtctgcccagggccgcctccaacccaaggcctccggctcccactgggcagagacctggacctgctgccagccctgctggagagaagcttctggagggagagcctggggagcctggcgggagggaaggaggccctggggacggcggccacccctctcccaagcgcaggagctggccaagggggccggagtggggaagggcagagaagcctccctgccagccacattttactcctgggatcatctggagagaggcgcccctgggcggggggcccccaggaccttctccttgctgtgtcctttgccatcctcagggtgacagggcggggggttccgacctgagccctccctggaggacggtgatcctgggtttctgcccgtagcgctctcctccttcgaggcgggagtgaggtgtgggtcaaggggcctgtgtgtgggggagggatggccaggctggggttctgaatcgccagaatgaacccttagccgagtcctgctgatggagcggggagggcgggatggtggccctggatgtccccccgc

SEQ ID NO: 33294 - DNA, 797 bp, Artificial sequence
  DNA replication origin
gaaggagggtgggaaggggcgggaggttttctggggtgaaggagggtgggaaggggcgggaggttttctggggtgaaggagggtgggaaggggcgggaggttttctggggtgaaggagggtgggaaggggcgggaggttttctggggtgaaggagggtgggaaggggcgggaggttttctggggtgaaggagggtgggaaggggcgggaggttttctggggtgaaggagggtgggaaggggcgggaggttttctggggtgaaggagggtgggaaggggcgggaggttttctggggtgaaggaggatgggaaggggcgggaggttttctggggtgaaggagggtgggaaggggcgggaggttttctggggtgaaggagggtgggaaggggcgggaggttttctggggtgaaggagggtgggaaggggcgggaggttttctggggtgaaggagggtgggaaggggcgggaggttttctggggtgaaggagggtgggaaggggcgggaggttttctggggtgggtgaaggagggtgggaagggcacttttcccacagagggcagcagctgggctgggttctgcagggggggtaggagttggccaggcgagcagtcgagcaggctgtgcaaagggcttgggagcaggtatagccagagccttgggagactccaggagattgtggagcagctgtttgtggcccgggagtggagtggatgcttctttcctgctggtgtttgcaaacctttctatgcaggaggagagtggcccccaggcggtccctgccctgggagcaggtctg

SEQ ID NO: 33295 - DNA, 1305 bp, Artificial sequence
  DNA replication origin
gccctgcccccgaagccgcaggtgctgaccctgggcccgctgccgcccttgggcccgctgctgccccgtgtgctccccatcctcaggttttggggcctgccgtgtgcctcaagccgctctcattcccaagggcaggcatagtgaggttttcccagagaaccatggggtggggacatcggctcctggcgagggtgttgggtaagcctggcctggagtcagacccaccagagattcggccaacctggagccactcacgcctccactgacctcgggctgagcctccaggccactggtcaccatttcccaaagcaggctccccgcaccccagccccgtgcagcttctgagaagtcagggccccgtcccgcagcagcctgagcttcccgggcacatcagcttgtccgaggggcctggaggtggtgtgaggccctcgcctgccccaggccctgcccgaggagcccccgacacccaccctccaccacaggcagcgggtgcgcgtctccctcacgcaaacggtccgatcctccacctcctagaatggggcctccaagcagggtcccggggccagcggcacccccaggtcttgtgtgagatgcagactcccgggctgcgggcctgcacatggggctgctggtagagcaagacctgtgctgagcccttcacgcgggtggttcagtgccttcagaccacaccacaagccttgggtggggtcttgtgcaggtggggaaactgaggcacggggcagttaaatgactccccaggagataccagcaggggcgggatgggaccctgactgcggggcctccctagcctctcggcctgtcaccctgcccggagggcttagccgggctgcaccgcaggtcctctgcttcccactcactgatgcccgctgtctcttctagagcgccatgctgcactgcccctactggaacaccttctcgctgccgccataccctgccttctccagcgacagccggtgagtaccgggaccctccccgcctggcccccaggcttgctcattctgaagtcacagttacaaacggagttctgggtgcagggcgcgagggcccaaagtcttgttgaggggtttggagggtggtgtgcacgtggtcctggaaggctccaccccacgggccaggtccaggctgagacccctgtttgtggaacgctgttttgtgatccatggcttccctctcctcgagagcccagcttggtagagggcggggaggtgtgggctatgggccaggggggcctcctgtggaggtgacaccaggatgggaaggggcgggaggttttctggggtgaag

SEQ ID NO: 33296 - DNA, 1054 bp, Artificial sequence
  DNA replication origin
gagctgtgggcttttgctgataaacttattttatgcaaaagctggaggagcggggcagcggtcaccccgagggctttgcctatctcgaggctgtcgggggtcctggaatcccccacccagcacctgcgggtacagaaagtggcccccggccatccgggctggttcccagccagtgtgaggtgaatgaggggcagaggtggccgagccccagggaattgcatcagggcctcatagaggagcagggctcacgtgggcctgggagaggtcactgggggactcagggaagcaggcgaacccccaaccctgttctggaagccagcgtggcccccagtcctgctgggataagcaggatgatgcccccggctggtggtgtctcccccatgaccacgggggcgtccgtgacggcagggtctcccccgtgaccgtgggggcgtccgtgacggcagggtctcccccgtgaccgtgggggcatccgtgacggcagggtctcccccgtgactgtgggggcgtctgtgacggcagggtctctctgctgcaggtgaggttggccctgtgcaggtgggggccctgctgaggggtgcccattctgcagggcacgaggtgtccacagccctgcccccgaagccgcaggtgctgaccctgggcccgctgccgcccttgggcccgctgctgccccgtgtgctccccatcctcaggttttggggcctgccgtgtgcctcaagccgctctcattcccaagggcaggcatagtgaggttttcccagagaaccatggggtggggacatcggctcctggcgagggtgttgggtaagcctggcctggagtcagacccaccagagattcggccaacctggagccactcacgcctccactgacctcgggctgagcctccaggccactggtcaccatttcccaaagcaggctccccgcaccccagccccgtgcagcttctgagaagtcagggccccgtcccgcagcagcctgagcttcccgggcacatcagcttgtccgaggggcctggaggtggtgtgaggccctcgcctgccccaggccc

SEQ ID NO: 33297 - DNA, 2326 bp, Artificial sequence
  DNA replication origin
caccgcgcccggccctgcctggggatttacctggagacagaggggctgccctctcctatcaagcagcaggacctgctccaggactccagggtctcctgggtactccctagcccaacacccaggttggcctgtggggcgaacatcacagacacccctcggcagtccatcctcagagggctttgggcagcttcctgccatgttctgaccgtccagagggggctctgagctggggccagggtacccctctcgtagcagggtccctgttgcggcccagacccctcctgtccccctccctagttcctgagtcccttggggttgaggctggatcctcacagctgccccggtggagctcgagtaccggccgtcggtcagcctcctgggccaccataaaggggactggccaagccacatccccaccggaacagctccatcccccgaaacccgccaggagcttgttccgatccaagaattctatctcggaaacacaccctggggactaatccaggagggaggggaagacagagcggcactatttatagtggcaggaaactggaatctccccagaggctctacggtggggaaataattaagcgaattatgggatgtggagacagaggagccatcttcaaggatccgagcgggagcaggaaggtgttagcagtgacagtcggggaatgcgacagggctggaacccggcgggggcactggacaccagccacagggctcaggccggggcgcacccgtgcgcgtaaccggctttgctccccatcccgtgtgtgaggctcatcccaccctccctgttccgggttccgtcacattcgggtacgtcatggacacctctgggcagggtcgactgagttcgcacacgcacagcccagcctcttccagtgcccagagtattcaattagaaataaaaatacaccggccagcacaatggttcacgcctgaaatcccagcactctgggaggccgaggtgggcacattgcttggggtcaggagttcgagaccggcctggccaacatgatgaaatcccatctctactaaaaatacaaaagttagctgggcgtggtggcgggcgcctgtaatcccagctacgcatgaggctgagacaggagaatcgcttgaactcgggaggtggaggttgcagtgagccacgatcgtgccactgcacttcagcctgggtgacagagtgagactccgtctcaaaataaggaaaggaaagaaaatcaccaggcaggctctgattgtctgggcagggtcaggtgcccatctctggaccaattatgtgctaggacctgccatctaaaggtgaagccacaccctctggctgccagagaaggtcccagggaagactctgattggcctgccatgcccatggcacccctgtggggtgggactcgggtgtgtgtggatggcaggtctcagaggagccatgggctgtgggagggaggagactagggggatagaggcagtcaggactttccccccgtcccatcccctagcctggcctgggtacaggtggagcatgttgggtgagccagggacccctggatcctcccgccctgcgaccccaagccccccgcccccttcctgcagctgcagttccctggccgtggccctgcccagcctggcccaaggcgccgtgtgtgcctgagacggactccagctcatctgaggaggctgggttggtctggagtcagagttctgttccagaatgttccggatgtgccacatggccttgggaagttcctgtttctctccagggctggctttctctcttcccaaaagggcaggaggaggggaaggatcaggagacccgggctctggagcccctgtggctggtggcccggcttcctgcaagccacttgcacggggtcttctcacgggtgcaggagctcagggtgcccaggctgccggcctctgtgcaggggaggagctgtgggcttttgctgataaacttattttatgcaaaagctggaggagcggggcagcggtcaccccgagggctttgcctatctcgaggctgtcgggggtcctggaatcccccacccagcacctgcgggtacagaaagtggcccccggccatccgggctggttcccagccagtgtgaggtgaatgaggggcagaggtggccgagccccagggaattgcatcagggcctcatagaggagcagggctcacgtgggcctgggagaggtcactgggggactcagggaagcaggcgaacccccaaccctgttctggaagccagcgtggcccccagtcctgctgggataagcaggatgatgcccccggctggtggtgtctcccccatgaccacggggg

SEQ ID NO: 33298 - DNA, 1029 bp, Artificial sequence
  DNA replication origin
tccggcccaggaggtagcaggagctgcagcccaggctgggaccggtcatgcccgagggagaggcggccggggagcaccactctccaccaccgttggactctcaggacgtccccgtctccctctgcagatcatgatgctgccgccaccgccgccaccacggagcgagaagcccagatagacgccccggcggccccgggtcctggagtcccgccgcctgctgcccggccgaggaccccaccccgcctgccgcccgatgcttgcagtggggcccgccatggacagggattacccgcagcatgaacccccgccggcgggcagcctcctgtacagcccgccgcccctgcaggtgagccccacccccggccccggcccacccgacggggtccacgggcacttgccccgctccgagtgcccggggtcacgtcgtgcggaatgctgccccagtggacgcggcgtgatctccacctgaccttcctggcccggagcccggctccacccgcccccgtgggccctggagaagggtccccatggggatgtgaatgggaggctactcatggccccagcttttcaagaagcacatttgaggagattctccctgctgcagagcttccagttccttcgccgtcagctgtagggggggctcaactttacttgtaggaacctgtcagtgagggaattacttaaaaaatatgtttctggccaagtggctcgtgcttgtaatcccagcactttgggaggtggaggtgggcagatcacctgaggtcccgagttcaagaccagcctggccaacatagtgaaacctcgcttctgctaaagataccaaacttagccaggcgtggtggcggacgcctgtaatcccagctactcgggaggctgaggcaggagaattgcttaaatctaggaggcagaggctgcagtgagtggagacggcgccactgaactctagcctgggcgacaagagtgagactccatctcaaaaaaatgaaaaataggcctggcacggtggctcacgcctgtaatcctagcact

SEQ ID NO: 33299 - DNA, 1211 bp, Artificial sequence
  DNA replication origin
aagggccgttctggcaagggtgtcgcaggtccccgtgggcagctggaagggctgccaagggtcccagctctggtggcagtgggttgtagcgtcctgactgcagggagcaggcagaggccgcggacagttgggacggcctggcagggtgacccccactgtgcctgaccacctccatctggtctctgggacaggagtcccgacccccagcccctgttgcccggccactgtctctggagcgccgggcagagacgtgcctctcccccacgggattgcacaagtgcctgcgtgtggctggacggcaattactggaagtcccggagatttcttcactccagggcttggccgggagtggccgccgcctccccttcctgccgccctcggcagtgagcatgctgggcggacgcctggaaagctttccctgccaccacgggccagcctgggtccctgcactcgccaggtagggcctggtgggggctcagcctggcgggcgtctggccgtgtgccagaggccgcggggcacgtgggagctgtccctggcgtctgatggtgtggggctcggctctgtagcccaggaacgttctcagtggggatgctggtgtgtgattagcctgaaacgaggtctgggtgctcttccagctctgcgtggcccctgacccccctccttgggagacctcactgtggagcccctgctgcctctgagggacagggctgggtccagtgtcccctgggctcccctgggtgccgggcccgggttggactctccctccacagtctcacaccggctgctgacaaagccagatgtgggggagtcagcctgcagctccactgctcacagtctgggtgcctggtcctacggctgccctgtgacctgggcagccctgtcgggcccaccttaatcgttgtagttggggccggggaggccaggaaaggcgctgtgggcagcacaaaggagttgggtggcactgctgatggcgggtgggggtgagtggggaggggaaggagcgccttttggttccggcccaggaggtagcaggagctgcagcccaggctgggaccggtcatgcccgagggagaggcggccggggagcaccactctccaccaccgttggactctcaggacgtccccgtctccctctgcagatcatgatgctgccgccaccgccgccaccacggagcgagaagcccagatagacgccccggcggccccgggt

SEQ ID NO: 33300 - DNA, 1230 bp, Artificial sequence
  DNA replication origin
ccaagcagccgtgtgtgaggatccgcctccgcctccgcctcctggttttgggccctgactcttggttggttgtgcctggtgtccgcattgttctcctgcccccatcccctcccggtccaggtctccacaccctgccaggtccccaaggcatggactccaggtcacatgccatgtgtgaagccctccccttgaagaacccggtcccctgagcctcctggggttgccgcctggaaggggcgtccacagacgtggggggctcagagaccgtagggagggaggagctgccaggagcaccgtgctggcctaggggactcggacacaggcgagctcagggcccctgctgctggaggggtccctcagctatggtgtaccccgaggacggtcatggggtcgccccagagctgcccaaggtgccccctccccaagctccgtccaccgtggggcctgggccctgctgcccatcagctcaggactgtgtggcctcagagctgaggagcgccctgagtgtggaaaaggtcagcgtagctctggggctgtggctgccgtgagatggaacctgcagcaggaaggggtgctgacaggagctgaggggagtccctgcaggggaggggctgctgagccccaaggcagggggtgggccaccccctagcactggtgggcccctggatggggaccccggtatcagcagctgccttgggcccagcagagctgtttgtggccaccagcacacggggccggggtcggggggtcccaggctctacccagagaacctgtctcccagaggaacataccgaggcttggaggagcttgggtgtctgaggttattcaactcagaaggtggagccaggctttgatcctgcctgacccagaatctttgacaaggattggccaagaccccagatcccagcgggcctgtcccttcccctaaagggccgttctggcaagggtgtcgcaggtccccgtgggcagctggaagggctgccaagggtcccagctctggtggcagtgggttgtagcgtcctgactgcagggagcaggcagaggccgcggacagttgggacggcctggcagggtgacccccactgtgcctgaccacctccatctggtctctgggacaggagtcccgacccccagcccctgttgcccggccactgtctctggagcgccgggcagagacgtgcctctcccccacgggattgcacaagtgcctgcgtgtggctggacggcaat

SEQ ID NO: 33301 - DNA, 1581 bp, Artificial sequence
  DNA replication origin
aggcggacgcagttacccggactcaggagagagctgggaggcggacacagttacccggttcctcggattctcccggatcttggtcctgtctgaggttctgccttcccagtggttgtcctgtctgggccaccagcaccttcatcgttctcttttacaacgactcccttgaagacctgatttcagaaggaagccacatcccctctgggtgtcagcgtgctgataaagcgcgggccccctcccaaggtgggaaccgtgtgacccccgcccccccaacccccacaccacgcatccctccagtcatgggactcgcgcccaaaaataaaaccaggcaggggacacgctctgctgcccgctggacgtttggctggcccgtggctctgaggctcggggtgggccgtgtcaccggggccgcgtggggagagggtctccggggccgcgtggggagagcgtctccggggctgcgtggcagagggtctccggggccgcgtggggagagcgtctccggggctgcgtggcagaggctgcgttggggtgttctcaggccccaagaccccacccagtgtcccactagggtttatcctggggattggggcagctggatgccccagagacatggcgtggtcacagctgctgcaagaaacggcggcggagtcaatgggggaagggtccggagggctcaggaccatggggtgggagccagcccttgggggcgtgggccctcggacaggaccgagtctgcaggcagggctaggggctgggggctgcgggagggcctggggatcggggcagcaggggttgtgagatatggccgaggacagggtgggaggcgatggggggctggcagtgggcggaaaggcagggctgtgggtcctgagggattgcagagggtgggcgttctcaggagtggcgggtcctgggggattgcagagggtgggcgttctcaggagtgggcacagcctgaagtgttgggttgtggggggacttggaaatgggccccgggtgcagggtcgccccagcccggcacccacgcatccccttctgtctctggatgggcccgtcctggacagtgcatagtagtgggatcacacacatctgtgcctggcgtctctcacagagcgtgacgtcctcaaggtgcgtctgcgctgtggcctaggtcggcctcgctgctgttcatggctgtgtcgtgttctggcacgtggatgggccacgccacatgctggtccactcgcctatccgtggacactgggctgcttcctcgggtggctgttgtgagtggtgctgctgtggacgtgcatggccacgtttctgtgtggtgtggaattgctcggtggtgtggtgactccagcgttagcctcttgaggaatcccagactgccaagcagccgtgtgtgaggatccgcctccgcctccgcctcctggttttgggccctgactcttggttggttgtgcctggtgtccgcattgttctcctgcccccatcccctcccggtccaggtctccacaccctgccaggtccccaaggcatggactccaggtcacatgccatgtgtgaagccctccccttgaagaacccggtcccctg

SEQ ID NO: 33302 - DNA, 2521 bp, Artificial sequence
  DNA replication origin
gcccaccagcacccacagccagagggcgggtgctgcccctggggtggaacgtgtgagagggtggtgcgggaatgtggccgcgtggcggggcaggcgggggcacccggaggctgatggctgcagagagcagcactggcgtgggcaggggcagcgccggacactctggggtctccctcacccacctcccttccctggccccctcctctgccactgcccagctctgtggggggcgaagtcctctcaggcaggcaccttggcccaggagtaggggaacctcacggatgtcttgaatgtgtcccctcctgtccccccactgtccccccgctgttcccccactgtcccccactgccccccgctgtccccatctccccgctgtctccctgttgtcaccccgtcccttgctgtccccccgctgtcccatccgccgctgcccccccactatcccccactgtttccctactgtccccctgctgtccccccaccatcccccgctgtccccccactgccccccactgtcccctgctgtccctccactgtcccctgctcttcccccgctgtcccactgtcccctgctgtccccccactgtcccctgctgtccccaactgtcccctgctgccccctgtccccccactgtcccctgctgtccccaactgtcccttgctaccccctcttgctacccccgtccccccaaggtctctcactgggctgaccctcccttggctccagcccttcaggcctcccttgccccgggctccatgttgagggacgaagcgctctgtctgcaggggtcaggacctgagacggcctgcagtgtcctccccaccagacggtcctggcggccgagttggggcctgcccaggtgcctgagcttgcagggctctctgccccatattagctgagccttgtgaaatcgccagcccccgccccctgcacccggtcctaggatgcgagttgtgcgcccgccaggtagagggtgattgccctgtcttgagcccatctggaggccagtgtgcggtggtcatagctgcaggtggggtcacggctgtggggcggcggttgcagccgcaggtggggtcatggctgcaggtggggtcatggctgcaggtggggtcgcgggtgcaggtggggtcacggccgtggggcggcggttgcagctgcaagtggggtcacggctgcaggtggggtcgcggctgcaggtggggtcacggctgcaggtggggtcgcggctgtggggcggcggtcacagctgcaggaggccatcacggctgtgaggtcaccggaggccgcaagtccgctctgtcttatggccgtggctctgtgcggggttcccgggacacccgggggcctgctccttgccatcttcaggtcctgggacgcagggagcgccttgtgcctgcccggagaacctcggctgaggtaatgcggcctccagggactgtgcggtggcctctgccgggctccatcaccacggtcgcgcccgctcgcccgggcctcgccgcctcctcctcagacctccatgtccgcctttgctggcgcaggccttgagatgctgccgggtgtgccaggagaccagaacccgggcctgggcggagcgctctggggtgtgccgtgcgccctgggtcctcccgtggtctcggttatggctctgcggccagtgtcttctcagggtctccgctttgccgtcgcgaacgtgggcacagcgtggcctgagctgctgagtctggctctgggggtcacgtcaaggctccacctaggggcctccgtgtccacatccgaaagtgcgggggtcacaaccctgctcggcgagaggacggcaggagaaccgggctccgaggacacagctccccatctgcagacggctcgggtctgagggcggagcgcgcgaaggggctccacacgacaggtgctcagggacccccagggggagggtccgcacagtggccagttctgaacatcaggaggctgagctgttgctgcacagcgtggggtgagaccctggggcgtccagccaggaagacggggacttcagcaggctcagaagaaagaggcgggaggcggccgcagttacccggactcaggagagagagacgggaggcagatgcagttacccagactcaggagagagctgggaggcggacagttatccggactcaggagagagctgggaggcggacagttatccggactcaggagagagctgggaggcggacagttatccggactcaggagagagagctgggaggcagatgcagttacccggactcaagagagagagctgggaggcggacgcagttacccggactcaggagagagctgggaggcggacacagttacccggttcctcggattctcccggatcttggtcctgtctgaggttctgccttcccagtggttgtcctgtctgggccaccagcaccttcatcgttctcttttacaacgactcccttgaagacctgatttcagaaggaagccacatcccctctgggtgtcagcgtgctgataaagcgcgggccccctccc

SEQ ID NO: 33303 - DNA, 1142 bp, Artificial sequence
  DNA replication origin
tggcgatttcacaaggctcagctaatatggggcagagagccctgcaagctcaggcacctgggcaggccccaactcggccgccaggaccgtctggtggggaggacactgcaggccgtctcaggtcctgacccctgcagacagagcgcttcgtccctcaacatggagcccggggcaagggaggcctgaagggctggagccaagggagggtcagcccagtgagagaccttggggggacgggggtagcaagagggggtagcaagggacagttggggacagcaggggacagtggggggacagggggcagcaggggacagttggggacagcaggggacagtggggggacagcaggggacagtgggacagcgggggaagagcaggggacagtggagggacagcaggggacagtggggggcagtggggggacagcgggggatggtggggggacagcagggggacagtagggaaacagtgggggatagtgggggggcagcggcggatgggacagcggggggacagcaagggacggggtgacaacagggagacagcggggagatggggacagcggggggcagtgggggacagtgggggaacagcggggggacagtggggggacaggaggggacacattcaagacatccgtgaggttcccctactcctgggccaaggtgcctgcctgagaggacttcgccccccacagagctgggcagtggcagaggagggggccagggaagggaggtgggtgagggagaccccagagtgtccggcgctgcccctgcccacgccagtgctgctctctgcagccatcagcctccgggtgcccccgcctgccccgccacgcggccacattcccgcaccaccctctcacacgttccaccccaggggcagcacccgccctctggctgtgggtgctggtgggcagcttgcgcctggcacctgtttgtgatgggggaagctgccccggcagcgaggctgagggagcgggaagggctgggcctggcagaggaagagcagccgctcacccacatccctgcagcccggctggggcccagcaagccgctcacggtccccaggccctcatgggcagccccccacccactgggtacatccaacttcatgcaccaagagcccatgaagaaaccact

SEQ ID NO: 33304 - DNA, 930 bp, Artificial sequence
  DNA replication origin
tgggctcctggggtatggggcggtgaggctgcagtgccccttccacctccaggcaaccggggccactgccgttcctcgtggggcggggagaacttgctcgccctggaccccggctcctgccctcctgccgggcccacctcgtcctcatcctaaattgaggggccgtcccccagcatgcttgagaaatgtcaggcggtgctgggccggtctggggcccccaggcttccccggcgccgcctggcctgtgcctgcgcgtggcagggtccaagctcgggagcggtggcctctgcccgtggttggcagcctggagccactgcggtccagacgcctcctgggatgctgtggaaatccacagacagcctcgtgccgcctcaccccagggcacccgagtcctcgtgctcacgggagtcgcgtggggctcagggctggagcagcctcctccctggacgagcttctcgtggcggccgcagcagtgctgcaaactgggtggcttagagcagcctgtccctgtcctggaggccacaggaagctgaggtcaaggagtagctccaggggaggacccttcctgcccctcccagcttccggggctccaggcgcccttggtctgcggccgcgtcactccagcctctgctccgtctccatgcggccgtctcccgatgtgtgggtgtccacgttcctcttttctcttaaggacatgagttgttaacagggacacagaccaccccctccagcatcctcattgtaaccaaccacgtgtgcaaagaccctgtatgcaaataaggccccacccacaggtgcgggtagatgtgagtctggagggactgtagtcaccccggtgccctctctgtccctggcactccctcttgcacctcaggaccagcctccaaatcgtcacttaccagatcctgtcttggccttgtggcccgcagg

SEQ ID NO: 33305 - DNA, 1708 bp, Artificial sequence
  DNA replication origin
caggagaaaaagacgtgtaggttagaggggaccacaggctcaagctcagcatgttaaaaggtttttagcgtgtgtggcttttagcgtgtgtgtgtgtgtgtgtgtgtgtgtgtgtgtgcgcgtgcagttgcggtctcgctctgttgcccaggctggtctccacctcctgggctcacgcagtcctcccagcactgggattacagccacgggccaccgcactggccccaaaagactgaaaataaacacaagacccgagcgggctcctcacagcagcagaagccgcgtggaagctgcttggctgccacagaaagccgcaccaccctgtccaggcggacaggcctttaaccgccaggtagcagtgaggcccgctcggagcatggggaccctgctttggagccccgcagcccggcctggaggctgtttccgcataagcatttgtgtcgtggaatctcctttccactccctcaccgggcctccctctgggctggggtctgggatctggggtctggaatctcgggtctgggatctggggatccggggatctgaagtctgggatctggggtctggggatctgaagtctgggatctggggtctggggatctgaagtctgggatctggggtctgagatctggggtttgggatctagggtctgggatctgagatctgggggtctggggtctgggatctgggatctggggtctggggtctggggtctgaggtctgggatctaggatctggggtctgggatcttgcggtctgggatctgggatctggggtctgagatctaggatctggggtttggggtctgagatctgggatctggggtctgggggtctgagatctggggtctgggatctggggtctggggtctgggatctggggtctgagatctgggatctggggtctgggggtctgagatctggggtctgggatctggggtctggggtctgggatctggggtctgagatctggggtctggggtctgagatctggggtctggagtctgagatctggggtctgagatctggggtctggggtctgagatctggggtctgggtactggggtctggggtctgggatctagggatctgaagtctgggatctggggtctgagatctgggatctgggatctgaggtctgggttctgggatctggggtctggttccccagatgtggtttcttcctaaaaggcatcggcctcacattcctggcttgggactcttgctctgtccaagggtacgggactgagtgccagcaaccaccactactccacttggctctgactctgggcctggacttccttctgttctcagggacagcagtgctgccttgggggtgcccggcaccctgctcgcatctcagccacgacgtccccctggccctgtggcttccactttcggggttggcttgggatgaagcaccaaggcccctccccagggcctcctttattccctttccaggcctgcattcggcaccgtgctgaccatgcctggtggggctgtggggtcagctgagcagccctgacctggtggagctcctgacggcggggtcagatgtcaggcagggccacgctcaactccgggtcctccctcgcatggcgggggctgctgcgcaggggttgctggatcctacctgttgggcgtgtgaccctggctcgggctggacgccttgtttgcttcagggcagtggagtcttgacctcctccggg

SEQ ID NO: 33306 - DNA, 979 bp, Artificial sequence
  DNA replication origin
acctccagtcactttttccacagccgagggctgtgtggtcagacagcacacggggagggctgggtgtgtccagctgccgggttgaagcctaaaagcgaggtcaccccaacctggttctcgtcctggcctgcccgctgtccgcccggcagtgtgggtggactctcagccttgcccctcgcctctgcactctcgcccccaacccccgggaggttggccggcacctgcaccctcgggctgggacgaagagcagactgccagccccgtggtcaccttgcctccctgctgggaggtgtggtcacccgtcacagggcccaggactcaggagagggctcagccctgcgggcgaaggcaaacctggggttctggccaagacggggatttcggatgcgtgggccccatcagctctcgccctgggcctcctgggccccgtgaggaggcggagattagatctgtcgtctgtgcgcccggcatggatgctctgcggagacgtgcttgcggagagacgccagacgcaaaaggccacggcacgtgactccgttcatgtgacgtgtgcagagcagggcagtccacagatggggggtagacgtgtggtcacgtgtccagagcaggccagtccacagaagagaagtgggcgtgtggttgcaggggctgtagaggcgggggagtgactgctgttggggacacggctgtgttttgggggagcggaatgttttggaattagaagctgtggtggtctgccttagaatacgttgaaaccgttgagtcatatgctccggacaggtgcccctcctggtgtggattgtatctcagggaaaataaaagtgtttaacagaaagtaagacctccctgtccttcggaatccccagttgtcaccacagggttgagcacggtgtccccgggaactggtcaggcagcctgcagccagcttgcatcaaggggtgatgggcagctgtcctgtctcaacccgtaggacggcaac

SEQ ID NO: 33307 - DNA, 1518 bp, Artificial sequence
  DNA replication origin
tcttggttggctttggagtctgggctagacaggaggcacccaggtgtgcaggtgcggaggagagggtgcatgttctccagccgcgtgaccatgggcagtcactgccctctcacctggcggggaaaccgaggtggagagaggttgcgccagccacccctagaccccccacccacttgctgcctaaggcctcccccaaccccaggggtgtgaggggtgtgaccagcttgggcttggcccaacccggctccagcggagtcacggatgcccctccggcagggcccatgcggaaacgccaacaccgccagagtgagctctgccccgaacaaagaggcgactgtgtcgacagaaccagtccggctcccagaggccccctcccagggggcccccatgctggggggtgggatcagctctgggaagggggcggtatcatgtaatccacagctgtaaacactcctggaggcggtgtggaggcagccccccatgacgccagcgctgccctggggactctgcatgtgtgtgtacacgtgtctttgtgtatctgtatgttgcgccatgtgcatgcacatgtgtgttgtgtgcctgtgtgttgtatggatgtgtgtattctttgtgtgcattgtacgtacgcacgtgcattctgtgtgtgcgtcgtacggacgtgtgcgcgttctgtgtgtgtgttgtacggatgtgggtgcgttgtgtgtgtgtgaatgtgcgtgcctgtggctgtgtgctcctgtgcatgtgtgtgttgctcgtgtgtttcatacgcgtgtgttttatgggtgcacattgtgtgcgtgtctgtgcatccgtgtttgtgtgttgtgtgtgcctgtgcacccgtgtttgtgttgtgtgtgtgcctgtgtgtacccatgttcatgagtcggttatgtgtgtctgtattttgtgtgttgcccgtgcctgtgtgcctgtcctcgtatgttgtgtgtgtgtattttggtggttgtgtgtattttgtgtgtgtgctcatgtgtgtgttgcctgtgcccatgtgcccatgcttgcgtgtgttgctcacacatgtattttgtgtgtgtttgtgttgtgggtgcatgtgtatgacctttgcacccgtgctcatgcaaacgtgtactttgtgtgcatgttgtgtgtgcccgcatgttgcctgtgcacctgtgtccgttatgcacgtgtccgttgtgtgtgttgtgtgcgtgctgcgtgttctcatgcacccctgcttgtgcatgtcttgtgcacgtgtgttttgtatgtgtgcgtgtgttgtgtgcacgtgtgtggcctgtccctgtgtgcatgtgtgtgtgatttgttgcgggcaggcctggaatacctccagtcactttttccacagccgagggctgtgtggtcagacagcacacggggagggctgggtgtgtccagctgccgggttgaagcctaaaagcgaggtcaccccaacctggttctcgtcctggcctgcccgctgtccgcccggcagtgtgggtggactctcagccttgcccc

SEQ ID NO: 33308 - DNA, 1524 bp, Artificial sequence
  DNA replication origin
ccgagtggggcccgggagcagcgtgtgtcggtgaaggggaagcgcaggcctcctggtgggtcctgtcccccgtagggcactcttcccaccaccccagagtcccgaagaataaggcaggtggggcctggagggaccaatccccagactgacctggggcgtggggggcaggcgttgtggagagcccacccagcgcctccagggacgccgggcacggatggtgctggggcagggacggtgggtgtctccctggatgaactgattaacattctgaaaagttaaaaaaaaaaaaaaaaaatctcttaaatgtgtagccggggcctcccctggctgcttcttcccggaatgcctgttgttcccgcctgctcagaacgtccttcctgcctgtgactgctgggacgggacgggataggtttggtgccatctgttgcacgccctgtcagcgagagtgcccggcctcggagctggcctgtgctgatgctggctgccagtttgccggggcggggggggcggttgcagtgagtgttttacagaggggcagaggaagccgaggttcaagagaagagcatgggaggggccgaggacccagggccgcagaccccgtgggcagccagcccgattacacggggattacaggcttcaaactttcttccaggcctcttcctccgggccagggcagccggcactgcttcctgactgaggggtgctgtgctgtttcgggtgccctccctgggatgtctctccctgactcggccctggaagaggagcagcggggacatgggacccagagagtttgtggcaggcccagcaggtgccgtccacgccctttcttcccagacatcctctggccttcagggatctggctgcccggccccagattttcccaggggtgaccctggtcgtggggtgatggcttctcacagtggcctgctccgggccaccttcagagttcttgccgagaaagggcgaatttgagatctggaccccttggtgggtgggatggagaacagcaggatgggggcctcagggcctcccacggcaggggagacggcagaggagacgcaggcaggctctcgtccttggagagggaaggacttggaaggcgcctgccagcccctggagtgtgatttcagagcacagggaggaggcttttgtttaactctgaggatcccggcagacatctgcccacacctgccaggagccaggagggccctggtgtggagggggctgtgcaggcaggggctggacttcagggggagggagcctgtcagagcacagaagaggcagcaggagcttccctcatccattcactctcagtttgctttggggtctggcctctccgttcatccattcactcttggttggctttggagtctgggctagacaggaggcacccaggtgtgcaggtgcggaggagagggtgcatgttctccagccgcgtgaccatgggcagtcactgccctctcacctggcggggaaaccgaggtggagagaggttgcgccagccacccctagaccccccaccca

SEQ ID NO: 33309 - DNA, 1312 bp, Artificial sequence
  DNA replication origin
tggaagaaagtttgaagcctgtaatccccgtgtaatcgggctggctgcccacggggtctgcggccctgggtcctcggcccctcccatgctcttctcttgaacctcggcttcctctgcccctctgtaaaacactcactgcaaccgccccccccgccccggcaaactggcagccagcatcagcacaggccagctccgaggccgggcactctcgctgacagggcgtgcaacagatggcaccaaacctatcccgtcccgtcccagcagtcacaggcaggaaggacgttctgagcaggcgggaacaacaggcattccgggaagaagcagccaggggaggccccggctacacatttaagagattttttttttttttttttaacttttcagaatgttaatcagttcatccagggagacacccaccgtccctgccccagcaccatccgtgcccggcgtccctggaggcgctgggtgggctctccacaacgcctgccccccacgccccaggtcagtctggggattggtccctccaggccccacctgccttattcttcgggactctggggtggtgggaagagtgccctacgggggacaggacccaccaggaggcctgcgcttccccttcaccgacacacgctgctcccgggccccactcgggccatctcagcccgctaccctccctcccgcctgtccctggaagccgggtttgaatgcgacccgcactcccacccccaacacgctctgcagactccgcccagacggccccggggtcacctaatatcagcaagcccccatcccaaaccgggggacctccatgcagaaaccgaaaaaccatctgccccagaagagaagtcggaggccccaggagcgggaggggcggggagcaaggggagggagggagacagggctgcgctgcggggccgagaaggcaagggtcctgggaccggggacaaggaggaggaaggggcacgaacgcccgaggagcctggagtcaggaatcggggcggcgggagagaccgggggtcactcccaggaaggggtcgaggtcacgaggcgcatggagtcgagagtccccaaaagggaaggccaggataccgaggaaaagcgggtgcggggtcaccaaggggctcgggggcaccgatgagtgcggggtcaagggttaccagaaaacgaaaggtcgggggtcaccaagctgcgcggtacagggagtcacccggaagagcgggaaggaaaggttgggagggttgtcgtggaaggtagggttaaggttcacggcagggggtcgccggggggcgggggggcaggtcaaggttcacgg

SEQ ID NO: 33310 - DNA, 1966 bp, Artificial sequence
  DNA replication origin
tgcgcggtacagggagtcacccggaagagcgggaaggaaaggttgggagggttgtcgtggaaggtagggttaaggttcacggcagggggtcgccggggggcgggggggcaggtcaaggttcacggcggtggtcgcggggcagcgcggggtcaacgttggcggcgaagggcggggtcggaaggggtcgcggcggagggcgggggtcccgccgcgctcgcccccgccccacggcccccagaacccccagccccgggcgcaggggtccgcggggagcgccggacccacaagcggggtcgggccaggcaggggtcgcggtggagccggggcgggggtcgcaaccagagcctcacctcgggcccgggtccggccgggcgcggagcccgcggcgcctgtttctccgagcctcgcagctgccgccgctcacttccgggtttcgggcgccatcttgggggccccgcgcacttccggtcatgccgcggggcggggcctccacctgcgggggcgtggtctcggttcgggggcggggccaccttccaagccaatcccttgaggtccttccgctattcggaaggggctgggactcctacggctctgggttcgaatcccgccctgcctggttctcttgagaccccagcatgtgctttcacctcctcaagcctcagtttcctcttctgcaccgtgctggtgaaatggaatctgctttgtggtacagcatccccttttttcctccttcctcagaaccccctccaagcctctgcatgtgccacgtcccccactggggctcactcacccgagacttttaaactgagactccctcaaaagctactaagacgatcaccagccgggcgcagtggctcacgcctgtaatcgcagcactttgagaggctgaggcggatggatcacttgaggtcgggagtttgaggccaacctggacaatatgatgaaaccccgtctctactaaatatacaaaaattagctgggcgtgatggcgggcacctgtaatcccagctactcaggaggctgaggcagtagtatcgcttgaacctgggaggtagttattgcagtgagctgagatcgcaccactgcactccagcccgggcaacagagtgagactccatctcaaaaataaataaataaataacgaaataaaataaaatgaaataaaatcatcacctctgggcctgtcagacatactctctcacgaaaagttatctctgttcattaatctctctccctaaccaaatacagttctggacgcttcagcatggtgactggcacatgggggtttgggtaagtcccaggggctacccccaagagagcaggatcctttcaggcagggccacgggggcctgaggggctcctcctctcggtggctgtggtgggaggctgccctgcgtggggagctggagtctcagggcacttttcctgtgacttgagccagtgaaggcagatccagtgtgggaggcaccaccgcctccccagcccaatttcagccatgacaatactgatacagctccctggacccaagcagccacaagccagaggcctctgcccccattccaaccccctgaaactagagttgatttctccatgactttgttaattcattcagtgacttctaatcgatgctgctctgtgcttggtcatgagctgggaaaacccagggtctcacagaggactcagctgtctgtcccaacatcagaaagcccctggtctaggggagagagaaccaggaccagacactccaatatgcgggatctctgggagggttgaaatgtctgcctagggcttcatagagggctgcatgctgaagagtgtgttgaagctggggttttgaagttcaagtaggagtgtaccaggtagacaagagtaggaagaacagtccgggcaaagaaggcctggtaaggcagataataagcaggtttaagatattttagcacctctctaaaaaactgaggccaaaagc

SEQ ID NO: 33311 - DNA, 2338 bp, Artificial sequence
  DNA replication origin
tagccgggcgcggtggcgggcgcctgtagtcccagctactcgggaggctgaggcaggagaatcgcttgaacccgggaggtagaggttgcagtgcgccgagatggcgccactgcagtccgcagtccggcctgggcgacagagcgagactccgtctcaaaaaaaaaaaaaaaaaaaaaaaaaaaaaaaaaaagtcggggccttgatcgcaaccgccccgcttcacggacctagctcagcccccccacgcaatggagtggggtcgagcctcgcacgcactggccccgcagcagccagaggggtctttcctagacccctgccaggtatccggtcgcggatagaaaaggggccggcggtctgcgcggaccgctgtggccgccaggtggcgggcgcgggctgcggcggagaggcccgcgtccgggttgagtgcgcgtgcgcgaggctgcccgcttggccgagccccctcgccgtggaccccgccccgcggtgagatcctccgggtccggaggccccttcgggagcgcagggcaagaggcaggaggaggggacgtgtaggatccgctgcaaataatccgataactgtcctcgccacattcggctaaaaaaaaaaaagtgaaaaataggccgggcgcggtggctcacgcatgtaatcccagaactttgggaagctgaggcgggtggatcacctgaggtcaggagttcgggaccggcctggccaacatggtgaaaccccatctctactaaaaatacaaaaattagccgggcgtggtggcgggcacctgtaatcccagctagttgggaggctgaggcgggagaatcgcttgaacctggaaggcggtggttgcagtgagccgagatcatgctactgcactccagcctgggcaacagagcaagactccgcctcaaaaaaaaaaaaaaaaagtaaaaaataataggccgggcgcggtggctcacgtctgtaatcacagcactttgggaggggggcagatcacggggtcaggagatcgagaccatcctggctaacacggtgaaaccctgtctctattaaaaatacaaaaaattagccgggcgtggtggcgggcgcctgtagtccaagctactcgggaggctgaggcaggagaatcgcttgaacccgggaggtagaggttgcagtgagccgagatcgcaccactgctctccagcctggggacagagcgagactcccaaagtgctgggaatacaggcgtgagccactgtgccctgccataaaatatattttagaattctcataaaatatatgtaacatgacatttattcccttttttttttttgaaacggagtcttgctctgttgcccaggctagagagcagtggcacgatctcggctcactgcaacctctgtctcccggttcaagggattctcctgcctcagcctcccgagtagctgggactacaggcgcccatcaccatgcccagctaatttttatatttttattagagacgtgttttcaccgtattggccaggctagtcttgaactcctgaccttgtgatccacctgcctcggcctcccaaagtgctgggattacaggcgtgagccaccgtgctcggccttttttttttttttttttttgagacagggtcttgctgtctcacccaagctggattacaggtgggggactggggtttcaggtggaagccaggtttacatgtgagtgccacagtttccacagagccctaggttccagatgagggcctgggttacagatcacagaggcccaggttctaggtgggggcctgggttacaggttggggaggcccaggttccaggtgggggactgggttccaggtgggggactggggtttcaggtgaaggctggggctacaggtaagttctaaagttccaggtggaggggctgacagtgtaggtgagggcctgggttccaggtgggggactggggtttcaggtgaagcctgggcttacaggtaagttctacaagttccaggtggaggggctgacagtgtaggtgagggcctgggttccagacgggagaggcctgggttccaggtgcaatcgtagctcactgcagcctcagactccatggctcaaacagtcctcccacctcagcctcacaagtagctgggagtacaggtgcatgccaccaggcctggttaatttttttaacatttcttttgtagagacagggtctcgctatgttgaactcctgggctaagttgatccttctgagtcagttgaggacaggagtttgaaaccagcctgggcaacatagtaataacccatcttgacaaaaacagcagttaaccatgcctagctaatttttttgtattttttgtagagatgggg

SEQ ID NO: 33312 - DNA, 1094 bp, Artificial sequence
  DNA replication origin
acctggcggccacagcggtccgcgcagaccgccggccccttttctatccgcgaccggatacctggcaggggtctaggaaagacccctctggctgctgcggggccagtgcgtgcgaggctcgaccccactccattgcgtgggggggctgagctaggtccgtgaagcggggcggttgcgatcaaggccccgactttttttttttttttttttttttttttttttttttgagacggagtctcgctctgtcgcccaggccggactgcggactgcagtggcgccatctcggcgcactgcaacctctacctcccgggttcaagcgattctcctgcctcagcctcccgagtagctgggactacaggcgcccgccaccgcgcccggctaattttttgtatttttagtagagacggggtttcaccttgttagccaggatggtctcgatctcctgacctcatgatccacccgcctcggcctcccaaagtgctgggattacaggcgtgagccaccgcgcccggccaaggccccgacttttagaccactagtggaggaggtctgggacacgggtctgcggccagagagaggccaggagggaggactggcgggcatttctccgcagggtgggggtgaacgggggcctgggcatcggagccggggggaacgtggggtcagcgaggggttctaggggaggaaatggtaggagagctcctgccctgcaggctggagggcaggatctgtgtgtttggggggagtcatgggtgggtaggagagatgacaggtgacagcctggaggaagagatggagggaggcttgagccctgggcggggctggcagaagcccccacctataacttgggacctctgaacctggaacccagcccccacctgggacctgggcctctcccatctgtaacccaggccctcacctagaacctctgaacctggaacccagcccccacctgggacctgggcctctcccatctgtaacccaggccctcacctagaacctgggacctctgaacctggaacccagcccccacctggggcctggaacctccaccaggaacttgtgcccccctctttggaacccttgccttcacc

SEQ ID NO: 33313 - DNA, 1110 bp, Artificial sequence
  DNA replication origin
aacctggggctctctgctataacttggggcccccacccataagccagttcccttaacagaacctgcagtttggtgaggatgagagaatgcaaagaaagcattttccccaggactaccataaatagtcataagcatcactttttcctattaccatagcattaccatttgtcacggtttacccacccgaggtcactctgcctctttttcactttattttttttttatttttatttttttgagatggagtctctctctgtcgcccaggctggagtgcggtggcgcgatctcggctcactgcaagctccgcctcccaggttcacgccattctcctgcctcagcatcccgagtagctgggactacaggcgcccgccaccgcgcccggctaattttttgtatttttagtagagacggggtttcaccttgttagccaggatggtctcgatctcctgacctcatgatccacccgcctcggcctcccaaagtgctgggattacaggcgtgagccaccgcgcccggccaaggccccgacttttagaccactagtggaggaggtctgggacacgggtctgcggccagagagaggccaggagggaggactggcgggcatttctccgcagggtgggggtgaacgggggcctgggcatcggagccggggggaacgtggggtcagcgaggggttctaggggaggaaatggtaggagagctcctgccctgcaggctggagggcaggatctgtgtgtttggggggagtcatgggtgggtaggagagatgacaggtgacagcctggaggaagagatggagggaggcttgagccctgggcggggctggcagaagcccccacctataacttgggacctctgaacctggaacccagcccccacctgggacctgggcctctcccatctgtaacccaggccctcacctagaacctctgaacctggaacccagcccccacctgggacctgggcctctcccatctgtaacccaggccctcacctagaacctgggacctctgaacctggaacccagcccccacctggggcctggaacctccaccaggaacttgtgcccccctctttggaacccttgccttcacctgaaaacccagt

SEQ ID NO: 33314 - DNA, 1601 bp, Artificial sequence
  DNA replication origin
gcggcggcgggggctccacggggctcccggcggccgaggcggcgcaggccgcaggctccgggccggggggttcccgaaggtgccgggccccgggcggcgcgtccccctcgccgcggccgccgcgcgtgtggaggaggcggagcggcgaggggggcccagcccatccaaggccgcggcagcaagtgccgccacccgcgctcccttcgccgccccgcgcctcactcgcgggcgccccgggccgcctcccccttccgcgcccgacacgccgccgccatcttgtttacctccctccccctccctgcgccgccgcggacaccgcacgcccggccgcagggcacgcctcctcgcgaggacgacgtgcccacccgttggttgaacctgccatccccggccctctgcccgccccgccgccgctgacgattggagcgtttggacccggccgggcgcccgagcggcgattggtcggcgcttggccccgcccgaggggtggatacagcgcgctcattggtcctcggagacgcccgtcacgggcagggggcgggaagcaggcatggggagacgaggccacggctgtgacctcggtggggctcgggaagggggtcgtaggtcacgggtgccaacggcctccctgaacggccgcagggtgggctgagcccggtgggcgggaacctgggcttgcggacctggaaggagcggggccacccctaccagagcccctcccccgcatccccctttggggcgaggtcaagggtcaaaaagtaacacaaagtggccaattccagtcaaaaatccttcttttgagccactcttggaccaggggaaagagaaacgctcagggcggcctctgccctatcggaactcatgggggaagcctcaggacagcgctgggacaagcccagcgggggcttctcgtgaaaaacaagagttgccaaaatatggcttgataaggttgaaaatattgaaccctcctgtgctagccccgtgccttccaccttttcctgcactagcgccaggttgtttagctggaacaaactatcttggtacaatctccgcctcctggtttcaagcgattctcctgcctcagcctccccagtagctgagattacaggcgtgcgccaccacgcccggctaatttttgtatttttagtagaaattacaggtgcatgtctgtaatcccagctactcagaaggctgagggaggagaatcgcttgaacccgggaggaggaggttgcggtgagccgagatcgtgccactgcactccagcttgggcaataagagcgaaactctgtctcaaaaaaaaaaaaaagatctcttccagaaaactgaagttgaaggaacactccccaactcaaacttattttggtatctcttttctgtactgattgctggctcacaccccaacttcttggaatctggagataatgctggataattggcatcggtaggtcccacgccccttcagagaactgcaggacacatggaagtgactcaggaaatacttggtgaccattacagacagaatccttgaagatggattctccgttcaaagaccacctcctccaagaacccctcctagtcattctctcaagtgcctggacgg

SEQ ID NO: 33315 - DNA, 1924 bp, Artificial sequence
  DNA replication origin
ccctcgccgctccgcctcctccacacgcgcggcggccgcggcgagggggacgcgccgcccggggcccggcaccttcgggaaccccccggcccggagcctgcggcctgcgccgcctcggccgccgggagccccgtggagcccccgccgccgcgccgccccgcggaccggacgctgagggcactcggggcggggcgcgcgctcgggcagacgtttgcggggaggggggcgcctgccgggccccggcgaccaccttgggggtcgcgggccggctcggggggcgcccagtgcgggccctcgcgggcgccgggcagcgaccagccctgagcggagctgttggccgcggcgggaggcctcccggacgcccccagccccccgaacgctcgcccgggccggcgggagtcggcgccccccgggaggtccgctcggtcgtccgcggcggagcgtttgctcctgggacaggcggtgggaccggggcgtcgccggagacgcccccagcgaagttgggctctccaggtgtgggggtcccggggggtagcgacgtcgcggacccggcctgtgggatgggcggcccggagaagactgcgctcggccgtgttcatacttgtccgtgggcctgaggtccccggaggatgacctagcactgaaaagccccggccggcctccccagggtccccgaggacgaagttgaccctgaccgggccgtctcccagttctgaggcccgggtcccactggaactcgcgtctgagccgccgtcccggacccccggtgcccgccggtccgcagaccctgcaccgggcttggactcgcagccgggactgacgtgtagaacaatcgtttctgttggaagaagggtttttcccttccttttggggtttttgttgccttttttttttcttttttctttgtaaaattttggagaagggaagtcggaacacaaggaaggaccgctcacccgcggactcagggctggcggcgggactccaggaccctgggtccagcatggaggtggtggacccgcagcagctgggcatgttcacggagggcgagctgatgtcggtgggtatggacacgttcatccaccgcatcgactccaccgaggtcatctaccagccgcgccgcaagcgggccaagctcatcggcaagtacctgatgggggacctgctgggggaaggctcttacggcaaggtgaaggaggtgctggactcggagacgctgtgcaggagggccgtcaagatcctcaagaagaagaagttgcgaaggatccccaacggggaggccaacgtgaagaagtaagtatggcttgctggggtcggggccgggccgggccagtcacggtgctgatggttctgtcttccttccttctctcctccctccctcccttacttcctcttaacaccctgagctggacccgtctggcgcctgtgtcctccgtgccagggagagcgtggttgggggcctgcgttacggactttcactcaggcaaggccagttgtcgcagcggggcgtgcgtttgcatgggctcttggactccagttaaaatgccctggtagcgaaaccctcctgagaagggagcggcccccaatcccctaagactagccccttggctcccccagctgtccaaggagcagaggcgcccagtggaatcagcctgtgtttgtttgggccccgagagtttgtgtgcggccgccaacacgttttctgcgcagtgtgtggccgttaccggggccaggcgaaatgtgatttgtttatcctgtcagaggggaaccctgggctgccaaaaataactgtttgcaccggcttatcagtcagcaggagggaaacgtagcctttcctcatttgccagggatgtgacgctggaagcatccctggcccccggggctggaagccctgcccgagggggactgtgcctccctcccgaattgc

SEQ ID NO: 33316 - DNA, 857 bp, Artificial sequence
  DNA replication origin
cacccgccaccacgcccggccaattttttgtatttttcagtagagacggggtttcaccgtgttagccaggatggtctcaatctcctgacctcgtgatccgcccgcctcggcctcccaaagtgctggtactacaggcgtgagtcaacgcgtgcggcctttttttttttttttttttttttttttgagacggagtttcactcttgttgctcaggctggagtgcagtggagtggtcttggctcactgcaatctccgccccctgggttcaagtgattctcgtgcctcagcctcccgagtagctgggattacaggtgcctgccacagtgcccagctaattttttttttttttttttagtagagacggggtttcaccatcttggccaggttggtcttgaacttctgacctcgtgatccacctgcctcagcctcccaaagtgctgggattaaaggcgtgagccaccgcgcccggccagcacgcttcttaatcagcatgcaggctgtgacatgcggaaaccaggggcacaggctctgaagtttgtactctggagctggagcagtcagggttaaatgggagcggctgggaagggtgtgtttccacgaggcctttctgatgtctcagtgcccagtctggacccgggtagaaggtgtggccagtgccttgagtcagtggagcagttgcctgtgcctggtctctgtgagatgggttggtcaggggctaggcagagcctgtgcctggtctctgtgagatgggttggtcaggggctaggcagagcctgtgctgggggtagcaggtgccctctaaaggggccagtgacagtctctctcccagcagtgagaaacccacgcttaggggccgggc

SEQ ID NO: 33317 - DNA, 1332 bp, Artificial sequence
  DNA replication origin
cctccctgcgccggccaccacctgccgacaccatgtctcctccatgagccatcattctacagatggggaaacgggcacaggaggactcgccctcaccgaaggcgccctgccctgcctccacctcaacggggacacttcacagcagcaggacacacagcagctgaaacgtggaagagcccaggcactcctgagcaggtcagcatagaccaagggacactgggttgtctgtttaattaaaagggaccaaggcattctgcgcaggcacgtgcgtcccccgatttatgccaggggaggagtgggggtggagccacccccgcctggtggcagtcacctccgggatgatgggtgcacatcagcttctctagatcgccaggcttcctctgacgtctccagccagaaaaagagcagaagaggaggcccagcgaaacctaagagcttggcgaggaacaggaagagcctccaggagggggaagcccggctcttggggcatcgccagccgctccgaggtgccacgttaggggcctactgggcttgcccaggcagcatggactgtttagctgacttgttgattagcaggacaggaaataggaaggagagtcataaacgccactcaagctcacagagaggtggggctaggagcctccgtctgcctagaaacagatcatacagggaagagatgggcctggccctcgccccggcctcccacggctcagagcaggactgggaggcacatggagacccaggaacacccagctccagacccgcgtgccctggtccctgaatccctcctgatgtggctgaaacaaggccctcaaggattctagagggacgccggctgagcacacgtgcaccaaagcagccacaattcacaggcagaggcgggagcagcccaagtgtccagccacagatgagcagtcaaacgcagcgtggccctccacacactggaaagtgacgcagccgtgaacagcagagaggttcggacccaggccacggcgcggatgccccttgaggacagcacactccgtgagacaagccggacgcaaaaggccacgcggtgtgtgacaccactcgtgtgaaatgttcaggacaggccaatccagaggcaggaagggaatgcgtgggtgccgggactggggagggaatggggagtgatggctgacagagacggggtttccttctggggtaacaagaatgttctggaagctgatagaggtgatagttgtgcaactctgtcaatgtactatatgccactgaattacacactttaaaaaggtgaactttgccgggtgcggtggctcacacctgtaaccccagcactttgggaggccgagg

SEQ ID NO: 33318 - DNA, 1360 bp, Artificial sequence
  DNA replication origin
gctcccgcctctgcctgtgaattgtggctgctttggtgcacgtgtgctcagccggcgtccctctagaatccttgagggccttgtttcagccacatcaggagggattcagggaccagggcacgcgggtctggagctgggtgttcctgggtctccatgtgcctcccagtcctgctctgagccgtgggaggccggggcgagggccaggcccatctcttccctgtatgatctgtttctaggcagacggaggctcctagccccacctctctgtgagcttgagtggcgtttatgactctccttcctatttcctgtcctgctaatcaacaagtcagctaaacagtccatgctgcctgggcaagcccagtaggcccctaacgtggcacctcggagcggctggcgatgccccaagagccgggcttccccctcctggaggctcttcctgttcctcgccaagctcttaggtttcgctgggcctcctcttctgctctttttctggctggagacgtcagaggaagcctggcgatctagagaagctgatgtgcacccatcatcccggaggtgactgccaccaggcgggggtggctccacccccactcctcccctggcataaatcgggggacgcacgtgcctgcgcagaatgccttggtcccttttaattaaacagacaacccagtgtcccttggtctatgctgacctgctcaggagtgcctgggctcttccacgtttcagctgctgtgtgtcctgctgctgtgaagtgtccccgttgaggtggaggcagggcagggcgccttcggtgagggcgagtcctcctgtgcccgtttccccatctgtagaatgatggctcatggaggagacatggtgtcggcaggtggtggccggcgcagggaggtttccaggagggagtcctccaccctcatttgcttttagggccgtgcagcctcccgagcggcccccacgaggctctgaggctgcatgcaggttgagctcctggcctcactgcccctcctcagggttaggactgtgctggagcctgggtgggtgtggggtggtccctgcacaggcagcaggaggtgggccagagcggtgctggacctgaaggcccgtggctccctcagctccactgaggaggctggaatagtgtcctgggccaccttccctgccggtagccggctcctgctgagggagggggtgctttcgcctcctggtggagcatcaggctcttggggcctgtgcgtccgagcatctggcctctgctgtctgaaaacagcaccttccccgccccccggccaccgcatctcctctgaatagaaggcaagtcttgcctcccaggaatggcctgtgaccttcatcagcgggggaggtt

SEQ ID NO: 33319 - DNA, 1014 bp, Artificial sequence
  DNA replication origin
ccacagacgaggatcagcacagcccatccacgcactcaacaagactcagccacaaaaaccagtgaggctctgactcgagccacagcctagctgcaccttgaggatgtcacagtgagacactaaaggacacacagtgtgtgatgcacttttttttttttttttgagacagggtttccctgtcgcccaggctggagtgcacctcccaggctcaagcgatcctcccatctcagccccgcaagtagctgggactacagacgtgtgctaccatgcccagctaatttttgtattttagtagagacagtttcaccgtgctgcccaggctggtctcgtttgaactactaggctcaagtcatctgcccacctcggcctcggaaaacgctgggatgacaggatcccatttcttgtttttttttttttggagacggagtctcactctgtcgccaggccagagtgcaatggcatgatctcagctcactgcaacctctgcctcccgggttcaagcgatttctcctgactcagcccctgagtcgctgggactacaggtgcccgcaaccacgcccagctaatttttgtatttttagtagagatggggtttcaccatgttggccaggatggtctggatctcttgctctcgtgagtcaccgcgcccggccgacaggatcccatttctatgcaatatccaggacaagccaatccagagccaggaagtggattcagagtggccaggagctggtggaggggatggagagtgacacaatgggaatggggcttgcttttggggtgaccgaacgttctggaattagaagtagtggttgcacagccgtgtgaatgtacttaatgccactgaattgtacactgtgaacgaatgagttgtacagtatgtaaattccatctccatagttttttttttcttttttaattcttaacaggaagcccaagcatggagcataaaaaacagctggggggccaggcgcggtgactcacgcctgtaatcccgacactatgggaggccga

SEQ ID NO: 33320 - DNA, 2783 bp, Artificial sequence
  DNA replication origin
gtgcaaccactacttctaattccagaacgttcggtcaccccaaaagcaagccccattcccattgtgtcactctccatcccctccaccagctcctggccactctgaatccacttcctggctctggattggcttgtcctggatattgcatagaaatgggatcctgtcggccgggcgcggtgactcacgagagcaagagatccagaccatcctggccaacatggtgaaaccccatctctactaaaaatacaaaaattagctgggcgtggttgcgggcacctgtagtcccagcgactcaggggctgagtcaggagaaatcgcttgaacccgggaggcagaggttgcagtgagctgagatcatgccattgcactctggcctggcgacagagtgagactccgtctccaaaaaaaaaaaaacaagaaatgggatcctgtcatcccagcgttttccgaggccgaggtgggcagatgacttgagcctagtagttcaaacgagaccagcctgggcagcacggtgaaactgtctctactaaaatacaaaaattagctgggcatggtagcacacgtctgtagtcccagctacttgcggggctgagatgggaggatcgcttgagcctgggaggtgcactccagcctgggcgacagggaaaccctgtctcaaaaaaaaaaaaaaaagtgcatcacacactgtgtgtcctttagtgtctcactgtgacatcctcaaggtgcagctaggctgtggctcgagtcagagcctcactggtttttgtggctgagtcttgttgagtgcgtggatgggctgtgctgatcctcgtctgtggaagggcccctgggtggttccacatctcggctgctgtgcgtcctgctgctgtgagcatctcgtgctccgtttctgcgtggcgtgtactgttcctcagggtgtgtacctgggagtggagctgctggctcacagggtaacagacctttggagaagctgcagacgcttccacgcccacccactgggtgtgaggaccttgctcctcgtcatttttgtttttgtttaattttttcttttatgagacagggtcttattctgttgtccaggctggagtgcagtagcacgatcacaggtaactacaggctcaagtgatcctcccacctgagcctcccgagtagctaggacttgaggcacgtacctccacacctggctaatttttgtatttttagtagagacagggtttcgccgtgttgctcaggctggtctcgaactcctgagctcaggtgatccacccgcctcggcctcctatagtgctgggagaaatgaagtgtctgcgacagggcggcagctgcagagggggctgtgctctctggcctgttgtgccccacccttgtgacaggcaggtgggcgtggccaactgggcggcagctgcagagggggcagtgacaggcgggtgggtgtggcaggaccccacaatgtctctttctgtggcgtctccttcttcgcctgccccttcctatgggccatccttccagctcacctgcggcccaccctccaaggagtgggaccctcggagttgggagcccttggctgcgtgggactgtactgtgtgacggagccatcaccagggctccaactcaccctggctcctgccacagtctgggctccatctgtgctaccattgcagtagtctggtttctaggaagcaaaactgttactgagttacaaagctcaattaagagtgtcctttgggaggccgaggcgggcggatcacaaggtcaggagatcgagaccatcctggccaacatggtgaaaccctgtctgtactaaaatacaaaaaaattagccggctgtggtgacacgtgcctgtagtcccagctactcgggaggctgaggcagggaaatcacttgaacctgggaggcagaggttgcagtgagctgagatcgggccaccgtgctccagcctagggacagagcaagactctgtctcagaaaaaaaaaaaagtgtcctaactgtgtcctccaaagccctcgccggccgatgacagactagagggcgctgtgctcccaccccctaccgccctgagcctggacgcgtggcccctgcagggccctttcccacagcactgtgaactcacagcttctctctagggaagggaggaggtacgccacttccacagggagatggggaggccgactccagggatccaggccatcatcctgacgttgggtcggctgatacacccctgtcctctctgtcccagggaaattcaactactgaggaggttacggcacaaaaatgtcatccagctggtggatgtgttatacaacgaagagaagcagaaaatatatcctttccggtgttgggaccgcggggcctccgtgggaggggctggggccctgggtccgcctgcctcgaggcctgctcctcttcccgtctccttgaaggagactggcacacgagggccgtggccttccctggttccccggaagtcagccattgtggcaatggctgcgcagcttgctgaaaggggccctgagccctggcccctgtgtcttgggcccgtggggtgtcaagtcccttttttctcagagtctcctcccaggctaaccaggggtgtagccacggtctgcctgagacaggccacgcgggctgaccgttgtgggccattttggtcgtggctgggcgtgtcctcgtgtcatctgtggacacccccatgggtcttacgggcacagcctccctacggggactttgcttcctaaggccctgtgcccagagcaagagccagaagtggtcctgaggctgggg

SEQ ID NO: 33321 - DNA, 1914 bp, Artificial sequence
  DNA replication origin
gacccacccggggaaggggcctggagctgctgtcacccgcccagcttccctgtggggctctgggaggagggtcggccgtgccactctgtgaagatccctgacgggccaggctgcacttcacacgggtgaaccaccatctgccgtatgagttacatttccataaagtaagcaccccctagcggctgtggccagagagggtctgggccggtggccacgccctgcgcccacaggccggcagctgcccaagacgcagaggcccctcggagtgtgcgtgtggtgagtgcccgggggggcggggcacttacagggtgaccccagccgaccagatgtccaccttgaagccggagaaggtgtccaggccgttggcaatctcgggcggctggaaagccggggagccctggctggtccggcaggtgtcgtccgccgcgaacgggtgcagtgcctgtggcggtgccgtgcagccctcagggagtgcccgggagggggcgccccagggccccccctagcacgtgcctacctcggccacgcccaggtcggagattttgagggtgccaccggtggtgagcagcaggttccccggcttgatgtccttgtgcacaatgccctggctatgcaggtactccaggccgtcaatcagctgacagaagtacctgcgggcagcacacacccgtcctggggccgaggcctccctgcccctcacaggggtcccctttgcagctgcctgggagcctcccaaacaccacaggcccagctgggaagtcacagaagtccaggcacacaggacagaggaaaggctaggtccagcagggagccacacctgcgcctgcagtggccaccctcgtccggccgagccacgtctggcagggccccggatgtccacaggtctcattttcctgtgggccacaggccggctgcaccccaaagtcttgctggaacagcaggcccctccctgcccctgtggtcctgcagcagcaaggggccctgactctgaggccacagacctgcatccaggagatctggtcagggcaggcggctgccagcgatgggctggaagcaggccactggcctcaggcagcaggcccagcaaagatggaggcgggaggttggcagcagccctgcctgtggatgccacacatgggggaccccaaaactgtttttaaaaacttgggcctttacaaggccgggcgtggtagctcatgcctgtaatcccagcactttgggaggctgaggcaggcggatcacgaggtcaggagtttgagaccatcctggctaacacggtgaaaccccgtctctactaaaaatacaaaaaattagccgggcgtggtggcgggcgcctgtaatcccagctactcgggaagctgaggcagaagaatggcgtgaacctcggaggcggagcttgcagtgagccgagatcgcaccattgcactccagcctgggcgacagagtgagactccatctcgaaaaaaaacacaaaaaaacaaaaaaacaaaaaaacttgggccttcatgtcaatgaatatcaggacaagcagtgtggcctcacggaaaggagcctgccctgcctggcccccggcccccgccccaccctggcccctgccccgcgcacgcacccgtgggcctggcacactgggaaacgcttctccggcacgctgtccagcatttcctgcatgccacacacgcagtactccatcaccatatacgtggggcgctaaggacacacagctcagggggcggccccactcacaggcccagggagcacgggggccagaaaaggggctctggagggaccctctgcacccaccttgcccctcctcgggaccagggcccaccctgccctcagccacccctctgaaaaggcccaggggccccagcgtcccaggaggaaggagcctacggggaaggggaggacagggct

SEQ ID NO: 33322 - DNA, 2977 bp, Artificial sequence
  DNA replication origin
cctcggccccaggacgggtgtgtgctgcccgcaggtacttctgtcagctgattgacggcctggagtacctgcatagccagggcattgtgcacaaggacatcaagccggggaacctgctgctcaccaccggtggcaccctcaaaatctccgacctgggcgtggccgaggtaggcacgtgctagggggggccctggggcgccccctcccgggcactccctgagggctgcacggcaccgccacaggcactgcacccgttcgcggcggacgacacctgccggaccagccagggctccccggctttccagccgcccgagattgccaacggcctggacaccttctccggcttcaaggtggacatctggtcggctggggtcaccctgtaagtgccccgcccccccgggcactcaccacacgcacactccgaggggcctctgcgtcttgggcagctgccggcctgtgggcgcagggcgtggccaccggcccagaccctctctggccacagccgctagggggtgcttactttatggaaatgtaactcatacggcagatggtggttcacccgtgtgaagtgcagcctggcccgtcagggatcttcacagagtggcacggccgaccctcctcccagagccccacagggaagctgggcgggtgacagcagctccaggccccttccccgggtgggtccagaggacactcccctcctaccccgtagcctccactagtggaaggtggtgaagacagaggtgtccttgagtccacagggcctctggtccagcagccacgggacgcctctgtccctggggtagagctggggctcctagggcgtcaaccaccttgactgaccacgcctttcttccctcccctcgaaatgaagctacaacatcaccacgggtctgtaccccttcgaaggggacaacatctacaagttgtttgagaacatcgggaaggggagctacgccatcccgggcgactgtggccccccgctctctgacctgctgaaaggtgggagcctcatccctctgcccgcagccccagggaggcggggcttttgtgcagaaatgtagggttgggggtgtcaggtggggggctattggccccgagaccccagcaggcattgagaggactgagtggagaggccgacctccccgcagggcctggtttgccaggtccctcagctccaccctgcttctgggccctgttcaccctccgaactcccaccccagagggcagtgctgccctgcgcctcccccagccccaccctcgggggctccctggcttgcagggtctgtcagggttgtcctgctgcacttcctacgcatggcagcaggtggcactggccgtccgtccatctgcccagtggccttgggagaacggaaccgccctggccgtccagcccagccctgtctccctgccagccgcgcacaggctgtccccggcatgtcccaggagtggagtggcctctgtcagggagaccgcctgtgcgcggggtcccccttaggagcgtccaggtatcacccagggcctgacaacagaggctgggcaggcggggacggttggtggggtctcaggcctgtgcccagctgacaggctcctcgccggcttctcctcagggatgcttgagtacgaaccggccaagaggttctccatccggcagatccggcagcacaggtgagcggcccctgggggcagtggggccgaggctgcagggaggccggccatgtgggcagctggttgagcgggcgctagagcagggcgtggtgggggtgccaggctgggctggggccagaccccgtgcagcgcccgcagttctcggggcccgagtggggtctctgggcagtgtcctgttaccggccagacccaggcgccttgtccgaactggggtctgagtgaggacatgcgtccgtccctgccctaggcatggagatgcgccaggaagggcacagctggtcccaaacactggcgagagcctctctttttcccctcctcctggggctcccagcagcagggtgtggctgggatccagcccagggcccccagctccatgacagggaagacagagcagcggacggggtcagcaggccccacagtgccgcctccctcacttcgtgggctctgctcctctgcaccagcccctggaggcccttgagccgtctgctggagcccctccgagccccgaggccacccactgagaccggctctgggagtgggagtgtccggacccctgaggcgctggtgctgattgtgccttgggggtctctgcacagctcgggtcatctgggcgcctggcggggactggggctgccccccgatagcctcctgggctgggatgtgctcagggccccccagacccccttctggcctttgctggctttgcagccagcatccatctggtgggtgctggcttctgagtgccacctgggacacaggcctcagggtggaggggacatctgtcaggcttggagtcaggtcagcctgcctgctcctagaggacatggctgagcttctgtggtcacagccaccccttgcacggcctggtcccagctcctgagtgtgtggcaggtaccctgggcccagaggagctgggtcggaaaactggaccgccctggtgccagcctgacaggcgccactgcttctgggcgtttgcagctggttccggaagaaacatcctccggctgaagcaccagtgcccatcccaccgagcccagacaccaaggaccggtggcgcagcatgactgtggtgccgtacttggaggacctgcacggcgcggacgaggacgaggacctcttcgacatcgaggatgacatcatctacactcaggacttcacggtgcccggtgagtctggcgggggcccctgcccggctctgctgactcggccaggatgtcccacgggagcagggtgcctgcctgtctgcaacaaggacagcttctgccctctggtggccaatcccacgtccccaaagcctccagcccacctg

SEQ ID NO: 33323 - DNA, 3700 bp, Artificial sequence
  DNA replication origin
cacggcctggtcccagctcctgagtgtgtggcaggtaccctgggcccagaggagctgggtcggaaaactggaccgccctggtgccagcctgacaggcgccactgcttctgggcgtttgcagctggttccggaagaaacatcctccggctgaagcaccagtgcccatcccaccgagcccagacaccaaggaccggtggcgcagcatgactgtggtgccgtacttggaggacctgcacggcgcggacgaggacgaggacctcttcgacatcgaggatgacatcatctacactcaggacttcacggtgcccggtgagtctggcgggggcccctgcccggctctgctgactcggccaggatgtcccacgggagcagggtgcctgcctgtctgcaacaaggacagcttctgccctctggtggccaatcccacgtccccaaagcctccagcccacctgcaggctgcctccgccctgcgggccgctgggacatggctgaaaggtgtggggtcagcgggggcaccagcccaggcctgtctggccaggagggttcctcaggcgtctctccgggtgctgcccagccaggcaccacccaccggccttggcctgagtcccagcaggagcaggcgggggagccccagggtcgggggagggtaggtgagagtcagggtgcagggtggcccctcagacagctggcatgagagagggtccagtggccctccctcccgtcgtccctgaggcctgcccgctggccctgatgccggccgcccttcttccctaggtggcgaggaggcgtctgaggcagggcttagagcggagcgcggcttgcagaagagcgagggctcagacctttcaggagaggaagcctctcggccggcgccgcagtagtgcctgaggaggagctcagggccttagcgtaggggcggcccacattggcagccagcccctccccgccatgctcccggcttggctgtgttcggcccagggctgggccgtgtcataaagagttttgcagtgtatctgcagggtggatgcttgctgcgctcgggctggagcctgagggggctttctgctttactgtttcagcgggaagtggtgggcaggggccggcctgagaaggggggtacgccaggcaggttgggatgtgaggacccagtgcacagggtccacccccgggcccgagggtcccagaatagtgggggccctgcagagagccccccattaggtccctcagcactcctgggcccctcatcaaacccctaggctcagctcagtagctggtccccaggagagtacagtgtgggggcccccgagagcacagtgtatgggggtccccggggggtacagtgtctgggggccccccaggaggatgcagcatgtgggggccccccaggagggtacagcgtgtgtggggcccccaggatcacagggtctcagctcctgggctcttggatttgcagcaccacgaccatcgcgtctggtctgttggaacgggaggtgctgctgggtaccctggtcactagggtgtgctgggaggtgggggcccctcatggtgcccatccttggggcctggctgcaatttgaccccaggcccagggtcttctgcctttcagagccctggtgccctgagacgggcagccaggcaaatcccaggcaggagggccagttagggcagggccagcccaggcaggttgcgagagtccctactgggacgtggaccacacgctgacccccacggccgcccctgcaggccaggatccctgagccaggacccggcactggcttccctcctggggaccctcaggcctgtgtgagacctgggctgccctggggtgaggtgcctgggaggagagcaggggctgggccacctttttcatgaccctgctaagcccactgtgggtggtgaggaggagtacccagcagggggaagggccgccagaccactcggcatggctgaggcctcagtactcagtactgggtactcaggtggacgcccctcccactgctcagatgctggggacaggctcaacttcaggcttcagcgtgagccccgtccctgacctgcagagcccccttgcgttggggcaggacagcccggcgccctcgggtcaggccatcctctgcgctctgccggggctgctgcatcggcctctgcgtgcctccactttggcctcacgtgtccctacccaggatgcgggtcctgctgccaacacccagatcccagggaaggggcttgggctagatcctgggcaccagtgcagacaggagtgtggggtggggcaagggcccagtggcggctgtgcccgctgatgcagagctggggcaccttgtccacagggtctgccccaccagagacgggctgggcccaagctcagacctatgggtgcaattggtgcctcctcaccaaggtcttttttatctttttttttttttggagacagagtcttgctctgtcgcccaggctggagtgctgtggtgcgatctcggctcactgcaacctccacctcccggattcaagcaattctgcctcagcctcctgagtagctgggattacaagtgcgcgccagcatgcccggctaatttttgtatgtttagtagagacgggggtttcaccatgttggtcaggctggtctcaaactcctaacctcatgatctgcccacctcggcctcccaaagtgctgggattacaagcgtgagccaccgcgaccggcccaaggtgcttttttaaagctagtgacttcctgtgcacatggggtgggtgtgtggcaagttctggaagctgctgagtcagccactggtccattctcggagctggggctctgcactgggcacatgagctctggggcagcccggggcggcctcccactgacttcgcccgggaggggcctcggggatggctcggcagccagtgtgttcgcggagtcctcgccaaccaccacggctcctcgcagggacagtacgtgggcagcttcctgcactttcccctgccattgtgagaacagtgtccacctgggcagggtgggcagccccaggcctgtgggtttcaccagggtgctggtgatggttggtggctagcagggactgggggcagctgggggccctggcaggctgagctctgctccccgcgtggttctgtgctggcatttcgcgtgcctggcctgagcctggcccgagcctggccctcctgtgtcctcacagatgagcatgtggcggctcctgggcctctagaaccaaccatgggccagggtgccccaggggagcacgggagggtcctgccttgtcagcttgcctcctactcgtgaggttcctgcagtcagtacctgggtggggtcccacctgcggccatggcaggtgcaacagacgtggtggaggggacactcctgcccaggccatctgcgggaggctcagccccggggggtgcctcccagagctgctggggggcagcatttcaggctggatacacctgggcctgacccgggggcgggcatggcctgggcagcagctgtaagtgcgtccccgtggtgggggccagccaggtccctgtggctctggggttgcgcccctcagctcaggccacacttgccgtctccctcccaggacaggtcccagaagaggaggccagtcacaatggacagcgccggggcctccccaaggccgtgtgtatgaacggcacagaggcggcgcagctgagcaccaaatccagggcg

SEQ ID NO: 33324 - DNA, 1460 bp, Artificial sequence
  DNA replication origin
ccacagcccccctgccacccagcagctcccaaacacccctcacagccacagctcaaatccaccttttattttttcttaaaaaaaaaaagaaaaaaagaaaatggaaccaaccaaacaaaaaaccaaagcggccgcgcggcttccaggtggcgctgcatgcatggcggggtcaggagcctggtctccacacccgccagctggtctgcggcggggccgccggacggcgctgggcgccctgcggagcacgaggccacgggcggggccagtagtctccacataaagtgcatggaggccgcctccctcctcccacgcccgcccgggaaggctccgcccggggctgcgaagtcaacaagccgcgtgcactgccgggcggccgaggggggagggctgcgcccggtccctgctgtccccctgcccggccctgcagggcgctccggaggtcctggggcgtggtcggcacagaagcatggcggccacctctccgggagggcgggcggaaccggcaggaagactgagggcctggcgcgggcacctggcggggctcctggacacgggctgcagggtggaaggaagacggaagaggtcagcctgggcaccggttctccgcctcccgcgggcccctgggaggatggagaagctgaggtacagtcatggggctaccggactcctggggggcagcaggggaggccagggaaggccacccttgagtcactcccggggtacattgtgtggccttttgcagtggggcctggcgggctctgacgctggtggatgggctgtgggcacccatttgggggacagacatgtaactcaggcggtggcccccaaaacctgggagaggggctgtggcaaggcaggggcttcagcctcgggcccccatccaccccgcatcctcggcaggtgacttaagggtctctgacacctctgggactccgtctcccacccggggctggggctggggctgggagaggaggcaggcacacagggagagacagggcagcgtccggcacgactcagcctcagccatacttggcagctggctcagagcctgcggcaccccggcagagccatggaggccgcggcccctccccaccacccaccacccactggtgctcaaaagcctctgggctgagcccagcataagcctttcctggaagcggcgcgggcatggggagggggcgccaggcccagggcagggtcctcggaatgcacccactctgagaggtggctgtgaggacggcacgcccccccagagccccgccacacgtaggcctccatgaccagcacgctggccagacaccaggccccgagacggcaccctccacggggatcgctacgtggccaagccacccaaaggccacatggcaaccacgcgcagccacgtgacggtcaccatgactgactagcgcgggctatgctcacggctggctgtggcatccaggcgttgtccccacatgccc

SEQ ID NO: 33325 - DNA, 1044 bp, Artificial sequence
  DNA replication origin
tcagcttctccatcctcccaggggcccgcgggaggcggagaaccggtgcccaggctgacctcttccgtcttccttccaccctgcagcccgtgtccaggagccccgccaggtgcccgcgccaggccctcagtcttcctgccggttccgcccgccctcccggagaggtggccgccatgcttctgtgccgaccacgccccaggacctccggagcgccctgcagggccgggcagggggacagcagggaccgggcgcagccctcccccctcggccgcccggcagtgcacgcggcttgttgacttcgcagccccgggcggagccttcccgggcgggcgtgggaggagggaggcggcctccatgcactttatgtggagactactggccccgcccgtggcctcgtgctccgcagggcgcccagcgccgtccggcggccccgccgcagaccagctggcgggtgtggagaccaggctcctgaccccgccatgcatgcagcgccacctggaagccgcgcggccgctttggttttttgtttggttggttccattttctttttttctttttttttttaagaaaaaataaaaggtggatttgagctgtggctgtgaggggtgtttgggagctgctgggtggcaggggggctgtggggtcgggctcacgtcgcggccgcctttgcgctctcgggtcaccctgctttggcggcccggccggagggcaggaccctcacctctcccccaaggccactgcgctcttgggaccccagagaaaacccggagcaagcaggagtgtgcggtcaatatttatatcatccagaaaagaaaaacacgagaaacgccatcgcgggatggtgcagacgcggcggggactcggagggtgccgtgcgggcgaggccgcccaaatttggcaataaataaagcttgggaagcttggacctggccgtctgggttttgttcgcgtctcaacgtggatggggcggcagcggggcgggcgccgttgacatgcggagggcagtggggactcggggcgcgggagggccggggccggctccct

SEQ ID NO: 33326 - DNA, 1296 bp, Artificial sequence
  DNA replication origin
tctgtgtgtggggggggcccaggcgttgtatgtgtggggggcacacgttgtgtgtgtgtggtgggggtccacaggcgttgtgtgtggcgggggggcacaggcattgtgtgtgtgtggcgggggggcataggcattctgtgtgtgtgtggagcgggtggaggcacatgccggctgacgcttacggcacatcccgtgcgcaggttcccccaagcggcaccacttccagcggcagcgggcagccagtgagagcacggagcaggaggagggggatgccccccaggaggacttcatccagtacattgcccgggcgggcgacgccgtggccttcccgcacccccgcccctttctggccagcccgccccctgctctcggcaggtatttttcagtagatggaggtgctaggggtggacctgtgggcccttgccccccttcgcccccccctaggcggcccagggagcgctctccaggccccgtggacacgcgctcgcctgcctccagcggcaaggcccctcccagaggcggactcactggggccacctctccagcatggaccagaggagggaagcagggagagactgggtaagggtagggcggtgggtggggaggaggggccccccgaggatggcgctggtactgctgcttgctggtggagtccgaggcctgaagggttctgctgtggtcccaggccctctcccacccccgccccgcccatgctcccaaggctgggcagactcctctcagaagctgctgtgaccactccggccagcagcacccctcccccaacccaagggcaacttccctgaagcccagggcccacgtcggtgggatgggaatggggcgtggggctggggcagagcagggttcctggggcagccctggtatggcgggtgaccctcacgtctgtgcactgtcctcctgctggttatccagcatgggtgggcagagagccctagcctggagcaggggctgagctggactcaaccgcgtccagtccatcccctgcggctcccacgtccactgggaggctgggaaaacgtgactcccggagagaagcatgttgacttttcctgggggcttccaagggagggggccccgccgtctgcagtccagcatggaggcaccctgcttaataagcaggcgccacagctcagggtcaatgcaagacgcatcccctgcaaaacacactggctcattttaaagctctcaccttccaaggcccgcccgagtcccaagtcccacccgcgtccaccctccctgatccagaggcgggatggccggccgggtagggggcgcggg

SEQ ID NO: 33327 - DNA, 1011 bp, Artificial sequence
  DNA replication origin
ggcaggagagggcacctctctccctctcctcgttggcccccaccagcctgtatgtgactctctcatgccttccgtagtttcagccaggctgtgcaggccaccaggtgtccaggacacgcccttatgagtggccacatgttgaccagggctgccacaaggcactatcggtgccagaggcccttccactcactcgcttcctggccctgccctgctcaggctctctggtcccagcacctcttccctccgtgcctcagttttctcacctgtactccagggtgtacacacagccactgtccgcacccacctgacccggggagatgccagccagggtctggcccaagccagggcccactcctgtgtgtgtgagacagagacagggcacacgcgttgtgtgtgtgtgggggccacaggtgttctgtgtgtaggagggtacaggcattctgtggggggggcacaggcatggggggtgcacaggcgttctgtggggggggcacaggcgtgtgtgtgtgagggggccacaggcgttctgtggtggggggcacaggcgttctatgtgtgtgtatgggggccacaggcgttctgtgtgtggggggggcccaggcgttgtatgtgtggggggcacacgttgtgtgtgtgtggtgggggtccacaggcgttgtgtgtggcgggggggcacaggcattgtgtgtgtgtggcgggggggcataggcattctgtgtgtgtgtggagcgggtggaggcacatgccggctgacgcttacggcacatcccgtgcgcaggttcccccaagcggcaccacttccagcggcagcgggcagccagtgagagcacggagcaggaggagggggatgccccccaggaggacttcatccagtacattgcccgggcgggcgacgccgtggccttcccgcacccccgcccctttctggccagcccgccccctgctctcggcaggtatttttcagtagatggaggtgctaggggtggacctgtgggcccttgccccccttcg

SEQ ID NO: 33328 - DNA, 1243 bp, Artificial sequence
  DNA replication origin
gaggccctctgcctgtctgggctctgacttcctctaacacgaagtaagtgttggactgggccaggggtcagcagacttttcccatcaggccccggatggtggtgttcgtggggttatggtcagagaggctgtgtctccacaactctgctgctgttgaggcgaggaagcagtcagaggcgctgcatgacgaatgcacgtggctgtgtgccagtaaaacttaccgaagctccggggcagggggtgcttttgccctctgggctgtagcacatagatccctggactgtttgacagtagcccttcaattctgcaggccttgggtcaggcaggatcctggagacagggctgccttatctgggctcgaggcaggagtttgtgtggggagcagaggtgtcccatctgtagcactggcagcaggcaccagccctgctcagccagctcagcagggccagggcagcccagaggggctggggcccgctctgccttgtggacagggtggcaggtcctgtcgtcaggtgaggccaggataggggacaagtgcagagagaaggtgctgtcagcatgacagaggacacatcatcagacagtgggagaccctgtgttgtggctccagccagcgggggtggggtgagttctcccagcccccacccccaaggtagctaggggccagggaggggaaggcctcctctggctgccccgctccagctgagagaatccagatcttgaaatgaatggggcccaggggtgactagagacatttagagtccaatgtggttgcagcacatcccagaacctgtttgctggggcctgcccactcaagctttgctggggaggctgttgggagaagggggccgaggcaggggtggggcagtcccccagcgctctccagaccagggtggagctggcaggagagggcacctctctccctctcctcgttggcccccaccagcctgtatgtgactctctcatgccttccgtagtttcagccaggctgtgcaggccaccaggtgtccaggacacgcccttatgagtggccacatgttgaccagggctgccacaaggcactatcggtgccagaggcccttccactcactcgcttcctggccctgccctgctcaggctctctggtcccagcacctcttccctccgtgcctcagttttctcacctgtactccagggtgtacacacagccactgtccgcacccacctgacccggggagatgccagccagggtctggcccaagcc

SEQ ID NO: 33329 - DNA, 1489 bp, Artificial sequence
  DNA replication origin
cggacacaggcgtgtcctcacacatgcagggggcaccccaggctcccacctcatttgacattccctaggttctggagagggtgcgccacccctgccctccctcacctgcagcccacgccgtgggcgagagaccttctagacacgcacctccttttctctccaaaccccatatccagggaccttccccagagggcagagcaccttagtgtagcccacccagccactgagcgcccctcctcccgcttctgcccctctccgagcaggtacccctctctgtcccagtgatggggggcccttgggactgtctctcagacctacggccacctggggccagcacacgggcccaggaagaagtcttagcctgagcgccatctctgttccctgccagttggatgccggtaccaggagcaccaaggctggagggcccggggctgcagcagggcctggggaggcgggcccgggatccggggcaggtaccgttctgcagttcctcacccgcctgcgccgccatgccagcctggatggggccagcccctatttcaaggtcaagaagtggaagctggagcccagccagcgggcagccagtctggacacgagaggtgagctgtagcacctggtggagagtgggcccctgtgggctgggtgctggctgccaggggctgccctggacatccaggagcaggaggttgtgggctgggtggggagccggtgctctggggctgagtcctgcccagtctgccagcgggcgtgctgcctgaggttctgcaggtggctgggagggctgagtgtgcgggcggcctgagccagacccacccagctccgggaacctgtgcgggaaggctttgcgcgccccgactgctctcgggccattggggcatccaggatgaggtggtaaaggagggtgtcgggggccacctggtcactgtggagcgcagagggtggggcctgtggcctgcatcccctcccagccatgctcggctctcatccctgggaatgtgagtggaaggcgggttcccccggggcccctccctcgcccgctggcagaccatcagctgctgtgtgaccttggccgaggccctctgcctgtctgggctctgacttcctctaacacgaagtaagtgttggactgggccaggggtcagcagacttttcccatcaggccccggatggtggtgttcgtggggttatggtcagagaggctgtgtctccacaactctgctgctgttgaggcgaggaagcagtcagaggcgctgcatgacgaatgcacgtggctgtgtgccagtaaaacttaccgaagctccggggcagggggtgcttttgccctctgggctgtagcacatagatccctggactgtttgacagtagcccttcaattctgcaggccttgggtcaggcaggatcctggagacagggctgccttatctgggctcgaggcaggagtttgtgtggggagcagaggtgtcccatctgtagcactggcagcaggcac

SEQ ID NO: 33330 - DNA, 1879 bp, Artificial sequence
  DNA replication origin
ggtggcccccgacaccctcctttaccacctcatcctggatgccccaatggcccgagagcagtcggggcgcgcaaagccttcccgcacaggttcccggagctgggtgggtctggctcaggccgcccgcacactcagccctcccagccacctgcagaacctcaggcagcacgcccgctggcagactgggcaggactcagccccagagcaccggctccccacccagcccacaacctcctgctcctggatgtccagggcagcccctggcagccagcacccagcccacaggggcccactctccaccaggtgctacagctcacctctcgtgtccagactggctgcccgctggctgggctccagcttccacttcttgaccttgaaataggggctggccccatccaggctggcatggcggcgcaggcgggtgaggaactgcagaacggtacctgccccggatcccgggcccgcctccccaggccctgctgcagccccgggccctccagccttggtgctcctggtaccggcatccaactggcagggaacagagatggcgctcaggctaagacttcttcctgggcccgtgtgctggccccaggtggccgtaggtctgagagacagtcccaagggccccccatcactgggacagagaggggtacctgctcggagaggggcagaagcgggaggaggggcgctcagtggctgggtgggctacactaaggtgctctgccctctggggaaggtccctggatatggggtttggagagaaaaggaggtgcgtgtctagaaggtctctcgcccacggcgtgggctgcaggtgagggagggcaggggtggcgcaccctctccagaacctagggaatgtcaaatgaggtgggagcctggggtgccccctgcatgtgtgaggacacgcctgtgtccggtgtgcggccggctccctctttctcccgtgtgcaatgacccggcgggccaaggagggctgcggtggctggcaggtcataggttgaccttggtcctggactggggacagggaggggaaggagcctccccggctgtggacaccatgggggacacgcaggggccctcaccgaggtgccttccccagagtcgctagatgccgaggggctgatctctgcgaagtcagtggcgcccgcggctgagttgtaggggtcacctggcagggcggagctggggcccacagagcggccggtgagggccttccccgggggctgtgggacagagccaggtgggggaggaagcagtgacaggtcaaagagcatgggtgggtgagggacatgggcaggtgaggagcatgctgggcttggccccctgccctgctccaccccaccccgcccatcccgagatgagggccacccagaaaaagagtgggtgagggcgtgggggtccgggagtccccggggctgcctcccgtcccccgaggaaccggggctgctgcccataggctcacctggaagatggccagagtggccttgggagaggtggccgggtggggcgtggtggctgagctggcctcgcctgagtcacactcgtggatggtgacaatcttgaggggcggcaggtgcaggtgcgtgagccgggcattcttcaggtggtggaagtccccctccgtcagtgtgtacctgcgacagcatctggccatcagagcccgcccacctcccatgcccgatgccccagctgccgtgctctgccatccaccctgccggcctgggcaggggcaggcgaaaggggggcaactggccaaggccgccccaccccacggtcccagtccaggagcctctgccttggtccctgcagcctccgcacccagctcctcccccgtcccggcggccaggacctcagacaggccctggggtgcctcccaacg

SEQ ID NO: 33331 - DNA, 2018 bp, Artificial sequence
  DNA replication origin
gcccgatgccccagctgccgtgctctgccatccaccctgccggcctgggcaggggcaggcgaaaggggggcaactggccaaggccgccccaccccacggtcccagtccaggagcctctgccttggtccctgcagcctccgcacccagctcctcccccgtcccggcggccaggacctcagacaggccctggggtgcctcccaacgccgccccgcttaccggcgacccttgtcctgcgtcttgcggctctgctcaaacagcgccgcctcattgaaggagacccggcggcccgtggagctggtggacaggaagcgttcggtctccgcatcctggcactcggggtcctctccccggaagtcggggtctgcgtggagaggcaggagagggtgggccccgggcgggccacgccaggcgcctggtcccgggagggctgctcctccgggcggccacggcagggagggctggggccgcggcacgggcggccgggctggcggggcgagggacactcgtccatccgctcacacactcactcgctcagcacgcgcctgggcccacctacgcctgggcgttaaggaaacagagatgagtcggaatcgagctgcgcccagtctggtgggggagacagacagacacagacggtcaggcagcccgagggggcggcgggtggccgaggggcggatggacaggcgagcgcacagccaggctggccagcacctcaccttgggctgggtgggtgccgttgtccaggtaggtggtggtggtcttctccgcttcctccatggccctgggagagacgttgggagagcccagtggcacggagggcccagatagccacagtgggtctcggctctttgccccaagccaagccctgcgcatcacccagtctccagaggcatagcccaccctgtgactcagaagccagtgaggtagaccccccaccacccgatggcacccacaaccaccatgcacctgcccagccgaggtgggggcctcgcacctgttgaggcgctggtggacgtcccagcagcgcttgcagaggagcaggacgccagacaacaccaccagcgtgccccccacgaacagcgacatcaccaccaccagcagcacgtagttgtccaggatggggtctggctctgcctgcgggtgtgcagggggggtcaggtgctgctggcctggacgacctcctgcccctcccacctgtcccctgcacccaccgtggggcgtccagtggcattgtcccacgacgtcgtcagggctactgtggcagtggtggtggtggtggtggtggcggctgtggccatggtggctgtgggctgcattctgaactggggaggagggccctgtggggaggaagcctggtcagctccagctagacctacttctcctgcaggagccactgcagacaagctgggtcttccctgcaggagcaggagcccacacagggggcagtgactcatggagaggtagcagagccggaggcagcctccacccggcttggctctgcccagcgggccccgggggctctctctggacctccatctcccatccccatggcgggggaggaggcctggccctctgagggtgcgcctgtacccatcacaactgcacacagccggtgcggcctgtcctgcaaggtagcgccaggccctggagctcagcgctgggcagggcaagcactcggaggaatggggacgccaaggcggtgcagccggctcgagaaggactccagacgccctgtccgccccatcacgggggtggggggctacccccaccccaagaagttcagctacaccctggcagggcccacccggccatggttgggtagagggagacctcccgctgcctgcgcgccagggagggtgcaggggctgggcgcgtgctcccgggtcacgactccgggaggtggaggtctccccggtgctgagtgctggtgggagtgcaagggacaaagaaggcgcatctgttcccagccccggagaagctggttcccatggcgactgcggagcaggccgcggctggg

SEQ ID NO: 33332 - DNA, 1019 bp, Artificial sequence
  DNA replication origin
gcgcgccagggagggtgcaggggctgggcgcgtgctcccgggtcacgactccgggaggtggaggtctccccggtgctgagtgctggtgggagtgcaagggacaaagaaggcgcatctgttcccagccccggagaagctggttcccatggcgactgcggagcaggccgcggctgggggggcgggttgccagggagcggcggggagggggcgcgggggcggcggcctgggggggggcggcggcctcgggggggcgggcgcgaagccgcaagatggccgcggccgcctccccgccgtgcccagcccgggcgcccggagcatccccggccgccttacgctcgggggaaactgaggcggggcgcggcaccagggaaaggagccgcctggacgctgtgcggcgcagccgggtggggaggcccgggaatcgcagggggtcggggctggcgccggggtgctcggcggccccaggtcagcaccgcacgcgcgagacctttcccggagcgagaggagcgcacaggcggcagccgctcctgcccttcccggacttccgcccacacgcgacagcgggaaactgaggcccaaagccgggcagggtcccggcgggggctggtgtcctcagcgctcccggtcacaggctgcccgggccctggtactgggggaaggggccgcatatgtaggtcgggaaatgagttcaggctggagggggtggggacaggcgcaggatggtgaccggaggccggggaagatggcaggaggccgaggggaagaggggggctcctgggggaggcggctgcgggagccgagggcggaggttccccacggggcagcaccgcgcccccgagccggccaagggtggggatggcgagccaggggaggcagggacccgacgccagggctgagccgagacgccatcgtcctcgcccgacctcacagggagaaactgaggctggggcggggcctgagcgggggtccctctggaggcagccgggtggggggcgcaaggcccggatctcggtccccac

SEQ ID NO: 33333 - DNA, 2449 bp, Artificial sequence
  DNA replication origin
aaataaataaaatttaaaaacaaacaggtcgtagtggtaggtggtggcaaaagccaaaaataaatcacagtaaaagccgagaaagtgtgcaggacgggacagggtggaaggctgcaggtgcagctgttctaggaaacggcgaccgcggcgaggggcacagcgcgggcgacgcgggagggctcgctggggatcccggaccccggcgcgctgctcctcgacgccggcagagggcgctccgcgcccggagatgcgctcgccgaccccccacctcctgcctggccgtcgcccccgtgcgcctctgacgcaggagcgcgtgcgcgggcggctcggggctccgctgccgtcagccagcggcccgcgcagcctcgctcgcggctatgacgtcaccgccccgcccccgcgctcacgcaggtctgcggcacccggccgggcccccagccccgctccttaggctccgggaaaatgcggaatcggggatggcgggggttggggctcgggctccctggaaagggccttgagcctggcgcggtgggctggaccccaggggtgcagggagcaggggaggccctggggctgtggctttacaagggtgcagccagggagatccaatgcctcctgctgtgggcgaatccgacacgatccgtggctccctacatccggaggctgcaccctcgccccctgcccgtgttcaggccagtgcaatggcgggcgccactgtcccctggaacccaagcacctgaagaaggccctgctggtccgactcaggatgaaggcgtgggcctggctcctcccaccgggccagcgctgtgacggtcacttggagcctggtcatcctggccctggctcggggggtgcagaggaggaggcctgttcacttttcgagtcgtgacctgtgcacctcctggctctcaggaccgcatatccagctgccactccaggaaactgggaggcctaatagactcagtctcactcgtggaaccacttccctccagtccccactccagggtcgcccacgggtgagggcgccattactccagccccaaacctggggttcctctggaattccgccctgtcccggcctgtgcacccagcatggccaccgcggctaccatctcttgcctaggaggccccagcctccccccgtttagtacaggtaccttttcttcacacagccagagggagtctttattaaaaatcagaaacctggcggggtgtgggggctcacacctgtagtcccaacaatttaggagactgagacagaaggatctcttgagcccagaagttcgagaccagcccggacaacatagcaagattccatctctacaaaaaaaaacaaaacaaaaattagctgggcatgatggcgcgcacctgtagtcccaactaccttccgggctgaggctggaaaattgcttgaatccgggaggtggaggttgcagtgagccgtgatcacaccactgcactccagcctgggcgacagtgcgagactctgtctctccaaaaagcaaaaccgaaatacaaaaaaccctgaagcctgcccatgtcatggtcctgctgggaacaagacgatttctctgcttccttcacaggcattgacttgcaaacttttttgcctcaaaacctttgcccatgcaattcccatttgcctggcaccaggttccctggggctgcccttggagttcacagctatcggagtggtggccccacagcacacaggaacaggcaaggcgcaaggcatagggccttggagggacgtagcagaggaggggacccaggcatgggctggaagccaagagcagaagcgccgagactgtgaagctggggaaggagttgaaggaaaccggggtgaatctctggctgcatggacagaggcctgggtacagggcacctgcaagggcagaggcggggaggctgagctgggccagccacgtgccagagcggtgtcagcctttctttgggacgagaaagaggaggcgctgtggggtgttaggcgtgggctcagaggggttggggtggcgctcgggccaggctggtggcaggtgtgtggcctgagtatctgcaggatgaggttcgatggtctaagagggagaagcgggggcagctttgggctttgggtttctgcgggtgtcgttctgatgtcaccccacgaggagcaggcctctgtgagtgcacgtttgggccccgatgggctctgctcagctttgtgccggggtctgtgatcgctgtcacacaggggagggggcaggagaggcatggcgagtcctccacagtgccagaggggacctgcgtggggaagcaggcggggcgcctgtgtccagagaccctgggctgtgcagcttaaaggggaattgtggccgaggggccctggctgtgccgccccagaacccccacggaccaagcaacgtgagaggggagtccgtgcccccccggaccccaccccctcctgcgcacg

SEQ ID NO: 33334 - DNA, 1690 bp, Artificial sequence
  DNA replication origin
tgggaatgcaacgatccggcgacacccaggctttggccagggagatcggggagggcacccaggagacgcttatctcggggaggtgcccgggacgagggcagcgcagggctcgggcagcagaggcagggccgagggtccagggctgagtagcctcggcttccggggcgcgcgggtccgggggcccggaagcgggggtcgcgccctgggggtggggaccctggactccgggggcggcggccacggagggtcccgacccgcagcgcccgaacctgcgtgggagaggcgaaggtgaaggacatctggttggggccagaggcggcagccggggcggcggcggcctcggcataggcacgggcgtggcggacgaggcggccaagtcccgggcggcggagcagcgcggcgggcagcatggcagcggcgggcggcaggaagcgggtagctggcggacagcggactccggcgcggcgcgggcggcctggagggcgaggaggacgacgcgcagggacgtctgggaggaggagtcccggcgagagcgcaagcgcgaactacgactcccggcagggcgcacgcgacgttgacgacgcagtgccccgtcgtgaggtattctgggggttgcagttttgttccggcccgggctgcggcagaaccagggggtggtcagataagggcggtgaaaccgtcctgggaggtggagtaaaacgaacttcagtgaaattcaagattcggctgcgtggtggctcacgactgtaataccagcgctttaggaggctgaggccagaggatcacttgaggccaggagctggaaaccagcctgggcaatagtgtagatcgcccccacccccgacccgtctgtacaaaaaaaaaaaaaaagatttttggggcgctcattggatgcagggccctggatagacatcaagaaaacatcaagtttccggctctgggccaggtgtggtggctccaacctgtaatcccagcaccttgagaggccaaggcaggagaatcacttgaccccaggagatggagaccagtctgggcaacagagggagaccccgtctctacaaataatcaaaattagccgggcgtggtgatgcacgcctgtggtcccagctactggggaggctgaggcgggagcatcgcttgggcctaaggagattgaggctgcagtgagctatcattgcgccactgcctagcctgggcaacagagtgagaatcccactctggggccgggggttatttagcagacatttgagatcattaataagcaggtcaggccgggcgcggtggctcacgcctgtaattccagcactttatccgatctggagggcgaggcaggcggatcacctgaggtcaggagtttgaaaccagcctggtcaacatggcgaaacctcgtctctactaaatatacaaaaattagccgagcatggtggtgggcgcctgtaatcccagctactcgggaggctgaggcaggagaatagctcgaacccgggcgggggggggggggggaggttgcagtgagccgagatcgcgccactgcactccagcctgggcgactgagcaagactctgtctcaaacaaaaaaataaataaaatttaaaaacaaacaggtcgtagtggtaggtggtggcaaaagccaaaaataaatcacagtaaaagccgagaaagtgtgcaggacgggacagggtggaaggct

SEQ ID NO: 33335 - DNA, 1168 bp, Artificial sequence
  DNA replication origin
gaggcggaaggagagccccatgggtggcagccacagctcaaagctgaggaggagcttccctggcccagtccccagagctttcaacacaggcagggcctggggcccaggcagaagcctgcactgccctctggtggcctccttggcaggcgcggcttccccaggtggccgggaccccaggagctggctgggcccacctggcatccctgcccagcccctggccgggcctcgggacaccgggtacgcaccgcctactccagggccttcaccagggcctcgttggcctcgattcggatctggatctctgcccgcgtggcctcgtcagctgtccccaccagctccgcctgggccttctccaagtttgccttggctgcctgcaaggggttgaggggcggtgaggggccagcagcgaccccagcccggctcctggtcccccagcgctccctcccccgcagcctggacagctccaacctgctgagcctcaggtcccctctgacactcacccccaggtccaacatgtccagcgtcacggcctcttcggccaacaactgcaccgaagagtcggcgttcactgcgatggaaccgctgctcactgggggaatggggcggggggaaggcgtgagaccccaaagggctgcacagcctcagggactcccctggtcaagtccagagccccctgtgaaccaggagctccacaaacatccaagtctgtgtcctgagtgtgcaaacagacccacaggactggccctgggcccaacatggcgggcaactgctagagaagaacaaaacaggggccgcaagaaaggactagaagctggaggaacccccaaaagcactgcctggggacagaggccctccctctgacccaccacccatgggttgagctggggtcagggccaaaggcaagctgagttcaaatctggccaccactggaaaccagtgaggcttagaactgctttttttcctgcacaaatgaccttcctcccctaatctgatcagccctcccaacatggttttttgaggggtttttttggcacagggtctcactcttgttgctcaggctgaagtgcagtggcatgatcttggctcactgcagccttgacttccccggctgaagcggtcctcttgcttcagcctcccgagtagctgggactacaggtgtgcaccacta

SEQ ID NO: 33336 - DNA, 1094 bp, Artificial sequence
  DNA replication origin
ggagtccctgaggctgtgcagccctttggggtctcacgccttccccccgccccattcccccagtgagcagcggttccatcgcagtgaacgccgactcttcggtgcagttgttggccgaagaggccgtgacgctggacatgttggacctgggggtgagtgtcagaggggacctgaggctcagcaggttggagctgtccaggctgcgggggagggagcgctgggggaccaggagccgggctggggtcgctgctggcccctcaccgcccctcaaccccttgcaggcagccaaggcaaacttggagaaggcccaggcggagctggtggggacagctgacgaggccacgcgggcagagatccagatccgaatcgaggccaacgaggccctggtgaaggccctggagtaggcggtgcgtacccggtgtcccgaggcccggccaggggctgggcagggatgccaggtgggcccagccagctcctggggtcccggccacctggggaagccgcgcctgccaaggaggccaccagagggcagtgcaggcttctgcctgggccccaggccctgcctgtgttgaaagctctggggactgggccagggaagctcctcctcagctttgagctgtggctgccacccatggggctctccttccgcctctcaagatccccccagcctgacgggccgcttaccatcccctctgccctgcagagccagccgccaaggttgacctcagcttcggagccacctctggatgaactgcccccagcccccgccccattaaagacccggaagcctgactgtgtgctcggctcttgttcctccacctggcccggtgaagccgggagcgtcctgggcccctgctcacgtcctccatgtcccttgcaaatagggcctttgagctcccctggactatgtcccttagggcacctggaggtccgtaggaagcaggctcgagggggtgggtggggtgcagccaggcgggcaggctgctgaccttcaccctacaacggtggggagggtgaaggtcaccagtgatggggacatcggtcagggaggggtgtccctgctgctcctggcgcctctgccgagttcctggtct

SEQ ID NO: 33337 - DNA, 1163 bp, Artificial sequence
  DNA replication origin
gtagtcccagctactcaggaggctgaggcaggagaatcgcttgaacgcgggaggcggaggttacaataaacccagatcgtgccagggcactccagcctgagcgacaaaacgagattccgtctcaaaaaaaaaaaaaaaaaaaaaaaaggccgggcgcggtggctcatgcctgtaatcctggcactttgggaggccgaggcgggcggatcacgaggtcaggagttcgagaccagcctgatcaacatggtgaaaccctgtctgtactaaaaacacaaaaattagccaggcgtggtgatgtgcgcctgtaatctcagctacttgggaggctgaggcgggagcattgctcgaacccgggagacggagattgtggtgagctgagattgtgccattgcactccagcctgggcaataagagcgaaactcctctcaaaaaaaaaaaaaaaaaaaaaaaaaaaagacgatggtccaggaagtgggaatggcttgagcagttctgggagcttagtgaactggacccagttggagggaggaggggcagggtcgatgaatggggcttggatgaagggctggggccccaggtgggaactacagggccaggctcattctgcttccagtgagaacaaaggtggcggagggagccgtggactggtgccaaatgagcagcccaagcaggacactggggccccctgtgagtggccagcagcccccacctccctccctgcctcttgcctctcgtgtgtggctctgccacctgcacaccgtcacctcagtctggtcgggagtggaatggacaccgtcacctcagtctggtcgggagtggaatggacaccgtcacctcagtctggtcgggagtggaatggacaccatcacctcagtctggtcgggagtggaatgggacacgggttgtcggaacttgctgggcttcacaggggccactgtgtggccctttggggaccagatgcccagagccagtctaaatgaataaacatgctaaaacgcttccccaccatttcccatactcggcgtccccatggttgagtgggttgttcctgggtgtgatggggacaaaccctgtgctctgttctgcctcactaagccaggggctgccctcactgaagggccttgaccgcctggttcccggccccaccctgactgcctcctgct

SEQ ID NO: 33338 - DNA, 1601 bp, Artificial sequence
  DNA replication origin
catcctgagccatctagagtgggcacccttcctcggcccgcaggtcccccccctccacactcaccgggcgcggccggttctgcgctccaagtgctgcgagtaccttcgtccggggccgaatgcgcgctggccgggccggtctgggccaagcgcgcggccctcagcctttatccgcgccgccttccctcggggtggagttagggcgggcaggggggcggggggccgggcgggcggtgacgcagactggcccccgcccctgcctgccggccctggccctggggcgccttgacggctgggccacccgggacccaggcttggcgcagttcatggggggactccccttgaatgccccgagccaagggtctcggcccgcctcgccgcgggctgagatgcaccccgaatcgtcagcgggacagggttttggggtgtacagcgcgactcgctgccccgcccccttcctgtcgccccaggcccggtgcttccgcctgggggcgcccgcgtgggggggacgggaagaggggcctgagtcagcggctgtcgtccaggaaaacaggctggagtcacctgccgtagagtgggggtgccctggccagccctggcctcctgcatctgtcaatggtgacctcagagggcatttatggagcgattagccagtgccaggcctgccttgtgcccagccagtcaccagccggctatgctgtgaccccgggaggtaactggcctctccaagcctcagtttctccagggtgggtgggagtgtggtgaggggatgcggcaggatcactttggggccatcaccccccattaatgcaggacatgcactggttcccagcctttggggtgggcattaccccattttacagatgaagaaactgaggccacagccaatgagacacgaatgtggtgtgcatctcacccttccccgtcggctttttgaggatggtcctggttgaggtgggccccgtcctgcccctctatttagagaaggggaccccattcctacgggagcacctcctgtccactcatctggcccctccctttatctggcctgaccacctccacccccaccctggccatgggcgcccctcccagggctgcgctcctccccaggtctccttccggctgccacccatgctcccggcagccgtggcccccaccttgacaggcacacccagccccgaagggtcagggctaggccagagagggagaggctgggataacccttggaagggggtcacaggggctgcggtttgaggaatgactaggagtttgtcacataaaaaagatgatgcggtcgggcgcggtggctcacgcctgtaatcccagcactttgggaggccgaggcgggcggatcacaaggtcaagagattgagaccagcctggccaacatggtgaaaccctgtctctactaaaaatacaaaaattagctgggcatggtggcatgtgtctgtagtcccagctactcaggaggctgaggcaggagaatcgcttgaacgcgggaggcggaggttacaataaacccagatcgtgccagggcactccagcctgagcgacaaaacgagattccgtctcaaaaaaaaaaaaaaaaaaaaaaaaggccg

SEQ ID NO: 33339 - DNA, 1963 bp, Artificial sequence
  DNA replication origin
ctggggaaggctaatgggcgggcatgactcggtgccaggcagggaagcaaccctggggagcccagtgtctccgcccagcaccccctccagccccccccaacccagctccttcctgacgcaggcgcccagggaggagggtgtgaagccaacacgccctgggccccctgccaaccgcagccccccagcggcggggagctctgctcacactcgccccaggaaatcacctgcagcccccgccctggctcgggaccccggctctgcccccacgccactgctgctgctgctgtggccacccccatggcagaccacccagctcccggcccccgccctgcccccgcgatgtagggaaagggcaggactctacatgccgctgggaaagcggaagggggtgcgggcctcggggccagggaggcccgggaagccggccaccccttgctggggcgggtggcagcctgcgtcccccaccctggcagcgggcggattgctgaggcctgtgtcaccctcctgggaggtggccagggcccttgtctgaggaaggcttggccgcagccaagaaaatgaggaaagaaggagaaaaaaaaaaaaaagtccgcagcaaaaccgggaaccgggtgagggccagccccagcctccctcctggccgcttactaaatattttcctaacatcctgtctaggcctcactggccccagggctgggcacccccgccccctcccctttcggggtagagaacaaaggccagagagaggaggggagggtgacgagatccccaccctctcacgatgggggtcacggaaggcggaaggagtgtcacccaagccgccacccccagccctcagcagaaatgtaaaaaaggagaaactcgctctggggaagccacagcggctggaggggggctcctcggtgggggcggagggggctggggatgcaggccagggtgtgagcggggatgaggccccataggccaaggtcatcctgcaggcagtcttgtgaaagccaggcccccttcccccagggcagccaccgtgggagagaaagccctccgggtcaggtggtgaatcttgggggagaggaggtggggaggccaggccaggctggcacccaggcggggtggcgcgtcccctcccctcccccagcctcctgggagcacagacaacccccaggccccgtcggtggccaaggcaccctgctcccagggctgccctgttaggaaggggctggcgaggtcttacctgcgtctccgtgagactctcgagagcttgcatcacggactgttccggccttgaggcctgagactacaaagagagggaggagaggggcctgagtgtggggtcggaatcctgggctggaatagggggtggagagggccctgctggctggcggggtgggggccccaggtagtgtgtgtgcggacaggtaccgagggaggggctactgcctgtgtgcgggggcctctgggggcacgcagccccatggccatttaccatgaggcccgcttccacggtgggtaccaaggtcagcttgctgccatcacccacgccgaactcctgcagcttccccgaactgagccggctggggggaggaaggaagagcatgagactccgcggagacgacacagggacgcggaagcagaggccgcgggggagggctgtgcttgtgtggggagagacggataagttcccacccccaccccttcccggcttccagatccagggccctaagcgcgtgcagagaggtctccgtctggtgctgggagccccatcctggcgattcggaccccttccctccagtggaacccccgccctggactctggcaccccctctgcaccccaaccaggcactttctcctcctctgggccccagtgtgctctatgccaccttcccccacgaccccagggcagcccctgcccccaattccctaattctagtcctggctcctctttgtaggaaccacgggtttcggc

SEQ ID NO: 33340 - DNA, 1762 bp, Artificial sequence
  DNA replication origin
aaactagcccaaggtcacgaggtcacaaccaacccaggacacagagatgacccatgagtcaaagatcaagagatcatctactggtccaggtcatgtcaggcgatgaccgtcaactcaggatctagaaataccccaccaatctaggctgggggatcacccaccagcccgaggtcacaggatagcccttaatacaagggactcacctgggactaagagtccttgtcctccccaagacctccccaggacggcccaccctttggattccaaccaagggtcacccttcccttccccaggctcacctccgggcaggtggtggaggctgcgtgggaccggaaggagccggctgtgatgggcgagggagatgcaggggacgggctggtgggcaccggggggactcgggcggcactggacaccggccggcagggcgaggacacgggggaggctatgctggggtccccccgcgcagcagcggcggcggccgcagcggccagcacatggcggtgttgcagtggagcgtgctgggccgcgagctgcagctgcacgaacatcatgtggtcgcccacacgcaaggccagtgtcagtggcgaacggcccgacaggaagtcactgacctgcaaggagagcggtccgtcagctgggagccccagcttgcggcgcccccagcccagcccggcccagtccccccgcgctgtgacctggggcctctcgccgcccctctctgggctctggggtccctgtcggtgccacggacgcttaaataaaatgaatctgtatttccggaagcctcctccgccagcccggcccggcccgggcgccgctgggggctgtggggacagaggcgggtcagacgggggcctgcccctccctggccaactaggtcggtcttgcaaggggaaactgaggccagagggggcggggcccagctggcagtcactgacctcaaacaaccttcactttgcctttcccccaccctcatgggcccctagatcctctctgcctgtggatacgggaggggctccacctcaggccccctcccagctaagtcaccagggccagcaagtgggtggaattcctgcacgaattcttctgtcctaacctttgctttctcaagataaatatttatctgtcctgggcggggcggaggcctagggggctgtggcaaggctgcaggaaggggccctgaccgccctggggctggagtcccggagggcacaacctgctccaagcacagaaaccctcaatctgcccccgttcagggtgggtgtgggttgaatctcaccctgtcctcgccaagccccctgctctgggtatgggccagagccctgctctccccagtggccgggatgggggggggggtggcggaggtttctgagaagtgacataggctgggatgactcagaaccgaccgcctcccagctctccctcccggctctcctctccactggcagtagctggcgtaaccttctctgcttggggcccatggggagggaggcagggaggagggcagggtgaagcccccaccctgcggcccagcctgcccggccccctacccccctgccccaagacagcctttgcaggaagggcccggggtggcttcccgagagcagctggagtccccaccaccacccgccctgcaacttcctccctggggaaggctaatgggcgggcatgactcggtgccaggcagggaagcaaccctggggagcccagtgtctccgcccagcaccccctccagccccccccaacccagctccttcctgac

SEQ ID NO: 33341 - DNA, 2323 bp, Artificial sequence
  DNA replication origin
tgagccacagagcgagacccctcctctacaaaaattacaaaattagctgggcatggtggtgtttgcctggagtcccagctacgcagctggcttctaattctccagctcagccatgagctggggaggtcaggactgtcctgcctcattcttcctggagtcctacatggagggggcttggccgcttctgtgatccgaggggagatacttgggggttgtaccttggttttttttttttttttttgagacggagtctcgctctgtcgcccaggctggagtgcagtggcgcgatctcggctcactgcaagctccgcctctgggttcacgccattctcctgtctcagcctcccgagtagctgggactacaggcgcccaccaccacgcctggctaattttttgtatttttagtggaaacggagtttcaccatgttagccaagatggtctcgatctcctgacctcgtgatccgcccgcgtcggcctcccaaagtgctgggattacaggcgtgagccaccgcgcccggccagtttcccacttttaaactgagctgggaggagcccccgcgacgggtgcagagcccaagggcagtacagtagccatcttctggtgagactctggagggagtaacccgccgtttgggagtagctggggccaggctggcaggggggttgtgttcgctgcttttccaagtcactgaaatgcttaggggtgggctctggccccgcctcggcctgccaggcctgacttggccattcacagaggcaccaaatgccatctggagatgatgccccgggtgggggtggggcaggaggaagtgggcctgtggccccccgggagcacacaaggacactttgtgccctgacacacatgctgccttctctccgggctggagcagagcagtggccacggcagctgccatcccccccagcccctgggcaggtcagctgctcctgagcccaccagctcacacagaggggccttgagaagcccaggcgggcggggaaggtaggacccccgagggtggccactcacccgggggcttgcacatgcggatctggctctggccctgcagcagggaggctgagggggcagccgtgagcttctcgcaggaggtagttctgggggccaggtcgggggccggtgaggccggggagcactgggcgtggcagcggagctgggccagcgaagggggcatgccctggtagtgccgggtggcgctcaggaggtcgttcaggatctgcaggatggtgccgatgtcacgccgcggccgcccgctgctgtcttggcagttggggtgtagcgtgcctgcgggcagaggtggccgtgagtgcccggcacgggcacagtcccgcatgtccaggacgggcgtccacgggtgtgagctcatgagctcaggcaatggcgtggacatgtgggctgatgtgcacgagggaccacggggcgggagcgggacacgtccccagtatgcaggcgcctggtgacccgcggccccccgggcagggccaggcgtgtgtgtgggggattcctgggggacatgtgaagtgagcagacggacacagcctgtgtatgcccagaatatgtggagtcgcctgtgggtggatgtagaccccaaatgcacagggtcacgggacacacgtgagctcacacatgtgctgtgacacctaccagagaaggtccctgagaagacccccggggcgtgattcacaaagctctcgatgacggcgccgggttttcgggagcggggggcagggctggcccctggggtagacgtggtgctggcaccaggactggcactgctgctggccgtgggggagcagtccatctgctgatgggaggaaggggcacatgagcacggggtccaggatcaggggatcaccagcaacccagggaccagagatcacccaccagcccaggtcaggagatgacctgtcaacacagggtttagagataaactagcccaaggtcacgaggtcacaaccaacccaggacacagagatgacccatgagtcaaagatcaagagatcatctactggtccaggtcatgtcaggcgatgaccgtcaactcaggatctagaaataccccaccaatctaggctgggggatcacccaccagcccgaggtcacaggatagcccttaatacaagggactcacctgggactaagagtccttgtcctccccaagacctccccaggacggcccaccctttggattccaaccaagggtcacccttcccttccccaggctcacctccgggcaggtggtggaggctgcgtgggaccggaaggagccggctgtgatgggcgagggagatgcaggggacgggctg

SEQ ID NO: 33342 - DNA, 1352 bp, Artificial sequence
  DNA replication origin
ggaacctccaggcaggaaccggctcgccaccctctgcccggtaagggctgcccaagaaagcattacccgccctcggggggtcgggctgtgggggtcccggcacctggcgtgagtttcatgtatgaaaacataaaattgaaaaaaaaaaaaaaacctacacgagcaccgtgatttcaagtaataaacagaaaatgaaacacacattgactcccgcctgctcgcctagtggggggatctggccttggttgggagggttcctggggtgggatgtcagctcagggagtcagagggactgacctgggtcccaaggccccgaagagggggtggggcaggggtcagggccctgagaatttcccacgctccttccccggctgccgggtgggcaggaagcagccagggtgggagggaggagcccagccacttcctggtacccaaggccggaagtcccttagggtgtggggcgagggcctgcctgcctgcttcgtggcctgggcaggaccctggccccctcaggacctgccagtatgggggagacgcgaccaccagctctccccagccacaggagtcggggactcccactctgccacacccacctgctccccttcctggagtctcacatctgtgtggcttgctgcagggagatcaccaggccgactgggaggacctaggactccgcagggtaccttgggctggcaggtgatacaggcctggcttgacccagccctggggggcctctctggccacacctcctgacattccagcccttcccagacctggccttcagctccaaacctcccggcctttgccccctgtctaggaacacccctggtccggctgtcccttgctgtctgggaacttccccagcctgcgccttccacccctgtccaccccgtcccgcagaccccacccttccctctctctgtccctagcctggagctccccgtgagcctcaccaggactgagtcctctctggggtcccacctccacccatgtccgggctgggcagagatgaggcaataacactatttcatgtctttttttaaattttgtaacctgtatttcctcaggtaacaagagttgcctatgagaagtaattgggctcccattttatagatgggagaacagaggcccaaagaggaacatcacttggcccagaggatttggggtgtttgttcaatgatgtgacctccaccccttatcccatctctaggggccccagtaccgggagcccccaggggaaggggcacaggttcagagagtggcctgggagcaccttcctgagacccctctgcccctcccaacgcccagtcaaccccaaatcatcgcacgcccacggcaggaaggcggatgcc

SEQ ID NO: 33343 - DNA, 1659 bp, Artificial sequence
  DNA replication origin
acggagaggtaaactgaggcacaaagagggcagggaccgctgggatctcgcggggcggggtcggccctggatcgctcccttcccccaaccattgaggaaaaagctgaatgggagggggcggcccccggaaacccgccgggatggaaacgcggtttccagggcaacgcgccgcgaaaggagcctgacgtcaccccgggtagggcgccctgcccgcccccgtccgcgcgtcgcgcggcccaggccccgcccaccagcggggaagcctcattggtgatcgcaccgctcgctcatcggcgtgccccagtagcagcgcgacgaagcctccagaaggcgggacttcagcccggcagcgccgagtgcgcaggcgcaagcgcggaggcgctgcagccccgcctctctccccgcgcgtctgcaaagttgggggcgggaggcgcagccgagggtctgacggctgcggcggggcctggacggaagagggggcgagccccggggcgccgcacgtggacccccggcacgggcacgctcacgtgcacccgtcctttcacgccaacgcgtttcctgctgcccccacccctgcaccactgcacgtcccagaccccggcccagcctccccgcggtccctaggctgggggagctcagacaggaggctaggaggagggggactttggggctgaggctttgccaaaggagcaggagtttgccaagtgttgtaggaagcgggaagggtgcgccaggtagggggcacggcgtgtgccaaggcccggaaacgtgaaaccgagtgcttttcgggggcaaccgggaagtcagttggtggagaaaaatcaaagatgggaggaaaggcgaggctgacaaggaccctaaacggtgattccccaagtcggccactggagggatgacttgggggaccagagaggaagagcaggtgagggggagcggcggccaggacatctgggaggtggctagacccgtggcctggactttggggggcggtcgagttggatcgatgatcgatggggaccctggcggcctcaccctgggggaggtagagacgaaaaaggaactacggtgtgcccggaaggtggtggctttaggtccacagggaggtggttggcaaggcgggggtaacagggggaaggagaaaatctgaaatgccggtgtgagctccgggccaagagagttgaggactcaggaggcaggaatcccccgtggccgcccgctgcttggctgtgggctccaacttggtgtgtgctcagagaaggcagtggttggagtgaacagggcctgtgccaggtggggagactagccaaggtgtttgtgcagcctggcctctggagcggcctgggaagagctggagttcgcagggtgggagctgccctgtggctgggagcccgtgctggcgtccctgccaggcggtgatctcacaggtgagcggtgcttggggagacgcggagctgtgggcgggcaggagaaggtcagtggaggtcatggcttttggcttgaggccggagtcctctgggggtggccgaatgcgcccttggagctgccttgggaggtggctagggtggacagcagtggaagccaggcccttggcttagagccactgggttggagggattgagccagtgcccgggcacagccgcccccacagggccttgcccc

SEQ ID NO: 33344 - DNA, 1395 bp, Artificial sequence
  DNA replication origin
tgaaatcccttctctactaaaaataaataaaattgggctggatgctgtagctcacgcctgtaatcccagcactttaggaggccgagacaggcagatcacttgagatcaggagttcgagacctgcctggccaacatggggaaagcccgtctctactaaaaaaatacaaaaattagccgggcgtggtggcgggcgcctgtaatcccagctactccagaggctgaggcaggagaatcacttgaacccgggaggcagaggttgcggtgagccgagatcgcgccaatgcactccagccagggcgacagagcgagactccgtctcaaaacaaaaacaaacaaaaataataattgtcccgtatgctaactctcctgtttcatttgtatttccaacatgcacagaaagacttttggaaggcataggttggggctcgcctgggaacccctctccatcccccacccagactccagcaggctggagtcaagcttggctgggcagcggaggatcactggtgcacagaggggtgagtgggtgagtgtctgtggctggaggccctgggggtgttcctgcccccgcccaggcgtgtgttggttgtgggggaaggctgctgccctctctgtatctggtcagggccctctttgtatctggtgacagctgcggtgtgtggtgggactctgcaggctggagttttgtttggggaggccttggcccaggctgagcaaggaggttctgtttgttttagggtcacacagtggattgaggttggggacaggtatatggggtgtgtctgggggggggggttgtgtatctgggagcctggcacaccagccgcacccataaatgcgtggcctgtggagggctgtcccgggcgtgctggtcgggggtgtgggatggctgtgcaggcccctcgtgggatggcacccattggttttgcttgctctcccccagggctgagtgtgggtagcgtcctgggtatggggcatgtgccctccgtggaaaccagctgtctcccttgccccgctccacccacattccagaggggttgggggtgccctcccaggctcccgcccgctcctcgacctccgacctcggcccaagcccactctctctgctctggcaaccgaggaggcagctggctccagggagggactgcaaggcgggggaggaagctggaatgtgccccggggtgaagggggcccccagagagggggcggaagcaggggagggacggaggggcggagatggtggtactgggttggggagagcgccagagatcgggacagaaatagagaaaggcaaaagaaagagaaatggagggagtgagaaccagaaagagggtggaggcagggcccaggtgacagcctcccctcccccacccgctgggctgggctgggctgctc

SEQ ID NO: 33345 - DNA, 1325 bp, Artificial sequence
  DNA replication origin
ggaatgtggaggctgggaggccctgtctactcctgccccggccaggccatcccagcagcccaaaggccaggcctgggccacagagggacatccccggcacacacaccccgccacaggccacacacaggtgcacacccacacccctgcttcgtacccactggacacaaagtcatacaccatgcactcggcatccggagaccctgcctgccacaggcacacgcagtagacaggctggggacaggacggaccccgacctgccctggggtcacacacctgtttgctctttcagtacacaggatactgcagagacataggtgaccccttctgctggggcgcagaccagccaagcacatgtggcggacgtgtagtgacgtgcacccatgcgtgtctgtgacgtgcagatcaggtgtctgtgaaaggcccaagaccctgcatggcccacggacaccctaaagctgaccgaggcttaggctcgcctgcgtggacgctggggatgcagccacctagtttctgaaactgggaaaaggtctgggggctccggagcccccacctccatgcagcctcagatgttgcttagcaacagatgcgcgctctggggtaggcggatggatctccacctgggcccagttccctctcatgggactacacgtcctgtgcctaacagagaggtcaaagagtggggatttcctgcaaagccaaccaggctcagggtggccctgcctagggtgggaggtatctccatggcaacagtggagtgggacaagtggagagtatttccccactctcccaggcagctgcaggggctcaggacctacggagtgcaagtgaagacacctatgttgcatcttgctggagaggcacctggcacctgcccgccccagcgtgcctggagggttcccacatccagacggacagacgggccaggggacacccgtccaggcagccatggctgctcagccacagtccctggagggtcaggggcccagctgtgaggcaggcggtgcccaagacgctctctggaccgcactgcttcatctgagaggtgggcatgccagcagcacctcctggggttagaggcgcacagggaagacctggtaggaagtcggtcaagggcagttagcagcaaaagacagctccacgcagcgccaggctttccttgttgtttgcttccttgatgtggcagtccacatggaatcatcccgtatgcaggccgggagcgctggctcatgcctggaatcccagcactttcgtttgagtccaggagtttgataccagccggggcaacatagctagaccctgtctctacaaaaaaaaaaaaaaagcaa

SEQ ID NO: 33346 - DNA, 944 bp, Artificial sequence
  DNA replication origin
aaatactctccacttgtcccactccactgttgccatggagatacctcccaccctaggcagggccaccctgagcctggttggctttgcaggaaatccccactctttgacctctctgttaggcacaggacgtgtagtcccatgagagggaactgggcccaggtggagatccatccgcctaccccagagcgcgcatctgttgctaagcaacatctgaggctgcatggaggtgggggctccggagcccccagaccttttcccagtttcagaaactaggtggctgcatccccagcgtccacgcaggcgagcctaagcctcggtcagctttagggtgtccgtgggccatgcagggtcttgggcctttcacagacacctgatctgcacgtcacagacacgcatgggtgcacgtcactacacgtccgccacatgtgcttggctggtctgcgccccagcagaaggggtcacctatgtctctgcagtatcctgtgtactgaaagagcaaacaggtgtgtgaccccagggcaggtcggggtccgtcctgtccccagcctgtctactgcgtgtgcctgtggcaggcagggtctccggatgccgagtgcatggtgtatgactttgtgtccagtgggtacgaagcaggggtgtgggtgtgcacctgtgtgtggcctgtggcggggtgtgtgtgccggggatgtccctctgtggcccaggcctggcctttgggctgctgggatggcctggccggggcaggagtagacagggcctcccagcctccacattcctgagctgtgactcaggcctgtggggagggggtgagtcacagggaagggaagccgacccaccctgcgaacgcatccgaggaacaggagggaaactgaggctggggagcagctcagtccggctttcctgtgtagcagcccctgaatctcaggcccgggggtggggcgggg

SEQ ID NO: 33347 - DNA, 1006 bp, Artificial sequence
  DNA replication origin
tccccgaacctgctccccgcgcgtctgtcttgggccccgtgggcccattcacaaatccgccccctttccagcctgccgtctcggaaggggcgcgcacctcctgcaccctgatactcctcccgggcctcctcccctgcggggcgtcgccatggagacgagggcggagctccctcgctcccgcaccgcccactccgccctccccacggggccccgcccgccggacgccaggtcctcccccgaccccgactaatgaccgggcgggaggcggtagagagcgtctaggcctgcgacgggcgtggccgaggatgaaaggcgcgtgggggggaccccggggccgcataattaccgcctcctcctagccaggcgggggccgggaccgtgcacctggcggccgccccgcgggggcgcagaaataggaccgtcctggcagaggctgcagccgacccagctggccccactacgcggggcccagagccagggtgggggatgcagagaccgggcgtgcgggttgccaggtgtggcgcacatgtgtgcccgtgggcagagtacagagacacaagcttgtgtggacacgaatgtgtagctatgtgcgagtgcacacggcgtggtgagtgcagggaccccaggccggcctgcgtcggtgcgcagggcatataggggcgtgcacgcagtcttggaggtgtgtgcacagagcccccggcacccgcgtgtgtgcaaagacacaggaacccgtctgcgtggcgctgtgtgtgcaacccaaggaggtgggcgcttggactccaaagtgtgcgcttatccggatgtggatgtgggggcagccggggacagggctgggtgtgcgtgactcgggtgtgccgggacccacagagcatatgtgtccatgcctggtgctgtgactcatgtccctggggtgggcacgcgtgctgtgtcagcgggagccgcgcctcccagggcagcccagagttccagaagcccagaagaggaagggttaaacctgcctcttccc

SEQ ID NO: 33348 - DNA, 1064 bp, Artificial sequence
  DNA replication origin
cgccccttccgagacggcaggctggaaagggggcggatttgtgaatgggcccacggggcccaagacagacgcgcggggagcaggttcggggactctgactgatccccgcgcctcgccgggcaggggcgagccccgcgcgtcgggcccggaatagcagtctcgcccccgcccggcgcggctattttgagctcctccgttggggccgaggcgcgggggcggcgggaggctgggggtcgacacgcaggctgcgtcctcgccccgcgagattggacccctcgaggactgtgcgctgtggccgcgcagggctgggcggcggggccccctctcccacgcgaggcgtctgcgtggagcggcggcaccgggagcccggccgctcgagccaaacgccgcggacggagcgaggccgcagcgccccctggtgtccgcaacgggcagcgcgtcccggtcgggtcccgcatggtcagtggccagcaggggtggatgaaggggtcccagccgcctgagacccccggtggggacacaggatcgcggtgagatacctgggagtcacgggtgctcgcagacgcagctgaccccagaggcacaggtaccgacacaggtccacacctggaagccggtgcacagtgctcggcacagatgcaaagcggcaggtgtgcgcaggtgcgtgtcaacgccaccctgggaacccaggatggctgcggacactcacggagcccgcacccaggaacccgctcgtagtaagcgcttaataactaggcactggctgaatgaatgaatgaatgaatgaacacggcgcttcgcaaaaccaggaaaaggcagaggctcacagaaccagggaacgatgggctggggggagcggcaagaattacgcaattatgcaggggccgctgtgactaccaggcaccccctccaactccccccctacaagggctgctctgggtcagagaacgtccaccgcgctgactgctggggctgggggctgggggcgcagatcagaaagaatgggcctgaattgctcccaggctgggcatgtggcgcccgcgtctggggctccagtgggtggg

SEQ ID NO: 33349 - DNA, 1680 bp, Artificial sequence
  DNA replication origin
ccaggatggctgcggacactcacggagcccgcacccaggaacccgctcgtagtaagcgcttaataactaggcactggctgaatgaatgaatgaatgaatgaacacggcgcttcgcaaaaccaggaaaaggcagaggctcacagaaccagggaacgatgggctggggggagcggcaagaattacgcaattatgcaggggccgctgtgactaccaggcaccccctccaactccccccctacaagggctgctctgggtcagagaacgtccaccgcgctgactgctggggctgggggctgggggcgcagatcagaaagaatgggcctgaattgctcccaggctgggcatgtggcgcccgcgtctggggctccagtgggtgggtggcccctcccgcatggacggcgggcgcaggggagctcggtgctgatgtctctctcctttaataaccaccctgcgtgagtggctgacgcagcagccggctgccgctgacggggagtggggcggctgtagtgggggggcccgaggtgcagagggggtggtgatgaatcacacagctgctgcctgggggagggggtcttgagcccatgaggggtcccagagaccttgtcactggagacagcgcccctggctacccccacctcgatccacttgagggtggaagtgagtctgaggtcaggagtggggccgggatttccctgggatgagcagcaaagcgggggtctctgtacgccaacttcccccagcttgtcagcagagggtcatccctccgaagactttctggggcagagaggcaggggtccgcgctggcttcttccaccagggctgggggaggcggcggcatgagatgactcctgggcgaggagcaagtggtggccatagagggccccccagaggctttggggccgccgaagagtagtgagtgagggtccttgtaaagctggttctccagatggcggcggctttaagactcccctccgccaaccaggctcagtaggggaggcctgtggaaggagagaaaaggcctgggtggaggagcagagtgggcctggccccgcgtggggagcgagtgcgccgttgctgtgcagcacggtgggaggggaggccgagggccgggcggagtgctggggtgcagtggggactcggggtgtccgcctgcacccgacagcagggacgcacaacactatccggccaggcgagtgtgggggtgtgggccacgcacccagccgtgataatcgcggttccagtgggagttaggcttgggtgcgggttggagtttgtaggcaaactgggttgcgtaaagttggggtgcaccaaagtgtggcgatgtaggaagaattgggattgcgaatattggggttcgcatgaatggggttgtctctgttggggttttggtgggcatggggttgatggcaggaatggagtgctggggtgctgggaaaactgggacgtcggttgtattggcaagaatatcacgacaggtgtcggggttcagatgaagttgggatgtctgacagccgggtcttggttgggtaggggatctgggctaggttgttatgtcgggactgctggagcacaggcaaagtcggggtcccagtgacacccagaagtccccatgaggcctgaggcctgggaatcggggctagaggcccatttgttccccgccgcaggccagggagcaggcac

SEQ ID NO: 33350 - DNA, 1222 bp, Artificial sequence
  DNA replication origin
ggggcccggcggaagcgtatataaggccgggctcggggacgcccccccctcactcgcgcgttaggaggctcgggtcgttgtggtgcgctgtcttcccgcttgcgtcagggacctgcccgactcagtggtgagggccctggctgcaccggctccgaggagctcggggcggcgggcggcctgcggcggccaggcgaggcggggccgcagcggcacgcccctgggagggggcgggcccggggtggagtccgccccgccggcggcgagggacagcgggagattgggccgagtagcggccagagggcctctccccgccggtccgggccgccggcgacccggttgccgccgcaaaatggcggccgcgagctcgaggctgtgcccagcgaaatggcgggagcgccgagttcccggatggagtggcgcagggtgcgcgcggggcgcatgcgcacgcggcgggggcggggccacgtggcgcccccggtctccagggccgctttcccggccttggggctggaggtatccacacaccaacgcttttgcttaccgagccttagtttcctccttttcccattgcgattgcatgagggaaaggacggcctcgtaaatcttgggtaggcgtggcccgttctagtgtggttcctcgtctgccacgtcgtgctttgcgcccaaagtttggtccaagttggcacagctcccagtgccagacttccaagtctagttctcagagccactgggtggcggccattcccagccagtgaatgctttgtctgtgtcagcactgaccgcccccttaaatagccagttctcctaaatgccacttcccctgcctggaaatcctgccttatcacttccggggccatcccttcccgattcccggcctaggtcctggctatggaagtcagtacctgccctgaggtgccccccaggacggggcggcctccctgacagccagccccccccccagtctcaggaggcattttacagtgagcagaagcacgttctggtccagcaacaagtagatgtcagttggttagggtaggagttggcacccgttcggaaataggagaacctgagagtgcagtcctgcccagggcacaactggaaggctgtgggggaagggagacacccattgtggaaatgggtgcggcctgccttcagtcttgggggtggatggagtaaattatttgaattaagaagtcctaggtggctgggtgcggtggctcac

SEQ ID NO: 33351 - DNA, 1176 bp, Artificial sequence
  DNA replication origin
acaactggaaggctgtgggggaagggagacacccattgtggaaatgggtgcggcctgccttcagtcttgggggtggatggagtaaattatttgaattaagaagtcctaggtggctgggtgcggtggctcacacctgtaatcccaaaactttgggtggccaaggtgggaggattgcttgagcccaggagtttcagaccagcctgggcaacagagcaagaccccatctctactaaaacaaatttaaaaaaattatccaggcgtggtggtgtacacctacagtcccagtttcttgggaggctgaggtaggaggattgcttgagcccaggaggtggaggctgcagtgacccctgcactccagtctgggtgacagttagacacactgcccccgaccccaaaaaaataagtcctaggtatgagtttgagataatgaaaaataaaaatctgattttctaatatttcccctaaaaaacacatgtcatttacataaaataggaagcggggagaggtggtgagagatgacccctgttgaggatttcattggtgtctgccacaggccgccatggcatcagatgaaggcaaactttttgttggagggctgagttttgacaccaatgagcagtcgctggagcaggtcttctcaaagtacggacagatctctgaaggtgaggctgctgctgggcccgcggccctgggcgggggggcttgtgctcctcctacctggaagtacagctgggtgctgactgcagacctctctcccctgcacagtggtggttgtgaaagacagggagacccagagatctcggggatttgggtttgtcacctttgagaacattgacgacgctaaggatgccatgatggccatgaatgggaaggtgaggatcagggtgctgagcaggagtcccgtctcgaggatggggcacccacctgctaacccgtcccgccctctgtctccagtctgtagatggacggcagatccgagtagaccaggcaggcaagtcgtcagacaaccgatcccgtgggtaccgtggtggctctgccgggggccggggcttcttccgtgggggccgaggacggggccgtgggttctctagaggtgagtgccatgagtgggtcccttggggatgctgtgaggtactgctggtgggagctggtactcactttttcctgtatgtgcag

SEQ ID NO: 33352 - DNA, 1180 bp, Artificial sequence
  DNA replication origin
ggcagcaactgccctggagccccagcccctgcgtccatctgtgctgtgcgccccacagtagacgtgcagacgtccctgagaggttcttgaagatgtttatttatattgtccttttttactggaagacgtacgcatactccatcgatgttgtatttgcagtggctgaggaattcttgtacgcagttttctttggctttacgaagccgattaaaagaccgtgtgaaatgaaccttgctctgacaattcccttgcattgcaccacacactccttgctgcgggctcctgcagccagacctgagcagagagagaaggtggagaagcagcgggtctgcaagccttccctggggcctgcagagctagaaagggaggcccagcagactggcgctggtcagggtaggggagccaggcgggggacgggagcgggcagctcaggcctcagggcagccctgggaggcttctggcagtggtggccagagggctggactgtgcgggcagcttagcagggacagtggacgtgcacctgacgctgacctggactgcctcagtctagaagcaggccagagagcagaggcacgtggcatcccagggcgacctcagacggccagccggttagctagttctgctgttgcttcacgagttctgagcattctctgctagcctatggaagctgcagccctcggaggacagaagtgttgtgcgcccaacagaaccctctgagacgcaagctgctcccttggctagctcatatgtggaaatagccctgtaattcgaggtaactccttccgctcgtgtccacatccctcttgttgagagctcactgaaagtcatgtgcccggggaatgttcctgtgactgttttttgtttttccttttttttttaactttgtttttgtttttttcaattaagctggaactaaagtcaggcccagccattacgctccccacgtgcagccaggtgcagcctgggcccagtcatgcctggctcatagatgaaatcccttaagcaggattgaagaccagtgaacgcccccgccttttggattttttgctcaattgaccgtcttttccagacctctttaagtcacactcttaacttagctttctctgatgtctgttgccgccattagtttttttctagagcccacactggcccacatagctccatcccatacgggtagctg

SEQ ID NO: 33353 - DNA, 905 bp, Artificial sequence
  DNA replication origin
caagcctgctacagggaacccgggactcggcccaagacggggcctgacagcggctgcgcggccgccgctccctcgaagccgagtgcgcctcagatcccgcgagactggagtctccgcgctgcgaaccccctcagtggcgagccccccgcggtcactgctcggacaatgacccttgcagtcttccctgtcgggtcctactcgtgcgctgaaccgaggtccgcaggcttttcttccagtggccccgctccgccgacagacccccctgaaccacagactcggctttctgggtgcacacgtggccctttattcgaatccgactttcacagggctccacatcgttgtgggcaaggactggccgccccgtaagctgccggcgcaccgcagcccgtgctccaggagagactcgaggccctgagcccgcacctcactggcgaagcgcctcctggaaggaggaggaagggagggagaacaggcgcgggctccaggcgggggacccggcgctcccgggaggcgctgccctgcacccaacacacaccgaaaggcgcccgccatggggccataggtgcgggagagcaggactcactgaaacgcccaggtgccgcccgggacagggctcagcgccacatgccactcttcccgaaagcacttacaggggacaagcctcctgggcaagcggctgcctccagctcttgttccaggtgaagtccctcctgggacagtgaccccagaggtcatcgctgctctcaggccacccttccccgagtcctggccgggccccttcaacctgccaaagcaaagcagcgttactcccaacgtcctccacagggctcacagctgcccctcccggcctccccggaaacagccacagcccctaggaaggtctcaggctagtcagggggctgtga

SEQ ID NO: 33354 - DNA, 1122 bp, Artificial sequence
  DNA replication origin
agccccctgactagcctgagaccttcctaggggctgtggctgtttccggggaggccgggaggggcagctgtgagccctgtggaggacgttgggagtaacgctgctttgctttggcaggttgaaggggcccggccaggactcggggaagggtggcctgagagcagcgatgacctctggggtcactgtcccaggagggacttcacctggaacaagagctggaggcagccgcttgcccaggaggcttgtcccctgtaagtgctttcgggaagagtggcatgtggcgctgagccctgtcccgggcggcacctgggcgtttcagtgagtcctgctctcccgcacctatggccccatggcgggcgcctttcggtgtgtgttgggtgcagggcagcgcctcccgggagcgccgggtcccccgcctggagcccgcgcctgttctccctcccttcctcctccttccaggaggcgcttcgccagtgaggtgcgggctcagggcctcgagtctctcctggagcacgggctgcggtgcgccggcagcttacggggcggccagtccttgcccacaacgatgtggagccctgtgaaagtcggattcgaataaagggccacgtgtgcacccagaaagccgagtctgtggttcaggggggtctgtcggcggagcggggccactggaagaaaagcctgcggacctcggttcagcgcacgagtaggacccgacagggaagactgcaagggtcattgtccgagcagtgaccgcggggggctcgccactgagggggttcgcagcgcggagactccagtctcgcgggatctgaggcgcactcggcttcgagggagcggcggccgcgcagccgctgtcaggccccgtcttgggccgagtcccgggttccctgtagcaggcttgggagcggggcgccaccttcctgggccctggacgtggccgacgcgttctcagtgtccgtgaggccggggcaggagtggcgggggtcgccccgaagtgggtgggaatgagcggcccgaggtcctgaagtcggggtccgccccgtctccccgctgccagcccgatttcctcggaagccgcgaccccccacgctgggctggcagttctgggctctgccggctgcg

SEQ ID NO: 33355 - DNA, 1295 bp, Artificial sequence
  DNA replication origin
gactgacagcgcgcataggggcggggcgccgccaccgcttccgccgggccatggggccgcgcgtgctgcagccgccgctgctgctgctcctgctggcgctgctgctggcggcgctgccgtgcggtgccgaagaggcctcgccgctgcgccccgcgcaggtcacgttgtcgccgccgccggccgtgacgaacgggagccagccgggcgcgccacacaacagcacgcacacgcgtccgccgggggcgtcgggctcggcgctgacgcgctccttctacgtgatcctgggcttctgcggcctgaccgcgctctacttcctgatccgggcgtttaggtgcgtcaggcgcacgtgggcgccgtctctcagccttggccaattagcgcgcgcctagtgcgtcacgtgccgggccgcggggtcctcccctccctccctccctccctccctctctccctgttggagtgggcgtgggcggtgctgtgcggggtcgtcacgtggtgtgggcggtgcaggggccacgggactcacccgctctccagcctgcgcctggggttggaggtgcccagcgcgccgcctcttaactcgggggtgacgctgcccgtttcccaggtggggccactgaagccggagcatgccgggcaggggtcaggccctggcggggcgagggggcctccttggctccttgtcgccggatgcccgtcctcgttctcatcttcccgcctgccgccaggcctttccgtggggtcccgatattttcctttctgcttctacccactgaagctggttcgtcgccagggtcggccacgtgcccgccttgggtgctcccacagcccgggaggtgcagctgcgtccccagaccctcgcgggggtctccagctgtaggcagcccctgggcaggaggggcttctgcgtgttcaggccaccccggcttccctggcctgtggctccagtctcctctgggctcctgactacccagtgtggctgcttctcccgggtgggagagacacagcgaggaccttatccctccccatcaccaccctggcaaagtcaagccgctttttattttttataagtttttattgtagcgatggggtctcgccatgttacccgcgctggtctgaactcctgggctcaagtgatcctttttcgttggcctcccaaagtgctggcattatagatgtgagcacctgcactccgccatgctgctttttatgggccctgtgcagagcctcccctgtgctccacacctcttcctgtggaagcacctgctgcgcgctctcccctgcctgtatgccgcgcc

SEQ ID NO: 33356 - DNA, 1205 bp, Artificial sequence
  DNA replication origin
aggggcttctgcgtgttcaggccaccccggcttccctggcctgtggctccagtctcctctgggctcctgactacccagtgtggctgcttctcccgggtgggagagacacagcgaggaccttatccctccccatcaccaccctggcaaagtcaagccgctttttattttttataagtttttattgtagcgatggggtctcgccatgttacccgcgctggtctgaactcctgggctcaagtgatcctttttcgttggcctcccaaagtgctggcattatagatgtgagcacctgcactccgccatgctgctttttatgggccctgtgcagagcctcccctgtgctccacacctcttcctgtggaagcacctgctgcgcgctctcccctgcctgtatgccgcgccctccctgcctcccgggctgctggggccaccaggggcttggccctgagacaggcttccattctgttgtctttggcaaagtctcacccctgtgtgagcctcagtcttttcatcagtgcaatgggagtgacatcagcgtgcctctcctggggtcctggcgcaggggagatgggagggcctggtagggcacatgtcttcttactgtcatcgccatgggagtgaatggtaatcacttggcgattaggacatgaaagaagcaggcacagcaaaaccagggaggtctgcagcagggctcggggctccagtagaggacggcaatgagagtcctgagggaaggaggaggcagggttggcggggaggggccactgactatgcctggacctacttccaggttgaagaagcctcagcggaggcgatacggcctcctcgccaacactgaggaccccacggagatggcctcgctggacagcgacgaggagacggtgtttgagtcccggaatctgagatggtgtgcacccttccccagctctggggcctcggtgggcaggctgggctggagactcagcaggaccctggggacttggccaagccatggagtggtccctgcaatcacagctgacagcggtagtcaggccatggccccactgggcagggctcatcccttctcccagcctccatttacaactttttttttttaaacttaaatgtttgtcatttatttatttttgaggtggagtggcgcgatcccaactcactgcaacctccgcctccgggattgaggcgattttcctgccacagcctcccga

SEQ ID NO: 33357 - DNA, 811 bp, Artificial sequence
  DNA replication origin
actgggtgcttctcaggggctggctggcctaggacggggacgtcagtggccttaatgtggggtcagtggtggctcaggccccccacagaggagatgggcacctgggggtgagatccctggaggtggggagtcgagggtacaggggtctcagcacccccagaagaggcagagagccctccgtcgcctgccaacccgagtgactgtgatttggcacatggggccacatccctggggcaccccggcaccagggcggcagaggagccctgtctctatctccccaggatgaatgtcggccccaagctgtgggcacaagccggcgccgcaaggaacccaacgcatcccgcctttgaggccacgtccccagcgcccacccgcccctatttcacaagcggagaagccccgcagtgagtccactggactccagcctgggcggggcccgctgctgaagcagagacccccacccccccccacccagaggcacagacctgatatgctgcttgtccagtgggcacaccgaggggcaagggtggggggcatgggtctgagacactccccggcgtggggttaggagctgagcaggtcacacccatgtgtgtgatcgcgtgtcccacggggctgcgggcgtcccatccatggaactgtccgagttgcttaccgtgtgtctatgagactgtattttgtgggtgcctgcgtgtctgcgtgtctgcgtgggagaggtggaggaagccactgcccgcccccgcaagctcccaggcacccgcacacacacgcactcccacgggcacacacacgctcacaagccgagcaccag

SEQ ID NO: 33358 - DNA, 1060 bp, Artificial sequence
  DNA replication origin
ttctccgcttgtgaaataggggcgggtgggcgctggggacgtggcctcaaaggcgggatgcgttgggttccttgcggcgccggcttgtgcccacagcttggggccgacattcatcctggggagatagagacagggctcctctgccgccctggtgccggggtgccccagggatgtggccccatgtgccaaatcacagtcactcgggttggcaggcgacggagggctctctgcctcttctgggggtgctgagacccctgtaccctcgactccccacctccagggatctcacccccaggtgcccatctcctctgtggggggcctgagccaccactgaccccacattaaggccactgacgtccccgtcctaggccagccagcccctgagaagcacccagtgctttgctgtgggacacaaagccacacatggctattcacgttatttcattaagttacataaaactggaggtccagggcctcagtcaccatggggagaggtcctcagtcgccatggggagaggtccgggtcctcagtcgccgtggggagaggtctggggcctcagtcactgtggtggacagcgattggtgggggcagggacatttcctttgtcttggaaagttctggacgctggtggtgtctggacactggagaacgggtctgtgttcaggccccagacctgaaggtgggatgagggagagaggaaggaggaggaaggggaggagggaggggacagagtgggaaggagaaggatgtgaatggagaggaaggatgggaggaggaaggaaggaaggagggaaggggaggaggaggaaggagaggagggtgcagaggatgggggaaggaggggggaggagggtgtgaaggggaaggagggaggagggagcggaggactgagaaggggaggaaggtgtaaaaggagagggagagaggaaggaagggagggggtattaagggggaagagagtgggaagggggaggagggaggggagggtagtatgaagggggaaggaaggagggaggggagaagggtgggaaggggaggaaggagagagggagggagggg

SEQ ID NO: 33359 - DNA, 1664 bp, Artificial sequence
  DNA replication origin
gcgcggcggcgcttggagatcccgggccgcccccgcctccgcgcgcgcgacctcgggcgccgagaagtcaggcggcggcggggcggggcgccggggtcgccccgggcgcaggacccggccgcgcggactgtcggagcgcgggccgccgccgccgcacccgccggggaggggcccgggctccggcctttgtcccgcccgagcgtcgggagggccgcgggcgccccctcccgccgtgccccggccgcgcggggactgggcgggggtctccagcctgcgcccgccccctgccccggcccaccccgtctcaggctcgtcccccggggcctgcccccagcgaccccgattctgcgcgccccccgccggcatccgcgtggcccggcctggggtctccgaggggcgggggcgcaccctgcctcccgcgcccccacgcgctccacccggcccggccctgggtcccgggcctctcacctgcccggttccagcgctatccgcagcctcaccaaccccgacgcacgcgtcccaaatcgggctcggccaactccagtctccctgcgggggccggggcagagtttcagaggggcgctggccaaagtccaaagctgctcgggctgcgacctccctggggccctcctgggagtcgcctctccggacccacgctgttccctggggatggagtaagtccctacacctcagccctaagggtgccgggagcatagtaggtggaccgatgtggagtgtgagcagctggggatgggatccaagaagcccagagtgaagccccggccgacagcaaatcagtctccacgcacgaatcctgcaggcaggggagggccgctgcccgggggcacagcttgtgcaaagacccggggtctgatctgttcagggaacgccgagtgatttctcctcctggtaggctgacacaggtggggaactgggggcctggcctctgctttgtcttttttccaatctatagagacagtgtctggccatgttggccacgctggtcttgaactcctgggctcaggcgatcttcccacctgggcttcccaaagtgctaggattacaggcgtgagccactgcacctggcctgccctctgtttttgcccttattcatgccacagcctccctcaccagactctgagcttgtggagggtaggctgtcatcaaacgctggctggactttgctggcgatgcccagatcgtgttgtacgtctctgaattagtgtcattcaccaggcccagtgcaggagagggaactgcagggcaagcaccaacagcccttggacccgaaggtccctgtgtgaggcattacccaaactcctggcagggaccgtgaacccagagatgggcaagctaacctgtgccccagcaaggtggggtggggaccggacccaccaccgtcccacagctctgagacgtggtgggctctgtcctgtgtctcctgcgtgccctcctcccccgattccccagcgggccacgcgggccacaccacctgacctttgttcaggctgggtcctgctgggaagtccttccactttttcttcctgttaaaatcttgctcttccagaaaggtctgtcccacccagtgctctagcgtccctgccaggacaaggttctcagttctctctcctccagggagctcagcccgtctgttctgagctcca

SEQ ID NO: 33360 - DNA, 1570 bp, Artificial sequence
  DNA replication origin
ggtcgcgcgcgcggaggcgggggcggcccgggatctccaagcgccgccgcgccctcctcccgcccgccctccgcccgcccgctcggcggcggcggcggcggcggaggaggcggagaaggctggcaggcggcggccgggagagcgagcgcggcggccggaccggggccatggcgcccgcgcagcgcccgctgctcccgctgctgctcctgctgttaccgctgccgccgccgcccttcgcgcgcgccgaggacgccgcccgcgccaactcggaccgctacgccgtctactggaaccgcagcaaccccaggtgagcgcggccgcgcgcggggggcgcccggggaccccccaacgccccccaagccgcgcccggcctcgcgcccccggagctccgggcgccccccacgcgcgcgccgccgccgggatgcgggcgcccggttcccgcgggagccccccagggagctccggccccccggagtttgggggactcgcccttttcgcgcctgccttccccggggcgccccattgccctacggactgtggggactcgcgccccacatcccccagagcgccgacgtctcctggagtttggggaacccctctggtaccctccgatgccgggtagcccctgagttgcctgcctggacttggggggacccctgatccacccgcttctctggggagccccctcggtttcgcatttggtggggatccccggggaccttggcaccggaggtgggggactgtggccctcgagggatctctgggttcgtcctgcccgcaggtccccagatgaacttggggaagttggagtgtccctccctcaggacccagcatctgcttcactccagggggccaagggcccagctttgaaaggagactgaggggccggggagctgggggtcagccccgggaggggcagtgggatggagtcctctcttgtcctctgggcgctgaccaggaaactgaggtgcagaggggatgaggagctggctcaaggtcatgcaagggggggacttgggggcaggacccaggtggcccagtgccctgcctgccacgcccggccgagatgccgcacccgcctgctgcaggcccccttgttttgaaccaggtccgggccaggcacaacgtgggggacaggagaagcccccgttggtcagagcaaaaaaagtttgccggggcctggccatggcctggacgtgggtagaaccctctgaaccatcccagggtctccaagacaggagcaggctgcagcttccctgggggtcccgtgggagccggggctttgggggtcctggggctcgggagggagtcagccccagcactcagggtgtcaccgtcttcctaaggcacacggagctgcacatcgggggctgaggcggcccccccccactcttctgctactggtcactttctctccgttttccagccgcttcctgtgccgaccgagccgccctctggagcccgccacccctccttgtcccctctgtctcctgctgtcctcggtccccgggaggaaagttgcatgaaggggtctctttgaggcgggctcggggacaagggcggcccgtgt

SEQ ID NO: 33361 - DNA, 1064 bp, Artificial sequence
  DNA replication origin
tggtcacatgtgggtttgattaaggctgtcgctggccgtgcggggagtccagcgggcagcgcttccccggcccaagtttttggtttcagctgcggaatctcccgtccccagcgtggcctgtcctttgttctagcaaacgccaaacacacgaggacccggcaaccgggggaggaaggtggtcaccagggccgtcctgctgccccacctgccacagggctgtgggctgcgggccggacccccggccaggggaaggaagtggcctccccagtgcctggcttggcccagccacctcctgttgctccgggtctgacctggttgcccagctcaaaccgctgcctgagggaacggccttgctggtccgcagagccgacctgggcagcaccgaggctgcctcctccttcctctcctgcctgcggtatccagggttgctggggacggagccgacaccctgcagtggggcccagggctgggtgagcaccttcccgggaagccgggatccagccagaatcagggctttgtcgcggacatcaggggtctctgcagttctcagatttggtgtccaggggcacctgcccgggacctgtgcctgagtggcgggggtgtcaggcacagcagggggtggtgctgggcctccgtatccaaggggaccctgtggaggggacatcggcttggggagaggagtggcgtcagccggcaggcctaaggtgtgaggctgggctggccggggagggatgatggggtcgggcaggtgtgtgggggatgcggggaccccaagtctttgagaggggcatacagaaaggcactggagacggggacagccgcgatggggggcagacagcagcgtgggcaccaggggaccgtgtgctcgatggggcctgcaggcccgggcagtgccgcagcgtcgccggccgccccttccgcccattggcctggcacctgtgcccaggcgatgactgtgtggtctgtctccacatcacaccctctctgctgtgagaggcgatgcctgcacccaggggaccccgcacccacctccttgggccgctataaggtggggccccgttggg

SEQ ID NO: 33362 - DNA, 965 bp, Artificial sequence
  DNA replication origin
cggggacagccgcgatggggggcagacagcagcgtgggcaccaggggaccgtgtgctcgatggggcctgcaggcccgggcagtgccgcagcgtcgccggccgccccttccgcccattggcctggcacctgtgcccaggcgatgactgtgtggtctgtctccacatcacaccctctctgctgtgagaggcgatgcctgcacccaggggaccccgcacccacctccttgggccgctataaggtggggccccgttgggtggtctggctggccggccccgccactcccaccggtgactgcacagcgtccgtccaacccactccccaacctgggctgggtacccctgagctggccgccaggagtctctgggcctgttcccagccgacccgcatcgggctggggcgtccagggcttggacctggccggctgccctcacctgtcctgttggacctggccggctgccctcacctgtcctggccacaacaccgcgtgtgcattcccacggctgctcatgtgtgtttgcgtgcagcggtggggaagggtggcgtgcaggtgtgcctggagtcgcatccggctgcaggttacatgtgtctgtgtgtggcaggaggctgcgtgaatccacagggcacagctctggcgtgtttgcacatgtgtctgcgtgattgcatatgaggtgcatgtgtgtgcatgagtgtgtctgtgcgtggcacccgcgtttgcatgtgcgtgcccttgcacgggatgtctgcagtgtccgaggtccctgtgcgtgtctgcctgtggcatgcatgcgttttgtctgtgcgtggagtgcaggtgtgtgtgcgtgtctgcgtgtggggtgcatgtaagtgtgtctccctgggggcagtgctggctggctgagggcctgcaatgtgggggcagtggtggccccagcacggtccacaatggcaaccccgctgttggccctccctctcctcctcccct

SEQ ID NO: 33363 - DNA, 1466 bp, Artificial sequence
  DNA replication origin
tggagtgcaggtgtgtgtgcgtgtctgcgtgtggggtgcatgtaagtgtgtctccctgggggcagtgctggctggctgagggcctgcaatgtgggggcagtggtggccccagcacggtccacaatggcaaccccgctgttggccctccctctcctcctcccctggggacgggaccagggcccgtgtgcagacggccatcaagcctcagagcagggtggacgcaggggcctgtggtccccgggagtccccaccttctgattggaaatctgcagccttgggggcactgggtgggcgcttgcccacactgggcatctctgggcttcggccaccctcccggggttccccacggacccagtggccctcgggtgtgggcagcagccgggttcccctcaaacactggatggaaaatggtgacctatgcaagggctcactccccgagggaggagccgtcccccagcagagggcagaggtgaacggggtgtctcgctccccgtggctccgctggcgtccctcggcctctcggggagccggctttgaagggggtgatgccgtgttctgctgcataagggttttttgttttgtttgagagaagctggtccactcggcattgggggcgctaggagagccgggcggtgggcctgggggattcggggcctgagggtggggtcctggaggccgtggggtacctggactcagactcgggagtctgggagacctgggcatgacgtcaggcaggtggcttagcagcctggaacccccaggcctgctctgcgaagtgggggtgacggagccctgcggtgggtgcggctcggccgatagggcctggtgtggatgggcaaaggcctgagggtggtcccaggggttagtgtcccctccccagaagggaaaccgaggcagctcctgtggtggggaggatgcttctgccgaggcaccatggtctctgtgtctcacggtctctttgggtctctgtcttccccatctctgggcatcctggggtgccatgggtggcccaggccttccgcctccactgcaggcctccctgggcggcctcagtttgcagagaagggaacagaggttccgtggcggggggccgtgaacgcagtgggatttgaccttcccccgtctctgggctgacgtctccgcaggtctgcaggggactggccctacgtgggtccctcggggtcacggcggaggcagtgggttgtgcattcatgggggtccgggtggtagcgtttctgtggagccggtggtctccttgtcatccatgagggtcctgccccggtggccgtgtgttccccgggacacggcttctctcctccccaggaaccgggatgcagccaggccttgcccctcagtcctgtgtgtgggaccagcctctcctgcagatgggtcctcagggagagctgggctttgtaccttgctgggggaagggctgagctgctcccgtccctgtgcccaccgtcccg

SEQ ID NO: 33364 - DNA, 1055 bp, Artificial sequence
  DNA replication origin
ttagtcgcttagctattagcgtctaataacttgacaattgcccgattggagctaattagctccaggccgcttgctggaagctggtgacagccaggaggcccgggtgggcaggaggggagccctgctgggtgagcctctgcctggggcctggagggctgcctggaggcgtggactttggcacccgcaggttgagtgagtgtggggggaaggtgtggcccggcagagggaacccggaggagtaaaaactgccaccgctgctctgtctgggaaaaatcccaaatcagtcattaaccccttagtgagaatttcagtctctctgccgctccggggaggatttgcatatcgaggcttcatcactaatggaggaagcgaaggctttgtctgcctctccccaggtgcggttttggggtgggggccccctcccccctgcaggcgccaccctcaacaggggcaacgcgcccacctcgggcttgcccgccaacttggaaccgggaatgccaacacagcaaggccgctgctattttagagacgcaaagggaaaaatacggccccactccggcaggcagagccgggggtgggggttcccctgggacctgccctccaacacacacacctgtgggctgctccccacaactctggcattgcaaagtcctcgcctcttgacctttttaattcactcattattgagcaccactgtatgcagggcctgtgtagggccctggggaggggacagaggaggccaacatcaggatccgggattcagacagcaaaccctgtaaagagcagatgtgatatggggcggggcacagggaacagcactgcaggcagtgggaacagcagctgcagaggcccttggtgggaacagggacagccgggaggctggtgtggctggaagggaggagtcttggagagaggaggatgaggagggcgcagtggatgggccacacaggcctggaggggtgtggattttattctgaggatcaggaatggatggagggctctgagccgccgccaacgtgttacagggtctgttttgcagaagagcgaggcttggg

SEQ ID NO: 33365 - DNA, 1464 bp, Artificial sequence
  DNA replication origin
aggtcccccagacgcaacccacaggccccttcctccagggagccccctgacccagcctcgtctgtgaggatagagatcagccgaggaagggaccggcggctccccttccctcactgcctcgggcgatggcggcaggagcccttagatctcccggctgtggtccccagggcccctgtcatgtaaccggcggcctggaccaagcggggcacgaggggggccctgagaggggcttattagcacataaaagacctgaacagggaggaatggggggtcccccacaccgctcctgcctcctccctccatgcacaggcaggggaaactgaggccccaccagtgttggcagcacatgggtgcaggctgctacgatcccggccctggcactgcctctagcccggcacagccaccgccaccccggcctgcaggggtgagcccgccgcaggccccacactgggggcactaattggcacagcagctcgagagagagggtggtgggattatcagatggcatcagcccggccccccgccaccctgagatgccacgccaggcggggccgggggttcctgggtctccaggggtgagaaggggcagacaggtgtgctcacttgcgcctcagtttccccactagggatccggcatgaagatctccagagcaaagaatttcaaggcagggcggcggaggcggtgaagtcaccctccagcccttccctacctggttggattcgtccagggacagagagcttcccaggcctccttcatcacccctgtgagcccagcacaggggacatgggagggcgtgttgcagggaaatctcccccgggcaccaggcctggagggcaggggcccttccggggcttcggaatcttgcagttctgggcttgcgtctggatttgaacccttgggtctcgaggtccggcctcctctcagaggctccctttcccctccgtgcaaggggatggtcctcccggctgttggacactcggggtgcgtccgcacagacacgggggcagcccccatacaggctcagatggagatgggctcggcctcagcccacccctcaggctgccccattggccggccgggcacaggcatctcattgacccgctggccccttgggcacgatcgatgcagaagctgctccagcctttttgaaaagtcattttcgttcctgcccagcccaagtgaaagcccattgatcaggcggtcgatggtagccaaggcccagctcccgcctgggactgcccacacccaggtcaccctgcaggggaggcctccgtggagggaccacaggggcgtctgggctccccactgccctctggcctcagtttcccctcctgtcccggcagtgatccccagggagccacattcaacccaaaaaaagaacctggctcctagcaggacacttcttgagacagagcagcctctgaaagtgcccacagcaccagccctgtaggtccccctctggc

SEQ ID NO: 33366 - DNA, 1794 bp, Artificial sequence
  DNA replication origin
ccatatgcaacgaaggacgaggaaagtcctggcctcccgggatggttgggagaatggcacgtccatcatgcacttgacatctggagggggtcagtgaccggggtgggtcagtggccagcaccggccctggccccactccgcggccccgcccactcccccctggccccattccgcggccccgcccactcccccctggccccacaccgcggccccgcccactgcgctgccccgcccactccccggccccaccccagtggtcccgcccacttcctggccccgcccccgcgtccccgcccactcgggccccggcagccccggcccgaccccactcacagatgtagtaatactcgtggccgggccggaactcgaagcccagggagaagggcgtgaagagctggaacttctccgagaacttgagcggccccccgggcgccgcgggccggttgcactcccagcgcttgaagccgcgctggcggtggtcgcaggaggcgtggccctcgccgttgaccatgtacagcacgtagtgctccatgcgctcggccggcggcagcggcgccccatagtgcgggcagtagatgtccaggtagtcattgatgctcacctccaccgtgtagcccccgccgtcgtcccccgcgcctgcgtggaacctgcggggacaaggcggccagaggtcagcgcccggagcgaggaacggggcacgggtcggggtgcgcggggagggccagggtcaggggacaggagcacgagggacgggtcggggtgcgcggcgagggccggggtcaggagcacgggggacgggtcagggtgcgccaggggggacagggtcaggggacaggtgcatggggcacgggtcagtgtgcgcggggagagatggctccggggacaggtgcacagggcacgggacagggtgagcggggagggacgggtcaggggacaggtgcacggggaagtcaggccggggaatgggggaggggtcagttcacaaggtggactccgcctgggccctgaatggtgatagcggtcagcaggtggggttgcacaccccaatcacggcgggcttccaaggttgggagcccacgatctcttgcctggcactgccccccacctcctgcctcagtgtccccaacagccccacggcagggccagcagcgaggtgggtgtccaggtgggtgacatctggacccctgtgtgcaaagggccggcggggggttcctgactccgggcctctgcacgagctgtccctccacaagaattccctctccagaaacttcgcatctacctaacatgcttaacatctgtgccgcctcctccaggcagcccccagccctgctttcattctgcactcccacctgttgagaaggaccggggcagcgtgggggacacaggtcgggcattccagctcgctctggggcaagctctgcccccaccctggcctcagtttccccaaagagaacggagcttggcgtgaagaatccctccaccctcctctcagcacccccagagttccgcccaccgccccctctctctcagcctgccgagttccacctgccgcccagctcggagacatcctgggctccactcccagccccacccctgccttcctgtgtgaccctgcgagccccataccaccctctcacatctggaacccagaaacctcccgagccccgagccccggaatccggcggcctcctggtctccctcttgggtgcctgcactcctgacacctcagcccccagccctgcctccaggcctttgccctgaggtcccccagacgcaacccacaggccccttcct

SEQ ID NO: 33367 - DNA, 1752 bp, Artificial sequence
  DNA replication origin
cccgcaggttccacgcaggcgcgggggacgacggcgggggctacacggtggaggtgagcatcaatgactacctggacatctactgcccgcactatggggcgccgctgccgccggccgagcgcatggagcactacgtgctgtacatggtcaacggcgagggccacgcctcctgcgaccaccgccagcgcggcttcaagcgctgggagtgcaaccggcccgcggcgcccggggggccgctcaagttctcggagaagttccagctcttcacgcccttctccctgggcttcgagttccggcccggccacgagtattactacatctgtgagtggggtcgggccggggctgccggggcccgagtgggcggggacgcgggggcggggccaggaagtgggcgggaccactggggtggggccggggagtgggcggggcagcgcagtgggcggggccgcggtgtggggccaggggggagtgggcggggccgcggaatggggccaggggggagtgggcggggccgcggagtggggccagggccggtgctggccactgacccaccccggtcactgaccccctccagatgtcaagtgcatgatggacgtgccattctcccaaccatcccgggaggccaggactttcctcgtccttcgttgcatatggggaaactgaggcttggagggggactgaggctgcactattgtgatctcgggcctccagctcagaccacttggtggttgggccagtagacctggctcagccccccgatagcgagaccagggtgcccgagccccagcacactgatgagggaaactgaggcatccggagcccagcaggggaggggagcttggtggaagccacagctaggctgagtgctggggcttactcctgcaatcccagcactttgggatgccgaggcgggaggatcacttgaggccagcgtggacaacgtagggagaccttctctctacaaaaacataaaaacaattagccaggtgtggtggcatgggcctgtggtcccagctgtgcagggggctgaggtgggagggctgcttggagtgcatgagctctggtcgctccactgcactccagcctgggtggcagagcgagaccctgtctttaaaagaagaaaaaaaccccacagggcccctgccgcaccagccgcacccagactgggtaggggtctccaggtcctccctgccccgcacccacccccgcatctccccgggacccatgccaggctcggagactccctgaggaccgtggggtcttcatctgaaggttgggtggcggcagccttggggatagtcacatctgcaggaccccatggtgggccaggctgggtgggccaggctgagggaggctgccagtccctgctgcttatcggaggtccgaagctggcctttttgtccctacgaaaggccaacggcaggtggggaacacagcagcgccagccggagtcccagtcctgcttggccatgatatctgtgaccttggcgggggaatgaggggccaggcactgcccacctgagatggggatgatggcatcacactcgtggcttccgccgtggcgctgagactgagggattctcgtggagtggggaccccggcttctcagcatctcggggcctgagggatggggagtcagggatctggggtctgtgcccccaggctgcaggggggccagtgcctggacacccagctcctgctgtgtgaaattaaactttacaaggccccattgcctcctttctctgctctagt

SEQ ID NO: 33368 - DNA, 846 bp, Artificial sequence
  DNA replication origin
gtgcagagcagaggggagcggctgtgttcccccacgagtggggtgcagagcagaggggagcggctgtgttcccgaccccatgttccgcgttcccctcccccaggccagggcacagggaccccgccccgctacaacggcagggaataaattaaattaaaaactcaagtctttttgatccaaccacgaaaaatacactaaaaaaaaaaaaaaaaaaaaaaaaaaaaaaaaaaatcgccaagaggttcccgggttctccgacgccccagaggagatggcctggccacggtccgcatccacaccccggcccctcgggcctccgggggggggctctcggccgtttcccctccctgagggctggtcctggggcgggtggatggcccctgcccggcgggggcggcaccaggcgagggagaagcagcgtctctatttggtctcggaggcgggggccgcagccgggtccggagggccgaggtcaggcggtccaggcggggccgtccaggcagggtcggcgtcctgcggggctgggactaggaacccaggagggtccagagcacggggatggtgctgaggaagaggcggcagccgcccgggctgctacacgagttattgctggtgaagatgggctcaggagcctcgtacagggtctcgtctgcgggtggcagagacagcacgctcagcggccgcccgaaccccactgggctccccacgtgccgcccgccctcagggtgcacatctgcccaacgggctcatcaccccaccaggcaggccctctgctccctcttggtgccatccccgatgcccactctccgggcaaagtcacttggcctgaagtgggggacctggctg

SEQ ID NO: 33369 - DNA, 1272 bp, Artificial sequence
  DNA replication origin
gtacgaggctcctgagcccatcttcaccagcaataactcgtgtagcagcccgggcggctgccgcctcttcctcagcaccatccccgtgctctggaccctcctgggttcctagtcccagccccgcaggacgccgaccctgcctggacggccccgcctggaccgcctgacctcggccctccggacccggctgcggcccccgcctccgagaccaaatagagacgctgcttctccctcgcctggtgccgcccccgccgggcaggggccatccacccgccccaggaccagccctcagggaggggaaacggccgagagcccccccccggaggcccgaggggccggggtgtggatgcggaccgtggccaggccatctcctctggggcgtcggagaacccgggaacctcttggcgatttttttttttttttttttttttttttttttttttagtgtatttttcgtggttggatcaaaaagacttgagtttttaatttaatttattccctgccgttgtagcggggcggggtccctgtgccctggcctgggggaggggaacgcggaacatggggtcgggaacacagccgctcccctctgctctgcaccccactcgtgggggaacacagccgctcccctctgctctgcaccccactcgtgggggaacacagccgctcccctctgctctgcaccccactcgtgggggaacacagccgctcccctctgctctgcaccccactcgtgggggaacacagctgcagcccaccgcggacccccctggtgctccaggttgggtgagtctgagccggaaggggtacgtggtgggcgcccctcattgtggctggggagacctcataccccatcgcccacccccgtcctcctggtcatttcctcccagacactgttttgccccagcgcccttcggaatcacagtcccgccgtgtcttagaaactgctttggccgatgcaaacagccccctacccgtccccctcgcctcacacggtccctctccgaggccgagaagaccttctgttcctgtaaatacagccagcaagtgcaaactgtgattttattttccacgtattcctgaggacggactggaccgtctatgttttttcagcccttcatagggggtcttttattttggtgggggggtggggtggacttttagagtagaagctgcacttggcaataagctcgtgtcgtctgtcagagcccctctctcaactctgtgacctgataatgtttctaagaaaaagaaaaaaaggacaaaagggaggga

SEQ ID NO: 33370 - DNA, 944 bp, Artificial sequence
  DNA replication origin
taaaatggagggaaggacactattgtgtttttgtaacagcatcacagtcagcactgggatgcctctcatgatccctgatctcattctgtccttggtcctctctgtcccagtggtcacgttgcagtttggggtgggggtctcggcatgaatgggctgtgggggtcgcctccctctctgagcctcggggtcctctgtggagtggggcatggtggagcctcccccgcggtgctcagcacggtggccggccggccctctgtgcctccgtgcgtccaccccgcgctgggcaggggcggggcggggcacacacaggggtctttgtgcctgggctgcctcattaggaggcggcccccgtcaccgggcccagcgcagctgaattaattagctgggagcgttcccgctcggctaattgtgccggagacgccgtcgtcacggcgggtgggatgcaggcgaccatcgtccagccgtaaagacctcagtcccctgggccgggtcacctgccgcgtcacccccagcctctctgtgcctcagtttcttcaatcggggcgtgcctggcatgaaggcccctgggacccgagaacttacagatgtgccgtttgcaaggggaagaggttaggagatgacagagcccctgccctggcctggagcaggtggggaaactgagttacacagaggcagagcttgccagtggagatttcacaacatttgattggatcctgaggcccaggaattccaccatgttcaggtgtgtgccggccagcggtgtccccagggccagccatgcacaggccccgtctcctccctccatcctcccagctgccccctcccagccctaggtgggctgttgctacttcccagagagggaaactgaagcccatggatggctatgaaggatacgggccctataaaatgctcatcccaaggtctgaccccaaaacgatgcacag

SEQ ID NO: 33371 - DNA, 932 bp, Artificial sequence
  DNA replication origin
ggcaaatcgcttgagcccaggagccagaggtttcagtgagccgtgatcgcaccactgcactccagcctgggcgacagagtgagaccccgtctctaataaataatacagagttaaataataaatctaaaaaaagcatcttggctgggcgtggtggctcacttctgtaatcacaagaagtttggcttgtgagtttttgttctttgttttttagagacaatctctgaaaatggtgagattacaggggtgagctaccatgcctggcacccccagcactctgggaggccagggcgggaggatcacttgagcccaggagttcgagaccagccaggaaatatagcaagaccccatctctacaaaaaacaataataataataaattgtatttttaacaattgtcataatagctaaaaggtggaaagtacccaagtgcccctggatagatgattggataaacacagcgtggtccttccacgcaccggaacgtgctcagctgtgaaaaggagcgaggctctgacccaggccacagcgcagatgcaccttgaggacgtcacactcagtgagagatgccagacacgcaaggccacacagtgtgtgacccatttccatgaaacgtccaggacaggcccatccacagagacagggaaggaggggatacgttggtgccaggggaggggataaggagtgacggctgatggggacaaggcttccttttggggtgatggaatgttctggaatcagagctgatggctgcacaagtctcaatgcactaaaatccatgcaattgtacttaaaatggagggaaggacactattgtgtttttgtaacagcatcacagtcagcactgggatgcctctcatgatccctgatctcattctgtccttggtcctctctgtcccagtggtcacgttgcagtttggggtgggggtctcggca

SEQ ID NO: 33372 - DNA, 833 bp, Artificial sequence
  DNA replication origin
ggagccggcattggggtctcactggggctggggtcgggggtaaccaggttccccaaggagcgcccacacccggcggggacatcccagcacagcccctggagtgagtggccactcgacacgttgatgcagccactgggacaggcaccagggtctggtcagggtctggcgcgggagtggaggtcagttcctgagaggctcgggcccaaaacacatgtgtctggcgacacaggggtacacaggcatggaggtgcaagcgcagggctacgcgtgtgtgtgtgtacacgtgtctgcgtgtggccaatgacacggtcccaggagattccctgctctgggcccagcactggtcccggcgataaccaggacagacccagccctgcccttagcggctgcagcctggggaggagtcaggtaagtaaacagtcacaaagggcacccacagcctcctggccaggagctcaggtgacatctgagctgagttggaaggggctgagtgggggagcctggctgcaatctgcaagagaggttcatcggggcagtggggtgggctggggggacagtgcatgcaaaggcccagaggcaggagctcagccattctttgtgtatttacccaaagtcaccttttaggctgggcgcagtggctcacgtctgtattctcagcactttcggaggccaaggcaggtggattacttcaggtcaggaatttgagaccagcctggccaatatggtgaaaccccatctctactaaaaatacaaaaattagctgggcgagttggcacacacctgtaatcccagcttctcgggaatctgaggcaggagaattgcttgaacgtggg

SEQ ID NO: 33373 - DNA, 926 bp, Artificial sequence
  DNA replication origin
cctgttgcccaggctggtcttgaacccctggcctccagcaatcagcctgcctcagtctccaaaattgctgggattacaggcaggagccaccatgcccagcctccgttcagttttgagggtgaagaatgagacaccatttctaaaaagcaaaaaaaaagtgagcccccctccatcatggctgtttggaccagagggtggggaccaaggggttttctcctcaaacacagatgtagacaggcacactgaggctcagtggtgaggtctggggggatgcagagccctgccctgggccaccggggctgtggggggcggcacgttccaccccaagccgcactcaagagttttgggcgcctcaggcctcctttcccctagcagcctcccgctgccccctgcccgcggcgggcaccgaggcggcagtaactggccggcaggagggagatgacttccctcaggatcctctgggcggaaaagactctgcgcgggaccagcgtaccaatggccgtccagggctggcaggagccggcattggggtctcactggggctggggtcgggggtaaccaggttccccaaggagcgcccacacccggcggggacatcccagcacagcccctggagtgagtggccactcgacacgttgatgcagccactgggacaggcaccagggtctggtcagggtctggcgcgggagtggaggtcagttcctgagaggctcgggcccaaaacacatgtgtctggcgacacaggggtacacaggcatggaggtgcaagcgcagggctacgcgtgtgtgtgtgtacacgtgtctgcgtgtggccaatgacacggtcccaggagattccctgctctgggcccagcactggtcccggcgataaccaggacagacccagccctgcccttagcggctgcagcctggggaggagtcaggta

SEQ ID NO: 33374 - DNA, 1291 bp, Artificial sequence
  DNA replication origin
cacacgcgtagccctgcgcttgcacctccatgcctgtgtacccctgtgtcgccagacacatgtgttttgggcccgagcctctcaggaactgacctccactcccgcgccagaccctgaccagaccctggtgcctgtcccagtggctgcatcaacgtgtcgagtggccactcactccaggggctgtgctgggatgtccccgccgggtgtgggcgctccttggggaacctggttacccccgaccccagccccagtgagaccccaatgccggctcctgccagccctggacggccattggtacgctggtcccgcgcagagtcttttccgcccagaggatcctgagggaagtcatctccctcctgccggccagttactgccgcctcggtgcccgccgcgggcagggggcagcgggaggctgctaggggaaaggaggcctgaggcgcccaaaactcttgagtgcggcttggggtggaacgtgccgccccccacagccccggtggcccagggcagggctctgcatccccccagacctcaccactgagcctcagtgtgcctgtctacatctgtgtttgaggagaaaaccccttggtccccaccctctggtccaaacagccatgatggaggggggctcactttttttttgctttttagaaatggtgtctcattcttcaccctcaaaactgaacggaggctgggcatggtggctcctgcctgtaatcccagcaattttggagactgaggcaggctgattgctggaggccaggggttcaagaccagcctgggcaacagggtgagacccccaccaccaccatctcggcaaaataaaaattaaaaaattagccaggcatgctggcacgcacctctggttccagctactcgggaggcccagggggaaagatgctttgagcccaggaggttgagactgcattgagccatgatcacgccactgcactccagcctgggtgacagagccagaccctgtctcaaaaaacaaacaaacaaaaatactgaacagctcacaccagtaatcccagcactttgggaggccaaggcaggtagctcacttgaggtcaggagttcgagaccagcttggccaacatggtgaaaccttgtctctactaaaaatacaaaaattagccggccgtgatggcaggcgcctgtagtcccagctactcgggaaggctgaaacacaagaatcgccttgcagggatccaacagccacatggcagtaatgagaggctccagaaaagaaaagaaaacaaaacaaaacaaaaataagaaaaacaaacaaaat

SEQ ID NO: 33375 - DNA, 1186 bp, Artificial sequence
  DNA replication origin
tcccagcactttgggaggccgagacgggaggatcacctgaggtcgggagttcaagaccagcctgaccaacatggagaaaacccgtctctactaaaaatacaaaaaaaaaaaaaaaaaaaaagcgggtcgtggtggtacgtgcctgtagtcccagccactcgggaagctgaggcaggagaaacgcttgaacccgggaggcggaggttgcagtgagctgagatcacgccactgtactcgtgggcgacagagtgagactgcgtccaaaaaaaaaaaaaaaaaaggccgggcgcggtggctcacgcctgtcatcccagcactttgggaggctgaggcgggaggatcacgaggtcaggggtttgagaccagcctgaccaacatggtgaaaccctgtctctactaaaaatacaaaaattagccaggtgtggtggcacgcacctgtaatcccagctactcaggaggctgaggcaggagaatcagttgaacccaggaggcggaggttgcagtgagctgcgattgtgccattgcactccagcctgggtgacagagcaagactccgtctcaaaaaaaacaaaaaacaaaaaacaaaaagagaaacacttgcaagtatgtatgtctatggccacgcacacttttgtggccatttgaaggcatggatgtgggcctgtatgcatgggggagggcaggtgcatgcccgagccaggtgtggttgatagaaagtggccccagtggccgggcgcggtggctcacgcctgtcatcccagcactttgggaggccgaggcaggcagatcacgaggtcaggagatcaagaccatcctggctaacacagtgaaacccggtctctactaaaaatacaaaaaaaaaacagcgggcgtggtggcgggtgcctgtagtcccagccactcgggaggctgaggcaggagaatggcgtgaacccgggagacggagcttgcagttagctgagatcgtgccactgcactccagcctgggcgacagagtgagactctgtctcaaaaaaataaaataaaataaataggccgggcgcggtggctcatgcctgtaatcccagtactttgggaggcgaggcaggcggatcacctgaggtcgggagatcgagaccatcctggctaacacagtgaaaccccgtctctactaaaaatacaaaaaattagccgggcgtggtggtgg

SEQ ID NO: 33376 - DNA, 1184 bp, Artificial sequence
  DNA replication origin
tcctgccatccacgttcccttcggagcttgagctggggagaggcagggatgggaaagatgctcacagattgtctctagaagcttctctcacgcctggagacaggcactgtggaccccagacccagaggggatgccccacagtgcctggtgggagccaggacttgagcccaggacagaaccgtaagccccaaaacccggcggggcagtcggagctggggaagagaccaccctgggcacacacagcctggtggggtgtccctaatgacccccggaatgaagggtccccagcctcattctccctgggctgctccagatgcaacccctgacccggcagggctcacactgcttcgggccagtgacccatggggcctgggagtggcctcagtttccccctctgcacagggaagggtgtctcctgcgactcagcgcccctccccccccccccgacacatgtccattagggtgcattgatcgctcctgggccgaagccttccatttctggaccaatgagggtgggggagtcaggagctgtcgggtgggcaggcccctgggaggcctgggcagggtctctccctctctcaggctgtaaagggaggggtccggtctgagacgttccagactcaagtgcggagcaggtgactccgaagttccggcctcggaagccaccgtctgagcccaggaatgtgcacagacaaatagacggggagccgctggcggtggtttctgctccaccaggcgaccgtgcaggaggacccagagcttgccgggcacggtgacccacgcctgtgatcccagcattttaggaggccgaggcaagaggatcccttgggcccaggagtttgagatcagcctgggcaccgtagcaagaccccatctctacaaataatcaaaaattagccaggtatggtggtgtgcacctgtggttcgagctactcgggaggctgaggcaggaggatcccttgagcccaagaagtcaagactgcagtgagccatgatcacaccactgcattccagcctgggcaacaaaggcaagaccctgtctcataaagaagggcctggagagctattctgaggatgcagcaagacggcagaggtacagcagcagaagaaacagaccttccgcaacttcacccagcgcggcgtggacctggaccagctactggacatgtcctcggagcagcgga

SEQ ID NO: 33377 - DNA, 3066 bp, Artificial sequence
  DNA replication origin
gatctcaaactcctgggcccaagggatcctcttgcctcggcctcctaaaatgctgggatcacaggcgtgggtcaccgtgcccggcaagctctgggtcctcctgcacggtcgcctggtggagcagaaaccaccgccagcggctccccgtctatttgtctgtgcacattcctgggctcagacggtggcttccgaggccggaacttcggagtcacctgctccgcacttgagtctggaacgtctcagaccggacccctccctttacagcctgagagagggagagaccctgcccaggcctcccaggggcctgcccacccgacagctcctgactcccccaccctcattggtccagaaatggaaggcttcggcccaggagcgatcaatgcaccctaatggacatgtgtcggggggggggggaggggcgctgagtcgcaggagacacccttccctgtgcagagggggaaactgaggccactcccaggccccatgggtcactggcccgaagcagtgtgagccctgccgggtcaggggttgcatctggagcagcccagggagaatgaggctggggacccttcattccgggggtcattagggacaccccaccaggctgtgtgtgcccagggtggtctcttccccagctccgactgccccgccgggttttggggcttacggttctgtcctgggctcaagtcctggctcccaccaggcactgtggggcatcccctctgggtctggggtccacagtgcctgtctccaggcgtgagagaagcttctagagacaatctgtgagcatctttcccatccctgcctctccccagctcaagctccgaagggaacgtggatggcaggagagaggagggaggcgtggggcgagtttatctctcactggctttctccgcccccacctggcctcccctggggcttctgtgattctttgttttttttttgaggcagggtgtttctctgtcccccaggctggagtgcaatggtgctatcgtggctcactgcagcctccacctcctaggctcaagcaatcctcccacctcagcctctcgcgagtggctgggaccacaggcacgcggctccatgctagctaattttttttattttttgtagagatgaggtctcgctgtgttgcccagactggtcttgaactcctggcctctggtgatccttccacctcagcctcttgggtagttgagactgcaggcatgagccaccacacgtggctaatttttgtttatttatttatttatttttgtagagatggggtttcaccatgttgcccagactggtttcccaactcctgagctcaagggatcctcccgccttggcctcccaaagtgctgggattacaggcatgagcccagtctgagacccactttgtagataaggaagatgaggtcagagaaggggagtgcccaggccctgggccccacagccgggacccctttagggtccagtggatggcgaaggggaggcggcctgaccactaccgactccagccagtcgccccagcctccagggagagcagcacaggtgcccagagaagcgacgaatctggatatttcttccccacatgaggaggagctgggggcacctgagtgggtggtctcggtgctgggcggtcctcatggccccctaagcgtcgaaaaccagagcttgttatgatcttgtgatgggaagggggcccgcctctcgcagggaccgctgtcggccccctctgcccgcccaccaggcgctagagttatggtttgcaatatcccatgcccctcccagcctgagcattaatgacggtggtatccgagtccccgagcacccggggctgttattaacatcgtccatcacgcttgtggctgcggctctagaagctctttggctaggaggggaaactgaggcaccgagaggttcgccttgacccctgcgtgagggcacagctgcagacatcggataagcccaggttccagtgccctctccaccacccgctgtgggtgaggcccctgttctctgagcctcagtttgctcatctggaaaacaggctagtgacacagggtggggtctcagatcctgggggctcttgatgagcagaatcgccaggcccatggaggcaggccctttgttgcctgatctccccgccttccctgtgatcccattgtctggcacaatgccagcaagccctcctcggatgtttgttgaatgactgaatgagcgtgttgtgtgtggactctgagtcaagtgctctttcttgccaactgggaaagactggaggcaaagggctcattctccatcattcactcctccaggaaggcctagggggcaggggtggtggtggggaacggcctctcgcaggtgaggggggcagcgggggaaccgcgggagtcagccgtgctggctggcagatctttaaattaaaatgcatatatacaccagataaataaactcggcccacatcctggtgacaggcagaattaagttgcccagttggggaccgggcagcgaaggctgggggtggaaggggatggggccgaattaccaagggcggcgactcagctccatcctctgccacattgtatcccatgaacgttcctgagacccctgtcctgccgggtctctgggaagcgctgagggggtcagggagtaaggacccaaattctgagccccaagttgggcacccaggatctggcccggcttagagagagaccagctgcccacggggtgccctgggtgagtcagtgtcttcgtctgaaacagggagaccatggccccccgtcccagcacagaggctgcccttggcagtgggcatggggcggacctggttcaagtcccggctgagcactcaagggctgggagcagcctccgtcgggtcaggtaccagggagaccccgttctagctcccagggaggcccccgtggggcccgcacagctgcagggtcctccctgggcccttccctctgacccaagcccaggggagaggggcggagggggcggcgggcagttttcaattacggagcagctaatctcccagtgagggccgttctggggcccagtaaatctattatgaaaagcctc

SEQ ID NO: 33378 - DNA, 2121 bp, Artificial sequence
  DNA replication origin
acaccttccacttcattcattcattcatttcttcctcctgaagacactgggtaaatgtagagcagcagagggtggccagaaaggcccctccccctgttccagacaaggggatcctggggcctccccggggaacacaggggccaggtacccagagaggttcctgaagactgggggtttgtaagctagccgtgccttccagggccagccagacgtcccggaattcctgtttggtgactcagggaggggcagctgccggccgtgtctctctccctgcaggtggctaggcctggctcccatcccagagctgtggggcttaggagggctcctccacgcctcagtttcccgtgttggcctccgagaggtgatgaccgggcacgtggccaatggggcagccgcgtcctcccgaagcctctccgaccctgacctggaagcccccctcggtgcccggggcgggggtcgtgccccagctcatctcccagggcccctctccggtgagagcctcaaccccgggattagggggccggggtcaggggtcaacagcatttgccgcggctccgttcaggccgagagcggatccgttctccctgccacctcgaatttcctggacaaaggcacagtggagggaccgggcagagggacccccgagcaccctgggaaagccccgggagagcctctgcccacacagcccccattcagcagccaatgagccgacgagaggaaccctgtatgcccatgctgcagagggggaaactgaggcagccagcggatggagccggccgagaagctgcatggctttagtcaggcgggggccacgcgaggcagcccggcccccagagaaatggggctcaggcacgggaggcggggtctgtgacggcaggcgggtggggggctggcggcggacaaaggcgggcgggctgggtccatgggggcgcgttccgctcgtcagccttggttccacttcagtccaccctggacaggccggaataatccctcccgtggccgctgctgggccgtgacgacttgaagggggcccggccagcctgactgacggctgggcggggggcaggggcgcctggagctcccccccacccacacccctcaggccctccacccccatccagtgctgggaacggcatttggccgttgctgatgacacggacgaggaaactgagtcacagacaggcacacaccccctcccaggtcacagagcaggcccaccatggccgactccagaatcaccctcactgggacggtcccaccctgctgcagctttgcacaacccctcacctgggagttggaggaattcggaggcctgggcctgaaggagtcagagaaatcactcgcctccctttcattccccagcacctgggaggcagggacaagctggtggctggagccgggccaggccaggggccctgggaaggccccatcgggtgctgcctgaggcctgcagaaacagctgtcagctcatgcctcaattttttctttttttttttttgagacggagtttcgctcttgtcacccacactggagtgcaatggcacaatctcggctcactgcaacctccacctcccgggttcaagcaattctcctgcctcagcctcccgagtagttgagattacaggtgcgtgccactacgcccggctaatttttgtagttttagtagagacggggttccaccatgttagccaggctggtctcaaactcctgacctcaggtgatccaccagcctcgtcctcccaaagtgctgggattacgggcgtgagccaccacgcccagccttatgcctcagtttctccagctgccaggcgatctgcagagctgcctgcaaactccactaggtgggggtgaggaggggcatcaccccctcccatcatgcacctgggctcctggacggacttcagcaggtggggacagtgtgcaggagaggaaactgctggaccaagggccccacaggcaggagggtgagcaggccctatgcgagggggctgggtgagcctgggagagtgtggggccacgctgaggaagctgtgcttccgagggaggcgggcttggaggtccacggtcccgccatggatgctgcaggggccacttaggttcaagccctccgagggctccctg

SEQ ID NO: 33379 - DNA, 2869 bp, Artificial sequence
  DNA replication origin
cccatggacccagcccgcccgcctttgtccgccgccagccccccacccgcctgccgtcacagaccccgcctcccgtgcctgagccccatttctctgggggccgggctgcctcgcgtggcccccgcctgactaaagccatgcagcttctcggccggctccatccgctggctgcctcagtttccccctctgcagcatgggcatacagggttcctctcgtcggctcattggctgctgaatgggggctgtgtgggcagaggctctcccggggctttcccagggtgctcgggggtccctctgcccggtccctccactgtgcctttgtccaggaaattcgaggtggcagggagaacggatccgctctcggcctgaacggagccgcggcaaatgctgttgacccctgaccccggccccctaatcccggggttgaggctctcaccggagaggggccctgggagatgagctggggcacgacccccgccccgggcaccgaggggggcttccaggtcagggtcggagaggcttcgggaggacgcggctgccccattggccacgtgcccggtcatcacctctcggaggccaacacgggaaactgaggcgtggaggagccctcctaagccccacagctctgggatgggagccaggcctagccacctgcagggagagagacacggccggcagctgcccctccctgagtcaccaaacaggaattccgggacgtctggctggccctggaaggcacggctagcttacaaacccccagtcttcaggaacctctctgggtacctggcccctgtgttccccggggaggccccaggatccccttgtctggaacagggggaggggcctttctggccaccctctgctgctctacatttacccagtgtcttcaggaggaagaaatgaatgaatgaatgaagtggaaggtgtcctcatgcctgccagctgctgcagtctagcccccgtgccttgtggctacttagaggcctcagctagcagcatccaccgcagattaaaagattctccgtcggaggctgggatgcgctcacacgcttgggcgcccctgcgctccccggtggccgtgtgtctgttccaccctgccgagctgttccccacgatcaatttcaatttggcctggtctctgcctctgcagcacgaccctccttgggggccgacggcggggaaggagttgctggcttccgcagctctccccccaggtccctgggaccctcgcctggtgaagagagagctctgctgggccgcctctttttccgggcctcagtttctctgggtttggaatgagggcacagggcagcgcagtgtggacccagcctggttttcatccaacctcatgaagtcactgaatgctcgccgtgggcctgaccctgggctgaaccctggggcaccgtgggggctacggcaggcaaacgagtcggaggcagaggaagggcgttcctgcaggggggaggctgtgtgcagaggggtagagggagggaggcaggagggagcgtcctggaagaaacagttaaggtggggccacagaggagggtggacaagcctaggcaacaatattcctcaacagccgaagtttgtgtatttgttttttgagacagagtctcactttgtcactcaggctggagtgcagtgagctgaggtgcgatctcagctcactgcagcctcaacctccctggctcaatcgatcctcccatctcagcctcccaagtaactgggaccacagttgtgtgccaccacgcccagctaatgtatttatttatttatttatttagagacagaatcgctctgtcgcccaggctggagtacaggggtgcaatctcggctcactgcaacctccacctcctgggttcgagtgcttctcctgcctcagcctcctgagtagctgggattacaggtgcaccccaccatgcctggcttatttatttgtttattatttatttatttttgagacagtcttgctctgtcactcaggctggagtgcagtaatgcgatctcagctcactgcaacctcgacctccctggctcaagtgagcctcccatctcagcctcccaagtaactgggaccacaggtgtgcaccaccacgcccggctaatttatttatttgtttatttagagacagagtcttgttctgtcgcccaggctggagtgcagtggtgcaatctcggctcactgcaacctccacttcctgggttcaagtgattctcctgcctcagcctcccgaggagctgggattacaggcacctgccaccacgcccggctaaattttgtaattttagtagagatggggtttcaccatattacccagactggtctggaactcctgagctcaagtgatccacccgcctcggcctcccaaagtgctgggattacaggcatgagccacccaccacccggccaatagccaacatttattgagtgcttactgtgtaccaaacgtcagccgacaggctttccctgcctcatctccctgcaacctcccaaggatcctctaatacccattttacaaatgaggagacaggccacagacagaggccgctgtgaggtgagggaaggaggccacggccatgctggcattggcagcactggtccagctcagacctgtccaggtccccagcaggactgcggtgcgcctggctccttcctctgcgcgctccattcccttgctgcttccttccgggcctccaggcttccctccttttctagggtggcggtggaggaacctatatgggctcctgggtgctggagttcgatctgaaccttcccgctcattctgcgtgaccttgggggcgtgcctggccctcccgtgcctcagtttccccagccgcacctgccggactgtgaggccccgaccccccg

SEQ ID NO: 33380 - DNA, 2599 bp, Artificial sequence
  DNA replication origin
ccaggtccccagcaggactgcggtgcgcctggctccttcctctgcgcgctccattcccttgctgcttccttccgggcctccaggcttccctccttttctagggtggcggtggaggaacctatatgggctcctgggtgctggagttcgatctgaaccttcccgctcattctgcgtgaccttgggggcgtgcctggccctcccgtgcctcagtttccccagccgcacctgccggactgtgaggccccgaccccccgccctctctggcccccccgcggctccgggctcaggccgccgctaggtggagcgaggaggccggtggagacgcggtgcggggagacgcgcgctcgggagctgcagaggccggggagcgggcctggcgcgcgggtagagctgcgtggacgcccgcggcccttggcgctcagagctcccgccccgcagccagcgcctctaggaggcccagccggacagtctgcgaggggcgcgctccgggcgcaggaggggcggtgtccggggcgcgtggtttgggtcgtcgggacctggatcccggagcaggcaggctgaggtctgcatggtcagggcggcctcaggtgctggggagccaccctggctggacctagggtcccagcttcacgttcacctcctggagcctcaggtctgggtctgatgccccaacgggaaccccaagccctgcccaccgcccgtcctcacctctgctgccccttcactgccccgaccagtggcttccgccataaccctcttgggagacccatttttcataggaggaaactgaggcacagagcgttttctcggtcacagaacagctggatccctcctgtgtgatgagcacctctgggtcctcctgtgtcgtgaccacacctgtgtccactttctgggtcctgggctgcagaatgtcaccgccccaaataccctctcgtgggtgctgtggttggtttccttggccttgggagggtcctttctactcaggtagggataccgtctgggttccccccctactgcccctgcaaggcagggctggtgatccgtgtgcaccctgggggccgtctcatgtgtggctgcaccttcccacaccacggctgaggagaggatcctacccacaggtgcccctggtgggttcagccggcccctgccgcgggatcctgcttgatttctggtactccaggcctcgccactgtcattcccgctgggcatgatgcgcacctgctgtgccatgctcttgggcagctctctggggtcacggaaacttctgtgcctcagttgcctcctctggaatgtgcaaatccttcgagaaataagctggaagacctgggagcaagcaggcttgggtttccaggtttggggggggggtgcccagatacaaccccaaggctttgggaggtgaggggacaccctgctgctccatctggacccgcgcccgtgagctctgctgctctgcgcctgacccacagctctgtccacttgccccatatgggttcaaggcaccaagaatcaagaatccagccctctgggctggatgcggacacggtggctcacgcctgtaatcccagcactttgggaggctgaggcgggtggatcacctgaggttaggagttcaagaccagcctggccaacgtagtgaaacctcatctctactgaaaatgcaaaaattagccaggtgtgatggtgtgggcctgtaatcccagctactcaggaggctgaggtagaagaattgcttgaacctgagagagggaggttgcattgagccgagatatcgtgccactgcactttagcctgggggatagagtgggagggatcgatccagccctctttcatccccttcccgctcactccgacccaacctcccagttctgtctttaaaacaagctgcttttgtctctgccccagggcctttgcacgggctgctccatccctgcatgtggccagcccagcagctccctcactgcccacctgtggccggctgcatccctccaatcttcagacacccatttttttttctttttcttttctgttttattttttttgagatggtgggggtggtctcggtatgttgcccaggctggtctccaactcctgagctcaagtgatcctcccacctcggtctcccaaagtgctgggatcacaggcatgagccacctcgcctggtcttgacacttattttcatgttcagtttgaccatatttgtgacaagtcagagacgatacagcaaggggaagaagacacgttcccttccctctagaaagtcacagtcacgcacagaaggcagaaggcttgcagtgcacagcgacgggataaaggaaccagctctgcaacagagtgagtggctctgagcttttgatcattgagatataattcacagaccatgaggttcacctgcttaaagcactgagctataactcgcggaccatgaggttcacctgcttaaaggtgtaatccagtggcttttagcgtacttgcagagttgtgcaaacctcacctctctctagttccagaacgttctcatcaccccagaaggaaaccccatccccattagccattgctccccatccccaccccagccctggcacccaggcatcccctctct

SEQ ID NO: 33381 - DNA, 1494 bp, Artificial sequence
  DNA replication origin
caaagtgctgggattacaggtgtgagccactgcgcccggcccaagaaggcaatttctaaaacagctttattgagttattcacatagcatacagttcattcatttaaagtatacaatttttttttctttgtatttttagtagagatggggtttcaccatgttagccaggctggtctcaaattcctgacctcaggtgatccacccgcctcggcctcccaaagtgctaggattacaggcaagagccaccacgcccagcctaaagtatacaatttctttctttctttttttttttttgagacagagtctcgctctgtcgcccaggctggagtgcagtggcaggatctcggctcactgcaagctccgtctcctgggttcacaccattctcctgcctcagtctcctgagtagctgggactacaggcgccttccaccacgcctggctattttttttttttttttttttaattagagacagggtttcacggtgttagccaggatggtctcaatctcctgacctcgtgatccacccacctcggtcggcctcccaaagtgctgggattataggtgtgagccaccgtgccctgccttgatttcttttattgtcttcataaagctgtgtgtccatcaacccaatcaactttagaacatttccatcattccaaaaggaaaccccgttccctccccagccctggcacccacacttcccctccctgtctctgtggatctgcctgccctggacatttcatagaaatgggattgcacacctgtggccttctgtgtctggcgtctctcactgagtgtggcgtcctcaggatgcatctgcgctgtggcctgggtcagagcctcgctccttttcacggctcagtcgtgttccagtgggcagagggccatgccgtgtttgcccattcttgtgttgatggacatttgggctgtttcagacgtttctgagtgtgtagggaatgctgttcttgccaactcttccagtggccctggatttgggcctttgaccctcacagaaggccaagcagaggctgggcaggtcccaccaaggccagaagcagagggcgtgttccccagcagggcctggtgtttggagcatgacacatggaaacagcttccaggcatgaccctgtgtctcccagctggccctgccacttctggaggtgaccctgccaccctgtgactctgtttctccgtcggcaaaggcggcggtgatggggactctgtggtggcagctattgtcaggcagcatggcagctgcacacgggggctcgcccatgtgagggaggctttccgcaggtggtccctgtccctgtccctgttcgcatggtcctgcagacggccgtctcacccccataccactggcgttggagggcagattgggcgtgaggagagggtgaatctgtgtccagggctccccagttttccgttcagacccgtggggaggcgactttcccgctgtgggctccagcatcgggaggggtggtctgtgtgga

SEQ ID NO: 33382 - DNA, 1049 bp, Artificial sequence
  DNA replication origin
gcagacggccgtctcacccccataccactggcgttggagggcagattgggcgtgaggagagggtgaatctgtgtccagggctccccagttttccgttcagacccgtggggaggcgactttcccgctgtgggctccagcatcgggaggggtggtctgtgtggagtgacgtgtggccctgtccccgctacgagaaatcccggggaaaggaggggtgaagggggcgggagggggttcctggaatctggctgagcttgggtggcacccaaggatgcctgcagcccgcccagtggcacgggaagccccctcacccgctggctggaaggggtgggaggcaagtggcaggaggcaggtggatgggttgcctgttcttccctgggggcgccaggggaagacctgtccctgccagagcaccgcggctggcagcccccagccctttggtggcagctatgccctggggtgggcagggtgatgcgtaggtcatctgcccctgtggtgggcccagcgccctcctgtcttctcagaccctccagaggaggcaaaggaggtctctcaggcagagcgagaacatgtcattccttcagggacagcagaaccaccacaggtactgcccacctgggtcagacatcagagggacagagacagagagacagagacagtcagagacagagagacaaagggagacagagagagacagacgcaggcagacagagtcagagatggagggaggaagagacggagagacagtgacagagacagaaggagacagagacagagagacagagacagagggagacagagagacagagatgggggagacagacaaaaacagagagacaaagacagagacagagggaaacagagagagggagagacagaaatagagataaacagagacagagagggaaggagacagagaaagagacagagagacagagggagacagagatagatcgagtcggacagagacagagaaagagacacagagagacagagggatacagagatacagcaagtcggagagagacagagagacatggggagacagaggc

SEQ ID NO: 33383 - DNA, 981 bp, Artificial sequence
  DNA replication origin
ttgggcctcggggaacatccagacctgggtcagtggcctcggcaagtgcccgggggatccgccctccggtccccgtgccagtttccacagcgggacaggggggtcccgggggccgggagtccgcagccccgaagacctacgctgccgccagccacacccctgggggtccgaccctcctgggtcccactttacagatggaggaactgaggcggtgactctaatcttcgcccggcctgagtcgcggggctggaacccgcagcgtttgccgattcccagggcccgagcgctccggcgagtgtgtgtgtaacgccctctccctggacgcctcgagtttaggaaacggcggagccgcccggattgaaattctcggcccgtgcacgcccggcggagaaatccatgacgcattgtttagacagacgcctttaaaccgcgccgcggcggggggcggcggccgggggcgcctgcgcggggaaggtcaccctttttttctgcacaaaggtcagccgtagaccgttgccaagacaacggccggcgtaaagatggaggcttaaggagaacagacagttcccctcccgaagatgccccgtgcaaagggcccggccgtgggcttgggaggctcagggggtgtgaggagctgagcgccggagcagagagagcggagagtggggcgctgggatggctctgggaggccaggaaggaatgcgggggcctggggggcagatcttggctcaggccctgccaggctgtcttcaaaccaatgagcctcagggttcctggctgtgaaatgggaacaacgtctgcccttcagggtaggcatctccaggctggtctggtgtgggaaccgctgtgttaaacatgcagactccagccaggcgccgtggctcacaccaacggggcacagtggctcacaccaacagggcacagtagctcacacccgccgggcacggtggttcacaccagccgggcacggtggctcacacc

SEQ ID NO: 33384 - DNA, 1370 bp, Artificial sequence
  DNA replication origin
ctactaaaaatacaaaattggccgggtgcggtggctcacacctgtaatcccagcactttgggaggctgaggtgggcggatcacgaggtcaggagttcgagaccatcctcgccaacatggtgaaaccctgtctctacaaaaaatacaaaaaatggctgggcgcagtggctcacacctgtaaccccagcactttgggaggccgaggcaggtgggtcaagaggtcaggagatcgagaccatcctggctaacacggtgaaaccctgtctctactaaaaatacaaaaaattagccgggcgtggtggtgggcagctgtagtcccagctactcgggagcctgaggcaggagaatggcgtgaacctgggaggcggagcttacagtgagctgagatagcgccactgcactccagcctgggcgacagagcgactccatctcaaaaaaacaaaaaaaaacaaaaaaaaacagctgtgtggattcctccggggcacgctgggcctccggagtctggagtgggggctaggggctgcctggggaggggctggaagggaagcagcagacaatgggctgggctgcacccctcccccggttccagttccccccaaatcagacggacacggctgcagaaagctgcggcctctcacgcggccaggcgcggggcgcacaatgcttgctgtcgtcccgtgttttctgctgtccccgcctccgttgtctgggtcccctggggcagctgtggaaattgggggttgagagcccttccaggcaggctatctttgtggctgtttcaagcatcctttgggagacagtaggggacaccttcccttccgccctctggacgaggcaggggtgacagcgtcggtgcgtgtactgggctctcgggaaggaggagggggcccggctcctggtcccttgtcccttgtccctgctcagtcctggttgcaggcattgtgggcaccacccgtgctgcccacaggaagatcattgtccgtagcagcatcctgagctgtgacctgcgtttatttccccatggggacgtggggtctccctgatgtcaagagaggcggtgtcacacaggcatttaacatgccactgccatgattgggactgggattgggaccagcacagccccttgggggatgtggcggtgtggtgggagaggggcttgggaacccaccagcagcctagccctggaagctgcgtgttgtagattatggaaaatgctgcagcactcagaacgagacatctgaaaatggtgttgaaagaaaacaaggacctgtcacttctgtgaatgtccccagcaaggactctcaggctatgatgagttggtttttttttttttttttttttttgagatggaatcttgctctgtcgccgtgg

SEQ ID NO: 33385 - DNA, 955 bp, Artificial sequence
  DNA replication origin
ctcagccgcccccgccgcccatggagggcgcgactgctgctccctcttgggggtgatccgtcatttcatccacgggggagttggggacctggggggcaagagagaggctggatgcctgggccctgtttgtaaacagcgttgatttctgagctgagatgtggcgaccaggcccggagcagggctgtattcacagtcgtcgaggggtctgccggccgtggccctgctatggaaccttgggtggggctggggaacaggacctcctgcctcacctcagacagcccctcctgggccaggcaccgtggctcacacctgtaatcccagcactttgggaggccgaggtgggtggatcacgaggtcaggagatcgagaccatcctggctaacacggtgaaaccccgcctctcctaaaaatacaaaaaattagccgggcgtggtggcgggcgcctgtagtcccagctactctggaggctgaggcaggagaatggcgtgaacccgggaggcggagcttgcagtgagccgagatcacgccactgcactccagcctgggggacagagcgagactccgtctcaaaaaaaaacaacaacaaaaaaagacaggccctcctgccaaggagaacgccagctgccggccgcagtcatttgtctgtcacttggatgcatgcagagcggggtctccggagggtggctggtgccggaacctgctgccacttacagggccctggtccccgtggatgctccagcttctccttagagctcccggctaagatggacccgcaagtgtgttttgttgttgttgctatttttggagacggagtttcactctgtcgcccaggatggagtgcggtggcgtgatcttggcccactgcaacctccatctcccgggttcaagcaattctcctgcctcagcgacctgagtagctgggattacaggcatgcgccgccaccgcacccagcta

SEQ ID NO: 33386 - DNA, 999 bp, Artificial sequence
  DNA replication origin
agagtgggggacccacggcggtagggaccgggcgctcccggaggagtctctaggccggggccccccctccccccaggcccggcctcctcgcctcagccccgcccggcggaaccgaggggacgcatcccgcgggctcaccgggcccccggctttccccagcgcggcgccccaagcccgggcaaggaggccgcagcggccgcaacagcggaggacccgcccgccaaccgctgccgtccgcgccgcccgcgctcaccgcctccgccaccgccgccgccgccgccgccgccgctccccgcggggccgggggcggggcttgcctcgcggcggcgccaagctccgcccccttccgcccgctgcccaatgggacgcgcgcgctcccaaggagcgccggcctcgccctctccggcgtccacggccgcgcgccggccccgccccttccgccgcgcgtctacccctttttcccgggagtgctgcctgaggagaccggttggcggggcatgtgtggccgctcccgggcgccgccctcccgcgctcccggccctttgtcctgcagtcagaccccggacaccgccctcgcgggtctcggtgggaaaacaggctcccccgcccgcggcgatccctgagagaaccttccagaactttcgagaatcttccaggtcctacggcacctcccagcccgggagctgcgcgccacggacccaattccagcagatcccaaccgatcccaaagccaggcatccccgcaaaggcgtcataagcttctgaactagagcaggacccaccttgggagggtcccaagaccccggggggcaccggaaacagccgcgggtggcgggagccccggagcggtcgctccatcagtgtcaggcctttccctgagcggtttttgattttttttcagacggagtctcgctctgtcacccaggctggagtgcagtggcgcgagctcagctcactgcagcctcctcctgctgggattacaggtgcgcgccaccccac

SEQ ID NO: 33387 - DNA, 1689 bp, Artificial sequence
  DNA replication origin
atcctgaaggcctataaccatgggatttcagatatttggtccaatccccattgtttcacagatggggaaactgaggcatgagaggccagtggcagacaaagacaaggacctgggcttttgcattgcagctgagcactgtctactgaattgctggaaagcattccctgaacacgaccataatttactatcacagggctgcttgccagatctttccttgagttacagccttacatgcctttttacagctgattctttttttttttttagtgtgaaaaaaaaaagacatttctggaagtgtaaccttggaagcactagaccaaaaccccattaaatggggaacgagaatcagtgccaaccgtgttctggctcaattatttcactgaagcaaatcctaggtatctcctgatcaagattttacttgtcacccgaaagtcatttctaagtcctgaagttacagaataatggctgtcaccttcgcaggccataatcgcttttcccatcggcagaggacatacttggcatccgccatcatttacactcatgtggcaagtggcaatgatttggcacaacgtactcccaggtctcacgccaatgtgtcctggaacgaaatttgcacggtggtttatacaactgtttgctggcgatgttaacgcagacacagccctcaggggcaaaggttagctcgacttagcctcaagtagatggtttaattccacaatcttgcattgagatgctcaatgccaaaaagcagactgacaaacagaaacgacggggctcggtatccagggaggcgcctgcattttttcataaataaaatacagcacagtccctcccaaaggttctatctagatcagttttaaaaggctcctgaataaatcatctccgtgcggaagacctgcctccgacctcggcaggagaggcattttacacaatcaaagctcacaaccctccccaatttggggagttaacagttgaccacagcacacacacaaaaataagagcggaaaaacgactgctcttttggctgccatgtccctgaaagaacggggacagctgcagaccgttcacagcatcaatgggaaggactggcttggctgttgacagaaatgaaaaggaggtttgggggtgggggtggaatttagcaacaacggaggggggcgtccccgcagcagggaagaggaggttcccagcagaggtaggggtggcgtttccagcaagagaggggatcacagcagcagcagaagtaggggtccaggcagcagggacaagatttcatggcggaggaagggttgcggcttgcaggaacgggggattcaggcaacagagaagggggtcacagcagaagcgggggggctcagggagcaagaacgagggctcacggaggaggtggagcggagggtccaggtggcagggatgggggatttcacggttgggggtggggaatccagggaagcagatgggggtccaggcaagagatggggttcacggcagacgtgagggggatccagggaaggagataggggtccaggcagcaaggatgggggagcgggtccaagcaagagatggggtccgggcggcagggacgggaaaaggagtccaggcaaagtgaggggcccacggcgccaggggcggaaaagggggtccgggcagagtgggggacccacggcggtagggaccgggcgctcccgg

SEQ ID NO: 33388 - DNA, 1257 bp, Artificial sequence
  DNA replication origin
ccctccccagcaccccacgtacctaaccggaccctgtagtcggtgatgagggagacacaccagccgatgtcctggttgaagtcctccctggcttgattctacaatgagatccgggcagcaggcgtcagtgggaggcagtgccaagcaccctgggttcagaagccacgcagagcccagggaccagccaggtgtccaggctgctcacgctccagcccgcacctctgaccctccctgacaaagggggctctggcagacgcctcgcacagggaccctctggtaaatgggaaacgcaccaggcacaggtctgggccctgagctgctcaaatggtgggcaccggggacccgatggcttgggctgatctgaacgcaggtgggcaccggggacccgatggcttgggctgatctgaacgcaggtgggcaccggggacccgatggcttgggctggtctgaacgcaggtgggcaccggggacccgatggcttgggctggtctgaacgcaggtgggcaccggggacccgaaggcttgggctggtctgaacgcatcgacggtgcaaacacctcccctgtggccactgtgccacatgacaggacatcaagtcctggaaataagctgctctaacagccgtttttgttgggagctatcgtctgcagccaggctaggccagcacctgggctgctctaacagcacctgggctggcagcagggtgggtccccagaaaaggacacagccgtcccaaagatgccataaagccacgaccatcacacaatgacccagggaagactctggagccgagggccactaggggtacgggggcaccccataagcacatcccagggccgggtggacgccgctctctgcctgcccagcagcccccgcactttcctaaagcacggcttccccaatatcatccctcagaagccacggtgactaccactgaatcaagtgggcttcgggaccaccacatacctgactcacaagcagatgtgagcgcactcttaggaagaagaagcgggcaccctgtgctctcagaacccagggtttttgatataaacggcagcccttctgcgtttaaggcacggaacttcctgctcttctcctcaccccacaccttcatccatttttagaaagtaactcagttccagccgggcgcagtggctcacacctgtaatcccagcactttgagaggctgaggcaggcggatcatgaggtcaggagttcgagaccaacctggccaatatgatgaaaccccgtctctac

SEQ ID NO: 33389 - DNA, 1209 bp, Artificial sequence
  DNA replication origin
acagcaagcaccatttctacaagaagcacaaaaattagccgggcatggtggtgcacacctgtggtcccagcttcttgggaggctgaagtgggaggatcgcttgagccagggaggtcaaggctgcagtgagccacgtttgcaccactgtactccagcctgggcaacagagccagaccctgtctcaaaccaaccaaccaaccaaccaacccaccaacaaaagcaaaacagaaaatgcctcaggcagtggggcccatgagagtgaggtttctgtggtttggaattctcgctgcatgcctgtgttgcccctttaagatggacgaagtgccccgtgcggccaccaaggccaccttgttggaagtgatccgacaggcacagctgtgccactgagggggaacctcaattcccctcacactgctgggaacaagtgagactggcttcggaaaaagcactggcagggacatgggggtctctgcagctcagtgaagggggcttggtggaagtcatcagacaggcacagctgtgccactgaggggggaccccaattcccctcacactgccagggcgggaacaagtgagaccggcttcggaaaaagcattggcagggacatgggggtctctgcggctcagtgaagggggttggggagtgtgggccaggtggttggggggctggcagaagcacgcacccaggttctgagacacccgctgggccaagccagagagggaaggggcgggggtcaggggaaggacgccatggtttgtggacagcagttttccacggagcaccaggccacgtctggggacatctgtggtcatctcgatggtagaggcgggagctcctggcatggagacactcagcacccagcaggacccaggacaccccaccccagtgacacaggtccagtgtcctcagtgccagggacaggctcaggtggggatgcagggttagctagctgccagaagagaggcaaagcgtgcaggcttctgagggcagggctcctggcgtctccctgcgtgtgtgcacggggtcaagcctgtcttcccggggctccggcggcagtcgaggaacgccagccatgctgtggagagggcgagcccaggaccacccatgctggcatcctcagggccccggaatgctcctcactggccgtgcctgtgaggtcagcacccctgactcccactcaactgcccggctgacaacccagagcaccc

SEQ ID NO: 33390 - DNA, 1189 bp, Artificial sequence
  DNA replication origin
taagcaattgtcctgcttcagcctcctgagtagctgagattacacgcatccaccaccacacccggctaatttttgtatttttagtagagatggggtttcaccatgttggccaggctgggctcaaacttctgacctcaggtgatctgcccaccttggcctcccagagttctgggattacaggtgtgagccaccaagcccagcccctatagggtcttcacgttcaaccggggctgctctgtgtgaccaacagaatggcggtgatattcatgggcggctgctgtggctcctgggctgctgcccccagcgaggctcctcagacccccagccccgttggagccttctgatgatgtggccccaaccagcatgtggactgcagccccacgagccaccctagaagcccctggccgggctgcccttagatcccggccccacagaaactgtgtggagaatgttccaggcgctgggttttggggtggcattctgctgcaaagggggctgactgataggcggactggacagaaaggtgaggtaggtggggagaagaatctggttcaggaactccgggccctggaggacacccctgagacagggaacatggaggagctggtttcacggggcagaggcaggacatgagcagagggcaggcagcagttccagaaacagctcaggccagtgagaggggaaggacccagggcggggtgagagtaggaattggggaaggtgaggagggggcgtgaggctggcacagggagggaggcagagaggcacaagaactcaggcaggccagctgcagtggctctcgcctataatctcagcactttggaggccgatgaggatcacttagcctcggaaacacagcaagcaccatttctacaagaagcacaaaaattagccgggcatggtggtgcacacctgtggtcccagcttcttgggaggctgaagtgggaggatcgcttgagccagggaggtcaaggctgcagtgagccacgtttgcaccactgtactccagcctgggcaacagagccagaccctgtctcaaaccaaccaaccaaccaaccaacccaccaacaaaagcaaaacagaaaatgcctcaggcagtggggcccatgagagtgaggtttctgtggtttggaattctcgctgcatgcctgtgttgcccctttaagatggacgaagtgccccgtgcggc

SEQ ID NO: 33391 - DNA, 1036 bp, Artificial sequence
  DNA replication origin
ggccacgacgccggcaccgacccccgacgccaccacgacacccgaggctcccacggccccagacccgcgcggccccacacccgccgccggtgccgcgctcacctgacagcaccgccatcttggcctcggccttcagacaacctctgaggtccgttctccttagcgctccgggttcccggggccgccgcccaaagcggctcggagcgcatgcggaaaccggaacctggagccgggaggttccgctgcgctttcggcctccgtggtcgtgttgcgccgtgcacccccagatcacccgaggcggaaaggtcatcggagtgcgcacgtgggggccgcgggtctgcggcggaccgacaaaaacagaggcgacactcattttcttgttattccaggagggcaaaagtcaccacgcgtccctgggtgggctcgaaccaccaacctttcggttaacagccgaacgcgctaaccgattgcgccacagagacgacactgcgctccggcgccctgggagaccttacaaaggatgtggggcctgctgacgcgaaacgactgcgcctgcgcagggaaggcgcagcgcgggacggagtcccggcgagagcgactctgccgcccagccgaaatagctcagttgggagagcgttagactgaagatctaaaggtccctggttcgatcccgggtttcggcagaagttttagcgcctcttgcgatcactgatgtctttcgttcaggattggtccagctgcctcgcagctatcccggaccccttaccgcaacatcaccgcattctgcagaggagtcgccgcgatgtggactcatcccaaagtaagggggctcagacctcacaaccccaaagcctcctcttcccacccctaagaggtcataatttcagctcaaacttcccccttccctgacacaccctcgattttccatcttgcttaaattgataagtttacaaccagtactaatgatataaaaactaacactaaacacccaaactagcaaaacagagtttgcagaacgctttctgcatgcatatca

SEQ ID NO: 33392 - DNA, 1664 bp, Artificial sequence
  DNA replication origin
gcgcgttcggctgttaaccgaaaggttggtggttcgagcccacccagggacgcgtggtgacttttgccctcctggaataacaagaaaatgagtgtcgcctctgtttttgtcggtccgccgcagacccgcggcccccacgtgcgcactccgatgacctttccgcctcgggtgatctgggggtgcacggcgcaacacgaccacggaggccgaaagcgcagcggaacctcccggctccaggttccggtttccgcatgcgctccgagccgctttgggcggcggccccgggaacccggagcgctaaggagaacggacctcagaggttgtctgaaggccgaggccaagatggcggtgctgtcaggtgagcgcggcaccggcggcgggtgtggggccgcgcgggtctggggccgtgggagcctcgggtgtcgtggtggcgtcgggggtcggtgccggcgtcgtggccgcggtcctctccgggcttctccgagccggccgctcctcgggctccccgcccggcttgcgatgaacggtcgccgttattgcgtccagagtacagtcggggaaaccgaggcccggtaggtcatgacgcaagcctccagcctcaggaaggcgctcggggtggaggctggaggggccccattcacgtccccgagaccagggcacggcccgcgaggctgctcttgagatgccctggagagagcggggcctgcctgacaggctgggaaactgaggcccattgagggtcttcgaggtcacagggccgggcctgggaaggaacaggacccaggacatccacgccaccctgctggaccctccacctccctccccacccctgggaggtaagggcctctcgcagagcctgtcctgctccagggacttttttgggatcagctgaagcctgcggacctctgctcagataaagttattaaatgcatggaataaaatccatagaattgcaaggaaatcagttacacggagaggcagttattaaaagattgtcttgaaacctgattggcgacttagtaatctaagtgcttcccttatgaacgcgatctagcggcaggtctaattgcgactgtgatttggaaggagtgaggagtggaaatgaggctttgatgatacggaaacgtctgcagcccctgcaccatagctaggaaacatctgtgattccgcttggtgaaaagttacaggtcctgctaatactgccgtattttgttgtctatgctaagaattttttatttatttattaagacagggtctgcctctgtcgctcagactggagtgcagtggtgccatcttggctcatcactgcaacctgtgcctcccaggctcaagcgattctggcacttcagtgtcctgtgtagctgggaccacaggtgtgcgccaccatgcctggctagtttttgtatttttagtagagatgggggtcttgccctgttgcccaggctggtctcgaacttctgagttcaagcaatcctcccacctgagcctcccaaagtgctgggagccacggcacccagcctacgctaagaattgaatgaagggctaattttccataagatgctggtgacaacaaagacatatatatttttttattccaagcaaattcacagttctgaatcctcaccaggccccttgttaagaatgcctggcccacgcgcggtggc

SEQ ID NO: 33393 - DNA, 952 bp, Artificial sequence
  DNA replication origin
caggtcgggtggagggtcacagttcagccgtcaccagcaccaagcctgcctttctggattcttccttgtgagccaggattcctggcacctccaggtttcctcccgctgagtgccccgggcgtggcaaggccctgctctggccttagtcttcgcctcgggaaggctctcccaggagacttcgtgcaggcgcgttccctcctctgcgcttcctttgaggctggctcctctaggggtgcttttctgtgtagattgacgtgggcagcgccctccccgcttagcggactgcagattcctgcaggatggggcctgtgctcagctgcgtgggaaacgcccgagcagcagccagggcctggagcacccagcacacgcttgtcaggcacagctgaggccaggacgagcactgggtgcccagggaggccccagcattgctggagtggcaggcaccccacaagcacgcatagatggagatagaaccgggtgccggcaaccggaggacctggggtcctggtgtaggcgggacgccccgggtatctgaactgaaacctgcctcatgagaaggggccagcagtgtgcaagtgtgaggcggggtgtcccccgcagggcagcagccagtgtgcaagtgtgaggcggggtgtcccccacagggcagcagccagtgcgggggccctggcgcaggaaagcggcaggtgccagtgaagatcgccagggcggggagacggggcagcgtttgggttccttccggggccatgcagtctcaagcaggggactaagactctctcgtgttctgaaaaccccctcgttacctaacgtttgttaagtggcactcgagttgggatcagagctaggctgtgcgggcaggagcctgatggggaagcgcctggaggccggccctgcgtgctgcccgcagctcactgttcccaccccgtggtcctctctgcagctcctggcctgc

SEQ ID NO: 33394 - DNA, 1116 bp, Artificial sequence
  DNA replication origin
gtgtgcaagtgtgaggcggggtgtcccccgcagggcagcagccagtgtgcaagtgtgaggcggggtgtcccccacagggcagcagccagtgcgggggccctggcgcaggaaagcggcaggtgccagtgaagatcgccagggcggggagacggggcagcgtttgggttccttccggggccatgcagtctcaagcaggggactaagactctctcgtgttctgaaaaccccctcgttacctaacgtttgttaagtggcactcgagttgggatcagagctaggctgtgcgggcaggagcctgatggggaagcgcctggaggccggccctgcgtgctgcccgcagctcactgttcccaccccgtggtcctctctgcagctcctggcctgcgcggcttccggatccttggtctgcggtgagtgcctgagtctccagccctcagctgggaggggccttcagcagcgacagacgaacggggcggggggggtggggggtggggggagcgccttgttgaaggtcacgtgtcatgttagggacaggatgcaggtgacggtctgcacgctgcccgtgatgtgccgggaccctccctgggacagtccacgcagtggcaaaggctggacagtcaggaggaaaaccctgtgggcccggctcagtgccgtcagagctcaccgccacctggggtgggaaggcattctctgagccctgtgcagatggcagctggggcaggcctcctgcagacccaggtgactgacagggcggtgagggcgcatgcccagggatcttaccttggtcatgtgtggagggcctgctgccagtttccttctgtggatgatcctgggaccgtccttgcttggacactgttgacctgctgggtacgtcacaaaagaagttccattcaagtctgggccatcattgggggtcggggcgatggccgcatggctccagcggctctggccagtggcccaagtgttgacaggcagaggtgagaacagtctcgcagcagggaggggagaggcaggacaacagtgagtgcggctgggggagctggaggggcctgggacagccactgacccgcgttccatctcccggcagctccagcgtgggcccggctgtgcaggcac

SEQ ID NO: 33395 - DNA, 1547 bp, Artificial sequence
  DNA replication origin
agttttcctgatggtcaaattcaccctaacctcacagtcaaactaagcctcccacgttttcatttgccaaatccggccaccccgggtcccagggagtcctgcgtgcccttctgtaaggctgagggcgcgggacagtgtccttggcccccaggaaccttctcgcttggtatttctaactgcaggtctttggtttgtgccaggtaggaccatatgaaactgctgtaaaccaggcgtgtgtcaggaattccactcagcttcccctgctccctctgatccctctgatgcctgaatacatcgccgacttctcacaggggacaggctccactaagaggcagcgctccgagtcggcccatccataggatgggggagcccgccgtctgctgggggtgtgggactccctcacaggggccgccgggctccgtgtggcgctggccctgtctccagctccctcgtgggcggtgcggtcccggccctacctgggatgtagatgtccacgggcacgatgcggtcgcagcccctcaccaccgagtaggaatagtggtagtagcctcctccgttggcgcagctgttggggaggcaccgtgaggggagtgtgccgaagacccgcctgcccaccctccctccacgaggcctcgccccatccccacccgccttcaactgcaggccaggcacctacgaggctggaacttgtcacggagaagcaatgagcaaacacgcacaggctcccagagcctctgtgggaccagtggggcgcaagctcacacgtggctgataactcggggaaaagtgctcccctcccgagggggctcctgaccaccgattcccggggctgggatgtgtcagatcacatgtgtcaacaaaaagccacttcagacagccacagtgccaacacccagcccctgtctatggggcggctgagcctcaccctcgcctgattccggctctgtcagtgaggcgctggggtccacccggggcagggagctggaaaccccaggagaccacacagactccactcccagcactgcttcccacagccgtaaaaatggacataccctgaatgcccagcagtgggagacggttatgaaaactctggaatattctaattaactgtttagaattagattagtaatatgtccacacagtgggatattattcagccaagaaaaggcacgaggctcggacacaggccacagcacggatgcaccttgaggacgtcgcgctcagtgagagacgccggacacagaaggccatgcggcgtgtgatcctgtttctgtgaaatgtccaggacgggcccatccacagagacagggaggggaggtgtgggcaccggggctcggaaggggatgcagagtgactgctgatggggacagcatttcatttgggggtgatgagaatgttctggaattagaggtggtggcctaaaaaccactgaactgctcgctttaaaagggtaaacttatcaagacctgatctctacagaaattttaaaaagtaggcacagtggagtacatctgtaatcccagcactctgagaggctaaggttgggg

SEQ ID NO: 33396 - DNA, 1542 bp, Artificial sequence
  DNA replication origin
tcaggagccccctcgggaggggagcacttttccccgagttatcagccacgtgtgagcttgcgccccactggtcccacagaggctctgggagcctgtgcgtgtttgctcattgcttctccgtgacaagttccagcctcgtaggtgcctggcctgcagttgaaggcgggtggggatggggcgaggcctcgtggagggagggtgggcaggcgggtcttcggcacactcccctcacggtgcctccccaacagctgcgccaacggaggaggctactaccactattcctactcggtggtgaggggctgcgaccgcatcgtgcccgtggacatctacatcccaggtagggccgggaccgcaccgcccacgagggagctggagacagggccagcgccacacggagcccggcggcccctgtgagggagtcccacacccccagcagacggcgggctcccccatcctatggatgggccgactcggagcgctgcctcttagtggagcctgtcccctgtgagaagtcggcgatgtattcaggcatcagagggatcagagggagcaggggaagctgagtggaattcctgacacacgcctggtttacagcagtttcatatggtcctacctggcacaaaccaaagacctgcagttagaaataccaagcgagaaggttcctgggggccaaggacactgtcccgcgccctcagccttacagaagggcacgcaggactccctgggacccggggtggccggatttggcaaatgaaaacgtgggaggcttagtttgactgtgaggttagggtgaatttgaccatcaggaaaactgttagtagtaattgtttagtacgagtatatcccaacaatatttgggctatactgacactaaaaagagcattggctgcatacctgaaattcacatcgcaccgggaacattctttatatctggtgatcccgtgggactcttgcacctcacgtggtcccacgagggccatccccccgggcgttcaccttgacagtggtccacggtaggcaggcttggaggtggcgctcatgtgggacaggggacagagtcctgttcttggccaccctgtgctgcgtgcggcattagctcatgcgcagagagcccagccctgagtcccgagtctgggggtttgggcaagcgagaggcacatcctggtgcctctcaaaagtggaggaacaggctctgactttggattccgcttccctggaaagggcgttgatttgttcagcgttctgcacggttcaggtcaccccgggggcagtggagagggcagcctgggcctccctgtgacttgacagcacagagaggtccatcctggggtcaggagctctgcccatgcccctggcgtcttcccctgcagtgcagaccaatggggcaagttgcgagtgtggactgtactcctccctccttgcagactgagctcctccctccctggggaccgcgctcctccctccctgcggactgtgctccctgtctggggactgcgctcctccctccttggggaccgtgctcctccctccctccctgcggac

SEQ ID NO: 33397 - DNA, 1061 bp, Artificial sequence
  DNA replication origin
cttcgcagagcagcgggaaaggaccctgctggcaggcacagtgcccgtctctgcccccggctctgctccaaccgcccccagcccaagggcggcacgccgcagggggtctgtgatccccccacgtccccggctcctttcacccacacaccacactgggaggcggcagcccgagggcaggtttattgacaacctcacgggacacaagcaggctggggacaggacggcgacaggctccggcggcggcggcggcggcgctacctgcggtaccagatctgcagcctccgctcccgcttgatcttcctctgcagctgcaggatgccgtagagcagggcctcggccgtaggtgggcagcctgcagggaccttgcctcagtctcgcttcccgcagccggagcccgcgtgaccgcgtgcacagcgcagccggctcggctttggaagggtttcccgggccggcctctgaaggtggaggctgacagccctgggtgggcgcagtgccagggactgggagccggcgcaggggaggtccctgcaggaagagtggggtcctcccctgggcaaggccccactgccctccacccgtggctcatcccgggctgtcacagggacctctcggacaagacgctgacctcactaacccggcccccggccccagccctcaggactcaatgggggccagcgctcagcagacacacttagcagtggggagcagggcccggggctgccctggacggagatggaggcagggaggctgggcggagggaggggaggtggcccagagcccgggcatcccacgaggacccgatgaccctctttctgagccccaagccagagctctttgctggggatcccccagtcccggctgccacgcaggttcagaacaaagggcttgagcaagaggacgaagcccagggcccaacggggacagcaggagtggaaacaggtgagaaaggacaaggccactgcagggcctgggaaagggcggccaggccccacctggcagagctctggcaagtccaggctgctccaagggagggagaagcacagtccgcagggagggagcag

SEQ ID NO: 33398 - DNA, 2685 bp, Artificial sequence
  DNA replication origin
gagctctggcttggggctcagaaagagggtcatcgggtcctcgtgggatgcccgggctctgggccacctcccctccctccgcccagcctccctgcctccatctccgtccagggcagccccgggccctgctccccactgctaagtgtgtctgctgagcgctggcccccattgagtcctgagggctggggccgggggccgggttagtgaggtcagcgtcttgtccgagaggtccctgtgacagcccgggatgagccacgggtggagggcagtggggccttgcccaggggaggaccccactcttcctgcagggacctcccctgcgccggctcccagtccctggcactgcgcccacccagggctgtcagcctccaccttcagaggccggcccgggaaacccttccaaagccgagccggctgcgctgtgcacgcggtcacgcgggctccggctgcgggaagcgagactgaggcaaggtccctgcaggctgcccacctacggccgaggccctgctctacggcatcctgcagctgcagaggaagatcaagcgggagcggaggctgcagatctggtaccgcaggtagcgccgccgccgccgccgccggagcctgtcgccgtcctgtccccagcctgcttgtgtcccgtgaggttgtcaataaacctgccctcgggctgccgcctcccagtgtggtgtgtgggtgaaaggagccggggacgtggggggatcacagaccccctgcggcgtgccgcccttgggctgggggcggttggagcagagccgggggcagagacgggcactgtgcctgccagcagggtcctttcccgctgctctgcgaagaccctggggtggacatcgtggcccaaagtcccgagcgtggaaggccgcacacccatccttcctgggagggccctgactcagtctccctctatgccctaaggcaggctgagcaaagcccgtctgagcctgccccggggttcagagtgtggcctgtggcctgcgtgtggacttgggcaggtcgccactgccctctggcccatttccaggcggtggcatgggctggttagctgagggctggggccagggagatggggaggtggcacctggtccaaaccaaagggctgcagggcaggactgtgagcctcacaggctgtctgaccccactttggggaccctctccacccagggctttcggggaaccctgactccaccccaccagccccttcatccgtcgaagtccaggcctcatcagggacgtgcattcattcagcaaacgtcccatcttcctgtgttcagcgccagatgccgccggtgctgggacctcgctctgcaggcccaccctgcatgcctgctgcacaccagggacagttctggggatcggcagttatgacgggccaggctgggatggggcccgggagactggggcgggggtggggaagaggcacccagcccagccgggtcaagcagcctggaagcaggacatgctggggtggggacagggcgtcagccagcggaacagcagccctgggccagagtgcagagcacaggagccggccttctctcagggcaaggaggtcagtggagggggcgagcaggacggccccaggaagatgggcgggctgcacacatgtggatgcagggggcaaagtgggaggcatggggtgaccagctgggcacaagggcacagacaggcaggacccgggatgttcctggggctgggcaggtggggctgcccctgcaatgggcccagcaggggcgatgcctcctgagaggaaaccacatctggaaatgggaggcttggggaacggggctgtcagcagccacgcccctcctggggcgggaggaggggagctcagggtgtgctggggcgggcagagaagtgggttcctgcctggggtgggcaaagatccttgtcccacccacaccccggccgtggtgctgccaccccctgagaccctgacctagttacccccttccctgaccccactgcaaagggtcaggtggctttcatctgaggaagggacatcgggcatcagctggagatgtctgctatgggcaagacagtggggggggcggggcggatcctggggccgctcagaaacctggaggggagtcacccacttttcctgtgtccatgggatgggcgggaggtgagggagcagccgctggaagtaacagtcgcacgctcactgccgactggccaagcccagcgccggcgtttacttcacctcagggaccctgcagtgggcagcagtgaccctcacagagaagctgggaaagctgctggtgacacacagctgggatcagccctgggctggtgggacccctcacagagaagccgggaaagcttctggtgacacacagctgggatcagcccagggctggtgcgacaccctggactcccggccaggaaggcacggaggagggcatgggtgtggccgggccggggtgggggctcagcctttggtcaccaggggcgtgatcatctgtgggaaggcgtagtagcggcagtcggccggtgggaccagcgccatcacctccgtacggatgttctccctccggaagccggcctccagcagcgcgggcacctgcgtctcctggtcggggatggcaccaggtcacctctgagggccatgggggtcacgtgcaccctggcgcccacccctcattgaagagtgtttacagatggcaa

SEQ ID NO: 33399 - DNA, 1081 bp, Artificial sequence
  DNA replication origin
aagctgctggtgacacacagctgggatcagccctgggctggtgggacccctcacagagaagccgggaaagcttctggtgacacacagctgggatcagcccagggctggtgcgacaccctggactcccggccaggaaggcacggaggagggcatgggtgtggccgggccggggtgggggctcagcctttggtcaccaggggcgtgatcatctgtgggaaggcgtagtagcggcagtcggccggtgggaccagcgccatcacctccgtacggatgttctccctccggaagccggcctccagcagcgcgggcacctgcgtctcctggtcggggatggcaccaggtcacctctgagggccatgggggtcacgtgcaccctggcgcccacccctcattgaagagtgtttacagatggcaaggcccgggtgggcggctgcagctcccgtgggcacgtggcagggcagccctggaagcccaggtgtgaacgggaatctccagctccccagtgcgggcagcagcttcccggctgtcctggaaccccagccccacactcgagccacccccgggcacctactccacagttctccagaccttgccagtgtggcgggtggagccaaagaatcacaccagaaaaagaacacaggccactagttcccattttggaagaaaagctgccccaggggccacaggcacccagccggctctcacaacagcagcccagggcaaccacatagagcccttctcagataggccgcctccaccaggcagagggaacagcgagacaagcactgctgaaccagcaaagacagccaggtggaggcagctggagggaggggaacacgcagggcttaggctgaaccacagggcactggggagccatgggaggttgttgagctggtgagggactttgatttccattttttttgtttttgttttgttgagatggagtctcggtctgttgcccaggctggagtacaacggtgcaatctcggctcacagcaacctccgcctcccatgttcaagtgattctcatgcctcagcctcccgagtagctggaattacaggcgcccgccaccacgcctgg

SEQ ID NO: 33400 - DNA, 1835 bp, Artificial sequence
  DNA replication origin
cccgctcaggactactgtgttccgcccgcctctgtccatgctggcccagggtgccctcccgtcctgtggcaaatgtgactcacatagcctagttcagccctgcaccccctcctccaagcagacccccagctcagccctgccctaccctgtgccccctcctccaggaagcctccccagccctgctctgcaccccctcttccagacagcctccccagccctgcatcccctcctcctggcagcctctccagccctgccccgcaccccctcctccaggcagcctccccagcattgccccacaccccctcctccaggcagcctctccagccctgctctgcacgcccccctccaggcagacccccagcccagccctgcgccccctcctccaggcagtctccccagccctgccctgccctgtgcccctcctccaggcagcctcctaagcccgccccacctagtgatgccaggcgccctgtgtctgcccagggggccgggtcctggaggtgggctttggcatggccatcgcagcgtcaaaggtgcaggaggcgcccattgatgagcattggatcatcgagtgcaatgacggcgtcttccagcggctccgggactgggccccacggcagacacacaaggtgcccctctgcccgcaggccctccaggacccccactccttggggtgagggcactgcttcctgggggttgggggcctggggctgtcagaggtggaggaggtggtcttctctctcgggagtccccctggccgctccctttctgcaggtggggagatcctggggacctctctaccctgtcctctctttttcttttcccctctgcaaggtcatccccttgaaaggcctgtgggaggatgtggcacccaccctgcctgacggtcactttgatggtgaggggtgaggggacgtatcacagggtgggcctccccagctccaatgcagcccctcctttgcttgtgggggtccctctgatgtgcactggggggacagagcccaagtgggtgtgggcctggctgtgggatggcggagcaccggggatgggcatgctcacggaggggccctggaggcgatctcggggttctcaagcctgtgtgggagccccacctctacccacggccccgtctcactgcacctccacccgctgggggatgagccgggtgaggctgggtgaggcgctgagcccggccctgaccgcgtgggcttctgttctccgtgcagggatcctgtacgacacgtacccactctcggaggagacctggcacacacaccagttcaacttcatcaaggtggttctctctgacttgctgggatgcgggaggccctcggggaagcccctctgcccacacccccacctccgtcctgaccactggccactccccttccacagaaccacgcctttcgcctgctgaagccggggggcgtcctcacctactgcaacctcacctcctggggggagctgatgaagtccaagtactcagacatcaccatcatgtttgaggtgcgcccacctgaagttccccatgggtctccaggaagtgaccttggatgggggtgggaaggggctgctggagccaccttgctacctggggagggtcccttcctgaccccctgggtgggctggactgtgctggttcatttagaaatcaaagtcctttgcctggcgcagtggctgccaggagcagtggctcaggtctataatcccagcactgtggaaggccgaggtgggcagattgcttgagcctaggagttcaagaccagcctgggctacagagcaagacctcatctttcctaaaaaaaaaaaatacaaaaaactagctgggcgtggtg

SEQ ID NO: 33401 - DNA, 1679 bp, Artificial sequence
  DNA replication origin
tcccctcacccctcaccatcaaagtgaccgtcaggcagggtgggtgccacatcctcccacaggcctttcaaggggatgaccttgcagaggggaaaagaaaaagagaggacagggtagagaggtccccaggatctccccacctgcagaaagggagcggccagggggactcccgagagagaagaccacctcctccacctctgacagccccaggcccccaacccccaggaagcagtgccctcaccccaaggagtgggggtcctggagggcctgcgggcagaggggcaccttgtgtgtctgccgtggggcccagtcccggagccgctggaagacgccgtcattgcactcgatgatccaatgctcatcaatgggcgcctcctgcacctttgacgctgcgatggccatgccaaagcccacctccaggacccggccccctgggcagacacagggcgcctggcatcactaggtggggcgggcttaggaggctgcctggaggaggggcacagggcagggcagggctggggagactgcctggaggagggggcgcagggctgggctgggggtctgcctggaggggggcgtgcagagcagggctggagaggctgcctggaggagggggtgtggggcaatgctggggaggctgcctggaggagggggtgcggggcagggctggagaggctgccaggaggaggggatgcagggctggggaggctgtctggaagagggggtgcagagcagggctggggaggcttcctggaggagggggcacagggtagggcagggctgagctgggggtctgcttggaggagggggtgcagggctgaactaggctatgtgagtcacatttgccacaggacgggagggcaccctgggccagcatggacagaggcgggcggaacacagtagtcctgagcgggaacagcgtgggccctggccagcggccagagagaggatgaccagccagggaggccgaagacggccgcttttggggccaggcctgtggggaggcgagagccttggactttgagcccagcccacgctgtttgtcccgggtcccttatctctcgggttagttacttttctctccccctccctctatccgaaagttggatttgcaagagtggccaggcaagacctggacttgagactatctgggaggggaaggactggtccccagtgggccacacatgggccccccgctcaatcctgattggcactggacactggacgtgcccattttcagggtgggaacactgaggcccgacccctggacggggcctgtgtggggccagggagtcctttcttagcagcccttagcgtctgacgccaggcaggccagggccaccccggggacagctgtctccctgagctcagctttccgagtgctattcttagccgggcgagtcggggctgctctcccaggcaggcagaagggcagcctctccctggcacgaccccttcctcccgacctcagacagggagctggggacccggttccacccagtttcacccaggtctcacgtttgaggtccccatctggagagcggggggcctcactccccctggagaggaagtttctggtacttaggcggtgcctaacgtgtgcgggccccacgcctgccgcactccccgtgaacgcctccgtgtgcccccacctgcagccccacttcccaggcgaggag

SEQ ID NO: 33402 - DNA, 1451 bp, Artificial sequence
  DNA replication origin
tttttttgtagagacaaggtctctgtgtgtggtctaagctggtcttaactcttgcactgaagcaatccttctacctcggcatcccaaagtggtgggatcacaggcctgagcccctgcacctcccccaggcactgggatcacaggtgggagctgctgcacccagcctatcaagcatgttctgtgtgccaggatcactgacagccctgtgagagggacgctaggaccatgaagaaataccttccgttagtgaactaccaaagagagagaaaacagcttctggccgggtgggtgcggtggctcacaccttgcaatcccagcactttaggaggccgaggcgggtgaatcacgaggtcaggagatcaagaccatcctggctaacatggtgaaaccccgtttctactaaaaatacaaaaaaaaaaaaaaaaaaaaaaaattagccgggcttggtggcgggcgcctgtcatcacagctacccaggaggctgaggtaggagaatcgcttgaacccgggaggcagaggttgcactgagccaaaatcatgccactgcactccaacctgagcaacagagtgagactctgtctcagaaaaacaaaaacaaacaaaacagcttctgaccaggacatgcctgtcctggggcagaatgggggtgtctcctagaggacacgtgggctcagcttgagacagaacgagaaagcggcctgaccaggagagaggctgtctgggcaaggggaagagcgtgtgccaaggcccggggctaaggagctgtgcaagaggtggcaggggcatgtggaggcgttgagcaggcagtgatggggcaggcagctacccagacaaggtggcgcagggaaggccgcgcgcgggagctgtttccgaggctgcctgcgttcacaccgtggccctgctgcaacctgtgaacctcaacctctctgggcctcagtttccctcgtgttaaatgggcataataactgcatctgttaacccgtgcagaacgcacggcaggcaggcaggcaggcaggcaggcagtgctcagggctcatgactgtggccccacgttcagagggggaaggaaaccggctatcagagccaggacgccaccgcagcgggcttgggggcccccaggaaacaggcggggggtgtgcttgaccctaaggggctaccctgggctgggggaggcctaattccacccccgcacaccccagctgcagggccgccggaggaaagggcactgctgggattgagtcctggtctccagaactggaggcgtctttgggcggaatcccccattagggacccggggtctcagatgacccccagcctatgggggtgtgacatgggctcatgaaaggggggcatcagagctctaatgctgggtccccaccctcgtggccaccagaccaccggctttgcttctcaaagcctcagtttccacatctgtaaaatgacagtcggct

SEQ ID NO: 33403 - DNA, 1195 bp, Artificial sequence
  DNA replication origin
ggaaatggagtccctgcgctggccccgcccctgcaaggggaggatgcgcgcgggccgagccacgtgcgtgcgtgcgcgcgcgtgcgggcttgcgtgcgcgtgcgcgcttgcgagaccggcgctccgggctaggcactgtgggcgcaggcgcggctgccgcttcctctttaactcttcactcggaagcggtggagccgcgtggggcgctgcggggagtgggagtgtacccgcccgcaccccaggcgggcggacggagcgggaacggcacgtgagcgtcccgcgcgaggctccttcccctgtccgcatttcacagaagaggatcccgagggtccgagaggctgagtcacttggccaaggtcacccagttcggggctgaactggaatcaaatcaaaacaattaactaaattcaatgactatgaaaagatattattgaccccccccccaagtgctattactattaatagccaaatactgttttagttgcatctgttaattgcatacatcagtggttcttcttctgggtgactttgccccctaggggataacttggcaatgtctgaaaacacggttttggttgtcacaacttgagtgcggggtgctgctggcatcgagtgggtccagaccagacatgccgctcagcaccctgcagtgcacacgacgaccccccaaaaagaatgatacccgtcctccaatgtcagcagaaggaggtggaaaaaccggtctaggctgacggtagtaaacaggtgacccgcagggttttgtaaaaccgggtacgtgctgcctactgcttttctccttaatctcacagcacattgacagcctgatcgtttggtttattcatcatcacagaattaaataaatacaaggaacaaggccgggtgaggtggcgcacgcctataatcccaacactttgggaggccgaggatcaatttaggtcaggagatcgagaccagcctagccaacatatatagtgaaaccccgtctctactaaaaatacaaaagaaaattagccgggcgtggtggtgggcgcctgtaatcccagctactcgggaagctaaggccggagaaatgcttgaaggcaggaagtagaggttgcagtgagccgagatcgcgccactgcacaccaacctgggcaacagagcaagactccctcttagaaaaaaaagggccgagcatggtggctcactcctggaa

SEQ ID NO: 33404 - DNA, 1607 bp, Artificial sequence
  DNA replication origin
caggggcccccgccgccgcttcctggttgtggcggccccgaacgggaacttgggggggtctggagcgtccccgttgccgcctgtagggcttcctggcctgggggaccccgaatgagaacctgagggagtctgcggggagtccagggcgccgtcgccgccgcctcccggcttcctggccagggggaccccaaactgtggcgtggggggtggtccggggcgcccccagcgcgcgcccaaacttggcgggcggcgcacgtggcgagccgaggcgagggttccggttctgccaccgcccaacctatcccactcggggctccgggctccccgctcccatcccacccccccaaagtggtaaggtcgggaggggttcgcaaacccagggcccagggggctcgggtcagccggggcctgctgtgtttacgttgcctcggcgcctccccgccgggggtgggcttgagctgcggaagggagagtcagcgcttccgaggcggcgacgggcccgcggatctttgctgcgccgaggcgtcccctcctataggagcctgacctgctccggaccccgcggggccgggaaacctcatttcgctgtgccccagggctcggcgccattctttggtaggagcggctcctgccgcagcgacgtcgttttagagttgcattcttccggcaaaacagtctgggttgggtttcctagtggtctggtgtaaatttctcggtgcccttagctttgagcagcgccctgtgttctcagcgctgggcttggctagtgcgggagcggttgctgctagagggttgccttggcaggcgcctctcgcaccagctacaggtcacacttgtggatgggaaatgccttttgtgggctctccccctccccagacaaaacaaaagagcaccttccgttggagaaccaggatgaaagcacttagcccctgcctagcccgtgctgtgagtcctctccaggcactttgacttggcagggtccgtgtgcctgtgtgagggacattgcagggatgggcctgagcagggagtccaccggccatgggggatggagccatcgactttggggtgaggcagggaaagggctcccagatggggtacctggattaggtccattcaagccgcgggtgaacgtgggcccgctccacccaagccgtggctgtgaggaggctggagagaggtgagggctcctgtcccctccctgcatggacacccttgggaagtggggcagctggggtcccagcctgggtctggaggggtcccacccacagcacaaataggctcgcaggccacccggacgccacgggctgcgtggaggagaactggagtgcatggaccctgctctcctccccggctgccaggagtgtccactgctttctaagtcagactccttgggcaagaagtgttgccacagccgcccgtcgcatgggagaccggcttccattctatgcggagtccacggtctgctctgatcttgctgtgtggagttgttgtgtgcgtgaaatgcttgtgaccctgcgaagcgccctcctggcaagtcccctgcaggtgcggtgggtgccatgcaggagggtgctgagcttggatggaagcaggccctctctgcggca

SEQ ID NO: 33405 - DNA, 1402 bp, Artificial sequence
  DNA replication origin
gcctgccggtgataacggatgccttacacacaccgacttccagtcagcttgaggggggcttcatgcaggaggaagcgcatacgtgtggtggggtgtggggagtccctctctggatcctggtgggtttggcacgcggaccctacatggtggatgtgatggacagtgtcctcctttgggagcggggcctgtcctggtcctcttgtgaagggtgggggacaggcactgacctgtcaggagggttagagggttggcaccagcaggtggcctggagcgctcagagcacgcgcgatcaggaaggcccgagtctccagtgtgccctccctggccttgtgaagtcatcttaaagtctggcttgagcgcctctgacttggattctgggaagctgacacagcgcggccggggtcgccacatcctgttgagtagccgctgggtgctaggcgcctgggtggtagaccaggtgtcagggatagggcccatgcctggcctactggggagaggacagaggctcagaggggtcacctcgagcgcccaggccattgtgttctgctggcttccaaggcagcacacggtcatggaactggagagagaggtttatggaagattttatctggtacactggggaatggtaagacagggacacctggaaatattgtaggaaagtcacagagggaggaaggactcagcggagagaggagaaagccgcctctgggcagcttcgaggatacccaggactgtggccgggggccatgcagctcagagccaggcccatggcaggtctctgggtttattgggtggctgtggaaggagacatcctgagtggggctcctggctgggcccctagaggccgtgactacttgtacctgtgcagagtgagcacaaggcacctggcaagattgttggtcaggccagagagggccgtgatctgggggaggctgttgcagtgcggggagtgatagggaacctcatggggccgtgccggcctttctggggctctcttggtgcatttggagttattccgaggcaggtctcctgggctctgtcagcactctggcctggatcactctggggcaccgtgggcactgcagggtgctgggcagcacctttggcctccattcactccgggtcaggagtacccccagtcgtgacaaccacaaatgttcccagacatcacccagtgtcctgctggggggagagccactgtctgggagcatctgtgcttttggcctggttgcccctgcgctgggggccgctgctccttgtggtttatggcttgtcctgtgtcggctcctttgattcctgtgaatgggccttgagggtggatgtgctcctgactggctcgccttggctccaatggtctggagcaggccggtgtctagaaaggcagcagcatggaccctggcgc

SEQ ID NO: 33406 - DNA, 1121 bp, Artificial sequence
  DNA replication origin
tgctgagactggagcttcagggccttcaccttcatctgtgggcctctcgttagttcgtgagtgcaggctcattgggaggcttctgtctgtgtccccccacccccgccccaggctgtaattcagaggccgtgtggcataggcttctagtttactgtgcatcatttcagatgtagacttctacattctttttcctgattataaaatactcgcaaaagctgtaggaaagcgagcctgtgtcccacttggcagcagtgcaggtgagcgtggtgccgtcaccactggcctgtcccaggaactcatcgcccgccacgcatgaggtcagcgtgcggctctgtggcacggtcctctccccatggcaaggattgggatcatctttcatgtctgcagacagcatgggcgaggctgactcgccattgctgtgagctttgtatgccgtcacgtgcacaaggacgtttgcgtcagctgcttctgtggtttgaattaagacctcagcttggcttggatgggggcatttctaaggcgagcgctgtcttgatcctgaatgttttctcattgaatcgcaggaagctcttcgtgggcggtcttgactggagcacgacccaaggtaggtggggaaggggtgtcaggtgggtactgcagatgggctctaggacctcggccttcaagttgtgtctgcccgcctcttgctactgtcttggatattttaaagtccttttgacgttgttctgatttctgggcaggggacagagtaagtgtgtatttgctctgagactgttaatttggtatttccatcccaagttacagggaagacctcaggctgcaggttcctagctccgggctgaggtggcttgtggaggcagacagctgttgtctggaagtgcagagggctgggggctggccaggctgttactgagttcagaataggaggaaagagtgtgtagcaaagtcggcgctccttggccactgccagcattcagagttgtcttgtttgccttgccttaaacgttgccttcctggacgcctacaaagtcaggttgtaaccgctggccactgctgtgctcactggcagcccctgatttacgtgaggacctcaagtgtgtgttgggcagaattccccagcg

SEQ ID NO: 33407 - DNA, 1001 bp, Artificial sequence
  DNA replication origin
ccggggcctcggcgctcactgggtggccagagccaggagtctctggtccagctcccgggctgcccttagggctggggctgctctcctcctgcccccacccaccaaccatccttttttttttttttccctatccaaggctatcacattttaagttgttccaactgctttgaataaaagactataaacctttgagggtgagtgctcgccgccgtgacggtcgggatggtttcatgagtgtgcgcgtggggtgagtgctcgccgccgtgacgttcggggtggtttcatgagtgtgcgcgtggggtgagtgctcgccgccgtgacgttcggggtggtttcatgagtgtgcgcgtggggtgagtgctcgccgccgtgacgttcggggtggtttcatgagtgtgcgcgtggggtgagtgctcgccgccgtgacgttcggggtggtttcatgagtgtgcgcgtggggtgagtgctcgccgccgtgacgttcgggatggtttcatgagtgtgcgcgtggggtgagtgctcgctgccgtgactgtagggatggtttcatgagtgtgcgcgtggggtgagtgctcgccgccgtgactgtagggatggtttcatgagtgtgcgcgtggggtgagtgctcgccgccgtgactgtagggatggtttcatgagtgtgcgcgtggggtgagtgctcgctgccgttgacgatcgggatggtttcatgagtgtgtgcgtggggtgagtgctcgctgccgtgacggtcgggatggtttcacgagtgtgtgcgtggggtgagtgctcgctgccgtgacggttgggatggtttcatgagtgtgtgcgtggggtgagtgctcgctgccgtgacggtcgggatggtttcatgagtgtttgtatgggtcagaatcatcaagtggtgcagtttactacgtgcccattatatcttaagaaaagctagagagacattaataaccagatggaatatgaaccttggattccagtctgaaaaaaaccagc

SEQ ID NO: 33408 - DNA, 1501 bp, Artificial sequence
  DNA replication origin
agcactcaccccacgcgcacactcatgaaaccaccccgaacgtcacggcggcgagcactcaccccacgcgcacactcatgaaaccaccccgaacgtcacggcggcgagcactcaccccacgcgcacactcatgaaaccaccccgaacgtcacggcggcgagcactcaccccacgcgcacactcatgaaaccaccccgaacgtcacggcggcgagcactcaccccacgcgcacactcatgaaaccatcccgaccgtcacggcggcgagcactcaccctcaaaggtttatagtcttttattcaaagcagttggaacaacttaaaatgtgatagccttggatagggaaaaaaaaaaaaaaggatggttggtgggtgggggcaggaggagagcagccccagccctaagggcagcccgggagctggaccagagactcctggctctggccacccagtgagcgccgaggccccgggaagtggtgcccaggagcaggcgcccttgccagtgggaggccggcagaaggggctgtgtggtttgggccagtgtttcacacagctcttgagctgctggaggtttccgtagccatcattgtcacctgctggagatgtacagcctgaaatccagcttcctctctgctcatttcgtcgtcgctgctgcctttcccctgccgtcctaaagtccctgccttcacactggagcacttttccacgtggcagtggttgtaattcggaatagctgaggcaaggcacgcactgtgtcgtgggtccgtttagctgaaatgtagctctgcagaaatgctcaatccctgtctccttgggtctctctagaaaagtgagaaagtgtctcagcagagcccagtgtctttggacttagcgggcttgtggagtgttctgctctggctttcagctgactctttaaaccagcgcggattggcctttatgtcctccgcagctcgcgggagggtttggagggttcccgtgtgaactaactatccttcccttcttcaacagcagaaaggacccaggagcgataacagtaaatcaaataagatatttgtcggtggaattcctcacaattgtggtgagacagagctcagggaatacttcaagaagttcggagtggtgagtttctccccaccccggcagcactgtggggacagagccgcttctgctcaggcctgggccttcttggggctggagtggccgagccacaggtgcacgggcctttcaggctgggagctcgctgtctcgtatttccccaacgcctgcgccctccggaaaggtggaaagcccggcctttgccttcatggccatttcgtgtcccagtagggtggttgggcggtgaaccagcctgacagccttcagggcggccgcccgattccattgtgaacaccgtggggtccagtgtcagagaagggcagttacacagaaacggggttcagtgtggcctgggcgagccagccccacagagctgactttccactgggcaggtgggagaatgcccga

SEQ ID NO: 33409 - DNA, 1751 bp, Artificial sequence
  DNA replication origin
aatgcggctgtcaagaggcgacatcaccactgaggaagcgggacagaaacacctgaaacttcgtttacaccccactggagcaaagccgctccctcctctgactgcgggactggcctgtacctgtgtgatataatttagcacctggagaagagaaatctaaagagatatcgttaatcacacacaattcacagagagaaaaggaaaaacagcttacttaacatcactgtactttactatgaaacacttaagtacgtcactaagcatgtatgtctaaattaagttacgactaagacttaacagcgtaaccgacatggaggaggagcactcctaaccgtggggagggaggttcaaatggcaaactatgctccagcatggtgggcatgctgcggcgccacctggcgctcggggctgccccgactgacctgggccggtggtgcgggggcggcacggacgtggcgggcagacccaggctgcaggtctgctcacgtggccggccaaaagcagctgatgaaccaaaaccatgcgggcgggcgggacagacagcagcagccacggaaaaggggcacagaaactgggcgcccatcgtcccagctccacaaaccagcatggatgggtgtgcaagaagctgagggaaaatgaggggaggccctgaggtgactcctcacccctcctcccacctgccctgctgacttcagagaggggagaaaactgaaaaaaaagaaaaagaaaagaaaaggaaaaaagaaagaaagaaaaaaaaagcatgggatggatcacggaaaatccaaactccacaccgagccagctgacccagctgacgacacgaaatgagaccggccacactgggaggactggatgagggtgaaggaaggtcaaatgcagaaggaccacactcttccggacagtgaaaaacagaagccaggccgagactcatgacaagtcgtaaaaacttcaaaagaacaagccaaaaaacaatgtgtgacgtctgacctcgggaagcacagacaggctgaatggggtgcacatgaggagcccacgttttagtcatttgtctccaaatcgtcccttcctgaggctgtttgctacagccgccacctgtgtgtgcctggcgggtgagatagtttgccatctgagggaggagcagggagaaggccgaggtcaaactagatctgcccttacctcggggcctctgcttctcggcgtcatagatcatgactacctccgtgacctggaaggagagggtggcgtcagcacggacaccagggccagcaccacaggtggtcttccgagggcacagcctgttcccacgaacccaaactctcgcacagggtgcgccctccctgagcgggggaggtgcacgggcaacagctgctccgtggggctgctgtctgagaaaggctggagccccaacactcccagggccagacgcaggcagggagaagcagctccagggcaggcgtctggatacccgcctccgggctgcccgtggccccgctcacgtgtgtgctgacggacatgaagggccaacaacgccgaccacgcatcctagcaggggacgtgggagccaggagaccccacagaagcccttcccacccaaacgcgggaagcaaagggcacgctcggccctcactcgaagtggcggggcagccacacacagctcctctgcagaccctgctcttccaggccccgctcaggcctctcattcctggcccaggcccgtggcaccctcaggtaccacctgatgaacgtgc

SEQ ID NO: 33410 - DNA, 1474 bp, Artificial sequence
  DNA replication origin
tggacatgggaagagctgagaccgggctgaagatgggctgcccgcgccagaggcacagggtgcgtgacaaggcaccacacagcaggggacagcgcagcacgggcgtgaggcgtgaacgagcgcggcagagaagggccgtggggggtgggaacaggcaacggcccccggaaggagcagcctactgtggggcctctcaagctgaagagacaggggccagggctgctgtagctgggaccaggcagaaacaggacaagcaaaactgggggcggggaaagatggaaacggggcagaaagggcagctcagactgtgaggggacaaaggtcactgtggttcaggagcctcccaccgtcctgagcacacgtgtgcacctgagcgtgactgtgcacgcagtgtctgcaaccagacggagggggaggggggagggggagggggaggaggagggggagggggaagaggaggaggaagaggaggagggaccaggaaggcaaggcacacagcgagaggagcgcaggatggagaagacctgaggggactgagaggcgaacgaggcagcggctggagcgggcgggccgagggtagacgtgggagggccaagcagggacccgcacagacactgtgtgcccgagacacaggcggggtccctgacagggacatggccatgaccttcagtcagtggagaggaagagggaggaggtggcggggagggggacacagacccgtctcagaagatgcagaaaggccaagggaaggggacacactctctgggaggacccgctaagcagcgccgcagcgtctctccggccctccactcgcctgacacccaagggacactttcaaagcccaacagctaaggacatgtggccacgtgctggccccgaagtgctctgtacaccagtgtggactcagcgacactcgccacgtcccgtccacacgggacaggacaggacgcgaggagaaggggcgccagctctgggcagccggagggggaccgggaggatctagaagcaaccctcagattcccgcgcgctcaagtttcccaagatcagaggcagtattggaacacagcatcggtgatgaaacaacgtatttagaagtagacattttcgcaaactgcaggagtgtctgaaaccacagggctcgcctggtccgggcacagtgcaagaggcgctgggtcctgggggaggcgccctgagcgctgtctaggaatgcggctgtcaagaggcgacatcaccactgaggaagcgggacagaaacacctgaaacttcgtttacaccccactggagcaaagccgctccctcctctgactgcgggactggcctgtacctgtgtgatataatttagcacctggagaagagaaatctaaagagatatcgttaatcacacacaattcacagagagaaaaggaaaaacagcttacttaacatcactgtactttactatgaaacacttaagtacgtcactaagcatgtatg

SEQ ID NO: 33411 - DNA, 880 bp, Artificial sequence
  DNA replication origin
gttaacagatacagtatctatcatagctggtgcctcgctaggcttacgcaacaccgttgggtaagcccaaggagtcctagaagaggtcatatcgtagacatctatgcatgttctatacaggtagagaaacaatgcacaaagatacaggccacaacgggttccagcaggtcagactctgctgccagcagcaagagcgagatgcaccatgggatcaaaacagaaaattttaaaggcaaaaaaaatttagcatttcccaaacacaagagtggcagtataaacgaagtttagtgggtctggggtgggcgcggcccccggctaacggggcgggtctcctcctctaggcgcaggagtgcgccgggctctccaggcctccccggctaggtggagcgtgacaccgcaaagcacaccgtcctcccgaggcggggcccaggcggcaccagcccctccccagatggaagtgcccggcagacagctgcccaagacctcacagaacaaagatggacatgggaagagctgagaccgggctgaagatgggctgcccgcgccagaggcacagggtgcgtgacaaggcaccacacagcaggggacagcgcagcacgggcgtgaggcgtgaacgagcgcggcagagaagggccgtggggggtgggaacaggcaacggcccccggaaggagcagcctactgtggggcctctcaagctgaagagacaggggccagggctgctgtagctgggaccaggcagaaacaggacaagcaaaactgggggcggggaaagatggaaacggggcagaaagggcagctcagactgtgaggggacaaaggtcactgtggttcaggagcctcccaccgtcctgagcacacgtgtgcacctgagcgtgactg

SEQ ID NO: 33412 - DNA, 1341 bp, Artificial sequence
  DNA replication origin
tccagcctgggctacagagtgaaactccatctcaaaaaaaaaaaaaaaacaattagagcttgtacacccttaaacaaatgcccccctaatcctgaagtatgaggctaagacacgaagtccaggctctgtctcctgaggagcctgtgagaactggttgggcccagacattcctgctatgagctctccaacccgcaggagcccgggctgccctttagcctaaccagcgaggccacaggcgatggagcccatctgcaggtgaagggcctggtggcaggtgacctgctgaccagccggcaccccacctgtggctgaggccagacgtgtaacacaagactccccatcaccccgcccaccacctggcatctccggagcaggcgggaggccctcccacaaggccccctagacttactgaactgtggcggggcaccgtagccctgagggaagccctggggagggggaaagcctccaggaggggtggacacgatgtaggaggtgaacggtgggggtggcgggggggctcctcttcctgcagggggcggtccatagccacctgaaacacacagtacgggggtgatggacagagagcgctggacaacacagactggccacagttagacccaggcctgccaggggccctagcaggcccctcaccctctcttcctctccagcactcaggacacgggaaccaggctttgccggctgccccaggacacctggcgagtcagcctgccatgtggcttctgtccccgcctttgctctataaacaaggacttaccaatcgcctgtcctgccggcacccacattcctagataagagaacagaagaggaggttggcgccgtgtccaccagctgtccgacgcagagaaggagccgcagagcatggacgtcaagggctgggaccaaccccggagcctcctgtgcttagagcctgttcgtcctgagggcagagccctctgaaccctgagcagagaagcactccccaccccttgtagaacaggccttaaagccactctcctctgtgccctgccaggtggcgggcactgtgtctgctgactggggcacgggtgacctcccggctccacctgaggaccccagagaaacctgagacttctaagcctcgagagggcagggacagtccccacagcacctccgagtttccaacaagggaggctccagagaaaaaggttttagacgaggtgcagggaagccacagtctcgggacccggacgacgtacatctggaaccctgacccacaactcgggtcgggctgcagccaagcccaggggttccgtggctgctggaagctccaaggacggcccacaacgtgggcctaactacaga

SEQ ID NO: 33413 - DNA, 1561 bp, Artificial sequence
  DNA replication origin
gtttttttttgagatggagtctcactctgtcgcccaggctagagtgcagtggcgccatctcggcttactgcaagctccacctcctgggttcacgccattctcctacctcagtctcctgagtagctgggactacaggcgcccaccaccacgcctggctaatttttttgtatttttagtagagacagggtttcaccgtgttaggcaggatggtctcgatctcctgacctcgtgattcgcccgcctcggcctcccaaagcgctgggattagaagcgtgagccaccgcgcccggactattttatttatttttttgagatggagtttcacttttgttgcccaggattgagtgcagtgccccgatcttggctcactacaacctctgcctcctgggttcaagcgactctcctgcctcagtgtcctgagtagctgggattacaggcgtctgccaccacgcccggctaattttgtatttttagtagagaacaggtttcactatgttggtcaggctggtcttgaactcctgacctcagcgcatccagaattttagacggggcccccagggtgaggtcttggcaccctccagtagagaagaagggacatgggccatacgtggggtgtcctttctgggagccttgcgtcccttacctgcctagccagggattgcacctcacagcacgcagccagcaggaacggcaccgtgatctgatttcacctgcgggccctgggccctgggggtgtttgacaattggggcatatcacagtgtgagctagtcccgtctcgggggtttggaggctccacgtggccgtggtacaggagcaggcagttccatcctctggcctggatcaggctctgcacacggaggcctgtgggccagatgactgacaggaggggagttgggtggaacctcggcctgcctgatatccagcaacagagggcaagggcggcagcacctccagcatgacagtcccttccaagcacgtcaggatgctcccttgcctgtgctggcagcttcctaaacatggggactgggcatggtggcaggtttttgtccttctgaaagagcaattttgctgtgaggttacttgctccttgagttcttgtctgaggcccacctggcggctgctccgtgaggaacgaggtggccctgctgcagctcagcatcccgccacgctcccaggagtgtgtgtttcctggggggagcggcccgggaccgtggctctgtggtccattctgtggatgtccacaaggcctgggcgttctgtgggtttgggtggcagtcccgtctgggcagctcctgctgggctgggtgtgggtctcctgctggtctgcccccagctgcacaacgtgtcttgtgccttgccctcttgtacctctgcaggttttggctacgggcctccacctccaccgccagatcagtttgcccctccgggggttcctcctccaccagccactcccggggcagcacctctggctttcccaccgcctccgtctcaggctgccccggacatgagcaagcccccgacagctcagccagacttcccctatggtcagtatggtaagtg

SEQ ID NO: 33414 - DNA, 1127 bp, Artificial sequence
  DNA replication origin
ggagcggcccgggaccgtggctctgtggtccattctgtggatgtccacaaggcctgggcgttctgtgggtttgggtggcagtcccgtctgggcagctcctgctgggctgggtgtgggtctcctgctggtctgcccccagctgcacaacgtgtcttgtgccttgccctcttgtacctctgcaggttttggctacgggcctccacctccaccgccagatcagtttgcccctccgggggttcctcctccaccagccactcccggggcagcacctctggctttcccaccgcctccgtctcaggctgccccggacatgagcaagcccccgacagctcagccagacttcccctatggtcagtatggtaagtggtctcctgccatgccgcgtccccgctggccccaggaccctgggcacggcctgccttcttctgcttcctcccctgctggacgctccccagcctttacctggtgggaaaggggagagggaggagaggggggtgtgggggttgttggagagatctcgtggcaactcgggtccagcagaagggagcgtgggagtcttgtcgcagcagagcactcgtcatacagcaggtgctgcagggcctgcatgtgtgggaacctgagtggcgactgggtcgagggaagtgagtcgcaggcagctgtgatcactgtctagaggttcaggccctcggtgtgggtcccgggtgcactggccccttggtgggttccagtttctggcgtcatcagcctcctgctgggtccagaccccgcttggggcagaagctgggtctgtagtaggcgtggcctggacgtgggcttcaccctggactggatggctgtcgtggcttgggtctgcctggacgtgatctgcaggcagcgcatgtgcttccggggcaggagcttgtgggggggcggggtcagcatgggtcaaggtctgcatgtcagtagttctcgccctgcactgagccaggagtcacagcagccttgctcaggaccaacgcggtggcctcagtgggcagggctccaactacggtcagctcctccagcaccaggggtcattcacaagcagggtttgagaacatggggcacctgtctgcaggtggccacgggcttccggggtgcctgtgaac

SEQ ID NO: 33415 - DNA, 1518 bp, Artificial sequence
  DNA replication origin
acctctgaccgtctcgcgggggccgcagttcgtccccgcggctacggcggcttgctcccgaccctgcaggcggctggatgttggggcgaggggcggacttggtgggtgtcgggacgacgcggggctgggaaggcctgtccgggccttcatgtccgggtcctcgtaacccggagccgcgagtgatccccggggacgggtcgaagcggtgtgtccctgtcgggcttctgtccccggcggcgccgcgcgtcttccgcggtgtcctcgggcccggtggccccgggagatgggtgtcgggatcccgctgacgcccgatccgcgcccgcacaggcagaagtagagcagaagaagaagcggaccttccgcaagttcacctaccgcggcgtggacctcgaccagctgctggacatgtcctagtaagggcggccgcgggggtcgcgggcaggggctgggccagcggtggggcttgtccgggtgagggcggcggggcgggggtccaagcgcctctgcggcggtgggcgggcacggtctccgcgcgggtttggaactgagtgtggtcttgcgcccagaaaactgtccagagacgttgaggtttttgcttatttgcaacctgccccccgttgttcacttttccgcggcttagttggaaggtgtagcccctgtctgtagcccacgtgacttagaataaggggctgcgttagactccttagattttaagggcggtggaggtcgctgggtcctttccaggcagggtggtggtgggcatctggcttgcgcttttattttttaatttttgattattttgaggcggagtctcatcctgtcgcccaggctggagtgcaatggctccgtcccagctcactgcagcctcccactcccgggttcaagcgattctcttgcctcagcctctcgagtagctgggattagagggcccccccaccacgtccggctaatttttgtatttttagtagagacgagtttcagtgttgcccaggctggtctcaaactcctgacctcaggtgatccacctgcctcggcctcccaaagtgctgggattacaggcgtgaacaccgcgcccgaccttgatttttgattatttgtggaaacagcgtttctctgtgtcgtccaggttggtcttgaactcctgggctcaagcgaccctcccgcctcaacctcccgaagtgctgggatcacaggcgggagccactgcgccctacctgccttcccctgcgtttttagaggcctttggcccgagctgtacgctgcagcaccttgtctgaggctgtggtctccgggccgcttgttctctctgaatctctgcagtcacacggtggctcttgcatgtgaggggtgagtcgcgcatatctggcgggggtgccagagggacttggcgtgttcattgtagtcactacaatggacagtgacaggtccactgcggctctgtccctggagagaaccaagccttagttctctgtccgccggagtgcgtagggtctccccaggccgggccgctcacaaaac

SEQ ID NO: 33416 - DNA, 1441 bp, Artificial sequence
  DNA replication origin
gagcccatgagatttaggctgcagtgagccatgatcacaccactgcactccggctgggcaacaaatttaaaaaaaaaagtggagaaacattatagaagagggcccacaggaggctgttgtgggccatttgagggtgaaggtggggctcctcacatctcccctgcccccatctgcctggctgagctctcaccctcctgtccactgcccaaggggaggcccaccccacatccctgggccactctgctgggtgcttagtgagcaaagttaccaccttctgggctgaggtgactccagcattgaacggggttagttctcaccatgttctccaacccacgtacggccatcagagagcccatggagggctggacggtgccccccacccacaggcacagccactttgtcctgttctttcaagcattctgtgcaaaggagacagagctggccaggccacggatggtgcagcctaaccacgggacacggctctgtcccggacacaaagccccaggctgggcggatggggctggctgcagccatggagcctgctgggagaggagatgccagcagcgtggtgtcaggaggagagtcaggagcttctaagaagccaagcaggggtgaggatagaagggaggggctcaggtggcccaaaggttcctgctgctgcttcacttcctgcgggaaccctccacaggagatgagggaagccagaaaggagagcccaggccaggtgagggcttgaggggctgcacttagcccaggagtggccccctctacgtgaggtacccagaagacagagtgaggccaggcagctgccccgaggtcaagaacgctgagggggccaaaagggacggagctacacacctgggcttgggcacccagctccacagctgtccctgcagacaggagcaggggcagccgagttggggcagggcccgcacagctgtcagtcttcgacaccaagagaccatccacacaacactaccacacacccccgaacgtccaacctgaacctcctcacaccacgaacctgaagcaggcccaggcccctcccagagctcgggacgccaggaagaacaagctgcgcaaaggactggagtcatgtgcgcctttattagctgagccattacttgagagggatgaagcgggaggagtgggtggccccgatgccgggccggccatgctttacgggcttgtaggtgatggagaactcgcccaggtagtggccgatcatctcgggctgcgggagaccaagagcaaagctgggtgtcagctgatcccgcctgcatcaggcgaccccagcccaccccagccggcagggacggccgcacacaccttgatctccacctggttgaaggtcttgccgttgtagacgcccaccatgctgcccaccatctcgggtaggatgatcatgtcccgcaggtgcgtcttcaccacttccggcttc

SEQ ID NO: 33417 - DNA, 1978 bp, Artificial sequence
  DNA replication origin
agctcggaaccacccccgaatcagcccggcttggcgcgctgaggttcattagtcattcagcaaacatcacctgcgcgcacaaggcttgctgggcgccgagctgggcgcgcggggggccgccgtaagggggcgacaccgaacgcggacattcatgcaacaagcatttataaagcacctactgtgtgctgggtccccctgcactgaacaaaacaaaatccaggcccttgggaagctgacgtgaacgaggggactgcagcgggctgggagagacgccagcgcggcgggcagggcatggggagctgctggggaggccgaacagccctggggagtgttgggggagagtgcagcccgcgagggcagtgagggctgggaggccccggggggcaggtcgcgcaggcccagcgggaggtgggagccaccgcgggctgtggacagagcagggccgcgcccggctccaggctcgcgggcgcccgctggcggctgcggggagaacaggccgtgggcggtgccgggagaggagggcggaggcggctgcgcgggtcgagggccggatgatcgggcggaagatgcggcccgggcaggatgggggctaagaggggtgttatgaattgtgcaaagtccctggaaaccaaagaacgagcggccggagaaaggggcgccgctttagcagggcggcggggacaggccgcctccagcaggtgcctcagctgaaccctggagcggggacggagccgtgcggctgccggggaggcttcggggccacccaggactcctccttcagaagtcaggggagggcgccgagttcagtgtaaactgccgtccaggggggaggccgcggggatgtgagaagcgccgggaaccaggacagggcctgaaggcagctgacccgcaagcgccggggccagacctgaacctgatgaggacggagctgtctgtctgagacggcacagatggggccgggcaggtctgggagagtccatgcagattctggagcggggtgtgggaccagagggtagaaacagaagcgtggggccgggcacggtggctcccgcctgtaatcccagcattttgggaggccgaagcgggtggatcacttgaggtcaggagttcgagaccagcctggccaacatggcaaaaccccgtctatactaaaaatacaaaaaattaaccggcgtcttggcgcatgcctgtagtctcagctagtcgggaggctgagcagaatcgcttgaacccaggaggcggaggttgcaatgagctgagattctgccagtgcactccagcctgggcggcagagctagactccgtctcagaaaaaaaaaaaaaaaaaaaaaaaagaagtgcggatatggccagagaggcctaaagacagagcctgggccttgagttgggagtggccctcgacagtggcaccctagtgctagttagaggctcccaccccacctcctggacaccccccaaattcttgtggacctagggcaccacctggccaccaagacatgtgtctctctgaactgggggtatctttttgctttaaatactaatacatattttccctgatcacacatgctggattccaactgcagaaaaccaagggaagtacccattagcagccacgtgctagccagcaggggcgtgtgcagggagggcttttatggacaggaaacttcccgtaaaggtccagacagtaaattttcagcgtctgcctggcagaagtaatacaggtatgaatgggcacagctgggtgccagtaaagctctgcaaaagcgaagtgaggcccagcacccattcctattatgctttcctcagggagggccccctggggcttgttcccagctagctgcctcatgatgggcgcggccccacacatctctgtgtcatttgctctgcagatagacctggtagctcaaaagctctgtcatttccatttatttatttttttctttttttgagacggagtctcgctctgtcccccaggctg

SEQ ID NO: 33418 - DNA, 1190 bp, Artificial sequence
  DNA replication origin
gtccgagggtctcctgcagaggccgagggctgggctgggcgagccctgcgcttgcgcagacccggggctgggggtcgcagcggcgcacgagaggggcttccatccccgccagccttccgaggcggtttcccggcaacggtctctacggcgacggcactagacccccgactctgcagcctccgcgcgctcgccccatgcgccccccgccgccgcgcccgctgttcccgcggtgtggaccccgccccgttcctgcgcggcccggagccctccccaacggctcgacccacgcgccctacctggtccccgaagaaggccgagtgcagcaggctcaggagccccaggagccccatggagccgcggccgccccggacccgccgcgccccgcccctcggcggccagggtgggggtgcgggacgcgaacggggccgccctgcgcctgcgcggagaggggcgggaggggtcagtccgcgggcccggggcggggctcctcccgaaaggggcgagggcgtaccgtggggtctgggggtgctcgcgggggctggggagtctcgcgggaccgaggctgcggaggggcggtgggagatccaaggatgggagagaggggaggggactcgcgtgggccgagcggcgccagggtccgggtccgaccacgctggggagttcgaatgcggaggaggctgggggggcccgaggcggcggggaggaggccgggtgggggtgggggcacgagaggtcccacggggaatgggggtcgcggggggccagaggcggcgtcgccatgcggctgtggtccgctgcccgcggacggtcaccctgcggaagctcggaaccacccccgaatcagcccggcttggcgcgctgaggttcattagtcattcagcaaacatcacctgcgcgcacaaggcttgctgggcgccgagctgggcgcgcggggggccgccgtaagggggcgacaccgaacgcggacattcatgcaacaagcatttataaagcacctactgtgtgctgggtccccctgcactgaacaaaacaaaatccaggcccttgggaagctgacgtgaacgaggggactgcagcgggctgggagagacgccagcgcggcgggcagggcatggggagctgctggggaggccgaacagccctggggagtgttgggggagagtgcagcccgcgagggcagtgagggctgg

SEQ ID NO: 33419 - DNA, 897 bp, Artificial sequence
  DNA replication origin
acccccaccctggccgccgaggggcggggcgcggcgggtccggggcggccgcggctccatggggctcctggggctcctgagcctgctgcactcggccttcttcggggaccaggtagggcgcgtgggtcgagccgttggggagggctccgggccgcgcaggaacggggcggggtccacaccgcgggaacagcgggcgcggcggcggggggcgcatggggcgagcgcgcggaggctgcagagtcgggggtctagtgccgtcgccgtagagaccgttgccgggaaaccgcctcggaaggctggcggggatggaagcccctctcgtgcgccgctgcgacccccagccccgggtctgcgcaagcgcagggctcgcccagcccagccctcggcctctgcaggagaccctcggacccctcctcactgcgccgacgcggaggctgcgccagctggggcggcgggggcggctgcgggggcatcctgcggaggctcggccctgcgcagggtgggggcctgggccacgccctgcgcttctttgggcctcagtttccccttctgggcgcgagcgtatggcctgctttgacgttcgccgccgctgctgttcgtatccgtccgctcccgaccccagcgcttctccagcctccggaatcgtctgaatttcgcggctgtgacatccctcattggaggggaaactgaggctggggggtgcagcggggagcccaaggtcacgcttcgaggccggagcctcgttgcggagctaaggcgcccgcaagagaacgcggggcgggggccggggagctgtccgcggtgctgacggaggcgcacgtctgccgactcgccgccggggaaactgaggcccatagcggcggtcaggcttcagggcgcggcctggaccggcctacc

SEQ ID NO: 33420 - DNA, 1087 bp, Artificial sequence
  DNA replication origin
ggccctgcgcagggtgggggcctgggccacgccctgcgcttctttgggcctcagtttccccttctgggcgcgagcgtatggcctgctttgacgttcgccgccgctgctgttcgtatccgtccgctcccgaccccagcgcttctccagcctccggaatcgtctgaatttcgcggctgtgacatccctcattggaggggaaactgaggctggggggtgcagcggggagcccaaggtcacgcttcgaggccggagcctcgttgcggagctaaggcgcccgcaagagaacgcggggcgggggccggggagctgtccgcggtgctgacggaggcgcacgtctgccgactcgccgccggggaaactgaggcccatagcggcggtcaggcttcagggcgcggcctggaccggcctaccccaccctcccccacctccggtggcctcctcaccggtcagggctctgcccggccacccagccggcggcgggccgtctctatcctcccgcgatgacctggtgccttctctgtccccacccagctcccgatgggggccgcccctgtttctgcctctagcccctggcacagaggaggcatcaagggggcggggacagctcgaggtcagactcagaaggctcaaagacactccaagagtgagccgtgtgccaggctgcggacttgcggggaggtgtcacaggacaggggtgggggagtgagcatttcatggaacttcccctttagcccagcagcagtagggggcgtggaggaccccagggaggagcctaggtcggggtcttgggctaggccctgcgttctgcagtgggagaagggggagacctctctcagtctcctgaagtcctagggggctgtggggggttcttgaggctctgaaatgtctggtgatgtctgagtgtggctgtggttcaaggatttacagggtcgaggattttagtgtgtggggggggattgttcagggacataatgttttgtagatttggggccaagggcatcttgtcttggggtctcagcccccatgtaccctcagccctccaggccctggccacccccagagggataagaagggaggttcagtgtca

SEQ ID NO: 33421 - DNA, 1127 bp, Artificial sequence
  DNA replication origin
aagacccgagggccttgtcccgggccagcactgccaggggctgagagcccttcggcctggctgtctgggagcccccagagctggacgcagctgtccccactggttgggtctggggaggcaatgcagtgggcagacacaggggatcttttcttttttctttttcttttttttcttttttttttttttgagacggagtcttgctctgtagcccaggctggagtgcagtggcacgttctcggctcactgcaagctccgcctcccaggttcacgccattctcctgcctcagcctcccgagtagctgggactacaggcgcccgccaccacgcccaggctaattttttgtattttttagtagagacgggatttcacgttagccaggatggtctcgatctcctgacctcgtgatccacccgcctcggcctcccaaagtgctgggattacaggcgtgaaccaccacgcccggcctttttttttttttttttttagatggggtcttgctctgtcccccaggctgcagtgcagtggcgccatctcggctcaccgcaacctccgcctcctgggttcaagtgattctcctgcctcagactcctcagtaactgggattacaggcatgtaccaccttgccagctaatttttgtatttttaatagagagggggtttcaccgtgttggtcgggctggtctcaaactcctgacctcatgatccgcccgcctcgaaggggatttttttctggaggctggaaggctgccctgagaagtgaacagcagtgatcaggaggagaggcgttccaggctgagggaagatcaatgcatgcttgggacacagggggtgtctggtggagccatggggtagggcgcgtggtggggtttgacaggtcaagccggggcagagctgggcgaggctgaaatggggttggggatgcagagcccagggccctggcttcagctcagccttgttgtccctgtgtccccctgggcatgtctctctctggcctcggtttccagtcttgtttactgaagggtgggttggatgatccctgcctcccccaaagaggaactaagtcccacctccctgtgtagtttcagatgtctcagctccccaggcccccatcaggcaggggtttggg

SEQ ID NO: 33422 - DNA, 1415 bp, Artificial sequence
  DNA replication origin
tctgtgctgacgggcaatgctgagagccagggatggaaacctcgacgcgaggcggaggtcgcgcccctgccctcctccccgaggacacacacccgcttacgtgcagctgggctggcggggcgcctgggtctggggcctcctccctctgcgcggctccgcgggccccaccggaaatcccggcccggggtggcctcggagcgcgcgggctccggggtctccgcggcgcgggcaggggctccggggcggacaaagcccggtccgggcctgggcaggcggcgctgccgctcctagcgctgggcgagaccaccgcgagcgggggaggatgcgggatgagggatgcgggtgagacagccaatgagggcgcgggaagacgggctggtgccatggcaacagccaatggcggcccggggcggggaccggcgtcggccgcggggcgtcgggcctccgcgcgggctcaggggccgtgagtgcggggggcgaaacccccccgagggaagggggtgccccgaggaccaagattcctgtgtcccgcactttattgcagggtgcaacggcctcttaaaacctcctgcgtctggatttgcagaattggagagtaaaacatcaaatcctggatgttacatcagcatcttggcgggggaggggtttccagggcagtggccgggctggggccaggcctgcacccaccccacaggtccagcctggcctggtgcaggtgcgtcagggtgggacagggttcgggtccaggctggagctccctgagggtcctgcctggtggggaggggagaggggaggaggggcagggccactggggagcacctgggacgctgcatctccccacatttctccctgtctccccaacggagcgtcagatcctcctgtaactccgttgctcttcatgtccctctctctttctgtctccccctctgttctctgtctctcaatctctgtctccatgtgtctctgcccctggtgggtggcacacttaattcaccctcacggaccgaaggccagaggagggaagggccaggggtcccaggagtcgccatctccaggtgtcctggatgctccatgagtccctggaagccatttgaaggtttaacacacagagcccgtccctgcagctcggagcagcccttcctgctctggacacagactcacagcacagaaagggaggcgactggggccagaagagtgatttttttccgtgctgggcaggcagggcaaatcattcgccgctcaaccctcggtttcctcctctgtaaaatggagaggaggcggaagattctgcaagggctggtgcagggaatgataggagagggtgggaaggtccgagtattcaaggccccgtagacaaaggcaagggaggacccgtgctgtttcctgttgggccttgagctgaagacccgagggcc

SEQ ID NO: 33423 - DNA, 1661 bp, Artificial sequence
  DNA replication origin
ccagacgcaggaggttttaagaggccgttgcaccctgcaataaagtgcgggacacaggaatcttggtcctcggggcacccccttccctcgggggggtttcgccccccgcactcacggcccctgagcccgcgcggaggcccgacgccccgcggccgacgccggtccccgccccgggccgccattggctgttgccatggcaccagcccgtcttcccgcgccctcattggctgtctcacccgcatccctcatcccgcatcctcccccgctcgcggtggtctcgcccagcgctaggagcggcagcgccgcctgcccaggcccggaccgggctttgtccgccccggagcccctgcccgcgccgcggagaccccggagcccgcgcgctccgaggccaccccgggccgggatttccggtggggcccgcggagccgcgcagagggaggaggccccagacccaggcgccccgccagcccagctgcacgtaagcgggtgtgtgtcctcggggaggagggcaggggcgcgacctccgcctcgcgtcgaggtttccatccctggctctcagcattgcccgtcagcacagactctggaccctccatttccccagagtgggagctggaggggaaactgagtcccggtgagctgggcgtcagcgtttctgcagccggtcctgcgcacacacccactcacgggcttcaccatccggacctccctgaggtgatcggaggaagggatgggcaggccagtggtgtgtcttcgggggtgttgctgcacctctctgggtgtcagtttccctctctggaaagagggggtttggattaaaggaaggagaaaggcccctttgggcctggcttcccatacctgtgcctccctcccctgaaatgcagcccgctcaataagaccagcccccagtcatggtgccttcagggagtgatcgctcaggaaggcccccaggaggctacacgatgcaacctgggggtgaaagtaggcagaagagcttcgtggaagaagctgcactgtgtgggatggcaggacttagaaaaggtgctctaggcagggcaactgcacgtgcaaaggcctgagagaagagagcctccagcctctaagtgagtcgcggtgtacatggaggagtcggagcgtatcctgagggcactggggagccatggaaggtgtttgagcatgggagaaatgggatctcacttgtgacgtttaaagctccctctggctgtgcatgggggactgtgggaggccaggaagaggctgatcagaatgtcctcacagaggggtgtcaggagctgggggaggcatgatcccgctgggcagagcttggagggactagcttagtctgatgaggatgcagaaatgaccaccgaatgtggggagagggaaggtgtctgaggcttggcttcggtcagctgagaagaaccacgtgggggaggcctgggtttggggagcaggaggcagacatgtgttgctttgcacgtcatctggtccttccacctggctgggcatgggatggtgacctcagctggaacatggggctcgagccagaccccagggtctccctgcgtgtagcccccaaccccaagcctgatccccactggagacctgaacagccttggacatcatcggatcagggtgggaggtgccagcctctgccacctgac

SEQ ID NO: 33424 - DNA, 1052 bp, Artificial sequence
  DNA replication origin
tgaggatgcagaaatgaccaccgaatgtggggagagggaaggtgtctgaggcttggcttcggtcagctgagaagaaccacgtgggggaggcctgggtttggggagcaggaggcagacatgtgttgctttgcacgtcatctggtccttccacctggctgggcatgggatggtgacctcagctggaacatggggctcgagccagaccccagggtctccctgcgtgtagcccccaaccccaagcctgatccccactggagacctgaacagccttggacatcatcggatcagggtgggaggtgccagcctctgccacctgacttccagtccctgtgcccctcccaccctgcccttgggcactcctgccctgcaggttcctcagaggggcaacccaaagccagagaggggcgggtcttgtcgggcctccagcctggacttcccagcccctctggggcagcatctgggtgccagacctcggttcctagggcctcgtttctccctctgggaacagccaaatggtggtccctgagactcaggacagaccaagaaggagccggatgacatggcaagccacacactgcgtcccctgagcaggacgggacagcccgactccatcctcccacctgcgactgagcccccacccctactcctgtcccagccgtgcccctggtgacatttgggtgggaggggaggggatgagggggcacctgggggtcagagaacaaatgacgggtgaatacatgtgtgtggccaggtggaggagggaggggaggagcaggtgggctggacagggccggtgtgaggaaggggctcaggctggcagggggaggtggcagagggatgggctgccattggtgcgtctgagacaaaggcggagggaggaggcgagcgctgatgggaaaggaacaaagagggaaggggggcgtgaaggggggctccggcgggagggccgagccgagggaggaggcgccggccagctggacagagggaggaggccaggccagagccagaagacggccagaggcacaaagaagccagcgcgctggcagagtcaa

SEQ ID NO: 33425 - DNA, 1396 bp, Artificial sequence
  DNA replication origin
cctgagcaggacgggacagcccgactccatcctcccacctgcgactgagcccccacccctactcctgtcccagccgtgcccctggtgacatttgggtgggaggggaggggatgagggggcacctgggggtcagagaacaaatgacgggtgaatacatgtgtgtggccaggtggaggagggaggggaggagcaggtgggctggacagggccggtgtgaggaaggggctcaggctggcagggggaggtggcagagggatgggctgccattggtgcgtctgagacaaaggcggagggaggaggcgagcgctgatgggaaaggaacaaagagggaaggggggcgtgaaggggggctccggcgggagggccgagccgagggaggaggcgccggccagctggacagagggaggaggccaggccagagccagaagacggccagaggcacaaagaagccagcgcgctggcagagtcaagggatggggcaggggctgccggggccagcagggaccagctgaaggctgcgcagggggtgcgggccacacaggtagccaccctgagctcagccaccgatggagggtcgtggggctgctgcggtgatggcggtgggcttgggtccatctgtcctgccgtttctgcacagcttaggtgtcacccactggccttcgtggtgttttcattgtccatcggcagggacagctggtggtctgtccgccccgcgtgtctggctgtcagcctctgggcaggcttgcttttatgggggagggtcctgtctgtctgtctgtcgccctctctggctgtgagcctgggggtgctgggctggccagtcggcttgctgggttaggctgtcccagctgtctgtgtgtttgtccggctgtcaggatgtgtcctgggggctgggaaggagaggccgacccatcgtctgtcggtcgactggtcagttggacgttcagctgtctgtacgtctgtctgctggcccctctgtctccccttggggccacctctcactccacctgcccctctgcgccccggattgcctggccaccaccacgtgggcctgtacttgtccacaccagtgactcctgcctgagaccccccccaacccaggatcaggcaggacggctggggcttaggtcaggggccgtctgtccggaaggcatcaccgcgccctccccagaccatcagctgaaccctctgaccctgtgatcccagacgctgcaggagctgaagatggcgagctccgtggcgccctacgagcagctggtgaggcaggtggaggccttgaaggctgagaacagccacctgaggcaggagctaagggacaactccagccacctgtccaagctggagacagagacgtcgggcatgaaggtgggggcctacatggaggaggtgggctagg

SEQ ID NO: 33426 - DNA, 1866 bp, Artificial sequence
  DNA replication origin
cggggagtgccacgggagagaccttgccatgttgcctgttaaccttggcatacagtaagcgctaacaagtgattacaaatatcaaaataaacacacacggcgccgccctctgagcccgcccccgctgacttgctccccaggtgtttcctgctgaatgagattgagaaggaggagaaggagaagctctggtactactctcagctgcagggcctgtccaagcgcctggacgagctgccgcacgtggagacggtgagccggccggggagccagggggcagcgcgcccgccccactcagggtgcgggaagcggcgtgggggaggaacggggcctggcccgggcgcccctcaccgtggcccgcccgcctgcctttgccagcagttctcgatgcagatggacctgatccggcagcagcttgagttcgaggcccagcacatccgctcgctgatggaggagcgcttcggcacctcggacgagatggtgcagcgggcacaggtgcggcggtgggcggggtggcgcggcggtaggcggggccctgcgccagtgggcaaatcagagtgcagatattatgggcggggtctggggtaatgggaggagtcttatgcctcctgggttggggggcgcgggttctggttcaggaggcggggccagaagctggaggtgttggtgggtggagtcaggaggctcagagcctgagcacaagggcggtggggtgcgacagtggaaggtggcatggcctgtgggcagggccagatcagcaggtgggtggggcctagaaggacgaggtctaggttctgggtggagcccaaatgggaagtgggaggagtcagagcctgggatggactaaaggcggggtttagacagtgggtggggtcatatcttaggaggcggggcttagggagctggcagggctggatcagggagaaggcagaggtagggtcagggcctggggcggggttatcaggaagaggcggggtcagagcccagggtggggtcatcccagggagaggcggggtcagagccgggggcggggtcagctccagcacttgccctcgtgtggtcctgagcagatccgcgcctcgcgcctggagcagattgacaaggagctgctggaggcgcaggaccgagtgcagcagacggagccccaggtaccgggtggggcagagccagggaccaggggtggtgtcggcccaggcagaacggggctcctcgagttctgcccgcccccgcccacatcatcacgggtgagcagactgggtgctctgggactgtacccccgaccctggtgctctccctgcaggccttgctggcggtgaagtcggtgccggtggacgaggaccccgagacagaggtccccacacaccctgaggatggcacccctcagccgggcaacagcaaggtgagggggagggtgaaacgggggctggcgcagctgtctgggctggaagggggatcaggtctgcatcctcgccagtggtggtgccctcccatgcctccatccagcaccccctcgggtgtaggaaggcccctctggcgtgcagctcatgcagaagctgcgggcctggcgaggtggatggggaaatacgtcccgtagcgggggctaagtggggcaccatagacgtccccgtggagtcccttggctctgcgcggccaccctaggaatgccaggtgaggggggccagcctccccgaagcacgtgtgcagcctcctagcgtcccctcatctgtcccccaggtgggcgtggggctgcccttggggacggggcaggggtcacagggctccgaccgggtttccaggtgtgcggggggcaggtgagggaccccaccctgaccctgccctccccccaggtggaggtggtcttctggctgt

SEQ ID NO: 33427 - DNA, 1896 bp, Artificial sequence
  DNA replication origin
ggggcaggggtcacagggctccgaccgggtttccaggtgtgcggggggcaggtgagggaccccaccctgaccctgccctccccccaggtggaggtggtcttctggctgttgtccatgttggcgacgcgcgaccaggaggatacagcgcgcacgctgctggccatgtccagctcgcccgagagctgcgtggccatgcgccgctcgggctgtctgcctctgctgctgcaaatcctccacggcaccgaggccgcggccgggggtcgcgccggggccccaggggcaccgggcgccaaggacgcacgcatgcgcgccaacgcggcgctgcacaacatcgtcttctcgcagccggaccagggcctggcgcgcaaggagatgcgcgtcctgcacgtgctggagcagatccgggcctactgcgagacctgctgggactggctgcaggcccgagacggcgggcccgagggaggtggcgccggcagcggtgagtgcctggcctggtgggccccctccgcgcaattaacgtgcagctagggcttcccgggggatgggcgactaggacctccagcctttgctgcctgccttctggcgttggaggctgcagtaccaggctccggccgaggcctgtgggggcatttgacgttgggaaaagacccgcccatgatcgtacctggcgcagagtaaacgctcgggaagtcgctgaatgcatggatggatcgtgggtaactctggaaagttgggtgcagactttgagattctttttttgcagttgatcgcaaagttaatatgggggccgggcgctgtgactcacacctgtgatcccagcactttggaaggcagaagcaggagaattgcttgagcccaggaatttggggctgcagtgagctgagatcatgctactgcactccagtctggacaacagagcgagaccctgtctcgtcagttttatttttaaaaagggcagaagcacagctgaaaggtgtggtgctccaggaactacctcgcctcccttcccaaggctgagtgagagaggccaccccatcatcccatcttagagaggctgggaaaggaagtcccaactttgcagccatttgcaaagctcccgggatccttcaggcctggggcgggcgggttgcgggaccttcgggagtcacctgggacatttcctgggaatgggggctctgatctggtccctgtgcccacagccccgatccccatcgagccgcagatctgccaggccacctgtgctgttatgaagctgtcctttgatgaggagtaccgccgtgccatgaacgagctaggtgagtgtcccaggtcctctgggaagccatcctccagcccccgaacaggtggtggctcctcggccgctaaagggacacaggctgggtcatctgagcttgggctggggattggagcccggagagggacagactccctggagtcacatagcacctctcatgagtggaccgtcaccctgggccctctgtccccatgagctgcgtgtggcctcccgatctggtctgaggcttcgggggtgactttcagccctaagttccctggggctcagaacagggaacggaccagaagggcaaagatagatagaagacaggcccagaattggaactgtagggggtgttttacgtttgaggacattgcaacatcttctctttgtcaatataaaaagtaattgaggccgggcgaggctgctcatacctgtaatcccagcagtttgggaggccaaggcaggaggatgactttagctcagaagttcgagaccaggctgggcaaaaatagtgagaccccatcactacaaaaaaaaaattagtcccagctactggggaggctgaggtgggaggatctcttgagcccaggaggttaaaggtgcaaggagctatgatcatg

SEQ ID NO: 33428 - DNA, 2413 bp, Artificial sequence
  DNA replication origin
gagccccagccggtctgaggctggaccacccgctaagcagtgagctgttcaacttgatttcctcccaagtcggagagctcgcccgctgccgccagcagtctccttccagtgactgaagaagcatccctgccgcccaccgggtgcccaccttggtggcccgcaggacacactgcaccagggcagtcacgctgcccgcctccctcagcaccttcttgctgttgatgtcggccctccaggacaagttccgaaggatgctggacaccacctgggtggggtgaggggcaagtgtggtgggactagggtccaggccccccaaaccccccagcaaatgtgagtctgcagagagtcggacgggacacccctgccagcccaccacaccgctggggaggggcctctgcctatcagggacaccctggaaggctttcccagcaccccgccctgtacctggtggagctcctcactgtcggaggccagctgggccacgatggcctccatgcagccgcggcgcgcacacagggtggcctgttgggggttatgcagccggggtcacggggttgggacacaagggagactgtgcccctcacctcccagccccgtctgtgtgctgcagctgcaaactcagacccctgctgatcctgaccactaccggggacggttaccccatgctcaggtcgggaaactgaggcccagacaggggcagacacccagcctcggggccctgaggccccctctacaatgagggccattttctgcagaggcagcaacagggtgggcgtgaggacaccgccaggtggggaggttcagcacgcgctcccgtccccccacaccgcactctctgggcctcagtctacccgtctgtaagttggggacaagtggccccagctctcagggctgtttcgaggctgggatgagttggaaggaggctcagtccctggaagactggatgaggaaagtgccagcccacccactgcccccgggcaccttgttggcaacgtccccaaaggtgaggttggtgagggtcatgcccgcgtagcggcgcagcgccaggttcagcgggtcccgggtcatcttgtgcatctcatagtcaacctgcagcagctctgccacggcctgcagcccacctgtgaggacccaacaaggttggtgggtggcagggatgaccctgcctgctgcccagcgccccacctcactcccttgcccagaggccctccctatgccccagacctgccctcaagttccccttccaggcccaagtctgagacctcctccaggagccggtatggcctcaccctgctgccagacccacaggggtacccccagtgccctgtgactgccacccccgcctcctgtcagccctcggtcctggctcacgcttcctccagccactgggcctctgcacctgttgttccctcagcctggaatgttcttccctgccctgtttgataggtgcctcggggaaggccccctgagtcctctaataatacaccccaagaccatcagatggagagcagcatccccagcacagacagggctgtagggatgggtgacggccacacccaccctcttcactcgccccgcttccccattacaaaagggggaaatcaacggggagatggcgcctgtgagtcagagggagaggaggacttgtcaccaaaacacttttctccctcttcaaagacaacagaggcaaatgtgactgttctcagagcaggagtgggtcagtggagacaccctttggggaagtgagttagggacatatctcagaaaacttccagcctgaaacgcgtacatccaggttcaccacagcacgattcacagagccaggagtggggggcagctagagcatccataggaggacaagtgggtcagcccagcgtgccctgtgcacacgatgggatgtcacgcagcctcagaagggagccaggctttggccgggtgtggtggctccttctgcctgcaactccagcactttgggaggctgaggcaggagaatcgcttaaacccgggaggcagaggttgcagtgagccgagatggcgccactgcactccagcatgggcaacagagcaagaccctgtctgtctcaaaaggaatgaggctctgaaacaaacagactatggcgtaggtgcaccttgaggatgtcacgctcagtgggagacgccaggcataaaatgacaaatcctgtgtgattccactcctaggatgtccctagctccatcagattcacagagacagaaagtaggatgggggtgggtgccaggggctggggacaggatgagcaggaaatgtttcaccgggacagagtttgaagatgtaaagtggccgggcgtggtggctcgcgcctgtaatcccggcactttgggaggccgaggtgggcggatcacccgaggccaggagtttgagaccagcctgagc

SEQ ID NO: 33429 - DNA, 2051 bp, Artificial sequence
  DNA replication origin
aggatcagcaggggtctgagtttgcagctgcagcacacagacggggctgggaggtgaggggcacagtctcccttgtgtcccaaccccgtgaccccggctgcataacccccaacaggccaccctgtgtgcgcgccgcggctgcatggaggccatcgtggcccagctggcctccgacagtgaggagctccaccaggtacagggcggggtgctgggaaagccttccagggtgtccctgataggcagaggcccctccccagcggtgtggtgggctggcaggggtgtcccgtccgactctctgcagactcacatttgctggggggtttggggggcctggaccctagtcccaccacacttgcccctcaccccacccaggtggtgtccagcatccttcggaacttgtcctggagggccgacatcaacagcaagaaggtgctgagggaggcgggcagcgtgactgccctggtgcagtgtgtcctgcgggccaccaaggtgggcacccggtgggcggcagggatgcttcttcagtcactggaaggagactgctggcggcagcgggcgagctctccgacttgggaggaaatcaagttgaacagctcactgcttagcgggtggtccagcctcagaccggctggggctcactcctcatgtcactgctctttgaaagcaaatgtgggctgggcgccgtggctcacttgaggtcaggagttcgagaccagcctggccaacatggtcagaccccatctctactaaaaaaaacagccaggcgtggcagcgggcgcctgttagtccagctactcgggaggctgaggcaggagaatcacttgaacctaggaggcggaggttgcgccactgcattccagcctgggccacagagcaagactgcgtctcaaaaaaacaacctcactgggccgggcgcggtggctcttgcctgtaatcccagcactttgggaggccgaggcgggcggatcacaaggtcaggagatcgagaccatcctggctaacacggtgaaaccccgtctctactaaaaatacaaaaaattagccgggcgtggtggcgggtgtctgtagtcccagctactccggaggctgaggcaggagaatcgcttgaactggggagtcggagcctgcagtgagtcgagatctcgccactgcactccagcctgggggagagagtgagattccgtctcaaaaaaaaaaaacaaaaaacaaaaaaacccaacttcactgaatgtgagcgtgggagcctttcctccgggccactcaggccctgacccgcccctctcccgcccctcgtccaggagtccaccctgaagagcgtgctgagcgccctgtggaatctgtctgcacacagcacagagaacaaggcggccatctgccaggtggatggcgccctgggcttcctggtgagcaccctgacctacaagtgtcagagcaactcgctggccatcatcgagagcggcggcggcatcctccgcaatgtgtccagcctcgtcgccacccgtgaggactacaggtcggcccccacccccccacccgcacacaggcagctgcgctcggggcgggcacagggctgggctgggcactgtcctcccgtgaatgcatgctcccaaggcttccccaggggctgctgtttgcagcataaatacgtcccaaatactgcgtgagatatactaaaatgcagacctatttattacattaaaattacttcaggccaggtgcagtggctcatgcctgtaatcccagcactttgggaggccgaggcaggcagatcacctgaggttgggagttcaagaccagcctgaccaacatggagaaagcctgtccctactaaaaatataaaattagccaggtgtggtggcgggcacctgtaatcccagctactcgggaggctgaggcagaagaatcgtttgaacccaggaggcagaggttgcggtgagctgagattgtgccactgcactccagtctgggcaacaagagcgaaacttcatctcaaaaaaaaaaaaaaaaaaaaaaaaaattcaggcagccaggcgcagtggctcacacctgta

SEQ ID NO: 33430 - DNA, 911 bp, Artificial sequence
  DNA replication origin
tgaggccacacgcaccaggcccaggcggcccccgcgcgcccccgggcccgcctcggtccccgcccggcccctggggcccggctccgggactgcccgagccagcggtggcggcccacgccgggccggcctctgcatgaacgggatccgcacgggcgatctctgcgtcttgtgctgcttcgccagaagggtgcgcgccggcgttttgggcaccggggaggctccggggccgggcagggccccagcagcctgggtgaccggggggcgctttctgggcaggggctgggaggcgggcgaggtctgggaggagctggaggagggggtcttggcgaggcgggcgggcggtgtggcgcttctggggggctggctcagcgtcgccagctccgaggtcttggcaggccggtgtaggctccgcgaccgctgctgcccggggctcgggactttggctggagccgcgggctgtgccaggcaagggggcgccaccttccgcggtgtggcgcgggggccgggggtccctttgggctgggcacggggtgccgggctggggacgtagatcactgttcgtccccggagcacagctggcaccccgggcgtggtcttctgtgtgccacgtggcttctcggggcctgcaggggaacgggggctcccgctggtcttgactgaggctgcgccccttttctctggccgccgggcactgcccatttctccctccgcctgtcgtcccttcctgtgcttggggggctgtagggtggatcccactgacagcccggatacgaaggacaggatggagtcggactcggacgaggcctcccgcgtggcagctgctgcctggtgcagccacgtgacaattgaattggcgccctcctggatggcgcgccactccacgctatccaggtcggaggcccggtccgagc

SEQ ID NO: 33431 - DNA, 3115 bp, Artificial sequence
  DNA replication origin
gaaggtggggagggggccggctcctgccatcccttcccaccctgcacttctgtgctgcttgcagtcatagctttccttgtccccccagctgggccagggctgtgctccctgaagtggctttgacgtggggccgtcccagctcccgcagcccctgtccaccattgactctccccggtagtggctgctgtggctgccccatcccagctgttgcaccagccacagctcctagtggctcatgggtgcctcctgccccacactggggcctgccataataactggcccaggtaccaatgcccaggttggaccccctgtctggggtgctgtgcaccccctggagcctgccctcccttgggaccagggggagactcctggcctcagccagtgcctccccggcccatctgggtggggtgcccacaaaccctgtgcccccagtttctgctttctggctctgcttccagggatctaacctggggggtctcagcaattctgtggcagcacatagacagcgatgaacctacccgcccacagcccattttgaggaagaggtgatggcggcaggcaatgcaagagctcagtttattaaatgtgtgcgagtcggacagctgacggtgtcgtccttacgccggacagatggctttacatttagggaaggacaggctttcactatttaccactatttacacgtccgtttaacactgcagagacccggtacagaaacgtggggtggcggctaggggaatcagacagaccaggcgcgcgccatcagggctggaccggggcaacagatggggccgggtgaggtaatgctgtcggagctcgggaggaccatgccggtgggcacggcgccccgagttcagcacccacgtgtggtcatgttgggggccagtggcggtcactgtccatcagcctcaggacacctccaccctccctgcgtcctcagaccctcagctccttaggactggccctggagcattggggggcagacgaggaccccttgtcaccctggtgcagagaggccaggtggccaggcaggggccgcggtgggagggaggccttgcagtgggcgtaccttgagttgattgtccagagaccgcggactgcctgtccccttctggagacagctggactgggcggtgaggtgtggctgtggcccccacggcaggggatggagaaggcgaaagtgagctcaggactcggggtgggggtgggaggcggggctggcagccatgttgcgcaccttgctgctgggcaaggcgtcacgggcaggagccagccagacccaagttctgtgagcttccaggcgtctccccatcatcgctgccaccacgctcccccaagaggtagctctgggagttccccacggcccacatggggaaacagaggcagggagctgggagggcgccgcccagagacttacatatgtggaaggcaatgccgcaccaccttcctgcataaccctggccctgtcaccagcgacctggtggctggcttcgccatttccctaccctttggcaattaggggcgcagcgggccggggcgagtgtgagggtgagcacgtgtttggcatccccaagtccaaaagctcagaagagaccaccaggttccccctcgggccatggatggggacagcaagtgtgagacccccgctgtgtcctgaaagggggctcctggcaggcaggaggtcgccccactcagcctgcattttccccgctctctgctcagccatccatgaccccctcttcccccaaaacaacctgacagccttgcctggctgcgaggtcctaggagggagcattgggcacctccagcacctgctgggtggcacacctcggtgacttatggacgtcctgtctggagctccttgtcctgcagggtgtgggcccggagcatggggtgcagcgtgacatgcattcagagaagcagcagtgttaactgggggtgggggctggggtcagctttgctcacagcggccctgagttgaggacagctccttctgccagaaaggctggccttgcccatgctggggatgggacgggagggatggtgtcatccgtggtggggctggggtttccttctgagctccatccacccaaccctcaaaccctgcttcgttcctcctggagaaggcacgtggggcattgagcgtgtgccttcagcctgggcagatccgtgggtgaaggcagcgcctgctggagcttttctgcagaaaagaggtcgtcggctccctctgcaggacgaggcgttgccccagtcacggagacccggcccctgcgagtcccaccccacgcaggaggcccagctcccagcctcccccgccaggggatgaggcagccgagcccctcaggcccttctataagctttcacctcatctggcaccaaatactctccagccctgcgttcacctgccggaaggcccccgaacctcccgccttgtcccagagcctcgggtggagggcaaggctgggtccccgccccagctgtgctgtttctggagttctagggcctagcgctttatgcatcatgaaccagaagggaattgaaaagggacaagatgagcagcggtgcggtcctgggcactgaccacgcccacatgtgatggtctccgtaacgtgcaggctccgctggggagaggccagcgcgggctccaggtcccagggcctcgggctcactgccgggactcccctcagtctcctttccattggcctcgcccgccgcggctgcgccgggccgatactgactccagcgacccttggggtcgccccagctggtagccagcatctcctctgggatggggtccaaatgtcagccggcccggcgtctgcaccagggtcccatcgtacgcagcccgctgccttcccgtctcccgccaaggggtgcgacaggcagggggatccgttggcctctgcccctcccacccccacccttttgggctccgccggagcgcttgggctccgggttccctgaacaccgtctgggcggggcttcctgccggggctcggccacacccccacccgcactcccacagctggggctgagaatgaaaacaatccctgcaaagccctcattagcgaattaccggcggctgcagtgattacaggcttcgcccctgcgcgcc

SEQ ID NO: 33432 - DNA, 1908 bp, Artificial sequence
  DNA replication origin
gtcactatgttgtccaggctggtctctaactcttgggctcaagtgttcctcccgcctcggcctcccaaagtgctggattacaggcgtgagccaccacacctggctgcatccgtcatgttaagaagaccccggctggcaagctcactcggggactgcagggaaccctgccctttgggggcagtagtgaggggtgcccaggaggatggggtggtcagcaggcagtgatgctgctgtgtcctgtctcagaccccccagttcccttcaggatgatggaggatgcggaggccccgggagagcagctctaccagcaaagccgggcctacgtggctgccaaccagcggctgcagcaggcgggcaacgtgctgaggcagaggtgtgagctcctgcagcgagccggcgaggacctggagcgggaggtggcccagatgaagcaggcagcattaccggcagccgaggctgcctcctcaggctgacctctcggggcctgcaggcttgggcagcgcacaaggtggcctgcacccaggctttccctgggggtccgtcggccccagactggcattcacggggtcccagcccacgtgggtgttgacacaggcgcccctcctgatgctggggctgcggttcatccgtcgtctcattcatgccgagttggtgggacccacccagctggctccgtcctgcgtgacctgagggccccactggggttctggaagaggatagggacattattgctgtactgtgattctgtcgtcagctcacagtggccgtgctctgcagtggggcccctgggagcaggtgccacctccttcctctcccggggcaggcactcgcctgtccacttctgagtccaggtgttgggatcgaggtgttaactgtgattccatccagcgagtgcccacccaatgtcagagcagcccgagggccagcctgagcccctgaccccacttccttctgggccccgggctcctcccacaagccacgttgatcttcacaacgaccctgggccgctggggtcacccaagagaagcagccctgagacccagccaggctgggcctagctccacggcacgggtgtctcccagccactgcccttgctggaggaccgctgtgagtcactggccaggagcccagggtgtcctgagtctcatagccaccctgccagctgcagcaggtcctgggcctgcttccctgcgggttctggccctgggggagggggcgttagtgcggcggagggtcttgccaaaggcttttcatcctaaatagcaacttgagtggaaacctgggcaaggcggcccagaggctgggccctgcacataaagctttcgtgtgtgtctggccgtctgaatggtgcctctgtgagcggctccgtcccggggccccggaagctggggagggatgggtaccggcgaccccgggaaccctgctcagtcctgccgggcactgcatgcagggaccgtccgcctgacccagagacctggggctgcctcaccctctctccagacccacagccagctttgtttcttgaatgtggaagatgtttcttattccctgaagaaagggggcctgccacacacagcctgggaggcgcctcatccagaaactgggacttggctagcccggcctgggccctagggacttctcactggtcatgcttctgaagctgctcacctggccgagggaggtcccggcagtgtcccagggtggaaggtggggagggggccggctcctgccatcccttcccaccctgcacttctgtgctgcttgcagtcatagctttccttgtccccccagctgggccagggctgtgctccctgaagtggctttgacgtggggccgtcccagctcccgcagcccctgtccaccattgactctccccggtagtggctgctgtggctgccccatcccagc

SEQ ID NO: 33433 - DNA, 1505 bp, Artificial sequence
  DNA replication origin
agtgcctgccccgggagaggaaggaggtggcacctgctcccaggggccccactgcagagcacggccactgtgagctgacgacagaatcacagtacagcaataatgtccctatcctcttccagaaccccagtggggccctcaggtcacgcaggacggagccagctgggtgggtcccaccaactcggcatgaatgagacgacggatgaaccgcagccccagcatcaggaggggcgcctgtgtcaacacccacgtgggctgggaccccgtgaatgccagtctggggccgacggacccccagggaaagcctgggtgcaggccaccttgtgcgctgcccaagcctgcaggccccgagaggtcagcctgaggaggcagcctcggctgccggtaatgctgcctgcttcatctgggccacctcccgctccaggtcctcgccggctcgctgcaggagctcacacctctgcctcagcacgttgcccgcctgctgcagccgctggttggcagccacgtaggcccggctttgctggtagagctgctctcccggggcctccgcatcctccatcatcctgaagggaactggggggtctgagacaggacacagcagcatcactgcctgctgaccaccccatcctcctgggcacccctcactactgcccccaaagggcagggttccctgcagtccccgagtgagcttgccagccggggtcttcttaacatgacggatgcagccaggtgtggtggctcacgcctgtaatccagcactttgggaggccgaggcgggaggaacacttgagcccaagagttagagaccagcctggacaacatagtgacacccccatctctaccaaaaaatacaaatacaaaaattagctgggcgtggtagcacgcatctgtggtccctacttctctggaggcagaggcaggaggatcgcttgagactgggaggccgaggctgcaataagctatgatcgtgccacggtactccagcctgggtgacagaatgagaccctgtctcaaaaataaataaaaacaaaaatcaagtaatggaggcttcctcgtccatcagctgggagaggcacagtggctgggtggcaggaggggcttccagctctaggctacccgccttagcaaagcgtgtgaccagggggatcgggtcacagaaagagctcaagcctcgccagcagtggccctcctgggggcggggcttccattcctgcaaaagccgtggcacccaccgggatggactccactgagctggcctggctctcattcctgctgtctctggaagccagagacgcaacaagcccgccaccgaaaacctctccaggggccgtgcaacctcctggagcacacacttagggaggcaggggtggcgaaggtgagaggtgggcattgacgtcctggtgactcccacattcagcagaaactacgtatggctccctgctcccccacgtatgcaagcccagtgcagcagggctgaagcagcaccgacttcagggtcactcaga

SEQ ID NO: 33434 - DNA, 1150 bp, Artificial sequence
  DNA replication origin
ctctgcgcttagagcactgctaatggacaagtgaacaaaagaaacaagaatgtctgccccaggctgttctggggctggcgggaaacaaatgaagatgaatcggccaggtgcggtggctcacacctgtaatcccagcactttgggtggctgaggtgggcggatcatttgaggtcaggagttcaaggccaccctggccaacatggtgaaaccccgtctctactgagaatacaaaaacattagctgggcatggtggcgcatgcctgtaatccctgctacttgggaggctgaggcaggagaattgcttgaacccaggaggcggaggttgcagtgagctgagatcgtgccactgtactccagcctgggtgacagagcaagactctatctcaaacaaaaaaaaaaaagaaaaaagaaaatgagccatgtggaatgatagaaactgtgaatttctaagggaacatttttaaaaagtaatattagaaaattctggggccaggtgcagtggctcatgcctgtaatcccaggactttgggaggctgaggcaggaggatgacttgaggccaggagttcaagaccagccttggcagcatagcaaaacctatatctaccaaaaatacacaaactagctgggtgtggtggcatgcacctgtggtcttagctactcaggaggctgaggcaggagggttgcttgcgcccaggagttggagtctccagcctgagtgacagagtgagaccctgtctctgaaaaagaaaaaaagagaaaaattgagttgtgttttccctttagacatatttcaagtgcccaggagccacacatggctggtggctggtgtggaccagcatcggtgggaggtgtgcgcatcatctggaaggttctgtgggccggtactggtcaaggtgcatgagttggttttattcccagcatgcagttcggtcacctgagggtgctggggccgtggtttgagcttcatgggctcaggtccatggccgttgagtgtggcgaaactgaggcacgctgtgcgggggacggggggcgctcacagaaggtagggggcctcctgtgccttcatccaggcactgcccggcctttcccaccctgttgctaaagcaggtgatgacagaggtgatttgatcagcccagacccgtgcggca

SEQ ID NO: 33435 - DNA, 1769 bp, Artificial sequence
  DNA replication origin
gctggtgaccgctgggcctgggcacacggcggcgcccgcgctgagggtctgctccagctgccatgcctcctgctacacctgccgcggcggctccccgagggactgcacctcctgtcccccatcctccacgctggaccagcagcagggctcctgcatgggacccaccacccccgacagccgcccccggcttagagctgccgcctgtccccaccaccgctgcccagcctcggccatggtgctgagcctcctggccgtgaccctcggaggccccgtcctctgcggcatgtccatggacctcccactatacgcctggctctcccgtgccagggccacccccaccaaaccccaggtctggctgccagctggaacctgaagttgtcagctcagaaagcgaccttgcccccgcctgggtccctgacaggcactgctgccatgctgcctccccaggctggccccagaggagcgagcaccagcacccgacgcctggcctgccagggatgggccccgtggaaccccgaagcctggcgggagagagagagagagaagtctcctctgcattttgggtttgggcgggagtgggctggggggagaggctggagcaccccaaaagccaggggaaagtggagggagagaaacgtgacactgtccgcctcgggcaccgcgtccaacctcagagtttgcaaataaaggttgcttagaaggtgctcagtctgtggcctcctctggagcagggtgggcccgaggccccagggctcaggtggtttctgcttggggtccccggacatcagtccatggagaatgcagccggccacggagaaagagtccgcccaggcccagggaccccaggcagtgggaacagcagggaatggccgggggtcagcagtaatgtccagccccagaacatggctcaccatggcccagaatcctctcctgcggtgattcctttgttttttttcttgtttgttttgagacagggtctccctacgttgactaggctagagtacagtggtgcgattgtagctcactgcagccttgaaccctggcctcaagcaatcttccctccttggcctcccaaagtgctgggattacaggcgtgagccactgtgcctggccctttcctccctccctcccttccttccttttctttacttccttccttctttccttcctttcttccttctctttccttccttttttagtagagatgggtttcaccatgttggccaggatggtctcgatctcctgacctcgtgattcgcccacctcggcctcccaaagtgctgggattacaggcttgagccaccgcacctggccccttccttcctttccttttctttctttctttccttctttctctttcctttttctttcttcctctttcttttctttttctttctctctcgccttcctttcttccgttcttccttctctttccttcctttcctttcttttctcccttttcttctttactttcttctctttatttcctttttcttttttttctttctctctctccttccttcctttttcttctccttccttctttcctttctttctctttctttccttttccctctctctgtcccttccttccttccttctctctcaacaatatttttttttttgagacagagtcttgctctgtcgcccaggctggagtgcagtggcacgatctcggctcactgcaagctctgcctctcgggttcatgccattctcctgccccagcctcctgagtagctgggactacaggcaaccgccaccatgcctg

SEQ ID NO: 33436 - DNA, 1088 bp, Artificial sequence
  DNA replication origin
ttctgggccatggtgagccatgttctggggctggacattactgctgacccccggccattccctgctgttcccactgcctggggtccctgggcctgggcggactctttctccgtggccggctgcattctccatggactgatgtccggggaccccaagcagaaaccacctgagccctggggcctcgggcccaccctgctccagaggaggccacagactgagcaccttctaagcaacctttatttgcaaactctgaggttggacgcggtgcccgaggcggacagtgtcacgtttctctccctccactttcccctggcttttggggtgctccagcctctccccccagcccactcccgcccaaacccaaaatgcagaggagacttctctctctctctctcccgccaggcttcggggttccacggggcccatccctggcaggccaggcgtcgggtgctggtgctcgctcctctggggccagcctggggaggcagcatggcagcagtgcctgtcagggacccaggcgggggcaaggtcgctttctgagctgacaacttcaggttccagctggcagccagacctggggtttggtgggggtggccctggcacgggagagccaggcgtatagtgggaggtccatggacatgccgcagaggacggggcctccgagggtcacggccaggaggctcagcaccatggccgaggctgggcagcggtggtggggacaggcggcagctctaagccgggggcggctgtcgggggtggtgggtcccatgcaggagccctgctgctggtccagcgtggaggatgggggacaggaggtgcagtccctcggggagccgccgcggcaggtgtagcaggaggcatggcagctggagcagaccctcagcgcgggcgccgccgtgtgcccaggcccagcggtcaccagccttgtgtggttgaagaaccgcggggggcagtaggccaggcagagctgtcccaggatgtaggcggggccgtcacacgctgctcggggacacgcacgcaaaggcccgtcagcttgccacccgcagcctgttactcgccacccgcccgcctggggccacatgcacgct

SEQ ID NO: 33437 - DNA, 1951 bp, Artificial sequence
  DNA replication origin
cgcagaggacggggcctccgagggtcacggccaggaggctcagcaccatggccgaggctgggcagcggtggtggggacaggcggcagctctaagccgggggcggctgtcgggggtggtgggtcccatgcaggagccctgctgctggtccagcgtggaggatgggggacaggaggtgcagtccctcggggagccgccgcggcaggtgtagcaggaggcatggcagctggagcagaccctcagcgcgggcgccgccgtgtgcccaggcccagcggtcaccagccttgtgtggttgaagaaccgcggggggcagtaggccaggcagagctgtcccaggatgtaggcggggccgtcacacgctgctcggggacacgcacgcaaaggcccgtcagcttgccacccgcagcctgttactcgccacccgcccgcctggggccacatgcacgctgcccacggtggccgccaccgcctcccagcagtgggccctgccccgccggcactcaccctggcacagcccctctgtgtcccgctgcacacacgcgctgctggtcacctgggggcctgtaggccgcgctgtcatgtcctcggccgtcccatagagcagcagcgtgtagcggtacaacgtccctggacaggggtcgcgggtgggcacaggaggaaaaggaggctctcggcagcctggtcctggtagtccccgggctccctccccttcagctcccacgcggggccctggactggttcacatctctcagggaattgcacacctactgtgcgcctgtcactggacaccgacatctcccgggtgactgcacacctactgtgcgcctgtcactgggcacctacatctcccgtgttaccgcacacctactgtgtgcctgtcattgcacaccatctcccgggtgactgcacgcctactgtgtgcatgttctcttggagaaggccactgggaaccccttttgcagtgcggtcaccaaggctagctccagagcccctggggggaggttggagagccaagccccgcccaccacagccccgccccgccctcacccgtgttgaaatagtagcccttgttctctaggcccagggtccacacgccctgtgggttctcatcccagaagtgggtggacatgaagacccagttgttgtagccttcagtgctgacgtccaagggtctgggacagaagggtgggtgggggtgggggtgtcaagagggatggctttgtgaagccggcagagccccatgaagtgtctgaccgcacgcgctggtggccgcgtgtcctctgggtgtgggtgagggtgtgactcggggtcccaccaactaggctgccgtgtgactcctatgggcctggcccctccccgtgaggacactccgggtagatggcagcgtttaccgacagggcatgaggccgccccctctcctctgcgggccgctcaccgtatggccacgagtgtggagcgcgtgcccatggggctggtgagcgagatctccaggtctccgcgccggctgtaggacagcgtcagctgcgcctgcacgtgctccagcgagcggatggagttgtggaggccggcgcaggccgatacgttttccctgatgtagatcagcggcaggatggggctgagggggtcgaggggtgaggaccctcctgcggcctgctggggggtgggtgggcggccagcaggcgaggtcggggctcagaggtcacggggtccagccctcgttttacagatgggtaaactgaggcctcaggcctgtcccccacacccccagcggggatagcggaggggcgcgcaggggtctcacgtggggcggctctggacccggacggcgcacttcctctgcggctgggtgggcagccaggtgcgggcggtgtccaccagcagcccggcgtccagcagcccgtatccgtagtgatggctcactgcgcggaagggcagcagtcactcgccccgtgg

SEQ ID NO: 33438 - DNA, 2098 bp, Artificial sequence
  DNA replication origin
ggcggccagcaggcgaggtcggggctcagaggtcacggggtccagccctcgttttacagatgggtaaactgaggcctcaggcctgtcccccacacccccagcggggatagcggaggggcgcgcaggggtctcacgtggggcggctctggacccggacggcgcacttcctctgcggctgggtgggcagccaggtgcgggcggtgtccaccagcagcccggcgtccagcagcccgtatccgtagtgatggctcactgcgcggaagggcagcagtcactcgccccgtgggccccgggtccccgcccccgcccggccccgccgcaccttggcgccccacgccgttggtcctccagtcctcggcctgcaggtgcgccggcttggacgcgcggaccaccaggtgctgcatgtctctccacgtcaggaacgggctgcggggggcgggggcgggggcgggtgagccgccgggccgcgcctgggggcgagggcggtggaccgggccccgcagtcacctacttggcctccagcgctagggcgatcatgccggccgccagtggggctgaggccgaggtgcccgtgtgctggtctgtgcacccgtgatgcaggtccgtggtgacctgagggcagaggggggtgggactcggggggccgtgcacagtgagaatacagcccttcttcaaaaagtaccaaggactgggcgggcgcagtggctcaggcctgtcatcccagcactttgggaggctgaggcgggcgtgttgtctgaggtcaggagttcaagaccagcctggtcaacatagtgaaaccccaactctacaaaaatacaaaaattagccaggcatggtggcgggcacctgtagttccagctactcgggaggctgacacaggagaatcacttgaacccgacaggcagaggttgcagtgagcggagatcacacccacgccactgcactccagcctgggcaacagagccagactctggattaaaaaaaaaaaagtactaacgactgaattcaaaaagtaccaagggctgggtgcggtggctcacacctgtaatcccagcactttgggaggccgaggtgggtggatcaccggaggtcaggagttcgagaccagcctggtcaacaccttgtctctactaaaaatacaaaaaaattacccgggtatggtggcggggcacctgtaatcccagctacttgggaggctgaggcaagacaatcacttgaacctaggaggcagaggttgcagtgagccaagatcacaccgttgcactccagcctgggcaacatggcaagactccatctcaaaaaaataaaaaaatagtaccaagaactgaagtcaaaaagtaccaaggactggccacacagtggctcacgcctgtagtcccaacactttgggaggctgaggcgggcagattgtttgagctcaggagtttgagaccagcttgtggcaacatggtgaaaccccgtctctacaggaaaaatacaagaattagctgggtgtggtagtgtgcacctgtaatcccagctactcaggaggctgaggcaggaggatcgcttgagcctgggaggtagaggttgcagtgagctaagattgcaccactgcactccaacctgggtgacagagtgagactctgtctcaaaaaaatttaaaaaaaaaggtaccaaggactccaaggactgagttcaagaagtaacaaggactatgctcaaaaagaactaagagcctggccaacatggtgaaaccccgtctctactgaaaatacaaaaaaattagccgggcatggtggcgtggcctgctattcccggcactttgggaggccgaggctggtggatcgcttgacctgaggagttggagaccagcctggccaacatggtgaaatgccatctctacaaaatatacaaaagaaattagcaggacatggtggcatgcttgtggtctcagctgctcaagaggctgaggcacaagaatcgcttgagcccggcaggcgtaggttgcagtgagctgagatcatgccacttcactctgttgcacccagcctgggtgacagagcgagactccatctcaaaagaaaaaagaaagtgctgggcactgtggctcacacct

SEQ ID NO: 33439 - DNA, 4541 bp, Artificial sequence
  DNA replication origin
ggctgattctcgaaggaggggtgtgttggaaagtgggagaggtcaaacaaagggtaggacgcgttatcgcaacagtgaacccgcttctctgggttagtcttgtcgttgtacaaatgggaaaactgaggctcccgagggtgtgggtctgcggaagacgggcaggcgtgcgtccctctcccgcttctgttagatcttcgcgcccctcctggctgagtagccgcaaggccccctgggagtcgaagccttctgcgttgctatggcgccgggggcgggtcggacgcctgggcccactcggcggtttggcgggagggaggggatttgcgcaggccccgctcccgccccgcctccatgcggcccgccccgattgcgctgtggctgcgcctggtcttggccctggcccttgtccgcccccgggctgtggggtgggccccggtccgagcccccatctatgtcagcagctgggccgtccaggtgtcccagggtaaccgggaggtcgagcgcctggcacgcaaattcggcttcgtcaacctggggccggtgggtgggaccgggatagacgggaagtgggggcttggaggggactgaacaaccctagaccccgacaagggggagggagcccacaaggtcttctaaatatcaagagtcccagcccacccctgcctcagccaagctcagcttctgggactcccagagagcacctgctggggaaggacaaagaagggggctgttaccggccctcgggggcttcagcaggggagccgggtcccatcggtgcggccgcttccccacatccccagatcttccctgacgggcagtactttcacctgcggcaccggggcgtggtccagcagtccctgaccccgcactggggccaccgcctgcacctgaagaaaaaccccaaggtgagcctggcctggaggccaaccccctgcccggggtctcagctgcctcctggggccaccagccatcttctgtggttctcgtggttgttatgaacagctgtgtgctttctgtggctcagacccgcccgggccccaagtctatacagcaagaggaggcaggaagacccagatacggaaatcatggcgcctgccagggcctggtacacagtgggcacctcttgtcctccccctccctcctctgggccccaggggctctggtaaggagggacagacggcgtgacttccccaccgtctaggtcatgggatggagggaaggggattttacgacaccgtaatgggttccaaagagtaggaggcttggcccggcgcggtggctcacgcctgtaatcccagcactttgggaggcggaggcggtcggatcacaaggtcaggaaatcgagacgagatcctagcgaacacggtgaaaccctgtctctactgaaaatacaaaaaaattagccgggcatggtggcaggcgcctgtagtcccagctattcaggaggcttaggcaggagaatggtgtgaacccgggaggcggagcttgcagtgagccgagatcgcgccattgcactccagcctgggcgacagagcgagactccgtctcaaaaaaaaaaaaaaaaaaagtaggaggcttacagtcacccagtggccctcaggacgcagtgtccaggcgctcagaaaggggcctgggtcccatcgggctgggccctgtctagaaaatgcctgggatgtcaagctgaggggttgggatggagcctgggaagccctcggaggccaggaagtgccttgaacaggactggacagctgcctgcttacagcaccgggagggagagcagtggccagttcctgatgtggtttgcaagagagaagccaggcctggcgtggtggttcatgcctgtaatcccggcacttcgggaggccaaggcaggcagatcacttaagctcaggagttcgagaccagcctgatcaacatggcgaaaccccatctctactaaatgtacaaaaattagccgggcatggtggtgtgcgcctgtagtcccagctacttgggaggctgaggtaggagaatcgcttgaacccaggaggcagaggttgcagtgagccaagattgcgccactgcaccccagcctgggcgacagaacaagactctgtctcaaaaaaagaaaaaaaataaggaagtgatgcaggagagagatagaaggatctagaacagggatgggggagagagtggggtggggacccggggacctgcagtcacccgcggcagcaacgacgcgtctgtgggcccaaggacaggtggtccaaaagcctcgaccccttccgactgcagacagagccccaggcacatggggaccctggagagcaacccccacaaacacagggtcccagggcacggggctgcctcactccctgaaccacgaggggccccaggggcgagcaggggacaggcctgatgcaccctctgctctgcaggtgcagtggttccagcagcagacgctgcagcggcgggtgaaacgctctgtcgtggtgcccacggacccctggttctccaagcagtggtacatggtgagcaggcagccagggtgggtagacggggacggggccgctggcgccctcaactccaggccctcacagggtcacaaccccgcctccccctgcagaacagcgaggcccaaccagacctgagcatcctgcaggcctggagtcaggggctgtcaggccagggcatcgtggtctctgtgctggacgatggcatcgagaaggaccacccggacctctgggccaactacgtgagaccgcgggtggctgtgggcgagggctgccccaggtgccgaggctggcaccaccctagggacgcctcccggccccctcatatccccacctgcccccaggaccccctggccagctatgacttcaatgactacgacccggacccccagccccgctacacccccagcaaagagaaccggtgagcagggctcccacagcacacgggggaagccccagtacccggcagggggatggaggccgtgacaggagcccctcttggccctggcaccaggcacgggacccgctgtgctggggaggtggccgcgatggccaacaatggcttctgtggtgtgggggtcgctttcaacgcccgaatcggaggtacccggggtcccccagcggcaccattccgggacagagagggaagggggtgactctggcggggagctgggcccaaggactcgggagcccaccctctcactgctgggtggtgctagggccccagactccagggcttggggggtgctgagccaatacgaatggtcccactccagggagcagagagagggcccaggtagggctggggagtggtgtggagtggcgcggggcgggctggggtgtggggaagggcagggccggtggcagcggccctcccgccctggctctgcaggcgtacggatgctggacggtaccatcaccgatgtcatcgaggcccagtcgctgagcctgcagccgcagcacatccacatttacagcgccagctggggtcccgaggacgacggccgcacggtggacggccccggcatcctcacccgcgaggccttccggcgtggtgtgaccaaggtgagtggcagcccgaggagggcaggggtggcaggccaggccgacgccccctccccgcccctcctggtttcccagggccgcggcgggctgggcacgctcttcatctgggcctcgggcaacggcggcctgcactacgacaactgcaactgcgacggctacaccaacagcatccacacgctttccgtgggcagcaccacccagcagggccgcgtgccctggtacagcgaagcctgcgcctccaccctcaccaccacctacagcagcggcgtggccaccgacccccagatcgtgagtgcagccgccccaacagggtcccctccccaggccctgccatcccagcctggcctcctcctgtccccaccactgtgacttagcaccctcccaaagctgctttgaaaatgcaaatccaggccgagcacggtggctcacacctgtaatcccagcactttgggaggctaaggcaggcagatcacaaggtcaggagatcaagaccatcctggctaacatggtgaaaccctgtctctactaaaactacaaaaaaaaaaggccaggcacggtggctgacgcctgtaatcccagcactttgggaggccgaggcgggtggatcacgaggtcgggagatcgagaccatcctggctaacagagtgaaaccccgtctctactaaaaatacaaaaaattagccgggcgtggtggtgggcgcctgtagtcccagctactcgggaggctgaggcaggagaatggcatgaacccgggaggcagggtttgcagtgagccgagatcgggccactgcactccagcctgggcgacagagtgagactccgtctcaaaaatcaatcaatcaatcaatcaataacccaaatccaggccaagcacagtggctcgcgcctgtaatcccagcactttgggagaccaaggtgggtggatcacctgaggtcaagagttcaggaccagcctagccaacatggcaaaaccccatctctactaaa

SEQ ID NO: 33440 - DNA, 1023 bp, Artificial sequence
  DNA replication origin
gaaggagtccggtctgcgacccccaggcccatggcctcggtgtgcccgtcggcgaaacgggctagcgccgacggctcacctgcagccagataccgcttctccaccccggtcttggcctccagcgcccccagcacttcggtgaccaggttcctttgctccaggaagtgctccacgcgctgcctcaggccgtccatggccccgacgcgcccggggttggctgctcgagctcgcccgcggaccagggcacccaccccgctgcacgcgcaccgctttcccgcagcctgagccgcgatgctccggccccgcgccggtgtccgcccccggccccccgctaggaccaatgggagggcagggcggacaaaggaggaggggcctgccccgtctcccccgccgcatagccctccgccacggccgccgctgcccagaccccgccgggagagggcggggcgcggcggcccagggcaccgattggccgggccggagcgagacgtagctgattggaagggcggtgtcagaggatgggattattggctgaagggtggagccagggcgaggagaggcgtgggggggcggaaccggggggaggggctaaagaaacatccgagccgattggagaaacgggacgcgattcattggcgagaccagtggagggcggggctgatcacaaaggaggcagggcggaatggtaggggcgggaacggggcgaggcttatcggaggaggcgggattacgcaaaagaatgattctgattaggccggacaggaggccgggctgattctcgaaggaggggtgtgttggaaagtgggagaggtcaaacaaagggtaggacgcgttatcgcaacagtgaacccgcttctctgggttagtcttgtcgttgtacaaatgggaaaactgaggctcccgagggtgtgggtctgcggaagacgggcaggcgtgcgtccctctcccgcttctgttagatcttcgcgcccctcctggctgagtagccgcaaggccccctgggagtcgaagccttctgcgttg

SEQ ID NO: 33441 - DNA, 1267 bp, Artificial sequence
  DNA replication origin
ggcggagggctatgcggcgggggagacggggcaggcccctcctcctttgtccgccctgccctcccattggtcctagcggggggccgggggcggacaccggcgcggggccggagcatcgcggctcaggctgcgggaaagcggtgcgcgtgcagcggggtgggtgccctggtccgcgggcgagctcgagcagccaaccccgggcgcgtcggggccatggacggcctgaggcagcgcgtggagcacttcctggagcaaaggaacctggtcaccgaagtgctgggggcgctggaggccaagaccggggtggagaagcggtatctggctgcaggtgagccgtcggcgctagcccgtttcgccgacgggcacaccgaggccatgggcctgggggtcgcagaccggactccttccccggctacggggtccggtccggccggtggagcgcgcgaggtgactgggacctcgaggtccgcccgcagcccttcccttgcccgcgccctgcgaccctgctcccgggccacccctctctagcttccgcccctggccgccccccgacgcctccttccgggcgctgggtgcctgccatgccgaagtccggttcttccagttgcccagtggccccagaggggtcgggatgccagtgtcctgcgcgtttcgccgtcccccttcccccgtggaccccggcctggctgcaacagtagagatcttcccgtttttctgaggggaggctcctggcgggaaggggaacggaccgtcctgggggcctgcccaggacccttctcctttcctcctcctctcctgccctagctcaccttcccccagctcaatggcttagtgccaccgagcgtaaatgtttgttaagacggagttgggttgtctgacggctgtgatgtggggaggctggactggggcccacagagccggagatccaggcaccccgattgtgactccattacagttcttccgtgactttcacccttggtgacgctgcgcgccccttcccctttccaaatctctagcaagagcatgtagtaaacgctccttaaatgcctccctccccacctttaaaacttttttttgagaccgagtcttgctctgctgcccaggctggagtgcagtggtgtgatcttggctcactgcaacctccacctcctgggttcaagcgattctcctgcctcagtctaccaagtagctgggattacaggtacccaccaccatgcccggctaacttttgtatttttagccgttcaacatggtgaaacggggtttc

SEQ ID NO: 33442 - DNA, 1182 bp, Artificial sequence
  DNA replication origin
agaccgggctggaggtgacgttgggtggctgcaggggccccgaggacgggagggctgactgggaggggctggaggaagtaccaggcggctgggtgtgttgccgagaccagtgggagctgccctgtgcccgacgctggccctgggccctgccggacaggcgggagccacagccagagccagagggcagctggccctgggatccagagctgggggtggccgaggactgggactgggacttgcccgaggtggcatttaaggagacccccagggccttgcctggacccgagggactggcaggggctgctgttgggggatgcgctgaagactctgtggaggcctgggagcctggcgcggccccctcctcaccagccaggaggtccttgtgaggctcagggggctgcttcacttgtccttcggctgcggggtctggcttggcttgactgcagagagaggggcgggtgggggagggccgtgaggcaggcctgggctccccggagctgctcgcaggcgggactgaggctactggctatgagcatgacaagtcgaggggccgggcagccaccctcagcagagatggtgtcaaccacacagaggctttcatggtcacccatgcacagatgggtgcacacagagcacacgcatgtgcagtcatgcacacgcacgcactcacacgtgcacacatggtcacacgcacacacatatactcacatgcacacgtgggcacacacacacatatgcacacgtgagaaaacatgctcactcccttgctcactcacacaccaaacatacacttgagcccatgcacacgcaccctcttgcacatgacaaaacatgcacacacaataatacatgtgcacacagcaaacatacgctcaaacacacgcgcgcgcgcgcgcacacacacacacacacagctcctatctccccacagcggttacgtacggtcagcttccaggggagtggagggcccggccacagccaccggggtgatgcctgcccggctacgggccaggacctgcaagactggttcccggaagcgtgagagagagaggcggacagtgagagggggcggccaaagtcagaaagggaggcaaggtggagagagacaggtccagacccgggagatggcctgaggcagccaggcgcctgcgagcacccaccgttcctggttattccggccgc

SEQ ID NO: 33443 - DNA, 969 bp, Artificial sequence
  DNA replication origin
tgtaccaccatgcctggctaatttttgtatttttagtagagatggggcttcaccattttgcccaggctggttttaaacccctgacctcaggtgatccacctgcctcagcctcccaaagtgctgggattacaggtgtgagccaccgcacccaaatgggggagttttaagagaagcaggctaatgcaaataggccagacaactagttcgggagggaggagagaaagcactgtgattaaggacaagcttttccggggcttgcacccatcctggccatgtgggtggaccttgagtgggtgaattagcctctgggcctcagtctcctcatctatattatggggctggtcggcacagccgggattcatgcctgatgaaatgggacggtgccctcgcagcccctcccctgggccccccgcacacgtggcacacaggtctggtccgggttagctttattggagcctcctagcaggccaggtgtttcaggcaccagtagtgctgcaggcacgggggcctgtggtgtggccagctgcaggtgatctcggtggtggactccgaagtgtactccagagaggtcccggaatggcaggggaccagctcgggcactgaggcgctgctggcaggctgtttcgacgattccttctggcgctgtccgctggtcttgggggctgcgtcctccggcttgccagaggacttgctggggggctgcgtggggatgttgctgctgctgggagactggaccatgggtgagaccgggctggaggtgacgttgggtggctgcaggggccccgaggacgggagggctgactgggaggggctggaggaagtaccaggcggctgggtgtgttgccgagaccagtgggagctgccctgtgcccgacgctggccctgggccctgccggacaggcgggagccacagccagagccagagggcagctggccctgggatccagagctgggggtggccgaggactg

SEQ ID NO: 33444 - DNA, 998 bp, Artificial sequence
  DNA replication origin
tgggaggtgaggagcgtctctgcccagccgccccgtctgagaagtgaggagaccctccgcccggcagccaccccgtctgggaagtgaggagcgtctctgcccggcagccaccccatctgggagggaggtgggggtcagtccccaccctggccagccgccccgtccgggagggaggtgggggggtcagccccccgcccggccagccgcccccgtccgggagggaggttggggggtcagccccccgcccggccagccgccccgtccgggaggtgaggggcgcctctgcccggccgcccctactgggaagtgaggagcccctctgcccggccagtcgacccgtccgggagggaggtgggggggtcagccccccgcccggccagccgccccgtccgggaggtgaggggcgcctctgcccggccgcccctactgggaagtgaggagcccctctgcccagccaccaccccgtctgggaggtgtacccaacagctcattgagaacgggccatgatgacagtggcggttttgtggaatagaaaggggggaaaggcgcggaaaggattgagaaatcggatggttgccatgtctgtgtagaaagaggtagacacgggagacttttcattttgttctgtactaagaaaaattcttctgccttgtgatcctgttgatcagtgaccctacccccaaccctgtgctctctgaaacatgtgctgtgtccactcagggttaaatggattaagggtggtgcaagatgtgctttgttaaacagatgcttgaaggcagcatgctcgttaagagtcatcaccactccctaatctcaagtacccagggacacaaacactgcggaaggccgcagggtcctctgcctaggaaagccagagacctttgttcacttgtttatctgctgaccctccctccactattgtcctatgaccctgccaaatccccctctgtgagaaacacccaagaatgatcaataaaaaaaaaaaaaagtgtctccag

SEQ ID NO: 33445 - DNA, 1117 bp, Artificial sequence
  DNA replication origin
gctgttgggtacacctcccagacggggtggtggctgggcagaggggctcctcacttcccagtaggggcggccgggcagaggcgcccctcacctcccggacggggcggctggccgggcggggggctgacccccccacctccctcccggacgggtcgactggccgggcagaggggctcctcacttcccagtaggggcggccgggcagaggcgcccctcacctcccggacggggcggctggccgggcggggggctgaccccccaacctccctcccggacgggggcggctggccgggcggggggctgacccccccacctccctcccggacggggcggctggccagggtggggactgacccccacctccctcccagatggggtggctgccgggcagagacgctcctcacttcccagacggggtggctgccgggcggagggtctcctcacttctcagacggggcggctgggcagagacgctcctcacctcccagacggggtcgcggccgggcagaggcgctcctcacatcccagacggggcggcggggcagaggcgctccccacatcttagacgatgggcggccaggcagagacgctcctcacttcctagatgggatggcggccgggcagagacgctcctcactttccagactgggtagccaggcagaggggctcctcatgtcccagacgatgggcggccaggcagagatgctcctcacttcccagacggggtggcggccgggcagaggctgcaatcttggcactttgggaggccaaggcaggcggctgggaggtggaggttgtagtgagccgagatcacgccactgaactccagcctgggcaccattgagcactgagtgaaccagactccgtctgcaatcccggcacctcaggaggccgaggctggcagatcactcgcagttcggagctggaggccagcccagccaacacagcgaaaccccgtctccaaagaccttgtctccaaaagaaaaacagtggtcagtcaggcatggtggctcacacctgtaatccccagcaccttgggaggccaaagcaggtgaatgacctgaggtcaggagttcgagaccagcctggccaacatggtgaaacactgtctctactt

SEQ ID NO: 33446 - DNA, 1170 bp, Artificial sequence
  DNA replication origin
atcacgaggtcaggagattgagaccatctcggccaacatggtgaaaccccgtctctactaaaatacaaaaaattagctgggcatggtggcgtgtgtctgtaatcccagctacttcggaggctgatgcaggggaatcgcttgaacccgggaggcggaggttgcagtgagccaagatagcaccattgtactccagcctggcaacagagcaagactctttctgaaaaaaaaaaaaaaaaaaagagtgttccaggcagagggcacagcctgtgcaaaggccttgaggcaggaccacgctggtgagtgggaggcacagagaggaggctcctgtggctggagcagagaaggggaggagggaggaggggaggagggaggagggaggaggggaggggggaggaggggagttttcggggctgcaccacacaggcactgggggcggggggtgcactttgtcttttttttttgagacagagtttcactcttgttgcccaggctggagtgcaatggtgggatctcagctcaccgcaacctctgcctcctgggttcaagcaattctcctgcctccacctcccgagtagctaggattacaggcatgcgccaccacacccagctaattttgtatttttagtagagacagggtttctccatgtccgtcaggctgttctcaaactcccaaactcaggtgatccacctgccttggcctcccaaagtgctgggatgacaggtgtgagccactgtgctcggcccgggactttgtcttttactcggggtgaaggatttatcagagcaaagggcaagggtaatcattaatcaccccccaccctgtgtcggtgatcacacggggatggcagacggggctctcagaatctgccgatcactggcccagctggtttgaagaatgtggtctggtcatggccctgagggaggagagagggtgccaggctcgctctgcacctggcatggtccctcactttcactggcggggagcagcaaaactggctctggcctgcccaggtcagcacacccagggagcacaggtggggaggaggacacacttgtcttaccaggtggaaatgtgacctttagcccctcaggcattttattttatttttattttgtattttttaaattttatgtttgagacggagcctcgctctgtcacccaggctggag

SEQ ID NO: 33447 - DNA, 1169 bp, Artificial sequence
  DNA replication origin
atccaggcgccggggcagcccagggggtccgtggccgggagagaccttgaaacctccattccctgggacaccccaaaccacagccggggagaagggacagccttacagactgacaggggagggagggcagtggggtgccggcaggcaccgacagtagcctcatgagccagtgctgtcacgaggaggcctgcgagagggccccgcgtccaatgggaagcgagtgcccacgcggaagtgggctcagggcacctggggccacaagccacgaggcgcgcccggagtcccttcatgtcccgtcctgccgccagggggcactgcggcccccactcatccctgcagcacccgcggcccttggctggggagcccctgggacccccgccggcagcgcgtgctgcagacatcaatcacagaaggcaccacgtcactgaagcgccaggcctgggccgtcccaggctccgctgggtccctggtatgccgtcggtgctcaataagcacttgctgcagaaatgtgtgaaggaaaaagggggctagggaagggctccaggaaagtgtaactcccatgtcagagctgggaggggcttcgagggcatcactcactgagcgggaaactgaggctggagaggggctgcacctggcctggggtcatctgcaagatcaggggccgtgtccaccaatgtcctgcaccccttgccgactccctctgcctcggccgcctccttgcccttcaccctctctggttgctccctgcctggtgggggtagcttgtccgtgcccagtggacagcggggacccatggaccccaggcaccccaggccccagggagaaatgcaaccactggtcccacacagagtgggttgtcccgggtggcagcatgagccatgcatcaggcgtcagaggcagagggttggcaccccacggaggagggtttgctgagcgacctcgtgacaccccctagtacacacacagcccgtgtcggccctcctggttgcagaagaacatagcgggctggcagctggcagacagcagcggctctcacctgcctcctcacctggggaggggttcccagggtgggcctgagaaagtatgtggcagttgggggaggctcaggacctaccaaagccccattcattccccacctgctcctatcctcctctattccctgccctcac

SEQ ID NO: 33448 - DNA, 902 bp, Artificial sequence
  DNA replication origin
tcctggcagccaaggagagaggcgaaataaaagtcagagtctccttagtgcctcctcaccagtgcctgccggcttgtgacagtggctttgactgcatgcagaggtgtcttaagcgtgtgtgggagggagtcacatagctgcacaggtgggacgtatttcagagctgcctggaagccagggtgagaggggaaatacgttgacgttgaggctggtcagatgtatctttcttgctgtgtgtggccggggctcctgcaggggctcagccaggacagcgccgggcagtcaggcgtatgcggctgtcctccgcagggctccagggccgggcgtagccggcgtggggcagcagcagctggtcctgtgtgccgtcggggctgacaagacgctggacagccatcaggtagtcccggtggggtgccagcatcgggcaggggcagtggcctggcgcccacacgtactcgcgtgcccgcagtggcgagcggttcttgtagacgagctggatgcgcacctcatagcgggtctcctgggcctggtggtggtggcccagcactcgggcctggaacactgttgaggggacgtgctaagctggctggctgctcaactctgcgcaaatctctacgccccctcccttgccagaagagggactgagggtcaggtgggacctcgggatctatagggactagagtcaggatcacgtcagggatcaatgagggattagggtcaagaggcaaattaggatcagaagaaggggtcaagggtaaagtcagattagggtcagaggtcaggaggaggccaggttagtaggggctaagtcagggtagaggtcgggggtctcaccaaagtcactgccgcaatagtggagtagtcggtgggcgcggccgcgggtgtcagggcagggtgggcag

SEQ ID NO: 33449 - DNA, 1981 bp, Artificial sequence
  DNA replication origin
tgaagaatgagtaatggtgttaaaaatgaataatatgtaaggactcctaatataaagacaatgaatgaatgaatgaatgaatgaatgcagccccaggatacttgcctgcgagtcccaggttgctggacgcagagcacctacggtccagtcctggctctgcctcagcctcgatgtgtggctttggccaaatctctgggcttcatctgcccaaagtgatggttgcctgatgaagcttggtagagggggactggagctcgaacaggggtccccggcccaccgactcctcctgccctcagcgcccaaccagtgcgacctcaactgcctggctgaggggcacgccttctaccacagcttcggccgcgtcctggacggcaccgcctgcagcccgggtgcccagggggtctgcgtggctggccgctgccttgtaaggactcgtcaggccccgcccgagccccgcccacctcccactcaggccccacccatcctaggctccacctccgccctcctcccattagcctccaccccctccctaggctccaccgccttccccctccccttccaggccctgcccccagccccccttaggcacccactcccgggcgccaagcccatcctcctcccgccaggtcctgctcctccctaggctccacccccatcttccctccaggcctcgtcctcttgctcccaggcactgccctttccccaggtcctgcccctcccagcgtcagtgacgccgcgcctgtccttcaccctttagagcgccggctgtgatgggttgttgggctcgggtgccctcgaggaccgctgtggccgctgcggaggcgccaacgactcgtgccttttcgtgcagcgcgtgtttcgtgacgccggtgactacctgccccgccctccctgcacacacgtcagagtgggccctttaacgagccgtggcccggaagcaaatttccgtgctgattggccagtgtgcggcccagcccccctttctcctcatcctgattggctactgacagattgtcccgcccttccccaggacagatggggttttaaccctttccctgccacactgaagcaatagtaattgtaactccaaacgtttacggagggttttccggttcccaggaccctggctagctgtcttacccgcagtagctcattaaatcctcaagtcatcgctcaaatacacccccactggcaccccaacaccctcctaccctcccacccaggtgccttcgctgggtactggaacgtgaccctgatccccgagggcgccagacacatccgcgtggaacacaggagccgcaaccacctgggtatcctaggatgtgaggcgagaggcacccggctgggcacccgggggcggttgtccctgtttacagatggggagactgaggcctgaggaggggaccccagggtctgggagacgagacgacaggttcctgagggctgactgttcccttgcagcactgatggggggcgatgggcgctacgtgcttaatgggcactgggtggtcagcccaccagggacctacgaggcggccggcacgcatgtggtctacacccgagacacagggccccaggagacattgcaagcagccgggcccacctcccatgacctgctcctacaggtgccactgggcctccaacagggtcagagggggtcggctggggacagaggggagaggctggggacagagggtaggagtggaggtgactggggccagaagggggagtctggggtcagaggggagaggctgggacagagcatcagaggggggagggtggggacagggtcagaggggatcagctagggacagagcatcagaggagggaggctgggggcagacaggatcaaagtggggaggctggggtcgtagggtcagaggcaggaggcaaccccagcctcctgtgaagctccctgtgtcccctcccctgctccaggtcctcctgcaggagcccaaccctggcatcgagtttgagttct

SEQ ID NO: 33450 - DNA, 1513 bp, Artificial sequence
  DNA replication origin
gcacgaaaaggcacgagtcgttggcgcctccgcagcggccacagcggtcctcgagggcacccgagcccaacaacccatcacagccggcgctctaaagggtgaaggacaggcgcggcgtcactgacgctgggaggggcaggacctggggaaagggcagtgcctgggagcaagaggacgaggcctggagggaagatgggggtggagcctagggaggagcaggacctggcgggaggaggatgggcttggcgcccgggagtgggtgcctaaggggggctgggggcagggcctggaaggggagggggaaggcggtggagcctagggagggggtggaggctaatgggaggagggcggaggtggagcctaggatgggtggggcctgagtgggaggtgggcggggctcgggcggggcctgacgagtccttacaaggcagcggccagccacgcagaccccctgggcacccgggctgcaggcggtgccgtccaggacgcggccgaagctgtggtagaaggcgtgcccctcagccaggcagttgaggtcgcactggttgggcgctgagggcaggaggagtcggtgggccggggacccctgttcgagctccagtccccctctaccaagcttcatcaggcaaccatcactttgggcagatgaagcccagagatttggccaaagccacacatcgaggctgaggcagagccaggactggaccgtaggtgctctgcgtccagcaacctgggactcgcaggcaagtatcctggggctgcattcattcattcattcattcattcattgtctttatattaggagtccttacatattattcatttttaacaccattactcattcttcattccactgaacacctactgttttccagacactgttccaagctctaggatacagaagcaagaattcaatcagtgtgcagatggatggccttaaaaaaggccaggtgtggtgtctcatgcctgtaatcccagcacattgggaggctgaggtgggcagatctcctgaggccaggagttcaagaccagcctgggcaacatggcgagacccccccgtctctaccaaaaatacaacaataaaaatttagccaggcttggtggtgggagcctgtaatcccagctactccggaggctgaggcaggagaatcgcttgaaccagggaggtggaggctgtagtgagccaagatcatgccactgcactccagcctgggtgacagagcgagactccatctcaaaaaaaaaaaaaaaaaaaaaaaaagaagatctgagcatctggcccaggcaccagcaagtacccaatgaagtgtttgtccagtactgactggactgagtcccgcacaactgagctgtgtcgctggtcctccctgggcctcagtttccccttctgcctggaagtggggcaaaatgagctgtctgatcaaacacaaaggccgacagccctgatctccactcctccttctccagctccttctggctcccatttccctgagcctggctggtggaccctgcc

SEQ ID NO: 33451 - DNA, 1315 bp, Artificial sequence
  DNA replication origin
agccagtcagggcagagccgggacacaaccctgtgtctctggcggtggctctatggactcggcccctctgttccccaggccccacctcttccagaacctcctgctcttcctgtgggccctgctgaactgtggtttgggggtcagtgctcaggtaagggggggcatgagcccagggggtggcgagtgggaatggggacccagtcagcagtgtggggtcaccagcgtccccctacaaggctgaccgtgcctctgtctccccaagtagggtccgggcgagtggaccccgtgggtgtcctggacccgctgctccagctcctgcgggcgtggcgtctctgtgcgcagccggcgctgcctccggtgagcggggcccggagggggtccctgcccctcctcccccgccggcccagcccggcccctggccgcaccctcggcctgcccacacatgctgtgccctttaatccccctgatcccgctggaatgcgggtggggttggcgggggcggagggtggaaggccagccctgggagggggtccctgggggttctcgccacactctgtctcccttcaggcttcctggggaagaaccgtgctggggagactcccatgagtaccgcctctgccagttgccagtaagccctgcccacctcccagaccactctcccaccccagactgcctgaagcccaccacctgccccttggggttgtcccagcctctggctcacctatctctgtccctaggactgccccccaggggctgtgcccttccgagacctacagtgtgccctgtacaatggccgccctgtcctgggcacccagaagacctaccagtgggtgcccttccatgggggtgagtagtctggtctcctgtggtcagaattggtccagagcgaacaactcattagtctcagggagagggtcttggagggttgcaaagagaagagggtattagtgctagggctttgaaggatatgtaggagttagtgaaacagaaacagcatatgttaggcgtgaaacaggggcagagggaagcagggttcattctgcacagggctgaacacccaactaaggattgacttagagctgtatccagaggccaacacttctcaaacttatcccagtagcaggaaatgttgctgcattgagctgaaaatagcgagttatataactacgtgcccgggtcagtgcgcctccagatttcagggagacaggcagcttcacacgccatggggaaggcagacacagatataagaaaagcctagaatggacaaagtgccatccatcaacctcatttccttccttccttccctttcttcctt

SEQ ID NO: 33452 - DNA, 1411 bp, Artificial sequence
  DNA replication origin
gcggccattgtacagggcacactgtaggtctcggaagggcacagcccctggggggcagtcctagggacagagataggtgagccagaggctgggacaaccccaaggggcaggtggtgggcttcaggcagtctggggtgggagagtggtctgggaggtgggcagggcttactggcaactggcagaggcggtactcatgggagtctccccagcacggttcttccccaggaagcctgaagggagacagagtgtggcgagaacccccagggaccccctcccagggctggccttccaccctccgcccccgccaaccccacccgcattccagcgggatcagggggattaaagggcacagcatgtgtgggcaggccgagggtgcggccaggggccgggctgggccggcgggggaggaggggcagggaccccctccgggccccgctcaccggaggcagcgccggctgcgcacagagacgccacgcccgcaggagctggagcagcgggtccaggacacccacggggtccactcgcccggaccctacttggggagacagaggcacggtcagccttgtagggggacgctggtgaccccacactgctgactgggtccccattcccactcgccaccccctgggctcatgcccccccttacctgagcactgacccccaaaccacagttcagcagggcccacaggaagagcaggaggttctggaagaggtggggcctggggaacagaggggccgagtccatagagccaccgccagagacacagggttgtgtcccggctctgccctgactggctgtgtgatcttggaaagtaactaaacctctctgagccctacctctcgtctctgaaaaacggggtaatagagcctcccttacaggaaagttgaggggtcctgtggatcaggtaaagaagacaggagacgtggagcccggtatggagaggaagaactcagaatgtcatctgcaattattattgttgttagttagtttgtttttgagacggagtctcgctctgtcgcccaggctggagtgcaggggtgcgatctcggctcactgcaaccctccccggttcaagtaattctcctgcctcagcatcccgagaagctaggattacaggtgcctgccaccacgccggactaatttttgccgttttagtggagacagggtttcaccatcttggccaggttggtctcaaccttctgacctgaagtgatccacctgctttggcctcccaaagtgctaggattataggcatgagccactgcacccagcctacaatattattgatatgtgtattgtgctataatgcagacagtaggtgcttaatcgatgcttgatgattggagggatcattcaaaaatagtacacaggtgcctcctagggctggggccccctccccgccctccccac

SEQ ID NO: 33453 - DNA, 1576 bp, Artificial sequence
  DNA replication origin
gagaggggtgaggggcaggaccaggggagggggctgtgaccggggatggggacgccggtgggacgcaatccgggcgtcggcggggtaggggcagcgcccgggactcccagacccagggcggggtgacctcggttcgcgcacattcccgggccctgagcgcggcgcccggaatagcagccccggggcagaggagggcggtcagtccccgcgccgcgcccccgcccgagcctgccaaggtcacccggacccgggcgcccgacaccagcctgcggctccgggacccctgcgctcgcgtccgccgggcagtcccctgccgcagatccgcgcccgccgcgcgagggcgcccggggccgccgcccctcctgacccgggcctgggcgcgcctgcggaggccgcggtgggagggaccgtcccaggctccccaccccgcccagcaccttgggccccgccgcttccgctcgccctggggccgctcagggagccgggacgcgctgcctgggctccgcgcagccggtaagtccatctgcctatcctcccactttctccgggggaaactgaggcccagaggtgcggcttgccttgagatccctccgccagtccgggctgcagcccacacggggaggggagagccttgattctgggcagggcccattgaggagggggtagggtggtccttgtagccccccacttttcaccacctagacccccactcctcaaaccaggcttagagtccggtgggggtggtcagaaggtcaagccccctccccctgttttttttggttggttggttgtttttgagactgagtctcactatgtcgcccaggctggagtgcattggccccatctcggctcactgcaacctccgcctcctgggttcaagcgattctcctgccttagcctcccaagtagctgggattacaggtgtgcaccaccacaccgggctaatttttgtgttttagtacagatggggttttaccatgttggtcaggctggtcccaaacttctgacctcaggtgatccgcctgtcttggcctcccaaagtgctgggattacaggcgtgagccaccgcacctggcccccctccccttgttttaagtttctggtgcagacttcttcctgcttcctgggccagcccaggctctaggctcagagaggggcacggatgcagcagaccacacagctgtctcagtacctagagatacccaggaccctagacccttggtgcctcagaagtccaaatgctggagccagggaaacagggtccaggtgggacccagcctcttccccagctggtgcccgggccggggctcacccacctgccttcaggctctgctggcagcaggacgccctggctcacttggcggctgcttcccttcccccctctttccccctgcaggctggggtcatgaggagggtgtggatggcaagtgacttcatccctgccctgacaggatggagaaactaaggcccagagaggcagtcagcctcctccccttccctgctccagcctcagcagtggccccttccctccacgggctgccccggagctcagtcccaccccctccgccgatgaggc

SEQ ID NO: 33454 - DNA, 2534 bp, Artificial sequence
  DNA replication origin
ccttggcaggctcgggcgggggcgcggcgcggggactgaccgccctcctctgccccggggctgctattccgggcgccgcgctcagggcccgggaatgtgcgcgaaccgaggtcaccccgccctgggtctgggagtcccgggcgctgcccctaccccgccgacgcccggattgcgtcccaccggcgtccccatccccggtcacagccccctcccctggtcctgcccctcacccctctcgcggggggtcgacctgctcgtggatggggaccctggcgcgcctgggctcccatccgggggttccccgacccaggtcccggtcacccccagcgcagggccccagcgcactggggagaggctcggccccgtgggccgcgcgcggggggcggagagaccctcccagctggcgcattcccgggcgctgctgtcaccaggggacgcgccccaccccgcctcccgccctccctgccgggccccggggctgccagcggggcttcagagccagacccgggtccaggcggtccctctccctcacagccgcggccacaccctctccggcctcagtttccccatcccagcagtgggcccggcagggatctccaccgcgaaccttccatctggaatccggctctgcgcggaccggcaacgcgagggggcaccccgggactccccccaccccaccctttcccgccgggcgtctgtgagccgccccgtgcccacccacgcagggatgagaccaggccctgggttctgggctccaccagtttctggtgtcgccccacggcgccccctggcgggcgggctgagggactggggcactaaaggagggggtggagggactgtcctgctccctgggctccacccaggctcggtctgagcaccccctcctccaggaagcccaccctgctgtcccacagcgctgaccacagggagagaggtttgctggggacatacagggtgttgctggtccaactcagtctgccctccagcctgtagcatgtcagcagagccacccatatgccatttattgagcacctactgtgtgcacagctgtgaacaacccagccagtcccaggccagcgggtaaggcagccccctggaatgtatgaccccccaccttctgacctggactattggagaaaatagcccaggcccaccactgatggccccaggttggggggtggtggttgcggggatgtcaagaaggccctcactgaaggggtcaagagagaagggcaggccgggcgcggcgcctcatgcctggaatcccagcactgtgggaggccgaggcaggcggatcacctgaggtcaggagtttgaagccagcttggacaacatggtgaaacccagtatctactaaaaatataaaacttagccaggcatggcggtgagtgcctgtaatcccagctactcggaagactgaggcacgagaatcgcttaaacccgggaggcagaggtggcagtgagccgagatcacgccactgcactccagcctgggagacaggcgagactccgtctcaaaaaaaaaaaaaaaaaaaaaaaaggaaagaaagaaagaaagaagtcagctcaggacatgtgtcaatgtgtcattaggacaattgtatcctcctcagatgtgccccattcccagatgtccagtccacagagctccactgggagtgcagacagcaggccctgtgccccgcagggaaggtatacagaaagcacagcgcccacagggagcacacacagcaggcattatgctctgcaggaagggtatacagcaggtgctgcatcttgtagaaatgcatagagtagactctgccctgcaaaggagtgtatacagtagatatggcaccttcagaggagtgcatacagcagtcactgcatcctgtagagagtatatacagcaggtgctgcatcctgcaaggaaggtatacagcaggtgctgcatcctgcaaggaaggtatacataaggcgctgtctcctgcagggagcgcatacagtaggcactgagttctatggaaagtgtaccccgcagcccctgttccctcctgggagtgcataccgcagccactgcaccctgcgtgggggctctagagctggcaagattggcagaggtggtggtgaagatgtggagggctgccccccacccccagttcttgtcccctaccgtctcccacctctgtcctctggatgtccctaggaggaggctgggagctcagcctaagacacccggtgtaggtggagggggtggctgctgaggctcagaggctcctggggtcccagttgggcggggtcccagcttactacattcccctgcccttgcctggaccctgacccaggaatcagccgagtccccctactctgaatttcagcctggaccccctccttgaggcagcgtcagggctagaggggagactgagacgcgggtcccggcggatgtggatcaattaggttccatttccttcatggttgtatggccttgaggcttaaggaatgccgcgatctgctgtgtgactgggctacagtgaacagtatggtaccccacactt

SEQ ID NO: 33455 - DNA, 2147 bp, Artificial sequence
  DNA replication origin
gtgggggtggttgctccaagccctgccccagactcaggtgcacccctttcctggtgaggtcttccctcacccttccacccagcctgggacacaaaaacgggccttgtccccattgtacaggcaagacattgagacccagggacgcaaagtcgctcagtcagcccaggaaagggcagcgctgggtttgaatcccggcagccgcccctggacgcctgcggtattaatccccaaatgttacataacaccaggaatggggaggggttaccaggctccgtggggctggaattttccagggaccagatttcggaatctggcccggccacaccactagggacaggaaacaccttctgagccgtcacgtgtccacctggtgtcacgaatggggcccccgtgcattggacggggctgagctcgggcacctttgcggggtttctggtcccagggccagggcggaagattcctggccagcctggggccaccgggttgcagctggggagcccaagtcccctgctgatgagaatcaggtgaggtggctgcaaggtgggctgctcggggcccgagtgtctgagctgtcacacgactgtcaccctggaatcctccaggggcagaaagccagttccttgcttttttttttgtttgtttgtttttttgaaagagagtcttgctctgtcacccgggctggagtgccgtggtgtgatcttggctcactgcaacctccatctcccgagttcaagcaattctcctgcctcagcctcccaagtagctgggactacaggtatgcaccaccacacccagctgatgtatttatttatttgtatttttagtagagacgggtttcaccatgttggtcaggctggtctcaaactcctgacctcaaatgacccgcctgcctcggcctcccaaaatgctgggatgacaggcgtgagccaccaggcctggcttccggttccttcctgatagcaccagtccatcctggcatcagttcaggcatttgttaagcacttactgcatatgggcctgtgtcaggctgtgcgagcccaaggcagacccagccctgtcctcgtaaaaggaccactgcttaacggactgcaagaacgtccaagacttcaccaagtcaggggtcaaggaaagctttggaggtggaaggaagtgagccaggcccgttctgggcagtaacttgtccctgaggcaggtgctgttcttagccctgtgttacagatgaggaaactgaggctccgaacgtccggtgccagcccaggatcaccgcggactgcatgtggctgagcctggagtctaggtgggagtgaatccagagctcctggtccccccacaataggtctgtccctctttcaggctgccagccccagcagtcccagggagcagtgccaggcaaggccctcgtgctgaggcgggtgtctgagcttcctagggggaaagaaatcagagttcctggcccagagcctcgcagcccgcctgtcagctgatgctccttgcacagagaccggctcgccctccctctcccctggccgcccgcggcttttcctggctgagactccactatggagctgggaaaggcctcctagtcccagcctgtgcccctctgagcagggactctgtcccccagcctatgtgagccctcctaaccagctgtccccatcccccgccctgccccaggctggctgctcaccacagccttgccccaggggagttttggggggctaaggatgaatgcccccaaagacacccctcagctctccctgaaggcctcttacacagattaggggatggggagggactgctgttgggtacaagtctccttttgaggatgaactgttttagaattagatagagggggtgcttgttcaacactgtgagggcagtaaatgctgctgaattgtgcattttaaaaagggtaaattttatgttatgtgaatttcacctcaaaggttaaaaaaaaaaaaaaaaaaaaagaattggccgagccctgtggctcacacctgtagtcctagcactttgggaggtcaaggcaagaggatcacttgaggtcagaagttcgagaccagcctggccaacatggcgaagccctgtctctactaaaaatacaaaaattaatcgggcgtggtggctcacacctgtaatctcagcac

SEQ ID NO: 33456 - DNA, 1208 bp, Artificial sequence
  DNA replication origin
gaccgcgcaggatcgcccgcgcgccccgggaccccagcccagcccggtccggccccgtcgcggactcggggcgcgggcctcccaccttgccgatcagcttcccgcgcctgtacacgcggcccgagcccgggtctcgcaggaaggcggcgaccagggggcgactcctgcgccgccgccgcggccggggctccatcgcgcggactctggcgcagccgggccgagaccaccgcgctgcggccgctccggggccgctctgagggcgcaggagccgccggggagcgttttattggccgcgggggcggggagggggcggagcccgggcgcaggtccagcccggggaggggcgggaggtgcccggccgtggagtggggggcgcgtgagcggcggggacgccgcggctggggaagttccacggaccagagcgcgcccgagtcccgcacgccaaccgggcgccaggggccgcgctcagcccgcgagctcctccgaccctgcacacccgggctggctgggaaccgctgatacgcccgctttaccgagcgggaaactgaggctctctcgcgcgtggggggttgggggcttccgggggcttctcccccacagtgcgcttgaggtatgagcctcgacgttctgaatgtgtgccatttcgggtcctccctgctggcgggtccctggggcccacatgaaaacctggggcttgatggccctgggcactggggagccacagcagaattcggagcggcagagaagcccagcgtttgtgatgctggggctggtggggagggcggtgaggcctgggacagggacccaggaggcaggaccggggcttggggacgcatgggctggggtcctacagtgtagtggatgtcccatatgagggagcttcagcccggagaagggatgggctgtgtggagcagcaggtggaccctggctggggtttgcacggacagccaggtggggacgtccttgaaatggcgacctcagagagcatcagaaacctcagagaactcagagaacagctgggtgggaagacagtggggggcttgagactcccccggaatcgtgggggtggttgctccaagccctgccccagactcaggtgcacccctttcctggtgaggtcttccctcacccttccacccagcctgggacacaaaaacgggccttgtccccattgtacaggcaagacattgagacccagggacgcaaa

SEQ ID NO: 33457 - DNA, 1327 bp, Artificial sequence
  DNA replication origin
cgcgccccccactccacggccgggcacctcccgcccctccccgggctggacctgcgcccgggctccgccccctccccgcccccgcggccaataaaacgctccccggcggctcctgcgccctcagagcggccccggagcggccgcagcgcggtggtctcggcccggctgcgccagagtccgcgcgatggagccccggccgcggcggcggcgcaggagtcgccccctggtcgccgccttcctgcgagacccgggctcgggccgcgtgtacaggcgcgggaagctgatcggcaaggtgggaggcccgcgccccgagtccgcgacggggccggaccgggctgggctggggtcccggggcgcgcgggcgatcctgcgcggtctacgcggcgcgtccctgcgagcgcggggtctggagcgggcgcgcgtccggagccgcggggcctcccgtgcggggtttcgcatggcgggaaccgtgttgagcgcgctgtgcgtcgtgtccgtgggttgcgtgtccggggtgtgggcgtgcggctcggcctcgggatgcgacgctgtgttgcccctgggtgtgtgtgcgagcctggcgagggtctgagtgtgccgcgtctgtgcccgctgcttccaagtgtctgggtgctgtgcggtgttcgtgtgtgtgtgtgtgtgtgtgtgtgtgtgtgtctgggtgttgtgttgcttgttcacctgttgtttgtgcgtcatgcctttgtgtgtccagtcattgtgttgtgtgtctgggtgttgtgtgttcatgtggtgtgcttgtgtgtttgtgtgttcatatgtggtgtgtctaggagttgtgtgttcatgtgtttgtatctgtgtctttgtccatgtgttgtactgtgtgtccaggtgttgtgtgttcatgtgtttgtgtgttcctgtgctgtgtctgggtattgtgttgtgtgtccacacgtggtgactgtgtgtccagacattgtatattcatgtgtttgtgtgttgctgcgttgtgtatctgggtgttgtgttgtgtgtccatgcatggtgactctgtgtctgggcgttgcgtgtttgtgtgtcgtattcaggcgtggtgttgtgcatccggtgctgtcttctggtccgtggcctctatgcaccaggcgtggatgtgtctgtgtctgtgtctctgtgccttcttgtgtgcatcatgtcttgtgtgtccaggcgggagggtgggagctgtgtgttgttttttccccggtgtgtgtgtggagagacctggacgcgcctgcgtccctggctgccctgtgcctctgtacgcgctgccagcttgcacacccgtgcacacctgcccact

SEQ ID NO: 33458 - DNA, 1050 bp, Artificial sequence
  DNA replication origin
ggggtggatccgtgcccacctcccgacgcccccgcccacagttccccttcctggcactcactgagcttcaggtcgcggtgcaggatgcaccgctggtgcaggtagcgcaggccgctgaccaggccccgcaggtagtcgcgcacttctggctccgtcaggatctgccgcgccctcagcacgtgggccaaagactgtgggtgaccagcggccccggattagaaggcaaatgtaagctcagcctggccaaggtggtatggctgattatgggatgagcacaggtgagcgcaggtgcacacaggtgagcaaagatgacccaccccaataggagcatgcgggttcagatgggcccaggtggccactgagggggggcacgaacctttccccacgggcacagctgcccggccccggccccgcacctggcaccaccttgagggtgaacacggcgctggtggacatgcttgtcagcttgagaagggccaggtgattaggagtgaacgcagagggggcatattctggcacaggtggacccaggtgggctcaggtctacttaatgggcacagtgagttcacggccacggtgggcacagcagggtgcaggaggggcgcaggtgaccacaggtaggcacaggggcatgctggtgggtacaggtgggcatgggtgagtccaagggggccaagaagaagcaaacacattctgatgggcccaggcggtcacaggtgagtctgagacgggcctgatgagcacagcgtaagctgggcccaggtggatcaagagagcctgggtgtgcccaggtgagtaaaggatggacacaattggccctacgtaggcgtaagaagcgctggcgaatggacagcagagggcacacaggatggtacggggggcagcggcgaggtgcagatggacacggggtggacagagacgggcacagctgacatgaatcctgccctctccccgcccctgggcacctggcggctgcagtactccagcaccatgtacacgtggtcgcggtcagcaaagtgtccgtggaaagccacgatgttgcggggtcgc

SEQ ID NO: 33459 - DNA, 862 bp, Artificial sequence
  DNA replication origin
gcgctacctgcaccagcggtgcatcctgcaccgcgacctgaagctcagtgagtgccaggaaggggaactgtgggcgggggcgtcgggaggtgggcacggatccacccccatgcgcaatgcccctcccactgccaggtaacttcttccttaacaagaacatggaggtgaagattggagacctgggactggcggccaaggtggggccagggggccgctgccacaggtgagagccggggggagggctctgagcagtccgtccgggtgggcacggctggccctgaagtctggcacggggatcccagccttcctgagccccccatgacgcccttcctagagtactctgtgggacccctaacttcctggaccctgaggttgtctccagaaacggtcactcctgccagtaggacatctgggctctgggctgcatcatgtgagtggggtcctggagaaggtgggcagggcctccggggggggcaggtgtggcggggggggagcctgcacggaacaggtggggaccgttgtgcagggtggggcgcgtggaacaggcacctgtcgccaagtgtgcagtatgaacaggacgtgtgtggggaggcgtgtgtgagggaggacgggggagggtgtgcacagagaggtggacaggtgtgggcaggtggcagtggcacaggcaggtcagggcgtatgtgtacagggatacagcgtgtgtgggcgcagggcaggtgtgagcaggcatgggatagcattggaaggtggaggccaggcgcagtgactcacgcctgtaatcctagagctttgggaggccgaggcaggaggatcgcttgagcccaggagttcaagaccagcctggccaagttggtgaaaccct

SEQ ID NO: 33460 - DNA, 767 bp, Artificial sequence
  DNA replication origin
caggtgggaggcgtgggcaggtgggaggcgtgggcaggtgggaggtgtgggcaggtgggaggcgtgggcaggtgggaggtgtgggcaggtgggaggcgtgggcaggtgttgggcaggtgtgggcgggggtggtacttacagggtggccggcactgggtgagcagccgctggcccaccttccggaagatcctgcccagaggcgggggtatggcgaagatggggggactgtggcaggagtgggccggcagccggtctggagtgaaaccctttggatggggatttggggttatccccggcttaggtcacccagcccctgagcacctgggttacctgggacagggcggggcctccctcggctgagcagggcaggctctggctcatcacctgccagggaccccacgccagggaccccacgccgaggaccgccgcccacctgtgtgaagaagtcgtcctgcagcaggtggtccaggctgggccgctcggccgggttgggtgctaggaggtgcacgatgaggcggcgcgcattggcagacaggtgagcgggttcggggtagtggccctcacggatgttttggtacatctccgacaggggtgaggccatgaagggtggggtgccagtcagcaccgtgtacctgggccaggtggggggcaagaacctgggtgtccaggcatcgctcagagctacccctgcacacttggccagacctgcctacacagcttagctgtgcaacccatatcggcttcctcatctcccaacatccgcctgc

SEQ ID NO: 33461 - DNA, 1052 bp, Artificial sequence
  DNA replication origin
ctggcccctgcctgtgccctccgtgctctgcacacagaggcactgctttccccttgggaggcagcctcggagtgtctcggaggcatacagtaggtgctcaataaatgtgatggactgaagccatggatgggacccttcccatggcctcgagcccggcccttgggaaagcccaggtgggcacatttggacacaaatggatcccagctctgatgcgtcaggacgggactagggggagggggccgggcttggagaccccagaaggggttcagagaagccggcatgggggagggggttttagcaggggccagcatgccctccacctgtgtctccccgtgtcccccaccccgatgtctcacctcgccgtcccactccatggagtcagggtctggcccaccttctcctggacccgaggcctctttaggcgtgaaggggcctgagggaggcacaaggccttggagggggcacagcctgggccccaagctgggggtaggggggcacctgccacccacacccacccctgatgtggagacagagcggagcaggtggcagttgtgggcaggtgggaggtgtgggcaggcgggaggtgtgggcaggtgggggcaggtagcaggcgtaggcaggtgtgggcaggtgggaggtgtgagcaggtgggaggtgtgggcaggtgggaggtgtgggcaggtgggaggtgtgggcaggtggggggcgtgggcaggtggggggcgtgggcaggtgggaggcgtgggcaggtgggaggcgtgggcaggtgggaggcgtgggcaggtgggaggcgtgggcaggtgggaggtgtgggcaggtgggaggcgtgggcaggtgggaggtgtgggcaggtgggaggcgtgggcaggtgttgggcaggtgtgggcgggggtggtacttacagggtggccggcactgggtgagcagccgctggcccaccttccggaagatcctgcccagaggcgggggtatggcgaagatggggggactgtggcaggagtgggccggcagccggtctggagtgaaaccctttggatggggatttggggtta

SEQ ID NO: 33462 - DNA, 843 bp, Artificial sequence
  DNA replication origin
gtagagacggggtttcactgtgttagccaggatggtctcgatctcctgacctcgtgatctgcccgcctcggcctcccaaagtgctgggattacaggcgtgagccaccgcgcctggccaagtttttttttttttaaattagccaactgcaagggtatgcatcagtaggtcccagctacttggatggctgaggtgggaggatcacttggtcccaggaggtcaaggctccagtgagccatgattgcaccactgcgctccagcctgggtgacagaacgagactctgtctcttttttttgagacggagttgtgctcttgttgcccaggctggagtgcaatctcggctcagcgcaacctccccatcccgggatcggggtagctgggattacaggcacccgccaccacgcctggctaattttgaattttagtagagacggggtttctccatgttggccaggctggtctcgaactcccgacctcaggtgatcctcccacctggacctcccaaagtgctgggattataggtgtgagccaccgcgcccggccttaacacaatctttctagcgggagtgacatgggggccagtggggaggtggctggactcatcaggtgggcagtggcggaggcctgggctgtgctggtgaccggggagggatgagaggggctgcagtgtggatagagttggaaggcaggaagggtggaccagctgtcagctgaggtgaagagaggacagagagccgcactgggcatatggataaggtgtaactagggcagagctgctctttaaagccaccattccagggggtgtaggtcaatggaagggtgtccactggcctgggctgtccag

SEQ ID NO: 33463 - DNA, 1638 bp, Artificial sequence
  DNA replication origin
ttgggaggccgaggtgggcagatcacgaggtcaggagatagagaccatcctgcctaacacggtgaaaccccgtctctactaaaaatacaaaaaaaaaaaaaaaaaattagccgggcgtggtggcgggcgcctgtagtcccagctactggggaggctgaggcaggagaatggcgtgaacccgggaggcggagcttgcagtgagccgagatcgcgccactgcactccagcctgggtgacagagcaggactctgtttaaaaaaaaaaaaaagtcagggtcttgctggaagactgtgggcaggggagcccccatctgagcctcagtttccccaggtgtacagtggagcacttggcctcccgaccccgagttcctgtggctggggcaggcactaggggccagactgggggctctgggtccagtgtccacttgtccttctggagcgccacggctggaggcaggtgcaggggtacccgtctccccttgactggtatcttaccctttgcaggtgagcttcagtggagtcccggcccaactggtgctgagtggcgagggtgagggtttgcagctcaccctctgggagcaggggtcccctggcacctcctactccctggacgtcccgcggagccacggctgcgcccccaccaccggacagcaccttcaccacgccctccgcatgctgcagagtatctagtgcccctgagggtcagagtggacccctgcatggtagtgccagggacccaggctccatttccattcctgtggctcccccagaggggctgtcctgggggagggctggggggcacacgggaggtgggttcttgccttgtggcatgactgttcaacccagactttgctgggatctcttcctttttcattaaagacaatttgaaatgctgtaggccatggtctgcctctctttgggggaaagcgtttgaggagctttggcaaagaaacgttgaccccacgtgacgttgcatcctccctgtttctcttagtggcagaggtgggttacattttcactaatgcagacattagcaccagaggccagtgtagtggctcatgcctggaatcccagcactttgggaggccaaggcaggaggatcgcttgggcccaggagtttgagaccagcctgggcaacatggcaagaccccatctctacaaaaaattagctgggcatggtggcacgtgcctgtagtcccagctacttgggaggctgagatgggaggatggcgtgagcatgggaggttgaggctgcagtgagctgtgattgcaccactgcactccagcctgggcgacagaacaaagaccctgtctcaacaacaacaaaagtagtaccagaagtggggttctgccataactccaaatctaaaacatgggacagttgcttaatgggtggacaggaaagaagccgacactgaggctggaaagatggctggctatgctccgggacacagttggcacaaccgtcacctgtgctgccctggggtggacggtgcactcatggacctgacctctctgggctgatggagcattggttgttagatcaaaatgtcataaaaggccaggcgtggtggctcacacctgtaatcccagcacttcgggaggccaaggcaggcagatcacttgagctcaggagttc

SEQ ID NO: 33464 - DNA, 926 bp, Artificial sequence
  DNA replication origin
agtcttgctctgtcacccaggctggagtgcagtggcacagtctcagctcactgcaacctccacctcttgggttccagcgattctcctgcttcagcctcctgagtagctggaattacaggcatgtgccactgtgcctggctaattttttgtgtttttaatagagacgaggtctcaccatgtttcccagactggtctccaactcctgagctcaaacgatccacttgccttggcctcccaaaatgctgtgattataggtgtgagccacctggcctggccttattttttaagagtcagggtcttgggccgggtgtggtggctcacgcctgtaatcccagcactttgggaggccaaggcgggcagatcacgaggtcaggcgatcgagaccatcctggctaacacggcgaaaccccgtctctactaaaaaattcaaaaaattagccgggcgtggtggcgggcgcctgtagtcccagctactcgggaggctgagtcaggagactggcatgaaccggggaggcggagcttgcagtgagccgagatcgccccactgcactccagcctgggcaacgccaggttctgggaccaatggacacacatctcaccaaagaccaaccagggaagaggaggcaggggtgccagcgtgcccagaggcagtgggaggagaggaggggggacagaggtcctgaggaggtttggctctgggtccccacccaaatctcatctcggttgtaatctccatggtccccacgtgtggagagagggagcaggtgggaggtgattggatcatgggggcggttccctcgtgctgctctctgatagtgagtgagatctcacgagatctgatggttttataaggcagttttccctgctcttccttcctctcttttcgcctgagtcaggtaagacacgcttgtttccccctgcaccgt

SEQ ID NO: 33465 - DNA, 1247 bp, Artificial sequence
  DNA replication origin
gggtgaattggatggatgaatgggtggttggatgggggataggtgtgggtgggtagacgaatggatggatggatgggtgggtgggtggatggatggatggatggatgattagatgggtaggtggatggatgtgttgctgggtgggtgggtgggtgggtggttaaatggatggatgggtgggtgggtgaatggatgggtgggtggatggatgggtggatgagtggacaagtagatgggtgggtggatggatgggagggtgggtggatggatggatggatggatggatggatggatgggtggatggatggatgggtggatgggggggtagatggatgggagggtgggtaaatggatgagtggatgagtggatgaatggatggatggatggatggatggatggatggatggatggatgggtgagtgggtgggtgggtgaattgatggatggaggaatgggtggttggatggggggatgggggagtgggtggacgaatggatggatggatgggtgggtaggtgaatggatgggtgggtggatggatgggtggatgggtggacaagtgcatgggtgagtaggtgaatggatgggtgggtggatggatgggtggatgggtggacaagtgcatgggtgagtggatggatgggagggtgggtaaatggatggatggatggatggatggatggatgaagggatgagtgggtgcatggttggagatggatggatgggtgggtggatgcttggatggttggatggatggacggatggatggatgcgtggatggatgggtgggtggatcgttggatggatgaatggatgggtggatgggtgaacaggtggatgagtgggtgggtggatgagtgggtggatggttggatgggtggatgggtgggtggatgcttggatggatggatgggtggatgggtggacaggaagggggatgggtggatggatgggtgaatcaggagttcagaggagagagagattaattctgcccagtgaattctgcttggggatgctgcagaaggctagacagggctggttggatgtgggggtcaaagggagacagtatggcaaaggtgtggaggtgggatgacagggcacacgcagggaacaaagagtaatcagagaacaggtgaaaataacgggagatgatttcagaaagtgaattgggatatggtctttggtttcttcagtctcactcaccccctgcacagaactgtgatgggagcccctgtttttgctgcag

SEQ ID NO: 33466 - DNA, 2428 bp, Artificial sequence
  DNA replication origin
aaagtgagaatgtgattttatttgggaaaaggtctttgcagatataattaaggatctcaagatgaaatcatcctgaattagagcaagccttaaatctaataatgagtgttttttgtttttttttttttttctgtttggttttgttttgtttttgaggcggagtcttgctctgtcgcccaggctggagtgcagtggcgccatctcggctcactgcaagctccgcctcccgggttcacgccattctcctgcctcagcctcccgagtagctgggcctataggtgcctgccgccacgcccggctaattttttgtatttttagtagagacggtgtttcaccgtgttagccaggatggtctcgatctcctgacctcgtgatctgtccgcctcggcctcccaaagtgctgggattacaggcgtgagccactgcacccggccatgagtgtttttataagagagggagaggggccgggagcggtggttcacgcctgtaatcctagcactttgggaggccaaggtgggtggatcacgaggtcaggagatcatagaccatcgtggctaacacggtgaaaccccgtctctaccaaaaatacaaaaaattagccgggcgtgatctcgactcactgcaacctccacctgccaggttccagagattctcctgcctcagcctcctgagtagctgggattacaggtgcccaccaccacacccggctaatttttgtgtttttagtagagatggggtttcaccaagttgtccaggatgatctcaatctcttggcttcgtgatccacctgccttggcctcccaaagtgctgggattacaggtgtgagccaccacgcccagccgggagggactgttaacctgggtctggccacagctgtgcggagcggctgggttcggctgcaggccacacaccctgtgacctgggctgacttcgtgcctcagccagactgcagaaggccgcagggaggggcgggtgtgcggatgcccccctcccctctctgcaattgggtcatggagagaatgagagcagcccccaaggggtcgagggatcaaagatgggacaaatgtcaaaggggtggaggagagtcttttggaaggatatgagggttcctgcagcccccgggttccgatagagtgggcagaaggggatgattttgtctggtgctgcaaggattcagggggtgtcatggagcagctctgcttccggggagccccaagtggggtcagtttgtcacctaactgcaggggaggctggggagaggagaggcacctccacactgggaggaagctggacgtggtggcacacacctgtagtctcagctgctcgggaggctgaggtggaaggatcacttgagcaaagtgaggttgaggctgcagtgagccgagattacaccactgcactccagcctgtgtgacagagcaagactctgtcaacaacaacgacgaaaaaaaaaaaaaaattgggagaagagaggacatgacagagctaggcgcaaagaccctgggaggtggggtggggaattgcccggcggaagggaatggcaaagcttggggaggctgctgggtgacccgccagggcagggcccaagtctagactggccaggacctgctctaggcgtttctgatgtagtgatatagaggagctgaggccccccagccaggggccaggggtgtcaccatgctggtcccaggacttccggagacatccgagggatgagctcactcccactgcagggttgctcagctggcacatgagagtctgaagtgtctgtggcctttgggcacagcacaagagatggccagagatggattctgtttttgtttttttaagagacaaggtcttgctctgttgccctgtctggagtgtggtggtgcaatcataactcacagcagccttgacctcctggactgcaacgatcttcccacctcagcctccctagtagttgggaccacaggcacataccatcatgcctagctaattttttgtatatttttaaatttttgtatattttgtagagacggggattcttcatgttgcccaagcaggtctcgaattcctggcctcaagtgatccgcccgccccagcctcccacagtgctggggttacaggcatgagacactgcatccggtccagtctggattcttaaagttgctgcacgaggccctggatccagctgtgcctgaaagccaacttttccatgccaacctttccatcatcagagctaatagcagttggaacaactgaaactctaaccacctacagggaccacatttctgaccaaggagctggaagaattttctagaggggctgggcagcaatggcaaagcaaggatcccatgcattggcctctccatgtctcggcacagctcagggaagccaagggctgaggcctggcctgtgtcctgggcacaaagtctcattgctatt

SEQ ID NO: 33467 - DNA, 748 bp, Artificial sequence
  DNA replication origin
tccccccactgctctgggagccatgacagacacatggggccaccagatatagctcttcagggctggggttgagaccacaggctcgccgggtgcagtggctctcgcctgtaatcccagcactttgggaggccgaggcaggtggatcaggaggtcaggagatcgagaccatcctggctaacacggtgaaaccgcgtctctactaaaagtacaaaaaaaattagccgggcgtggtggtgggcgcctgtggtcccagctacttgggaggctgaggcaggagaatggcgtgaacccgggagacggagcttgtagtgagccgagattgcaccactgcactccagcctgggtgacagagtgagactccgtctcaaaaaaaaaaaaaaaagaaaaaaaaaaaaagaccacaggctggacccatggtgagctgtcccagcgcgccatcccaaaacagccaggaagcccctgggtgtcaggatgggccactccggggacaaggaaggggccgggcacacaggctgcaggcttggggagtggaccttggggaggggcctgggacttagaacccaccagggaaagagaagcacgtgtggaagagaggcctggagagcttccaggaggaggcgaggaggagagaggaaccaccagagacgcacacctgagttcaagcccagccctacccaggcccctggcctggaactccctcctccgcaaaacgcagggtgttcgaggcccaaactccctctcggtgaga

SEQ ID NO: 33468 - DNA, 1023 bp, Artificial sequence
  DNA replication origin
caggtgtgcgtctctggtggttcctctctcctcctcgcctcctcctggaagctctccaggcctctcttccacacgtgcttctctttccctggtgggttctaagtcccaggcccctccccaaggtccactccccaagcctgcagcctgtgtgcccggccccttccttgtccccggagtggcccatcctgacacccaggggcttcctggctgttttgggatggcgcgctgggacagctcaccatgggtccagcctgtggtctttttttttttttcttttttttttttttttgagacggagtctcactctgtcacccaggctggagtgcagtggtgcaatctcggctcactacaagctccgtctcccgggttcacgccattctcctgcctcagcctcccaagtagctgggaccacaggcgcccaccaccacgcccggctaattttttttgtacttttagtagagacgcggtttcaccgtgttagccaggatggtctcgatctcctgacctcctgatccacctgcctcggcctcccaaagtgctgggattacaggcgagagccactgcacccggcgagcctgtggtctcaaccccagccctgaagagctatatctggtggccccatgtgtctgtcatggctcccagagcagtggggggatgaccacggctcaaacgtccttcacagaccaggatgcatcggggtcaaacctgggacgggcatttccaggcctcagtttccccatctgcacgaccgctggacggtctgttgggatggatcccacacacccagagagctgggcagatgtccctgaggaaggacagcctgggtcccctttctctgtgggatccatggttgaacacccacagggatggggaggacctgaggtttgctcacggggagcccagctagaccctcccccacagacccaattccttcgtctggaacaagggacagtgcctggtcggggtgagggcctggaccacggaactggggggttgaggggctggatccgggtgtcccctgcc

SEQ ID NO: 33469 - DNA, 2344 bp, Artificial sequence
  DNA replication origin
aggcggaggccgccgggctcgggcagcgtgggcgagtggcggggggtcccggccccactgctgcgccgggcgccggcggcgggaggtcccggggctccgttgaccgtggagcagccgctgaaggcgggcaagggggcggcgcgctcaaaaggcgcccagatggtggccgcggcgggcacggtcaggtccagcgccaggaagtcgaagtcgaagccgaagtcgcagtcgtcgggggcggccgtccccaccggggcaccgggaccctccgcgccgaaggcgaagcccccgttgccggagccgctgtaggggctggcggggcctgggtccggcacggaggggccgccgcggctgcccgcgtagaaggcctcgggggcgctgggggcgcccagggccgtgtccccgcggaggccggccgtggccgtggggggccgtcgtccctggttgggggtcttggcccagaggctggcggccgccccgagcaggtccaggcagacgtcggtgccgttggcgtggaagtcgctgtcggggcccgcgtcggtgaaggcgccagtgcgcagcgtgatgtgcgcctcgatctcctcgcgcgcgcggtccacgttctcgggcatcccagtgaccgcgaacaccggctccttgtcgcgcccgggcgtcacgatgtaggtgtgcgtccgctgctggatgcgcttgatggtggcgcccttgggccccaccaccagccccaccacccggtagggcacgcgcacctggatggtggtctgtccgggaaggttgggcgggccctgggcggcgccgggcagacccccggccttgctgcgcgtggcgcggatgatggagaagtgttcggccgccgacaggatctcacgcttggccatctccacgtcctccttccggccggtcacgatgaagaccggctcctcgccccgcactggggtcttgatgtaggtgtttgtcttggcccgcagggccttgatcttgcagcctgtccgggagggaggggaaggacaaggtgacccagagccccctgcgcagctcagccccgctgggcatgcaggctgcagggccagtgagggagcccctacctcccagcctgtgcccaacaacactttatcctcagacacgccacgtcccttcttccctcagcctcagtttcccctctgggctcgagtttggcctaaaagcaagacggcaaggggaccctgttttaggttgaaaggtgtgcgccataatttatgttcccctggaaccgcagtgtgacggctggggtgtgaatgtttcccccaagttcacaagctggaccctaatatgcggcgttgacagtattaatttaatacgtagggtcggctgggcccgtggctcacccatgtaatcccagcactttgggaggccgaggcaggtggatcacttgaggtcaggagttccaaaccagcctggccaacatggtgaaaccctgtctctactaaaaatacaagcaatcatccgggtgtagcggcaggcacctgtagtcccaggtacttgggaggctgaggcaggagaatcacttgaacccaggagacgaaggttgcagtgagccaagattgcaccactgcaccccagcctggacgacaaagcaagactccaactaaaaaaaaaaaaaaagcggggtgcagtggctcacccctgtaatcccagcactttgggaggccaagttgggtggatcacgaggtcaggggctcaagaccagcctggccaacatggtgaaaccctgtctctactaaaatacaaaaaattagccaggcgtggtggcaggcatctgtagtcccaggtactcgggaggctgaggcggaagaatcgcttgaacctgggaggcagagactgcagtgagccgagatcgcacaccattgcactccagcctgggtgacagagcgagactgtctcaaaaaaaaaaaaaaaaaaaaaaaaaaaaaaaaaaaaaagccgcaattagcaaggtgtggtggcgcacgcctgtaatcccagccactggggagggctgaggcagaaccgcctgaactcaggaggtggagggtgcagtgagccaacatcatgccactgcactccagcctagccacagaccaagactccatttcaaaaaaaaaaaaaaaaaaagagccacagtggcagggtcagtggctcacacccgtaatcctagtacttcgggaatctgaggcaggaggatcactggagcccaggagtttgagaccagcctgggcaacacagcaggaccccatctctactacaaacaacaacaaaaaattagccaggtgtggtggtacacacctgtagtcttagctactcaggaggctgaagtgggaggatcacctgagcc

SEQ ID NO: 33470 - DNA, 1845 bp, Artificial sequence
  DNA replication origin
gcccgccaccacgcccggctaatttttgtatttttagtggagatggggtttcaccatgttggtcagtctggtctcgaactcctgacctcgtgatccactgtgcccggtccacacctggctaatttttttttttttttgagacggagtctcactctgtcgcccaggctagagtgcagtggcgcgatctcagctcactgcaacctccatctcccaggttcacgccattcttctgcctcagcctcccaagtagctgggactacaggcgcccaccaccacacccggctaattttttgtatttttagtagagacggggtttcaccgtgttagctaggatggtcttgatctcctgacctcgtgatccacccattttggcctcccaaagtgctgggattacaggtgtgagccaccgtgcccggccacacctggctaatttttaaaaattttttgtagaggccggatatggtggctcacacctgtaatcctagcactttgggaggctgagatgggaggatcacctgagcccaagagttccagaccagcctgggcaacataataagaccctgtctctgcagaaaagctttaaacaattagccgggggtggtggtgcataactgtagtcccagctactcgggaggctgaggtgagaggatggcttgagcccaggaggtcaaggctgcagtgagctgtgactgcactccagcctgggcgacaggtgacaccctttatagagacaggatcttgctatgttgcccaggctggtctcgaactcctggcctcaagtgatcctcctgccttggcctcccaaagtgccggaactacgtacgggtgtgagccactgttcctggcctgggagggggttttgacatccctgtttgacagctgaaccagcttccctcctccccaccagacccctcagctcccgctggcttccatagtggcccaggtctgggatgctgctgtcccgcgtcacccggctgcctggctgggggcggctgcgtgttggactgagtgttggctgtgaggccttgttctcgccccgtcctgcttctagaatcctgtccttgctgttgcctcagcggctccctggggttcacattccccttcctgccatggcaaacccatccagcctgggctggtggcctcggctcccacaccaggacttgtggtttcattggtaagtcgtagtgcacggtcattgcagccaggaccctggacgggctggatgagtgatgcccgctggtgtgtgtgctgcgtggggccctggtagggggagacttggctgctgtgggttgggggtgtgggacaggtcagggccagactctggggtggtcaccccgattcccaggcatctcaagccctccgagttggaattctggggacatggcccacgaatctgcatttcagtgcctgccaaccttcggtgtcccccagagcccgcccttcaggcttcctgtccctctagcctcgctgtgtcatttccagtggggcaggggtgggctgggatcactcctggagccccgattccttggccccttggcgtcttgatgtgggtggagttttgggggccagcacgtgtcaaagcagacgcagcaccaatgaattgagctccagctccgtctttgaggtcctagaggccttctagctgtgaggtctccacccagcgccaccgtctgggttagggcaggatggagtaaggggagggggaggcgccagttccctcccctgccccgacgcacgcgtggctcccagcaccatcctggtttctgctcagacagtcacacgcccccttccttgccacctccatctcccaaatttgtcatctcacccagaccagactttctgtga

SEQ ID NO: 33471 - DNA, 2894 bp, Artificial sequence
  DNA replication origin
acgctgctggccgaccagatgagcgtgatcggcagccgcaagaaaagcgtcaacatgaccgagtgcgtcccggtgcccagctccgagcacgtcgccgagatcgtgggtcgccagggtgagtggccctcgtcgggggttgctgtcctgggggtccccgcaccgtccgccccggggaagggggtcgcccgagcccagcccagcccgcgccggacgccccgcaccggacacgccccgcgtgggctccggcctcggccgctgcctttgcgcctttgtcctgcagccgccgcgggagaaagttgggcgcagcccgcgctcctcccctgcgcgctccggccccgccgccgcctttgtctgggccgcctccagcccggaaaggctccggggagccgcgccgcagcccaggccctcggccgcccgcaggggcaccccagagaggggctcgagggcccggggctccggccgggcggggggcgccccacacccagcacaggcggcggggcggggcaagcgcaggtttaggggtggcttaggggggccgcctgcaggaccgggagagaaggctgacagtacaaagagcgcacgtctcagtctccagcctggggccctgactggggtggggacgggaccgggcaggagagggtccctgctccactctctggccccgagtcagggatttcggggcctggggaaggaccggctgtcaaagccacttctggggtgcagcctgctgggcaggccggcgggcggcaggccccgggtgtggggtccagcggtggcatcgtcggagcttccctctggccgccccattgttctctttgttagagagcgaggctgagatttgcagggtgacatcaggccggccgctgctcattggcccccgagctgcggggcgggcgggcgggtggtgggcagtgcctggcccagctcacacccaccaccccgttagccacccgcccgcctgcctccctcaactttctcctgccttcccgccacccctccccgctcctgggtccccgctgaccgccagtgatcagccaggttctagaacttggggtggggccttggcggggctggtggtggggccgcaggacacttgggctgggggtccctgcctccccggggccctcgggaatccaggccagagaaaggtgtggggggctgggattgcaaggtcatctatggccctggcctcaggcgggggaccaccagggcgccctcccctccgccctttccctcggtccaggtgggtggggcaccacagcctcctgtcttttggtcgttcatttgtccagctcatgtggggacccacggagggtcaggcatggtgctggccccaggaagcatgctctggagtggtgggtggggagggactgggttctgtctcagtcctgctggctgcccttggtgggaccccctggcaggagggcgccctaccatcctgttactgcctccccattgaggccttccacccggcctccatgtcccatacccagggcctagaacgggacagctgccctgtgcggagtgtctgggagcctgtggagacaggcgtccaagccgaggcctggggaccaagtgaccaaaggcacgagcctgagcctccaggtggtggaggctgtggctgtgttctttgtgaacgcgcttgtcctggcacccaagggcctttgagcgaggctatggccacatggggagctggcaggaatcagcgtcaggctgagagcttctagacctgtggcctcagggtgggaattctctaggggcaggtccatgggaaatggagtctgtgggcaccaggctcagcccccacctctggcctgtgcgttctgcacccacttactgggctcttgctggtggccgtcagcaaggcaggccctggggtacagtgggggtcgggggtagagtgggccctgattgcttgtcctgcaggccgccgtggccctgcgcagatgacggcccctctctgtgatgtgcggacgtctcacctccattagggtagaggattctggggcaagatgctggttttatttatttatttatgagacggagtttcgctctgtcgcccaggctggagtgcagtgacgtgatctgggctcactgcaaactccgccttctggtttcaagcagttctcctgcctcagcctcctgagtagctgggattacaagtgtgagccaccacgctcagctgatttttgtatttttagtagagacggggtttcaccatgttgtccaggctggtctcgaactcccgacctcaagtgatccgcccacctccacctcccaaagtgctgagattacaggcgtgagccactgcgcacggccagttttatttatttgtttttattataaagtttttcttgtagagacagggtcttgctctgttgctcaggctggtcttgaactcctggcctcaagcgatcctcagccacccaaagtgctggggttcctacaggtgtgagccactatgcctggacccaagttgctggttttaatcccagctccaggtcacacacagtggccaccccataagtggagtgcgcgttgccagggatgcaactgtggatgccaggacaggttggcagcttcagtagtccttacgtcttccacagcttcggtagtctgtacttcttccacactgtagaaccatctgtggctcccagcttctcccacccaccccgttctcaagcatacctttcaatgtcctttgtgccccggccctgcccctttactcaccttcctctccaccctggggctctctgaacttctcatgcttctctgtcaaacccaagctccaaggttaccccttccctggaggccaggaagggtgcacctgtccggcctccccacctagacaagagtcacacaggcctggcaccagccctctccccagtagctac

SEQ ID NO: 33472 - DNA, 1921 bp, Artificial sequence
  DNA replication origin
tggcgtcaggcacctgtagtcccagccactcgggaggctgagacaggagaatggcgtgaacccagaggcggagcttgcagtgagccaagactgcaccactgcactccaacctgggtgacagagcgagactccgtctaaaaaaaaaaaaagaaagaaagaaggaaggaaggaaggaagggagagaaaagaagaaatgaagaacgaaataaaggatgaaagaaaaggaaggaagcaaggaaggaaggagaagaaagaaaagaaagaaggaaagaaagacagaaaaaagaaaaggaagagaaagaaaaaaaggaaagaaagaaaaggaaaagaaaaaagagaaagaaaggaaagagaaagaaagaaaaagaaaagaaagaaaggaagaaagaaagaaaaaaaggaaagaaagagaaaaaaagaaagagagaaagaaagagagatagaaaaacaattccaagcatgggcgtgcacgaaagagaagtccaggaccccaggaggggaagtggggctggatgcagcctggggtcaggagagagattttgggtggggaagggctccaggcagggggatcctgaccctgcctgcctggaagaagtgggcagagaagccaccaaaagtgaagggcccagcagtgggtggctgtggctgagggactagaagagtggctgagggggacccagggtgtgtgaggcggggggaggggacagaggagaagccttgctaggcaaaggggcaggctgccccactcctgcccagagagccctgccttcggtccaagtttgcacagccagccagggacaggtctggtagaagaggggggcaggtagacccagccagacaggtttatcacaaaaaaccccacaggtgcaaggaaggccccgaaggacagctggaggaagagccgctgggaaagcggctattttttttttttttttttttttttgagaggagtcttgctctgtcaaccaggctggagtgcagtggtgcaatctcgactcactgcaaccaccacctccagggttcaagcaattatcctgcctcagcttcctgagtagctgggattacaggtgcgcgccaccacgcctggctaatttttgtatttttagtagagtcgggggtttcaccatgttggccaggctggtctctaactcctgacctcgtgatccacccgcctcggcctcccaaactgctgggatgacaggcatgagccaccgcgcccggcaagggtggctttagaggtggacaacgcccgttgcggggaaaggcaccccagaagagggtggggctccacatggagggttctggctggtgtgagcctgccctcgccatggaagcaccactgtggtagagaggtctctggctgggggcacagagaccgggtctgtggccttgggtggggcggaggaggtggcgtggaggaggtggcctgatcccaaagccgggagccagccagaggggagctaggagagactaggggagagggacctcaggccctggggtgtgcatgattgtggagctgtccctggcacagaggctgggggtggggcaggggcctgaccctaaagcccacctgatagcaaggggtacttggggactgggaccccaggccctggggggtgcaccgtggggcgggggttggaccctggcacagaggcggtgggcgggcaggagcctgacttcgaagtccagtgggatcgcgagggggacttggagaggaccccacgcctttatgcagggaggtgggggtccctggcacaaggaagcgggcgtggagcaagagacctcgcttgggggcgacccggatctctaggggaaattggggagcgggacctcgggccctggggcgcgcgaggcagggactctcaggcttggggagggagcgctgtccaggcaggggctgagccgcacacacctgcagcag

SEQ ID NO: 33473 - DNA, 3000 bp, Artificial sequence
  DNA replication origin
tcgagactagcctggccaacatggcaaaaccccgtctctactaaaaatacaaaaaattagccgggcgtggtggcacatgcctgtaatcccagctacttgggaggctgagacagaattgcctgaactggggaggcagagattgcagtgagccaagatcgcaccattgcattccagcctggcgacaagagggaaaccccatctcaaaaaacaaaacaaaacaaaacaaaactcagaaaggaaaaggaaaatgcacagggagaatcctgtgatggagaaggaaggcaggcaggacagcagagacaggagcattttattgcttgtaaattacatctcaaaaaacccacttcacacacgttaactggaaatatcttcaaatgaacggccgtgagcgtggttattttggtaaccagagaaggctaaaaattaaaactgtgaaaattaaaactgagcagggaaggcagttttgtggtctcatattatttgccctcaacaaaattcttttgcccgtggccaacatggtgaaaccctgtctctactaaaagtacaaagattagctgggtgtggtggcgggcgcccgtaatctcagctactcagcaggctgaggctggagaatctattgaacccgggaggaggaggttgcggtgagccaagtttgcaccattgcactccagcctgggcaacaagagcgaaactccatgccgaagaagaagaagaaaaaaaagtacacaattctggtgaggcacggtggctcatgcctgtaatcccagcactttgggaggccgaggtgggggatcacttgaggtcaggagttcgtgaccagcctggctaacatggtgaaaccccgtctctactgggggtggtggcatatgcctgtaatctcagctacttgggaggctgaggagggagaatggcgtgaacccaggaggcagagcttgcagtgagcagagatcacaccattgcactccagcctgggtgacaagagtgagactccatctcaaaaaaaaaactgtggaacattatcattaacttttgtgggtgccctttagccatttcccccagtccccataatccccagtcactggcacccacgtgtccccttcctgtctctgaatcggcctgtcctggacattcacacaaatgggattgcacgccgtgtcggtgtctgtgtgtctcttgctgagggtggactcctccaggggcatctgcgccgtggccggtgtcagagcctggttcctgttcatggccgagtcctgctccatggtgtggccgggccgggctgtgttcgttcatccctggatgggcacttgacttgtttacactttttggaccccttgaatctggagcgagtgtgacagaatctcacaggcagtgcccagccacccgctaccagaaagctgagtcttgctccggtatggccctgtccgaaagaacgttccggaagctgggggtgttttccatgggcacctccgggctcctggagatttgctgtgacagccatgagggacacacacaggcgaggggcatccccggggatctttgcggtggcgagtgtgtgcggtggtcagaagggctgtccctgtctgcctgggtctgggggctgcagggacagcaaggcacgggccctgggtgtggcaggagaggcatgatgccccttagctggtgttgctgagactcgggagccctgtggtccgtgtggctgggccgagggctgggaggtgcatcctcgccacgggggtcctgagcctctcctccctggtaccctctgtggcggcagcggtggggagcttggtctgaggggaggcgggggacacgtgaggctcttgctgctgctggcaagtgccagaagggctgccatggtggttcacacctgtaatcccggcaatttgggaagctggggcgggcggatcacctgaggttaggagttccagaccagactggccaacatggtgaaaccctgtctctattaaaaatacaaaaattagctgggcgtggtggctactcgggaggctgaggcttgaacccagaaggtggaggttgcagtgagcccagatcacgccactgcactccagcctgtgcaacaagagcgaaagaagagcgaaactcttgtctaaaaaaaaaaaaagtcccagaaggtcttggggctgagacatgggcggggctgggggcagccaagtggcctttgaggatggggccaggcaccgcacagggcaggctggtcatgaggcccccacgaaagatcccagcattgggagctcaggcttccccgccccatgccaggtctgggttctggggctggagtgtggagcctcggtgcgcccagggggttcagcctgagggtctgagacttttccagggcagggaatttgacgagggcctgagcactgggctggcccctcaggtgcccacgcctacaactcacttctcaccgggcacgacctctagcaaaggccagtattgccttggcctgtgggggtccccaaggtttcagggagagaggaaaggaccctcaagcttcgtcaacagcgacagcccagggcctggatgggcttccagtggggagggccctgtggcaggggtagggatcatcacatctcagaccaaggccaggacatggccagaaccccgggatcagagggactgatcggggtctgtcagtgacaggaagctgggctgcgacagagagggagagacagcaagagacagagacagagaccgagggagagagacaggagagagagcaagaaacaaagagggacagagagggagacggcgcaagagagagacaagagggagagatagagacagggatagacagagacagagagagaccaagggagacagggacacagtgggagatgggaagagggaaacagagtgtctctgagtgccgggcagatgaggggagggtggcctcccagccttcaggtccagaaagcagcttccagtggccatggctagtgagctgaagtccagggtcccggggcacagctcccctccctg

SEQ ID NO: 33474 - DNA, 996 bp, Artificial sequence
  DNA replication origin
gcggtcaggccccatcagggatggtcacagtccagccacaggggcgactctgcccatcagtccccctggggcagcgaccagatcctggctggggcagcaccgggacaggccctctctatgggcctaaggtcaatgcaggtgggggctcgctgggcccaggccaatgaacccacccgtaggagccctcactgggcagcagggccaggagggcaccagggactggccgcagagtccactcggggcaggcgtctgtggcttggaacctgccctcgccaaggcactggggggttaaggagcagatccctcagacggccttgggccagaagctccctggagagctgggcacctcgaggagcgtctgggagcctcaccctgtcccagtggctcctggcacccctgggagcgtcagcaccaccccaaagctgggtgcctgtgtcgccactaaacagaagggaaaccgaggcaggggggccggctggcagtggagcattctggcagcgccgggcgaccaagtcccgactggcagcggctggagtttggttttcagaagcgaaggctggcgttggcacacagggaaggctgcccgatgacgtgcctcgactgtgttacatttactgaaggagagcggcctcctgggcatgccactcaggcacggtgaggctctgtggcaccaccagccgcatggcagggcagagagtggcgccgtcctgcatgccccccacagcagaccagagtcccgtcctcacgctgcacagtgggtgatgtgagtttcaaaactacgcctccagaccgagaaaccctcccagctgtcagcaagccgtggcgccgagctgccgggcacctgctggctgctctccagtctcaaggagctgggacagcgggcatggggaggagctggcctcgagcccaaaggtcgtagggagccaggcagggcccaggagcacccggcacttcccgaagccggactctgtagaggacgagcgtggagggtctttc

SEQ ID NO: 33475 - DNA, 1240 bp, Artificial sequence
  DNA replication origin
cgagggtgtggattctttttctcaggccgcccgagccatggtaaaggagtacacgctggtgcatagtgggcagcggaaaggtgacccccggcctgcgagggtgggggctgctgcgggctgatggtagctgattttggtgaggcttgcttttttttttttttttttttttttttttggcagaatctggctctgttgcccatgctggagtgcaatggcgccatcccagcccactgcaacctccgcctcccgggttcaagtgattctcctgcctcagcctcccaagtagctgggactacaggcggccgccaccacgcccagctaatttttatatttttagtagagatggggtttcgtcatgttggtcaggctggtctcgaacgcctgacctcaagtgatctgcccacctcggcctcccaaagtgctgggattacaggcatgagcctctacctggcctggtgagggttttcctgccccactcagtgcctgtcaagggacaggagcaagggtttacacagctgagccccggggaggctcagggccaagtctggggactgaagggtcaggcccctcccttggtcccagtagaggtggcaggggggccatctgggagggtggcggacgctggcgatggccagcggcagccggtcattctctgcgtggattgtgaagggaggggtggcacgggccagggctggtcctgggggggtgcctgtggatccctcgggcctcccctcccagctgaggtccccacgttcatcctgtgtccatgtcctgctggccgctcaccttggtgtaacgcaaggtccatgtgtccccaggaagcaggaagagctggtgcagcaggtgcggaagcggctggaggaggcgctgatggccgacatgctggcgcacgtggaggagctggcccgtgacggggaggcgccgctggacaaggcctgcgctgaggacgacgacgaggaagacgaggaggaggaggaggaggagcccgacccggacccggagatggagcacgtctagggcaggtgctgcggggccacgggggctccctggagtcgggtcctggcagtggggactgcctggtgaacacagatgtgcttgggatgacgggtgcctcccaagagcttcccatctccctagaagagcccaagcgtccccgtcccgtggagtcgctaaagccagccctccctgtcctttccagaggccctgccgagagcccgtgctgcctgctggagccgcctgc

SEQ ID NO: 33476 - DNA, 1143 bp, Artificial sequence
  DNA replication origin
tgtccaggctgtagtgcaatggtgcggtctcagctcactgcaacctccacttcctgggttcaagtgattctcctgcctcagcctcccaagtagctgggattacaggcgcccgtcaccacaccggacttttttttgtatttttagtagataaggggtttcaccatgttgaccaggctggtctcaaactcctgacctcaggtgatccacccacttcggcctcctaaagtgctgggattacaggcgtgagccaccccatgtgtattttttattcttatttacaaacgtccactggatccctggctgtggaaagcctgggcagggtctggagacccaaggcagtgggaggggagatgccccattgggacccacatggggcaaggaggccaggtgggcctccctggagcccagcaaggacctggagtggggagagggcagggccactcttgaggttcacatatgtgtctggggcagctcttctgggagaagaagctgagcggcctgaacgccttcgacattgctgaggagctggtcaagaccatggacctccccaagggcctgcagggtgagcgggcaccctgaggggaggcggaaggggatgtgccgggtggggtggaggtgctgcaggtgccctcatctcctggcagggtggatggctgttcctgctttgggtgcttagggcaaatctgccagcgactggggcaggaggaggggacccagtggggttggggatgggtaagggcgcttgggctgggcccttcattcttgaccttggagaccctgcgggtggggctttgtggcttccaggtgtggcgcaggcctggggctgttttcacctgcaggacgtgcagttttgccatggagatcctaaataaacaaacaaggacagctgactttgcttctgtactctcccagcacgtccacaccacagaacaaagaatgcagctcttgcatggttttggtggttgttttttgagacagggtcggctgggtacagtggctcacacctataatcccagcacttggcggggctggggcaggagtttcacttgatctcagaagtttaagaccagcttggacaacatagtgagaccccatctctacagaaaatacagagcaaggccaggtgcagtggctcacgcctgt

SEQ ID NO: 33477 - DNA, 1231 bp, Artificial sequence
  DNA replication origin
caagccgcagctggcgcgctacctgggcggctccatggacctgagcaccttcgacttccgcacgggcaagatgctgatgagcaagatgaacaagagccgccagcgcgtgcgctacgactcctccaaccaggtcaaggtgagtggtggcgtcacgcaggtgacgtcggcgcggggcgttctaggcggggacgcggccatgacgtgagctgcaggcgacacagcccggcgtcctgagcgcaggaggtcacagcgggcggagggcacagagcggaaggcgcaggccacagggtgcagagcgcaaggcgcatggcgaggacgcggcccgcggcgggcgttccagagccggccggaccgaccctgcgggagcggcctccccggaccgtgggggtcctggcgggcgcgggggacacgaggggcgccggcaaagcagggggtcacccgggccccgcaccccctgaggctccgcgccgccggggcgcccccaggccggactgcatatccttcctcccgcagggcaagcccgacctgaacacggcgctgcccgtgcgccagacggcgtccatcttcaagcagccggtgaccaagattaccaaccaccccagcaacaaggtcaagagcgacccgcagaaggcggtggaccagccgcgccaggtgagctcaacgcacagcgaccccagccttcccggccgggttgttcactttggtgggtggacgtttggaatgaggtcgtacgtggagcggacgtagtgagcgcaggagttccaggctagcctgggcaacatgacgaggcaaaaaacaagtaaaaaattagctggacgtggtggcgcccgcctgtggtcccagcttctggggaggctgaggtgggaggattgcttgagcccaggaggctgaggctgcagtgagctatgatcacaccactgcactccagcctgggggcagagcaagacccagtcctgcggtcccctcttggaatgtgcagggtattggtgccaggatacgccccaccctcaacccccagataccaaaatctggggatgttcaggcccctcagaaaatggtctagtatggcctcacgcggtgactcacgcctgtaatcccagcactttgggaggccgaggcaggtggatcacctgagaggtcaggagtttgagaccaggctgacccaacatggtgaaaccccgtctctactaaaaatacaaaaattagctgggcgtggtggtgtgcgcctgta

SEQ ID NO: 33478 - DNA, 2257 bp, Artificial sequence
  DNA replication origin
actaaaaatataaaaaattagccgggcgtggtggtgggcagctgtagtcccagctactcgggaggctgagtcaggagaatggtgtgaacccggaagtcggaggttgcagtgagccaagatcgcaccactgcactctagcctgggtgacagagcgagactccgtcttaaaaaaaaaaaaaattaggccgggcacggtgactcacacctgtaatcccagcactttgggaggctgaggcggacagatcacctgaggtcaggagttcgtgaccagcctggccaacacagtgaaacctggtctctactaaaaatacaaaaatcagccaggtgtggtggcgggcacctgtactcccagctactcaggaggctcaggcaggagaatcacttgaacctgggaggtggaggttgcagagagccaagatcgagccacttcactccagcctgggcgacagagtgagactccatctcaaaaaaaaaaaaattaggcgtggtggcttgtgcctgtcgtcctagctacttgggagactaaggtggaaggatcaccctagcccaggagttcaaggttgcagtgagctgtgattgagccattgcattccagcctgggcaagagtgagaccctatctccaaaaggaaagagagaaacgaagtcctgtccctatcagcagccactccacatcctgcaccccagcctctggcactacgcgtccccttcctgtctctgaattatcctgttctagacatttcttagaaatgggatcacacactgtgtggccttttgtgtctggcgtctctcactgaatgtggcgtcctcaaggtgcatccacgctgtggcctgtgtcagagcctcgctccttttcatggctgagtatgtcccatcgtgtggatgggcgtttgtccgttcatccattgaaggcgtctgggctgcttccaccttctggctcctggggacatccgtgtagaagtgatggtgtggatgcgtgctcatttttcgggcagatacctaagagtggcgtggccgggtcatctggaaactcagtgaagagctgtcaggcttttccaacatggctgttccatcttacatcccaaccatgatgacggtgtgttgggttgggtgcttgtcatcctgtagtgtgacctcatgtgacacacagggcaacccattggtgggtgtccttatgtcctggagaggatgagttgccggcgcttgtccatggcaggctgagagcagagccccgtgtctgagagcaggtctgtgtttacctggctgccttgttgcgagctctccagtcgggttatgcccaagcagctgttagggcctggccccagatcttagaacgagaccccttcccagtctggccctgctgctgtaaccccaaggtggaagaagattgcttttagggctgtccctcacatacctgttctccgtggggtcttttctcaagaatgtgacctaaattccatgtctggaatgttctggacatgtgagccatcctcccagagccggggcccaaagccctgtaggtagtagcgtttgtacccgaactcagcgtctgctgtgcctgacgctgccagggcctacggtggggaggattcagaggggaccggggttgggggtctggagcaaggatccgatgtggaggctggggctagggccagggtgtgaggatcggggccagtgctctgggtctggctggcgcccagatctaggggccagttgtggggtgctggggtctgggatgaaggtctggggtcacgccagggttggggtctggggctggggccagggcctgcctgggtttggggtcagggccgtgttggggtctggggctggggtcgcgacctgaagctggggctgggactgggtttgggtctgcggccgaggcctgggtttggggtctggggtccgcccggggcgccgaccgtcccgcctccccgcagcccgagcgggaagaagttccgcagcaagccgcagctggcgcgctacctgggcggctccatggacctgagcaccttcgacttccgcacgggcaagatgctgatgagcaagatgaacaagagccgccagcgcgtgcgctacgactcctccaaccaggtcaaggtgagtggtggcgtcacgcaggtgacgtcggcgcggggcgttctaggcggggacgcggccatgacgtgagctgcaggcgacacagcccggcgtcctgagcgcaggaggtcacagcgggcggagggcacagagcggaaggcgcaggccacagggtgcagagcg

SEQ ID NO: 33479 - DNA, 1116 bp, Artificial sequence
  DNA replication origin
cagtcctgggaataagcgcctcagggtgactggtctcccacgcagcgttgctttttttaaaggtattccccttgactccttccgaggcctctggtcctcttgggtcgtggccccctcagggtggagacctgaggctttcgactttccgagcccacctaacggtagtctttgcgtggatgttactggtggtggaaggctttcagagacccccccgtccccaaattggaacaaggcgctgctctgaaaggtcgcagggaaccccctccgtggaacaaagacttagtcgcctgctgcagccaagtcccagacagtcggccacctgctgtttgtcctcttttttttttttttcctggctcgggaaagatgcttttgattctgggccagctttgattgcgccctccccttggttcagtgtcccgtggcgccttcaggtcccccaggaggggaaagcggaggacgcctgccatgtgccgagcacctgggtaaaggggggtgtgcggctggtccccctttttcccacagctcggggtcgtgggcaggagaccgcccaggtgagggcgggtggtttccacgagccaaggaggggcagaacgaccgctccgtccactgtgcacttcggtcctctgtggttcttgactgtcccggtttggggagataaagtgagaaaagtgagcggggaaaggatggctgtgatcagaagcaatgtgtggggcctcgtcctgcaggaggagctcagggactggttcctggaaagttggaggacagcaagagaggggaaacttggtccccaaatgtgtacccttatgagctggaaccctgtacacgtcctgagatctgcagtgacacatgctgaaatctgggagggcagatgacggggcctgaatgagactggggtcagggagggcttctctgaggacgtgacattgagtgacagggagaggcgtccaggcagcaggaaccccctaagaggtggctgcagcttgggagctagaaccaaggccagcttgagcggagtatcctgaggctgtcatcaccccacctctctcattcccactctgggccctggccctgagcatgagggtctagcagtggagaaaagcagggagaagctcctct

SEQ ID NO: 33480 - DNA, 1128 bp, Artificial sequence
  DNA replication origin
ggagggcgggggcccgcgggccggaacagccgcggcaagtggcggcggcggcagcggcagcggaggcagctgaggcggcggcggcgagtgggggtccgggcggcggcggcgggcccggcggcgggccgaggagccgggcgcaatggagcggaagaggtgggagtgcccggcgctcccgcagggctgggagagggaagaagtgcccagaaggtcggggctgtcggccggccacagggatgtcttttactataggtgaatgagcgcgccggccgcgcagggcctcaacgggctcctcccagcggcctctgcggcggcctcggcgcccctgccccgggccgcggcctgggccccgcgcgtgcgtcgtgcgtgcgtgcgtgcgtcttgcgtgcgtgtgcgcccggcgcgcggaggcccagtgcgcgtgcgccgcttgttgggccgcatggctttcggccggccgttcagggactggctgccggacggcgactgcggcctttgttcgtgcgcgctgggccaggggcgcctggcggcggccagatgctaccggggggcaggggtggagggtgggctgtccctttggttcccgtgagacgcagggggtgccttcttggggcgctcctggggtggcgcggagcccgagggggtggccagccgggatttcggggagcagggctcatgggcggatcggggagggcgtgcgtgaaaatacgggttcttgggctcgccccagtcctgggaataagcgcctcagggtgactggtctcccacgcagcgttgctttttttaaaggtattccccttgactccttccgaggcctctggtcctcttgggtcgtggccccctcagggtggagacctgaggctttcgactttccgagcccacctaacggtagtctttgcgtggatgttactggtggtggaaggctttcagagacccccccgtccccaaattggaacaaggcgctgctctgaaaggtcgcagggaaccccctccgtggaacaaagacttagtcgcctgctgcagccaagtcccagacagtcggccacctgctgtttgtcctcttttttttttttttcctggctcgggaaagatgcttttgattctgggccagctttgattgcgccctcc

SEQ ID NO: 33481 - DNA, 1277 bp, Artificial sequence
  DNA replication origin
accagctggccaacaaggtcaaatcccatctcttctaaaaattcaaaaaaattagccgggcatggtggtgggcgcctgtagtcccagctacttgggaggctgaggcaggagaattacttgaacccgggaggtggaggttgcagtgagccgagatcacgccattgcactcgagcctgggcaacagagcaagactctgtctccatcagtcagtcaatcaatcaataaatgaatgtgcctgtcctactccctggaacctgcagctaaagggactttgaaaatgggacgagatcttcagatgggaaagcatcccagatcgggtggacccaatgtcaacaaaagagtccttagaaccaggacagtttctccagctggaggcaggggagcacagcagctagactcagtccttgaacacctgtgcaggcccgcccagccctagccttgggagcgacgctgtcagggggaactgatggggggcagcccacccgtttccatttcaggatccctctggctggctggggaaggggttaaggggagacaacagggggtgggcgattccgcaggaaggtcctggaactctcccggccagagatggtggctggactaaggtgcagggggtggtcggggagctgggggggggtgctcagattcctggattttgagggttcaaaaagcagctggacggggcgcagtggctcacgcctgtaatcccagcgctttgggaggccgaagtgggctgatcacctgaagtaaggagttcgagtccagcctggccaacatggtgaaatcccgtctctactaaaactacaaaaattagccgtccgtggaaccagctacttgggaggctgaggcataacaacttgaacccgggaggcggaggctacagtgagccaagatcgcgcctctgcactccagcctgggtgacagagaccccgtctcaaaaaaaaaaaagctactggagggaacttgggggcgtggaaggggtggtcacgggggaagtcccccagatttggacgctcgtaaaaagctcggaagctgggagaccaggagggcggggaagtcgaggtccagtcactgggccagagtccccaagacttgggctggagaaaggtcggaggaaaggaccccactagtccgaaagcatgtccccgcgcacgcgcaccaggcggccggcagagacagggcacagtaaaaggagccgcgcggactccgggcacagctgctgggcactggcagctcgcaaggcacagcgcgcaggcgcgcacgccacttaaggcccc

SEQ ID NO: 33482 - DNA, 1002 bp, Artificial sequence
  DNA replication origin
ctagtagctgagactactggcatgtgccaccacacccggctaatttttcttaattttgtgtagagatggggtctcactctgttgtctaggctggtctcaaactcctaggctcaagtgagcctcctgcctcaacctcccaaagtgctgggattccccttgtgagcctccatgtctgaagccagtcttttgtcacttgacctcggcagtgatgccccattgctcatgctgcgttctactcattagaagcctgtgcccggccgggcgcggtggctcacgcctgtaatcccagcactttgggaggccgaggcgggcggatcacgaggtcaggagattgagaccatcctggctaacacggtgaaaccccatctctactaaaaatgcaaaaaattagccaggcgcagtgacgggcgcctgtagtcccagctactcgggaggctgaggcaggagaattgcttgaacccgggaggtggagattgcagtgagccgagatcacgccactgcactccagcttggtgacagagcaagactccgtctcaaaaaaaaaaaaaaaaaaaaaaagaagcctgtgcccaagttcatactgtgcgagggcgtaaacgccagcaggcgggtttgctgggccttcctagaatctgctgggccttcctagaatctgctgggccttcctagaatctgctgggcccaggcaactcaggggagctctcacagcacgtgccgtggtgggcaagagcatgagcttggaaccggaggcctcgatcctcgccagctgtgtggcctcaggtgagggcctcgccctgtctgttgtttggtgtcctcgcctgggaacagggactgtgatggcggcacctgcctgagtcctgcagctgtggcagggatggatgaatttctgcagactgcagcagaccggacccatcatcatggtggttgcaaacttacaaacacctacacatgcgccaggcccagcctccccccagctccactcccaccccagcagccccttga

SEQ ID NO: 33483 - DNA, 1189 bp, Artificial sequence
  DNA replication origin
tctgcacggtggagctgactgggaccttcaagtggaatgtgatggtgccggtggcgttttacagcgtgggtaactcaggcctgggatgaggaagcctgctcctagctgagaacccagtggcccatggtagccagtgcagcccctcccgggtgcagcaggtctgcttcttctgtgttcagtcacagcggggaccacccgtcatccgtgctttcatccaacagcaagcatttatttatttatttattcatttatttatttagagacggagtcttgctctgtcgccccggctggagtgcagtggcgcaatctcggctcactgcaagctccgcctcccgggttcacgccattctcctgcctcagcctcccataagtagctgggactacaggcgcccgccaccacgcccggctaattttttttgtattttttagtggagatggggtttcaccgtgttagccaggatggtcacgatcttctgacctcgtgatccacctgcctcggcctcccaaagttctgggattacaggcatgagccactgcgcccagcccaacatttattgagcacctactatgtgttagggacgcgccaatagaccgaacccttgtgggcggacattctggttggtgggcaaggaaaggtaaagaaacgagacctgtggtgtggggctgacctaaaataacgaagcgggagaggaaggggtgcagacacgtgcgtgcgaggggccgtgcagggctgtgccaccaggcagtggctttgggaggctagggagcgggtctcatccccaggaggcactgtggggttgtgtctcagagtctcagacttaggactgagagggccacagttcaccagctggggaccctgcagtccacaccccttctaggccctgctggggcttgctttgaggaaggggttgtcgtggcgacgaggtcgttggtcagtgtggtcatggtctgtacgtccttcctcagtggctagtggaaatcaggttttgtgggctcttcccacactgtccaaatccacagggtcctacatggggtgaccaggatgataggggaggcggaggccggcccactgggcatatttatgagcaggcttctctggtgattaataacccagggctgggcgcagtggctcacgcgtgtaatcccagaaccttgagaggctgaggtgggtggatcccttgaggtcagg

SEQ ID NO: 33484 - DNA, 2043 bp, Artificial sequence
  DNA replication origin
tcactggcaggtagccccgcggagcccagaagcacaatcggccgccagaccacgtggccagaaagcaccgccctaacgccgcccactccggaccacttctccgcggtcgtccaaccctcgccggaagttactgtaagtggcttccgggtctgcgcgcacagtggcggatgatgtttttttttcctccccccccccccgccctccccgcgcgcgtgcgcgccgcggccgcgcctgcgcagtgtagccgggtcagctggacagggtcatcctgagggtgcgactccgccgcgatggtgacccggttcctgggcccacgctaccgggagctggtcaagaactggtgaggacgccgacccgcggccccatccgcgctcccgcctcggcccagccccgcgccgctgcgttccgtatttgtgcgcgtttccgggggccgggccgggccgggcccaggtcccttgttgttcccggtgacagagggggaaactgaggccgagaggcggagcggcgcgtcccggcgtgaacgggacgtgacggacccaaggccaaaccccagcatgcccggctccgcggctaggccgctccaagcctcagtttccccatctctaccgggggatccgaatggtgaccccctggacggaagcgcccagaaggtgccgagtcccgatccccagcccagcactcgcggcatcttcggcctttgccactattttggtttttatgatttttaacaaggagcgtgaaagcttcagctgcgcctgagcccacgtgggcagcgggacggcataggggtggcccccatagaagccgggctgggggtggcctccgtagggttgtctggtgtttccacgtggggtgctaagaagcaaggcctggctgggtgcggtggctcccgcctgtgatcccagcgctttgtgaggccgaggcaggtggatcacctgaggtcaggagttcgagaccagcctggccaacgtggtgaaacccgcgtctctactaaaaatgcaaaaattagccaggcgtggtggcgggtgcctctaatcccagctactcgggaggctgaggaaggagaatcgcttgaacccgggaggaggaggttgcagtgagctgagattgcgccattgcactccagcctgggtgacagaatgagactgtgtcccaaaaagagaaaagaaaaaaaaagcagcaaggtcttagccgggtgcagtggctccggcctgtgatcccagtgctttgggaggcccaggcaggagaatcacttgagcctgggagttcaagaccatcctggacaacacaatgaaaccccatctctacaaaacaaaaaattatcagggcatggtggcacctgtctgtagtcccagctactggggaggctaaggtgggaggatcgtttgagcctgggaatttgagaccagcctgggcaacacagcaagaccttatctctacaaaaaaatttagagctgctgggcgcagtgactcacgcctgtaatcccaacactttgggaggccaaggcgggcgaatcacccgaggtcaggagtttgagaccaacctgaccaacatggagaaaccccgtctctactgaaaatacaaaattagccaagtatggtggcgcgtgcctgtaatcccagctacttgggaggctgaggcaggagaatcgctcaaacccgggaggtggaggttgtggtgagctgagattgtgccattgcattccagcctgggcaacaagagcgaaactccgtttctaaaaaagaaaaaagcaaaggcttatgattggcagtgtctccggaagccagaacatacttcctctatcccagactgggggacaggtcggggacagggtctgcacggtggagctgactgggaccttcaagtggaatgtgatggtgccggtggcgttttacagcgtgggtaactcaggcctgggatgaggaagcctgctcctagctgagaacccagtggcccatggtagccagtgcagcccctcccgggtgcagcaggtctgcttcttctgtgttcagtcacagcggggaccacccgtcatccgtgct

SEQ ID NO: 33485 - DNA, 1341 bp, Artificial sequence
  DNA replication origin
aactgaggcttggagcggcctagccgcggagccgggcatgctggggtttggccttgggtccgtcacgtcccgttcacgccgggacgcgccgctccgcctctcggcctcagtttccccctctgtcaccgggaacaacaagggacctgggcccggcccggcccggcccccggaaacgcgcacaaatacggaacgcagcggcgcggggctgggccgaggcgggagcgcggatggggccgcgggtcggcgtcctcaccagttcttgaccagctcccggtagcgtgggcccaggaaccgggtcaccatcgcggcggagtcgcaccctcaggatgaccctgtccagctgacccggctacactgcgcaggcgcggccgcggcgcgcacgcgcgcggggagggcggggggggggggaggaaaaaaaaacatcatccgccactgtgcgcgcagacccggaagccacttacagtaacttccggcgagggttggacgaccgcggagaagtggtccggagtgggcggcgttagggcggtgctttctggccacgtggtctggcggccgattgtgcttctgggctccgcggggctacctgccagtgattttgtgcgcctagtatgtgccagaacgttatttacaatgaaggaaactgaggtccagcggggaagggtcttgctcagagtcacacagaggggaagagctgggattggagcccacttttggaggcgtcaggcgttgttcctgattcgctgtaggactttggtcgagcggcagtgcttccctgagcctcagcgttgcccgttgcttggaggccctgtcggaaatctctttgcaggattccgtttgcgagcctgggttattcctcattccggcagcagagggtggcctggctccttgctcggtgaacgtctctggatgctcttagctgatgacaggcaggtctttctgcctcctgctttccaccgcaccaggctcgcttgggctcgcctttctccagtccctgcttcctctgctctcccacaacccggcgcagcaccgtacatgctcactcagctcccagcttccagcctcccccctgcacaccgggccggtgtgggcagaaggaagaggggcatattcccagacaccgccattgcacttttgtgccttttcccccatattcaagagttgcctccctcaggaagccctcctggactgcctgacccacaggcacctttacagcatgaacggaaaggccatagcctagacggggcactgggcgtgatttgtctctcgggcgccagcgtcacttgcaggcctcgtgataaggaatggacaccgtgggttcttctgcccagcctggcctgtcct

SEQ ID NO: 33486 - DNA, 933 bp, Artificial sequence
  DNA replication origin
agcgaggccagtgagtggtaggccagggccccagggagctcctggacccagtgtcaccttggccgcccccatcactccgaaccttgtcaggttggtgttggctcgatgctgacaacaggtgtgtgaggtgtggatgtggatgaagcccggggtctcgagtggccgttctggggccagagcacagggctgaaagcgggtggctcgtcccacggaggcatacctttcacatgtgcccggcggggttgtgggcttcgctcaggcctgggtggggagctgaaagcaccatctgggggtctccaaccacacctgacaccttttcctcttctcgccgtttcaaacaggctgctttgggattcaggttccgctctggagggaggggggagagctctgtgggagacggtcccagggaggagaaagatgtgaggtgggagtggggggtaggatgtcgggggggggggtgggggcagagccccatcacgtgtggcctcctgtatttccggctctcacctccttccttgagaaggctggggggatggggtggaggcttgtaaagaagagagtgggtatcagggggtgtctggggaacatcactgggtctgagtccagccacaaagacagacatggacagagtccgggggcggcaagcacaggaggaccccagcatctgcacctgggtgtggggaagggagagggtgctggggcagccctggccggggagcctacctcgcacctgctgctccagccccaggatgacctgcacggcctgctgcaggatgagcagcttggtctgcgctttgtccgacttgaggtgcatctggcacatgcgccccagctcccggaaggcctcgttaatatcccgcacgcgcacccgctcccgcgcgttattggccatgcgcctctcccggtccctcaggtctttctcctccagggaca

SEQ ID NO: 33487 - DNA, 1446 bp, Artificial sequence
  DNA replication origin
gcccaggcctctgtgctgcatggccctgcatgggtgacctcgctctgttccctggcttcctacttggtagaatggatgccggtccccatcagggcacccactgctctaggttgtggtgaagatgaaatgggtgaaggtctggcccagtgcccagcatgcctggtgccctgtcttagtctctagggggctgcctcacccacttgcctgcccaccctgccttaggggcctgaggggatccctccaggtggtgggggcggcccctggagcccaggacaagcgcacagaccaaactgacaggaccaggggctgcgtgctcccgggtctggtttcttcccgcaagccctgacggggggctttgggggaggaaacgccctgaggttgcagcccagccgctcccggtgctcgggcagcaagtgcgaggtgaggaggggctgccacgggaagcagagggacggacgggcgggatggaggggagggcggaaggcagacagcagagaggcgggcttggggggcgcgaggcgtgccacacacggctgcagagactcggaaaccttagagctgaggggatagcgtgtgggccgggccggggctctggctccggtcccagcaacagtgctgcaggagagaaagggttaacggggtgcaggcgaggaaaggaaggagttaaggaagcagccgccagcgccagcggggggaaggagtcagctcacatctgcgggtggggacagggtctgtctgtatccttcctccccctggccctgggaaatgggggtgataggaagtttccctatcaccttcagatagggaaactgagtcagagacaggggatgggctcatgtggccttgcgtggcatctgcctgacgggaaggggccagggtggtttgcacaccagctcctgtctctgggatcgggggacactggcctctgtgagctgggttctgggcttcccaagaaaggaggaccacggcgagtgggagccccgtggagctgggagatacagttctgagccacagagcccaggcctgaaggactaggggtccagaaagagtccagtcctcccactgtggaggggatgctgaggcaggcagggagaagggctggcagtcaggagtggacagtcatggcaatgcggtcagaggggtgaagggcacagtcactgcaaggaggcaactgctgcagagggagggctggctccaggaaggcgggcggggaaggagaacgagggcaggaacacgagggagggtggcgctgcagggacgctggtggcccgcgcccccactgacctcgcacttgctgctccaagttcaggatgaccgagacagcctggtgcaggatgagcagtttggtctggggcttctcgctgttgaggtgcagttggcacatgcgccccagctccttaaaggcctcgttgatgtcacggacccgcagccgctcccgggcgttat

SEQ ID NO: 33488 - DNA, 695 bp, Artificial sequence
  DNA replication origin
gcagtcaggagtggacagtcatggcaatgcggtcagaggggtgaagggcacagtcactgcaaggaggcaactgctgcagagggagggctggctccaggaaggcgggcggggaaggagaacgagggcaggaacacgagggagggtggcgctgcagggacgctggtggcccgcgcccccactgacctcgcacttgctgctccaagttcaggatgaccgagacagcctggtgcaggatgagcagtttggtctggggcttctcgctgttgaggtgcagttggcacatgcgccccagctccttaaaggcctcgttgatgtcacggacccgcagccgctcccgggcgttattggccacccggcgctccttctcccgctcggccttctgctctggggggagaaggtcgtcctcgtcctcgtctgggctatggggagggcgccgggagggggccagagggagacagtgaggttgggggaagagcgtggggcccgccgacggcctcccagtgtgggtgcggtgtgcgtgtggcctgtgcacatgtgcgtcctgatggggtgagggtggggagtgccgaggggtgggttggcacctggtccgggcccggggggccttcagctccttcttctcctcctccgagtggtcagccgctgacgtgttctcctcgtcctccttctcctcccgcttgatctcgctggcggcc

SEQ ID NO: 33489 - DNA, 2647 bp, Artificial sequence
  DNA replication origin
ccgccccaccccacccttccccgacagaatttgcaggacagacgctccttgagaaggagaaacctttttgttagtttcttgtaaataagccccaagctgttattgaggcctcgtggccgccaaggcacacacattttgtgtgtgctcccgggcgccagatgcctggcatatgcagcttcctggggaaggggaagatgggaccaccggccacttgcatgcggaagggacatgaatggaggcctgtggggtccctcggcttgggcccctcaccacccatccccccaccctgcagcagagtaagatagaagaccacctggacgaggccatccacgtgctccgcagccacgccgtgggcacagccggcgacatgcacacgctgctgcctggccacggggcgctggcctcaggtttcaccggccccatgtcactgggcgggcggcacgcaggcctggtgagcgctgggcgagggtggagctgggcagtgggcggggacccggctccccctgatgcacccgtctccccacgcctgcaggttggaggcagccaccccgaggacggcctcgcaggcagcaccagcctcatgcacaaccacgcggccctccccagccagccaggcaccctccctgacctgtctcggcctcccgactcctacagtggtaagcccttgagcttgggactgtccgactcctggttccagttggggaaactgaggcactctagtggtgggggtcagggtgggagcccagggcaggtgtcaccgtgggggcacctggtgacatgggcgccccagtcagcaacttcaggagggtgggtaagaccggcggggccggcgttggccctgggcgtgtgaggtggacagctctgggctgcctcttcattcgcctgctcccagacgctgtgtgcctggcagcgctcagcactggggaaggggcgaggggtgcagcaggatgcctctgcctcaggggagacagaccaggagctcgctgcacagtacaggtgccagggagaaggaacgaagtggctgcggtgggttgggggttttgtatggctttgaagatggtggcccatgaggccacaaggtggtgtttgggcagcatctgggaggaggcaagagtaggcaagtacctggaggaggagggtttcaggcagagggcgcagcccaggcaaaggccctggggctggactgcacctgggaggaacagccaggagacccgtggggttggagcagagtgaggagagggagagagggaaggggggagggcggggcagggcaggtcatgcggggccttgtgggctgcggggaggacttgggatttggccatgagaaaggtggcagccgtggagggctgaggagggatgggacctgacccaggtgctcacagataccctctggtggctgcttggaggacagactatgagtggcaccgggagaccaaggcagaggccacagggctggtccaggggccttggaggggtgagcagtgggtgggccctgcatctcctgaaggcggggcccacaggatttgtgatggacaggacttgagggtgagagaaggcagggtggctctgggatttctggcccgagctgtgggtgacactggggctgggaactccgtaaggaaggggacaaaggaaaaggttggggacaaatctggacctgggcctggggattgttgagtgtctcagacacccatgagaggcccaggagaaggtggggtcattgtgggcgctgtcctggccctgtgccttccaccagcccaggaatcctgcctgctttccaggcagactttccaagtaccttgattctatcactcctaggccagggcatctcaccgcagcggctctgcccccaggggacactgggtgatgtctggggacatctacagttgtcagggctgaggggagctcctggcatggagtgggtgggggccagggatgctgctcagcaccctgcagtgcccaggacggccccaccccagagaagggtccggacccacaggtcagcagtttccaggggcagccccaagcttagtctttcacccataggctcccctctgtttccttcctgtccttcacttcgtgtgctgaggcctgggctggtcctggtggctggcgttggccgattggagcagagttcactgtggggagcgggtgcatttctgaggctccccctcagggtacgggggtctcaggggatggcagctggtttgctccatgtgagccctgactgattcctggactccccaagcccgggttttgggggtggcccaggccctgctgaatgcagagtggccgcattcatttggggcactgtgtacccttaagccacatgttttgcaattattgttcttgagcttcatgaacacggcgtcccactagcgtgttctttacacgctggtttgctggcttatgttgtgtgtggggtacatgtgtggtgtgagcggctggggtcccattgtgagtgtgccgttggccctggcccgggcgtggggctgtaggtcattccaacatcacgctttcctgccaacctgctgatcaagggtgtgatacacctgttgtcaattcagaggaaaggctgatgaattattttccaaagcagccaagttgccctcccacaggcaagattttgactgttcaggtccctcaa

SEQ ID NO: 33490 - DNA, 2214 bp, Artificial sequence
  DNA replication origin
ctggaaacagatctttgaggagcggctttcccgccttacagctgggaaagaggctcagagagggactcacccacccagggtcagagagggactcacccacccagggtcagagagggactcacccacccaggcccagagagggactcacccacccaggcccagagagggactcagttacccaggcccagagagggactcacccatccaggcccagagggggactcacccacccaggcccagaaggggactcacccacccagggtcccctgccagtggcctgtccccagtgcctcaacccctgcagaggctggtttcagggggtcagacagaaaccggacccgagtcaggctgctctccctggcgcagcagtgtctgtgcaggacggcagaacgcaggagagcttgccgtcggcggcagcacccaggccgggctgcgtgggcctcacctctcttcacccacaggctcccgagggaccacagctggcagctccggggatgccctcggcaaagcactggcctcggtgaggcgtggggcatggggggtggccaggcaagtgacctgagaggccggcccctgaccgcccatctctcctggtcctcctcgcagatctactccccggatcactcaagcaataacttctcgtccagcccttctacccccgtgggctccccccagggcctggcaggtctgtgagggttttggggggaggggaggctgaggtctgtgagggtttggggggaggggaggctgaggtctgtgaaggctttgcgggggaggggaggctggttctggtgtctgcaccttgctgggataggcaggcagcggggagggagcagatggcccccaagggcccgtggcatcgctggtcaggaaccgacggtggaagggagtcccccatgggcttgtgttccactgggcaatccaggaaagctgcctagtggaggcagcctccaagccagccctccaaggctatagcacataaccaggcagtgagggagggctgggaggtggcgtccaggttaggtcacagcacaggcaaagccaggaggcaggacctggcagttcacactgcgtgaacatgaggggacattggcgtgcctagcagctcccaggtccgatggggccagcatcgccagggctgtggcctggactctagaatgtgtgcgtgttgccatttgctcacccactgggtatttattaggtactgactgtttaccctgtgcggtgctccggcatgggagggcagaccctcctatccctgtgaggacgtgcttgcttatccgcagggggtcgggggcaggtacaggaggagggggagtgagaactggaggtttccagaaggtctgggtgtttaaaaacacccgtgagtcctcatctctgcccccatgggaagcgccaggaaccctcacttcacctcggcctgtctggtcccacctggagcttgccactttcttgcctgctgctggagcccagcgtgggtcagccagggtggggcagcatggggaggagccccctactgtgtgctgccgagccactttatcctctgagtggggagttggattttgtagatggggaaactgaggctcagagataggaatggcagtacccactgggcacccagcatccctgcctggcggggccgagcagctttgcatcagtgtggggtgccccggaatggccatcttgggcatcaccggaggctggacaggcggggtggttcatgaatccctccccatgggcatcaggccatgctcacaccccgcccctcgcaccccattcacgtccccactcccttccaggaacgtcacagtggcctcgagcaggagcccccggtgccttatcgcccagctacgacgggggtctccacggcctggtgagtgcctgccccgccccaccccacccttccccgacagaatttgcaggacagacgctccttgagaaggagaaacctttttgttagtttcttgtaaataagccccaagctgttattgaggcctcgtggccgccaaggcacacacattttgtgtgtgctcccgggcgccagatgcctggcatatgcagcttcctggggaaggggaagatgggaccaccggccacttgcatgcggaagggacatgaatggaggcctgtggggtccctcggcttgggcccctcaccacccatccccccaccctgcagcagagtaagatagaagaccacctggacgaggccatc

SEQ ID NO: 33491 - DNA, 918 bp, Artificial sequence
  DNA replication origin
ggtagggcagggctggggttccccactcggcccccaccttaccagctcccctccacagatggcagcctgcacccctcagccgagctctggagtcccccgggccaggcgggcttcgggcccatgctgggtgggggctcatccccgctgcccctcccgcccggtagcggcccggtgggcagcagtggaagcagcagcacgtttggtggcctgcaccagcacgagcgtatggtaggacccagggcagggggcagggggtgggcggagggtggcagtgcccatctaacccaccctcctcctgcctgaccccccagggctaccagctgcatggagcagaggtgaacggtgggctcccatctgcatcctccttctcctcagcccccggagccacgtacggcggcgtctccagccacacgccgcctgtcagcggggccgacagcctcctgggtatggcccctccctgggatgcggcctctccgaggggacactgggctccaggcagggtctgggtggggggtggcgaggactccacgggaggcgcaggcgcgtctgctggccctgagagcgggttgttgtcagttctcattgtccgctgtctgcagggcctgccacgtgcgttgggcttgggatgtctggaaacagatctttgaggagcggctttcccgccttacagctgggaaagaggctcagagagggactcacccacccagggtcagagagggactcacccacccagggtcagagagggactcacccacccaggcccagagagggactcacccacccaggcccagagagggactcagttacccaggcccagagagggactcacccatccaggcccagagggggactcacccacccaggcccagaaggggactcacccacccagggtcccctgccagtggcctgtccccagtg

SEQ ID NO: 33492 - DNA, 1695 bp, Artificial sequence
  DNA replication origin
agacgcgcctgcgcctcccgtggagtcctcgccaccccccacccagaccctgcctggagcccagtgtcccctcggagaggccgcatcccagggaggggccatacccaggaggctgtcggccccgctgacaggcggcgtgtggctggagacgccgccgtacgtggctccgggggctgaggagaaggaggatgcagatgggagcccaccgttcacctctgctccatgcagctggtagccctggggggtcaggcaggaggagggtgggttagatgggcactgccaccctccgcccaccccctgccccctgccctgggtcctaccatacgctcgtgctggtgcaggccaccaaacgtgctgctgcttccactgctgcccaccgggccgctaccgggcgggaggggcagcggggatgagcccccacccagcatgggcccgaagcccgcctggcccgggggactccagagctcggctgaggggtgcaggctgccatctgtggaggggagctggtaaggtgggggccgagtggggaaccccagccctgccctaccgtccctggcgagcccccgccctgccatgtacctgccacgtagaagggggcgggataggtgctgctgggggtcttggcggacgggtaggcggtggcatccctgccgtagtcctcacctgagctgggtgggtacacctgcgggcgggtgggcggtggggggtgcagtcaggacggagggaccacgatcagcccatgcaccttgccggcctcctgtcccctcctggtagcacatctaccaccccgtttcccttccctgtaaagccacccccctttaggtaaatcccagcccctggccaagtttgaggttcttatgatgtcctggtctctctctcctactccttttccagcccccacctcccgcctccctgaacttctgacctttgtacttgaggacttggatctggctctgcctactaaacctttttcctccttaatccagaaaactcctatcgacccatcaaaaccccagctccaacaccccatcccatccttctcccttgttccccagctggaatcaatcttccagtgctgagcttcccttggtcccagagcaacattcgtccttcactaaagtaacaggaagaggggtctgtgagtagcgccagctctgactggttggcactgcctggactgtggggctggggcctgttggtaacgtctgctgctgtgctggagcgggaagtatgctgggtgggcctgatgttgtaataaactggggggcggtttcagggcagagaaagtgcaccctggggaaggaggggagtgagtgatactgttgggagcagagcctgaccacgcctttggcctgggaagtcaacctgactctaaccccgaacccaggcctgtggggagctggtcggctggaggggtgaggagatgtatgcccagggctcttggggccagcacaggcactgggcagagggtggttggtggctactgagccagggaatcggcaaattccctctccctccagcgagatgagaccgcaggagtgtggcacagcagcctggaccatctgcgaggcctggtagggaggcagggatgcggggcagcctgaagctgtgaggatgtaacagggagccccaattgcggcaccccccgctttttttttttttttttttgagacagagtctcactctgttgctcag

SEQ ID NO: 33493 - DNA, 1574 bp, Artificial sequence
  DNA replication origin
ccggggcatcgggggcttctgggagggagcctgcaaagggaggtaggaggcttcccgttagctgagggcaccagagggagcagaccccgcaccttccaggtcctggctggacgtcgggcgctcgggccgtgggagggatggacggtgacggggggtcgaggcaggggccggcgggcgtggcacgtccagggagaggttcctacgagcctctggtcccgaggttcctgcagctgacgggcacgggctctgccatgtgctttctgtgtcagatgcctcatggggctgcatcgtggctcctctgcactgagccctgctgcacacgcgggcatcccccgcgaggcacgtcacagcctcgggctcaggagcactggacggcgccttgaactacccggggcccattccaggcagcacagtcgccaggcatggcggcactcacctggggtcccagcttctctggaggccgagacaggaggatcacttgaggccaaaagttgcaaaccattctgggcaacatagggagatcccatctttgcgaaaaattttaaaaattagctaagtatggtggcacacacctgtggtcccagctactcaggaggctgaggcaggaggatggtttgaccctgggagttcgaggctgcaatgagctgcgatcgcaccattgtactccagcctgagcaacagcgcaagaccctgcctgaaaaaaataagcgtgaaatcacccacaaaaagcacaaaaacgtaaaagatcgtggctctgaatagaccaaggacaggagccccatgatgcgggaggaggcctctgttccgccttggctgggcacatgcgcctgggccactcgaacttttcccactgtgcgcacgtccgtgagtgatcaggaaggcgcctgagtgctggtttccgggttacggattttatcctgtaggcgagtttgcaaacagcagcccctagtggtgaagcctgactgcgtgggatagtcggggccatcttggaaggagggtggggccaaggggcttctcagcagagccttggcttagaatccaccaactcctcgttttccaaactgcgcgtcgcgggagaaaaccatcgtggttcttcgacatctttggagccgtataaatagacccggggctttttgttgttgttgctgctgctgctgttgtgttttgagacggagtctttctctgtccccaggctggagtgcagtgacacgatctcggctcactgcagcctctgcctcccgggttcaagtgattctcctgcctcggcctcccgagtagctggaattataggcacccgccaccacgcccggctactttttgtattttcagtagagacggggtttcactgtgttggccaggatggtcttgatctcttgacctcgtgatctgcctgccttggcctcccaaagtcctggtattacaggcatgaggcaccgcacccagccgacccgaggtttttaatatatgaaacgggaattgtgagggtctctcctccagggtgtagggcaggggttgttctcatggccggtggccggttctcaccccttttgcttctaacagacacgcagcccaag

SEQ ID NO: 33494 - DNA, 1262 bp, Artificial sequence
  DNA replication origin
tagttcaaggcgccgtccagtgctcctgagcccgaggctgtgacgtgcctcgcgggggatgcccgcgtgtgcagcagggctcagtgcagaggagccacgatgcagccccatgaggcatctgacacagaaagcacatggcagagcccgtgcccgtcagctgcaggaacctcgggaccagaggctcgtaggaacctctccctggacgtgccacgcccgccggcccctgcctcgaccccccgtcaccgtccatccctcccacggcccgagcgcccgacgtccagccaggacctggaaggtgcggggtctgctccctctggtgccctcagctaacgggaagcctcctacctccctttgcaggctccctcccagaagcccccgatgccccggccagaccccgctcacctaggctgccgtctgccgctctccgccgggagctgccggagtaggaggggtagtactgggaggtccccttcatgcccgaaggggacaggggcccggggctgttgagggccagctcgcctgacaggaagccagcctggtggggagcggatggtcagaaagcgcccagctggcatccagaccccaggctgttccattcaagaaaaaactgcaaaggccgaagccactcagacccgccctgcagtgggtgatgccccttctgcctgtcacggtgtttctctgtgacacctgctgtgtttttctgacttgagactgaccgcatcccacactgctgttttcacgaagaacgaaagactgagaaacagataccagtgtggccaacccaaggggctgctcccccgattctgagacgcaaagtacaaagctgcgtggctaagcgtctgtgcacccggctgcttcctatctttttggttttgttttgtaaagccctcggttggattctgtacatgttagtgtgaaacgggctttcttcctggggagccagggctgccctgagccgggtcccggaactgactcctgcatttcatccgttctaaggccgggcacggtggctcacacctattatcccagtactttgggaggctgaggcgggcggatcacctgaggtcgggagttcaagaccagcctgaccaacatggagaaactccgtctctacaaagaatacaaaattagccgggtatggtggcacatgcctgtaatcccagctactcaaaaggctgaggcaggagaatcgcttgaacccaggagacagaggttgcggtgagccaagattgcgccattgaactccagcctgggccatgagc

SEQ ID NO: 33495 - DNA, 2250 bp, Artificial sequence
  DNA replication origin
acagcccccaacatcctcccccagcctcacaaccagggccagcgtgggtgaggatctcggctgcacaggggcctgttgtatgggctccccagggggtccacacctgcaaagccctgctgcatggcctgttttcctgcctgccactcagaggagagggcaaccgagcccctccagctaagcatggcagccctgcaggccttggcctccctggtcctcacctacctcccctctgctcccggtccacacccacccagcccaccctggcccaagcccagcctggtttcgctatcaggaagcaaacataacctagctaagccaggagagcttctgcagatcagagagggtgggtgacagatttgtttaaaatcaaaatacaccccagcccggcccgagcccctcacctgagtcaggccgcccacgcctgcgtctctcccgaaggaggcataggcgccccgctcaccgctcttgcctgcaaggggagaaggaaggttagtgggaggcgaccccaaggaacatcctgagggcccccgagtgcctgccatgtgcctacaataggctctcagtaagtgcacacgactgagagcgccacggcaggatgctggcagagcctgaccccagtgtgcccatctcggggagccctggccccagtatgcccatctcccgcagagccctgccctcagtgtgcccatctcctgcccaatgacaggcttggggacaagaaggggtccccgatgatttcggggccaactctgagcatctgcagcccacagaagccctgcccagggggtggggcggaaaggggacagcagagctcacggggtgaggtgggaaggggacagcagagctcacagggggtgaggcgggaaggggacagcagagctcacagggggtgaggcgggaaggggacagcagagctcacagggggtgaggcgggaaggggacagcagagctcacagggggtgaggcgggaaggggacagcagagctcacaggggatgaggcgggaaggggacagcagagctcacggggtgaggcgggaaggggacagcagagctcacagggggtgaggcgggaaggggacagcagagctcacagggggtgaggcgggaaggggacagcagagctcacgggggtgaggcgggaaggggacagcagagctcacaggggatgaggcgggaaggggacagcagaactcacggggtgaggcgggaaggggacagcagagctcacggggtgaggcgggaaggggacagcagagctcacagggggtgaggcgggaaggggacagcagagctcacgggggtgaggcgggaaggggacagcagagctcacggggtgaggcgggaaggggacagcagagctcacaggggatgaggcgggaaggggacagcagagctcacagggggtgaggcgggaaggggacagcagaactcacggggtgaggcgggaaggggacagcagagctcacagggggtgaggcggaaaggggacagcagagctcacaggggatgaggcgggaaggggacagcagagctcacagggggtgaggcgggaaggggacagcagagctcacgggggtgaggcgggaaggggacagcagagctcacgggggtggggcaggaaggggacagcagagctcacagggggtgaggcgggaaggggacagcagaactcacggggtgaggcgggaaggggacagcagagctcacagggggtgaggcggaaaggggacagcagagctcacaggggatgaggcgggaaggggacagcagagctcacagggggtgaggcgggaaggggacagcagagctcacaggggatgaggcgggaaggggacagcagaactcacggggtgaggcgggaaggggacagcagagctcacggggtgaggcgggaaggggacagcagagctcacggggtgaggcgggaaggggacagcagaactcacggggtgaggcgggaaggggacagcagagctcacggggtgaggcgggaaggggacagcagagctcacagggggtgaggcgggaaggggacagcagagctcacgggggtgaggcgggaaggggacagcagagctcacggggtgaggcgggaaggggacagcagagctcacggggtgaggcgggaaggggacagcagagctcacggggtgaggcgggaaggggacagcagagctcacagtggccctgcttcctgctggccaggcccctgcccttcctgagcctcagtttcctctgtttcaggcgtt

SEQ ID NO: 33496 - DNA, 1443 bp, Artificial sequence
  DNA replication origin
gacctcctggggccccatgcccagggatcgcccccgaagttcactccaacaggcctgtgccagaggcactgcggcctcaatctgccctttgggggaaccctccctcacccagccttggcctcctcctagaaatgacaaaaataaggacagcccccacattaatacagttattaaaatcccccccaccgattaatgatgcattttaataacccaccatgaatattcataatgcatccattgctcctgttctaattaaaatgtactaatagaataagacactgctgtcagagtgtggttttctgtgatttctttggtgaagcaccgcagagttttacccgggaagggcaccttcctgccctgggccagcctggctgcctcgggagaggcctgcgagtggacggcgcaggggcgctggggagagggccccaggagcggcccaccccttgggcttcagttccaattccagtcacggggtgtggaagccgcccacctgcctgggctgccgtgaggataacaatgaaagatgctgcttcagagaggccatccgtagccaaggaatgctccaggctggtggtttcccagtcccggtccctgttgggtcccctcctgagagggaccggggactggtctttgcctggtggctcgttggcaaatgggagagggaggcttcaaaaggcgcttagtaaataccgggtaggactgagattggtctgcagcagggatctgcaaacagtacacaaggaccaagtctggcccctaagctgctttttaaataaagttttattggcacacactatgcccgtttgtccatgtactatcaacggctgcttttgctgcaacagtagagttgaatcaattccaatagagaccatctgtcctgcacagccaacaatattcactccttggtcctttccggagaaggctggctgaccttgatacagaaaaagactgtccaagtgccttcagctgcctctgcacaagaaacccaatcgacagacttcagtaccaggagtggggttaccatgccgggcaggcaaaactattggtggacacgggccctgaacacagccctgtgtaccgcccctgccaaaccctcaggcacaccaccaggtggtctggcttcagatgggcctggggacttcatcctatagccccagctctgcaatgtgcccccactcaggtgctcaggctaaagtcctgggagtcctcctcaccttccctcctcccaaagaacagcagcttgccccatagctacagcagcgggttaagcccagtccctgcagcagcttccttccaagtctgctgacatcctcaggcagccggatggagcctttagaagcaaaacttggctcttctccctccctctaccctctctcatggctccccaccgtcctcaggataaagaccaaactctttcctgatctcaccactctcctcttcccc

SEQ ID NO: 33497 - DNA, 1130 bp, Artificial sequence
  DNA replication origin
ttctggttgtctggatcggaagacatttaaaacgggaataattttcgtacgccttctcccacccaccgcctcccatttttggaaaccctcaggcacaggtctctgagtgacagcctatcttctgccaagacagacaggctctgaggccacgggagacaccaggaaattgcttattgacggaccaaaggaaagttctttcctatttttcatttccccgtcgctttctctgtccgtgcgattgtaagtgtgacacacggtcagagtgaaaatccacagaacggcacctccgcgttctgctttaagaggaaaccccgggagaacctggcgcatgggtcatttcctccgggtgcgtgtctgggagtggaattgctgggtccctggatgctttttcacattgaaagcgtcccttgtgaccgggcgcggtggctcaggcctgtaatcccagcacttgggaggccaaggcaagaggagtacctgggactaggtgttcgagaccagcctggccaacgtggtgacagcacggcctgtctcatttaataggtgacaaagatcgtgtcctttcacctgccacttgtttaatagagggcggtggtcttctcggaaggggattgaccctgtgaatggctctctggtgaattttctgttactctcttgggccctcgtccttgaagttgatccactttttattctgaagtctttcgggattcacaggaagtggcagagtgttctcctctcacctagccacccccaggggtaccgtcccgcccacccgtggtgctgcgtcagacctaggaagccgacattggtgccgtccacagatcctgatcagattccaccggctttacacgcacgtgtgtgtgtctgtgtgtgcgtgcgggtgtgtgtctgtgcgtgtgcgcgtctgtgcgtgtgcgtgcgtgtgtgcgcacgtgtgtgtgcgtctgcgcgtgcgtgtctgtgcgtctgcgcgtgtgtgcgtgtctgcgtctgtgtctgcgtgcgtgtgtgtacgcgtgcgtgtgtgtgtgtgtgtgtgtgtgtgtgtgtgtgtgtagttctgtgcagttttgagacatgcaccttctttaagcccaggaatcaccaatctgttcttcatctgtacgattttt

SEQ ID NO: 33498 - DNA, 1432 bp, Artificial sequence
  DNA replication origin
accctcctcattgcctccactcccccaggcccctgcaggctgtggcgctggccccaggtgtggccctcccgaagctcccgcaagatgggcacctgctctcttccatcgtcaggttcagcgagtcgatgggtgcgaggggcggagggatcccggcagggcccaggagctgcagtagctcatttccccgcttcctgcttctcctctccgaggacccaggaagaggggagtttggggctcatcagcaggatggagccccggagctgtgggatcccttcccaaacctcggcttcttcctggaacagtgggtgcagcttccttccaggcggggcctagttggcttcggggacgccacccttcgccaggagtccccaacgctgatggctgatggggtaccccagccgcattctccaccttggccccttcttcatgtgccctgttctagctcccttttaagtcacctcgcttttcttaagttcatttgaaaggaaactttagatttgagaaccagaaacccaggtgagaataaaaggtgtccctgaaaattaattaaacataagttttcccctgtgaagggtctgcctgttcttcgatatttataaatatttaaaaattggtgtcgagagaggagttaggtactgggcaaggtggctcacacctttaatcccagcactttgggaggccaaggcaggaggatcgcttgaggccaggaggtcaaggctgcagtgagctatgtttgagccactgcgctccagcctgggtgactgagagaccccaactcaaacaaacagaaaagggccagacacagtggttcatgcctataatcccagcactttgggggaccaaggcggaaggatcgcttgagcgcaggagttagagaccagcctgggtaacacagcaaaacctcatctctactaaaaatacaaaaattagctgggcgtggtggcgcacacttggggtcccagctactcgggaggctgaggcaggaggattgctggagcctgggaggcggaggttgcagtgagctgagattgcgccactgccctgcagcctgggtgacagagccagaccctgtctcaaaacagaaacgaaacaaaaaaggcattagagattaacgaataggaaaccaagattttctggttgtctggatcggaagacatttaaaacgggaataattttcgtacgccttctcccacccaccgcctcccatttttggaaaccctcaggcacaggtctctgagtgacagcctatcttctgccaagacagacaggctctgaggccacgggagacaccaggaaattgcttattgacggaccaaaggaaagttctttcctatttttcatttccccgtcgctttctctgtccgtgcgattgtaagtgtgacacacggtcagagtgaaaatccacagaacggcacctccgcgttctgcttta

SEQ ID NO: 33499 - DNA, 2580 bp, Artificial sequence
  DNA replication origin
actctccacatgtccacctgttgagtgtaaacctctcacttttcagagctgaaacgtaaagacaactttgtatcactgtcaagagctgataagttgtatccttcgcctaatgggatacccctccccccagagcaaaggcagggggaacagcgagttttcagcggcagggactctgcctggcggtacagcggggtcatcgtctggagttttctcactctgggcgtgggtgtccagggtgcagcgtcacttgagggcacgcgagtcctcagagtcttctggtctgtgatggggcggagcaggacgggccgggcctagatggagcgcagtctcaggttcccgggtgtccccagctctgctcccagcttgggtttgaacccgggactgtagggtttggtttgccacccgccccgctcacgtctcccctcccctccctgcagatgttcccgctgcctgtcaccaacgggaagggccggcccgcctccctggccggggcgcagttcggaggttcaggtaggaccccgccttcctgccagcgctcgtggagtgaggagatcaagggtctgttgaagacagtgtgcgggcgagggaggctggggcagcaaaggagggagacaatggggaaagggccacacaggccgggtcgggggcagcgagcctgaagacccctgaaatcagctgccgttgcccgtgtgacctgccttgggagcccgagcccctgagcccctcgtcccctcgtccctcccgcgcctggagcctgggtctgggggctgggtggggcttgtttttaggcgcagggttggagctgggcctgtgtgtgggtggggatctcgagcatccgtttctccagtcaatccataagggggaaactgaggctctggagagggcgtggtgcgggatcccggctctcactggatcccacccaccttgtgagcctcgacgactttcatttaagcaggtattaggcgcttgctgtatgcagggcccagcaccagggtgaccggccattgtggtttgcccaggactgaggggcaattcctgggacccgcggctttgagtgctcaaagcagaaacatcccaggctgacctggatgagcgggtcaccctcgctgatgacacagcagtgggcgggacagataggggagacgtggggtcctgggggtggcctgaaaatcacactctggagcatgggcagggcttcacggcacacccagcgagggccaggttgccccaaagcgggacctctagtgaaggtctccgcagagggcgtgtcggggcagagccctgagggtgagaggaaggggccgtgggagcatgaggggaggaatttgccaggcagagagagcagcccgtacggacgccctgcggtgggaccggccggcggggcgggctaggggcgctgtgttcgttgcaggggcagcggggagccctggatggttgtgaatggagagagggtctagtctgatgtgcatttgggcggcccaggctggctgtcgacaggatttggtgggggaggttggggcgggtgcccccgatgctgcttcagagccacgggtctctttgtggacatcagcatctttccggggagtgggggcctcgggttggggcctctgaagctgtgtccttcctgcctccgggatctgggtggaaagcgccgtcctgcagttatctccagaatcccccaggggtgggccctggctggagtgtcggggttttgagtggtgggcaaagggggttctgtacttgggcacttgcacccccacatggagagacatcgctttgctgcccccactgcctcacactggccttcccctctacgtgaggaagtggccacagggctggccggaatatgctccctgaggcgtggaaatccccaaacgccaccctgccagccccccggaaacagccccaggaaccggacatgctaatgcttccctgtgtgaggcagagggtcaggccctgggggcttcctggaggaggaagcgcaactcccaaggccgtccacccccattctcctgggcctctgggtgggcttacagcagggcctggtggggagggtggggtgggaggtgtcttccctcgtcccctgtcgcctctcaccccctcagccctggcacggaccactgtgagattggtccctgggtaaccagagctgtggtgtgtaggccgtgtggacctgagaatgctccctctgggttgcctctccctggacgcccagcccggtcccagcaggaacctgccaatgtttgcagatgtattttctgtggttcccacagagtctcgccctgtgctccggccctgccccaatgctgcaggttgggagggtctcgccttgtcccctcacacgttagggcggaggctttggagggcccagtgaggcccagtatgttgcattttttgcccttgagggacgtgatgtggctgctccagcctgggaccccccagctcctggacacagaggggtgaccccctccccgttcagtccatgcagttaacgcccgcctgagcccgggggtggtggaggatgcagagctccaaggcctgagttggtggcaccctcctcattgcctccactcccccagg

SEQ ID NO: 33500 - DNA, 1775 bp, Artificial sequence
  DNA replication origin
cagtctgaatttaaccctcccgcctatgaggcacaggccactgaggtctgtcaaaaacaaaagtccccaaactgaaacaacaccggccaccctgcggaaaaaaacagcccaagggccggaggggccaaggctccggaagggccatgctggtatttttaagccccgttttatttttgcttccctggctgagtaacccgaggtgcagttgggttgttttttgttaaactgacaagtcacagaccgctgggctggaacagaccagcgtttggggggagggggcacaggttcagccccaggacctgactcctcacctcaagccactcagcacgtctccccatcccgggtcggagccgttcccagatgaggaaacaggctgggagcggcgaggtgcccgtcctctccgggcgtcccccctcgggctttacccagaggtggagttccacctccctggccaggacggggaggcagaggcagcccctgtgactgcccgcatccccactctgttcctgcatgcctgccttctgcccctgccgaggctgggtcctaggggaagcacttacttccctggaccagatgcgtataaagtgagagaacagggaactccaaataaatacgagggagaacgctaacccaggctgttcccagcgcgcctttgtcctgccctgacccaggctagctttggtcgggaacgaaggacccgccagcactggcctgggctgacatgccctgcctgggtcccaggcagtccctgggcctgagtcaggggcttcaggaatgaagggggagcgagtccctaggaccgaggctgttggaagcgagctccccaggccctgccgcgtgcgagactcccatgggcttttgggtttcaccacgtcccacacagccagagccctcggtccatttctcagaagaggaaactgatgctccaaggggtgcgggggctgttctgggctgctcatgaggcctgcagagcccacaggacacagcccggtacccatgtgacctgtggcacgttggtgcagccctggtgtcctaggggacaaagcagatagaaatgcagttggctgtcccccacagcaggcctttgtttcccaaatgagaggttggcccttggaggtctgggtccaggggaggctgggtgcaccggagcctgcgggagggggtgtggtccagggcgaacactgccttcagcgcgggtgccacccctacccgcaagaccgttcttcctctccagggccaggtgagaatgcggcctccgtttccccttctgcaggaccagggagtgggggacaaccccgcttcctgggtcccctttggacctgtggatcgtggccacaggcgctgtgccttcgcctcctggctggctggggaaggtgttggggatcttggctgctcctcagaaagcccctggctctgattccagccactttgatcacttaagccccgatgggagccttaaaacgcagccccttggggcagggcggaggcttgttgtgtttttttctgtggcaaaagggtttgttgccgttggcttttccggttaatgccgctgagcccgttaatctttagggacttagtgttctgggtacgggtgagccgggcgggagggagggtggcagtcccacacccctagcacccaggagctggatcagctgtggggtgcagcctctccccagcccctccagcttcctgccgggcccggggctccatcccgtgtcttcctcgacctgctgcctgtctgagcctcggcttccccttttgccaagcaaacccat

SEQ ID NO: 33501 - DNA, 1128 bp, Artificial sequence
  DNA replication origin
ctcactatgtttcctgggctggacttggaactcctggcctcaagcgatcctcccgcctcagcctcccaaagtgctggaatgacaggtgggaaccactgtgcccagcccccctcccatttactgaaacagggtctccagggtctcactgtcaaccagactggagtgcagtgatcttttacttacttttaatttttgtatctacaatgaggtaagcgaccctgatcaggcccattttacagatcagaagatcaaggccgcattttgcttacccagccaagctgggggcccaggaccatgcccctgaggactcagtttccccatctgtaaagcagtaggctgtagaatgctgcgtccgggcaaaagccccatagcacacgtgctgccgtgcgctgtcagcctcctgccagagagcggcccactcccccagccccaccggggcctcccatccaaacagctgaggctccatcgctgaagtattcagcaaacactctcccctgaaaaccttcccgtgaactgtggaggcaaaggggtgtcgggggctgggcgggggtcctggctcaccatgctgaagtccaggaggtcactgagctccttgtctgtgcccacaggcgccatcctctgcggctggttcattctcctggggccagggcgggcacctcaggcctggaaaccctgcttggtggatgtggggacagatggacagggagaaacagggaggggagaagagttgtgagtggtcaaagcacagagtgctaaaagccacctaaaaaaccctcaaccgccctggggtctgagttccagcagagccctgggggcacggggagccctgggagcaggcgcagggaagctggaattccagagtctaggtccctgcagagtcctccccagagaccacagggagtctgaaaaatggggggagggtgtgcaaatataaactccctaactcccccagggaacaccagggcatcaagttgccaagtttaaactgcacgcagggcagccagaacctctcctttctccaactctctcatttccaaccaaccccgggcttcctctgaggccccctacccccgggaaagggaggaacagcccgatcctaccccgccccgagggaaatttggtgattcc

SEQ ID NO: 33502 - DNA, 915 bp, Artificial sequence
  DNA replication origin
gggccgcaccgcctgcaccggctgcggggggaggggggtccggcttcccgggccgcctccccccgggaaaaaggcgttccagcgcgccccccgccttcggcgccgtgcaaagtggcttcaaacattctccaagtctctcaaagtccttgggacgccccagaagtcttccagctcccgtagaatgcccgttttagctcgccacccccccaactaagtctgtcttaaaatcggtttcagctaccccacaaaaaagtgcggtttcgtagtcctcaaaaaaagtcagtttcacacgccctccaaaaaagaaaaaaactgagcgggggaggggctgcgctggggcgcccgcttcacacccggcctccagttggcagacaaagaggggatttctctgcttctgaagttgggtctccctcgacctcggaggctcctccccacccccagcctcggaggtgtctcccgggctgcccccgtccccacctggggacccctggggaaagtcgagactggaggggcctggagtgcatttctttggaatggaaatttttctctgtacctttttctgggggtggaatgggtcttggcaggtggatcccccatcccccatcttagaatggagccccctgggaccacgcgggagcaccctggtcttgagacgctctccccgctcatggagggcaggcaagggatgttgtcaaagttttgcttaaaaataattcccggatacatcgcgacagtaaagcaatctagggctgttttttttttctttcctgaatactgttggggttttcttggggggagggagattgagggtggaggaaagctttgctggtccctgcataggatgcgcgtcccccccacccccggcactttaagtcttgaagcttgtaaaagagtttcgtggttttctgacttgtg

SEQ ID NO: 33503 - DNA, 850 bp, Artificial sequence
  DNA replication origin
cccgggagtcattgttctccaacttcgcgcggcgccgggggggcggcgacgtggaggagcccggagctcgccaggcccgcgtcgcccccgtcgggccgggcacttcgggaaactttaagcagccccgggcgggggcgcggggggcgccggacgggctgtgcaacttaggcgcgaggaccgtcccccccagcccgggcgcacggggaccccggggcgccccctttctcgggtagaggggggcccggcccgggcgccggagtttggggtggggagcgcgcgggagggacgtccttttgtctgcgcggggaaggtgccgcgcgctgcaggcgctggtcggggccgggcgggccgggggggggcgcgcgggtaacatctgctccgcgttaatgcggggcgaggcggcggccgcgctgcgagcttcaaaggctcccgggccgcaccgcctgcaccggctgcggggggaggggggtccggcttcccgggccgcctccccccgggaaaaaggcgttccagcgcgccccccgccttcggcgccgtgcaaagtggcttcaaacattctccaagtctctcaaagtccttgggacgccccagaagtcttccagctcccgtagaatgcccgttttagctcgccacccccccaactaagtctgtcttaaaatcggtttcagctaccccacaaaaaagtgcggtttcgtagtcctcaaaaaaagtcagtttcacacgccctccaaaaaagaaaaaaactgagcgggggaggggctgcgctggggcgcccgcttcacacccggcctccagttggcagacaaagaggggatttctctgcttctgaagttgggtctccctcgacctc

SEQ ID NO: 33504 - DNA, 1167 bp, Artificial sequence
  DNA replication origin
aggagttcaagaccagcctgggcaacatagggagaaccccgtctctacaaaaaatacaaaattagctgggtgtggtggcgcgtgcctgtggtcccagctactcgggaaactgaggcgggaggatcgtttgagcccaggaggtcaaggctgcagtgagctgtgatctcaccactgcactccagcctgggcaacagagcgagactctttctcaaaataataataataataataagaagaagaagaagaagaagaagaagaagaagaagtccgtgattggatggttgcttcccttccgtgggtgaaactgaagggctcctcgggaggactccggctgccacactatggcttggaccctgagtgtgggtggggagtggcccacagtgagctccctacactggaatggggagagccagacccggccacagacaccctcagacccatggggtcagggctgggccacaaggaagggccgggggctgaggaggctggggtgggattggagctgcttggagaccctggctccggagaggcctctgcgggggtggggggcggctgaggaaggcaggcatcagctgtgagcacctactgtgtgccagactccccccttccactgtccagatggagaaaccgaggcccggagagtagcacgaacttgcctgaggtcacagtgaggtggagagggatgagggatttgcagcacagaccctgggacccacagccctctccccagacctgcggcacgtggaactctctgggcacggagggtcggactgtggacagcccagtttgggtgtatagcaggaggggcttgtggctttggtggggggcccctgtggccccgcctccccgccggcctggcataggtgcagcattgaactgtgatgactcaggggctccagataggggtgggaaaagcctcccaggtagaggacaaagcaaacgtagaggcccggggtggggatgagcttagcaagttctggaccatccagagggcaggatggctggagccaagcgggccagcgagatggtggcatcttcccaggctgggagtggagtgtaaatttccctttggggccccagggagccctgggagattgtgttattttcatttatttgtttagttattttacttttttttttgagacggagcctcgttctgtcgcccag

SEQ ID NO: 33505 - DNA, 875 bp, Artificial sequence
  DNA replication origin
ccactgcgccgtacaagactattcaattatcgggcactgacagcgaacggggccttgtgccgcgcatcgtagcactgtggacagtgatggactcagtccctgctgtcccggcaggatgacccatgagggaccccttgtctagtcctgaatgtggctctttcctgtgaggtcctcctgcctgtgtggttccacgtatcgtacagatgaggaaactgagactaggggtctcctccctgggccccagggcaccctggggctcgcgcctgccaggaggttccgctggtaaccacaagccaccattgttttccccaaggaggtcagtcctggggctgagtcactgggtggagcagcccgtgggggccccccacttggccaccacctctgcccagccccgaggcctgggtgctccctccagggccctggtacggggacaggcagcaagctatcctcctgactgtggcctttgttttgctctggggccgggcaggaggaggagcagggcctctgcacctgccgcctgttccctccacacctactgtgtgcgcccccgccaacatgaaccacgtatgtcagaaaaactgaggccaaggacaacttcccactagggagacacagaagcgaggggggcgaggggcggcgatggcgaggtttccagagacagacgcagtaggtgtgcaggccacagctgtccgcagagagactgggcttggattaggacttcggggccaccctccagatttctgtttccatttgtccctaaagtgggcacctttgacttctcccagggtatgaacacactcccccaacccccagcgccctccagcaggggcggagaagggagtggcggcccagcacttatcacccacgtcaggccc

SEQ ID NO: 33506 - DNA, 968 bp, Artificial sequence
  DNA replication origin
ctggttggacctgggcagggaagcctcctgagattgggagtgctaggggcttatgattgttctcccctagcggagggaggagattctggtgtgaaatggagcagtggggacacactccagttcctggggtctgatcacaagggttcctgactcctcgggcacttccagctatgaggacaccaaggaagggaagaggcttgtcggtgatcagacccctacccctccacccagacttatgggagccagagggccaggagagctgggcaggaggctctgaggttgacgggaatgggaacacagcctcacacctcctgctgtagggcattcaggggaagaaggaccatctcccacagggagtgggtcccctggggcagtgactcttgggctatgacctcaagatgcatgcggtcgacaggcagagagcggataccatgccaggcaggggaagctgagggacaaaggtactgaggtgggagggggtgtggggtgttcaaggaacggggcctgtgaggctggagcccagagaagaccagagaagaggagccaagatcagagagaggggcagggcctcctatgccacagggaggaattgggtcttcatggtgagaggactagggaaccatggtgggagtttgagcaagagacggacgtgatcacagggaccatgagttggggtggatctggggtacatttggaggataactgagggctctcccagggggtgggtatgaggggttagcagcctgcctactaggtgtggggttagggacctgggcctgtgaatggtggtatcgttctctgagtggggccagcgtgggtcaagggagaggcgtgaagggggaacaggaggctcatgtcccagggtggtgtccaggccccatgagacaaggcgggtcatggccaggaggggctgcgtgagagggggcaccagtgaagaaggcacagtccccagtcggggggagcccagc

SEQ ID NO: 33507 - DNA, 1299 bp, Artificial sequence
  DNA replication origin
tggtatcgttctctgagtggggccagcgtgggtcaagggagaggcgtgaagggggaacaggaggctcatgtcccagggtggtgtccaggccccatgagacaaggcgggtcatggccaggaggggctgcgtgagagggggcaccagtgaagaaggcacagtccccagtcggggggagcccagctctggatgcagcctggcctccccgagccctccttctgtccgagccccccacgcagcccctctgcacctgccgggtgcccgtccaccccagggccagggccaactgccgaggatggtcccaccccctcttggccaggcgcccacagctcctgactcaggggcccccgggggcctgtcctgccacattccggggccgcccgtgcaaacacagggcgcctgcccatcaccccccatggggcattgtttggcccagttaccccgaggcgggggcagggcaggggacagggagcccagccagattctcagttcccgccacccatgcacctgcccacaggcagccctgctgacctgcacccgccttgacatggggggacggcgcctctgcagtgtaccctgggcacaatgggggcatctcccttcttcccgggggtcttcacctcccctgaactttgctcaaggcacagaggacgtcatcccattgttcagatggggaaaccgaggcaggactcaagtggcctcatgcctgaagctgagccaggctcccatccccggcccacctgtcctgtcccccaccgaccccacctcaccccgccaggctccttcacctgcacctggtgccttccagaaacgggggaggccactccaggctgtcagccctctggcacaaaggctgggaggtcagaagccatccagggacgccttgccacgctaagaaggttgggtttcattcgcgggtttggaggagccgagggggccacgtggtctcactgggggttgggaagggcatctgggagaccgaggtggaggccggtgacgtggctgtggagtgggatgcccaaggcaacaggaggggtggaaagagatgcctgttagacgggaaactgggggggcgcccctggggaaagacgacaaggatcctaggagggcggggagcacaggtgcccccaaccccaaggggtgagaactagactcaggaggagactcagggcttgggggctgcagggatggctgcctggagctgagcctgcaaagctggaacagggaggaagggtaactgagcagagggaacagcagaggcaaaagctacgagacgaggaaatgcaagttgttccctgggt

SEQ ID NO: 33508 - DNA, 1279 bp, Artificial sequence
  DNA replication origin
ctgggtaacagagcaagactctgcaacaaaggaagaaagaaagaaagaaagaaaaagagacagagagagagggagggaggggaggggaggggggaggggagggagggaagggaaagaagagaaagaaagagagagaaagagagaaagaaaagaaggaagggaggaagggagggagagagggagggaaggagggagggaggaaggaagacagacattttcatgggccctaaaagcctccggggcctgggcctgttgcgttcgatggacagattgaactcaccctggtgggtgctcttgttaaactcctttgacagatgagagctcacaccatcgtgtgaccacaaccacagtggactcgctgagcagtgctccttgccctgagctcaagctcacgatcaacctggtggggcctccccaggacaccaggggtttcccccagggaaccctgggacagcaagaggcctccccacccccagggaaatgcccgggcagtgcggatcctgcaggaggagggggtgccccggtggaagcccacccacgcccgttctgtggttctgcaatctcagtcatgcagcatctatggtgaggtgaaaaactaaacattctttaattttaaaaagcggccgggaccagggcacagtggctcatgcctgtaatcccagcactttcggaggccgaggtggggctgatcacctgaggttgggagttcgagaccagcctgaccaacatggagaaaccccgtctctactaaaaatacaaaattagctgggcgtggtggtgggcgcctgcaatctcagctaccagggaggctgaggcaggagaatcgattgaacccgggaggtggaggttgcagtgagctgagatcacgccattgcactccagcctgggcaacaagagcaaaactccgtctcaaaaaaaaaaaaagcggggtggcgggggtccgggcatggtggctcatgcctgtaatcccaacactttggaaggccaaaatgagaggatggcttgagtccagaggttggagaccagcctgggcaacatagcaagatcccgtctctacaaacaaaataaagaaaaattagccaggtgtggtggtacatgcctgcagtcccagctacttgggaggctaaggatggaggatggcttgatcccaggagtttgaggctacagtgagccatgatcgtgctactacactccagcctgggtaacagagtaagaccccatcttttttttttttttttttttttttttttgagacacagtttcactctgttgcccaggc

SEQ ID NO: 33509 - DNA, 1176 bp, Artificial sequence
  DNA replication origin
gtcccagctccgcccccctagtgcacacacagcccctcccagctgccctccccaggaccagtgggtacgggcaactgggccaggttccctgtgtgacgggggagtgtggctgggggtggcccggggagggactctcagggccctcaccctgcctgctcctaacccggggagggactctcagggccctcaccctgcctgctcctccacccgggattcccctggcctctgcctgcagagtttcaaatgcctgtaaggcgattccttcgaaattctccttccccatctggctgggagccccgacgggctgagacctctgccctgtggttccccagagcaccgctctgagagggctctgcaaacaccctgcatgtggggaaatgcaggctcacagggggagcgatgcgcacagggtccccagcccgtgagagggtcctgggctcctcccggtgggtagagaccttcatgccagcacagaggtgctggctgacgcaggggtgcaggcagcagggagtggggtggagcgggaggtctggaagagagggtgcagcagtgtaaccagcccctgtccgggccagtcaggggagtccccagtgtgaaggggaaggagagagaggcagagacagagggagacagagaggcagagagagacagagaaaaagacaagagataggaacagaaagagaaggagacagagaagcagagaaggagacagagaagaacagaaacagacaaagagacagagagatagagatacagagaggcagagagagagacaggcagagaaacagagagacagagaggcagagagacaggcagagagagacagaaagagataaagagaaacagagagacaacgagagagatggagacagagagagatggagacacacacagacacagagagactgacagagacagagggacagaaagagatacgcagagacagaaagaaacagagacagagacaaaaagacagacagagatggggaagagaaagagacagagacagggaggctgacacagagagagcacagagaaagaagacagagagaaacagacagaaagagacagagacagagagacaaagacagagatggagaccaaccgagaaaggctgagggggactcagaaggggacccagaggcagcgtgagccgacccagcgccctccctctgc

SEQ ID NO: 33510 - DNA, 2128 bp, Artificial sequence
  DNA replication origin
tgggctgcgggcgcgccctggtggacgccagacccgctgcagctctgtccctggaagggggtcccagtcccacctccctcggtctgggcgtcacgcaggggtaagaaggggacgggacggggacaacaccagaagacccagggaaggcagcccgcaggacccccatcatccagctccctccattcttcccatgacgcgcccgagtttgggggagtctggcgaagctccgtgtcccccacccctggcgtcccgagcgggggccgcggctttcctgagcccacctcccccagcgcagggtgggctccgtggggtgggggccccgacgcccggggaggacccgcggccttgccccattggccaccaggtggcagcacgcgcgcccgactgaaccccaggaccagcgaggcccccgcgccccaccccatgcacccccggaccacagggaggggaggggtctggggaggaccccggggggccgtgagcaccagcctcgccgctctatgcctcggtttccccacctcccagggagagggagaataactgaacacacaggcgtggtgaagtcaccaggagggcttccctggggaggtggggttgaaggaaaaggcaccaatggtgaagaagagcaggccgggtacgggacgcggcaggtgcagagggccgggggagggcgcggtgggggcgaagggaactgagtcctgagcctgggcgggattgtggggtggggtttggaggcaaaggtcccaggtttccgatctgagcgcaggaggtgaggacaagggcaggatttagggtctacctaggacagagaatacaaaggtttgttttgatttttttttaaagtgatattcttggccggtaaatattcttactatcctcagcctcgatgggtaaaatccaaaggttttaagatactcggaacttgaattcacagctttccaaatatgggattctcaggatggagccaattggagaaaattccagaatcccagttcccctggccaatgccagcgttgatgcccaaatgcaagagtggcaaagacagggcgtgatggctcacacttgtaatcccagcactttaggtggctgaggcagaaggctcatttaagcccaggagttcgagaccagcctgagaaacatagcaagacccctgtcctacaaaaatgtatttatttatttatttttgagacggagtttcactctgtcgcccagactggagtgcagtagcgatcttggctcactgcaacctctgcttcctgggttcaagcgattctccctgcctcagcctcccgagtagctgggattacacgcacgtgccaccatgcccagctaatttttgtatttttagtagagaaggggttcccctatgttggtcaggctggtctccaactcctgatctcaagtgacccaccagcctctgcctcccgaagtgctgggattacaggcgtgagccacggcacccaaactcaaaattttaaataattaggctagtgtggtggtacacgcctgtggtccgagccacgtgggaggtgggaggatcacttgagccaggaggtggaggctgcagtgagctatgattgcaccaccgcactccagcttgggtaacagagcaagatcctgcctcaaaagagaagaaaaagagtgggccgggcgcggtggctcatgcctgtaatcccagcattttgggaggccgaggtgggcggatctcctgaggtcgggagttcgagaccagccttgccaacatggtgaaactactaaaaatacaaaaagttagccgggcatgggccgggcgcggtggctcacacctataatcccagcactttgggaggccgaggcaggcggatcgcctgaggtcaggagttcgagaccatcctggctaacaaggtgaaactccgtctctactaaaaaaaaattcaaaaaattagccaggcatagtggtgggcgcctgtagtcccagctactcgcaaggctgaggcaggagaatggcgtgaacccgggaggcagagcttgcagtgagctgagatcgcgccactgcactccaacctgggcgactgagcaaaactccgtctcaaaaaacaaacaaacaaaaattagctgggcatagtggcgcacacctgtaatcccagct

SEQ ID NO: 33511 - DNA, 1639 bp, Artificial sequence
  DNA replication origin
ccccctgtcctacacacactgggtccctcccgggaagccaggcctgaccccacttccttgtcaccttccgggtccggggtcggggctgcaggggtgagaggagattgatccagcagacgaccttgtggccactgttgccaaggagatggcccttgggggctgtgtgggtggccagggccagggagtgacagagggacagagggagggagggatgaaggaaaggagggagggacagaggggagggagagacagagagggagggagggagggagggaggcaccagcagtgggtacggtcctcacatcagagcctcctgggcagctggttggctatgttgacacagcctgggaaccagcattcacccctccctggcggtctgccattgactaaccgccattgggctcctgtctacaggcttggcttggaaatgagacgcagctgccaccacccaagttcacccaggagggctgggagcctgggagctggcacctggtctgctctccaaggtagcttctggtccattcacccccaggactggggtaggtatcctagaagtggggcccatgttccagggccccacaggatgaataggagtttgccaggtggagagggaacggtaaagaggagggaggcggcccgctcatccagccccaccactggagaggaaggggtgagtgagtgtcaggagggtctctgcttggcaggctctgtgacaggggaacctctggctgaggccagctggtgactgctgggtttgtgggagctgagcatggatttcccatagcgacgggagctgctgggcccggctgaaggacggttaggcttctgacctggttaccgcgtgccggctggataccagagatcagggtgcagccgtggaccccagacacggccctgcctcctaagagctctgcatctcttgggggcacaggcagcagctggggctgactggggaccggacccagaagccaccacagcaggaagagggtgcgggtgcaggaggctgcagccactgaagtgggggagatcgagtggagagctgggggttggggcagaccagggagaggctgactgggggcgacctggaccctttggctgcagggatcggctcacagggccagggggtttggggcagtggagctgtgggagggccctggggtatgtggggcctgactcaggggtgtcctgtaggacccagtccataaggggccattgcactcagggacgccagcatgggctgtggctgtgagtgcgcccacatgcacacacacaaacatgcgcaagcacaccagaacacgcaaacacacgcgtttaccaggacacacatgtgcagatacagcaggccgcacatgagaaggtgtatgtgtgaaccttcctggcacatacgtgcccatgcgtgcacatgtataaacgggactgaccatgtacaaacacacctgagctcgtggcaacgagcgaacatgtcacagcctctgtgtgcacccacacggacatgccagcacacgcatgcaaacctgtgtataggagtgagcacacatgctagaatgcacacgagcatgcgagaacacgcataagcatgccccgtatacatcacgtgtggcacacctgaatctacgtgaacactgttcattcagaaaca

SEQ ID NO: 33512 - DNA, 1734 bp, Artificial sequence
  DNA replication origin
agggtgggatcgcctgcagaacctagctcaggctgctctcttcctttcccaagcctcagtttccccatccgggcaatgggggaagacgcagatagggaatagatttgcccttggcctccggggacctcgttttccggctgcggcactgcagctcagagaggtcaggctgcctgcctagggccacacagcctggaggtgggggccggccggggggcgcagacgcgcaaagcctgtccccacctcacggccccctccccgccggcccgggcggggctgctggccctttaagagcctcgttttggcgccgcctcggggttatcgatcgcagccttggaaacgcgattagattatcccggctgggaacggcagcctggcgggggccgcgcgggggaagcgcgccgcttcttgtaaacggttccccgaagggcgctgggccaggggcctgggagggggctcgttcccggtggggggggcgtcccggtgcggcgcggcccagcgctcccgggaacgggggatgggtaactggggcccccattttgtgttttgggtttggaaattgaggcgcagagaggggtgcgcctttctgcgaggccgcatacccaggaagacgggtttatttgttcagctgcatttattgagcgcctagtgtgtgccgcgcatgcgcggggcctattaatccgattagcgtttcgcataaaaatagagtcgcggatgatgatgatggtgataatgaatatccgtgctcctgactcgctcctgccgtgccaccaagcctttatgtgcgttgtctcagatcctcaccccaacacttagagtggcagaggccctggtcccattatacagatggggaaactgaggccggagctcaaacaagccagaggggccgaaccgggacaggcgggcccccggctcgctcctgggagcctccctagtagggtcaccgtagaaggaagggaagggatgggttgtggggggagttggggaccagcccctccatccactgtgaccccttctgcatccgccaaggcctctggtaggtgcctgagctgaagcagatgaacccttgagtgtgggaggaaaggatgggccagcggatgggtgggggcaggaggaggcccttccaccaccaacttctgacgcctcagcagaaaggccccgggcccatgagcttgagtcgggggctggtgggcagtggacaggaccagcttcccttccactccgcggtcgtttgctcccacatgtgaccccatgcccacggggggctggagggtgggcaagcacgcattcgttgaacacctgctgtgtgccaggccctgaaccgtccccctgccaattgtggcacagtaggagctggttccaatgcccacccacattcaccctgatgcacccccagagacccagtccagtggtcccacagtcaacgtttgttgattgaccaaatgacagtattttgcaatagcagtaaatacaaaccacttagactggacttcacttgggtctcaatgacccttcctgccccatcgtccctgaaaacctctatccttccatcgttcctaacattatggagcaccgactgtatgccccaactaccttcttcatcctctcagcagcctgtgaggcaggaaatatgactggcctagtctacagagggggaaactgaggatctggggggtggagggccttgtctgaggccgcagagcccagaagatgagattgtaaacccagacccaactg

SEQ ID NO: 33513 - DNA, 1600 bp, Artificial sequence
  DNA replication origin
catgggagcacctggggggatgccatgggggaggtggtcccagccccagcccctggcctgaggcatctccacaccctgcagacaacgagagggacgcccgggcgcgggagcctttagccgcctttagccctcctccggcacctgtaccctgcctgtgcctcagtttccccagaagatggggggtctctgcggggatctggcagaagtgaggtgaggcctgaggggctggtcctggttggctcatttattctcttctcccagctctagggtgtccaccttcgatgggtgctgggcttttatgaagtcctaggctggggggaccaagccagacaccgaccctcccagatttcaagggcagggcagggctcagagagggcagcggctggccaaggccatgcggcctgctcgggtcaggggacagggtggagctggggcacccaggagcttctcaagtctctacctgtccagcaccaaggcccaccagggccccatgaggcccttcccggcaggagtgggggcacttggagagaccacagctgagggctcctgaggcgggtggggagggggccagggagctgggaaggggagagatgtggctccggagtcagggggaggagagggccagagacagagataggagcatggagagagatggagagacaaagagagagacagagacagagagagggactgggggacgaggagagagggtcgaagagatagagatgaagaaagagtaagagacagagacatggagatagggagacagaaaagatggaaagagagagacacaaagggagagggagacagagacagtggcagagatggaagagagagacacagagagacagagatggagagaggtgaagatggagagagagacacaaagggagagagagagagacagagagacagagatggagagaggtgaagatggagagagagacacaaagggagagagagagagacagagagacagagatggagagagatgaagatggagagagacaaaaagggagagagggagagacagtggcagagatggaatagagacagagagagacagagatggagacagtgatggagagaaagaggcaaagattaagaaagagtaagagacagagacatggagagagacagaaagagatggagatggagagaaggaaagagagagatagagagggagacagtggcagagatggaaaaagagagatgaagagagagagaaggagagagacagaggagagagacacaggctcgcccttctggatgtccggcattggggggctgcaggggagactctggggggacacgggtgggccccccatccctgctctggccctgcccagaggctgagacaccctggcaaccctctccagcagaaggaatcacctgcctcgacccctaagtgtgacctccctgacattcctctcctgagctccctcctctcctgtcctccccaccatggcggggtcctcgcccagctggtccctactgaagaggtcccaggtggtaccgtgtggttgtagctcaagccagccacatcccctccttctgcctgcaacctggagggtgagtcttggcctcctgtctcctcatg

SEQ ID NO: 33514 - DNA, 1158 bp, Artificial sequence
  DNA replication origin
tctctctgtgtctctctcttccatctctgccactgtctctgtctccctctccctttgtgtctctctctttccatcttttctgtctccctatctccatgtctctgtctcttactctttcttcatctctatctcttcgaccctctctcctcgtcccccagtccctctctctgtctctgtctctctctttgtctctccatctctctccatgctcctatctctgtctctggccctctcctccccctgactccggagccacatctctccccttcccagctccctggccccctccccacccgcctcaggagccctcagctgtggtctctccaagtgcccccactcctgccgggaagggcctcatggggccctggtgggccttggtgctggacaggtagagacttgagaagctcctgggtgccccagctccaccctgtcccctgacccgagcaggccgcatggccttggccagccgctgccctctctgagccctgccctgcccttgaaatctgggagggtcggtgtctggcttggtccccccagcctaggacttcataaaagcccagcacccatcgaaggtggacaccctagagctgggagaagagaataaatgagccaaccaggaccagcccctcaggcctcacctcacttctgccagatccccgcagagaccccccatcttctggggaaactgaggcacaggcagggtacaggtgccggaggagggctaaaggcggctaaaggctcccgcgcccgggcgtccctctcgttgtctgcagggtgtggagatgcctcaggccaggggctggggctgggaccacctcccccatggcatccccccaggtgctcccatgctggttcctggccctctttccagccttgatgaaggcaggcgcaggaaggggctcggcctgcacgtccctgccaggagcatcgtcatgagcgtgaagggggcaggcgcctggtcagggtcacttcccgctggacagatggggaaactgaggccggggtctgtaggaggctttggtcctatccactcctcaacgcacttccctaaagccaactccatgcccgacccagcagtgatccggccaggtcctgtcctgccctcccaggcttcagggcaaagaaggaggttcattctggccaggcgtggtggctcat

SEQ ID NO: 33515 - DNA, 1393 bp, Artificial sequence
  DNA replication origin
accagcctggacaacacagggaaaccccttgtctctacaaacaatacaacaaattagccgggcatgcatctgaactcccagctactctgaggcggaaggatcgcctgaacctgggagattgagggtgcagtgagctaagattgcaccactgcactccagcctgggccaccagagtgagaccctgtctcaaaataataacgataatggtaaaaacccttactacacggctgtcatgcgaactgtgtcagctgttcgttcattcattcattcattcattcactcggacacccaggtgtctgaatctctttgtgctcagaccccaccctggaggatttggagcctgagtgggtgcatcccgggcatggtctggacagagctggacaccggcattcccggctctgtgcagtcagggtgggatcagagggagagacctgagattggggaataggggcagaggggctgagggctgggcctgggggggatgggagggctgcagggagtggggcttggaggatgagtgggggacatcggctaagggaagcaggaagggacccctggcagagaccggcacgtgcaaaggctcggagatgtgaaggggcagccctagagactcctccgggctggagtgcagcggtgccgtctcagctcactgcagcctccacctcccggactcagcctcccgagtagctggaactacaggtgccaccatagcagggcaatatcttaacttttttgtggagatggggtctcaccatgttgcccaggctggacttgagctcctggcctcaagtgatagtcccgcctcggtctcccaaagttccagttagggattctgatctggggagggcactggggagccacgcagggtctcaagcagggggagggatgtgtcccaactggccttcaagagtgatcgctgcactctgagtacaagtgggagcattcgaagttccattagcaagctccggtttggcaagcatggattgagcacctactgtgtgcccgtctttggcctcagccttagaggccagatcacacgaaggcttgtgggcacgcagttgggggccagccccacaggcgagtccaggctttcaaatcaggaatccccctgccctgtctgcactggtggaaactgctgaagccgtcaggagctgggagccggctcttggtggcttgatagtgtgcgatgggccagtgtaggctccatcccaggctggacaccggtcagtccccagaggaagtatcgccgagtctgggggtggccctggcgcacgtgcagaacctctcagccactctgatggtgcttaaggcaggcggtcagggtattcaagttaacttcctcttaaacagacttaattagtgttctccagtcccacataaattaatcgtggcc

SEQ ID NO: 33516 - DNA, 905 bp, Artificial sequence
  DNA replication origin
ctgtaatcccaactacttgggaggctgaggcaggagaatcgcttgaacccgggaggctgaggttgcagtgagctgagattgtgccacggcactccagcatgggcgacagagccagactctgtctcaaaaaacacaaacaaaacaagagaaaacatgtgatcagaaaagcccccaaacctggagccactccggagctgggggagccgaatgggtgggatggatagggcgtggccgcatcggagggcgactgacgagggggcggggccaagtgagtgaggcttttgtggaggggcggggccaaacgcgctaactgcatgtggacgtcgtctataggggccggctttcccagggggcgtggcctgcgtgcgacagggccaaggtggggcccaggcaggttctcccctctttgaggaccaggcctaaagcagcaaagacccatccacccaaggagttgttgagaccccgtagacctttgctaggtgtggatgacctccagccctgtgggaccagaatggggtgggagagggagacccggagctgaggaggacccggagggtacctcggaagctctgcctgggatcggggagggctcctgaaggaggcggctttgaggatacagaggacagccagctgacaagacagagagggtgcatgtgcaaaggccttgagacaccagcagagtaaaagccagtttgcctggagcagggtgcatggtgcgtggaagagcctgggagaccaggtggagacggggacagggcggggatttgtgctttccggagaagtggagaagccatgggggcttctggcaggtggagatgggcaacgatgcagttcgtataaaaatataaaaattagggcagggtgcggtggctcacacctataattccgcactttgggaggccgag

SEQ ID NO: 33517 - DNA, 1501 bp, Artificial sequence
  DNA replication origin
agcatggccaagctggtggggaggacgggcttcaggtcacagtggccccctgccccgtgtggggagggacagaggacacggcaggtggacggcagcaggcggggaacatggggaccccttggggacaggcaggtggcaggaaacacttgcctggggtggaggtcacagctggagaagggggacattcccagcagcctggagcaggggctccacaggggccggtccaagcctcttgcccacagccagcccagctttctcgaacaggcgttttcccgagtctggggcggggggagcatttctgagaaggaaaagagtccctcagggtttcggggtttctgagaaccgtttccaccttttctcagaagtgcctcccccagacccatccccgggccccagcctgacaggcatcaaacctccactccagggctctgggagggggtgagctccccgtccctggggagtgcaagccggcgcggagatgggggccgggctggggaccaaggcttcctccaagccggtgagggtcgtttcccagctcagacagaggcacggaaatcagctgtggccacttccgtgttggagaaactgaggcgcaaagacaagacctgcttgggtcattcccatgagttcagagaggggaaccgagtgggtgcggcgtggcctcatgtggaggcaactgacgaggggcggggcaggtgggcgtggctttggtggaggggcgctgccttgtgtgggcgtggcctgtgtttgggcgtggcctgctgtggccggctttctcatggggcgtgacgccaggtcccctagagggaaggggacatttgcgacctccctccctcccttccacatccaggctctggagaagcgacacagaacgcagtcagccggcctctccctgcaggagctgagggtctagcagggcgggggtgtggactgcagcagtggttcctttgacacggagtatatttcgttcttgccacccagcctctgacttgctgctttggaactccacctcatttcaccctcgctgcaaatcacctgtctcacagatggggaaactgaggctctgagaagccaagcagcttgcccaaggcccacagagggtctgaactcgggtccggctgcctctagaaggcttacagggaatccggcctcagcctcccccagaccaccaatttccaaactcatgcaaaattgtcctcaaactgccaacctcctccttcctaccaggcggctccagaaagaaatgccaactgtctgtcgggcgcagtggctcacgcctgtaatcccagcacgttgggaggctgaggtgggaggatcgcttgaggccagggggttgagatcagcctgagcaacacagagagacccccgtctctaacaaaaaataaaaaatcaggccgggcgcggtggctcacacctgtaatcccaacactttaggagaccgagtcgggctgatcatgaggtcagaagttcgagaccatcctggcaaacatggtgaaaccca

SEQ ID NO: 33518 - DNA, 1066 bp, Artificial sequence
  DNA replication origin
gtgttgtttcctcaaactcacccccactttgcagacgagagccctgaggctccagggtcccactgtgagggacactccaacctgggagggtgtgactccccccgcacagtgctctttccaccacctgaggctgtggattccggccggggggctggggaaaggaggggagactgctttcatctgcccactggcgagggaccccacctcacagccggtgaggggccaaccaacccgtgccaggaagtgggccatggcgggaagtctgtggggccgggacccgcccggaatacagacgcagctgcagcgtcggagtggcccaaatcggattctccggggaaatctgaagcctctgatgtgtggggaaggttcaaacttgaacaaaggctgggtggacaggagactcggccagggccgggcgggggccaggagccacgggggtgatcctgagtctgcccgtcctcagctgtgatgggggctccccagggcaccttctgggggagatctcaggtcctgctttgggttctgtgatggagaggggggagcaaagagagagagggaggaggagagagggagacagagagacagagaatgagatagagacagagagagagagaggcagagacagagagacagagacagacacagagacagagagaaagatagaggcagagagagacacagagagacagagaaagagacagaaaaagacagagacacagacagagagaggcagagagtgaaatagagaagagatagagacagagagagacacagagagacagaaacagagatagaggcagagagagacagagagtcaaagacagagatagagagataggaagagacacaatcagagagaggcagaaacagagagacagagagacaaaaagacacagagacagaggcagaagaaatggaaactaagagggagagacagagacccacagagacatagagagacacggagagatagagagagacggagagcgcgcaggagccagggacaccggtgggctgcagatgctcccgcccgtctgcacctctggccccagttctggctgccccg

SEQ ID NO: 33519 - DNA, 990 bp, Artificial sequence
  DNA replication origin
tggatgggtcaatgggtggatgggtggatggatggatgggcacatgggaggatagatggatggatggacggatgggtcaataattgggtggatggatggatagagaaatggatgggtcaatggatggatgggtgggtggatggatggatggatggatggatggatggatagagaaatggatgggtcaatggatggatgggtgggtggatggatggatggatggatggatggatggatggatggatggatatgtgaatggatggatgaatggatggatgagtgggtgggtggctggatagatggatggatgggcaggtatatgtgtgggtggatggatgggtgggtggatggatggatggatgggcaggtgcatgtgtgggtggatggatgggtgggtggatggatggatggatgggcaggtgcatgtgtagatggatggatgggtggatggatgtgtgaatggatggatgagtgggtgggtgggtggacagatggatggatgggcaggtgcatgtgtgggtggatggatggatggatgaatggatggattaatggatggatggatggatgagtggatgggtgcatggataaggatacacatggatgggtgaggagatgaatagacaggtagttgggcaattgtccctgtgagtcccgcatcaatgggaatgcatgccaccccttccaagggcctcttggctcacaggtgttgcacttccaggattgaatgcagccatctgccactccctggatcccagtctccctgcacagactcatcctgggggaggggacacagagtccacgttgctgcccctcccatgctagcctgcaaacctcctccccagcaagagcagatccaggagccacgaatacggtggaggatgcaaaacggtaattaatctgtggtgggaggggggtgttaataccttaaagacacggggacacactggcagctcctaccaattagtgacctaaccctgccagtgtgct

SEQ ID NO: 33520 - DNA, 2041 bp, Artificial sequence
  DNA replication origin
cctgggcaacagagtgagactctgtctcaaaaaaaaaaaaaaaagggggagataagctccatgtgggaccttgtttgctttccccagctgtgtttctgactctgggcgcacgtgctctatgaaactgtgctgagtgagtgataagacagtggcagaatcacatacacaagagacgggaaggaaagagtggagttcaaaagctggctctgactacggtccattcatgtgcgttggcctctgggagtctcgcctccctttctgctgctctatttctgaccctggacacacatgctcagtaaagctgtgctgagccagttaaccatgagcagggtggcggagtgcggcacctggcagccctggatctcgctttcctaacctcgtgggcctcagttttctcatctgtaaaatggcacctccatcagatgaggccatacctcatgtcagcctttgtttgggctgaacccccttgtttatattggggggatgtctttgatctgggaagtcactgggtcaggacgcaggtcagattcacctttgtccccagagcacagcatcaggatggcccagaagtgatcactgaaagttcttgcgggtggacaaatggatgggtgggaggttggatgggatggatgcatgagtgagtgtgtgggtgggggatgaacggatgtatgggagggcagacgagtgaatgggtatgtaagtggatagatgcgtgaatgaattggtcaatgagtctgagtgtagttggatgggtgactggaggaattgagtgaatggatgtatggatagatgggtacatgggtgtgtggatgggtggaagggtgagtggataggtagaacaatgaatgggtggatggcaaaataaaagataaacaatgaatgagtggatgaatagatgggtaaatggtctggtgaatggatcggtgggtggctggttggctaggtgggtgagtggatcgatatatgagtgaatatatgtgtaatgagtgggagaatagacaaatggctagatggatgggtggacggatggctagaaagacagacaaatggatgagtggatgggaggataaatgggtggatggatgggagggtggatggatgggtggatggatggataggtgggtggatggatgagaggatgggtgggtgggtggatggatgagaggatggatgggtggatggatggacagatgggtagatggatagaaggatggctgggtgcaggaggatgaatgggtggatgggaggatggatgtatgggtggatggatggataggtgggtggatggatggatgtataaatggataggatagatgaatggatagatggataagtgggtggatggatgagaggatggatgggtgtagaggatgaatgggtggatgggaggatggatggatgagaaaatcagtgggtggatagatgaatgaatggatgagaggatggaggacaaatgggtgggaggttgaatagatgaatggatgaataggtgggaggatggatggagggttgggtgagtgagtggatggatggacagaggggtgggaggatggatggatggatggatggatggatggatggatggaacatggatggatggatggatggatggatagatggaaagatggatggatgggtggatggatggatgtgtagatgggtagatggatgggagaatgaatgggtgtgagaggttggatggatggatgggagggtggatggagggatgggtggatggatggattcatgggtagatggaggacggataagtgtgggaaaatggttggatgataaatgggtgagtgtcttgatggaggggcaggtgggtgggttggtgggtggatggatgggtagatgggtagatggatgagagaatgaacgagtgtgagaggatggatggatgggagaatggatggacaggtggatggatggatggatggattcatgggtagatggaggatggatgagtgtgggagaatggatggatgataaatgggtgagtgtcttgatggaggggcaggtgggtgggttggtgggtgga

SEQ ID NO: 33521 - DNA, 932 bp, Artificial sequence
  DNA replication origin
gaatgggtgtgagaggttggatggatggatgggagggtggatggagggatgggtggatggatggattcatgggtagatggaggacggataagtgtgggaaaatggttggatgataaatgggtgagtgtcttgatggaggggcaggtgggtgggttggtgggtggatggatgggtagatgggtagatggatgagagaatgaacgagtgtgagaggatggatggatgggagaatggatggacaggtggatggatggatggatggattcatgggtagatggaggatggatgagtgtgggagaatggatggatgataaatgggtgagtgtcttgatggaggggcaggtgggtgggttggtgggtggatggtgggtgagtgggtgggttggtgggtggatggtgggtgggtgggtggatggtgggtgagcgggtgtgtggtggatggtgggtgggtgggtggatggtgggtgggtggatggtgggtgagtgggtgggtggtgggtgggtgggtaggtataggtgggtgaacacagggcctcagcgggattattttgcgttggttcccggtgcagcacttaagctttccggagctccctttccaagtatttgttgtacctgtaggaggacacctagtccggctcagttctctgtaaaggacagtggggtgcagtggggagggggaggggaggcctataagagggtctcatcagttctccagccggggactggagctgggatcaagtggtgggcggaggaggggtgcaggggggaagagcagaattccagggccagaagggactccaggttgagtgggaagcccagccacccagcctggccccctctccacctccctgacggaccctctaacaaccgagctggccgctcccctccctgcccaccaccaccctccagggctcccgacgcccctgcccatc

SEQ ID NO: 33522 - DNA, 892 bp, Artificial sequence
  DNA replication origin
gttgggggctgtgctgaaaggccagagggagctgtgggaggcaagatctaccagtggggcctcagatttccaggcagttggaggaaggttctggctttgtgtctcttgggctcctccaaccccagcccctgctaccaatacctcgttcttccgccttctacaaaacaggcagaaggtgcccccagccagaaggcacccccagcctgggctgcaagagaagacgcagacagggctcggaggaggcctcgggctggggctgtctctgggagatgctgcctgggagggctcctggaaaagaggcttgaaggatgaggagtgctttcgccagcatgcagggtggggaacgacctccagtccagaggaactgctgggcaaaggctgggtgggatgcgggcgagtgtgacaacagccagggggtgctgcggtgggaggtgggcctggcgggctgggcggcgcgtggctggacttgcagtggaacagctcgttcatagagtgggggtagagcactgggccaagggcttgggttggccacagggagctttgggagggcttagagtgagggagggccgagttcagatctggccttgggaggtccctagagagccagtgtggggtcaatgggagagacttcagagggagaagggccaggagtggtgaccagtgggccatggggggagaggaagaggaggtgagatcagcacagaggccaacccaggacagaggctcagctctggggaaggagcgatttgattcaggtcacacctctgctctagatcctccatggctccctgctacctccagaattaagaacaaacactgcccctggcaagtggctgcccaccccatggcctcacctcttcccactcacctcctcccgaatacatggccactg

SEQ ID NO: 33523 - DNA, 619 bp, Artificial sequence
  DNA replication origin
ccttcccagtgctgagaacgtcctccatgggtgattctattagggtggttttgaaatcattctgcagcgccgtcagcttctgggccctcagaagcccgtgcccctctcctggctctgtcttcccatgggtgtcgtgcctctggcagcatatgaattctgtagttatttctgatgtatcctgggcccccaaagaaatacgttttcttcaattattaatcatcgaggtgtgagagacacgtggggatgaaatttgctccctgacctttggggagagggtgagggagggagtgggggcggcccctgagcctgcacagatcagatggggggctcgggtgggggagctgagactctcagagtgggggcctccagaaagaagggggggtcttgtgaaacgggtagtggagggaggccctgatcccacttgccttttctctctgtttttttctcttctctctctccccttgggacctggtgtgggggggtccttctgggtgtcagttgggggctgtgctgaaaggccagagggagctgtgggaggcaagatctaccagtggggcctcagatttccaggcagttggaggaaggttctggctttgtgtctcttgggctcctccaaccc

SEQ ID NO: 33524 - DNA, 1276 bp, Artificial sequence
  DNA replication origin
cgcccggagccaggcccccggccacgccgagcccgcgctgaccaagtgaccacgcgcggccggggcccgggccgccgccagccaatgggagcgcgccgggcagaggttgccgggcaacgagccgggggggcggggtcgggcgggtgcggggaggcccgagcgcggccgatcgatcccgcggccccgcgcatgcgcccccgcgcggcccggagggggctcggccggcgcccagctgtcatcgatcgccgcggccccaggcactgaataagctcaggaagggcttccgggaagggcccggtgctcccgccccgccccatctctccgtaatagtaatggcagcaatagcgtcggcagcatcgcctcccgcctgcgggaccgcgccgcggagcctcccccagcacccaggccagggcttcatcggggtccgctgtatcctggaggtggccgcaggggccccacagtcgggattccaatcccgttcccaccacccgctacctcggggcggggggaggctgtgatcccagcgctgtgggagtccgaggcgggaggatcgcttgaggcctggagttaagagaccagtccggacaacatagcgagacccaccccacccatatctacaaaaatttgccaggcgtggtggtgcctttggtcccaatgatttgggaggctgaagcaggaggattatttgaggccaggagttggagaccagcctgggcaacatagcgagactccgatctctacaaaaaaatacaaaaattagccaggtgtggtggtgccttttgtcccaattatttgggaggctgaggtaggagggtcacttgagcccaggaggtcaaggctgcagtgagctgatatcgcaccactgcactccagcctgggtgacagaatgagaccctgtctctaaaaacaaaacaaaaaaccccacagatgtatttttctacagtctagaggcctgaaatttgaaatcaaggtgtgggcagggccatactccctcctaaagctctaggaggccgggcgccatcgctcttgcctataaaaacagcactttgggaggctgaggtcggaggatcacttgaggccaggagtttgcgaccaacctgagcaacatggcgagatctcatctctacaaaaataaaaattagaaaaatagccagagtggtgagttcctgtggtcccattactttttcttttctttctttcttttcttttttttttttttttgagatggagtttcgctcttgttgcccaggctggagtacaatggcaccatcttggc

SEQ ID NO: 33525 - DNA, 1387 bp, Artificial sequence
  DNA replication origin
gaacgggattggaatcccgactgtggggcccctgcggccacctccaggatacagcggaccccgatgaagccctggcctgggtgctgggggaggctccgcggcgcggtcccgcaggcgggaggcgatgctgccgacgctattgctgccattactattacggagagatggggcggggcgggagcaccgggcccttcccggaagcccttcctgagcttattcagtgcctggggccgcggcgatcgatgacagctgggcgccggccgagccccctccgggccgcgcgggggcgcatgcgcggggccgcgggatcgatcggccgcgctcgggcctccccgcacccgcccgaccccgcccccccggctcgttgcccggcaacctctgcccggcgcgctcccattggctggcggcggcccgggccccggccgcgcgtggtcacttggtcagcgcgggctcggcgtggccgggggcctggctccgggcgcgggtcgatgccgcctcgcatctgacctttcccggcgcggggagggggcccgagaggatggagagagctggaccatcttggaagaaaactttattgacccgtctcttatcttggggacgcacggttccagcggcggggggcgagggtacggctgggtgggggcaggggcggccaggaccttcctcccggacatgcacggaccccctgaccgccgccccggccatctccctgggcgggctgctctccattccctagacaggaaaattgaggctcacgagggcccggggattacccaaggcgcaaagggtttatgaggtgcaaggggcctggagcccagagagtgtggctcgagggcttcagactctctctgccacgccgtgctgacatctgcaccctccaagcaaagctaaaacatcttcccgcgttgctgggtcccacaccgtcgcagcctggaacccaccaccccataaggagggaccgttccttaaattgaaatgcgatgttgaacagccacgaaaaaggacgaaatcgtgtcctttacagcaacatacgtgcagctggaggccattatcctaagcgaatgaaagcagaaacagaaaaccaagtacccatgttctcgcttatcagtggaggctaaacattgggtactcatggacacgaggatgggaataatagaccctgaggacttctaaatcggggaaggtgggggacaggggctgagaaactcctgggtaccatgcttagcacctggatgacgacgggatcggtcatatcccaaacctcagcatcacaccatatacccatggaacaaacccgcatatgtactcctgaatctaaaattaaaaagatgaaatttcaaaatagtaataggaaggggccaggcgcggtggctcacgcctgtaatcc

SEQ ID NO: 33526 - DNA, 1548 bp, Artificial sequence
  DNA replication origin
cgtaaatgttttaatatttagcacgcatgatgcttttgatatacgtgccatgccaagtccagggctcagagatttgtttaaaggtctccattaatcccacatgtaccccaaatcgctgtggttttagaaaagaaaaccttctgtgcaactccgtaaccaccttaaaggaaatacaaaaggagaaaatcgctggccgtagccttctccaccccctaaactcagccctggccactttgctcaggcctcccagcttctgtgtcctgcacgtaagcctcggtcttcacacagtccctgatatctgcatttatttcatatttttcccataacgttccacctgacatctccatctccttcctctgccgctgcgtttctaattcctaacagctgaggaaggttgcattgaccggcggattgtgtggggtgatttttgaaagcagatcctggaattcaatttttattttaacctggttattgagtggggagggagagggaggcggaggttggccgattcgtgtgcaagatgaaaaagctggattttcacaaaggttgtgctgtttggaaatggctggttaggttttcaacgtaggaatggttcaacgacagccctacgagagtgtgcgcgagcgtgcgtggctccgtgtggtttcgtgtgtgtgtgtgtgtaagtgagctgcagggtgtgtggacaagtgtgttgtgtgaatgtgcatgtgtgggttcgtgtgtgctcctgtgtgttcccgtgtgtgcatgttgtgttcctgcatgtacatgtgtggcttcgtgtgtgtgcgtgtgtggttttgtgtgtgtgcatgtgtgtgcgcctgtgcgtgttcgtgtgtgtttgtgtgtgtgcatgcgtgtgagagggtgcactcagcggctgtgcctttgtacacgtgtgaatgtgggtgtgagtgtgtaagtgctttgtgtgagcatgtggggggaaggacgcagaggcacgccagcgtctgactgtgtgtattgttaagagtgttgtggggtacacgtgtgtatgtgagctcgtgagggtgtgcaagggatacacgcgtgttgtgtgtatatgtgtatgtgcatgtgtgtgtgcaggtgtgtacatattagtatgtgcagatcagtgcatacctacgtgtgtgttcctgtgtgcagatgtgcggccatttgagggtggcagtgcgcctgtgtgagtaggtacctaggacagcgtgcctgtgcatttgtatgtgagtgtgtgtgctgtttttgcacgcatgcaccggtgtgagggtgtgtgtgtatcggtgcacatctatgagcatgtcagtgtgtgtgagtggcagaaggtacacgggtgtgtacgtgcgtgtgtatacctgttcgtgtacctggcagtgtgtgggcatgtgcgggtgtgagggtgtgtgtgccggtgcacaccagtgtctgcacctgcgaccaccccgaccccgtgcccagccccctgaccctctcctgctgttctcactgcggggaaacgggtccaaccccaccactgaccccagctcatctcaggcctcccgtcca

SEQ ID NO: 33527 - DNA, 1014 bp, Artificial sequence
  DNA replication origin
tctcccctttggggttgagggtgggttccagactcaaatcccagccccgccttcatttcccacatcagggacccttctggagcctcagtttccccatctgtggaatggggataaaacacacacagtgcacccttgaggacatctgacagtgctcaggaaaggctgtgacaagggcggccaccagcctctgcccaccccataaacagccagggtggaccggtgggggaggggcaaggaatcctgggccaggctcagaggacagaagctggaggggggaagaggaggagggagggggaggtgagggaaaaggatgaggaagaagggatggggaggagggggaggaagaggaggagggggaggaagcagaggggagatgggaggagggtgagaaaggggaggaaggggaggggggaggaaaggagggggagggaggaggggaactggaggcttcccagaggagcccccctccccccacagcccggtgctgctgctggaattgatcctcccatcgatcctgggggagctggagtcgggggccagctctgctctggaggccaggaggaggccggggcaaggaggagaggtttgcacaaagcgaagggaggctgctttgtccccatctgcgcagattccctcatagtcccttgagctgggcggtgcaggccccacttcacaggtgagcaaactgaggcctgaggggcggattctggggagatggtaccggggctcccgtgcagttggagttaggtggcctggggttcaccagcctcagttttatgggtttgttccagtttccctgtgggcaccagccctggttttctgttccttccaccttcctggggctggggctgttttttgattcctctcaatgggtagaaatgctggggctgcaggagaggagtgaatggggtgctcgaggcagagcccaggcctcctgggagccagctggtgtggggccgggctggggtgggggcctggattttgcttctttaagaatcgtcaggcggggtgcag

SEQ ID NO: 33528 - DNA, 1075 bp, Artificial sequence
  DNA replication origin
gggaggagccaggagggagactaggaatgggaggaggggggaagagggagaggaggagggggaaggaggggggaagggggaaggaaagtagaggagggggtaggaggagtgggaagaatggggaaggatggggaggagggagaagggggagtagaagggggaaggatggggagggaggggagaggaggagtgggaagaatggggaaggatggggaggaggggcaggaagggggaggagggagaggaggaggaggatggaggaggagtggggaggaagagggagggtgaggaggagggagaggaggaaggaaatggaggaggagtggggaggaagggggaggatgggggaggagggagaggaggagggagatggaggaggagggggaggaagggggaggatggggaggagggagaggaggaggaggatggaggaggagggggaggacgaggtaggaggatcctcacccttcaagagcatcaagttttcctccccagtgggagaagctgaggcccagagagaagtctctgctctgacaccccacaagagctttcccaaccaacaggcccctctgggactccctctatgccctgcccagggccccacagggctcgctctgcttcctgctctcttgctgcaggcctggagctgggaggtgggcaggtgatggccagagcaggaggcggctggccccttcccctgtccgctgcctcaaatgattaaccagtgcggctggagtgaggagtggacactgggagccggttcctcaaataccctccacacctttgaccggcgcatgggccagaacgggggacccctccagctcaggctgaagagctcccccaactgccgggtccagagggtcctgcgctccctgggatcgcccgaagggctgggtcggagggggaccctggcgcagggaacgttctctgtaactgagatccgcgtttctactcaggagctcagctgagactctctgcgtggccaaccctctccagagaccggctccaccgccagccagattggatgctgagcgtgtccacacagcacgcactcactgggactcagcgtgctggg

SEQ ID NO: 33529 - DNA, 1587 bp, Artificial sequence
  DNA replication origin
aacggcctggatcaggggttgggggcctggagaacgccccactccagggctcggctgacagcctggggactggacgctgcaggccacggacttccccgacgcaacgaaacccgcgttgggcgccgcgctccggaggggcccaatcgtcggcccagcggcggggttcgcggcccccgcagctgagcgggatcccggcgctgagttaaaccacctgagcgccctccctgccctgccagaagacaggctcctttagccattaaacatgtaaatatctagatttaattctctgcgcactcttctgggatggaggcagccggcggatcccggagcggggctcggcggcccgcggtgggttggtttgcggaggcgccgggctaggggacccgagcaaggctgcagcggggctgccctcggggcgtctccagggccgccggttctgcgggacccgagctcgccggcttggacacctgggagtgtccactctgcaccctgaaagccgagacgagacgacaggtgggtggggggagcacaggcctgggggcgcccacttcgcagatgcagagacagaggtcctggtcgggagtgaggaccccgccccgggagggtccgaggggcgtccccaggtgggttaggctgggcgcatctggctctgagcctcacctgggcctggcctgttccgggccggaatggcgcctcgattaaggcgcggtttatctggacacgcccgggcgctttctgctgggtcaggaagtggggagagcacggcacctcctccccgcaagaccgaccaacgcccacgtccttgcctctctctttgggtctgtctcgcctcgtggacctctgggtggggagggggtgttggactggggaatggggaatggggaaaggggaagggattcgcacctccttaggcagaatctgcagaccggggatgggggaggggaaccaggccattcgctggatttagcaaacttctcagatcactcctgctcccctgcccccaccaccctagagctgcggccacagcctctgtccctcccgctggggctcccatacttagggaggggaaaagtcatccccatccccctgagatcagaactggggaggcggcagtcctcccttcctggaggaggagccctgaggttgggttttgtaggatgtgtaggagtccaagtcaggtaggccaatggaaggacgaaaagactccttgtcatctgaggaagaggcggtggggctggggaggcgtctggcgttagcccagtttcggggccctcacaggacttcattagggaatgtttgttgaatgagtcaatgagataaaactgaatgaagctggggtgtgtggggggggggcatgtgttcaaagccaggccttgaatgccaggctgggggtggttgggccttctctccctggctgtgaggccaagcagggagggtcccgggcggcccttagtataatccccccaccccacaggttagtacgcacccagggaggccatcacagatgtggtggggtggaatgactcaccccctctccgtgctgtgcggtgtgtgtgtgtgtatgtgtgtgtgtgtgtgtgtgtggcg

SEQ ID NO: 33530 - DNA, 3847 bp, Artificial sequence
  DNA replication origin
tcgccatgccggccaccaggcccgggcgcccgggcgccaccaggccgcggtgctgcgccgccgccgagcgcgcgtggcccgggctcagcagctcgcccgcctgcgcgtgggccacgctgtgcaggccccccaggctctccaggctcagctccatgctcggctgccctcccgccgcgcgcgctcctcagcgccggcccctagtgctcaaggccgctgcatgactcccgcccgctccccggtggctgcgcgcgaggctgccaggctgcgcggcgcacggcccggcccggctgcgagcgcggccaccaggatgtggcaggggagcggccgccggcgcccgggcccgggtctgacgtcagcgcccccgcccacccgctcctgccaccgctgcctcccgcagcctcgctctccgcccgccccggccccactcgagcaccaagcaggccgaagtcggccagacttggggcttcggcgtccctggccactgcgcccgcccgcgcccgctggggcaggccgtacccgggggacagcgggcgggggtccgaggacagactctgcccaggtggggctgggggcctcgacccagagtctccgatttcgcgtctctgtgtgattctctccagagtcccagatgtggctttctgcctggcacccccaagtccatctccagggagtttctgggagtgtggctggacggtcgcctgtaatgtacgtgtccccccccccccccgttccctacagacccccaggagctagatccccactgcaagctcagcttcccccgactcccactcacacctacggagtcacagcccccttcccacaacctctttgtggaggaagtgggggaaaagggaggtcctaaggctaggtcagggcctccgtgcgccccaggggtcagcctctgcccatgtgtgggcacctgggcctccgtttccccaactgtacaatgggctgcccggcctcggggttgccaaaggccccttctaattgcagggcctttttacagtgcggccgctggaggcactggagcctgggggtgaccactaagagcccctgtcaccctccagcccacggaggctgaggctggatcccctgtcttctgagacgtcgctggtgcaaactcctctttgtccctggggcttctcttcaatgtggggggaggcaggggtctcctttttctcagcacctggagacaggtgagccccaggggcccctgggaactgggatagatgggggaagggctcctataatcagagagacccccaggggactagatcccgccagtggggtaaggtcagggctgcggatctggaggggccagaccagaatctagaggatgctctgtcttgtaggccagaggctacggtgcagagtccaaaaccagcctcagccccttcctgcttccccgttgcctctgccccccccacccccggggtaacgcttgtgcactttctagaagaggaaggggatgggtcaggcagtcggttcgcgggagcccccagttacccccatctcagagggttgcatcagggctcaaagctgaaggaagaggggaggacacagtcaggctgtcacttcccctttggtgcaaaccttctgggcaaaccccggccccagctttgcacctgcatccagatttcctggcccctgtagacgtggctacacattggagatgcgattttctgaaccaagactaggttggctctggaatagggccctttctgtgcctcagtttccccttctctggtgtgggagggggtgccctccagcctgcccagctgggagccggaggtgagtctatgctgaccacaacagccagagagagagggggcctgaatgatctgggcccccagcctgaggtggcctgatccaagtcctggggagggatagggctgaaggggacccctgttagtactcgctgcttagggctcggcatttagtaagtgcctgttatttaccaggcatactctcctctctcagccccagagagggggaagtcaaatcacaatttttccgggtgtctctggcccaaggtgggggggtggtggccctagagttccccccttcattcctacatctgcccaagtgctaactcctgccccctgaagtgtcggtccctaaactttccagttccagggttcaggtataatttctggagtttacataattacacccatcttccaggtgggaagagaggggcaggtccgaacagtcgcgtaccccactccccgtgcagatgctgaatctcggcgggggggatgtggctgcacagagccccagcctgcgctcctcattctcaccctccaacaatcacagataattaaaaataatcgtgagatctaaaaatcaatcagccgccataaaacgctagcatcccaggctcaagaagcgcagaccaggtgggggctgggggtctctacgggtgggaggataacaaggtggaaggaagttcccccaaatgccaatgtgggggagctcctagggagctgggattttgcaggcttccttttaaatatattttttacagcttgatgatcgtgttcattttaatagcaagcgtgtgtggcttttctagcagggaaagcatccattttgaaagagaagacgagggtcagggactccgagaggaagagggcctctcccctctgctgcctcaggacacgctaaggtggccacagaccccttccaaagctccctagacttggaaggggcagcccagcctggtggacctaaccctatccaggtctgcgaagcccctcacccctcccttcggctgatggacacttggactcccccagggatggggatctcactccttgtagaggctgtggtcccgttgagagattgaacagaattttgctggccccaagagagggactgtggccccctggagcccccagcttgcttctccccaccagcagcagccttttagtaattagtaaaatagaattgagccggccaccgggtaggctggctgcccaggcccagatcgatcctgggtcattaggcaaattgtgggcagggggaggggtgggctggatcgggacaagaagtcccccttccccaccccacagggacctcagccacctcgaggaagctctctggcctcagtatcccctccaggaagatgaaagtttgactcccagagcccgagtctgtgtctgggagttggggagggggacctcagcaggtgctgggctgccccagaccaacgctcaccctctctgtgcctggcctgcgtctgggaggagtcaaaaagggcagcctctggtcctgccaacctcagggcttggagagtcccgcgggtggaggggaggactgggggcctccacccatgccccaggggtgcgcactctccacggcttcaaactccctaaacggaccccctaagcttgaaccccctctttaatcctccacacctcccccatttttggacacaccaccttccctgttgttattgactctcccattgcagctaaaaatatcaaaggcagagtcagatacctcaagttttcctttcctggggctcccccagaaccctgcacagtgcgcccccaactgactttctgattcgatttgtctcccaccgaaatgaaagtgtccgggctctgcgcacccctccctgcttttattaaagcgaggttttactaaacgatggcaatgaatgcgcgccccacccaagcccagccgcagccctagatccgctctgctcccactcccggcccccgaaacctgcgggcgccccaaatcccggccgccggtgcctagtgtgtggcaggagttctccctctggactccagccgccttcgttcgggcggggtctggggattttatttagatttggggg

SEQ ID NO: 33531 - DNA, 941 bp, Artificial sequence
  DNA replication origin
ggggtgtgccctctgccacctgaggcctcgcactgcacctcgagggccgtggctgtgtgcggatatgaccgccggtctatggtgagcgcacgagtgccgctgtatgtgtcatggggaggggagcaggacagactgaaatcgtccaggttcccggacctccctgagcacaaggttaccctgccacacgcgaaagactatttattttcccgtgccccaaagcagaaaaatctaagaatcccataagaggttccagctagtcaccttgcttgctctgcagaagggggaaactgaggccggcctgtgggtccaggctcccagggggttgtctggtcctcctggggtggagggagggaatggctttctagggaggaacagcacaggacaccccgctgtcctctcttcgcccagcccccctgcctggacgggctgcctgggggcacagccgcaagcccctctgcctctttgctagtggggcgcctcccagagcccccgcctttctcgcccttgtgctcggagaagcgatcgatcaggcgccagccgccgcggctattgtccctgtggcccgggtggacagccccctccccagcaccaccagggaaagaaacccccacctaggccaggggccctcctgcacccttacacccccacctaggaaatgggggcctggccgggctgcctgtcagagggcaggtgtggacttagctgttgtcagctgggagggaggagggaggagggtccccagggggccggtggctgagtatgagacagagacagaggcggagagaccgacagggagaagagataatgagcaggaacaagagcaaaacggagagcaagagaaaaacatagagataccagtgtgttccgaccgagagaggagagaagtggacatgagagacacaaaaccccaaagccaggcgggcaggggcgcgcgcacccga

SEQ ID NO: 33532 - DNA, 1494 bp, Artificial sequence
  DNA replication origin
ggtgcgcaaggttgacggcgtgaaccccgcggccgcggggccgcgcggcggggccacggcgtgggcagcggacccggcagagagcaggcgggcagcgtggtccgggtttatcatcctcaacgccccagcgccctgcgggaggctcggggtgccaggagctgcgctcacccctccggttcccccacgcacccctgagacggcgactgttctaactctcccttcctcgacaggaaacccagactcccagagctgagactgtttgtcattgtcacaagtcaggaaggcgaggcacaaacggagcctgtttccccatctgcaactctccccgtggcagaaaggggacggcggaggcctggatggctgtggggtcggcaggagcgaacacccacctgggtgcagggtcaggtgcaggcgaagcaggcggtgtccactcagggcgggtgctgggtgctgctgacccggctgcggggagcccaccccccccccatgggacttctcgcctgcggtttgcccttctgtgacgctctggctgatgttttctgtggcccccaaatctgcaattccagtactgctaatgggtcattagttacataacgtgacagtgggaaaaatggagagtggtgtggactctgggtgcacccacggtggacacaatgtcccccaaatatgtgctagagaggaggcaggaggtggtgggtatcgggctatagaaactgtccctgccttactggtgtgatggcaaccagttggtgtttaaacgtcagagggaggcccggcggggtggctcaagcctgtgtaatcccagcactttgggaggcagaagcgggcggatcacctgaggtcaggagtttgagaccagcctggccaacatggtgaaactccatctctactaaaaatacaaaaaaaaaaaaaaaaaaaaaaaatagccaggcgtggtggcgggcgtctgtaatcccagctattcaggaggctaaggcggaagaatcgcttgaacctgggaggcagaggctgcagtgagccgagatcgcaccactacactacagcctgggcgacaagagtgaaactccgtctcaataaataaatagagctgccaggggtgtgccctctgccacctgaggcctcgcactgcacctcgagggccgtggctgtgtgcggatatgaccgccggtctatggtgagcgcacgagtgccgctgtatgtgtcatggggaggggagcaggacagactgaaatcgtccaggttcccggacctccctgagcacaaggttaccctgccacacgcgaaagactatttattttcccgtgccccaaagcagaaaaatctaagaatcccataagaggttccagctagtcaccttgcttgctctgcagaagggggaaactgaggccggcctgtgggtccaggctcccagggggttgtctggtcctcctggggtggagggagggaatggctttctagggaggaacagcacaggacaccccgctgtcctctctt

SEQ ID NO: 33533 - DNA, 1121 bp, Artificial sequence
  DNA replication origin
gccccgcggccgcggggttcacgccgtcaaccttgcgcacctgtcgcgtctcaggtgccctgggggccgcgtctacaccaccggactccgcctggggcgtaagaggtggcgggggcgagggccgcggggtcactaggctccggcccaggcctttagttccggtcgctgcgcaaatgaaaagcggttaagtggcggcaaatcgcggcggttagggggagacggccggatgcgtccccatctccacctaacacggcgacgccccaacgctggtgctcggaaagggaactctgcccccgccccgcccccgcaccatttcaaccccgcagcagaggactcgccgccctttctactccggcatccccattccccgctccgcgagcaccgcgggcctccccaggcctcctccaaggagaactttgcgccccgggtctcccgtcgcgcttgcccggctcggggcgggccacgcgtttccgcaggtgccgagtgtcctgccgggcgccggggccaggacagagacggggacagggagggagaaagacccgcaggtgcagacggagagggagggggagacggggagatggagagagagggaggggtcgcgagacaaaaccagagagtggggagggagagaccgggagcgggagaaacagacggggagaagagaaaaagaagcccagaaaggaacagaggtgaaggagagacgaaaagagaggcagagagaccaaaaaaaaaaaaaaaagagagagagagagagagagacagagatgggagaggaactctgggtgctggaggctgcctctgtgtccacccccgccctcccacagccccctccttcttccccatggggtaggacttgggagaggggaataggtgttttccttgtttcaccaaagcacgcaagaaatcccaccgcagacctcggagtcccggccccactgcccgttctgcgtgcctcagtttacccatctgtaaaatgtgcgtgtggtgggccgaattctgggtctgacactgtcagattctggaccccgtcgtctgggagtcctgcagcccccaagcccattcccatggggctgggagcctcaccctacccccaccccatggtcctccgagtcccgcacttc

SEQ ID NO: 33534 - DNA, 3691 bp, Artificial sequence
  DNA replication origin
gtcccggccccactgcccgttctgcgtgcctcagtttacccatctgtaaaatgtgcgtgtggtgggccgaattctgggtctgacactgtcagattctggaccccgtcgtctgggagtcctgcagcccccaagcccattcccatggggctgggagcctcaccctacccccaccccatggtcctccgagtcccgcacttcggagctgcctcctggtcaaagctctcccctggcgccgtctccaacagtaattatgggagaggggctgggggaggggcgggcgggctcctcggcgggggtgggggcggtcgatgaattcgaattaccgtctctaattcatcaccgtcgccgggtcgatagcttcggccgtcttcaaatattgtttaaattgcaactccggaggaaaagtattttttgtaactgatcagaaaaaaaatacgtatatagataatacaaagttagatggaggtggttgaaagaagggcctcatctcctcctgtgggcaccatggggaggcaggagcccagaatccctgagggatggtggagcccagcatggaggaaactgaggcagggaggaccccccacccccaccccaggtggatgggatgctttgcccttaagcagaacgaagtgtcctagggacaaaaaccagagctgtgtatggagttgcatgctgagggcagctggtgcaggaattgggcacctctgtttggtggtgggtgagcaggggggatgccagggactggggacctgaggggaaggacatggaaaggaaaaagaggcagaacctcttccccacccaggctcatacaggccctccctccccggcttctcccccctacccgctgccaccatcaagggctgaggttgaaatgggcgaggcaatctgggagtcccccttaaagggacaggtgtccaccccccacaagcactctggaacccccacccaaactctggatgaaggggagggatgagcagggagaggaggaggaggaggagagggaagggagggaaggaaggggagagaggagagagggaaagacccctgtgccttttgcaaaaaccccactttccactgcaaggggtccacgcctcttacggacacccccagaaaaatatgccccacgccactagacagtagagataaccaaggttgggggcttggagacccgggccttccctgggctctgtccctggctgatccctggcaaaaggacttgagcctcagttttcttatctgagaaatgggcagaatgaaatgacgcctaggagagggggtatgaggggctggaggggctcaggggtctgaaggggccaccgtaggtttccacagggatgcacggagtgtggatagaccgagaccgtgcccagggccacgagaaccagacccacgtggggctgcgcgcgagactcaggtgactctggtgcccccacaccagcaccctcccacaaaacttcagggcccggggaggagcagccctagctagggacctgggccaggatcagggatcaggctcccgcctcccgtgcagagggggagggagatggggaggggtcccactggatgcccacagcccttcccctcctcctcagctcacctgcccggaacgacattttgaacccgatgcggttcccatgcccaccctacagaccagcaagctgaggccgaagagaaaggcgcttgccagagccccgcactgcttctgatgcggagtcagcttccgctaggaggggccgtaacaggaccagggcgtggctttcggctgctctgaccccgctgagtctggtgggcctaacactaggctggagatgcccaggctccctgacctccagcagagatgggggagcattccaggaaggtgacgcttcgggacgaagtcttggaggtgtattgaggtcaaggaccacagagaagggaccggcgggggggcggggggtggcactttccacgttctcagccacttggccgatcctcaggtggggccaggtgaccggccagttccacctccccaccccacaggagccacatcctttaggggtggtgaggcctgcgctgcgcttccccctgtgccccagctcctccaagtatgatgatgttgtgggcatgtgagtcctctcacctgggagaccaccggagactcccagagaggatgggcggtgggggggggccaggtcccagcctcatcgagtccagctcagagcccccaggaccatccccgcttttgcttttcccagcagacctccccctcccaacgccagcctcggtcccaataattcctttctgtagcctgggagacagggacgctcgcccccaacacagaggagtctgggggagtctcttgagtggtgaggggctggagctggcctttggctctgaagtcctcttagcctgaagtcctagaagtaatcatgaccattcattcttctctctgaatctccctcccattccgtgctgcttctccaacaaccattaccactctagtctaaaccactatggtggtctcctcctccacctccatcatggcttcccagctccattcctgctctttttttttttttttttttttttggagatggagttttgctcttgtcgtccaggctggagtgcagtggcgcaacctcggctcactgcaacctctgcctcccaggttcaagtgattctcctgcctcagcctaccaagtagctgagattacaggcatgagccaccacgcccagctaatttttgtgtttttagtagagaccgggtttcaccacgttgaccaggctggtctcaaattcctgacctcagatgatccacccacctcggccacccaaagtgctgggatgacaggcatgaaccaccgtgcccagccttctcctccttctcactgccgtctcccccacatcctaagggagctttgcatggccactttgggttggcaccccgggttggcaccctgccccgtggctccccagagccctaaaatataaatgtggtttcctgtggtggcctacagtgcctgaccctggcctcctgcgtggatgtgggaggggacttctggccggtgggaccagcagggacaaaggctgggaggtgggaaagtcctgagcagctgttaggagggaggctgagccgggcaggtagcccggcttacccgggagagctggcgctgggtggaatcaagttcttaattaaatatgggccctgatcaatagggagggaagcactggtggggtaggggagaggctgaacaaggagccagggagacccacctgaccttgggcagccttgggacacctacggcctcagttttccctctgccaagtaggtgctaatgtgagaggggctgagaaaccggcacccctcctgagtcccgagtgtgggcagatgtggggggcgatgggggacccctccgagctaccaagtcatgacctcagagccacagattcacagaagagagaaacaaagactggaagatgtgcctggcacaggctgctggagaggcgtgcccgggtcacaagtgtagacgcacccggagacacgtgtgtagacgcctccgttcacactgggacgagtgcagactgacccaggacccccatccgccctctggcagtcttgagccagcaactcccctaagtggggtgcggggacatctggaagacgccccatctccccctggacgcagtggctgcgccatctggagaccctcgt

SEQ ID NO: 33535 - DNA, 624 bp, Artificial sequence
  DNA replication origin
gagagtcacgaaggaatgaacgccgaagcacggacctgcaaccgactcatccattcaccattcagggagcagctgctgcgtgaggccagagagaggcagctccaggagctggcctccactcacagtcacaggacagcgtgaagcggcggctgcctgggactctgttccccaatgaggaggccagctccgctctgagtccaggaaagggggagagaggacgcctttgggtgggtactggaggggaggcgcgggctccactgggctctctgaggccttcgagtggatacactgctggctgggagggaggatggaccagaagaccaggcccaggcttcgggacagctggagggaaggtccctgaatcccagtggacgccagcagtgctgggggcggcacggcaggagagacacaagccagggtggcaccaggacgggagggatgtggaggctcctggggggtccccaaggtccagggaggagatcaaagagcaactagaggagatggagaccagctgggcaatgcccaagggagaagaagacgccccaggatgcagcaatgggcgattcaagtgaccatcccatgtccctctgtgcccgacagtctgtacagtgccccaaaccacca

SEQ ID NO: 33536 - DNA, 1083 bp, Artificial sequence
  DNA replication origin
agtagctgagtaggggccctgaattcagtcattgctgcaacccaagctggggcccacctgtcaacccccatcaccctccaagaggggaccatcccctctcctcctcctcacccctccttttccactcaccctccctccctctcccctctctgctcttttcttttcctccctttccttccctccctctctttacctccctcccctcttccccttccttccctcacttcccttccttccctctccccctcctcctccttctctcccccttcatcctccccttcatccagaggcctttggaggggctgggcttgtaacagggagggcttcaggatgcagcatccgcctcgcccctgaaggcgggcccgtgggtgcctctgcgcgcgcctgacgttggccgcgtgcgggctgagggtgccagcctccgtccaccatcgggtgtgcccgcgtggggctgcctgaggcttcccaaatgtcccggcggggtggagggcgaagtctgagcgaggtgctgtgggtgggtgggtggcgcctgcacgggcgctcaaccacgatgggggtcggcagccttgcacatccaaaccccacccaagtgagaagctaagaaacctgtgaccgttaggaaagctgttccagttctgggcgggaaaaccggcatcagcttgtggggccttggacgggcggtggatgaggcaacggatcttggtgtgacatccctgtgtgggatgcagctggctcgcggtgtggacgtgagacgtgagagctgtagggtgtgcagggtcttggggtgagtctgggtgtcaccccgcagaagcctgcggtgtgggttacgcatccatgtccgcccagccccagggtgggctcctctctgcctccccctgctcccctcaccactgcagccatggggacgcgggtgggctctgcgggccgagtggccttgaacgcgcaccctggcctctctggacatcaggttcctggtttatcaagtggacgcagtgacccagagccctgtgtccccaccgggccgcagtcccgagagtcacgaaggaatgaacgccgaagcacggacctgcaaccgactcatcc

SEQ ID NO: 33537 - DNA, 1320 bp, Artificial sequence
  DNA replication origin
cggggtgacacccagactcaccccaagaccctgcacaccctacagctctcacgtctcacgtccacaccgcgagccagctgcatcccacacagggatgtcacaccaagatccgttgcctcatccaccgcccgtccaaggccccacaagctgatgccggttttcccgcccagaactggaacagctttcctaacggtcacaggtttcttagcttctcacttgggtggggtttggatgtgcaaggctgccgacccccatcgtggttgagcgcccgtgcaggcgccacccacccacccacagcacctcgctcagacttcgccctccaccccgccgggacatttgggaagcctcaggcagccccacgcgggcacacccgatggtggacggaggctggcaccctcagcccgcacgcggccaacgtcaggcgcgcgcagaggcacccacgggcccgccttcaggggcgaggcggatgctgcatcctgaagccctccctgttacaagcccagcccctccaaaggcctctggatgaaggggaggatgaagggggagagaaggaggaggagggggagagggaaggaagggaagtgagggaaggaaggggaagaggggagggaggtaaagagagggagggaaggaaagggaggaaaagaaaagagcagagaggggagagggagggagggtgagtggaaaaggaggggtgaggaggaggagaggggatggtcccctcttggagggtgatgggggttgacaggtgggccccagcttgggttgcagcaatgactgaattcagggcccctactcagctactggcttcctgctgagggcactcggggagccccactgtcccacccggcgctccagggcagtggctactggtcttccgcagcagggtcttgcaggctgggctgagaccccccccccatgctccaccaccctcgtgtaggacaacccaggaacatgttagtcactgcacactcactcagccactgctatacctccgctctgtgctgggccacagaaagatctcaggccccacgaggctaaaaggaggaacagtggcccctgggagtcccagaggaggggccccgggctccgctgcggggggagggagggacttcctggggagaggccattgctcctgggcgttgaggaatgtgtaggagttctctggctggagtgacccaactttctactcttggccccagtttctccatttctcccctctccaggaagatcctgagagaaaacctgaggctcaaggccttccttgagggagggggaaacttcgtggttggaaggcaagtgtcgcccagagcccagctc

SEQ ID NO: 33538 - DNA, 1293 bp, Artificial sequence
  DNA replication origin
tttctggctagacccttccccacagcccaaccatgatcaagaccatcttacagttggggaaactgaggctaagatggtccaacaccaggcagggcccaagagggcagcaggtcagaccaccctcttgggccccggggtggttggctgtccccagcaacttttagaaaggcaggaagtgggatagagctggtgtgtgtgggccaaatcccaaggggtctgcaggaaacgccttcatccggaacttgagggtctccccccagtccagccccctttcccccgcatgagacacagcctacagcccccgccctttcctgggttggggcggggacggctgccctctgctggacacagcgggaacagcagggataactgagcgaaggggcggccacatccccgggacctccccgcccagagatttcctgatcccacctgcccagaaaagaaaacgacccttgttgatgctgggggcggcggcgcaggcccaggacggtgccctggggcgggaggctggatgctacagtaaagccaccatgactgcgtttgccgggctccctgtgcatgggctcagatgtgggcatggggtctccgtctcttctagttgatctctgatctcctcccagggccccggggacccccaggaaccagccccagatcctcctcatccttagattccaaaaagactgataaccgttggggagatgggatgggtggtgtacctggagtcctcagatcagagcctctcgggggtgattgctcctggaatcagggcctcagtccccagggtcctggaggaggtgcagggctggctgcatggagtgggcatcctgtcaggacccaaaccctcactcaatggggcccctggacagagcaggtgaattgttgtaaaaagaaggggtgtggcaggggtgacagggagagttgtgggattagacaaggggtgttggggtagcctcgcagggaaggagatacctgagcagagactagaaggagctgaggggggcgggaggggacttggggaagagcaaccaggcagagagaaccgtcgtgcaaaggagctgagtgagtgaggccagcgggggaggccagacagagaggcggctggtggtggatggggagagggaagcggctggaagagctcaggagcccaggaaggactggcctgcaccgggacatgcctgaagggggcgcactgtctttacaaaggaagggactgaggcctccaagggaatgggactcgcctggggtcccagagcaagcttgacagcctggccccgccccactcctccgccagct

SEQ ID NO: 33539 - DNA, 1688 bp, Artificial sequence
  DNA replication origin
gagcaggtgaattgttgtaaaaagaaggggtgtggcaggggtgacagggagagttgtgggattagacaaggggtgttggggtagcctcgcagggaaggagatacctgagcagagactagaaggagctgaggggggcgggaggggacttggggaagagcaaccaggcagagagaaccgtcgtgcaaaggagctgagtgagtgaggccagcgggggaggccagacagagaggcggctggtggtggatggggagagggaagcggctggaagagctcaggagcccaggaaggactggcctgcaccgggacatgcctgaagggggcgcactgtctttacaaaggaagggactgaggcctccaagggaatgggactcgcctggggtcccagagcaagcttgacagcctggccccgccccactcctccgccagcttggtggccaaggtctgtgttgggggccactctctatccccccgactacaggtcgggagctgctggtgatggaaccaggggctgagtatgcagtgctggccacatactaggagaatcccaggatggggttcagcagtgttgatgaggataatgaaggaaatcagggggaggtgaagaaaacagaggaagggggtgagtaaaagaaaggtcatggaggaggtgtggggaggtggaaggtggaggtgatggaggtggtgatgggggtggaaggtggagacgatggaggaggtggcggaggtagaggtggaggtggtggaggtggaggtggtggaggtggaggtggtggaggtgaaggtggaggaggtagaggtagaggtgctggaggtggaggtaatggaggtggaagtggaggtggaggtgatggtggaggtggtggaggtggaagtggaggtggaggtgacggtggaggtggtggagttgctggaggtggaggtggtggaagtggaggtggaggtgatggaggaggagatgctggaggtggaggtgatggagatggaggtggaggtcgtggcggtggaggtggtgaaggaagaggtgctggaggtggaggtgatggaggtggaggtggtgaaggaagaggtgatgaaggaggaggtggaggtgctggaggtggtggaggaggaggaggtgctggagttggaggtgatatggagggtgtgatgggatagcactgacattggtggtgcaggagtgatggtggaggagaggacggaggtggagacctcattggaggctggtggaggtcgcgtggcagaggtggcaatggtgggccctggcagcatgaggctggtggttggtaccagggccaagtccagggcttcacccccgtccccactctgaaccccatcagtccttctctccaagtctcagttttcacttctgcacaaggggtccataaccaccatggcctctgggttggcacaggggtggcctttaggattggtgtgggggtgaacctgatgttgggtggggtgctggcgggggtcaggtggcggtggtgatgggtaggggatgcacagagggggcatccaggcggcccccctactccaactcacacctctgtcagcggctgtgggggatgggagcaatgacaaagctgctcgcggtaaacagctccgactggatcgatctgggctgtgaggagctgtaattagattgaacgccgggaaggggggcagcagagcctctttttgctgcaatc

SEQ ID NO: 33540 - DNA, 1076 bp, Artificial sequence
  DNA replication origin
cgggtgtggggggcccggatagcaccccctccaggtgccccctgggggcgggtctccgggccggcaggatgtggggaggtgacgtgggggcacagcgcccaggccgtggaggcagggagggcgcggggccggggcgcctcaggccttggagaaagtggccgtggcgccggcggggcccccgggggccgtgctgggctcctcagcccagcggttcatgcagcggcgccgcgcgttcatgaagaagttgctgacggtgttgagctccaagccgagctgctgcgagatggtgacctgcatctccttggacggccgcttgttctccttgaagatggcgatcagcgtgcgtcgctgcaggtcggtgaacaccaggcgctgcttcttgggctgcagggcgcgctccttctgctgctcctgttccttgcgcttgcaggctgcgggcgagcggcgggcgggcgggcgagcgggacacagcgccaccgtgtggccggccggggagaggcaggaggcgcacgccgcccggaggatgaggaggaggggagaagggacacgttggggaaaggcgaatgcacataaggtcccagggagagcccagaagcaacaagaatgcagggagaggcggagggggagacagcggggaacacagggacgcacagagacagagacagggaaacagcaaggtcaacagggagacaacaggaaagtccaggatgcagccagagggcggtggagacagaatggaaggcgaggacaggcagggaaagcagatgcggtgggggtggggggaggacaaagaaggggacacagtgtgagtgcccctctgcaggcatggctaccaccccctccagcccccttctccatggagcccactcaggcaccccccaagcctcataccccccaaaccccgtcctaccctcaaacgctccctacctaaaggaccacagaaattgatattggtaactttctcctctcctttctgcagccccaacctgggggtgttggggaaatgacatggaaactgcacatgagagtttttggctcagtgtagacttgggtgaaataactggttaattactagg

SEQ ID NO: 33541 - DNA, 1052 bp, Artificial sequence
  DNA replication origin
ggggtgggaggggggcgctcatcttcatttccgacccttcccatttgtaaatatttttggcaaaaaatggagcaagcggaatccaccttcctcggcgtcttctctctttggcgagagtggaaaccaacaccacgttcaaccccgctgcccccctgcaagcccagttcagaccctgacgcgggcggaaaggggggcggtggattccagaaggttccacgcaggaagcgtctccacgggcccgtgcagaggggctcctccgggcggccccagcggcgccttctccggccgggtccccttctcctgggagcctgggcgtggtctcccgtgtccggagctgcgtccttccttgcgctccacgaaggtgcctaaaggtaaagtgaactcaacagacggggcggggcgggggcgtctggaatttacccgcacgtgggagccccccgtcccctgcggcctgggatggggtgggaagggtgctcgcccgtaggtgctgggcgcccgccgcaggcccctccccagactttaaggcaggcgattcttggcacgaggaatcctggccgcagagaggggcagctcagttctcggccgcaggggccgtcctgccagcgggtggggttggttttggagagggtgggggaccgtaaggatccggcttgatgtgggtttttggcgactttggaaagggctgaggtccctggggagggggccggggcgggtggggaggaaggaagttttctactacctccctcggtggggcaggggatctgacggaggaggggttattctttaaaattccatttttaaatacccggtttatatttctagtatgtgcttcttgacccgctttaggggacaacacagtgagccctggtttttctcgaggccctctgggcgtcctgaatggagagggggctgggaaacccctttctgtcactccctcccctccgggggggggtggagggcttcctttggcctggagggagtgggcatggagggaggaaggggggccctttttgtgcacttgggctggggggtgtgctgcttccccctccccg

SEQ ID NO: 33542 - DNA, 968 bp, Artificial sequence
  DNA replication origin
tttttttttttgagagggagttttgctctcgttgcccaggctagagtgtagtggcgcaatctcggctcactgcaacctctgccttccagtttcaagagattctcctgcctcagcctcccaggtggctgggattacaggtgcctgccacctcgcccagctaatttttttgtatttttagtagagacagggtttcaccatgttggtcaggctggtcttgaactgctgaccttgtgatccacccgcctcggcctcccaaaatgctgggattccaggcgtgaaccaccgcgcccggcaagacctaaagctttttaaaaagaaattaaaacgtgggccctggacctgctgggcccataggctacgtcagtccggcctggagtggacaggacagctctaggttcatccatcaggaatttaggggtggggacgggagagaaattaaggcccaggttttagtgggaggtgggagataccgagttgctggcacccagtgacaccacagaaaaacaggggccagtgtgtgtatgtgtgtgtgcatgtgtatctgcatgtgtgtctctgtgtgcgtctgcgtgtgcctgcatgcgtgtctttgcatgtgtgcatgtgtgcctgcgtgtctgcatgtctctgcatgtgtgtgcacgtgtgtgtgcatgggcctgcatgtgagtgcctgcatgtgtgtgtctgcgtgttgtctgcatgtgtgtgtctgcatgtgtgtctgtgggggggtagagaggtgcggtgctgagcaggaatggggaccctttctactattgggaaccccccaacacccaaatgttctagaagcatcactcagatccggtcgcttggaaagctgggagcagagcaagtcgataaggacaagagaacactccatacacgtctttggttcaagaagaaggcactcttcgacctcacgatcctctccctccctctctccctttctctccctctctctccct

SEQ ID NO: 33543 - DNA, 845 bp, Artificial sequence
  DNA replication origin
tgggactggggggacctggggcaggtgaggggggcgctgatggaggcggcggtgggactggggggacctgaagcagatggggggggctgatagggggcagaacagtgcgggggtctgggggggcgggcgggactgggggcgtgcggggggctgaccagctgcttgtgccctgcagccgcggacgtgggcgtggggctggcgggccaggagggcatgcaggcagttcagaacagcgacttcgtgctcggccagttctgcttcctgcagcgcctcctgctggtgcacggccgctggtcctacgtgcggatctgcaagttcctgcgctacttcttctacaagagcatggccagcatgatggtgcaggtctggtttgcctgctacaacggcttcaccggccaggtgcgtcccccaccctggctgccccatgaccagggcctctggggatgccctgcccctcccatagctgccaggagcagccctggacgcactgagaaccctgggatcctcggtggacagggcttgcctgaggccacatggcaaggctgcgttagtggaggcctagagtccaggtgaagggaggtgacggtccctgtctagctctgtgcccaacaccttccaggatatttgtttcgttttgttttgttttgagacagagtctcactctgtcacccaggctggagtgcaatggcacgatctcggctcactgcagcctccgcctcccgggttcaagtgattctcttgcctccacctcccaagtagctgggattacaggcgtgtaccatcacgcctggctaatttttgtatttttagcagagacagggtttcaccatgttggccaggctggt

SEQ ID NO: 33544 - DNA, 867 bp, Artificial sequence
  DNA replication origin
ggagcgcagtggcacatgcttgtggtctcagctactccagagaaacgaggcaggaggctcgcttatgcccaggaggttgaggctgcagtgagccgtgattgcgccactgccctccagcctgggtgacagagtgagcccttgtcaaaaaaaaaaaaagtgattttcagggtgccctctgtcggccaggagccagcccagggaaacatattcaattatttcccttctgatttaaaaagatattgagacattttgtgggttcctgaaggcactgtggatcctaggcacatgtgcctgctgatcctggcctcagacacatctctgggcagcccagtcccggccagaactacagccaaaatctcagggctggctctcattggtgagcctgggttacaagcccttctctgaaccaatcaccatggccagggggtggggcatgtggctgccattggtcgggccaggattcaccgggcagagtgggcgtggcccccaggcagccagtgcggggcgggtcgcagaggcgctgagctggtctgcttcgcagaaacggctgtgaacatcggcttcgcctgcgagctgctgtcagagaatatgctcattctggaggagaaggagattaggtaagaagtggggagttggggggtgagcaaggggagtggggaggtgaggacaaggagcacccaggtgcgtgtctcactggacggggagcccaaggcacagtgggaagggggggattgagaggggagggaagggtaggaggaaggagtgtggtaatggggagtggagggagcttggagggaagggggaggggcagtggagggagaaggggagaggcagaggagggggaggagcagaggagggagggggaag

SEQ ID NO: 33545 - DNA, 1144 bp, Artificial sequence
  DNA replication origin
gtgctgggattgcaggcgtgagccaccgtacccggcctcagaccagttttctgaatcccttctggctgctgttggctggggaggcaacaggcttttggttgggggacccaggctccggagcccggcagggggttggggagggctgagcctcggatgtcggcttcagcatggtgacagcttccacctgcccggcccccaggcctttgcccaggagaccctgcggacactgtgcctggcctacagggaggtggctgaggacatttacgaggactggcagcagcgccaccaggaggccagcctcctgctgcagaaccgggcacaggccctgcaacaggtgtacaacgagatggagcaggacctcagggtgggtgggcagcgggggcacccaagggggccctgggactctcctgcccccgccagggagctggacggctgctcagcatcttccccgccctgccctcctcccccaccagctgctgggagccacagccatcgaggacagactccaggacggtgtccctgaaaccatcaaatgtctcaagaagagcaacatcaaaatatgggtgctcaccggggacaagcagggtgagtcccgggcagctccgggtggctaagcccctgcagcatgggtcttcaaacttccctgaagtttgaaggctcacacctgtcatcccagcactttgggaggccgaggcgggcggatcacttgaggtcagaagttcgagaccagcagggccaacatggtcaaaccccgtctctgctaaaaatacaaaaatgggcctggccaggtgtggtggtgcgcatctgtaatcccagctactcaggaggctgaggcaggagaatcgcttgaacctgggaggcagaggttgcagtgagccaagatcgcaccattgcactccagcctgggcgacagagcgagactctgtctcaaaaaaaaaaaaaaaatgctgcaactctcagaggagcgcagtggcacatgcttgtggtctcagctactccagagaaacgaggcaggaggctcgcttatgcccaggaggttgaggctgcagtgagccgtgattgcgccactgccctccagcctgggtgacagagtgagcccttgtcaaaaaaaaaaaaagtgattttcagggtgccctctgtcggc

SEQ ID NO: 33546 - DNA, 1978 bp, Artificial sequence
  DNA replication origin
caggagttcgaggccagcctgaccaacctggtgaaaccctgtctctactaaaactacaaaatcagccagatgtggtggtgcaggcctgtagtctcagctactcgggaggctgaggcaggagaatcgcttgaacccgggaggcagagcttgcagtgagccaagatcgcgccactacactccagcctgggcaacagagtgagactccatctcaaaaaataaataaataaaaataaataaataaacaaatttgagacctaaggccaccccttggagcacaaagctgggggcagggtcggggggtaagaagccgtaagggcaccttccttggggaccccccgaccacccttggggtgcctgctctctgggcctgcccagtttcctcccagcccctagaggccccaaccctgggtctggcccttgagaaatgaggggcccaaggaaggggctcagagagccaaagttgaggggtcagagggaggggcctgggactgggggagccccagctggggaaggcaccgggtgggtggactgcatagaaggtcttgagtgatagtcagaattcgccatgcaggccaggtgtggtggcttctgcctgtaatctcagcgttttgaggctcaggtgtgcagcttgcttgagctctggagttcgagaccagcccaggcaacatggtgaaaccacctctatttaaaaaatatatatatatacaaagaaattagccgggtgtgatggcatgtgcctatgatcccagctatttggaaggtagagacaggagaatcacttgagcccaggagttcgaggctgcagtgagctatgattgggccactgcactccagcctgggtgacaaagtgagaccctatcccccacccccgagaaaaaaaaaaaaaaagaatttgctgtgcaaagcatagggaaggtgttcctggcagggaaacagtcctccaagaaggtctggaggcaaaagagagctgagggtctgggggtgggagcaggtgtctgagacagagtaggtggggagcaggggcagctcagttttcttttctttttttttttttttgaaacagaatcttgctctgatactcaggctggagtgcgatagggcgatctcagctcactgcaacctcggcctcccaggttcgagggatcctcccacctcagcctcctgagtagctgggattccaggcatgcgccaccacacctggctaattttttatgtgtttcgagtggagacgcggtttcaccgtattggttaagctggtctcaaactcctggcctcaagtgatccgcctgcctcggcctcccaaagtgctgggattacaggtgtgagccaccacgcccagccctcttccccgctttctttctattgttttttctatttttttttttttttttgagatggagtctcactttgtcgcccaggctggagtgcagtggtgtgatctcagctcgctgcaacctccgcctcccaagttcaagcaattctcctgcctcagcctctcaagtagctgggactacaggcacccaccaccatgcctggctaatctttgtattttgggtagagacagggtttcaccatgttggccaacctggtctcaaactcctggcctcaaatgatccgcctgcctcagcctcccaaagtgctgggattgcaggcgtgagccaccgtacccggcctcagaccagttttctgaatcccttctggctgctgttggctggggaggcaacaggcttttggttgggggacccaggctccggagcccggcagggggttggggagggctgagcctcggatgtcggcttcagcatggtgacagcttccacctgcccggcccccaggcctttgcccaggagaccctgcggacactgtgcctggcctacagggaggtggctgaggacatttacgaggactggcagcagcgccaccaggaggccagcctcctgctgcagaaccgggcacaggccctgcaacaggtgtacaa

SEQ ID NO: 33547 - DNA, 1174 bp, Artificial sequence
  DNA replication origin
atcctcctgcctcaggctcccaaagtgctgggaccacaggcacgcgccaccatgtctgatttcccttttgttgttgatggggcacgggtccaagagcttgggcttgacacagcagaggagcttcacggacattggcagcctccgacaggccttgacccttcttccggcctcaatttacccatccattccctggggtggctgagctaagctgacctgctgagctcctgggctctaggtcattattgtgaccgcacttccagttcagagtgcccccacatcctggcagagcaggggacacaggacatcttcccacacacaccccgctgccctgtgctccatgctgctggggccccagcagaacctgtgaggagcccccaggctggacgcagaatcctctggccctgtagggtcagggctggaccagggggaggcagcctggggtgatgacagccccatgttggcagggggtggggcaggaaaggccccatgtgtggggagcttgtggctgagtcatgaggacaccgaaagcttctgaatgacaaaggtgcagggaagaccctcccagcacaggaaacagcatgtgcaaaggtgccaaggcagcacctgagagtggggaagtcacaagccagaaactgggtcctagggagtcccttggtgaggccaaagagagaccaggctggagaggtcagcaggggacagaaaaagcctcaaatcctgggccgaggagttcgggcttcccccacagagtgggaagctttggagcagacggagctgagtgtgtcctggcagctgggccagctcaaccgcacggtcgtcttgtgcaaatgagaaaaatacacccttggccgggcgcggtggcctacgcctgtaatcccagcactttgagagggcgaggcgggtggatcacctgaggtcacgagttggagaccagcctggcaacatggtgaaaccccatctctactaaaaatacaaaattggccgggcgtggtggcgggcgcctgtagtctcagctactcaggaggctgaggcaggaggatagcttaagcctgggaggcagaggttgcagtgactcaagattgcaccattgcactccagcctgggcaacagtgcaagactccctctcaaaaaagaaaaggcaggctgggcgcgatggctcatgtctgtaatcccagca

SEQ ID NO: 33548 - DNA, 3032 bp, Artificial sequence
  DNA replication origin
aggaagtcccccctagccacctggcagcatcgatgtgtttgtctgtgtgatgggtgggttcacgtcccactccccacagactgggaccctcagcgctgagtccctactaccctgcccagggcctggcacacaagaggcgctcagtacatgttgaatgacaaaggtggatggatgcaccctccaggtctgatgacggcaccctctccacgccccgctggttcctgctgggcagggctgggcatcgggaggcatagctgttccccagcctaaacggcctcggccacgcagctcccctggcccccgccctcccagctgacctcagaggcgagggggaaggaggagcccagagcatgttctcaggacctgtggagccacttcccggtacctgggtggtccaggccagcgtggggccggcatccggccaggggcgctgttttcagagcaaacactctcacccaacatctcatttctgttctggatggagaggttctcctttcatccatcgagtcattcagcattaatggagtacctactgtgtgcaggccgctggccgggtgccagggtaggggatggtggagctcacacctgcagggtgacctggggaagcagggacatgggagggagggggagcagtggcggccaagcttggggctgggggaggctccctggagaaggcaccgtgggagctgggcttggacgggagaaggggagtttgctggggagacgaggcgtgtgggagaagttccaggcaggtggagggatgccggggcgtttgtcccgagggctgggggttgcaggagatggctggaccccggtcaaggtggccagcagatgtgtcacgtggtgtcgagtgcggggctaggtcggcttggtggaagggcaggggacgggggagtgggctggtgtgacccttcctgtggccccctcacgtcagagcattcccgacatctccacgctgccctggttctcgctcagtacccctatggtctgcctcctcttcatccgtgccacccgggacctggtggacgacatggtgagtgctgttggatgcagctgcctgggggagggagcggggccggtcgggggggtctcttgatccctgggcgagagtgggaggagggctgggcttcctggagcattaggggaacgtgggcctgggagcctcagctgctggggctacattgtccttatctgctagcacccacattgggcaggtgccgcaggtggcgttggctctgtcggtgcgtggttttggggccattgagctttggtggggggtggtctggcaggcactctaggtggtgggcagcacgcctgtcttctccccgccaatagcagtgggtccagtggcccccacgtccgggatccctgagcagacgcaacgtggcgtggggccagcggacagggaccccgtgttgcgggcgggcactgctgggctgcagtgcggcagcggcctgggcgggggcaggagaggctggacggtctctctgatcctttccctcctggcccaggggagacacaagagtgacagagccatcaacaacagaccctgccagattctgatggggaagaggtgaggctggggctgcagctggggatccgcggggacacgggggctccagcccagcagggtcatcggcctcggcaagtgtccatcaccttccgtgctccctgatctcccggctggttgagtccgacaggaaccgggcctgcattcattaggcgtttggccgggacgaggacagaggccgaggccctgatggcgaacccttgcagagcttagggctcgggcgatggggaggacaaggaaagtctgaagaggacgtgggtgcaggaccctggaggtcactgggtgggagcgtggacccgcggggagtggggtgggagcccggggaaggcttcctgagggggcaaaggcccggaggtggggactgcagctgcgggccccccgtcatcccgtgcctctggtctcccggtgtggggagggttggcagagggaggggcctccttcacaaccccctctccccgcagcttcaagcagaagaaatggcaggatctgtgcgtgggggatgtggtctgtctccgcaaggacaacatcgtcccagtgagctggggttgaccccgaggtcccagaaccacgcgccccctcaccgagagcacccctcccagggtggggagggctgccgcacccccaatttgtcttgcatcccctcttgcaacgctgccccccactccacaccaggccgacatgctcttgctggccagcacggagcccagcagcctgtgctatgtggagacggtggacattgacgggtgaggagctgtggcatcgctggggaccctggggggtggggagcatggcccggaggagcccccttccccagtcaccaaggaggcggccagccaaggtcgctcagagactttggtcactcaccccatgagtgtctggggcgtgggtgctgccaggcactgaggggaggaagacgcccaccctccccattgtttccattgtgtgcatacgggcaggaggccctaggccctaggccctggcctcagcactttgcaaatgtgctgtgtggccttgggcaaggccttctccctctctgggcctcagccatctgactggcagctggcgaactagtaggtgctcagtgaaaatgtttgagtgactccagaaggggtctgggggctcctcgaagcatccatcaactccactttcacctccctcctctcctcgtcaccagggagaccaacttgaagttcagacaggccctgatggtcacccacaaagaactggccactataaagaagatggcgtcctttcaaggtgagaggcgttgagcagggagtcacgtccctcgaatctgtaaaagttaaaagttagggtattttgttgttgttattactgtttttaaaacaaggtgctggccaggcccagtggctcacacctggaatcccagcactttgggaggctgaggcaggagaatcacttcagcccaggaattcaagaccagcctggacaacataacgag

SEQ ID NO: 33549 - DNA, 2235 bp, Artificial sequence
  DNA replication origin
tctgcgaggccccgcccttcggccgtgaccgcgtccctgaggcctggcccccatcctgctcggccgtgctccgctcggccccaccctcgaggccccgccccttcttcgccttggccccacccaccccctccaggccccgcccccggcccccttccggggtccgaactggctccaccttcgccttggccgggccccgaggccccgccccgagatcccgccccccgtttcaggaccgttggcaccgggctaacggttccaccacgtccgccgccctggacgcccgcggcctgcccccccctgcctctcctgcgccggtgagcggcgggtgctcccactgctgtgcgtccccgggagcccgcgcaccctctctgggctccacccaggctgagagctggggtcgtggcggcgggggtggagagcgcgcccctagaggttcgcgcggtcggggccccggggcgggtgcagacagccctggactctggagccctgtccagggcggtcctgtgcccctgcggctgcgggaagacggggtggggggcttccgagtaatggggcatcccagttagtgagggggcaggaagccagcgctgtgtccgtgtctctttctgcccccagatacacttcgagtggattctggccatttgagcattctctccaactctccaatccccagtctgcccccacgggggtctcccccacctctcccccgtcccacagcctaaacccctcttcgccctgaacctcccttttcctcatgcggtgaatgggcactggccccgctcagactcccaggagcaccagagctggccctgagccaagccctgccccaccaggacctggggacacgggtgactcagacgtgactcaggaaggctcaggtcctgctggcatccgcggaggtgagacggtgatcagagctgggatgggagactccccaggcagaggggcacctgagaggaggcacaaggcccagcctggccgggctaggaagtatgaatggagaccagaagggtgaggacgggtgcatcgggtggccggaacacaggggcaggggcttggcggggagggcactgctagagagctggcaggtggggggccagttgctggcgtctaggggtggtttgcccatcctcatagggggccaaaccagggcccccggtgcagggctagagccagacccacattcctgaacctgctagtggagaagattccaggatcttctgacgatgtccgtctgcctccatcgcccccatcagagtttgctgcccagcctgggggggtgaggaggggagtggccatgcctgaccctcatgctgtgttttgagatataacatatagcccgggggtcccattcagtcagtgaacagatgactgagcccctaagctggtgccacatggggagaggggcaggaggccgtcagtgaaaccaggaggaggtgagagtggtcctttcaggaaaagcgaggtgtggggagcagtggccggaggctggcatggccagaggctggcatggctggcggtagagtccttctaggctgtactggcgggaggcgaccagggtggctggcgggggacactggcagatgggctgttgcaggtttgaggatcatcttggggtcccctaggtctcaggatgtccaaggcaagacacacagcctatggctggacattcagagcctggcggggaggctgcagatgagtgtgggaggtagcatttgagagggtcggcccctaggctgtgagctccttgaagaccgagtggtgcccagcaagggctggggtcactgctgtgacccggggcccttctctcccacagccccaccagcatgggcagcctcggccagagagaagatctccaagatgaggacaggaactcaggtgctgatcctgggcagagggggcggtgcaggtgggagggattatgaagttcagggctggccaggcgtggtggctctcccctgtaatcccggcactttgggaggctgaggcgggtggatcacttgaggtcaggggttcgagagcctgggcaacatggagaaaccccgtttctactaaaagtacgaagattagctgggcgtggtggcgtatgcctgtaattctagctacttgggaggctgagacaggagaatcacttgaacccaggagacccaggaggtggaggttgcagtgagctgcgattgtgctactgcactccagcctgggtgacagagcgagactccatctcaaaaaaaagaa

SEQ ID NO: 33550 - DNA, 1896 bp, Artificial sequence
  DNA replication origin
cacagcgctggcttcctgccccctcactaactgggatgccccattactcggaagccccccaccccgtcttcccgcagccgcaggggcacaggaccgccctggacagggctccagagtccagggctgtctgcacccgccccggggccccgaccgcgcgaacctctaggggcgcgctctccacccccgccgccacgaccccagctctcagcctgggtggagcccagagagggtgcgcgggctcccggggacgcacagcagtgggagcacccgccgctcaccggcgcaggagaggcaggggggggcaggccgcgggcgtccagggcggcggacgtggtggaaccgttagcccggtgccaacggtcctgaaacggggggcgggatctcggggcggggcctcggggcccggccaaggcgaaggtggagccagttcggaccccggaagggggccgggggcggggcctggagggggtgggtggggccaaggcgaagaaggggcggggcctcgagggtggggccgagcggagcacggccgagcaggatgggggccaggcctcagggacgcggtcacggccgaagggcggggcctcgcagagcctcgcagaacaggccgggatagaagacgctcgggagcagtgcctgggtctggggaggggccgggactttggggaagggactagaaggaaggcgaggacgagcggggtctcgctgagcaaagtcagagtaggggcggggccaggactcaggggcttggccagagcgggaagcggggttgagcatggccttgcggagcagtgttatggtaggggcggggctgggatccggagccgttacaaaggaggaaggcggggccgcgcagagcagggtcagggtaggagggcgctcagggtgggtccaggacagaaggcagggccttgggagggccttagggagcagtgccagtgcaggggcggagcctgaaagggaagagggtgtcagggcagggccgggccgggcttggtcagggagcagaaagaacctgcaccgcagggcggggttggaagggttcttggaaaggtgggcctgggtcaggtcggaatgggccttgcagacctgacggggctgaggctggtgcggccagcgtggcagagtgcaggaggaaggaccacaggtaacggcggttatgtaagtcatgtctgatccgtgtcctgggttcgttcattcatcccatacacgttcaacgagcgcctcctaggcgcagatgcagggctgagcaccaggctggggagaggcggttatagccattgagaccaccctaaggccaagaggaagcccgcagggttctttccagcaggtggcaggggctcagggatccttactgaagaagtggcaggggtgagttcagcgacgaggctagggcgggtccaggccagcgatagggcctggagccagggtcagaaagtgtgtgcggaggggctgctgaagatgaaatgcccccaagagtgaggctacctggggtgagggcccaaagggagaggcaaacatgggtggagggggatagggaagccacctcccccatcaaagcggcaaccacctgagggctctcggtgatcacaaaccctctttctttggaagcccaaattggaagcctgcttggccctggaggctgccagggaacctctctttttttggagacagagtctcactgtgtcacccgggctggagtgcagtggtgcgatcagagctcactgcagcctccacctcctgggctcaagcgatcctcctgcctcagcctccagagtagctgggaccacaagcaggcaggcaggccactgtgtttgacttctctcctttcattccttcaacacttcccctgtgcttgcttgcttgctcagtggttacgaaaaaaagccggggctg

SEQ ID NO: 33551 - DNA, 885 bp, Artificial sequence
  DNA replication origin
ttggagacagagtctcactgtgtcacccgggctggagtgcagtggtgcgatcagagctcactgcagcctccacctcctgggctcaagcgatcctcctgcctcagcctccagagtagctgggaccacaagcaggcaggcaggccactgtgtttgacttctctcctttcattccttcaacacttcccctgtgcttgcttgcttgctcagtggttacgaaaaaaagccggggctgggagtttgaacacactgttctaataaactttagaagagacctggttgggtgcagctgtgaggaccagattcccccaccccagccttcgcagggggcactatctgggggcaggagcttgcccagggcacttgtgcaaaggccctgaagcctccagtggcaacaggtggcttcacaagctgaagggagtccctgggggctgaagccagggctggccagccttgggaccccccgtgggctatgtcctgaggcaccaggtgcgttctgggaagggggaggcagacatcacatgggaatgcacagaaacagagcgcatacacgcctgcgccatttatttagaacacagagccgggcacagtggctcatgcctgtaatcccaacgctttgggaggccgaggcaggtggatcacttgaggtcaggagttcgagaccagcttggccaacgtggtgaaaccccatctctactaaaaatacgaaattagccaggtgtgatggcacagccataatcccagctactcggcagacagaggttgcagccagctgagactgggtgacaaagcgagactgtgtctcaaaaataaagaagaaaaagaaaacaactcctttacagaagaggtgggagagtcactagtcacaagaacagccctcgagggtgg

SEQ ID NO: 33552 - DNA, 728 bp, Artificial sequence
  DNA replication origin
gtgcaggggtggggcggcgagtggtggaagccggcgcccccgaagaccggccagcccctggagcacagaggcgggtccagcccacactgcgctgagtgtggccctggcccccactggggtctgtcccacccccaccccgcaggagggaaggcagcaggcccgctcttcccggtgggaaagatgctgtgcaagtcatcaggtttaaattaaaaataataaaaataacaatacaaaataaaaaaagactgtctcaaacaaacctgggacaagcccgccccgcgacccacgtgaggagcagaggtgccggccaccacccgggagggagggcctggcaggaggggcaggaggggctgcgggccgggtgggggcgggctctgtcctggtctccatcagcagcagtttctagagacgccagagggctggggggcagagggtggggaccggcggaggggtgcggcaggacgtgagcgggggtgggctgggctgggcgttctctggccgccagctcatcccgctgctctgggctgcctcggccaggtggacgggttaccggagatttattgcactgttttggaagaggcatggggctaaggaccagcgggacggcaggagaggcgggtgggaggcgggcaggcgtcatcgcttggtcttggcgtcttctcgaaccttccagatcaccaggtgcatgcaggcgccggcgtcctcgctggagctgtgcccatccactg

SEQ ID NO: 33553 - DNA, 1773 bp, Artificial sequence
  DNA replication origin
gcccatccactgcggggcagatgcggtgagcacccggcccctgcgcagggacggccccagggcaggcaccggcactcaccattgtcctggatgatctgtctgaggtagtcggccatgaggttccgcagggaccgcttgtaggggaggcccaggcggtgggggaagagcacagacgtgtccaccacggtgctgtggatgacctgtgggcagcggcagagatcagcgcacgtggggcctgcgcaggtcctgctggagaaccgcgcgggacccgggccggcagggcaccttcagggccaggaggtcgctctccaggctgtgtccgatgaggatggtgtcagcgctgaacatgctcagcagaacggcctggacgtcacgcagcgtgacacttgtgtcggcaaggtcagcctccgtcacccccgaaaacctgggggaacgggcaggaggggcaccagggctcagcctggaagcactggctggtggggcgggggagggtgggtccctggggagaggcggctgggagggctcccagctcgtggagggcactggccacacctggtgttgtagtccacgatctcgttgtcaggcttcacgaaggtgtcataaaccacgtgcacgtccgtgtcgaccaccgtgacgcgcgtcagctccaggccatatgtggtgtaggactgcgggcaagggatgcacctcagatgtgtcccaggcaccggcctccctccctccccttccctgcccctttgagtctccagagcccctccaggcagaggcagtgaccagagactctgtgggacttctaggagaggccgagtggggtgtgacctcagtaaccccctttcgcaaagccctcctgcctcccattcagaggcagagccggggcccagtgcccggtgtgcttggctctgctgggaagtatggggtgttggtccagggcaggagccacaggcaccggtgctgcgagagaaaccctgagcgctggccggtgagccaggcccagatggggccagatggggcggccgcaccaggccaggtcctccccaatcctgaacccgacgctgggcagagaacagcctcaccatctcgcagtccagggcgtagatccccgggtgggtgtctcctgagagctctttctcaaaggtcttcacgaagccctcaaggcgctccttccggccatcctgcacgtgttgctgggggtggagaaggcaggtgagggcagcttcggggtgcagtgggggcgggggtggcagcagcagcacatctctgagcccttcgggaccatcctatccatccatcacgcccattcactggttgggaccctggtgagcaggtggggaagggggcttgccaagaagacacagggaggacggcttcccaggatgggaagtggccagggacagggcctggggcctacgggtgctacgttctctgggtaacacaagaaaggctgcccgggggcccagaccctgagcccaggactgtgctgtgtcccgagaccccacaccaacgatggggaggcagaagtctgttgagaacaggcagaggggactgggacgccagggctcacctttgcgacttggcagccgacagagccggcggcagccgagcagcacatgtactgggtctcccagcctccggccactgcaggggacacagacacacagtcagggcccggccaggcccactccacagcccccggggcactgaccacctgcatctaccgagccctactagggagtgaggactgaggacaggaggcctcagcctcttggtggagct

SEQ ID NO: 33554 - DNA, 1089 bp, Artificial sequence
  DNA replication origin
cccagaccctgagcccaggactgtgctgtgtcccgagaccccacaccaacgatggggaggcagaagtctgttgagaacaggcagaggggactgggacgccagggctcacctttgcgacttggcagccgacagagccggcggcagccgagcagcacatgtactgggtctcccagcctccggccactgcaggggacacagacacacagtcagggcccggccaggcccactccacagcccccggggcactgaccacctgcatctaccgagccctactagggagtgaggactgaggacaggaggcctcagcctcttggtggagctggaagcagaccaggccccggcagtcgtgtggcagccaggacgcccaggcctggatccagggagaccagtgccctctgcagaggcctcttggcagcgctgccccgggcagcaccctccaggtatccctgaggcgatggctttaggggccgccacagggctgtgcaaggctggccatgtgccctgagcgtggctgcgtggttgcctgggggattgaatagaaccaccaggccaagggtgggacaagcccctccgctcctggggccagcaacctccacatttccatggaccaagggcacaggaaggcagggacacagggcctttcaggtggtggcatttgaaccttgtcatgggaaagctcttgtcttacttttgcataaagaacaggtggagagaaaatgaggccaagggctagccccggctctgccaaagacggtgcagcccagggaccctgagtgggatggagggcctgggtaaagccttaccccagttctgggggcctcaagggagggcccaggttccgggggccatgggtgggaaggggaaggacccgggtaaggccttaccccggttccggcgcagccgtccccagtggtaataacactcctcgtcccggatgcagcggcctgaagaggacacgaggtactcggtgccacagcggcagcaggtcctgcaggaagctgtgggtggggacccaggtggaagctgaggctcacgctggggcccgcatgcccggccttgcccacatcccgcacctgcccacctaggccg

SEQ ID NO: 33555 - DNA, 2593 bp, Artificial sequence
  DNA replication origin
gttccggcgcagccgtccccagtggtaataacactcctcgtcccggatgcagcggcctgaagaggacacgaggtactcggtgccacagcggcagcaggtcctgcaggaagctgtgggtggggacccaggtggaagctgaggctcacgctggggcccgcatgcccggccttgcccacatcccgcacctgcccacctaggccgtcgcaggccagcgactcacagtccttgggcctcttctcctcagctgtgaagatgattgcgcccccgggccgctctgggtgcgggaaggggtagccgttctccttgagctggtcctgggtgagcaggtactccctgaggcggctgtacagggcagcccctgtggacaggcacagtggtcagcccctgcctgggatggcccacggggcggtagacaccaccgggaaaggcggctgggccggcaggggcccacgaagcaccgtgtggcacagcaggggctgggccggcagaggcccacgaagcaccgtgtggcagagcaggggcagggccttacctttcaggtcctccacccgggggctgcttggacggctgagcgagaagctggtcttggcggccaacctgccccccaacaccacctcgtgggacacaaccctgcggccactggtttctggaaggaagggagggaggggaggagggtgtgaagtagctggctcagacccctgccccgcctgctctcccacccaccctgccctcctcagacctctgcctcaactccccctttctgggacagcaccccactgaccccgggttccagcctgacccgaacaggagaggcagacatgcggtgagccagggacgcagggcagccgccagctctgcaggccccagagctgcacggaggccccacacccaaagtcttcgtcccctcccctcaagcgaagggggaagggcggggagaacagcacgggggatctaatggctttcgagggctttgagccttcatgggccacccagcctgcgacgccaacccagggcccctccgagtgctaatgcaggcggggacgggggcaggggccggtgatagcttaatgcagcctggagaggctgcaatgaaacgcccaggtctccgctttcttcctccccagagcttaatgcatggagctcgcccagccctgggcctcctgctttgaagaagctgccgcagctccattagcaggcggcccctcggctcggcttggagaccccactcagcggaggaaggcggctgacagcgaggacaccagggccaggtccgtcctacacagaagcctgggaaccaggcagcaggcagcccccccacagcaccgcgctttccttttgtctgagactgtggctgagctcagggctgtgaaggtcccagcgagggtcccagcccagctgccaccccaagagcaaccctgagcctcccccgcccacccgccaggactcactgctgaggccgggcacagcgctgggggccaggcccctgagcttcttgagggtgttcacggccacattcaggtagatgttcttgctggggctgcggtcataggccaccttctcctcgttcagtgcctgggggacaggcggtgcccagctgaggccatgcctgcctggtgccggggagccccagcggtggggtcgccatggggtcggggacttgcatctctcccaggcagctccgggtcacagctgcggctgagaggccgggggatgtctggggaccaccctggacccctagtccccacccgaccggccagataggaactccaggacctcaccttctctatggcctcctggttggaggtacagaacttgagacactcctcgatgaacaggttgagatagcgctggcggatgacggtggggactttgcccccaaactctttggggataatgggtttctttaaactctagagggaaggcaaaagctgccatgggtgagggcctccacaaggcctccagcggggaacgcagacgcgatgaggccgtgcccatggctggaggcaagagtgaggtgcgctgggacagatcagcctggctgcagtagggacagacacgccaaggcaagacaggagcagcaggggaaactgagggcagcggaactaaggtcatgggaaactgaggccatgggggcacaagggaacttgctgtactttctgctcaattttcctagaaacctaaagttgctcaaaaaacataaagtctattaattaaaaacaaaacaaggccaagcgtggtggctcacgcctataatcccagcactttgggaggctgaggcaggaggatcacttgaggacaagagttcaagatcagcctggacaacgtggcaaaaccctgtctctacaaaataaaaaacaaaattattagctggggtgtgatgacaccggcttgtggtcccagctactcaggaggctgaggtggaaggatcacttgagcccaggaggtcgaggttgcagtgagccatgattgcgcccctgcactctagcctgggcaacagagaccctgtctctaaacaaaaaaaaaaaacaccaaccaaccaaaaaaacaaaacaagacaaaacaaaaaaacaccgccagggcggtcgggcatggt

SEQ ID NO: 33556 - DNA, 2949 bp, Artificial sequence
  DNA replication origin
gtgcaggacaagcagagagcctggctccggggtcagcagccaggagagtcccagttgctccagtcccagagcctccccagaggaggggctttgaggaagattaggcgtagtgggattggattggagtgccagtgtaatcggggtagtcccgcccacccgtgccttatcagggctgaggacatagcctgggcaccgggagacactgggagtgggggagcctggagccacatggcattgaggaccactgccccctgctgcttccccccagtgtgcccagcagctcagaaggcagccagggaggtggtgcctccggcccccgagctccagccaccctctcccaagcctgcccggggtcgcctgctccaggtgcccccgctgtgctgccaggccttagcatttgtggtgacgcaggtggagcccccgaggaggggtcccgcggtgcccccggcccggcccccgacggcgcaggaggtgtgctacctgcgggcccagcaggcgcagagggcatcggcgagcttgctgcaggcccccgccaggctggcagagaagtcgccctccgtccacatttccgcccctggcgagaagaggaggatcgcccacatccccaacccccgcctggctgcaggtgagtcctggcccagggggcctgtgccggggggccgtgggcatgtgggcaggagaggtggcaccctgaggtctctgagctcacctgaaccacatggtgcttgctcatgggatgactttgggccccctccctggggccctcagcctgcctgtctgtgaaatggggactgttgaggggtgcaggaggcctggcccagcaccttccttccctgacccagctccggggttactaggagtccaacagcctgctggggactgggctgaaccagggcctgagcctgtggttccagggaatggggagccatgtcggggtacctggcattgggtggggagcaggcttctgcaggtgtggctttctcctggcgtgtgagtggggggcgtggcctctgatggaaatgagtgctgtcttcccaggagtggggctgtatttcctttactccgaggggcacttcccccccagcagggtcttgtagaaagtcgggccaggcctcagtggtgggtggacaggacccttcacggggggttgtcctgtctcctgcgtcttcacatcagtggtgtctgtagagcgagaaagtatccctggaggcaggtcacagatgagggtcccccagaaagctcctaaaaaatgcaggttctggtctggaggctgggaaaggtctgtgtgtctggcaagctccctgggagggcatggctgctgtccgaggaccaccctgagcagcctgctggtttggagcccctgcctccctggcgctggctggagagccttagggccagccccggcgattcccctgcagatcccatggatcccacggccctccttagggagagctctccaggctactctgacctcccctccccagagccccctcacggctgagaccttagccccagggaggggaaatcattgagttgggcctatcccaggaccccacacgcttcccgtctgtgtctccgcgctcgggttgtcctgttgctgatctgtggtgggtgctgagctgtcgcagtgcccttggggcccgccgcctgaagggagtctggcgtcccaagtgctggcagtgccgcagggcgggctcatctggcttggaggactcctgtggctgcctgggctcgcccccagcgtgcagccgagggagtctggaggttctctgtccgttcctgaagagcaaaccctccactgcaagaggcgcgtgccagcctggcgggcagcctgcttccttgctgggcggcccgcggtagcatgagcagactcatcctgcctcccttgcaccttccagggccagatggcatttcgagggatgttgctctgagactagggccagatgtccctgctcacagctccccttcctgggtcggtgccgagcccccagtccagaagcccccctgccacacagacgtacatgcccaggttgcagctgcccgcgtggccagccctccgaagcagcccctgcaggcctggcctcctccctctggtttgtgacttcatcaaagggcaaggcagaacacagaggccgcagggcagggcaaagccaatgagcaggtgggggcacccgagacccttcggtcctctgtccgggagccagggcctttccctcagacatcgacgccttgggcttggggtcagaacacgtggcagaggcctggaccaccccaccggtgacgtgtcctcagcggcctccgcagcctgacctgtgtcctctgcctcgatggacttgcctgaaggcagctagagcctgatgccattgcgcagccccagcccctcaccctggcccggccccctgcacgcggagatgcacgtgctgctggcgctgagcggccgcggctgcctggtgctccgccacgtggtgatgggcagccactcgccctgtgcccacaccccctgtgccccgccagcccccacaggtgccaagaggacccttgcggccagcggcagccagtcctccaacggccctgagccaggtggccagcagctgaaaacacgcacattgtcggggatggcgtccaagactaccaccaccatcatccctaagcgaatcgcccacagtccatccttacaggtagcccctcccatctcggccaggaccaccacccccaagaccacgccctgaggcccggccacatgggacctgcggagggccagcctcgcccctgccctgcgggccttcgtgctccacaccgcagtacagccttcaccttccctccccatgccttggtgttttttttttttttttgagatggagtctcgctctgtcgcccaggctggagtgcagtggcacgatcttggctcactgcaagctctgcttcctgggttcacgccattctctggcc

SEQ ID NO: 33557 - DNA, 1276 bp, Artificial sequence
  DNA replication origin
ctcctagtaaccccggagctgggtcagggaaggaaggtgctgggccaggcctcctgcacccctcaacagtccccatttcacagacaggcaggctgagggccccagggagggggcccaaagtcatcccatgagcaagcaccatgtggttcaggtgagctcagagacctcagggtgccacctctcctgcccacatgcccacggccccccggcacaggccccctgggccaggactcacctgcagccaggcgggggttggggatgtgggcgatcctcctcttctcgccaggggcggaaatgtggacggagggcgacttctctgccagcctggcgggggcctgcagcaagctcgccgatgccctctgcgcctgctgggcccgcaggtagcacacctcctgcgccgtcgggggccgggccgggggcaccgcgggacccctcctcgggggctccacctgcgtcaccacaaatgctaaggcctggcagcacagcgggggcacctggagcaggcgaccccgggcaggcttgggagagggtggctggagctcgggggccggaggcaccacctccctggctgccttctgagctgctgggcacactggggggaagcagcagggggcagtggtcctcaatgccatgtggctccaggctcccccactcccagtgtctcccggtgcccaggctatgtcctcagccctgataaggcacgggtgggcgggactaccccgattacactggcactccaatccaatcccactacgcctaatcttcctcaaagcccctcctctggggaggctctgggactggagcaactgggactctcctggctgctgaccccggagccaggctctctgcttgtcctgcactacctcgccacgtctgcacaggggcctgacaagcgctactgtctccgggctacagaggacactggagctcagagctggacaaccggcccaggcccaggccgcacacggcgcagcaggccgtctgccgcactctgggggaggtcaccctggggctgctgacctgctctgtccctcgccccagcaccgtggcaatctaacaggaaggggcagggccagctccctctggaactcgggcagcgtcaaagataaggtgtcttcaaaaagctcatggaaaacgtgcgttgtgacgaaacttgcatggctttcaagtttttttgccccaaaataaactgatactaacttgtcataacatgtctgaaccagacggagtttgaggcactaaaaaaaagtaagacatcagttagaacagagcccca

SEQ ID NO: 33558 - DNA, 2210 bp, Artificial sequence
  DNA replication origin
tgtcgcccaggctggagcgcaatggcacgatcttggctcattgaatcctccacctcccgggttcaagcaattctcctgcctcagcctcccgagtagctgggattacaggtgcgtgccaccgcgcccagctaatattttgtatctttagtagagacggggtttcaccatgttggccaggctggtctcgaactcctgacctcgtgatctgcccacctctgggcgcagtgcctcatgcttgtaatcccagcattttgggaggccgaggtaggcagatcacgagaccagtctggccaacatggtgaaaccccgtctctactaaagatacaaaaattagcctggtgtggtggtgggcacctgtaatcccaggtactcgggaggctgaagcaggaaaatcacttaagcccgggaggcggaagttgcagtgagcagagatcgtgccactgcactccagcctgggtaacagagcgagactccgtctcaaaaaaaaaaaaaaaaaaaaaaacaaccaaaaaacaaacaaacagaaaacagagggatgaagctgggagcagtggctcacgcctgtaatcccaacgctgggaagccgaggcaggaggatcacttgaggtcaggagttggaagaccagcctgggtgacaaagcaagaccccctttttttataattttttttttttgagacagagtcttgctctatcacccaggctggagtgcagtggtgcaatcttggctcactgtaacctctgcctcctgagttcaagcgattctcctgcctcagcctctctagtagctggtattacaggcacccatcaccatgcccagctaatttttgtatttttagtacagatggggttttgccatgctggccaggctggtctcgaactcctggcctcaggtgatccacccgccttggcctcccaaagtgctgggattacaggcgtgagccaccaaaccaggccaacctcgtctttaaaaaaaaaaaaaaaaaaggctcctgctggcctggcctctgcggaccttacctcctggccttgcttggaaaggtgggagatcctcctcttctgcccggggaacagagtggtcagacccgaaagccccttctcctcactcttctcttccttggggggctaagacacatgtccgtccgtcagcacaggtctgccctcgctgccaacaccaacacaccccaacctcaaactgcccccggcaagtggggaatggaacagtccagcccccaggcacagcagctgagggctcagggccaacagtccctgggctttgtgtgggtgcagtcggaggggtgggcaggtgtcacacgttctgcagatgcccaaggctacctctcctgggcacccagggccccagcttggagaccccagggctgcagaatgaaagcacactgggaaagcgaggccaccttgggccgaaccagctgctgcgggctgagcacttgggctcagtctgtgtggagtgagctccccctggtggccaatttggggacacggggccaggagacccaggggtccagggctggcccaggagagcaagagctcgccacgctgggagtagggaggagggaggggaggagaaaggagccggaggggatgaggaggaggcaaggagaggagacagaggagctggaagagaagagacagagatgggggaagggaggaggggagaagagagggggaagggaggaaaggggaggcgaggggagaggggctagaagggtgtgccggaggtggattcccctgaggtgggtgggtgggccaatatccccctgccagtcagtgggaacagaccgtgtgcacgtggccacagaagcctggctggtggccacgggccagtgacctctgggtgggtgaggggcaacaggagcaacagggctgcccgggtgctcctgagctcctgagatttcaacgggctcagggaccagcactgaggagctgcctccaccccgtgcctccgagccaactggaaaccactccagatagaaggtctctcaccaggccctcggctctgcctctgcccgagcccagccccagcacccgcgcgcctcacctgccgggccagccggcctctgtcctccgtcttgacgctggtggactcgttgaagatccgcaggcactcctccatggggtcggagtcaaagtccacctccttctccagggccgagtagtccacatccgcccccgcgctggaggtggaggagga

SEQ ID NO: 33559 - DNA, 1390 bp, Artificial sequence
  DNA replication origin
catccgcccccgcgctggaggtggaggaggaggaggaggaggaggaggatggggcgggggaggggggcggggaggccttgagccgcttgggcggcccctgcgcctccgggaagcccaggctggagtctgagtcggagtctgagtccgagctgaggctggggagggcagagggccacacgctcggcacccctggccctgcggcctcgtcctcactctcgtccccaaagaggtcggcgtggctcagggcccgcttcttcagcttgggggcgtcctgggaggcgccctcgtctagtgagcgggctttccgctccactagcttccccgacggggccttggtgctcttcctgtcgggcagctggagggggcggggtgggcctctgccggccgccggtcgggagtccccgcttgtggggctcggccgccgcgctggccggtcaggcctccctttccctgaggtggccacaggagtggccgaagatggcttcttcttggtcccttccggccgctctgccttgcgccgggggctgctggcctgcgggcccttcttgtccgcacggggcttctccacaggccgccctcggcccttgtccttggtcttgtccttcccctgggccccgtctttgcagctgggggcaggtggggccccggtttttttcttcttgggttttccctccttggggcagcccccatcctgtgaggactggacctgggctggggaggcgggcttggctgggggcggctggaggtcccccacgtcgcactgcacggccgtctccttggtctcccgcaggccgcccccctcggcctccaggccctctttggagggtggctgcccggtggccttgatctcagggtcggccctggctttgggggtgctggccgtggtgggctcgttacctgggaccgtggcggcctcatcttctgagtctgagaaccttgcatcgcaactgccaaaggggtcacagagcttcttgggagcaggtgtgtagggctcactgccgcgggagccccggggccgcttggcggcccgctcatcccgggagctggccctgctgaggtgccgggccgagtagttggagagagggtcatactccaggtctgtgggtggcctggagttgtccaccacgtacttgccactgggaacggggcggctgtgccgccggggctggctcacagccttggggacgtattccagggcaccgccaccccctccacctctgccctgacccctgtccagggacgccagcgagtacttgctgcccggctcggcaggggcggccagtggggtgggctggtagccggcatcagggcttaataggccgtggctgccggggctgtagtcgaaggccagtgggaaggcatcctcgtccgggcccacagtggggctggc

SEQ ID NO: 33560 - DNA, 2234 bp, Artificial sequence
  DNA replication origin
ccgcgggagccccggggccgcttggcggcccgctcatcccgggagctggccctgctgaggtgccgggccgagtagttggagagagggtcatactccaggtctgtgggtggcctggagttgtccaccacgtacttgccactgggaacggggcggctgtgccgccggggctggctcacagccttggggacgtattccagggcaccgccaccccctccacctctgccctgacccctgtccagggacgccagcgagtacttgctgcccggctcggcaggggcggccagtggggtgggctggtagccggcatcagggcttaataggccgtggctgccggggctgtagtcgaaggccagtgggaaggcatcctcgtccgggcccacagtggggctggcgttggggccgcggggcgccagggcgggggcctcggcggagcggtgctcacgggtcgtctccagcagctcccggtagcgccgctgctccagctccacctcactgcgcacggcctcgatggcctggttgaccagctccaactccagcacatccgggcgcggctcctcccccaggcccagggtgccattctccctctgcgcggggggcttgggcagctcagggttgtaggggtcgtaacccagccctgaagggaacagagagcacagctgtgaccagcctgccggagaggagcccgcagcatgggggcggccccggtctcaaactgcagggaagggaagagacctgcctccgaaacccaccacgcactggcgcccgccaaggctctggggtgcccagctgggtacaggccatggcgccatctcaggccctgtgccgggccccgccttgccctgaccaatgggcgctggatgggcctgggctgcgtgacacacagctccctgggtactggaggctccctcacacggctcatgaaatgcgcacaatgaccatggtggggtggacactcgacaggctggaactccccggggcaggcgggtgtggagctcccagcattcagggtgccgggctgaggcaggactgggctgggccgacaaccacagcctgacggtggacacaggagagcccttcctcagccaacacggccccacccagccagcagtgtgcccgcggtgtggcggaggtgtgccagcagtgtgccagcggtggtgtggtggcggtgtgcctgcggtgatgtggctgagcagggccgggggatggggacatgcccagttgatgggccaccctgcaaaatccacaggaagattttttttttttgagacagtctctctgctgcccaagctggagtatagtggtgcgatcttggctcaccgcagcctctatctcccgagttcaagcaaacctcctgcctcagccccccaagtagctgggattacaggcgtgcgccatcacacccagctaatttttgtatttttagtagagatggggtttcaccatgttggccagtctcgaactcctgacctcaagtgatccactgcacctggcctactttaaattaattttttaatttcaaaactttttgtagctgggcgcggtggcgcacgcctgtaatcccaacattttgggaggccaaggcgggcggatcacctgaggtcgggagttcaagaccagccagaccgacatggagaaaccccgtctctactaaaaatacaaaattagccgggcgtggtggcgcatgcctgtaatcccagctactcaggaggctgaggcaggagaatcgcttgaacctgggaggcagaggtttcggtgagccgagatcacaccattgcactccagcctgcgcgacaagagtgaaaccccgtctcaacaaaaaaaaatttgtagaggtggagtctcaccatattggccaggctggctttgaactcgtagactcaagcaatcctcccacctcagcctccaagatagctgggactatagcccaagctgctgtgcctggcttaaagcacacggctgaaatgtcttcccggggggcagctgggaacatgagactcgcatgttatttacgtggttccagaacatagtgtagcagaccctcacaacctcaatgccaccaacgtcagcacagaagtcagaaccacagaagcctcccgtggggacaggccgaaggagtctaaagaaaacatgagcaagtggagcccagtattccagcgaagcaataaaaaccaagttcaaatatttactccagaaacttggaagttgaccattagaaattctactgagcacggcca

SEQ ID NO: 33561 - DNA, 1611 bp, Artificial sequence
  DNA replication origin
ggccacgaggtacgggcaggcaggggaacatcacacagaagccacaggttcttctttgcctgtgccaggctacagccaaggcatttccaggaaacgtcaccccatgtgcccagcaggcgcagaggggcccattctggcaccatctcacagccaaggaccctgggagtcagcgagggcacccaactaggatcagcaactgtggctgccagttcctctgtgcggggagggacagctgccaggccaggaggatgctcccggcagggaaacggccggctggggctgggtgtcagcccccacccagggggagggctgcggaggccagcagcagctcaagggcgccctcccggcccacttcactgggggaggctccggctcctccctgacccagccggctgcagagcacgccaccctgccacccgcctggtgaacagggcaactagtgccagccctcccccagccccggaagcccggctgcccagtgacgtggaggggccaggccaaggccactgtggcgtgagctgcagagattcatgaaggggaggtgacagagcacaattactgaggaggagcaaggccaggtcagggagacactggtctcccctcccaaggctccagctaacggggatgcagagaggaggaagagcccgcctaacgggaaggctctcctccccaggcaggggtgggcagcagtgagactgggccccaggagggcaggcgggggtggaggggactgaggcatctctaaggggctaaggataagggactccactcaggggcttccacctccttgtcctggaccccagggctctaagacacagcctgcaagatcaacccagcccaggggagccaagagtcacaggcaatacacacaccagccagcagacacccgcgagcccttcccaaaggaaggaaattcagacctctggacattgtggactctgaaaggagagaccatttccccaaaaggtgcttttggaaggtcttggaaggaatagcacctgcctcccaggagtggagccaggcccccaagcagagcgcaggacaggtgataagggtccaatctgggggacgtgggcttgtctttctaactggaagcctgtgtgagtacttgttttgttgttttgtggagacaggcattgcccaggctggagtgcagtggtaccatgatggctcgctgaagctttgcctccccggctccagcgatcctcccgcctcagcctcgcaagtagctgggaccacctgcgtgcaccaccacatccagctaattcttttctttttttggtagagacgggggtctcgctgtaattgcccaggctggtctcaaacttctaagctcaagcggtcttctcgcctcggcctcccaaagcactgcttgtcttttaagggctgtgaaacctgccccagcctttagccaacagatgggaaagagcaggggcacctggaggccggagggcacactctgcagagggggtttcagcattttcactcccgggtggaggctgctaccacctccacaaagactgcaccaaaaagaaagcaggcatgctaggcgggtccgagaagactgagatcaggatctgcaccacggcctctcctccctgtggtcactgg

SEQ ID NO: 33562 - DNA, 930 bp, Artificial sequence
  DNA replication origin
cctgggctggaggggccagtcctgctgatgcctggttgcgttgagagccctgcgggcccaccgaacggtgtccggagcaggggctgggcctgccgggttcttttttttttttttttttttttttgagacagtcttgctctgttgcccaggctgcagtgcgatggcgtaatcttggctcaccgcagtctccgcctcccgggttcaagtgattctcctgtctcagcctcccaagtagctgggactataggcgcctgccgccacgcccggctaatttgtgttttcttagtagagacggggttttaccttattgtccaggctggtctcgaactcctgacctcaggtgatccacccgtctcggcctcctacagtgctgggattacaggcatgagccatcgtgtccagccagcctgccgggttctttagagccactgagtctccccgtctgggtgggaggggcctggggctccttgtggggctaggagctgccggctctcgctggcactgggtgtcctcatctttgaaatgggctgactgagagaagacaggagtttggacgggtctcactagagaacgttctggaagttcaggttgggatcttcgtgctccatgatcttgtcatttttgctgcctttcagtctccgtgtggggttggagctcatgccaggttctccccattgctggggacaggacagctgtgtgggtggattgagtgtggtggggcgggggcagtgggagcagagaggagagtggatgcccagggtgaggggtttctgggccaagggaaggtttgggggccaggagatggccttgggcagatagtgctggtcccaggccccacacctagaaccctgggaagaaatatcatctttgtcatccagcccgtcccggggctgcagggcactggtctcaggagatgcggtcaggatgggt

SEQ ID NO: 33563 - DNA, 1348 bp, Artificial sequence
  DNA replication origin
acccagaggaggtcccacagctcctagaccacacggggcagaaacagggtcacctggagagggcttcgaggaaaagtccagccagtgccgggggcctggacctccaccacccagcagcttccaataccctctctgaaatccaaggtggcccagctctgccccaccccccacaccagactccacccaggtctcagagcttgctgtggaggctgggctgtgcctgcagcagcggcacctggggtctaccccactgcccccagggttctcctcgacccccagggctgcgatccgagcctcccctctgctccaaggcaccgccctccccacctcgacagcgcagtgtgcagtgccaggaccgcccagcaggtggagccacacggcagggtccaggggagaaaaagaaaaaggtcccggcctgaccggggaccaccagctctgctctctggggcgtcctgggcatttattcacctcatggggcggccgtccccacatgccatgactggacgcgctgctgtcccaaggcttacagctcgaggctaggggacagggacggtaaccaggacagaggtcactgcctttcaaaacaatgtagaaacaggctgggcgcagtagctcacggctctaatccccgcgctctgggaggctgagcccaaggccgaggcaggtggatgatttgaggtgaggagtttgagaccagcctggccaacatggggaaaccccgtccctactaaaactacaaaaaattagccgggtgtgggggtgcctataaccccagctactcaggaggctgaggcaggagaattgcttgaacccggaaggtggagtctgcagtgagctgagatggcgccaccgcactccagcctgggcaacaagaacgaaactccatctcaaaaaaaaaaaaaaaaaccagctgggcgtggtggctcacacctgtaatcccagcactttggaaagtcgaagcgggcggatcacctgaggttgggagttcgagaccagcctgagcaacatgcagaaatcctgtctctacttaaaaaaatacaaaattagccagctgtggtggcacatgcctgtaatcccaggtaatcccatgcctgggcgcagtagctcacgcctgtaatcccagctactcgggaggctgaggcaggagaatcgtttgaactcgggaggcggacgttgcggtgagccgagatcgtgacattgctctccagcctgggtgacagggcgagactccttttcaaaaaaaaaaaaaaactgaaacagaagggtacaaatggcaaaggacaagaaccggcagggaggagccagcgggaccttctccccctatgcctctccatccctgccaagagcc

SEQ ID NO: 33564 - DNA, 1121 bp, Artificial sequence
  DNA replication origin
tccgccctcctccccaccctcagaatcccttctgcaaagcaatccctagagaggagcaggcaggtttccggggagcgctgggtgcgcccggccgtggcttgttccttacgctgtccgcgcagtgggtagattctgttggtatgatctgctgcagaacaaaaagcaaaaacctgaaaagaaaataaacagggtagaagggagactgtcagggcaatcctgggggtccctgagcctcacggggacctctcgagttgccattcctcttcctcctctaacagccaagtcctctgggacccttggaggagccgcatgtgcactggctgtttcggggcgatccctcccttaggctccgagaggtttttgggaacggctgcgaggacggagcgcctcccgtcccatgacaggctgcgtgcctggagcccggggttctgggacctgcccctgcttccggcctcaggaaaggagtggttgggggaggactcgggacgagctgtgggctgagcctggacacacacaccacaggacttcagtgttctctgtaaagccaggagctggtcctggtgccctccaaggccctgtctgggtccatctagactcagtgtctgtggcgccaggctgaggggactcgggaagcagaagcggagggggtgatgtggggtgggcccgggtccaggagacagggcagctgtcacttggagttgcagggagtggaggggtgacgtggggcgggcccgggtgtcactcagagttgcaggggggtggggcgagtgtttccaaacacaggattactgggctgggttttggaggatgaataggagtttgcctgtggctggaagtgggattagggctgtgggctctggggatggagacagctcgaggaaagcctgggatgttctcctgctctgggcttggggctgcttgggagcttgccgccgatggggctcactgttgatatgctgtctcatctgtccccagcctgggagcgctcctgcggttgggcagtctgcgattctcagctttctggagtctcttcctgttcccacagagactcatgtctggagagtcggtgtgctgcaggtgtggaggggcccgtgcctctgggtcagtgtttccttcccctt

SEQ ID NO: 33565 - DNA, 939 bp, Artificial sequence
  DNA replication origin
gaggaaaggggcctggggtttccagagcagccgccttcttgcagatgctggcaggattgtgctggcagctctcccccaggtggatggcgatgggaaaagcgctgggttcccagggcctgggggcctgtccgtgttgccacgggtctctgggtgctttacttttgaaggtactattttctggcctggggaaatgtttgttttagaaacatcagagaatacggaagagccagaggagaagtgtggcttcctttgccgagtccggcaccaggccgcttgccgggcctcctccagactccacaccagaggtcccgggcttgctgtgcttgagccatggctgggaccctgcctcacagatgaggttggattctgtttttttgggggggcttttcccaaggttctgaggtcctcacctgacttccggagcgcctgggcagctttgaaaacctggctgctgggcccggagctgcctccaggcgtgggccgtgccagtcgaggctggttttggtattcatattttaggattctttgcttaggtcttcagtagagcagtgactgatcccgacagggcggttctgcaccttgggaatgttaggagatgtctggagatgttttggttgccagtttgggggtgcaggcacagagagggcagaggccaggggcactgctcagcacccttcagtgctggggacaaccccacagacagagatctagcttggggcagtagtcctgaggatgaggatgccggtctggcggccccgcctgctgtttttgtgttttctttgctgctgctgctttttttttttttttttgcaacggaatctggctctgtcgtctaggctgttggagtgcagtggctccatcttagcttcctgtaacctccgcctcctggattcaagtgattcttctgcctcagtgtcccaggtagctgggattacaggc

SEQ ID NO: 33566 - DNA, 1463 bp, Artificial sequence
  DNA replication origin
gtggagtgggcagggctagatcccaccttcctcccatctgacctcagaacccaggcctctgcccactgccccgcactccctgtggtgtctcagggagtctgtgtcctactgagaggcaggacactgtcttccaggagagggaacccttccggggaggattgcaggaaagtccagggctctccagaggtgcggtgggccccagctcagggcttcacagctccggcaggaacgtgctcccagatgatgcttctcctgagggaggcagaggctgagggcaccacgttgaggggatgctagtgctgcgccacaggctgactcaggccccagcaggacagtcccaggcctggggaaggggccatcctatactgcaaagtgagcggcagacgtgtgtgcggggcgcacagctcctgccctcggggatcccgcagtcgggttcaggatctggcagcccggtgccagtggttctgggtggggctgttggcggcgtcccagctggggctccaggcgactctccagaactgcatctgtagagggcaggagtcctggggtagaggcgctcagggagcagccccaggtacatggggagccctgaagcccacccactgtgtacccagtatctactgaagcccacccaccgtgtacccaatatctcctgaagcccagccaccatgtacccagtatctcctgagccttctagcagagtcgggtcaggcaggggtcctcctccttctggctcttcagatgtggcccctcacatgggctctggggtccctacctcttgacttggccactaccacagcagtactgggcggactctgcctgtgacccccaaacagcagtgggagtggctcttcccagtttacagatgaggaaactgaggcccagcgccgggaggctgctcacctgtgtacgcgtggctggtaactggcagtgctgggttggatgtgggtgggccggggccctgcctgcctcctctgccgtttttgctgccagcctctgtgggctgggcacagaagggaacttgaaaccttccaaggatgggcctgaagcaggcctggctctccggtgtcggtgacagcctcccatacccctgctaggcaggtgagccctgggatcctactgatctgttagggcttgccagctctcctcggaaactctgaggccccgagtcaggcgagaagggagaaggaggccaagaatggcgcctcgctgcagaggatggcttgccttcatttcctctggcctctcaggagggtcaggagctcccgctggctgcgtcctgtgctgcctcctcctggtggatgggagacagccggctttccgtggggcagtgaaggcaccgtctgaccacctgtgtcaccttcagagacgtgacagtgtgtgctctcctcggtccgacttttcatcctcagtgagccgcgtccaggaaggaatggactctaggggagaacccccgcagccag

SEQ ID NO: 33567 - DNA, 1995 bp, Artificial sequence
  DNA replication origin
catggtggttttcatcgtcatggcagcgtttcttggaggagatgtgggatttggattggagaaaaagagggacatcgcaaggaaagtcgtggagggagggttatcgagtgtgatgtcattcagactcccctgttacctctgtcccttgatagtggctctctgcttcacccagcccctgacttccttcgtcccagatttcctcattgggcgtgagtttcaagcactgtttttactttaaccatgaaacagtctcagctcagaaccttttcctgcaaaagagaaacatcttctctaggatttaagaataggtttattttcctgttttgccagaaaaggtagcatttttttctgatttccctgataagtgtgcttgggacacctgcacctgtgggcggttgtttgcaggtggacagatgcaagcaatcacttgtcagctccccacagcccagcgtcttcgctgtgtttgaggcgggggattcagagctgcgtacgatgccggctgtgctctcagggacctgccgacagctgtgcctacagatcccgtagcataggtcgtgatgtcctgggagcacgcagccggctttggcgggggctgggagttggtgaagaaggcaacgcgtgggagaggcttctcggaggctgtgacaccagactcacgatgctcattttaaccctatttttagagacagggtctcactctatagtccaggctggagtgcagtggtgcgatcacagctctttgaggcctcgacctcctgggctcaagggatcctcctgcctgaacctcctgagtagctgggactatgggcggcgggtgccaccaagcctggctaactttgtatgttttcgtggagatagggtctcgctatgttgtccaggcttgtctcaaaactcctggcctcgagccgacctcctgcttcggcctcccaaagtgctggggttacaggtgtgagctactgcacccggcgcaagtcaggcttatgatatctgtctgcatcccaaatggctcatttgtttcccaaaggcttatttttgagggtccctttggtgatgtcgtcttcctgtctgccccccgttcctatgggaaaaaggcagctgcctgcctcttaccatggcgtgtctgcatttcccttttgctggtgagaatgaactccttttcccatctctggtggggtggtagggcttcttgttactgtctggtagaagactgcctccccccgcagaaggcaggatccatcttccttgcggtgaggtttctctgaccctctgtttccgcctccgtgacatgttcatcaggctgccctctgaggacagggggggatgcatgtcccatgtccacacctccagatttacacacacccagtttcctatgagatttgaagaggctggcgtgatctagcctttgccatgtcttctcaaggggattttagggtgcacagggcagcggcctccagagaggagatagacaggaacgctggcctcccaggattgagagtggacagaggttcaggtgaaaagccctcagctagccctggagcacctgtggggccatgctctgtgctggacacgcgctgcatggtgaccctgtgagctatttgctgccggtggggaaacggaggcttatcgaggaacgtgttttgcccatactaccacctggccagggcagggctggagcctccagggcctctgggagaaggagagggcatctgatgagggcaccaaggcaggcagggttgggaggcttggcggagctgcgacgggaacaggaaggtggctggtgctcctgggccctgggtcacaggctcagcgggtcattggcgaccttgagcagcactgctgaaggactcaggtttccttctgggctcttatccctggacctgctcagccattttatttaatgaattaatttttgagacagggtctcactttatcacccaggctggagtgcagtggtgcgatcacagcttactgcagcctcgacctcctggactcaag

SEQ ID NO: 33568 - DNA, 946 bp, Artificial sequence
  DNA replication origin
gcccggggggccctgccggcggccctactgccacttccggcaccgcggggcccggggctccggcgcgcccggtgacggcggagaggcgccccccgcagcaggtaatgcccgcccgcctgcttgccttgggctcggctcccctgcccgggtctggaccccaccccggtcccgcccggggtccccgttctcggcccagcctcctccccacacgttcgcgggcgacggttttcccagtcgggaccggaaccacccaccctgggacccggtgcaaagcactagatgtccctaagccttcgtcttcacgagtgtgaaatgtcaactaggaggacgcgtcctgccagggctgtctagagggcggagtgcgagcgcatgttgagtaccgggcaccgggcctgacacaagggggctcgggagacgggcgcggccggcgctaggcaggtcctggactcctcctgcccctgattggcgcccgccgcttcccggaccccatgtgcttgtggccgcccttgtttatttccatgacgtttcctccggccgcgcctctggcagcggccacctcagtctccagtcgttgagttaggatggtccgaggatcgtctcttgtgtttgtcgagccctgtgtccagcatgactggcagggaggaagtcaaagcttactcgagtgggctccgaggaattccatgcttttggtcgggcagaggacgttggtggactccacctcacagcgtcatggtggttttcatcgtcatggcagcgtttcttggaggagatgtgggatttggattggagaaaaagagggacatcgcaaggaaagtcgtggagggagggttatcgagtgtgatgtcattcagactcccctgttacctctgtcccttgatagtggctctctgcttcacccagcccctgacttccttcgtcccagatttcctcattgggcgtgagtttc

SEQ ID NO: 33569 - DNA, 1005 bp, Artificial sequence
  DNA replication origin
ggcagggccccccgggcgccccagaccaataggggcagtcaatggcccggaagaagccagtggagcgtagcatggtccgtcccgcggcggggccccggcccggagccgcccgggccccagggccccctcactggcgccgcggtcgccgccgcccgcgcctcacggaccccgccgccgccatcttgctccgaggcccccggaggccctcgggacgccgccgcaagggaccccgggaggggctgcccgcagcgcgcctgctcagaaacgcctgctcctgcgcgaccaaggctggtgacggacccctgggccgggacagacggccgcgggaggaagtaaggagggcaggggctgccctgcctgcggtctccgggagcctcgccagcgccgccgcccgaccttcggcggctgtagcggcgccatcttgagccccaggcccctgcggcgccagggctgtccacggcgcgcctgaccaaaaaagccccgcggggcccgctattactcatttgcatattatttcctttcgttagcatatcaccttaaggcgccctctgctggacgaggagagttctgcggggaggtggccttaaacctgggccaggtgaaactcatggttgaattactccgttcacagtctttaaaaatcccctcgccctggtatacagctggctctcaagaaacgccttaatctccccaacctcgactcttgtcatcagtctaatgaccaggtccacgttcactcatttgttcaacaaatattgagcgcctactgtataccagctagagggtgcattttaacagacaaacgaggaacaaggctgggatggggcaactctgtagtctggtggagtaggcccacgtcttaatgggaagtttaacctggtgcattttggtgggattgtaaaatagtgccactgctatgtaaaacaaaaaacccaaaaagtttgtttttaagagacagggtcttgctctgtcacccaggctggagagcagtggtgcgatcacggc

SEQ ID NO: 33570 - DNA, 1607 bp, Artificial sequence
  DNA replication origin
tccataagcagagcagagaaccccactctggtggaggtgatggtgtaggcagggaggccgacaatgaacacagcaataagtgagacagcctgaagccaggtggaaagtgctttgagaacagaaacaggagaagagcctggactgggcacagggctggtctgggtgattctatggggaaggcgggatttgtgcggttttacagaaaattaggggccaggcatggtgcctctcgcctgtaatcccagcactttgggaggctgaggcaggcagatcacttgaggtcaggagttcgagaccagcctgactaacatggtgaaaccccatctctactaaaattacaaaaattagctgggtgtggtggcccatgcctgtaatcccagctactcgggaggctgaggcaggagaatcccttgaacctgggaggcggaggttgcagtgagccaagattgcaccactgcactccagcctgggtgacagagtgagacagtgtctcgaaaaaataaaagataaataaataaataaaagatgatgagggagccaagcaggcttctggaggaaaagcattccgggcagagggcacaggccatgggcaggactgcgcctggtgtgttggaggaacagcgaggaggccagtgtggctggaccagggtgaggagggggagagaggcaggagggaagagcagggagaggacggggcaggtcatgcagaaccctatgggcctcagggaggacttgggctttgactgtgagggcagtgggagccatggagggttgcgggcagaggaggaaccagacttgccccaggtgttcacggacaccctctggtggccgtggggaggacaaaccgtgaggagaccagggccaaggtgattgcactggttcaggtgagtcgtgaggaggctagaccgtcgcggtggaagcccttacagcagggaaaggcggccagatcctggatctattttgaaggtagagcccaaggaggtttcagatgggccagatgtgggtggtgagacacacagtggggtccagggtgactccccaaggattttggccttgcaggatggaactgccctcgaccgaggagggggcatggcaagagcagcctgcgggtgggagggacgcccgggagggtcggggtcccaaaggcaccaaaaggatggtgctgcttctgggcacgtgtgtgtgctgggggtggggcgtgtaatttaaaagcctaatgcgagtgtgtccgtcagagagaggggtgaggctgcgagtgtagaccccatattctagacattttgctccagaggggcagaaaaccaggcaggagctggaggggtgcgagagtcccgggagtgatgtttgtggggcgtccggtaggatgggaggatgggtcgggcaggattgggggtgcacgagggaggctgccctcgagtaaagccgggaatttgccgcccaggttggggaggggtctggcgtgagccggcgccggccgcgcgatacgagaggccgaccacccccttccccgggcgggcagcaggcgaagccccagggctcagcaggtgtgtaggagtggcctgcccggccccatcccagccccgccggcctccaggctctggggagcg

SEQ ID NO: 33571 - DNA, 1650 bp, Artificial sequence
  DNA replication origin
tctcaggtgtccacaagttctgcccacggtaggggctgcctggccccccagacctcgggggtagagccaggagtggggcagcgttaggatgcccggaggggctccaggtgttgcttctgagacctgggatggggagggaggggacctctgggttcttccaaagaacatttgactcagtggggtcgggagggaatcctggcttatttattttcctctgtcctcgggtgtgggggccctagctcgccctctctgggtgggtgggtgagagaggctgcaggggaggctggcaccgggcttgggcctccagtccctgccttgctgactttggccgttgcggtatcacgtgacaatcaactctcccttaacgacgactgcggctgttgggctgcgctgccctccctggcctgcaggtggggccgtggagcccatgcccgccggggttgcaggctcttccgggcctgggctgcagcctggcccggccctgcttccctggcctcccctccttctcctgggtgcttggaagaggtgggtcctggcccgtggttgaggtcttgcctcgtggactggaagcagagggctggctgtgcagcctcctggggtagctcgttttttttgcaccgggtagaatattttttcaggcacggattcctttttttctgggcccccatgggtggtccggcatcctcagggggtgtgagtgtgtgtggggggtctctgagctgaacttgggtggggtggggacttgttcctcgggggccacctttgtgtccttgtcagcggtcgtcctgctgtggcctgggttgcatttcctcttggggggggtattgaggacccccagcctggaatgagaagggtccccggttccatgtcagacccagaaaggtggatccccccactgttggctgcaggaggtttttggtacccccttttgttccagaaccgtcctgcctctcgcttggggacaggggggctttggatggcactggtgtgcacctggacccagccccggcctggcaggatccagggatgggtgcctgggatcctggggggagggaggcaggggacgcccttctggagctgggctcggagggtcctgccccatccagccctcggctctctgtgttctctgtccctagcctcaaaccctcttctggcagcgctagtgagatgccttagtctgtgggggtgggtgggggactggggccccgttttcctttgtgagtcttggttggccccagccctggcaggggcctgtctggagcaggggtaggtagggctgtgggttccagaactctataactgggcccctctccagtgtccaggggcttggagagacctgcgcccacccctccactctcccaggagtcgctgatcactgggacctggttccagccgtttgcaggggaggcggctccgagaggcgtgtgctttccgtgggtggcgcccctcccccgccctgcctggcctcatccttgtatttaattaattaaacaagcccctttttaaaccctactccagcgtgtgtgtggtctctcccgtggcagtccccacctgtgggcacgctctgaatccctctgtcccacccaccagtgtggtcccaagttcatccacctcgtggggaaaccgaggcagcgggctagtgaagggggt

SEQ ID NO: 33572 - DNA, 1375 bp, Artificial sequence
  DNA replication origin
tggggggatccacctttctgggtctgacatggaaccggggacccttctcattccaggctgggggtcctcaataccccccccaagaggaaatgcaacccaggccacagcaggacgaccgctgacaaggacacaaaggtggcccccgaggaacaagtccccaccccacccaagttcagctcagagaccccccacacacactcacaccccctgaggatgccggaccacccatgggggcccagaaaaaaaggaatccgtgcctgaaaaaatattctacccggtgcaaaaaaaacgagctaccccaggaggctgcacagccagccctctgcttccagtccacgaggcaagacctcaaccacgggccaggacccacctcttccaagcacccaggagaaggaggggaggccagggaagcagggccgggccaggctgcagcccaggcccggaagagcctgcaaccccggcgggcatgggctccacggccccacctgcaggccagggagggcagcgcagcccaacagccgcagtcgtcgttaagggagagttgattgtcacgtgataccgcaacggccaaagtcagcaaggcagggactggaggcccaagcccggtgccagcctcccctgcagcctctctcacccacccacccagagagggcgagctagggcccccacacccgaggacagaggaaaataaataagccaggattccctcccgaccccactgagtcaaatgttctttggaagaacccagaggtcccctccctccccatcccaggtctcagaagcaacacctggagcccctccgggcatcctaacgctgccccactcctggctctacccccgaggtctggggggccaggcagcccctaccgtgggcagaacttgtggacacctgagattgagtacccgaatggggggtggctgggctgcacccccatttccctgaactactcccatggctttcggtggggtgggggtggggtggggagaggcaggggccgtgtcaacccccgactcctctatggctgtctgaacacttcatcccaatctgcagggatggggcagggggtgctttccccgggccggctcccagaagtccactccacccccccaaaccccaccccgggaggggggcagcagggggtggtggagaggagaggggaggacctcctagctgccctgggggggccccgttgcacagatgggaagaaagttagtatcatggctatttacagacacaagcccccgtcacccatcctgagagccacctctgaggtcaggcagacccaggtccagtctcaggccccctcctcactctctggaggggggcaggggtgtcttcagggtttgcccacggctggaaggggcccaggctccc

SEQ ID NO: 33573 - DNA, 984 bp, Artificial sequence
  DNA replication origin
ctccacccccccaaaccccaccccgggaggggggcagcagggggtggtggagaggagaggggaggacctcctagctgccctgggggggccccgttgcacagatgggaagaaagttagtatcatggctatttacagacacaagcccccgtcacccatcctgagagccacctctgaggtcaggcagacccaggtccagtctcaggccccctcctcactctctggaggggggcaggggtgtcttcagggtttgcccacggctggaaggggcccaggctccccgtgggtcctcactacacccctggatggcagaagcatcctggcggtcagggtgggctgcacgagggccctacaggcctgcgggggctgggctgggcgcggggctgggcgcagggctcccggccaggctgcagggcagcgagtcgctgggggaggtactgcgggcaccagggcgccggagcaggtccgggtggaagccggggtggcggcgggcgtgcttggccaggtggtcactgcgggtgaagcgcttggagcacagagggcaggagaagcgcttctcgcccgtgtgcgtccggtggtggcgggccagctcgtcggagcgggcgaacttcttgtcgcagccctgccagtcacaagcaaaagggcgttcccctggacggagagacagagacagacagcgggtcagcgggggcggggggagatgacagacacgttccagcagatcccaaagggtggcgggcatttgtcccgtgccgttttagaggctgagctctggtgtgagttcaaaacatggagaagcacaaagaatacaacccttacccgccccccggtggcccaacacgagaccctaataaataatcctcttatttcctaccagctcttagaaaggactctccggcgagcccagaatctgttaaccgtaagtaaccgccgcagacccccaaggctgaagctccccaggccctcgcagcctctggccccaggcgg

SEQ ID NO: 33574 - DNA, 2255 bp, Artificial sequence
  DNA replication origin
tcaagtccaccgcggccccgcccacactgccctcccgcgttgtccccacccaccgcatcctcagggcgctgcgtctcggccaggtagcgcggagcagctgggtggctgtgcacctgggggcccggctggctaggagcagcgcgctctgggcccccacaagttcaccccaccctcctccctgcgagtggattgtgtgcgaggcagggcctggcatttcgcagaggcgcttcgcccagcgcagcgtgggtgggtagcccgtgcaccccctgccccgccacccacgtgcgcatgtgcgcgcctcagtctccaagcgcggggcggggctggcaggcacccaggccggagaggcgaccctggcccgggccccctggccccggcgggagtgggaccacgtgagcggggccggctggggctgcggatgtccccgccgccgccgccgagctacgtgcggcagctgtgttcccagcggctgcgcgcccctgccccggtcgccccccccaccccggcaacctgctcctccttgcaaagtggaactgggggagagggagtggagaccagccccgccgccctgaaaggggaagtgaaccaactgactgtccggcacccagccgtgggatgttcccccttccctcctgccgcctccccgcctgtgccttgcaagatggcgacacggcggcatgttccctggaggggcgcgagccccaatcccgtggtctgctccagccgcgctcccacagccagaccccgtccccagactgaggcccttgggagctgtcagggcccagtggttgagatgggagtggggtcccttccagggctgctctgcgcctcttgcttgggttgtagacggcccccagctggggcggacccgcgaccccagctgcatcctgggttgcttgggggagacttggggtgtggagcaggcagccccagggatttgaggctactgttggtcttggtgacagctggtctctccccctctccagctgcctggattcacaacctcttggggaggggggctgctggtctctgtctgcagtcttgttttgctgagggtgtcggggtgtggcagggaggaaggatgagatgagaagggaaggttttttcttccagctcttcttgggtcacgggtgatcgctggtgcccctcagtgggcagacccctccaccctcccgtgcccctcctcagctgggctccccagggcagcccctgatcttagagcagagatgtcactcggtcaccctgagcatggccgtgcccctcccgccgtctctgtacccctcaccatggtccctgctgtgggtccttctaggcccctggctggctgcagttcttcatggaccggtgggagtgctcccagggccagagcaacctccagtgctgggcgtgggctgcccagtttgtaacccaccgggtgactaccctcctggccctgctgtggcttccttgagaataggctttggggccactcaggggagttggttctgacgtctcttttgctactcagggctccaaccagtgccacgaggggcatgcacatccggtctccatccacacaacccaccctggggtgtcacgggaataacgtcccggaatgccagggtccagggtacctggtgcagggcccgaaagggtgggagcttcggggatgcagggccctttgtcctgcttcggtccctgggtggaggtggactgacctgcccctccccagtcgttggagacccctatctgctggggagacgctgacatcacgatgccacatgctgtgggcgtgagaccccggctaaaggaaggggtcgggtggcacagttctagagcaaagacccacaccgcctggaggcgcacaggcaggcccagatggtgacggctggttaggggcaggatgggcgaggcccggccttggcggtgggaggggactgtggaggaagtggccgggtggtggcccgcccctgcccagcgccatctgtcccgtgggggtggggcgagtccagcccgccgggccccgccccttcccgggagaccccgccccctcccctccctgtgagctttcctgcctgtcttccatctaaccacaccccgagatcggggcccagactgactgtgcctgcgggttcctcccatgcccccttgctcgtggaggggccaggagggttagggaggttgccatgattgtacccccttaacccagcctttgcatcccaggtggtcatttggaaaaggaggggatcatgcacagatggaggcccctgcatgcc

SEQ ID NO: 33575 - DNA, 1376 bp, Artificial sequence
  DNA replication origin
ctgccgacccccaggtacccagagtctggtgcaggaggtcctggcctgggttgggcctcaggtgggcctccttttatgtagaagggagtagtgatagtttggcggcggggtggggaggacaggagtattcaagatgctgagcaaacattatctgcccttgctcttgttggaaccagagcttgatcccctaggcctgcattctccttttccacagatatgcattaagcacctgctgtataccaggcctgtgctgggcattgccggggacccagccgtcaatgaagtgcctgccttctgctcccactggagtgcaggggtgcagatattacacccacaagatgcatgcgtttttggaagcctggtacaaagacagagaagctgaccaagggtgcttggggggcaccaggccactgtgaggggcactgctgctcagagaagctccgggcaggatcagccatcagttttgaccctaggccagggcggaactcaggaaagccaagcgcagtctgggtgcccaggcgggagctgctggactactgcactagtccaggagtgagctgggaggggcagggtggggcctggacggatcccgaaggtgatgggatttggctggcaggtggcacgtggggaggtacgggattgacacaagggtgggtatgcctgcctgcgtgtttggcgggaacagcagggggtttggaaaggggaagtctactggaggagtggggatgggggaggaaggaagctttggctttgggaagtcaggggagctaggggcagagtgggtgtgggggttgctatggcccagtagtattcgagaccccacccccaggctggcagggcctcaccaccagtgttcccccttttctgcagcggctcccagaagcagctgcctataggttctatagaacctgctcaaggatcaccttcaggagctcctcccttccctgggtgggtaagaggcctccccagccccagcctttcctggctctcctgggatgcttgctttgcggctggggctggtcttccccacctgtgccctcccctacagacccgaccccacctgttaggtggacgtgagtgccccggcaggcagccggccacagcccccctccccaccccaaggccccccagacaagctcaggaggtgaggcttccctgtcggaaccagggcccttggcacagtcccgcagtcctgtctccaggcccctcctgtgccggctcagacggggccgggccaggtttccaggacttcctggactccatttttctgagcctgcctgtttccgaggctgtcctgagctcacccgggcccagcctgagtcagagggtcaagtccaccgcggccccgcccacactgccctcccgcgttgtcccca

SEQ ID NO: 33576 - DNA, 897 bp, Artificial sequence
  DNA replication origin
atgtgggagggatcgaggcgtgctggtctacgcactgggttggagggagactcctcaggacgaggtgtgcagaggagtgtctgagtgcctgccaggtttctgatcccttgctgaagagggccccaggaggacaggtgggtggggaaactgaggcccagagggggaagcagccatgccccacttcattctctcctccacccccaggcagaactatgcgctcctgtagggttgggatggcagtgctggtgggcagagcttgggagaactggcagcttatctggggagggtcggagtggggcagtgccaggccatagggggtggggggtagggggccagggactgccctcccccacccaccgcctctccagcctgcagagtgcagagagcagctggaactgcctgcaggtgccccagctagtgggatggggagggctcccccagggttgtggggggcgataaccacccccacccaggctctctgataaaagcagcccagatcggtggggaggaggcacatgataccagcagggtgagctgtgggggcggggggcaccaccctggcttagaccatttctggaacagaggttacacaggcaccagggtccttgagggggttgtcccctgccgacccccaggtacccagagtctggtgcaggaggtcctggcctgggttgggcctcaggtgggcctccttttatgtagaagggagtagtgatagtttggcggcggggtggggaggacaggagtattcaagatgctgagcaaacattatctgcccttgctcttgttggaaccagagcttgatcccctaggcctgcattctccttttccacagatatgcattaagcacctgctgtataccaggcctgtgctgggcattgccggggacccagccgt

SEQ ID NO: 33577 - DNA, 1155 bp, Artificial sequence
  DNA replication origin
gagttggggcgggggcgggaggagaggctggctgtcggctccctgctctccaaaccccctgcatccccggagggccccccccccgcccccggcatgccagtgcccggcacaccgtcagcctgcacctccagagggtttgccgacaccctccccaggagaggggctcagacctggaagggttcttctcacccagggcttctctcctccgcacttaccgagacatttggggcctgatcgttttctggggaggggctgtcctgggcactgcagggggttatgcagtgtccccagcctctacgcactccatggcaggagcaccccctccccagtcgtgacaatcacaaatgtccccagaccttgtcaggtgccccccagggggctgcagggtcacccccagttgtatcccactctgaagtcccctgccgcaggccagcacccagcatcccagtccccgcgccccaggacttagggaactgtgtccgtggtggcggggggcggggtggggggtggcaacagggatgctagtgatgacggaaagcgcttcctggaggaggcagcctgaggcccactgggctgggtggggcagggaatgggagaggaagggcgtgctggctctggggtctgctgtggaggtagggacttgaggtggggagggggcacctcggcaaggtgaatccctgcacttaatcccgagggtggggacgctgggggcggcagtgaggcaggctgggctttgcagaggcaaatccatttatggagaagggattaggatcagagaggggttgaggagggcaggacgagatgtgggagggatcgaggcgtgctggtctacgcactgggttggagggagactcctcaggacgaggtgtgcagaggagtgtctgagtgcctgccaggtttctgatcccttgctgaagagggccccaggaggacaggtgggtggggaaactgaggcccagagggggaagcagccatgccccacttcattctctcctccacccccaggcagaactatgcgctcctgtagggttgggatggcagtgctggtgggcagagcttgggagaactggcagcttatctggggagggtcggagtggggcagtgccaggccatagggggtggggggtagggggccagggactgccctcccccacc

SEQ ID NO: 33578 - DNA, 3217 bp, Artificial sequence
  DNA replication origin
tcgcacctgcggacgcacacaggtgagtgcagccgcgatcccggcccttgcgggggcggccgcctgagacccctcccccgccaggaccccgaaactgcgtggcgcgtggggggcggggaggggggcgcgcccgggccgccgccgcgccggccggcagggcggggcctcggtgggtggggcgcgcgcggggggcgtggcggccacgcggtcgggcggcgagcggatggccgccccggcggcagtggcgggggctccgggggcccagcgaggtctgcgggcgggattgagactcctgggcagaccacctctctccctttctgggccttgttccgtttttttttttttcttttgcgttctggtctgggcggtgggcaccgtggttggagcatccggctctggggttctgggttctccccctcccccagcctcagtttccttatctgtgaaaatggaggaggaaccgcgtcgccgccgccggggtggccgcgcggattctccccagaggtcggcagagcacctggcgtggggccaggatggggggagcccggcacgttttctctgcgttctctgtattttaacgagggggagggcgaggctaggagcgcgggttggggcctgagtctgggcgggggaacttcatagtattggaggaccctcgaggggctcgggtccacactgctgtatttccctggcgtgtttgttcacccctacctggcgggcgattcgggaaggtgcgcgtagttggagcgcttcggctacaccaacgcccctcctagcgcagtccccggggcggcgaggggaaccgggagcctggtgggcctggctgtattttttcactccgtcccctcctagggttccactttctggactgggagtttggactgggcaacaggggacggtgggccttgatggccggccctggtttgggcattagaggtgcttgtcccttccggggagggtggggggctgggggaaagctgtgcggctgcccttgggcttggcattctggccttgccaccaaacagaagacctctacccgatctgggtctcaattttctcatttctatcaagagtgcgatgctgcctctatttcatagccatagcggtggccgctttgggcagctggacactccaaggaggcttggtccgtgggctcggattgtagggacacgtggagcagccgaagggaagtgggccgtccagagtggtggggctgagatgagcaggggccgcgaatgccttgcggaagaattgagggtccatctttggggtatggggagccgcgctgggacgcctgagggtggagagcaggagggcgggtgggggcggtggtgtgtagcctgccggccgccccctctctgttctgcactcttttcacccctcgctcagtccctgtcctggtcccaggggcctggaggctctgcccaccttgagacacagacgggaaccgagggcgtcaagacaggacttgggtggggtctgcgttttctgcgaggagccacacatcctcggcggaggggtcccagggtgttacctctttttgagggcaatggggtccgtgtatctccgcggggagggacattgggggtctgtgaagatggcgaggcagcgttgggaacagaaagggaggtgcctctccgggcggtgggcaggggtccaggagtgccctggctttttgggggtaagttgggcgatctgaacagacggggctgaagtgggagcctgttgggaaagcgactcccacctgtctacccaggtcattcttttcttgccagatggcgtggcctgagagctccatttgggttttctgagtttctgggttaagtggacgggatggccacctccctgagtggcacccaagaggcgcttccataggcccccgggtattggggcagcggtccctaagccagcagggaggggagggatgggtttggagtcctgggaaggcagtattgttatcccgggattgcagtaagaaacaggcctgggggtgcccagtcgggcatccccaggggtggatgcagttgtgctgatggcgcgccaccgtctaccctgtgtggtgggggagggcagggcggatctcctggcaccctcccccaccccttgagcctgctgacgtcccattccaaagccccctttacagtaacgatttggggactgggagggcagtcccaggcccaggcaccttggattcggtttccaaagggttttggatacttgtggctttccaggctcctcttccgggcctccccagcccccaggaccaccaaggggtctgtgtaaacggcctcttttagtggaaggtggtctggtttttcagcccccggaggagggagggaatggctgccgttaagctggttttgggggacaggaaggccatgcgtttttttgggagggagccccattgcagggctgtccctgaatggagtggaggccgggaaagatccgcagacgaacccgagtcaccggtggctgcagggctgtcccgggggccattgagaacgagttccacccccacccacccctgcctggagtgcttctctgtaaagggaacaccagtcgtggcctggccccatttttacagataaaccaactgaggcacactggaggagccccacctgtgatttcggccacatttggccctgggagcagggaggccaggggagcagtgggatgttcttcatgggggcagcaggcggcaggactgcacctcccgtcccctgggtctggcccacagcccctatcctagcccggccagctctcggctctctctcccctgcgtggggcggggaaggactttggaagctgtgggtgatgttgacgccgttgctatggttacggagagtgagcgagccagcgagttggggcgggggcgggaggagaggctggctgtcggctccctgctctccaaaccccctgcatccccggagggccccccccccgcccccggcatgccagtgcccggcacaccgtcagcctgcacctccagagggtttgccgacaccctccccaggagaggggctcagacctggaagggttcttctcacccagggcttctctcctccgcacttaccgagacatttggggcctgatcgttttctggggaggggctgtcctgggcactgcagggggttatgcagtgtccccagcctctacgcactccatggcaggagcaccccctccccagtcgtgacaatcacaaatgtccccagacctt

SEQ ID NO: 33579 - DNA, 689 bp, Artificial sequence
  DNA replication origin
gccccccgccgcttctggcccgggccccggcgccgccgcggcgccccacctgctggccgccagcatcctggccgacctgcgcggcggacccggagccgccccggggggcgcctcgcccgcctcctcctcctcagccgcctcgtccccgtcctcgggccgcgcccccggcgccgcgccctccgccgccgccaagagccaccgctgtcccttcccggactgcgccaaagcctactacaagtcctcgcacctaaagtcgcacctgcggacgcacacaggtgagtgcagccgcgatcccggcccttgcgggggcggccgcctgagacccctcccccgccaggaccccgaaactgcgtggcgcgtggggggcggggaggggggcgcgcccgggccgccgccgcgccggccggcagggcggggcctcggtgggtggggcgcgcgcggggggcgtggcggccacgcggtcgggcggcgagcggatggccgccccggcggcagtggcgggggctccgggggcccagcgaggtctgcgggcgggattgagactcctgggcagaccacctctctccctttctgggccttgttccgtttttttttttttcttttgcgttctggtctgggcggtgggcaccgtggttggagcatccggctctggggttctgggttctccccctcccccagcctcagtttcc

SEQ ID NO: 33580 - DNA, 1060 bp, Artificial sequence
  DNA replication origin
cccggcgcgccctccaccactctccgagccgcgcgcggccgccgggggcggggctcgggccggaggaacccgccccccggcgcgcccactccggcctccgccagcgcctagcgtcttaggcccggagcgcgccttctccgcgctagggtgcaaggccgggagccccgccccctcccggcgcgccccactccagcgcgcgcccccgtaccctttcccggagcaccaccccctcaagccggggcgggaggccgaggaccccgccccctctccggcacgcccctccttccgagagcgcgccccgccccatcccggcacgcccctccctcccagagcgcgccccgcctcctcgctggcgcgcccaccccacgccggggcgcgcggccggcgggagcccgccccctccccggatgcttccctcctggccccgggcgcgcccccgttcgcgatggaggagggctccgatccccacgtggccggggttggaggggtgcggaagcggccggccccgcccccaggccacgtgcgcgacccttcccccctcttctcccggcctggggccctgctttgaccccgcactcaggcatctgctcgtcctcttctctggggttccccctcgccgctcacagagcccctcggagcctcccggccgagacacccggtatcccgcgcccgcggcggggcccgggagggtggggcaaggctgcgttcgttcctctttttgcacccagttccggagctactagagcgcgccccactgggggtggggagggccggttgggtcccagagggtcgggatagggggacgggaagagggggccgaacgcaaagggctgggctgggctgggggcgcctgagcgggtcagaggttccccgccctgctgggacaccggggtccggggcttctctttccattcccaggcatcgattcttggggttcggacgggaaaactgaggccaggtattcgggcctcccggccgcgaggacgtccaggccaacttgttaaatattaggggggacaccagggacgcggatggcccagttcgcaggcccaaggcggcg

SEQ ID NO: 33581 - DNA, 1608 bp, Artificial sequence
  DNA replication origin
gagtagctgggattacaggcatgcgccaccaggcccggctaattttttttgtatttttagtagagacggggtttcttcatattggtcaggctggtctcgaactctcgacctcaggtcatccgcctgcctcggcctcccaaagtgctgggattacaggcgtgagccaccatgactggcctccagctaatttttttttttgagatggagtttttgctcttgtcgcccaggttgaagtacaatgttcgatctcaactcactgcaacctccacctcccagattcaagcgattctcctgcctcagccttctgagtagctgggattacaggtgcccaccacctggcccggctaattttttcttgtatttttagtagagacgggatttcaccacattggccaggctagtctcgaactcctgacctcaggtgatctgccagccttggcctcccaaagtgctgggattacaggcgtgagccactgcacccggcctgcagctcattttttaatgtggagagttgggggtttcattacgttgccccggctggtcttgaactgatagcttcaagtgatcctcctaccctggtctctcaaagtgctggcattccaggcgtgagccaccgcacccggtggagaatttacagggtcatagagagtaaggaagagaggacagagccctgtgccgggcgctgctggaggtttgtctgtgttcaccgcaggggtcatgggttgcctgagtgttcctggggcttaggggtgtgaatagaagcctcatgggtggggtgtgggctgtgtgccctcacctggggtctcctgcctgtggagtggctggcatgacctgcagatgaggccactcacttgaaaccctgataatggctggagtgggcagacaatggagtctcacagtgaaggtcctgcctggggccatgtggcccacccctggaggctgctcacccctgccccccatcgttagcctcccagttacaactgtaagccccttgagggcagggctggttggttctgctctaagcccaggaaacatcagtggaagacgcatggttgggtgtggaccctgaggcctcaagacacacctgtccacaagccaatgcggggttccaggaccctgggggctgctgggatggtggggacctgggggacctgcccaagtggcccatcgtcctagaagttcaaagacaacagaggcccagcaggagcaggaacgccgacccccagcgcccaccgaatggtaggggtgcagagagggctctggagcccaggcctaggagaggggcaagtgtgtgcagggcaccctgtaccctcccacacttcgctgaacctcctctctctcggctccgctctgtccagccacgtagagtgggcttactggggcccagggagggctcagctggcttaaccaagcatggttgagcccaggcgcagtgcgggcgacccagggaacagtggtcagcctcagggcgtcagctggggttgcaggtgggcgggggatggggctagagaagccccgaatcgggtcagggcctctgtccatgcccaacccagagcaggaggtcgccgcaggccaaagcagctccgccccctggaggcagctccggcc

SEQ ID NO: 33582 - DNA, 1760 bp, Artificial sequence
  DNA replication origin
cactggtcccctggggagcagctggagggtgcacagccctgggcaccgccccagacctgacccactggaagggcctagcccacatctcaggcaagcctctgccacacccacagccatgctccagccactggccctggggagggtctgccctccccccgggctccgggtaccagagtgggcctaggccatagggtcacctggctggtgtctgtcccgtcacccagggccccgtgctggggtgtaccaggagcaggtgacacagggtggaccagagactcagcccccaggcgccctacccgggagaacgctgttgcagggcttgaacaagtgtgtcctggaaaatccacaaaatggagaacgggaagttggccctactcccaggtggcctggccccgggccataccaagtgggaggtggggagagcgcgcgtcctggaatagagtgctggcctcccctgtcgccacccctgcggggtcctcccgggtcccaagagcagggggtggtggggagaggccgagggtggaagttggcctgacagcctggagcctgaaggcccggactcggtttaccccatgtgagagggacaggcagagggaacacagtgtacgctgaaggcgtctgggagccctgccgaagcctcggtgctgagttcgcagcagcttgagaatggggctgcctgaaaccaaggccagcatcgcgcaccgtgaatatccacagcccgcagggagggaggggcggccccaaatacttcgatttccaaaatcctcttcatcacagtgtcttgtggaactagtaccacatggatcagatgaagtcgtcaactattttaagatgagaattttatctcagtttgatctgtaaatctaagaatctaagcaatctcaatgttttcaaagaagatcacggtgggagaaccagataaacttgcctgctgttcaggagaaaaaagaaacgtgcaaaataatgcaaggaggaggggcctccggacatgaggtcaggaagacaatggggttctggaaaactgggataagagtctagggacagacccaaatctacttgccataaagacagcacttcagtggggaaaagaatgcttttttgggaaataaagttgggacaatttgtggaaaaaaagttttgcttcctaccttactccttaccaggaatactttctaaaattagacataagcatttaaatatatggggaaaaaaaaaccccactacatttctagaagaaaatctcaaatgttttatgatcttacagcggagaagatattcctgagatgacacaaaaatgcaggagccgtaaagagaaaaaaactaatgaccagtaacaattttagatgcttagcttaaagaaaaaaatacaaacaaagtcaaagactaatgacagatagaaaaaagaaacacttccgggtcagccgagaaatggtattcagcaataaatgtgtcagagtcccaaaaaaaaaaaaaaaaaaaaaaaaaaaaaaacacttctactagacagaaagcgaattttcttaatctgtaaagtgcacctagaaaccaccaccatccacccaacagaaaaatgagccaagaagataaaatacaaatggcttttaaatagtcaaacgtttataataaacatattttccaatctcgaaacgactgtcagtggtaacaatgatcaacgtaacatagatgtaacaggaacatcacgacgttcgactatacttacaggaaacacaagctacagtgaaatactatctcacgcctac

SEQ ID NO: 33583 - DNA, 1313 bp, Artificial sequence
  DNA replication origin
actcgccgctcacctcgggcatgcgcgtcgccttccccgacaccaagaagacctactgcttcgacgccttccctaagtgagcggcccgggcggggacgggggcggggcggggcccgggccgggcgcgaagtctcaccggctccacgaccctcccgcagcatcgagaaggtgtccaagatcacgtctcccgtgctcatcatccacggcacggaggacgaggtgatcgacttctcgcacgggctggcgctctacgagcgctgccccaaggcggtggagccgctgtgggtggagggcgccgggcacaacgacatcgagctctacagccagtacctggagcgcctgcgtcgcttcatctcccaggagctgcccagccagcgcgcctagcggcggccccaaccggccggacctcagcaataaggcggcccccggacctcaccccgcgccggcccccacccaggggctgcatgtggaccccccgggcggcccaggggaccccgccccgacccaggggctgtggacgatgtacaggcaacagagctacgcactcctttccttttggaagcaagaagaaaatacgtgaaaacggaaattaaagatttaaaattttagggctgctctccttcctttcatggctctgctcactctctcgagcgctcagcgagctcgaaagggggccggggttcccaggtttcgtccctgagtccctaggagagatcggcacggacccccttataggttttactctgcggaagtggggtgggtctctgtctagtccggggagcccttagggagctggttgcctgggcgatgatgggtggggcagcgtttgagcccaggacccctgcctgcttcctagggaggctggtgagccctgctgggtgggcgcgatgaggacgccaggcgtgggggccctgctgccatcgcgggactgccccctcgacagcttcccgtcagtcctactgcagaggggccaggacagcgcactctgggtcctgaggtgccgcgcttgacggacctcagagctcggacaggccgcttccttcgtagatggcgaagctggggtccagcagagggcggtggcaggtgcttgggccccgagggtctcccctggaagagggagccgacactggagctgggatcacgagaagagttcctacgatctctagggcagaaggcttaggaccgggaggactcgggaaccggtggcctgttgtccaccttagggttgggcagggttcagcctgtgtcgcgcgaccaggcggtggcgaggccgggatcccaagctgcatccagctagctctagtccgcggccc

SEQ ID NO: 33584 - DNA, 2345 bp, Artificial sequence
  DNA replication origin
agcctcccctctccattcactggcttctggcccccttgggaggggagtaaatgaggcactgggcatggctggccaccggggtgggctgtcactacgcatcctcctgccctgcagctgggcgctgggagcgaggatgtgaacggcccttctcggcctgtcccaggtacacggtcctcttctcgcacggcaatgccgtggacctgggccagatgagcagcttctacattggcctgggctcccgcctccactgcaacatcttctcctacgactactccggctacggtgccagctcgggcaggccttccgagaggaacctctatgccgacatcgacgccgcctggcaggccctgcgcaccaggtgagggcgaccctgggggcagctcagcctgggcacacccaagaggggaccaggcggggggccggggggcgggcttccctgggaggaaggtgggcggccctgcaggaggggagccacagtggatgcacagggccagagagccggacaggcgagcttgggtgtgcaggtgccgcctccacatggctgaggtgtggccaggcggtcctcccacaccctggcctgtggagccaggttccctgggaacccctggcctgaggatgggaaggggctgagcttgtcacaggggtgtggatgccacccggcgggagggagtgggtggtggtctgggggtctgtgcacgtgtggctgggagcccatcggccgaggcagcacttggggccaagtgaggcgaggctgctgcatccaggtccggaggactggcccatgaggccctgtggctgcggagcttggccatcctggggcagggcctacagggtaaggtgcagacccgcagcacacatccgaggtctgggccagcctcgattccagatccagccctcctagtcatccacgtccccagccctgcgcttgcctgggcccttcaccggtgtttgagcaccgcccgggccagtgctgctttggacgaggagacccgggtgggcctctggtggcttttcctgctcaccatccactgggcctgtctcgtcctggccctgcccagcccactggtctgacctgctcccacagggaccaggcacagctctgagaagtcagaggccctagggaggtggggtcgtcgttgccttggtgatatgcaggcagtccctgcagtgggcctgggagctggtcccctggcaccaccctggctctgggggcctcccagcagtgtgggacgctgacaccaatcaccacttcatgcgacttcctcggcccctcctgtctctactgcctgggccactggcagagtcacacctgccatggccagctctgagctctgtctgctcggccatctgtcctgctgccactttgtcctgcaggaacctaggcccagagctgtgagggggaggccagagcgtgcccagggcctccaccggggatgtgtcctgttcgtttgagtggtgacatccaggtggcagctcggggctcctgcctgtagcaggtggcagggctgggctggctcagcacactactgaccatggctgccagggagcaggccagggaggccgaggcagagctggagccacaggcaccagccaggcagcatcctttggggcatgggtgagtggcgagctgtggagtgctgccaggaggctgggattccaggccagggacggggacagccctgctggtggagatgccaggcagaggggacgcacacctgcccatgctcctgccttgcaagagggcgtctgcctgggatcagagcctagagcgtgtgggaggagagttgtggggtcccggcatgggcagggtggcaggtgggtcccgtgtgcttgggactgggcacgaggaggccttgtaactggtgctggatcagctgggtcaggggccgcacaccaatgacctgggggtgagggtgcccctgggtgggagctggtggtgctgaggtggccgaggacttgtccactcccaagggaaggtgctggtgggagggggtgccacctccgcagccaccaccctcgatgctgacctgggttgcactggcatctcattgggcgtggggactccgagagtccaaaattgggtggagacatttggggacacagctgcctgaattcctcatggccaagggggtgggcaagggctgcagggaggaatagtgtccgctgtcctggccagtgcaccaggaacggttttctaaccctggcaggaaggtgtgaagcattcaggatgtgggggccacacagttcccagtgtgcacctaggggtgaccaggaggaggagaggcgccagggcctcccttacccccgccccaggggcactccgtaggcaggatccctgcagatcc

SEQ ID NO: 33585 - DNA, 1902 bp, Artificial sequence
  DNA replication origin
gctggactgtggcacccccaaaggaccccacatgtcactgttcccccgcagggcttcccacggcacgacatggagacctgtggttgcgaggctccctggggctcggcttggaccgcgatggggctgggccctggcctcctaacggggctgctgtctggggcggtagctgggggggcgctctcccccctgcccgcgactcggagcacccccacccctcccctgccgggccaggccgggcggcgttgttggcgggggccccggtggaggcccggcctgggcggcgcccgccatgaatgggctgtcgctgagtgagctctgctgcctcttctgctgcccgccctgccccggccgcatcgctgccaagctcgccttcctgccgccggaggccacctactccctggtgcctgagcccgagccggggcctggtggggccggggccgcccccttggggaccctgagagcctcctcgggcgcacccgggcgctggaagctgcacctgacggagcgtgccgacttccagtacagccagcgcgagctggacaccatcgaggtcttccccaccaagagcgcccgcggcaaccgcgtctcctgcatgtatgttcgctgcgtgcctggtgccaggtgagcagctgtggccgcgcctgggctgggtcaccctgttcttggggctcccgtttctgcctgcggtgcttggtgtggttggtggtgcccccgagggcccgagcctgccgtgaagggccatccagccagcaagggtggtatcccccgtcaggccggcctcgtccctctggcaattttctctcgcagacaaggacaccaggctcagggaggccatccccagctggcatgggtgggcaggctgggcgactccaacaacccagcgcctggtggttgcctgctgggcaagagctggggcacaggggctgccctggcctgcgggtacatccaccttctcgccaggtggggttctgaccagatctgagtccagagggcgagcctttaccttctggctgggctaggtgggggcctgggggaactggaggaagcagtccatggcagggccagcctggccacctgctcctggcaccacctggggcagctcccgtgctgggaagcagacaggccttgcagcacagccttggggcttgggcagggtggtgggccaggaggggctgcatgagtgtgagcagagattggccgcatttgcttgttgggggcaggggtggggtccagttgtgccccaacagtgagggcaccattctgtgaggtgaggggagatagccctgccagcagcagcatgggctcccctgggaaggtcctgaaaggtgggcctgtgcgctccatccccgggggtccaggttcttccaggaggaagggcagtgaagcctgcagtatctgagcacacactgcgagtctgccctgagagaggatgcgaccgatggtcccagtgtcccgcttcacagatgggaatcctgaggctccctggctggcctctgcagcccaggctgcctgtccccctgccagctgtcctgtcctctccccatggggaaccctcggagatggagctgtgctgtcgtagcctcccctctccattcactggcttctggcccccttgggaggggagtaaatgaggcactgggcatggctggccaccggggtgggctgtcactacgcatcctcctgccctgcagctgggcgctgggagcgaggatgtgaacggcccttctcggcctgtcccaggtacacggtcctcttctcgcacggcaatgccgtggacctgggccagatgagcagcttctacattggcctgggctcccgcctccactgcaacatcttctcctacgactactccggctacggtgccagctcgggcaggccttccgagaggaacctctatgccga

SEQ ID NO: 33586 - DNA, 2218 bp, Artificial sequence
  DNA replication origin
gaatgcggacctggcaggctgtggggagggctttgatctctatccagggaataatgggaggcccccaggacaccccaagagggaagcggctccattgcatttgtgtcgtgaaagattgtttggctgctgggggagaatgtcctggagcaggtgatcagcaaggagggaggctgttgctgtggctctggtgaaaggtgatggaggcagggaccgggcggtggctgatgggagacaggcagagccaccgggctggtgatggaccggctcagatccagtgggtggaaggaggtgtcaaggataacatctttgtttctggcctggatagtggggccctggccacctcggtgtgccccttcgtctccggggtctccaggggcctgctgctgtccactgggctctcaggacccagctgcatgatgccacctaaactgcagggccctccaagtccccagcaccagcggggcagcaccggtagggcctggacctctttgagaatatgttgaaaagctgacatcaacctcgacgctgtggatgttgggcctgatcattctttggggtgggtctgtcctgggcactgcagggtgctaagcagcctccacccagtccccagtggtgacacccaaaactgtgtccagacattgacaggtgtctccaggagggagactcgcctccatctgagaagcagaaccagcctgacagtccacctcccggctgaaaagtgcttgcatgtgcgatttgccttccgcctgggagtctgggggcactgggatgccatccttgccccaccctggctttcagagctctctcctctcctcctcgtgtgcccatgagtccggctcacaggaacgtgggtctcacatcaggtcctgagggagcaggtgtgtttctgggcctgaggctgctccttggtagtgagggtgtccccacgagccgtgtctgtggcgcctgcagctgcctgcatgtccatctgtgtccacatctgcctttgagcctcatcttcctggccccacggttttctcatgctgtgacccaaaagccaagcattccagggtgttctgctgaaattgagttgtgagcgtgtctctctcctcgctccagtctgaaggagaagcgtggtcggtagatagacgtctcagaccttcgtgttttcttcacgtctgtctgttggcaggtccttacactattgtggttgctttagcaacttagctgttgtcgacttaatgtgtttcatgacgttctgcagcaaggaagaaggtccgagtttccactctcaatcaggcaccttcgttcccctcccccctcacttgacttcctgtggggtgtgtggtgtctgcacttatagatgagaatgctgaggcctcaggagggcaagggactcgcccacggtcacggaaccctaagtcaggggtggagaaggaccccctgacgccagcccacctcccctgcccctcagcaggcctggctccagcacagagaagagccattgttgctgctctgggggccctaggagcctgggatgtatcctgcctttgtttctagagcctttgtttgttgtatttcctctgtctccagacatcgcaggccggtgggacccggcgcctgtgcacgctcacgtagcggggcctgttcgggtccctcgtgggtcccttcagttcgagctctgtccttgcctcagcggcccgtcacccatagggtggcagagatgggccgggggagggagtgggcagcagtgcggaccgagtcctggcgcatggggtttccctggtgctggagccgggcgtttcgggggtgtgggcggggctggggtcatatcccctgcatgccccgcatgccatggctgtactcacatggcaagaggtggtgatcgccagctcagggaaggtgggggttccttcatcctgtggagagggggctgaattggggtcccctgagctgtagggtgcagtgcctgacaggccgtggggagggccgaggggatggggactgacaggccccgggcccatgccgccccctggcacgggtggatgccccgcctcccgggggtgcccagctggactgtggcacccccaaaggaccccacatgtcactgttcccccgcagggcttcccacggcacgacatggagacctgtggttgcgaggctccctggggctcggcttggaccgcgatggggctgggccctggcctcctaacggggctgctgtctggggcggtagctg

SEQ ID NO: 33587 - DNA, 1831 bp, Artificial sequence
  DNA replication origin
gtgccgggcaggggcgggggcgggcgcggccgcgcggggtcccgggccgggcctcgagggcctgacagcccggttggacgtccccgagacccctgcagtcccagggcttccgcgggtcctgcccgaggagcccagagcaggggcgcggaccgcggatgagcgtctgtgattgggaaagccctgtccccatccattcagccctccggcgtgggttgcgctcccaccctcctgcggacgcggcccttgccttcggggagcacccgtccgagccgcggattccgctcttttgccccgaaactgcccccagtccgacaaacgcttcggcctctcgccccccaaggcagctcccaggggccctcccgagccctgcttcccaaccagctcccagtcgctgtttcccttgtcaggcttcttcctgccaccctgactcctgggcgggcttcccggcctccgctcgcgtccgttctccgggatgcagcccttctcctatgttgtccatcgcttgctcgggacttcttcgcggccccgccatttctcccaggatgaagtgcaaactctcgggggcgcgacctcacccgtcccaggctctctcttaggacccttctgctcacttcttcctcccagggtctgctctagccaggagcctgctctgtcacctcggattttgctcctgcttgtccctctgtcccatccccctgtcacctggcccgtttgtctgccctctgatatggccgcgcctccccccaggcgggtttcccaccctgactggttgagtgaggtgcagtcaccgtctcccatatgtaggtcatcttccagtattttggctgctcggttgcttgctggtcctcagaacacctctagcttgcagagggttgcccagttaagtgcgtgggaacggaattggtgggattcagggtgtcaagggtgtgtgcccagtgagtgaggcgtctgggtttgcactccccagtccacgcccattagtgacactagggaggttccaggtacctgtggctggagaggagaggagactagactttcccttccctgtcaaagctggcggaccttggggattcttttcctcctgtgcttcctccttaattctgtgctgcctaccacctgcccattcctttagtgagtggcaggtcatggtcctgctctcatagagtttctggtttggaggtggggggagatctggccaaacgtgtgaaaaatacaagctgtggaaagagcgtgtaaggggtcctgtcccagctttgaggactctgagagcgttggcagtgaggtgcaaagggtggttgggttgggcaaggctgtctagtgaggttggggaagggagttcctggcagaggagcagaggcaggaaggggcaatttggcttgtcttgagggagccaggagtggcagggtgtgagatgagtgagtctggagaggtcggcctgagccggaatgcggacctggcaggctgtggggagggctttgatctctatccagggaataatgggaggcccccaggacaccccaagagggaagcggctccattgcatttgtgtcgtgaaagattgtttggctgctgggggagaatgtcctggagcaggtgatcagcaaggagggaggctgttgctgtggctctggtgaaaggtgatggaggcagggaccgggcggtggctgatgggagacaggcagagccaccgggctggtgatggaccggctcagatccagtgggtggaaggaggtgtcaaggataacatctttgtttctggcctggatagtggggccctggccacctcggtgtgccccttcgtctccggggtctccaggggcctgctgctgtc

SEQ ID NO: 33588 - DNA, 1076 bp, Artificial sequence
  DNA replication origin
tccccgaaggcaagggccgcgtccgcaggagggtgggagcgcaacccacgccggagggctgaatggatggggacagggctttcccaatcacagacgctcatccgcggtccgcgcccctgctctgggctcctcgggcaggacccgcggaagccctgggactgcaggggtctcggggacgtccaaccgggctgtcaggccctcgaggcccggcccgggaccccgcgcggccgcgcccgcccccgcccctgcccggcactcaccaccccggcccgcgcccccgggccccagggccgcgctccatggctcccggccgcccgcccgtgcgtccgtcggtccctccgcacccctgcccggcctcctgcaccgccaccgccgcagctccccccacggacggaagtgagcctcgttctcaccaccgccccggaagtgacgcgaggagcgcgcggggcgggggtctgcaggcacagagcgaccgcgcgactagcgtcctgggggcggggctgatatgtcgaggggcgtggcctgctgctctgtgggcggggccaaacttaggtttcattcacttggggacccggaataggttgaggccagtaaagttctcgcctggaaaacaaaatttacagggacgccaaaaaaaactcagacatcaacatttagaaatgttttaaaatatttttctttatgagatggagtcgcgctctgtcgcccaggctggagtacaatggcgcgatctcagctcactgcaacttctgcctcctgggatcaagcgattctcctgcctcagcctcctgagtagctgggattaccggcgcccaccaccatgcccagctaatttttgtgttttcagtagagacggggtttccccatgttggccagtgtggcctcgaactcctgaccccagaatcctcctgcctcagcctcccaaagtgttgggattacaggcatcagccaccgcacctggcctcttttttttaacatagagtctactctgtcacccaggctggtgccatcatagctcactgcagcctcgacctcccaggatcaagtgaacctcctacttcagcctcctgagtagc

SEQ ID NO: 33589 - DNA, 1101 bp, Artificial sequence
  DNA replication origin
ctctcatatgtgccttccccccagctttcgtgccttttccagctcaaaatgctcctccagcctgcaggcaaccgcagcccccgctccgtcccagggactctcatcttagctccactgttctgagataagcctgaggctcctgggccaatcctgcccccaggggctcattcctcaaattcaggacacagctgccagggaaggaatcaggctcaaaagactagagacttagagatagcccagggtttctttgcctcattttctttcctctttttttttttggttgttgttgttttgagacagagtcttattctgtcacccatgttggagtgcagtggcgcgatctcggctcactgcaacctccacctctcagattcaagctattcttctgcctcagcctcccgagtagctgagctaacaggcacccgccactgcacccggctaatttttgtatttttagtagagatggggtttcgctatgttggccaggctggtctcgaactcctgacctcaagtgatctgccagcctcggcctcccaaagtgctgggattacaggcgtgaaccaccgcacctggctgctttgcctcattttctgattttccggtgttgttggacctctggcgcccctgctcaggactcagctgcctgggtctccctggggctgtcaagagctgccccagcgttcccctgcctctgctgtccccctcgaggctcccagcctccgctgaggttctcctgaggtccaaaggccaaaacaagtccaggcttcttcctaggtccttgtgaattctctgagcaccagggccagaagaggcctgtccccagcctccttcccccctcccatcttccctgcagccccttcccactgtgagctaggcaggaccagggctggaccgcaccagaaagcccagctccacttgtaaacgacagcccccacagggacacagggagacaccatccaaggggaggaggataagcccgcagggtggcccaccaatccaaggccacctggtgaaaggtaaacgcacgctgtaaacactcaaatgtctcagaaggacacccatcccttcctcctccccagagaccctttgtgatcgagcctc

SEQ ID NO: 33590 - DNA, 1661 bp, Artificial sequence
  DNA replication origin
catgtgagcgcagtgccggagcggggcggggcgaggcggcggcgcgcagtgcctactagcaattgtagtccttgccccaccttggcctggcgaagatcccgcccctggaactacgctcccgtcgtgctccgcggctccaggcggagacgaggcggggtgaggtgggttgggccgggccggttgctaagacttggcgaagcgctgcgctcgcgcccggatccctcaggtaagcgcgcggccccgaggtctcgggttctccaggctcagacttccccagagggggagtaggggctgacatggggggtctcggcggtgaggggcgccggccgtttgtggggagaaaacggggggcccaggccagcctcgcgcgcgtctcgggcgggccggtgggcgacgcggggaggcggcgcgaatgcgcgtgcgcgcgcgcgcgcggcgctggcctgggggaagcctcaggaccgcgctcccccgggcctagcgcctttctgcgcgtgtgcgcccttatggtcggtgcgggagaccccgtatcctccagctgcttccggtggcccttcctcaggtcatgtcccgcagtcccctgcctctgaaccgcgctctcgcgagtttccgtagccttcgcgtccttcctccccagctctgattcgcctttatgtggagattcccctaggccttggtacatccccagaattgaccatcgttcctcatcgttacctagagtatgagtttttcaggtttttgtatcacaggcccccagttatctcccacacactaccccgaggaccgaggttccccgctgtcttgcagagaaggcctccttgtagggtggccagaaacagaggatcgactccgtggaaacaaggacggctgggtgcagttcctcaccctataaccccagcactttgggaggccaaggcgagtggatcacctgaggtccggagttcgagaccagcctgtctaacatggtgaaactccatctctgccaaaaatacaaaaattagctgggcgtggtgtcacgcgcctgtaaaaccagctactggggaggccaaggcaggagaatcgcttggacttgggaggtggaggttgcagtgagccaagatggcaccattgtactccaggctgagcaagctagcaagactcactctccaaaaaaaagaaaaaaagatttttttttaataagccaggcatggtgacacatgtctgtggtcccagctacttgggaggctgaggcaggaggattgcttgagccccggaggttgaggctgcagtgaactgtgatggcactactgcattccagcctgggcaacagagcgagaccctgtctctaaataaataaataaaatacatacgtgtagcgccggccgtggtggctcacgcctgtaatcctagcactttgggaggccaaggcgggtggatcacgagatcaggagatcaagaccatcctggctaacacggtgaaaccctgtctctactaaaaataaaaaaaagccaggcatggtggtggacgcctgtggtcccggctactcccaaaggaggctgaggcaggaaaatggtgtgaactcaggaggcagagcttgcagtgagccaggatcgtgccactgcactccagcctgggcgacagagtgagactccgtctcaaaaaaaaaaaaaaattgtgtgtg

SEQ ID NO: 33591 - DNA, 1248 bp, Artificial sequence
  DNA replication origin
catagcagccgactcgctgggccctcccaaaacgcacaccacgcgcgaccaggaccgagaggcccgcacggccctgctaggccacaaacactccactgtctccagggtaaaagacaaacacagcctcgcttgtccctccaagagtacaacctctgtctgatgaaaaacaaacgacccagagaggaggcagctgccgggacactgcaggctgggcccgccgcgcccttggagggcaggtcaaaatcccggaacaggcacagtgttcaggctgattgactgtcccaggccagggcggcctcaactgccagagcacctcctacctacctgctatggcccggggggacgactcactcccacagcgactgccccccaacagcagggggccacctgaccctccctctaccacacccacccagaaggcaggcgaccgaccactgggacccctcaggagggcaggcagcccaggtcccaggtcccagcagaacacggccgccagcctgggctgggaaccggcatagctccaggcaggtgagtcagaccctgcgtggtgacaaccctggtgaacaggaggctgggaggcctttatctaagcccacagatgaggaggccaaggtccgcgccgggacctgggtatgtccacccagaaaacacacccagtccccaacctgccctagaggcgttcagcccagcgcggtcaattcctgactgcgagaactcaggcaccagtcctgactcctccaagcctcggcttccacccctgtgaaatgggaattcctgctctaccttttttttttttttaaggcagggctgtcaggtacataagagaaaatggggggatggaggggcctgaccatcttcagcagaatccaggagggctcctcggaggcagtgacccacagcccagcctggaaggctggggaagtaggggagagaactcggagagggaacagctaatgctcagttccagggcacaccaatagtctgcgtgggggcttttttttttttgggacagtctcactctgtcccccaggctggagggcagtggcgcgatcctggctcactgcaacctctgcctccctggttcaagcaattctcctgccttagcctcccaagcagctgggacaacagatgtgcaccactatgcctggctaattttttatatttttagtagaggtgggatttcaccatattggtcaggctgctctcgaactcctgaccttgtgatatacctgcctaggccccccaaag

SEQ ID NO: 33592 - DNA, 2037 bp, Artificial sequence
  DNA replication origin
tgtggtagagggagggtcaggtggccccctgctgttggggggcagtcgctgtgggagtgagtcgtccccccgggccatagcaggtaggtaggaggtgctctggcagttgaggccgccctggcctgggacagtcaatcagcctgaacactgtgcctgttccgggattttgacctgccctccaagggcgcggcgggcccagcctgcagtgtcccggcagctgcctcctctctgggtcgtttgtttttcatcagacagaggttgtactcttggagggacaagcgaggctgtgtttgtcttttaccctggagacagtggagtgtttgtggcctagcagggccgtgcgggcctctcggtcctggtcgcgcgtggtgtgcgttttgggagggcccagcgagtcggctgctatgggccccacctggcacggggcctcgggcagcggcagcacctggcgctgcctccgcgcttcctgctcccggctcccactgcatctccggttctgtgctttgttgaacgcgtgagcttcgggcagcgctggggccgcttcagcgtgacctccaaggccactggcctggagttccactggctgctggtcccccatctgtggggcgccccggcggctgaggcgtggaccaggcagtgcatgtcgaggagtagcacccacagctgcgcggctgcgaaatgatccagagacacatccctgtctgcgggaggagccgtccataccagcggggatgtgtagtccaggctggcagttcaggatcacccggctggagtcattttaagatcatctgcggcttagccccagcaccatctgaggcagtactgtctgctagaaataactgtgagcacacaggtagtaaggtttttaggattttattattatttatttatttgaaaaaaggaacagggtctctctatcttgcccacgttggtctcaaactcctgtgcttaagtgatcctctcgccttggtctcctgagtagctgggactacatgtgcacaccaccgtgcccaactaatttatacttttaagcaatgtgggctgggcacggtggctcacacctgtaatcccagcactttgggaggctgaggcaggtggatcacctgaggtcaggagttccaagaccagcctggccaacatggtggaaccccgtctctactgaaaatacaaaaattagccgggcgtggtggcatgtgcctgtattcccagctactaggggggctgaggcaggagaatcgcttgaacctgggaagtggaggttgcagtgagctgagatcatgccactgcactccagcctgggcaacagagtgagactctgtctgaaaaaaaaaaaaatgtgggctgggcatggtggcttacgcctgtaatccaacctcaggcctgcggtgcgagtctgtgggggcagatgcaggtgggggaaggctggccagctgagactgtggtttgggggtgttcaggtggggtggatgccagagatgtgggagccagaggcgctgtcccccagggccctgtgagcagtccctgcaggctggctgtccccacgcctgcctctctgctgtgctgtctgcccgcctagggcaggctcccttctaatgggcggatcccgagagctgggggccccaccagcccttcctctccagtggagtggccctactgcctcatgtccacctgtgccagcagcagggatggtaatggctctactatctcctgtcctcacctgtgccagcagcagggatggtaacggctttactgcctcccgtcctcacctgtgccagtggctgggatgtcttcacctgtgccagcagcagggatgtcctcacctgtgccagcggcagggatggtaacagtgctggtgatgtcaggccgggaggttctcacccgagagccgccttggcacactgcccggcagtcagggatgttagcaggagccccgggagtgatcccagctcttcccgcagccccactccagccagggcctcctctgtgactgagtaagcagggacaccccagtggctgcctgctccacccgacagccag

SEQ ID NO: 33593 - DNA, 1225 bp, Artificial sequence
  DNA replication origin
tctctgctgtgctgtctgcccgcctagggcaggctcccttctaatgggcggatcccgagagctgggggccccaccagcccttcctctccagtggagtggccctactgcctcatgtccacctgtgccagcagcagggatggtaatggctctactatctcctgtcctcacctgtgccagcagcagggatggtaacggctttactgcctcccgtcctcacctgtgccagtggctgggatgtcttcacctgtgccagcagcagggatgtcctcacctgtgccagcggcagggatggtaacagtgctggtgatgtcaggccgggaggttctcacccgagagccgccttggcacactgcccggcagtcagggatgttagcaggagccccgggagtgatcccagctcttcccgcagccccactccagccagggcctcctctgtgactgagtaagcagggacaccccagtggctgcctgctccacccgacagccagggcccaccacagctgcaggaatgtggtcaagggatgggaagtcgggcccaccaggggaggggctgcgctccggggcttacgtttcgtggcttgtcttctgaggtctctcttttcctagcccttggccgactagggggcgagtgtttacagaaaccactggaggtgggtgttccgtgtcagtgccaggctgtgtgctgttctgggagggggccccgtgtcccccacacttggcatgcttgctttctgtcactgcatagcagactccgtgcatctgtgggcttaatacaacacccgccagctcccggttctgtgggtcggggcctgaatgtgacatggctggctcctctctgcggggtctcaccgggctggaacccaggtgtcagccagggctgtgttgtcatctggaggctcaacgggggtggcatctgcttgcaactcacgcaggcgttggcggaattcagcagcttgcggccgggggaccaagggtcctgctcagttcctggccacatggcccttctgtctggaagccaggcgccgcctgtccccgcttctgcttccaggctctggcttctggagatgcagagatcacatcagtggttgcctgggttgctgtgtgtgttgtagggtggtgagacaagttttctcttaggggtgatggaatgttctggaattttatagtggtgatggttgcacaactccaagtgtcctaagagccactgaataggacacttgatagt

SEQ ID NO: 33594 - DNA, 2082 bp, Artificial sequence
  DNA replication origin
accatgacggcgtgcaggagggggttgtccgcgcagctgcagtcgtggccggtggccagcacgcggtccgaggccgggtccactaccacggcccccacggcccgcaagccccgcgctgctgcccgccgggccgcccacaccgcccgctccatgtggctctgcatggcggcgcgctcctgcgtggagaagagccgcccagccagggcgctggtcacctgcttgtcctcgtggaaggacgtgggccagtgggcccgggcctcctcgaactggcccctggtcagaggcggccgggcgggcacgggcaccaggaagggttgccccaggccgcgggggtccacagccggccgtggcaggagctcagccagcgagcgcgggcccgaggccggcccagccaggcaaagcagcatctccagggcgtgggggctgccggcatcgcggctgggccgcacccgcttgaggtgaggctgggcggggagcgggtgcagggccgacacctccttcaggaggcgtgaggtctggcgcttgtccaggacgggcgcggcgtaggccagcaccagctccacgtcccctgactgcttctcggacaggacagggagggcctgccacggcgccggctcaggctccgggctcccggcctccaagcacttgggctgctccacgaggcccggggcgggctccatcctcagcgaggccgactgtgggagacagagacgggagcagaggatcatccggcggctgcgggcggctgggggagagccggggagtccgtcccgggaggccgtggctccacaaggcagggcgtgctgccaccaaagctgaggctagtccgagggctccggcccaggtcaccgcatcagagctacactccctcatgtcctgctaacccctggtgtgcacagagtttaaacagccattggtttttaaaaacgaagatataattcacctaccagaagacagatcattttcttttttttttattttatttttttacttctgagacggagtctcgctgtcgcccaggctggagtacagtggcatgatctcagctcactgcaacctccgcctcccgggttcaagctattctcatgcctcagcctccagagtaactgggattacaggcatgcgccaccacgcccgactaatttttgtgtatttttagtagagatgggatttcaccacgtcgttcaggctggtctcgaactcctaacctcacgtgatccacccgcttcaacctggtggtgggattacaggtgtgagtcactgcgcccagccaagacaggtcattttcaaaagcacaattcatggctaggtaccagcggctcacgcctgtaatcccagcactatgggaggccgaggtggggggatcacttgagcccaggagtttaagaccagcctaggcaacataacaacaccccatttctactaaatatcaaaaaattagctgggcgtggtggcacacaccggtggtttcagctactcgagaagctgaaacaggaggagcacttgaggccggaaattcaaggctgcagtgagctacaatcgtgccactgtaccccagcctggctgacagagcaagatgccatctcaaaaaaaaaatgaaaacccgggcacggtggctcacgcctgtaatcctagcactttgggaggccgaggcaggcggatcacaaggtcaggagatcaagaccatcctggctaacacggtgaaaccccgtctctactaaaaatacaaagaattggccaggcctggtggcacgcacctgtagtcccagctactagggaggctgaggcttgcaggagaacccagaaggttgaacctgggaggcgcaggttacattgagccgagatcgcgccactgcactccagcctggtaacagcgcgagactgtcaaaaaacaacaaaaaagccaggcgtggtggcttaagcctgtaatcccagcactttgggaggctgaggcgggcagatcatgaggccacgagatcgagaccagcctgaccaacatggtgaaaccccatctctactaaaaatacaaaaattagctgggcatggtgccacgcacctgtaatcccagctactcaggaagct

SEQ ID NO: 33595 - DNA, 3239 bp, Artificial sequence
  DNA replication origin
gtggacccccgcggcctggggcaacccttcctggtgcccgtgcccgcccggccgcctctgaccaggggccagttcgaggaggcccgggcccactggcccacgtccttccacgaggacaagcaggtgaccagcgccctggctgggcggctcttctccacgcaggagcgcgccgccatgcagagccacatggagcgggcggtgtgggcggcccggcgggcagcagcgcggggcttgcgggccgtgggggccgtggtagtggacccggcctcggaccgcgtgctggccaccggccacgactgcagctgcgcggacaaccccctcctgcacgccgtcatggtgtgcgtggacctcgtggcgcgcggccagggccgcggcacctacgacttcagacccttccccgcctgctccttcgccccggccgctgccccccaggccgtccgcgcaggcgccgtgcgtaaactggacgcagacgaggacggcctcccctacctgtgcactggctacgacctgtacgtgacccgcgagccctgcgccatgtgcgccatggccctggtgcacgcacgcatcctgcgcgtcttctacggtgcgccctcgcccgacggcgccctgggcacccgcttccgcatccacgcacggcccgacctcaaccaccgcttccaggtgttccgcggggtgctggaggagcagtgccgctggctggaccccgacacgtaggcgccgccctcctgcctccggacccttcccgctcccggccgtggggcgcccctcctggacttccgggcctcgatttcttccgcacaagcctgaccgtggatttcagggacacataccgcctccagcggggagcacgggtgctgccttccgtgcggatcgagctttcctggactcggtcattggggccaccccgtgccagcggtgcccttctgcggccgcccttgctgcgtttgtgtcccctctgtctcgcgggccgggaaactgctctgatgggaaaataaacagcccaaaaccaagtgggtgtctgttaggaggtgtgtgcctttgtggccagggtcccgagtggggtggggtctgtacagggcctggtggctcagccggaggggacctgctgagccacgtgtggtcagagacctgggctgattctggggtagagcaaggcccccagctgctgcctcctttcccgcttctggagtcctgatggttccaggcgtgcctggcccaagtgtgtggacactaggcgtagtccacagggcaccgaccctaaggaagggccctgggatttcgtgtccttcacaagtggcaacaggggaccccaaagggctgatgctagtcggtcacagcacagtgaggactagagccgtttttgcagaacttggagcaggacctgtgggtccacccggcaagtgtccattgcctgaccatgtgggtgcagctttgcctccagacacgcctgctgtgagcccccagcccataggggaggggatccggcaggtgggggctctgcgtggggagctcatgcagtggacagaacaccactgctggccaggagcccgccaggcctgcagtgggggagtccgtgcctgggggtgggactgaggtgggctggagggtcccggatggggccagagccacagcgtggagtgaggaggtgggagccgcagaggcgtgcccagttgagtggtagaggcagcatttgggcctccttcatgctcaggtgctcagctccttcccctgaggggcaggaagtcagggaggagggagtgagaggtgggaggtggcaggcgggcggaggggaagatgtcctgtcccaagagccaggggtgccccaccccacggtgacatgttcctgaacgggttgtgagtggagggctcagttcctgggaactgcctcacctggactgtgggcgggaggcagctcctggccccgtgcccgccccctcgggcctgttcccctgccaggatctgggatggttcacaccccactggtctgtgatgcccagtgggcagcaggcatgcccctgctgggctggcccacctcccgatggcaggtccgcccccaggatcacggaagcagctagatccactcagtcgtgggtggatgtcaggccaggtggggctgctctggtgggtgagctcatggggttccctttcagaacggccagggtgccatgcggatgcgatggggtcttaggccctgcagcgttcaccttgtggcgcccaccccttgtgggctgaagccgggatttgggggacgcaggggcctaggacagcggggaaggggcatcctggctggggcggtgggtgggaggggctgcggccagccctgcccgttttgccagcatgggtggtgtgcactggagccgaggggagggggacctgtggggtaacacattgggtcgagtcaggcctgtggctcccgcttagcccactgctgtttccagagcacagggcacgatgaagggcttttcagccacggtgggtgggtggttagcgctctgcccagggcagctcagggttccctgactgtggttgtcttccttccaggcggctgcaggcttcagcctgcgctggttggtgaaacagagatgtcaggtgagtcctgcctgcctgggagcctccagcagcgtgggcgggagggagatgccagcagttcccacaggagccctcggtcctggccgttggcaaacagtgtcctcctggcccacctggcctctgactcctcgggtcccgtagcccagcacagctggagtcacgcctctgctgggggcaaaggacagcagagccgcctgtgtatccgctcggacgcctcactgacccgaagcacagcccagccgggtgcccctgccatcacagctgctctttccttatagcagcgggcgtgttctcatgtgccccggggtccctcacccactcatttactggcagccttccccagtggggcgtaagcccctgaggacagggcctcttgctgtctgactccccatctggccctcgcaggcgcccagggacacttcctcaggcagtgctggctgagcagaagctcctggggggctcccagtgccacgctgagtgccccaaaggctgtgttcccatcttgatccctggaacctgtgagtgggacctcatttgggaatatggccttaactccggacgtgatggagttaagataaagtactggagcagggcgagctctcatcccagtgcctgctgtgtttataagaagagatggaggccgggcacgg

SEQ ID NO: 33596 - DNA, 1416 bp, Artificial sequence
  DNA replication origin
ccccagtggggcgtaagcccctgaggacagggcctcttgctgtctgactccccatctggccctcgcaggcgcccagggacacttcctcaggcagtgctggctgagcagaagctcctggggggctcccagtgccacgctgagtgccccaaaggctgtgttcccatcttgatccctggaacctgtgagtgggacctcatttgggaatatggccttaactccggacgtgatggagttaagataaagtactggagcagggcgagctctcatcccagtgcctgctgtgtttataagaagagatggaggccgggcacggtggctcacgcctgtaatcccagcactttgggaggccgaggcgggtggatcacgaggtcaggagatcgagaccatcctggctaacacggtgaaaccccgtctctactaaaaatacaaaaaattagctgggcgtggtggcgggtgcctgtagtcccagctactcgagaggctgaggcaggagaatggtgtgaacccgggaggcggagcttgcagtgagcgagatcgggccactgcactccagcctgggtgacagagcgagactgtctcagaaaaaaaaaaaagagatggtccgggcgtggtggctcacgcctgtaatcccagcacttttgggaggccgaggtgggcagatgatgaggtcaggagtttgagaccagcctggacagcatagtgaaaccccatccctactaaaaatattagctgggcatggtggcacagcacctgtagtcccagctacttgggaggctgaggcaggagaatcgcttgaacctgggaggcggagttgtggtgagccgagatcacgccactgcactccagcctgggtgacagagtgagactggatctcaaaaaaaaaaaaaagacatggagatacaggaggagtcgtcgtggagatggaggcagaggccagagctatgcggccatgagccaagggcgctgggatcccccagaagctgcttgagagaggcaggaaggctccttccccggagcctgcagagggagcgcgttcctgagacaccttgatctcagatttctggcctccaggactgttagcagataaatatttgttgtgttctttgttttgttttgagacagggtctgggtctctcccaggctggagtgcagtggtgtgatcatagctcactgcagctttaacttcctgggttcaagcgatcctcctgcctcagcctcccgagaagctgggaccacaggcacgcaccaccacgcttggctaatttttgtagtttttgtagagttggggtctcgctaggttgccaggctgatctggaactcctgggctccagcagccctcctgcctcagcctccaaaagtgctgagatcacaggtgggagcccccacacctgggcagtttctgttgttctaagcctc

SEQ ID NO: 33597 - DNA, 1884 bp, Artificial sequence
  DNA replication origin
gtcagagatggtgagagcggaggctctattttattcctttttttttttttttgagatggagtctcactctgtcgcccaggctggagagcagtgtcgagatctcggctcactgcaacctctgcctcccgggttcaagcgattctcttgcctcagcctcctgagtagctgggattataggcgcccgcaaccacgcctggctaatttttgtacctatagtagagacagcgtttcaccatgttggccaggctggtcttgaactcctgacctcaggtgatccgcctgcctcggcctcccaaagtgctgggattataggcctgagccactgcacccagccaaaattactagaaagcaaaacaaaacagacagtagttggctctggcttgtgggccacagtttgccacccccagatgtgaactgtctttcacactgggcagagaaagggacagctcctcacagctgggctgggactggggtgcagagtgggccctggttccctctgggtgcagacggcccccggcagctctgctcaccggaaggccttgtagacaggccggaaccagcacacgtagccgcaaggcgtgaacaggagcagccacacgaaggccaggccgaagttggtccccgagcctccgccgatccaccaggccaggcaggcaatgaggttgacgccgagggtggcgcagtaaactgcgaagagagagggaggacggatgagcaggcacgggagggtgtggccgtgggaaagcatgggcccagcaatggggcacccgctgtccgcctccccagcccagtgaccccatgtcgaggatgaactgtgcaagccaagacactggggcctggacaccagcctcgttcaccgcagggaccaccaggcccaggacggcttcagtagacggtgggcccccgacgggctgcccctgcctgaatgccactccctccctcggggagccctgcctcccgcttcccgcctcctgcccccaggcgcactcacacatccacagccggtagatcctcttcaccaggacctggtgctccactgggatctcgtcggagaagttctggtagaagcagggcttcacagggatgaacttgggcagtggcgggaagttgttctccttttctgtagggacagagaacccacggacagaaccagactttgtctcttgaaggaggccccacctcatcccttcgacccaaggctgggttgcctctcatggcagaagggactctgcagttgggattgagggcaggacgctgagacaggagagggtcctcgtggcagcctcacgagaggagacgggagggtgggagtcagagagaaacgggaagaggctgcgctgaggctgtgaagggggagaaaggggccctgagtggagggatgggggcgcctctagacgctgggcaaggcgggaaccggcctacagcttgatgttagcgtttctggtctccagaactgtcagataactgatttcactgttttaaggaactaagtttatgactctttttttgagacggagtctcgcgctgtctcccaggctagagggcagtggtgcgatctcggctcactgcagcctctgcctcccaagctcaagtgattcttctgcctcagcctcccaagtagctgggattacaggcgcccaccaccacacccggctaatttttggatttttctttttagtagacacgaggtttcaccatgttggccaggctggttttgaactcctgacctcaaataatccgcccacctctgcctcccaaagtgctgggataacaggcgtgagccaccgcgcccggccgaaattgttttttaaatttacgtgtcacccttcatgcagggccctgctactcttcgtagccctcctccatgtttagtgtgggtgcggc

SEQ ID NO: 33598 - DNA, 1049 bp, Artificial sequence
  DNA replication origin
aaccggctctctgccggtttgctgggtttggggagcggctgtgctcccgacctggcctgggtccccgactctgaactcaggggcgtggaaagacagcctgccagggatccctgttttggaggcagggagggtggccccaggataccctggaccaggaactccccaggtatggtgcacgtggggagggggcgaggctggagccgcacagatcaggggatggcggggacagcgaggactcagctaggcaccaagccctctatcactgcaggggaccggaagctggccccgacgcctcttattagttccggccaagggcatctgccatggtgacggcgggtggccggtgagacggagctccccatcagacccgctctgacctcagcgccagcagctctgggaggacgggagggcggccgacctgctgccacctgtcccccggagtcaggcctcgagacctgaagacaaggccgtaccagccgtgcagtggacggcgggtgaccacacgtttccgggagcaagagggcgtcctgtggacggcagaggccaagggctgctggggagtgcttgtgaggaactccgctctcggatgagatgaacacgggttctgtggccctggcaggaggggggcggtccgtggccaccaccggcttccaccatcccagctggggggatggggccccaggtactcccagccctcgggaccaggggtagcagcaggaatgaaggggaggaggtggtgggcggtgggggcagggcaggctccctctaaggccactggccactgcccgggtagctgggcacagtggggtactcgggcaggctgttgcctgagaagttgttgtactgggcctccctcgacggtgggttccgccaagtgcccgtgttccactccgtctgtgccttctggaagcttccgccagcccctcggtagatcctgtgcacctgcaaggacagaggacagggaggcagaagacagaaaatgagcatggcggccgggcacggggactcacgcctgtcatcccagcacttcgggaggccgaggcagacag

SEQ ID NO: 33599 - DNA, 1021 bp, Artificial sequence
  DNA replication origin
gggagtgcagtggcgcgatctgggttcacggcaacctccgcctcccgggttcaagcaattctcctgcctcagcctcctgagtagctagaactacaggcacccgccaccgcgcccggctaatttttgtatttttagtagaggccgggtttcaccacgttggccaggatggcagggtcagccctgggcacacctggctacagggcacccggggcctgggtgggaggaggcgctgcaggggggcatcctgccagaggccatatgctgaggggtctcccaagggagaagacggcctgggggaaccacacatgctcacagcacaaacgcggcaggtccctggctctaagtgcagaaacatgtatttatttccaggatattttcacataacaaaaccccaacgatgcggcgaggggccacacacggcgggggaggggtgggggggggttgggcctgccaggtgagattttgtctgcatcagtgcaggcgagaggctggggaagggggtgcctcttggcagactggccgggggcaggacctgaagaccctgaagcatggccgtgagacccatgggtgctccatcctggctgccgtccatcgagacaccatggccgcctccgggcacccagcggcattccgtaccagcgaggggactggctcacatcctggggagggctccagggcagcaggcgtcctacagcaacagcatcctgggggtgaacgggtggggaggggtggcagcctggggtgtccaaagttgtggtcagcgagtgcaggaaatgatgaaggaaaagtttctttttggcccaaccgttgtgaatggtgctgtgaaaatgtcttgcctgggagaggtgttccagggggagttggggggtgaggggacaagacaattgtggccgctgccggacccctccataaggcacagatttgacgggtcccctctcataaaaggccactccaggctgggcgcggtggctgacacctattatcccagcactttgggaggccaaggcgggtggatcacttg

SEQ ID NO: 33600 - DNA, 2014 bp, Artificial sequence
  DNA replication origin
gtagacaaaggagagaaacttctctcagagtcacccatcctctgactggatcccgtgcccctgtgaagaggcagatcccagtgccccacacttggctctggggccacccactgccgccaggctctgtccctgcggttggtgggggtgagggcagaccctgctctgtgctgcttcctcacccaccaaaacttcctgacgtcgccctgttccgttggctgcgctgcatatgggaatgcagtgctgggcaggcccagcctcccagctgggaaggggtgtcgccactggctgcaaagacaggtcttcttttcccccaagtctgtgtttatgccctactagagactgttgggtgtaattcccagaaagttctggaatgatctaaaatgaggaaatagaaaaaagttgtagaatcgggccaggcgcagtggctcatgcctgtaaacccagcactttgggaggctgaggcaggtggatcacctgaggtcatgagttggagaccaacctggccaacatggcaacatgggcagacatcaccaattaatcatcgaatgatgtttctcctgacctccttcctcctgtgtacagggtaggcatcaccaatcaagcaatgatgttggttgactggggaacgctgctgtttgtcctgccttccttcctcttgtgcacagggcagacatcaccaatcaaccaatgatgcccacactgcttccctcccatgcacaaagcagacatcaccaatcaatcgagcagcaccaggaggaaaccaatttggcagttcaatccgtcttcaactctatccttttatagataaggttgaggcccagggacctggtcaagggcaactacagggcagatccctcctcctcttcctgggaattagctttgtctcttgttcctggagcaaattcaggaaaattgcaaggtcatgtacattttcagcccagggcatgagtcacttgatccctgctgtccagagctggacccggagatgatggccaggactgtccccttgcagggaggccactgaggctggcagggccaagactgggcagtgagccactccaggcgggaaagccctttgtcactggagctgctctgaacgctgccgccaagtcgcaggcagctgttgtcatctgctcagcgtccttccccttccccggcaactactcctcctgctgtggggaacctggcccacccgactcctgtgttctcagggcgctgcccctcgtggaacctgcccttctggtcaccaggacattgcctaaaccaggcctggccagtcatctgggaggggccaatgccagacaataagagactttcctgggattttatagcgatcctgggagagaagagctctgttttatttgggggttgctaaactaagccacagctgccaccacggacggaagaagcttggagtgaaagaatgaagccaaggcacagagacggagagacaaggagagggagagagagagggaaaggtagagacagagagagatgtggggagggagagagagacagagagatagagaggtagagatagagacagagggatatagagagggagagagagacggagacagaggatgaaagagacgagacacagttggagatagagggagagatgcagagacagagagagatagagagggagaaatagagacagacagagctaggaagggagagagagacagagagaggaagagaaagggagagacacagagacagagacagagagcttgagagacagagagagaggcagaggaagaaagaggcagaaagacaaatagagagacagagacagggagagacagagacatagacagaaagatggcgagcactccagcctgggcaatagagcaaggttccatctcaaaaaaaaagagagacatagagacagagacaggaaaagacagagagatagagacagagagagagaaaaaagagagagagagagacatgaggacaaagagaaaggtccacaggcactgagcttgagtcacccctggttgcagcc

SEQ ID NO: 33601 - DNA, 1784 bp, Artificial sequence
  DNA replication origin
cgccgccagcgtctgccagcggggggcggcagccatacgcgccccactgcgcagccgcggccacggcgccgggggcgcgcgccgccgacgtcacagcgcggggcggggccaacacccggctgggcgtttctcgcgccgctttgcgacaacggatggcgccgcgcgacggccacggcgttttgcggccgctacgaggccgccgggccgctgcccgcgggggacaccgaaagcgcgtggccgcgagggcgcgcgcgggcaggaaagggggtctaacggtttccacacccttctaggggcgggccttccgccgcccgcccctccccgcccgctgttgccatggcgacgcgtggctggtcgtcctggcaccgccctgccgccgtgtgttacgtcacagtctcgccacctgacgtcacggacgggcggcgccgcgggatgttccgtgcgtggggcggtggcgggcgcggcgcggggaggcggcgggctgcgcgcgctaggccgcgaggtttccgggacaggcgctggaaggggcgactggccagaaaatgagctggttcagggcaagagggtttttccatctggctttcctgggcgaggaggggaaaacagttctagaataactgctccgtgttcagggggagaacagcggtgacgtgggtgccccgttgtcttcatccaccgtgacatcagcaaggagcagagaggaagtggccccggacccgcggccggcagctagacaaatgcactgctgggactgccatgcccagcacgggccgctcccctggggctctgcgcgtagagccgactccttgcttgtacctgcctgccttccggcctgcaccgggcaagaaacgtggggaggggatccacaggccaaggcgccgcacagtgatgccctgctccatcccatgacagggcctggaaggggactggcagctgcagaaatggtttccggccttcccacatcccccacgcacttcccggtgggggcatttttaaagtcgaaggagacacattcattcaaatatgtattaagtgcctgccagtggctctgagaatagaacagtgagctagactcttggcatcgtttcctagggagtcctcggtcctagggggaggagagagccctgtgtaatgatttcagatgatgttataaggtagggtgtggggcgggcgcggttgctcacgcctgtaatcccagcactttgtgaggctgacggaggaggaggcttcgttgagcccaggagttcaagaccagcctgagtagcagagaccctgtctctacaaaaaataaaagtagcgggacgtggtgacgcatgcctgtggccccagctacttgggatcctgaggcaggaggattgcttcaaccaggaggtcgaggctgcagtgggctgtgattgcaccactgcactctagcctgcctgacagagcaagactgtcttaataaggccaaggccgggggcggtggctcacgcctgtaatcccagcactttgagaggccgagatgggtggatcccctgaggtcaggaattggagacagcctgaccaacatggcgaaacctcgtctctactaaaaatacaaaaattaggcgggcgtgatggtgagcacctgtaatcccaactagtctggaggctgaggcaggagaatcgcttgaacctgggaggcggaggttgtagtcagccaggatcgtgccactgcactccagcccgggtgacagagcaagactccgtctcaaaaaaaaaaaaaaaactgtaaaaaagctgcgattccaggtgtaaaccaccgt

SEQ ID NO: 33602 - DNA, 1859 bp, Artificial sequence
  DNA replication origin
cagaggaactagacaggttcaaatcagacaggaagcccctagacacacaaggaagtccgaaggcacagcaggcacagtaaatccagacactacagaccacttggggtttcgcctcccaccggggtgaagggaacagagccagctcctccaacatctcaccccatttgcccgctgcacggtcctgcaggacacatggttggcctctcacccccagacctggccctcccattgggaccccgtccagacccggctcccctgcatgcaggtctcccgttccctctcgtctgtgcaggagcggctctcagagctcactgtggggggctgagcaaaacactctcggccctagagacgtcaaggcaggcgtgcgcgtacctgcacacactcccgggggctgcctgcctgggaaactcatcagtcagcccagcccagagcgtttcgttttggtggagacacaggggaaaacaaaacaaagtaccagtgacaaccgcgaacttccccctttcaaacctgggggccctggcacacagtctttcctctgcacagaggcaccccaggctaggctgggctgtgcagggcagagtagcccggggtgcttccatccccagctgccaacccccgcccagccccctccctaatccgagcgccttcccgtggcgggacggctgggtttttcccccagacaggagcctttgtaccttcctgctcagctcccacacccacgagctaccagggcctccgggagccaggaaacaccaagaaggctcctgcatgtcctggggtggggaggcagagccccacatggccttgtggaccgccccggcgcactgggccacacggtggagcgtaacggggagaagatgctggactccacctacacagacaaccctccggcccgcttcctgcaaacaatgccatccggaggccacaggaataagaaccagctgtcccaaagccattctggctcaagacgcaacagtccccgaatgtcctctcagcccccacgcccctcaacgggaaagtcttcccctaagaaagttgggagagaggagccaggcggggatcggggatcggtgaggccaccgcaggccctgctcagacatctcaccctccctccctgatccgtgcgtttccggaaaacaaagccggtggccacagcggaagggggagggggcagcgagcccagccgggagttcccaggcagtgccgcaacaggtccctgcggatcagaccaccttcctcccccccaccaccccctgctctccccctcaagagctttaggaccacaaagtgaggacggggacacagctgcgtggggaggggccaggccaagacaggaggaggcgatggggccaggtgggcaggggcctcgggaccagaacgcggggaggcgtgagggacgcgggtgagtgggcggtgggcttgagcactgggtgggggaagaaggcgggaggtggggtggggactaaaggctcagcggagggcaggagagttggagcacgacagtcaccggggtgcagagtgggggggtcactggagcggcgggggcagggtctggagtgtgagggtcactggggcggcagactcctgagtgtggaggtcagcgtggggctgtgtccggaggtcctgagcgcgggttagggcggtgggggacgctggggtcccgagtgcagggtcaacggggtgttgcggcggtggggccctgagtgtgggggtcagcttgcggggcggttagacgggttggggggcgctggggtccggagcacggggtcggcagggcgcaggagggcagtggacaccgagtgtgggggcgggggcgccgggggtcactgggggcgcccagggccagggtgcagggggcg

SEQ ID NO: 33603 - DNA, 1358 bp, Artificial sequence
  DNA replication origin
ccaggacatgcaggagccttcttggtgtttcctggctcccggaggccctggtagctcgtgggtgtgggagctgagcaggaaggtacaaaggctcctgtctgggggaaaaacccagccgtcccgccacgggaaggcgctcggattagggagggggctgggcgggggttggcagctggggatggaagcaccccgggctactctgccctgcacagcccagcctagcctggggtgcctctgtgcagaggaaagactgtgtgccagggcccccaggtttgaaagggggaagttcgcggttgtcactggtactttgttttgttttcccctgtgtctccaccaaaacgaaacgctctgggctgggctgactgatgagtttcccaggcaggcagcccccgggagtgtgtgcaggtacgcgcacgcctgccttgacgtctctagggccgagagtgttttgctcagccccccacagtgagctctgagagccgctcctgcacagacgagagggaacgggagacctgcatgcaggggagccgggtctggacggggtcccaatgggagggccaggtctgggggtgagaggccaaccatgtgtcctgcaggaccgtgcagcgggcaaatggggtgagatgttggaggagctggctctgttcccttcaccccggtgggaggcgaaaccccaagtggtctgtagtgtctggatttactgtgcctgctgtgccttcggacttccttgtgtgtctaggggcttcctgtctgatttgaacctgtctagttcctctgaagaggatgagggagcagcgcctcattgcctgggctctgggcaggtctgggagccaggccgtttgcaggatggcccgcgatggtgcagcactttgtgcagacagattttgtggaattgccgatttgggtttcttcttttcttctcctcctttttaataatacagtaattactctgggctacaaaggaagtaggcgagggtttttttaattgaaagttcctgttgctcatcccaagcttaggggaagccagtatgccagccattaatttggggattggggtagtcctgttggtgtgccaggcacggttgggagggggggcactgtgtcttttggaactggtgggggttaccgcgcgcccgagtggcagactctagcgccccagcagatgcgtccgcagagccactgggacggacggaagctgagcttagggacagccggagttgcttgccctggggcatctggagagggggatcctgttgagcgtttgatgttgcctcctttctgcaccccccaccgagctgccccaggcccccaggggctcatggtccgtcaaggccttgaccgaggcctggcggagggcg

SEQ ID NO: 33604 - DNA, 1693 bp, Artificial sequence
  DNA replication origin
cctttttaataatacagtaattactctgggctacaaaggaagtaggcgagggtttttttaattgaaagttcctgttgctcatcccaagcttaggggaagccagtatgccagccattaatttggggattggggtagtcctgttggtgtgccaggcacggttgggagggggggcactgtgtcttttggaactggtgggggttaccgcgcgcccgagtggcagactctagcgccccagcagatgcgtccgcagagccactgggacggacggaagctgagcttagggacagccggagttgcttgccctggggcatctggagagggggatcctgttgagcgtttgatgttgcctcctttctgcaccccccaccgagctgccccaggcccccaggggctcatggtccgtcaaggccttgaccgaggcctggcggagggcgggtggtggatggaggcagcgctgtgggtgctgttggggccgagtgccgggcacagcctggcaggggctgcgggcctcgggtggcagtgggcaggccagcatgtggggctggctgactttctctgaacccagaggggacacagggcccatgtgaaggaggcctggcccgagtcctggttagggttgcggtggtggcgggcagctgtgggcttcgtcctcaggtcagcctcaagtcctgtgtccagctagggctcggtggccgtgcgcgtgttgggtcgagctctggtgtcaggcgtgccgggtccgcctcccccatcccgcggatctgcagatctgcaaatgctccgccggcagccacacgagagaacctgttggttggcggcctctgtgcaaggccgtctgagtgaggcctgcagtctggaggctccctaggtcgggaggctccgcgtctgcttcttcctcattctggagttctcgtggggcccgtgctgtggggcttcctgggaagtgggtggagcgcccattttacagatgaggaagtcgaggcctacctggcctgcttgggtagaggagaaggtggtgtttcccgagggctgactcccacacctgtgcttctctggtcacccgccgtgccagtgggagcagtgacagcgaggggtggtggccctgcggccaggggacgggcctcaccgccttccccatcctctctgctggctctgtccagagggctgtgccgccctgtgactggcacgtgggtgcagccgtctgctgggtgggtctgtccgggagcttgactggcctggctgggtgggggggggtacccctttgtgctacctcagcgagggctcaaagtgagggtctgggaccaccagaacggtgtattcaatgcactgcgggcagccctgcagcgggcagggattgagtgaggggtggggcctgcctggctcctggcaagcacccgtctggcgggcggggcccagtgagcctcctccctttgccgggtcctcctgtagtggggcaggaacctctagcatcccacccttgctgccctttttctgccccgctcaccacccacatcaacttgtcaccagcaagggcatgggacaaagcaggacatgccccgggtggccagcgtgagctagctgtgcccaggagcattgcccatgctgtcccccaggcactgtcctgaagccctgctgggttctgagtcctccaggctccgcggccccttctcgccctgcccagagtctctggccacca

SEQ ID NO: 33605 - DNA, 1215 bp, Artificial sequence
  DNA replication origin
gagctagctgtgcccaggagcattgcccatgctgtcccccaggcactgtcctgaagccctgctgggttctgagtcctccaggctccgcggccccttctcgccctgcccagagtctctggccaccaccgctgcttggggccctgcaccagcctgtgcgcccgcaaggttgccagggcccctctgcaggtgcagcgtgagctgtgtcctgggcccacaggggagccgcttctcagacccccgggctggccccaggctcccccggcagcactcaggcggccctggcccccggtgcggctgactgttcggggcacgcgtctgaggtgtggggatcatctcccccttgctcagagcccccaacgtgtcccctgcacagggaatcggggcagccccctgccagccctgcccagggatccctcctgtcaccctcaggcgtgctcctgggtggcccagcggcctccctgcaccgtgaggcccgagacagtttcgcgtgacatcatgttgaaaacagccagctctggccgggcgcgggggctcccacctgtcatcccagcactttgggaggccgaggtgggcggatcacctgaggtcaggagttcaagactagtctggccaacatggcaaaaccccatctccactaaaaatacaaaaattagccgggcgtggtggcgtgcgcccataatcccagctactcgagaggctgaggcaggagaatcacttgaacccgggaggtggaggttttagtgagccaggatcgcgccactgcactccagcctgggcaacagagcgagactccgtctcaaaaaaaaaaaaaaaaaaagctggttctcccttgatgcgcatctgctgaacttctggggcacgctggggtagagcagtgggtccctccctggagaggccatggggtgaggaccgaagctgtgggtgccaagtggggcaggcagcccagtggagtggggcaagagactctggtctggccggcctgacccgtggggtatgactcttgttacggcagattccatctaggagcggaggccacgcgtatgttcccgggagaggtgggaagtgcatcccgtggcctatcccggggaggtcactcccattccatacctgcagggggagctagctgcctcacgtctgtgtctcaggccgcgcagaggagggggcgcaggtgagggcagcgggaagaaagactgcaagaggctcgggggtcacggg

SEQ ID NO: 33606 - DNA, 1226 bp, Artificial sequence
  DNA replication origin
cccaggacgtcaccacacccattgcccagggccgcgggcgaggtccaaggggcagcggaggtccccgacaactcatggggcagccacggtccacccagggctcaggcagcgagccccacacagcgcccctctccacggcgtacaggcctgaccagcgtgatggcacagcacgcacacacctgtgcagacgccagcgcaaacgcacaccacccctgcggtcgcaagccctgtcccagcccacctgcaggctccagggctctggctggcctgcacgtggccagggcccagctggatccccctcggcgcacccaccctcagaggaactcaaaggcacacccagcaagtcagaggcagacacgggccagtccgtgtcctcacgctggtcccgtgcgctgccctcaggctcccgtcctgggaactgtccccaggcagagcctgggcatcagcgccagctgccctgccccaggaccactggagcagaagcccgaggggcacaactgccgcggacaggatgagccctcgcacgcctgccatctttcctggggacagaggtcagatgggaaggggcagaggtcaccgcagattacatgagcatcacctgggaaacaaggtccctaaggagggcgggtcccacctgcaacagggcctgaagcaccacggccaaggcgagaggactggccatcaggcctcacaggcagggactctgtccacgaatccagaccaggacttggggtgcctcactctggagggtggaagtttccagataattgagggattacctttaagcacaacttttttcaagcctccaaaggcaattacgcatcaacgaaacaccgctggtgacaataaaaaaacctctaagattttctctgccttttaaatagcgatagggccgggcacggtggctcacgcctgtaatcccagctatgagggaggctgaagcaggtggatcacctgaggtcaggagttcaagaccagcttggccaacatggacaacagagcgagactctgtctctaaataaataaatgaataggccgggcacagtggctcatgcctgtaatcccagcactttgagaggccgaggcgggcagatcacaaggtcaggagatggagaccatcctggctaacacagtgaaaccccgtctgtactaaaaatacaaaaattagccaggcgtgatggcatgtacctgtagtcccagctgctggagaggctgaggcaggagaa

SEQ ID NO: 33607 - DNA, 1868 bp, Artificial sequence
  DNA replication origin
cgggtgcctgtagtcccagctactcgggaggctgaggcaggagaatggtgtgaacccgggaggcagagcttgcagtgagcagagctcacgccaccacactccagcctgggggacagagcgagactccgtctcataaataaatatataaataaatatataaataaataaaataaataaaaataaacgttgatttttgtggcctcgaaaggccagggccacctcgatgatcctgtggggctggggcctaccggtcactctgtggacactggatgcctccggcctctgaactcgctgtggcgaaggtcacgggcagcacatccatctgtctgtcccactggccgtgctcgtcacagggtgcaggatctggccctgtgcctgacaaggcagtggggacaccgggcacatgcaggacccctggctttctagacggcatggggatcaggacagcagggtccctgatgccctgcaggccagagaagcatcgggccgaaggacaggagaaaccaagtcaccggaagaggggagtggtcgtcgctgtgcagagatccagtccccaaaacccggcaggggacccaaacagtgcaggtatggatggccgtctgcggctcctcaaatggtccaaccgggagtggccctgtgaccagcggttccaccgctagaagtccacctgacagaagaatcacgcagccacacgggaaccggacacgggtgctcgcagcagccacacgcggatgccatgcaaacatctatcacagaaataaacacgtggccacccacacgccggaacacgactcagccacgaacaggagcgagactcggacgcgggccatggcgcggatgcaccgagggtgtcacactcagtgagagacgccaaacacaccaggcctcatcccgtgtgattccacccctaggaggtccctggagccctcagagtcacagagccagaaagtaggatgggggtgccaggggctggagagggcacgggagtgaacgtttcacgaagacagcgtctcaatttgggaaggtgggaaggttctggaaaggatggtgtggaaggctggctgctgatggggccagggctccctttgcaggtgatgagaacactctggaattacaggtggtggctgcactcacagaggagccttgaccacggcaggtttgaactgacaggtccactctgacgtggattttttcaataaaggttgccctgagggcgccagcctctcctggctccttcccgctctgccacccgagacagcgagacccaccctcccttcctcagccctcaacgtgaacacgacgaggacagaggcttccatgagcattacttccactgcgtgaagagcaaacagggtttctcttccttctgcttttctccacatgttctggtctccagcttccctcactgtgagaacgcagcacctaacacaacacacgaggtatgtgtgcgcggaccacgtgtcctcccgaggcctctggtcaccagcaggctgtcggcagcggcatctggaggactcgaaagctatacgagggtattttgctacatgaggggctgctgccctaaaccccaccctgctcaagggtcagctgtacaaaaaccacttgcgtgcacacgttgccgaattttaccaaacgtggattatgttcccagcaaaaaaaagtggctcatgctctaaggaccacaccgaaataaggctggtaagagaacagtgagctgggtcagtgtgacgggatcttttttttttttgcgttttttttttttttttttgagacggagtctcactctgtcgcccacatggagtgcaatggcgcggtctcagctcactgtaagcttcgcctcccgggttcatgccattctcctccctcag

SEQ ID NO: 33608 - DNA, 1284 bp, Artificial sequence
  DNA replication origin
cagtgggacagacagatggatgtgctgcccgtgaccttcgccacagcgagttcagaggccggaggcatccagtgtccacagagtgaccggtaggccccagccccacaggatcatcgaggtggccctggcctttcgaggccacaaaaatcaacgtttatttttatttattttatttatttatatatttatttatatatttatttatgagacggagtctcgctctgtcccccaggctggagtgtggtggcgtgagctctgctcactgcaagctctgcctcccgggttcacaccattctcctgcctcagcctcccgagtagctgggactacaggcacccgccaccacacccagctaattgtttgtatttttagtagagacggggtttcactgtgtttgccaggatggtcttgatctccagacctcgtgatccgccctcctcggcctcccaaagtgctgggattacaggcgtgagccaccgcgcctggccatcaatgtttatttttaagtagcaaaagagaactcagcagtgttggagaacttgaacattacagcaacatctgaagaagatgttctttcacaaacctcagattccaggagatgagcaccgtccgctttccagagaaaattgtctgaggcctctgggagacaggagggggtgcacttagaaacagccaaggcctccttccatgttgggacggacgggccttcctgggctggcccggcctaaatctgctgccgcccaccgaacaccaaggcaccttctcgtgccccagaggccaccagcacccgtccccctgcctccctccagccagtgtcaggtggggacctggccgctggaagggaggtgtcacctgctctggggcatccaggagggaggggctgcgggagttttgctggagaccctccaggtgggggttatggggtatcatggcggagcgtgttgggaagttttcggtgagctgggcgtttattcgccttggtgcccccctagatccctgggtgatccccgtgcccagttttcaggggagaccatgggggtcagagagctggccaggcgggtggtctgtgtctgtcccctgctgttgaaatgaggggaggtgagaggagacgccgtgtgcctggggaggcaacactttctaccgtttgctggtttataaaaatcaaagatggccaggcacggtggctcacgcctgtaatcccagcactttgggaggccgagacgggcagatcacgaggtcaggagattgagaccatcctggctctactaaaataccctgtctctact

SEQ ID NO: 33609 - DNA, 867 bp, Artificial sequence
  DNA replication origin
tcttggcttactgcagcctccacttcccgggttcaagtgattctcctgcctcagcctcccgagtagctgggattacaggcgtccgccaccatgcccggataatttttgtatttttagaagagaccggggttacaccatgttgtccaggatggtctcaaactcctgacctcaagtgatcttcccacctcggcctcccaaagtgtacgtatctttttagtaacgatatatttgacgatgattaaaaaaacccgatccttgaaggcccttgatagatgctgaggtgagtacaggcctgactctgagggtcatgcgcctagcaggcgtcgcccggtgcacagggccaggagctgagtcgtgcgggactggatggaggccaggggatatagaagacctgggcagctccccaggaccaagccctctcgcctagggctccccggggagttaggccgaaccctgctgtgcccttcactctgcagccctcgtggggatcatcacagaggcaggagctggcaaccgaggtgactgccttcgagtggagggaaaccggggcgggatgtcgcccggcggctcccacacgatgaggggaaaaggcactccagtctgggtggcagagcgagactccgtctgaaaaaaaaaacaaaggaaatgtagaaacgcagcccacccaggttttccacggccgttcatggttacgcttctggaaggacccgtgtcctctcagatgtagcaggattccgatgggagccaccccgggtcccactcgcccccgggacctgccgtgggagctttctttcctggtggggtgcctgactctgcctgcacgttccccccgctgtctgtggcaccacttgggaccggggacccctg

SEQ ID NO: 33610 - DNA, 1531 bp, Artificial sequence
  DNA replication origin
cccagggggcgagtgccggctccgggtcacacgccaaggatggctcccgggcgccaacgaggggattgcagccatcccacaaggggctgctctctccccgtcagctcccatccccttccccagccctagcctcaggctgctacctgccctgttcttttcggggtcctccatctggtctgggcccagggccagttccctggggagggccccgggagcccccttctctgactgtctccactgagtgatgtcacagtccctgggctgacatcaccacacagccctcagcccagagcccagggcaaagctgaagggaggccagggacctcactgggctgggcaggtgcaggccaccgccgtcccagtgccctcagaggcacctagactcatgtggacccggccgcagaccgttctgggcagctctgtccaggccggccctgccctctgacctggggccgcaggggctggccactgtgggctcggttccctgccaccccaattcatctgcaccccaaggaaagaaaatgaggggttgcagcgccccaggacccaagagcccccgaacaccagggcagcacatacttccagtgccagggccacagcagagcggggccaggcccagcccagtgacgcagggcagacggaagggcgccctccacaatggaggggcgcaggagctgccgcggccaggacaaaccaacctcaggctgacctaggccggtaatgggtttaacgcatcaggtgcaaaagagaaacaccccacaaatcagggagaggagggaagccgcccaccccatgggaggaagctgaggagtgaacgccagggatgggcagggccggtcctcggagcactgcagacaccagaccaagggcgactgtcatcaccacgagaaggccccgtccatggcagaagccaacctcaccgcgccgactgcaccggagacgcccacgaggacagccggcctctgagaacgcagctgagccgtcacaggtcgccatcagcaaaggcaagagtccaggtaaagaacacaggagggccacaggtgatcgcggtacagcggccaggaccggaccctgatgcggggggagggggcaaggctgcacaatggcagctgggaccagaccctgttggggggatgtgggggacggcgaggctgtgcagggaccccgtcccacaggtcagcctcgccctggtgatggcacagaccacaggtgagggccacgggcagagctgaccagggaaaagctggcactcacccagcaccggacacataaggcaaacaccaccggcagccttggcggagggcactgtccctgcaactagtccacataggggcaattttcccaaaattcagattatgcaaacggaggcaaggctgccatggactccagagcctcagacgccatcaacaaaagcaaagtggacacatctgcatcaaatccatcacaaagacggccttccagactccgggggaagtgagaacacccccacccaggcccccatggcgcacaggcccccacagcaaccctgcgc

SEQ ID NO: 33611 - DNA, 1537 bp, Artificial sequence
  DNA replication origin
acgaccccctcagaggggctgtcgtgagatgcttggaggcgggatccagccctgagggtgcagggagtgctcagcggacccccgtgccactgctgtcaccggaggaggctgctgctcggctccgggctccatctgcaaagccgggtgtgcatctgtgtggctcagctctgcagggcacagtggggtttgctcccggccggccctgaggccgggcacagggaggccagtgctcatccagggggccagagagaaagtagcaaccccaacctgcctgggccacaacagccaagaccactgtatcagaacagacgccagcggggcagcctgctcgttggccgggcggagcagggtcggcacacagcccgggctggccttcaccccagctcccgacagcgttgggtccctgagtgcagggcctgcccctttctcatcctcctgcctccaggtcatggggcaggggtgccgagaggccctgcgggagccaggacctgagaggtgatggtcaccacccagacgaggggccgggggtcgcacaaggaggcttccagggggatgccaggagcagtggggccctagacccagcagtgggtagacccagcagggcagcgctcacgtcacaggttctgggggttggggcttgtcatctgtgcaggtgcagctgggatggggatttggtgctttttgttctgcaaaagccagaacgcatgtagctgagccaagatcagacggcatggtgcctcatgcctgtggtcccagctacctgggaggatgaggcgggaaaattgcttgaactcgggaggcggaggttgtaatgagccgagatcctgccactgcactccagcctgggtgatggagctagatcctgtctcaaaaaacaaaagaccacgcatcctagccggcaaggccactctgtactcagacccggcagctgtggctgtggcacaggcgcttaccctgcggcattggccctttcagtggttggtgttgaccctccacagaggggctgggtggggtgtgtccagtcccatctgggtagactgagtgttggggatgggagagtgtttaaggaggtggcggttacagactccagcatcgggacacggggccgtgggtcatacccacatccgtgggggctgtgagacagccgtccagaagcttctgtctccgggccaggaggacaccccagagagccccaggaggctcgttccggaatttagggctcagcctcgatgaacctggccaggcggcggttgatgggttaattcagttaatcacacatcactcagggtttctcagcagaaggaactgaccaagccaatggctcacctggaagagagaaggagggaggaggaggggattctgcagagggaaggctggtggtggcgccccccttcgacggtcgtgccctgatgctgcgtggcttaaacggtgccacccggagattggtgggcgggattgggcctctggggtccccggctgtggagagggcaaggcaggggcggctagaaagaaaagcaacctggacgcaggccccacc

SEQ ID NO: 33612 - DNA, 978 bp, Artificial sequence
  DNA replication origin
aagggggctgccccgagcggcttgggtggccgggcctgtgggagaccttgggtttgctgttaggagggacagtgagcgcaggcacctctctctccacttcatgtttgtcctcactgagggagccgagcagatgcctttgcccctgcaggtcccccatgtcccctcgcccggggcgcgctccacaggctaggccactttcacagctcaccacacaggcagagactggagggtgcgcaggaccccgggtgactgcagacgtgggcacagaggggcctctgagggcgtctggcggcatttgagcagctgccagatctcccctggaaacactggggtgtgtgctcggtgggtgccgtgtgtggggggtatgtgctcggcgggcgccgtgtttgtggggtgggagctaggcgggcgccgtttatgtggggtgggcgctcggcgggcactgtgtgtgtggcacggccactgcttagggccccctggagctgcggggcacacggcagagccagcctcatgtcaccacgtgcttcccccgtgtgcagggaggggttggaggtgtgcgcttgtcttgtccggaagccgggtgttgggacgcgtcctgacgacggcactgcccacatcctaatgggacacctgagggacatcggtggctgagtaaggggcccctcccgagcaggtctggaggcgttggaagcacagcgcagcctcatggggcacctgcctgctctgcctggaattgaggggcgattgggactcccactgcccccaccaaagcctgtgcccctgatgtctgtccagagcacggcttccttctcggtggttcccagaggccgctgggcctcgcttcgtcctttttgggcagcgagtgtgtatgttaggggaacaggagcccggcagggccgtcttgcagggctcagcagtgggggccgtggggttggtgcaccagggcaggagagctgcccggctcctgctaggtgtcta

SEQ ID NO: 33613 - DNA, 1374 bp, Artificial sequence
  DNA replication origin
gccagcctgctcgcgccacactgcctgcctttctcgacgagggctggaggctgcccgagaggcagcatcctgaagacacaggcctcagctctcccctgccagaaagcggcaggacgtgtgggccatctcaggggactgcgtgcagaagccgggtagggagggggaaggggcaggcgccatccgggggaccttccctgtggactgagggcgagaaggccccaggtcccggatgtacctatctcctaagcaggacgccttttcttcctacacgcccctgtgctgacgcagacattcggctgtggtagggtcaggactggcaccagggagggcagggaagctccggaccctacatggggccctggacgtgggtgggggtttctgcctgcctggcttcccccaggttatgccctttacaacagcagggaacaaactctcactccccagttccgagagtcctgcaggaggaccgtgaacccaaacggggttgtgggagccacaatgtgtagccagggatgtggggacccagggtggcactaaaggtggggcgggtgctgggggacccacggtggcactaaaggtggcacaggtgctgggggactcagggtggtactaaaggtggggcgggtgctgggggacccagggtggcactaaaggtgggacgggtgctgggggacccacggtggcactaaaggtggcacaggtgctggaggactcagggtggcactaaaggtgggacgggtgctgggggacccacggtggcactaaaggtggggcgggtgctgggggacccacggtggcactaaaggtggcacgggtgctgggggactcagggtggcactaaaggtgggacgggtgctgggggacccacggtggcactaaaggtggcacaggtgctgggggactcagggtggtactaaaggtggggcgggtgctgggggccgagcattaaaggtggggcgggtgctgggggctcagccgcagcctgtagggtctgtgctaccctgcgcaggcaggtgtccgggcaggtaagacaccccgatgccacgtcaggaaaaagacatcacacccaccctctctgtgagccccagagctccagccctttcccagacaagggagtggggacactcacaggccactgagagggagctgccaaaaccctcgttgaggacaagagactggaggccaccaaccaaacctgaaaagcaaacgtcaccgacttcacgaggaaaacaaatccatcccttctcgccatgaggatgaaaatatcctctattagatggcacagacagagacacagcctcatgatgagctaaaggcactgagctgcatgagttacacagctagcgggtacagcccgagtgtcacacctcagtt

SEQ ID NO: 33614 - DNA, 1184 bp, Artificial sequence
  DNA replication origin
atatgggtctggtttagagaaactaggttagccatgcgtgggtgtttctggatgtttgggcagtaaggagagtcggtagctcaagaaatccgctggccgctaagcaggggtgaggggcaccgactgccatcccttcttcaaccacggccactcggccacatcagtgtctcctgccacctccctcgtgtccagcatcaacacagcactgcatccctgacccagtgcagtggagaaaactcgcatccaaaaataaaccaggagtcagccaaaaacacgcaaattaaaattacaccctggccaggcgcggtggctcacgcctgtaatcccaacactttgggaggccgaggcaggcggatcacctggggtcaggagttcaagaccatcctggccaagatggtgaaaccccgtgtctgctaaaaataacaaaaattagccagatgtggtggcaggtgccttgtagtcccagctactcgggaggctgaggcagagaactgcacgaacctgggaggcagaggttacagtgagtcgagttcgtgccactgcactccagcctgggcgaaagagtgagactctgtcaacaacaacaacaaaaaaagcacacccccagcatggctgtgcccagaagcacagaagtggggtcaccacagctcacgcctataatcccagcactttgggaggccgaggagggaggattgtttgagcccaggagtttgagaccagcctaggcaacatagcaagatcccatctctacaaaaaaaaaaaattagccagacatgggggtccatgcctgtggtcccagctactcgggaggctgaggcaagaggattgcttgagcccgggagacaagttacagtgagctgagatggtaccattgtgctccagcctgggcgacagagccagaccctgtctcaaaacaaacacaaaagctcacagaagcgctggggtgggtgtgtagaagtcagacccccgggagcggcaggtggaggacgactcggtgcagcagccactgtggagacgacctggtggctcctcaaagatgcacagatctcccatccgacccagcacgaccactcccagctatgtacccaggtggagtggaagcccgcagccacgcagaagcccgtgcgcagacgccgccgtggactccagcagccggacggtggctacaacccagatggccgtca

SEQ ID NO: 33615 - DNA, 1411 bp, Artificial sequence
  DNA replication origin
tgcagaactgaagggtggtctggggcagcctggggaggagggaggagggaggagccccacctgcagaactgaagggtggtcagggacagcctggggaggagccccacctgcagaactgaagggtggtcgggggcagcctggggaggagggaggagggaggagccccacctgcagaactgaagggtggtgggggcagcctggggaggagggaggagcccccacctgcagaactgaagggtggtcgggggcagcctggggaggagggaggagccccacctgcagaactgaagggtggtcgggggcagcctggggagaagggaggagggaggagccccacctgcagaactgaagggtggtcgggggcagcctggggagaagggaggagggaggagccccacctgcagaactgaagggtggtcgggggcagcctggggaggagggaggaaggaggagccccacctgcagaactgaagggtggtcgggggcagcctggggaggagggaggaaggaggagccccacctgcagaactgaagggtggtgggggcagcctggggaggagggaggagccccacctgcagaactgaagggtggcagctgtggtgttaactggacgctcgggtggtgcaaccccagggacgcggctgtcacctcgtcgccctcaagccaggtacccgcccaggaggccaagaaccctgcaccgggagccaccgcagccacctgcctgtctgcacagatcctgccgggtcctccctgacccaggccccagccacccctggccccattctagggctccagacagacagaagccccaccctcactgaagaagggggaccacagtttgctgctgtgccccagatgtgcaggggaagaggtttcctgccaaccggcaggacgtaggggccgcgggtgaagaggggccgtgggtgcacagccatcgccgaaaatgttaggacaggaactcccagctgagtaagccacatcagaaacgaaggcaccggcgtcacaagcactgcccccctggatgtggcccctgcgttccggtgccagaaacaccctgtggggatcacaggccttgggttccgcacggcaacagccgctcgaatgttctggtttcccagtgcacacacaagttacgttcacagtataccgtggtctaggaagtgtgcagtagcgttgtgtctaatcaaaggacacactttaattaagcggggcgtggtgtgcaagcctgtggtcccagctactcgggagactgaggcgggaggatcgtttgagcccaggaggcggaggctgcagtgagctatgatcgcaccactgcactccagcctgggggatacagcaagaccccatcttaaataaataataaagaaataaaaatactttactgctaagcaatggtaatgatcatgggaa

SEQ ID NO: 33616 - DNA, 1585 bp, Artificial sequence
  DNA replication origin
gcggccccgccagaggctccagtgaccccgggcggccccaccagaggctccggtgactcggggcggccctgccagcagcctcccgaccccacctaccaccgagcagggcctcacctaggcggagctccccgaagttgccgcagccgatcttcttgccgacgcggaagttggggcccaccatcaggacccccgagctggtccccgagctccggatgccgtggctgctccggcccccgccggccttggacattctccggccctcctccgtctcccctttccctcctttcttgtcaaaatccataagtttgtgataccctggcctctccacggtgactctgctgccgtgcaaatcccaagtctctggaaacctgaggtcttggctcctctgtggctagaacatcactgcggccggtgggcgggcgtgggcccgtggctcccagctactgagacgcaggcgttcgggccggccaggccgcgctgctcttctcagtggcctcggggtcgctctcgggggcaggagacattctgctgacacatcccaccgcctcaaagctcacggctcacagctgcagagaaacagaggcacaggtgagcaccggcaaggcccccgcggggccactgaggacacggggcggaggccacagaggacacagccaggagactgctgggctggaaggagctctgaaggccggggcatgatgagcaccgtccctgcccggaacccagctgggaagcacacatcacatgacatcagaggccagagatctcggcgtggctgcctggggacgaacagggtagggctcagggggctttctgtaaagcgggatgggtgggtgggtgggtgggtggcacaggtgggagagtgtactgccaggagagcatgactgccaatcccgggtagaagccctgaggatcctgaagccaggggagcagtcgcacccccagacacagaggggccacacaacagtccccgtatccaggcccagggccgctctgggaaagagggagggaggcagatgacagcaggcaggcccgaggcagggacacaggagccaccgagctgcccctgcccatggcgactggttgatgctgagagcggggagagtgggccggagggcaggaggccccggagagccgggcactgatgcaggagcccccagggcctgacccaggctcgggttcttctccagcagccactggtggagcggggcaggctggacgccactcgaggctgtgatgatgccaggctgggtcggacccatccccttcggtgcagagcggagctgaggagggaatggcggggcttgagggaccagcggagccaacagccacctaagcaaggctgggcacggggcaggcagcaaacttctaccccaggggaaaagacagaagcctctggtcctgagaaggaacacgcagtccctgctcccgggatggtgggaccccagcccacagcccctcgctgagtctgcaccaccttaaatgctcccgagcccagagctgagggccccagagcctgttgccacccacagagaaacgccgtgtctggacaggggctcatggctgaggggactctgtgcaggtc

SEQ ID NO: 33617 - DNA, 1879 bp, Artificial sequence
  DNA replication origin
agtctcctggctgtgtcctctgtggcctccgccccgtgtcctcagtggccccgcgggggccttgccggtgctcacctgtgcctctgtttctctgcagctgtgagccgtgagctttgaggcggtgggatgtgtcagcagaatgtctcctgcccccgagagcgaccccgaggccactgagaagagcagcgcggcctggccggcccgaacgcctgcgtctcagtagctgggagccacgggcccacgcccgcccaccggccgcagtgatgttctagccacagaggagccaagacctcaggtttccagagacttgggatttgcacggcagcagagtcaccgtggagaggccagggtatcacaaacttatggattttgacaagaaaggagggaaaggggagacggaggagggccggagaatgtccaaggccggcgggggccggagcagccacggcatccggagctcggggaccagctcgggggtcctgatggtgggccccaacttccgcgtcggcaagaagatcggctgcggcaacttcggggagctccgcctaggtgaggccctgctcggtggtaggtggggtcgggaggctgctggcagggccgccccgagtcaccggagcctctggtggggccgcccggggtcactggagcctctggcggggccgccccatgtcactggcaggtgcgttgaatcatcagtccgtcgtggtgcgagtgccacttcccttcgaggaggttctgtggggagagtgggtttctggccctgtcaccttttcgggaaacagttctgttgggaggcaggtggcccagagcaggccaggccacgccgcaaggagcccgatgttaagttgtgaatgactttcatggcccatgtgcacgctgggcgaagccccggctttaacggcaggtgcctgcccggcactcagctcgtgggaggtcttggccagcccggagctggcgtcaggtggctggagtgactgttctgtggtgatgatactgctgtgtgccactcccagcttcaccatgtaaaaggccgcacctggcccacctggctccgtcccttctgctcacaccaacctctcccgggtcggggtctgattgcccgggcaggcgtgaggagcagggccgaggactgagcctctcattggccaggggtgccttccctggggtgggggtgcctgaagatgaccatcaggcctgggggagctctgagcacctttggggccgttcccagtctgtgattagctgggccagggagctgaatcatccccggaaatgtggttaaatttattgctggtgctgccggagctcctgcgggagggcatttggcgtctgttgctggggttgtccggggaacccaggtgcacccccagtcagtgtctgtcgtggtgggaatcagggtccctgggaaagagcgcaggatgggcaggtccgagaggccacggcagtggatcggcctcacgtgggcacccatggcaggcggtgcccatggcacccatggcaggcactcagcccgatgaggttgtcagatgagggaaacaggcccacgcagtggtcatgatgtggctgcatcttcaagagcggccgcccaggggcgcaggagcatgggctgtggcggcctggaccccaggcatgttttgtggccctgcttcccacctcctgcctcactttacccacctgttaaatgaggatgaatggtagttgccactcgtgggcagaagggttcagcaggcagttatgcggcagaagtgtgtgtcctatgagtcaagcagcttctcccaggcgagggcagctgttggggtcactgttggctgtttctgtgttcccattggttgcacccagggccccaggaggccggggtttgagaccccacccgaaccag

SEQ ID NO: 33618 - DNA, 1143 bp, Artificial sequence
  DNA replication origin
catctgatggtgatggggtccttcccggctcttctactctgcactgtggaagaaaccttcgcctgaaccccaccgctgtgtgcggctggcgtgtcagagacctgggtgtgtgctgggtgggtgtggcagcatctgaggcctgtggatctgcagactcctggaggaggtcgggcgctctgggctctgaaagccaaaggggcctcctccggcagtactcgcgatgcatgcagagggcaggagagcccacggggcctggcagagaacagctccagagaggctcaggaggttccgggggacacacaggagggaggacgccacagctccaatggccggagtgcggggtcctccctggattctctacttcagctgagaacccaaaaggtccacaccttggcacagggctccctggccttggagtcgctcatgtttaccctcagccttgccccagcaacgctgaaaccaacctgacagaaacaaggtgagccacggggacaaactcagcgctcaagccgggagacggcaccctccacacctcacggcacacaccacggccacgcccagtgaggctgtcccacaggtgagtgagggaggtgtgaccgtgacaagggaggaagaagcagcacagacgtcactccacacagtgctgtgtctttgatgcaccccccaagggtcatgtgttgggaacctggtccccaatccagcactgctggggctggggctggggcctagagagaggatctgagtcgctgccctcgtggatgagtgaatgccatcagcaggggagtgggttcctgactaaagggcgaatccagccccctccggtctgtgccgtcctgccttccaccatgccttcttgccatgacatggcaagaaggtctttgccagacgccaccctcaatctggggctcaccagcctccagaacggtgagcccatcaatttctgttcattataaatgatctggccaggtgcagtggctcatgcctgtaaccctagcactttgggaggctgaggcaggtagatcacgaggtcaggagtttgagaccagcctagccaaccaacacacagtgaaaccctgtctctactgaaaatacaaaaattagctgggtgtggtgacgggcgcctgtaatcccagctactcggga

SEQ ID NO: 33619 - DNA, 2177 bp, Artificial sequence
  DNA replication origin
cacagcggtggggttcaggcgaaggtttcttccacagtgcagagtagaagagccgggaaggaccccatcaccatcagatgcatcagagcttcaaaggcccgcccatcaagacgctgccaagagcatgaggccagccaggctggggaggacgttggcgagcatccgcctgcccgtcagggagccacagctggatgatacatcgacagacagcagagggacggtgtagcacacaggcgagggcttgtcctcctcagcctgggggagcgcagctcagtgcttggtggtcagcacgtgactgacactttgccggagaaggggacggctgcccgcaggaagagctacacagccgtgttcgccggaactccgctctggagagtcagaactggagacgggagggcgtgcctcaagggcagatgggcaaaccaaaccccatcctccctgtgagccgcggcacagcaccaggcgggcacacgcagcacgacacggcgaggagcccaccgcaggggcagccttttgggcggggaaggggggatgaatccactgtgaatcccacctccgaagggcagcgcaggaaggacacgcaaatgctggactgaacctgcagctgattcagggggcagtgtcctgagctctaaaacttcaaacctggggcagtgtcctgagctctaaaacttcgaaatctgaccaggcacagtggctcacgcctgtaatcccaacactttgggaggctgatgtgggcggatcacctgacgtcaggagttcgagaccagcctggacaacatggagaaagcccatctctagtaaaaatacaaaaattagccaggttgatggtgcctgcctgtaattccagctactcaggaggctgaggcaggagaatcgcttgaacccaggaggcagaggttccagtgagccgtgatcgcgccagtgcactccagcctgggcaacagaacgagactctgctccaaaaagaaaaaaactttgaaatccctctaaaaataaaatggaccggtggatggtagctgtgaggatggaccgtgtggcaggtttagttctggggcctcggcaatgagtgttgggtgtttggggcacggctcctgttgttttacgaggagaatttcctaataacgtgttacactggggagaacgtaggaggggagcccatttgttctgaaaacgcggggaccagccctggtccccggctcaggactggaggggttgccctggtccctggctcaggactggagagaccagccctggtcccgggctcagggctgcagggaggcacctggtcttccctcgtcctcacgatcctgcaccctcaagatgccacgttgttgaggctgtttagggaacttgacaagctgattggaaactgtgctgaaatagagcccaggtagtgatgcggacagggcagtgccagaaggagccccagcgattcctgtgctgcaaggcacgcccaggacggggcactagccgggggaagaggctctcagggcccaggtgggaccccagcctcagactatgaggtcatgactgtgtacagctcagccaccgggctttgggactttgaatccaccttagcagggtttccaaacccattgtctccacggccaccctgccagtccagctgcagcagggcggaacaaagtggaggcctctttcttgctttctttttttttttttttgagacagagtttctctcttgttgcccaggctggagtgcaatggcaccatctcagctcaccacaaccttcacctcccgggttcaggcaattctcctgcctcagcctccctggtagctgggattacaggcatgcatcaccatgccaggctaattttgtatttttagtagagatggggtttctccatgtttgtcaggctggtctcgaactcccgacctcaggtgatccgcctgcgtcagcctcccaaagtgctgggattacaggcataagccaccgtgcccggccacagaggcctcattctgcagcgtatgctactcgggcaaaggcagctgactgcagacccaacacggtgacccagctggatggtgcctgagagacggggctgccccacatggtgccctgtcatgccgcgggacaggtcgcccagcagatggtagctatggccccagtgccatcctgggctggagacacatgggtgccagacacgttcatgcc

SEQ ID NO: 33620 - DNA, 1401 bp, Artificial sequence
  DNA replication origin
atgctactcgggcaaaggcagctgactgcagacccaacacggtgacccagctggatggtgcctgagagacggggctgccccacatggtgccctgtcatgccgcgggacaggtcgcccagcagatggtagctatggccccagtgccatcctgggctggagacacatgggtgccagacacgttcatgcctgtcgtctggcccagctgccgtggggagccctccagggccgtgtgcctgcagggaccggcctgttcacctctaggctcacccctcgggtgctgagtcaccacagtgggtggggccgtgccccctcccaggccggcttccacagctgcccctgcagagcgcctctgtgttaagggctggccgcctccttcctcagggggtgtaacatgtaaaaagctgcaccctggcctgtacaggggctcccgcctgttatcccagccctgtgggaggctgaggcaggcagatcgcttgagctcaggagttcaagatcagcccgggcaacttggagaaaccccgtctctactaaaaatacaaaaattagttgggtgtggtggtgcgcacctgtagtcccagctacttgggaggctgagatgggaggatggcttgagcctgggagacaaaggctgcagtgaactgcgatctcgccactacactccagactgggcaacagagcgacaccgtctcaaaaaaaaaaaaaaaaaaaaggttctgggcctcgtaccttctgcgctttcatgagactcagccctggaagtcctatgtggctggtggccccagggaacaggacctgggctcctctcttctaacccatgtgggccacaggtccctgtccatctgtgctggggctcacctgggggccgagggcctcgggcatgtgggagatttgtctttgagaaaggggtggaggagtgtggagcccttggggctgcctgcaggccgtgagagacctccccagtgccgcttctgtcctgggctagggaggtgggggggcgggggaggaggagtggcagacactgaggcggtgaccacacgggcagggtgcaggtgtcgggatgacttggcaggccatggtgcagtgctctggcaggctgggcccaggccctgctgctgggcagtggtgtcatttggagggtggtccttcagggaccccctcctgcctcctgcctcgggggtgggctggggaggtcggggctaggtgggccctgcgctggcggtgctgatggtctctgtccccgcaggaaagaatctctatacaaatgaatacgtggctatcaaattggtgagtcggcccctccaccccacccccgctgacgtgccccccagggatttcagggcagcgacccggtcccctggtgactcgctcttgtgcccccaggagccgatcaagtcccgggcc

SEQ ID NO: 33621 - DNA, 1029 bp, Artificial sequence
  DNA replication origin
tgaggcggtgaccacacgggcagggtgcaggtgtcgggatgacttggcaggccatggtgcagtgctctggcaggctgggcccaggccctgctgctgggcagtggtgtcatttggagggtggtccttcagggaccccctcctgcctcctgcctcgggggtgggctggggaggtcggggctaggtgggccctgcgctggcggtgctgatggtctctgtccccgcaggaaagaatctctatacaaatgaatacgtggctatcaaattggtgagtcggcccctccaccccacccccgctgacgtgccccccagggatttcagggcagcgacccggtcccctggtgactcgctcttgtgcccccaggagccgatcaagtcccgggccccgcagctgcacctggagtaccggttctacaagcagctcagcgccacaggtaccgggcggcccgcgggtggggcgggggctgcgcaggggcagggagggggctgccgccgcacgcccgtgcgtctgtcctccgccgcagagggcgtccctcaggtctactacttcggtccgtgcgggaagtacaacgccatggtgctggagctgctggggcccagcctggaggacctgttcgacctgtgcgaccggaccttcacgctcaagacggtgctgatgatcgccatccagctggtgcgcggcgggcggggcggggcggggctcggagggaagagggtggccctggaggggagcgcgtgggacggggaggggcccggccgacaccgccgtgcccccctgcagatcacgcgcatggagtatgtgcacaccaagagcctaatctaccgggacgtgaagcccgagaacttcctggtgggccgcccggggaccaagcggcagcatgccatccacatcatcgacttcgggctggccaaggagtacatcgaccccgagaccaagaagcacatcccgtaccgcgagcacaagagcctgacgggcacggcgcgctacatgagcatcaacacgcacctgggcaagggtgagctgcgcgcgcg

SEQ ID NO: 33622 - DNA, 1464 bp, Artificial sequence
  DNA replication origin
ctgtccccctcccaggagggcctgggcaagacagctccacagcacccctccaggccgggcctgccctcccctcgagaaaacggcctttggatcgagggagacaagctggactttatgacgctaacgggggcggctggcggggcggggccaggccggggggcctccaggatcacactactcacttcagcaaagaaacggaggggcaggagtggggtagggcgggcctctgttttttttttcctcttttccttgttttaaatagttaatgctcttggaggggaggactagacacaggtgtagaaatttcggccaaagtcttacatgaaggaagtgaccccacgtcccgggggtggggccgcctgagccaggcgcggcccctgcagtctgcgttctggcttccagccagggtctggccctgggccgctgtgggtgggccccgagggcctcgcacaaggtcgcgccccaaggggctgcacggagaagattcagggggctgcacgcgcccagggtcacttgtgtcgctgcagcgattttctctttctcctcttgaagaaacagcagcatctgaggagggcagtggctcaggtaggaggaccggggtgcagggcgggggcagcccaggcctcaggccctcccacccccatggggacccagggcacccccacctccccgaaggcaccgccccagagccttacttggtttcatcggccacctccacctctgcaggcgctgtgatcggggcgttggagtggccggccgtggggtcgtccgcattcagctccccgttggtggagttcaacgcctggtgggggcagtagggggtcacgctggccgcccatgcccctccctggggcggtcggtcccgcccgggcctcacctggtttttgctgtgcggctgggttttgtcccggagctgaggctgggagggcaggtcggtgtggacggtgccgatgggggtcggctgtgggtgagggagcaggggtcaggatgggctgcagcgccggttcccatctccctcagggcagtttcccggtcccccgctcccacataccggcacccccccacctaccaggggcttcccggcccagtcgtactcatagtcgaacacgaagccactgcggtcgaagaggtcggtgaagagcttccgcaggtagtcatagtcgggcttctcgaagaagtccaggcgccgcacatagcgcaggtacgtggccatctcctctgcagagagagcgccagcggggcctcggcgggggtgggggtggggggtggggggtggggggcacagggcgggggcgcagggaccccttacctgggaagttctcgcagagcacctcgatgggcgtggcgcgtttggtgtccccgatcttctggtaccgctccttgagcgtgtcggcctgcgggggtctgtggtcagccttgctcccgccctgcgtccccgcccgcctgcccggcctcctcgcccac

SEQ ID NO: 33623 - DNA, 1400 bp, Artificial sequence
  DNA replication origin
gggggacaggcattgttgccaggggtgaggccgtgccccaggcctccccgaaaccaaaggggaaggcaggggtggggccgtggctgaagccggctccccaaccaaaatgctgcaccaaagctcgggcgccgcgggcacggctgctgcagtctcttcccagcctggccctggcaaggggcgggtgggcgctgccaggcgggtgcttctcgacgcacttgctcccggaggctgcgccccggcgcctggaacccgaggtgggaggaccggttggtgtcaccctgctcggccctcagccctgccgcgtggggcgcgtgggcacggagcttcctgcctctctgctccgacacccggcaagcagccggagacaaaacgccttaaagcccccggcccagccctgcaggtatattgcaggggcctgggggcggccctggactggcgggcggttccccagtggggtgccctggaggctgccgggcagagtggagcagcttggggccgtgcccagggcggtggctgtgagtctagtttttgctttaccaagtgtacagaaatggcatttacgtttctctgatgctcccttgaagccatagaatttaggggcttttttaaaaaaataaaagaaaaatgaaaccaaacccaagtgtagagggatttgtctgggctttccacgaagcttgacctggaacgggcgttgcttccatccccatcctgcctgtccgggacgagtccggagcggctggcggcctccggtaacagaaaccgactgatgaggcggaaggtaaggaagatggaagcagagggcagagctgggctctgtctggggagagggcaggagacgagtgttcacgtaccatggaaaggggaagtcacacacatgcgacttggccccgggggtcccgttccccgacactacacaaatatacctgaaagcctcagcgacggggcccaggcaggatggtcctggctgctctgacggcggaaggcctccttgactccctctgttcacgcagcagggcagaaaacatctccacgggggccacgacactgtgaagggaatcagcagtagctcccagaagaacagcggaaactgcaggcaggtgaagaccttggcagcactagccccggctccgccccgtgccttctccccagacaacaccccatacccggcagcaagggtggaagaccagtaccaccgtaatatgttgtgacaaagcagaaataatgcacctgtaagagtcagatggcaagagggaaatggaatgagctcatcgatggttttcccggcagtagcttggggataaggactacttgtcatgtgctttatatatttacccacatgttaaccttttctgatgctcttcatttctttctgctgatcagaaattacatctgggaccggg

SEQ ID NO: 33624 - DNA, 2426 bp, Artificial sequence
  DNA replication origin
aaggtgacacacgagtcgcccaccacgggcgccaagacctgcttcaccttttgctacgcggccgggaacaacaatggcacatccgtggaggacggccagatccccgaggtcatcttctacacctaggctgcccgacaccgacaccgccctccctccgtggggatagccgcagccccaggccatcatctgctgctggggcccccccaccacgcggtgccaggcccagtgtcccccaggccgtctgtccactccatgccacctttctcagcatcaggacggggttgccctgtgttcaccacgagtgtggctgctggatcagggcagccggggaggtggccaggccagtggccaggccctgtggagacaatccctcaggactagggacagggctgtgccggcctgggccagggcccacggacccgcagctcagggcgcctgcccacgtcgtctgccggcggtgcgccgcgggcgtccctcgcgtctcttcactgcacattgcaatgcatttgcgattcccatttctctgctaggagccagcctgggtggcgctgctcccagagccgtgggtcccagaccttgcgttccttttgttcctgtccgtttatcaggacacgggccccacctgtcacgtgcccgaggccacccaagcccagcctgcggggcgttcccactgcctggatgccggcttgagttctgcgcacgcaggattcagtgtggggacggcccctgccggataggcctagccctggcccaggtggtgagcggtttgcagtgtccgttctcatccacctgatgggcccagataaaggcccccgctgtccagcctccctggacggccctcgcggtccctgcagcccaagatgggactcagaccctgtgccccagagctcccctgccgcagaatggggccccagccggccccgaccgggtccaggagcactgctcgcctgtacatactgttgccctagcccacctggtgccgtgggagccacccccaggtgctgggggcacagcccctccccactccggccacgcccccacccaccccgcgtgtttctgccctgtgactcctggaacctgcgtcctccccaaagccatgggaggggtgtcctcctcagaccatgcccccagatgatttttttaaataaagaaacaaatgcacctgccttgagcgcacactgctttgctccccttcactctctgccctgtcatccgggctgcagtgggcgagggatgtcgtgcgccgagaggggccctgaaccccgggtctggtcgccagtgctgcgagaccctccttaagtacccacaggccacactgaagcccgggaggtcgagactgcagtgagcagtgatgcaccactgccctcccccctgggcaagagcaagaccctaactaactcaacacctccccccaaacccaaatgcaatggacgtgtgtgccgatttccccgtggggaggccctgctggctgctgggggaccgtggatgtgagagatggagagaaagcagggagtgcccagttgtggcctcagtggccagagaagtcaagccgttggctgctgcctcaggagcacacgtgcagggcaagacatcaagaaacccggcagcaaggccgcgtggtggctcacacgtcattacagcaccttgggaggccgggcgggtggatcacctgaggtcaggagttcaggaccaacctggccgacatggtgaaaccccatctctactaaaaacacaaaaattagccaggtatggtggcaggcacctgtaatcccagctacttgggaggctgaggcaggcgaatcgcttgaacctgggagatggaggttgcagtgagccaagatggtgccattgcactccagcctgggcgagaaagcaagactccgtctaaaaaaaaaaaagccagccgcaaacagttgccaggaggctgaaggctgagcagatctccacagtgcgcagtgctgggagcaggcaatggagatggaggctggcggggtagggggccttgtcgaacaccctgggggccgggcgtgctggctcacacctgcaatcccagcactttggcaggctgaggcagaactgctaggggccaggagtttgagaccagcctgggcaacacagcaagaccccatctctaaaaaaatacatattaaaaggaaacaccttgggcttctaatgaagacaccagaagggccacccaccaggagctagggcaacactcctgtggggaggacagaacggaagccgtcatcactccaaaacaaaaccctggtagggtctcactgggctgctgttacgctggaccctgccaaaagaaaacacagccctgtgaagaaacatcagcaccagcttctaccatctgtcatttacaacgtccagcatccatttaaaaatgacaggctgggcgtggtggctcatgcctgcaatcc

SEQ ID NO: 33625 - DNA, 3026 bp, Artificial sequence
  DNA replication origin
cgcgagggccgtccagggaggctggacagcgggggcctttatctgggcccatcaggtggatgagaacggacactgcaaaccgctcaccacctgggccagggctaggcctatccggcaggggccgtccccacactgaatcctgcgtgcgcagaactcaagccggcatccaggcagtgggaacgccccgcaggctgggcttgggtggcctcgggcacgtgacaggtggggcccgtgtcctgataaacggacaggaacaaaaggaacgcaaggtctgggacccacggctctgggagcagcgccacccaggctggctcctagcagagaaatgggaatcgcaaatgcattgcaatgtgcagtgaagagacgcgagggacgcccgcggcgcaccgccggcagacgacgtgggcaggcgccctgagctgcgggtccgtgggccctggcccaggccggcacagccctgtccctagtcctgagggattgtctccacagggcctggccactggcctggccacctccccggctgccctgatccagcagccacactcgtggtgaacacagggcaaccccgtcctgatgctgagaaaggtggcatggagtggacagacggcctgggggacactgggcctggcaccgcgtggtgggggggccccagcagcagatgatggcctggggctgcggctatccccacggagggagggcggtgtcggtgtcgggcagcctaggtgtagaagatgacctcggggatctggccgtcctccacggatgtgccattgttgttcccggccgcgtagcaaaaggtgaagcaggtcttggcgcccgtggtgggcgactcgtgtgtcaccttgcgcaggcctttggtgccgtagtgggagtctgggccctgtagggaataggggtacagtgaggtcaaggaccaccaggctgggatgccccaggtgtggacagggcaaggccccgactgggccagggtggctgcctctggagagtgtgtgctgtgccccggtggcttcaggatgggccagagactcccacggagggacccctgtccccggcggcgcaccttgagcgtggcacaggccgtgtagttgacgttgggcagcacctccaccggctccttgaacatgacgcggaaggtgctggctgagccgtcgcagctgaagcccgtgtcgttctggcccaagacggtgttgctatcggtgtgaataatctgcggggaggtgggaagtgggaggctcaggcctggggagggccaacggggacccctcgaggcccagcccacctgcccagggtgggggcagcacagggaccagggccgggggttcagccagggttccatggaggtggagagaggacatgggcctgagtggggcctggggatgaggcttggggctggtacctggatgttcacttggtagtcggtgggcccgtggatggatccatacagcccaaatcccaccacgaagatgcgcttgttgactgagaacctgccgtggcagatgacaggcagcagcgtggatacccagggatagcctaaggtgagctggggcgagcccacccccatgcccggtcccctccatcgtccctgagtcctccacccccatgcccggcggcccccccgccgtcttcatcatccctgagttctccacccccatgcccggccccccatctccgtcatccccgagtcctccacccccatgtccggacccccccgcctgcaccccaagccccacctgatgcggtcactggtcccgctgtagccccagcgactctccacctgctggaagcggttgatgctgcactccttcccacgcaggcagcagcggggccggtcaatgaactccactcgtggcttggggttgacggtgaagtgcaggaagaggctgaccacctcgcggtccaccaggatgcccgactgtgcgggacctgcagcacagggagggtgtgggggagggccgggctgcaccccaggatcccgagtgcctgggaggacacgctccttccccctaagatgtctgcgtcggactttcaaggtgcagggacctgggcagcccctccccgggggactagccaccagccatggcccctgctgcctgggcttttagggagaggtcccagggcacagaccagaggccgacagatacgctcactcaggggcgatgcctcagggtctgacagatgcactcactcaggggtgatgtctcagggtctggccccactgtagggaccacccgtcacttcactgtgggtgggggcggggggctccactgcctgttctctcagggccattggctgggaggggtcactgtggctccctgctaggcctgtaccccccaggctgcagccctggcttctagaagcagtctgggggttcctctccacggtgggccctaggcagacaccttctcaagcgcttacacccccaggggtgatggctagcggaccccaggcagactccaagagccaggctcttaatcccggtgcagagatgtcacaggcagagggactgtgcatgggatgtgaaggggctctgggtagggaggggaggccaggaggggcagaattgggggtccaccatccacccccaggagtgccaggacacagcaccctctgctctaatgagagcagccctgcctgcctgagacctaatcactcatcaaccaaggtgggctcaactccgcatcgctcagctgcaagccagcccagtgcagacacagtttaataactggtgagaaacagaccattatgggttaagtgaatcaggaagactgagtatcaaaactcaataaacaatgttaacaattttttttttttttgagacggagtttcgctcttgtcccccaggctagagtgcaggacggagtttcgctcttgtcccccaggctagagtgcagtggcgtaatctcggctcaccgcaacatccgtctccagggttcaagcaattctcctgcctcagcctccagcatagctgggtttacaggcatgcgccaccatgcccagctaatcttgtatttttagtagagacgggg

SEQ ID NO: 33626 - DNA, 1781 bp, Artificial sequence
  DNA replication origin
gcagctggccagcctgtgcctggagaacatcgacaaaaacactgcagacgccatcaccgcggagggcttcaccgacattgacctgggtaagggcccaggagcccaggtgtgggaatcccagcggggcctcggcgggagggtccggggattgacagtgggagctttgggcctgggggagttgcacaggtgagctggggcctcaccacttgcagcaggtcaggagtttgggtcctagcacagccccacgggagtccggggccttggccaggaggccacaggccagagcccaccatcccagctgatggtgaccatctcgtcctccgatggtccatggctttgactttgctgttgaacagcttttgtcaaagctactcaagtctgtccttgtggcttaaaaacaaccacagccgaggaaaatgaaggggcgtggtcttgtgttgataaagctttatttataaacacactcacagggccagatttgggccacgggccatagttgccagcccggctttaactgctggtcctcacgttagtctcactgcctcctgcagggtgggcatgtgggtgtcgtgttcacgcagccccttcctccaccccacagacacgctggtggctgtcctggagcgcgacacactgggcatccgtgaggtgcggctgttcaatgccgttgtccgctggtccgaggccgagtgtcagcggcagcagctgcaggtgacgccagagaacaggcggaaggttctgggcaaggccctgggcctcattcgcttcccgctcatgaccatcgaggagttcgctgcaggtaacagagctcgggctcaggggctggtttgggaggggagtggcacacaggtgggcatctgggtaccgaggatagtgcccccgagttcactgcggaaagcctggcagatgcctggcatatacagataggaagaaacctggcttgtgaggacgcgtccacagggccatctgttagccccggcccggctctgtccccaccgtgcacactgccagaccccgcctctcgtgtctgtccagctgttttggtggcatcttcccaggagggaagggagtccccgtctcgcgcccttgtgctacctgctggtgcaggtaccagtgtctgtgacgagctcaggagggctctgacatggccggggtggctgtcatgcgcccgagtgggccttggggtcccctgctgcagggcctgggttccagggtgacgtgaaggggcagcgctaacgatgcctcctgccctcgtggctgctcactgcctgacgccatccagctctggagcaaaacaggcctggaactttccagaaggggctgggacagagccctggggctggtgcacactcgccgtctggccttccccaggtccacgcggcccccgctcttgcttagctgaaggtcgccagatttagcaagagggtctctgtcgcccaggctgagtgcggtggtacaatcacagctcactgcagcctcgacctcctgggctcaagtgatcctcctgcttcagactccggagtagctgggatcacaggtgccaccaccacacaaggcttatatttgtatttttttgtggggacagggtcttgctatgtcacctgggctggtcatgaactgggctccagccatcctcccatctcggcctcacaaagtgctgggattatggacatgggccaccgagcctggctagatacatacttcttaaaaatacaactgttgatcagctgggtgtggtggctcatgcctgtaatcccagctacccgggaggctgaggcagg

SEQ ID NO: 33627 - DNA, 1488 bp, Artificial sequence
  DNA replication origin
ctctggcctgtggcctcctggccaaggccccggactcccgtggggctgtgctaggacccaaactcctgacctgctgcaagtggtgaggccccagctcacctgtgcaactcccccaggcccaaagctcccactgtcaatccccggaccctcccgccgaggccccgctgggattcccacacctgggctcctgggcccttacccaggtcaatgtcggtgaagccctccgcggtgatggcgtctgcagtgtttttgtcgatgttctccaggcacaggctggccagctgcggttcatcgaagagtcgcgcctggcaagagacatcgacggggggcgcggtggggacatcagcacccagccctcggcagatccccagtgcggggccggttcaaatgcagccctgaccacacgggccttcctgagcgtggccaggagccaccagggtctcagccaccaggccggccctgttgtgggcccagagactcccctgtgaccgctgactggggcgggagagttggggagttccctctcaggacctcagaggccaaggaaggaagaaaaagatgctcaggtccctgtcggcagggcctgctgctttaggcaaaaggggcgttgcagctgcactcggggggcagcagggcccaggaccccgagtggcaggcagaggtgaggtggccggggccgaccggtgaagcttcccgaccacaacatgcccttggccacttgtggtgggaggggccgtgtccccggcagctccatcccaagacaaacagcagacatgacttctgacagtcaggtgacagagctggaggacgcctgtgctcttagggaaacagaggcttagttagtggaaggtgctggaagggcctatgccagcagggacccgggcaggcctttctgcgggcatcctcccgaggacacctctcaagtgggttcgtagtggttttaggggcagggaggctgaggcagccacaagatgaagcccggggagtgagctccagcctcctctcagctcaggcagaggcctctccagcaaggcgaccagatgacccggacaagaaacccctccctgtgggagtccgggatgccctgcatctgacctgccaggatggagggggagaaggttctgggtcctttccaggatgccggacccccaaagcccattggaggacccagtgccgctgtcccctctggccaccctccacccccgaccaggagctcacggctcccaagcggccgtccacccgtactggccccacgtcctctcagcctccctggcctgcacgacctccccagcccccgccctttgggctgcacagagcccaactggggtcccctgagatccctggccctgctctgtctacctgacatttccttagagagagagagaaagttctctctggtttttttttttctttttttttagccaggcgcggtggtgggggcctgtaatcccagctactgtggaggctgaggcaggagaatcgcttgaa

SEQ ID NO: 33628 - DNA, 1177 bp, Artificial sequence
  DNA replication origin
atgggttcagcctcttgctcgttttcatgggtgaccaccttgccaagtcgtgtccctatgtcagagggcaacggacaggggctaattctggaaggttcctcggggaacctgatgtgggtgtttgggtcctgccagctcaagggccggtggccgagtctaacggtctgagtggtcccctgacgctctcccctgggggcgggcatggcggtcccacctcacggccacccgcgttgcttctgcaggtttctctactcggacgaggtgcagattggcccggagacggtgatgaccacgctatacaccgccaagaagtacgcggtgccagcgctcgaggcccattgcgtggagttcctgaagaagaacctgcgagccgacaacgccttcatgctgctcacgcaggtgggcggggccggtacgaggcgggggcggggccaggcctggctggaggcggggccggggtggggcggaccgaggctggaggcggaggcggggccgggggcgggcccgggaggcagcaggctcctgcctggtagtaaaatgtgttttgggccgggcgtggttgctcacgcctgtaatcccggcactttgggaggccgaggcgggcagatcacctgagctcaggcgttccagaccagcctggccaacatggcgaaatcctatctctactaaaaacacaaaaaagagccgggcgtggtggcgggcacctgtaattccagctacttgggaggctgaggcaggagaattgcatgaacctgggaggtggaggttgcagtgagccgagatcgcaccactgcactccagcgtgcatgacagagcgagactccacctgaaaaaaaaagatgtgttttggacttttccgtgatacttcaaaaaattattggcagggtgcggtggctcacgcctgtaaccccagcactttgggaggccaagtagggaggattgcttgaggcccggagttctagaccagcctaggcaacatagagagaccccgtttctacaaaaaattaaaaaaagattcaggccgggcactgtggttcatgcctgtaatcccagcattttgggaggctgagacaggcagatcaccagaggtcaggagtttgagaccagcctggccaacatggtgaaacctcatctctactaaaaaaaaatatttcataaattagccaagcacgctggt

SEQ ID NO: 33629 - DNA, 1302 bp, Artificial sequence
  DNA replication origin
caccctgccaataattttttgaagtatcacggaaaagtccaaaacacatctttttttttcaggtggagtctcgctctgtcatgcacgctggagtgcagtggtgcgatctcggctcactgcaacctccacctcccaggttcatgcaattctcctgcctcagcctcccaagtagctggaattacaggtgcccgccaccacgcccggctcttttttgtgtttttagtagagataggatttcgccatgttggccaggctggtctggaacgcctgagctcaggtgatctgcccgcctcggcctcccaaagtgccgggattacaggcgtgagcaaccacgcccggcccaaaacacattttactaccaggcaggagcctgctgcctcccgggcccgcccccggccccgcctccgcctccagcctcggtccgccccaccccggccccgcctccagccaggcctggccccgcccccgcctcgtaccggccccgcccacctgcgtgagcagcatgaaggcgttgtcggctcgcaggttcttcttcaggaactccacgcaatgggcctcgagcgctggcaccgcgtacttcttggcggtgtatagcgtggtcatcaccgtctccgggccaatctgcacctcgtccgagtagagaaacctgcagaagcaacgcgggtggccgtgaggtgggaccgccatgcccgcccccaggggagagcgtcaggggaccactcagaccgttagactcggccaccggcccttgagctggcaggacccaaacacccacatcaggttccccgaggaaccttccagaattagcccctgtccgttgccctctgacatagggacacgacttggcaaggtggtcacccatgaaaacgagcaagaggctgaacccatctacacagcacacacccggaagcgtctatatggcctgtcttgttctgcccgggatgccccaggagagggcactgggagctgggtgtctccttcttgggcaccttttccatgaggaactgttggttccccacctcgggcaccaccgaaaacctcaaccacttctgggtggatcatagaacccaacacgctaattaggatcatggataatcatggacgctattaccacctgccagcgaggggcccacacgacactgaatacagatcagaagttgggccgatcaaaaatagaagcacaggctgggcctggtggttcacgcctgtaaccccagcactttgggaggctgaggcgggcagatcgcctgaggtcaagaagtgccagaccagcctggccaacatggtgaaaccccgtctcta

SEQ ID NO: 33630 - DNA, 948 bp, Artificial sequence
  DNA replication origin
tagcccagggtgcagtgcagtggtacgatctcagctcactgcgacctccgcctccagggttcaagcaattctcctgcctcagcctcctgagtatctgggattacaggtgccaccacgcccggctaatattttgtatttttagtagagacggggtttcaccgtgttagccaggatggtcttgatctcctgacctcgtgatccactgcctcggccccccaaagtgctgggattacaggtgtgagccaccgtgcccggtgcctcctgggttctaagtgattctcctgcctcagcctcctgagtagctgggactacaggtgtccaccaccacacctggctaatttttgtatttttcatagagacagggtttcaccatgttggccaggctggtctcgaactcctgatcttaggtgagccgcccgcctcagcctcccaaagtgctgggagtacaggcgtgagccactgtgcccgtcccccatcctttctgtctctgaatctgaggactctggggacctcctaggagtggatcacacaggatttgtccttctgtgcctggcgtctgtcatagagcacgacgtcttcaaggcgcatctgcaccgggtcctgcatcagagcctcgttcctgtttgtggctgggtcgtgttccagtgcgtgggtggtcgcaccgtgtctgtcaatggacgctggttgtttcccccgttcggagttgggaatcgtgctgctgtgagcaattgtggatgtgtttttgtgtggccgtgtgttctcgatttgtttggaaggggaaggggttacagatacatgaaggggggaacagccgggagtggggctggggactcacggtgggcagaggaggcagtagcggtgcccaggggtcgaatcctgaaggcccatgcaggtgtctccagggaggggctcggtgttggaggagcccctgccttggggaccggcaga

SEQ ID NO: 33631 - DNA, 2090 bp, Artificial sequence
  DNA replication origin
cagggaaccgagattgcgccattgcactccagcccaggcgacacagtgacacaccatctcaaaaaaaataaaggacaggctgggcgcggtggctcacgcctgtaatcccagcactttgggaggccgaggcgggcgaatcatgaggtcaggagtttgagaccatcctggccaacgtggtgaaacaccgtctctactaaaaatacaaaaaattagccgggtgtggtggtgcacaactgtagtcccagctacttgggaggctgaggcaggagaatcacttgaacccgggaggcggaggttgcagtgagccgaggttgcgctactgcactccagcctgggcgacagagcaagactctgtctcaaaaaaaaaaggaaaaaaaataaaaggagaaatcctgtttgctgttcacacagtggaggtggccacgatgaaggcctgtgtccttgtgttcatattgagggctgaggagcaggagcaggagggtgggtctgtctccggggtggcagaggtggaaggggaggcaggagaggccggcaccgttggggcagcctttattgaaaaaattcacatatgagtggacctgtgcagttgaagcctgccttgttgaaaggtcatctgtgtttccttagcatttcaggagggttgaaaatggagagggggcactgacctggtccagaacgaccccctgagcaagtgatgttgatggagagtgcagtgccccaggctcagggatggaaggcccagagcccagaggggctgggcaggtgggagccatggcaaggccggagcaggaggagtgagggaggccctgtggcccagtgtgaccagatccgcattgagggtggaacgcgccgtggatgggcccaggagcgaggctggggagtagcagctgcagactccaggcaggagacagcagcgggctcggtggggacggcagaaatgaggggtagaggatgcaggtcctctttggaggaagcgagttcctgtggccaggagaggaggcagcttggcaggtgagggcgtggggggctgtggtgggggtccccagacttctggctggagcatcacaagccaggacaggctcaggagggacaagtactggcttggatgtgttggcgggacctggggctgagaggtccgcagagcagtgtgtcccaagtgctctgtgcctcagtttccatgattgaaacaaggtcactcagacacatctgtcctggggctgtgggaacaaacggacccgatgggttgctgacagccacaggccacacagcagagagaaagaaaacagcagctgaggccgggcgcagtggctcacgcctatcatcccagcacttcgggaggccgagatgggcagacatctgaggtcaggggtttgagaccagcctggccatcgtggcaaaaccccgtctctactaaaaatacacaaataagctgggcgcggtggcacgcacctgtaatcccagctactcagagtctgaggcaggaggatggcttgaatccggaaggcagaaattgcagtgagccaagattgcgccactgcactccagcctgggtgacagggcgagactccgtctcaaaaaaaaaaaaaaggtggggggatgtcgggacgaactgggggtgctgggataaagtctggagttcaccgatgagcagagaggggccgggccttgccagctgtgaggagagcaagtggcctgggcttgggcctggtccctggcgggggtgcagggtgagctgagacatggcagagaggaggctgggagcaggccttggtggtggccccagtgtctggaccgtcgcgcaggggtcggcgtttgtgctggggaggaggccaggggttgcacgcggcttctgggctgttccccggtcctggatgggcacccgtccatctcagcgcgctggagcctggcacacagtaggcacgcagtgattgtgcattgaatgatctgtgggaattaaacatctgattctctcatggggcttgaagggagaactgaagatctccagggttgcacttttgtagatgtgcacattggctggtcccatgaagttagtatctaaaatacctttttcttttttttgagacggagtc

SEQ ID NO: 33632 - DNA, 3442 bp, Artificial sequence
  DNA replication origin
gtagctgggactacagttgtgcaccaccacacccggctaattttttgtatttttagtagagacggtgtttcaccacgttggccaggatggtctcaaactcctgacctcatgattcgcccgcctcggcctcccaaagtgctgggattacaggcgtgagccaccgcgcccagcctgtcctttattttttttgagatggtgtgtcactgtgtcgcctgggctggagtgcaatggcgcaatctcggttccctgcaacctccacctcctgggttcacgagattctcctgcctcagcctcctgagtagctgggattacaggtgtgcgccaccacgcccggctaatttttgtatttttgtagagacagggtttcaccgtgttgaccaggctggtctcgatctcccgacctcgtgatctgcccgcctcggcctcccaaagtgctgggattccaggcgtgcgcccccgcacccggccccttagacttttctgaatgtattttctgttctccagcctgttattgtgagaacaggaggctggtgtgcattgaccaagtgtcctcacaaggcctccggtcagcgagaagccattcctagttaagttcgtgggagtcaaaagttgtacttggatttgagctgagtgggggtccacgcccctaaccccgcatgtcgagggtccgctgtcccaggcccgcccaccttaccttgctgctatctcccgctgggcctcattgccctctcctgagccccccgggggcagacccctcacctacttttctccaaggggtccttgtcctgcctccatcttccccactttgcaaccgagccagcggtccctcaagtgcaatcgcatacatgtcccaaggtcagccggtgcccggggcgccccacctcccccctcaaacagaaagcctgggattctccagctgcacctgctgctgggtgagttccagctgcatccaacctaccccctccccaaagagcacaaagaccacccaggtggagggagcaaacccaccgcccctcactccaagctaggagaggcccagcagctaaggacgacagagacagggacggcgacacggacggcacaagccgtaggaggccccggaaccctccaggggcaggaacctctgctaagtaccgcccagggcaggaccccacgaaaggagacccagctgcccataaacacccaggaagaagccagaacacgttaacaaaagcacccgaaggtcagaagggagggcaggaccctccccctccagtgcccgcagcaagaaaacccagcccctgcccccgaccaatgaggggcagggtaagagggaccggggagtggagggaacctggggcctggggccggtaccccgcacactggcaaagacagatactgggccaaacccacttctttcccagaaaggagggctgggggctggggagggagggaccccggagctgggggtctctgggttggaagggcccggagatgggagtctgggcaggggtctagggtggtggcctggtggcaggggatcataggatggggtgcagggggtagcagggcccaggggagacaaccttctgcagagtccagggtccagagcctggcagtggcggagctggaggtgggtggtcactgaagtgggaggtggcagggcccaggggtctctggctgaggtgggggtccggggctggaggggctgtggatggtagtctatgatctggactgcagggcgggcagggggtatccctggaggggagcagcatggtttgaaggtctctgatccagatcatgtgctgagcctgggggtctccggtgggggtcactgggtctggaggcagcagggaggacgcagggagcaaggcctaggggtcttggcgcacaggggtgcgggtgggagtggcagggtccctggatggtgggggaagagggaggggtcttgtggtcatgggtgggggtggaggaaatagcacgacccctgaagggaggggtcctggagttcaggagtcataggttgggggttacggactgaggtggtgaggactggggacggggggtctcaggtgagagcggagaagtctctccatcctgggatgcaggggtgacacacttgagtgtagtggggtcccagggggccccgggagtagagagtggaagggcagtgggcaggggtgaaggacctggggaaggaggggtcctggagagtccctgggtacagggacggaggggtcaccagtaggggtcccagggggagaggggcggcaggcaagggtgcagggcctggggatggaggggtcctgaggatccccgggtatagggatggaggggtgtggcatgtggggtcatgggtcctagaaacagtgggttggggtcctgggaatggaggagcagataggggtacacgtcccagggttggagggtcacaggagtcccaggggtggtgggtgggggtgcagggccagggcatggaggggacccagggatgcaggccaggtggggtccagggatggaggggcctggggtgtaggcaggggttccagccggaggtggaggggcccagggatctgggggcagaggtgtctggggacctggggtgcagggaggggtgaggtccagggatggagcgtcctggggatggaagaatggagggtcctagggtgcaggcggggggtggagggccctgaggatggggtattcagggttctggggtgcgggctgggtggggtttgaggatggaggggcccaggggctccaagtgcaggccgagttggagggtcccaggaacggagggtaccggagtgcaggctgggtgggtccagggacggaggagagcaggggtcccaggggtacagggcctgggatcccggggaacaggctgggggcgcaagccagaggtggaggatccaggggggcctggggatggaggggtgcagaggcccagagtgcaggcctggtggggtctggggacagagaggtgcagaggcagggacagaggggtgcagagcccagggaactgggtggagtctagggatggaagggtgcaggccccggggtgcaggccgggtcggtttcaggaccggaggggtgcaggggtcccagggacagaggggtgcagggcctcaggtgcaggccccggggtgcaggccgagttgggttcggagcctgaggatgcaggggtgcaggggtcccggggacagaggggtgcagggctcggggatggaggggtgcgggggtctcggggacagaggggtgcagggcctcaggtgcagggcccgggcagcaggctgggtgggtcggggccagggctggcggggtcggggcgcccacctgtgcgcggggatgcgctgcgagctgagccccttgcccaccaggaagtgcacgtcgcacagcacctcgttgttgaagaggaaggcgaagcgctcctgcacggtgggcttgctggcctgccagttgt

SEQ ID NO: 33633 - DNA, 1352 bp, Artificial sequence
  DNA replication origin
cggcggcgttggcgctgggcccgggactgccccccgtgcccgggccgaccccgacccccggcgggcacgacgcacgcccgccgctcccacccgccgccattttgtggctgcggcgtgggcgggggaggggaggagggaaggagggaggggaggagggaaggagggaggggaaaggaggagagtagggggaggagggggaggagggaggggaggggaaaagaggagggaggggaaaggaggggaggagggaggggaggggaagcgggaaggagggaggggaggagagggaggggaaaggagggggaaggagggaggggaggagagggaggggaaaggagggggaaggagggaggggaggagagggaggggaaaggagggggaaggagggaggggaggagagggaggggaaaggagggggaaggagggaggggaggagagggaggggaaaggaggggaggtgggaggggaggagggaggggagaagggaggtgaatgggggaggctgttgcaggggaggggacggggaggagagggaagagtaggaggggcctgtagaggggaggagctggtggaagacctcttgctccactccctaagcatcctgacctgaagcccagactccagaccgaggtccagaatttggggtccaggcaccaggccccagactccagaccgggaatcctaaaccctggagcacagacctcagtccgggatcccaggcctcagaccttgaatcctagatcccagactctgaaccccagacttcagactccggattccagatcccatacctcagacccggaacccccaacccaaagaccaagcgcaaactccagaccccagaccccggacccaggtggcgggcctgctccgtggcgcaggctccgctgtacagagacatagcctgaggccgggaagctgcggatgagcgagcaggatgcaggccacgtgcactgacactcagcagacgcccagcaccctctccaggccaggtgtggggggtggtcagtgtggacggagctgggactcccccaaaacgcttactacatacataatgtcaaggtagacaaatgccacaaagattgaggaaccaggtcgggcgcagtggctcacgcctgtaatcccagcacttcaggaggccaaggcggggggtgcatcacctaaggtcaagagttggagaccagcctgggcaacatggcaaaaccctgtctctacaaaaaatacaaaaattagccaggcgcggtggctcacgtctgtaatcccagcactttgggaggccgaggcgggcggatcaccaggtcgggagatcgagaccatcctggtgaaaccccatcatggtgaaaccccatctc

SEQ ID NO: 33634 - DNA, 774 bp, Artificial sequence
  DNA replication origin
cctctgttttccagatggggaaactgaggcccaggttggcagtcatcttgccagccccatagccccttttccaggggacagctcggaacctcgatttccagtctgtgccttgaggctgtgggggaagctaacggaggaccctgagcccctccctcccactgcagctgcagaacagggctagaaggacttcatgggtcatggggttcagtcgggactgtggggtagccacgaagtgccctgcagggggtgacagacccccggtgcccggcccacccttcacctcccccagcagttagccctgcagggctgggcccgtcctggccatggccgtggtctctgctccacctgggtctccccggacccttcctcctctaggcccagctggaatccaccacccccggggccattcacatgaaaagtccagaacaggcaaatccccagagacagagagtgcactagtgaccaccgggggctggggaggtggggaaaggcagtgactgccggtggggcgggcttgctgttccgggtgatgagaatgttgcagaattggattagaggcgaaggctgcacaactttgcgtgtgctaaaaccattgaattttagacgcagtgggtgaacagcggtgctgaggtttttttgttttgttttgttttgttttttagaaagagtctcgctgtgttgcccaggctggagtacggtggtgcaatctcggctcactgcaacctcagcctcctgggctcaagcgatcctcctgcctcagcctccctagcagct

SEQ ID NO: 33635 - DNA, 1631 bp, Artificial sequence
  DNA replication origin
tatttttagtagactcggggtttctccacgttggtcaggctggtcttgaactcccggcctcaggtaatctgcccacctcggcccctcaaagtgctgagattacaggcgtgagccaccgcaccaagtcaattttttgtatttttagtagagacagggttttgttatgttggccaggctgttctcgaactcctggcctcaagtaatccagctgccttggcctcccagcgtgctgggattacaggcgtgagccaccacacccagtcagggctcagctgcgagctcttcaccagggccagcgcctgcagggagcctccccgtgtggcttgggcttcctcacaacatggcagctgtgttcccaagctcgggctccagtaagcagggttccaagcaaacaaagcagaagctgccaggctgacctgctgagaagccaggcagcgccacccccgccaccttctctggtttcacagaagacgcgaggcccgcccaggttcaagggaaggggaagggtctcctcctgggagagggtgagagacgttgttgccgctgccttgggactgtgcaacctaacaagtcctagtaattgtaaccttctgcacatggccggcccctgcctgctttagggttcacccccctcagccattattaagtttttgttgcaggcaggacgctgtgctggggctggtggcagagaagatgagctggacggccaagggctgacctcagatcctggagttgggtgtagaccaggaagggcttcctggaggcgggagcggaaggaggacagcgaagcctagtggttaaggaggccagcctgggctgaaatcccagctgtatccaggctactgtgtgcctcagtttccggattcatcaagcgggagccaagggcagccaggtgagctacaggctggtagcgcagtgcagggacaaaacccagcaagaaagaaaccgatgacgtcgcctgagggggcgggacttgaggcctggagggggcgaggcttggcgtctgggggtggggcttattatatggggcggagccttggacttggtgggcggagcttggaatctgaagggttagggcctcgtctggggcgaagtttggggcctggaggggcgaggcttgggggaggttcccagacggggcggggcttgtgtattgggtgaggtttgaggcctggaaggcagagacttatggcctggggggcggagcttttgcctggagggagcggggcttatgaactggaggtgggggtgaggcttgtgtctggggccaggtttgggcctggaaaggcggggcttgcggtctggaggggcggggtttgggcctggagggggctggaggcaagagagatggcgctcgggacggaagggttccctgccctgccccaggagcctgcatgggagaaggcgtgaggaggtgaaggaagcttatggtacctgcacaccgacaggctggagcgcgagagtaagcaccgtgtggggacacacccgaccacggccggggagggggcggcaccccaaaggcaacagggaacccaggcagcattttattttttcagataacagctttactgtgataaaactcagcacctggccgggtgcggtggctcactcacgtaatcccagccctttgc

SEQ ID NO: 33636 - DNA, 1574 bp, Artificial sequence
  DNA replication origin
gcccccacccccaggccccccgacattcaagtattcttcaagaacagggaagcaaagtccatcgatgtgttgtttttttttaaggaaaaactaaaaaactaaacaggaggaagaatcccgaccgcggatttagaagccagaggggctgccccagctgtggagctcgggggctgcgccgggaagggcgggcggtgaccctagccgcgcgcacttctaaagtggaaccctgtattgcatagaacgtccccacccgcggggagggggcagcaggctccgcagcccccgggggttggagcatggagggtggggggactgagcagacccccgcattcctgggtgcccgaagggaggccgaggccgcagccgttttcctgaaggtggcagaccaaaaacactgccctgggggtgaggattcggccagaccccggggtctgggctcagctctaaggacaaggacggagctgacggagcttccaggtcaggcccgaggggcggcgcgaggcaggacgtggctacggtcagactgagccctgagaaggggcactcgggtgccccaagggggtgtcttcaggaccccccacattggctgacagtgcctgtccagcccctctgcctgctgcggtggaaacggcttcgggccaggcggggctcctgctgtctcaggccttggtgtggaggggaggggcagcggcgagcccctggggtcagctgcagtttaaggtcaaggtcggaggccgaatctggccaccaggagtcctggacagacagacgggccttgcaggaagccccgattgtcaactatcatggggacaaggcaggcgcgggtgaagggctgggggatcccatggggtgggtgggtgagctgcctgccacctgcctgcctgacacctccagagacaggcagcccctcccttccccaaccaagccaccaggggtgctctcagggtgagggatagaggggaagagcctgtccctgaaatactgcgggctgggagggaacacgagggcagggtcctgtgcccctccccagctctgcaagatggcaaacgctgtgggcctgctctcctgagtcactgcaagccacgtgggcagatggcgggcagcacaggtgacctgggggcaccttcatagtagaggtgagcagggcgggggaccggggaggggacaagcccacccacctaccctctgctcaccttcccgggtgcctgcaatgcttttaaccatccaaaggaaaaaataacggggaggggtggaaacaggaaaaaaaaaacccaaaagcaaaaaccttctataaaacacccccctcagctgagcttagtgcctgggaatccaggcagaggaggggcagcccgctggacaccggctggcgatagcttaaaaaacctttagatttgattgggggacgggtgacctatgtacagaggggagatgggagggtcaggcgtggtctcccaccaggaccactggggccgaggacagactggccctttgccgccgctgcgccagcttggactgggagggtggagacagctgcaggcagcgtgaggtagctcggaccaggacgggctggccct

SEQ ID NO: 33637 - DNA, 2314 bp, Artificial sequence
  DNA replication origin
gctggccctgccccgcggcctcctcctcagccaggtcctcgtcgtgctgggccagctgccggttcatggcaatggcctcagccgcgaaggacgtgaggtctttggcacagctgttcctgggaaacggggtgggggtaggtggtcaccaagaggcacccctcaggggacccctggggtctgtgaaggccctgggggaaggggcttcatgcccccctcccagcccccaccctggggctcctctgagcaccagggccccaccgggagcttcactgagtcaccaggcttgcctgcctccccgaccccaaagcagttctccgggtctttcacaaatgtcttaacctggaaaccccgccccctggactcaggggtcccgagcacccctgcgggccttacctctgcaggaccatgggagtgggcaaggtgttctccggggcgcactgcaacgagagtgggcgggggcagggctggagagcagctggggccgcctggggcgctgggtggggtgtctggccaagggatgccatgcccatcccatcaccaggaccccaccggagaccaggagtgcacctgggtgccccgggagccaagcgcccaccccgaggtccctatggtgaggctccatgtccccctgcccagggaacccgaggctgggccaggctgaggcctggtgttacaggacccagtgagggtgggggcagagccccaagccccatctctcccggctgttcccagcccaaacccacctccgcccccctcttaacccatgggtctctggatgcttctgcaaggagattggaggcccccagcccctcgcctggggacacagagtgaccccagcttctatttttagtaaatcctcactccctggggtggcagctcagctcagatgacctctggcaggagaaacacccgactcctcctcgactggaggccacacagggaagggtggaggcacagcctgggcttgagactgacggcaggctaggctggggtctatgtgagctgggctcgctgcccgcttcgctccagcctgctgcaggctgtgggtccccaccaccctccaggaaggttctctgagtagctgctcctgggagccgcctggctggccagcgggcaccgtgcacaggcgggcggtggggatttcggctgcacccctcatcccagggcagagcctgtgctctcaagcctcagtgcatctcagggtgtccaggctacaccctcagggcttcccatgctcgctctgaggccaccctgcagcgcccccatacccctcctgccgcccgtgcggctggtactcaccccctgaacccaggggtgctgcaggacttgggcggcactcagcctctgcttggcgtcacggaccagcagcttggagatgaggtctttggcagcgcaggagatgtgggcccagtccttgtcggggaactcgtacttgccctcctggatgctctcaaacagcatgttctggggacatagaacacaggggagcttagacctgcccaagggcctggatactgtgcactgacacgtggctccaaccggaccccaaccaggccctagaccaggccctagaccacgcacgcctggggcagagggggctgggagccggaccaggagagtcagctccacccaagtggagctggatttacaaaaaagcagctctgagggacctggttccagggaccacaggccacagatgctgagccttaagccgcgggcagggagcctgagcctgatccccccaaaccaggggcctcactccacctctcagctctctgaaccctgtctggggtttcccttgggcaggcaaacctgaaaagccttcgggaaactggcagacagggcggcactgccctgtggatggcatcagggagtagggcacaccgggcaggtccccaggggttagggggagtacagagtaggtccccgggggtctggggagcacacagggcaggtccccgagggttagggggtggtcagggggcaggtcccctggacttagagggtgcgcagggcaggtcccctggggttagggggtgttcagggcaggcccgggggaggagggtgcccaggagaggagggtgcgcgggccgccgcacctggcaggcagggcaggcctcgccgcggtcccagccgcagtcgctgccacagcggcccacgaagggcgggtagccgctgagtaggatatacaagatgacgcccaggctccacaggtcgcagcgcttgtcgtagatgctagcctcctcgctgaaggcctccactacctccggggccatgtactccgccgagccgcactgcgggcgggggaggggcg

SEQ ID NO: 33638 - DNA, 2357 bp, Artificial sequence
  DNA replication origin
cacagctttcagcagcggcctgggtggtggtatttcaggacaccctggcgtccagttgttctcttgcccctcgctgggacagtgttgtctgtcagtatagacatgggactgcagaggcaggagccagggactcaagggtggaatgccacatccctgctgccaccaggccatcgcactgggcagggaaccctgggcagagtgctcatgcagccaggcacccgcccagtgagaggggctaacatgtccagcctggcaggagggtcccagcaggtgccaggggaagctgcagacgcctcctcaccccacctctgtgagtgaaggtggcagggagcagctggagctgctgggggcagtagagtggcttcctgaggctctggggctcagggaggctggatccgccagtggctgggacagccaaccagggtgggcccgaaacagatattggctgaggcggcaggcaagtgtctgcccaggctggcacggagctggggagcaggacttggtgctgtggccacatgtgaggtggggcctggtgggctggcagccaggtgtcctgaggcctccctagttctatgggtgaccaggtacccaccctgtggggaaagaggactacagctgactgtctctgggtcagggagggtggccgcccagggcagggaaccctcacgtcctgtgggggtattttgcagaagtcataggtctcaaatgtgtctctgagggctgtcagggtcacaggtggagagcagcctccactggctttttttttttttttttttttttttttttgaggcgaagtctcactctgtcaccaggatgctggagtgcaatggcgcgatctcagctccctgcaacctccacctcccgggttcaagtgattctcctgcctcagcctcacaagtagttgggattacaggcgtgtaccaccacacccagctaatttttatattttcagtagagacagggttttgccatgttggccaggatggtctcaatctcctgacctcatgatccacccgccttggcctcccaaagtgctgggatgacaggcgtgagccctgctttctagagttgcagggcgttaagtgtggtgaattccagccgtggcagtggagtttctggccccttctcgactatgagcgtcccaccaacccaggtgctgtgtcctttcgcctgtttcagatcattgagaagcagccaggccacattcggagcagggttttcagggaggtggagatgctgtaccagtgccagggacacaggtaggtgagccacccttgccaccgcactggcctgagctgtctttcagtggatgaagggcctgagtgccacatcacccccagcaagcgtctgtagggcacccagtttcccaggccctgcattcccctccctgaagcaggctggctgacagccccaggcgggcagtgtgaagctggcctattgccccagtcccagcttccggtggacaggccagcaccaagagggtgggcccctcctaggccgggcagcaggtacccaggggcctcaggaagcctcagctcctctcctgcccccacccccaccccaggaacgtcctagagctgattgagttcttcgaggaggaggaccgcttctacctggtgtttgagaagatgcggggaggtacctgggggctccaggctgtgaggagggagggagctgggaggtattacgggatgggggcctagtgccacctgcaggagggggcttgtggggtgagtgtcctgcccaaatggtggctcaggggtgaggcctttgtgctggaggaagccagtgtgggggcgtccccgccaaagtggaggtgggtgctggccttgaggggactttgaggtgacctgcgtgttccccctgtcctgccctgccctgccctgcccaggctccatcctgagccacatccacaagcgccggcacttcaacgagctggaggccagcgtggtggtgcaggacgtggccagcgccttggactttctgcataacaaaggtaggtggtgaccccgcccggagtctcctagggccgcctgccaaggactcctggaagacctccagaccctcaccccgtcgtggttctgtggcttctcccccaggcatcgcccacagggacctaaagccggaaaacatcctctgtgagcaccccaaccaggtaggccagttccggcagggtggccccgcgggaggggtggaccgcgtgggaccccaggctcacggaccttttggcccctcccaggtctcccccgtgaagatctgtgacttcgacctgggcagcggcatcaaactcaacggggactgctcccctatctccaccccggagctgctcactccggtgagggcccgcggggagggct

SEQ ID NO: 33639 - DNA, 1184 bp, Artificial sequence
  DNA replication origin
cagacagaggcactgtgcccattgggtcccctgggccgtccctgcctctgagctgtccctgagggtacatgacagtttggtttcaaggatcaaaatgcaatgtcatatcccagggcccagaggggctctgcgtttggggaacctcagtgcaggcccgtgagagccccctgtgtcactctagccctgggcggctgctggacccagggtgtggccgaagggctgggagcaggagccctgttgaggctctggttgtgaccctgtgaccttgtgggccggttggatcccgtgttccaagaaatcttccaggcttccctcgtgacctggcatccggctcccgggctgggtggggtcccaggagggctggctgcctgggaaagagggccaggtgtgccctggcgagcagggctcgccaggagcctgtgggtcctggtggacggccaggctagagctttcctctgaggagaaggaggaagaagaggggtggccaacctggggaggttactggctaggtgctgggaccacagtggcagcaggcagggacagacacagtacggacggtccctgcctcctgggagcccccaggcaggccaaggcaatggtgcaggagcactaggcccctccggaagcacttccacacagcaggcgttcctctgagcacagccctctcctggtggcccagccttgcttcctgtctttgtttgacagatagggacactgaggctcagggggttaggtagcctgactcatgctgtgtggcctctgggggatcctaactggtgtctcagagccacctccctggtcatcttgccacattgacctggtgtggtcagtgttgggatctgcagagcctgggggacttcctgctggaggtgttgttggccactgacgtccgggagttggtctggccaggtggcagtgggaggaggaggtgtcctgggcgagtcagagaggcgaatcgctgggcctgtgggtctgaggagcgttgtttcgttctatggggactggggtgtgggccctctgccctcggggtcatgctgcgggaagccaccctggggtcacctggtgccgtgaggctgctggctggatgcagagcccccatgctgggacctcagaataggccccttccatgccaggaggggctgcgccccctccctgaagcagcattctagccagccacccaaggg

SEQ ID NO: 33640 - DNA, 2017 bp, Artificial sequence
  DNA replication origin
ccacccatctcctggccttgggtctcccacgggctccactggagtctcacttctgctgaacgaccctcttgttagagccccactcaggttgtctggggcccagagaggggcagtgacttggcccagagcagccagcatcctcactgggactgggacccccgccacctctgtgggcccctcccgcctgggttcacccagacgggtgaagctgagtgagagctcagtggtacaaggaacctgaccgggcctcggttccccagcttcaaaggcccggcccctcgtaaagggccggcagtccctgcgctgggccatttgctctgtggaaacgtacatatgtatgccaccatcttccacgggggctgggcaaagcctactctaatctgcactgttccttgcaccctggtcagggtcttgctcccatggtcctggggctgggtcaagaaatgacccagccccagcctgcccagtgcaacaggcctggatttgaatcctggcccccagggcccaaggcggcttccttagccgggtatcagggcccaccaggggctccctccaggggtgtctggcactgaaatgggagagtgcaggatgtggtctgggcagggcctggcacactcgcgcctgtgggtgcctctcccgtgagcccccaggaccagtacagcactgtgtatactgactcggtaactggtagctgcggggttggggggctggaagcagatgagcctctggtgggtggcgggggcgtaggtgcacagagctggcaggggaaaggtgtgccgggcagctgcgggacatgggcggaggaatgcaggtgtctgggcttgggtaggggcagaaggcaggggtgatggaagcagagcccccaccttcagcaggccccagagcaccaggcactgaattcttaccccgccagccccaggcactgagcgaaagggaggggagcagcttaggggaaggagaggtggttgtgtgccatcttagatgggggaaactgaggcccagggaggactcagctgccctgagatggcccaggaggccgtgggaaagcaggcacagccaccaggctggcagcccgcctagtgactcacctccttcccactgccccgctgcctttgatccccgcgacccgccccagaggtcagccgtccccattctgtggacaagcagacggaggtgcaagacacggcttgggccccacggtgactcaatcctggcatcagaggcagggttcccaagagccagctgcttgtgtctgtcccctccccgcaatgcacccctttcccagaggcccccagggctctgcaggtgggaggaggtcttccccacggccctgtggaggttggggcccatctttctctggggtggggctgtcctgggcactgcagggtgctgagcagcacccctgccccaccccactccgtgccaggagctcccccaaccggtcacaaccacagatgtccccagacatggcccagtgtctcctgggggacagaatcaccccctgggttggcaaattccatggaccccctaagagactctgcgtcccctgatcttgccttgctgaggtgctaggaggcctcacgccttccacatgtggcccacacctgtgatcccagcactttgggaggccaaggcaggaggatcgcttgaggccaggggtttaagaccagcctgggcaacgtagcaagactttatctctacaaaacataaatttaaaaaagagagaaatccacacacacactgagtgtggggcagcgaggaggtgaatcccaggagcttgggggtcccctggtttatgctgtctgccccttcgggagttgatcctggtgggagttgatcctggtgtgtgagcggggacggagttgatttttccgtaatgctcagcgcagggcttgtcagtgtggacgctgcgacactggggcaggataggtctccctgctgcgtgggcagggatggggcctgagtgcctctcctctcctctcccctgcaggggcagaaccccttcgagctggccttc

SEQ ID NO: 33641 - DNA, 1934 bp, Artificial sequence
  DNA replication origin
cgggctgcgcgacgtggggcggcggcggcactgcggccccggcccaagcccgaccccggtgagtgcgaaccccagggcggccccgaggacaccgacccggtagcgggaaacgggccccgcggagccctcgccgcccccgcccggtccgcgctcctggcaggccgggctccgctcaccgccctccctttgtctgctcccgcccgcagggtcccctcctcggccgccccccgcccggccgcccgccctcgggcctccccccgggccctcggtcccctcccccgctggcggggcccggacagaagatggtgcagaagaaaccagccgaacttcagggtttccaccgttcgttcaaggtgaggcccggggtcggtttgggggcgctccgggctggaccaccggaatggccggcgtggggggcgcggggcccgcccctaagatcggctcccggggctcgtgcctggcccccgccctacacccggggctgcccgggccggccgtgcgctgaagcggggtcggtgtgcgaggatgggggttcagcaggccacagtcctctctccagccatggccgccgggtccttcctccaggacccccaagtgaggctgggagcaggagccccctccgggtcagggcaccaggctgtgtgtcccctgcaagcccccgccgggtatgttctggggggtcagcaggctgcagtcctgtcccagtcgctgcatgtggcttatggggggtgtcccctgcaagctccagctggttgtgccctggtggggacgggtcagcgggccacagtcccattcccacctccatgtggcttctggggactttctttcagaatccccaggccgggctggtcaggtgcacccacccccagggggcctgtgccgtgggggaggggatgggatgtcccctcagccctgcacttcgcagacaccccaggcccaagtgctgtttcctgtcggagcgggaagtttctgcgcagcccgggtggtgactgctgttgagtgctggtttcagatgagcaaatcttgggggggaaggggagggcaggtgctgggcaggggccccgcaggacctggcccaggggacgcagtgatgtcagccggcccgccccacccctcaggccggggttatgtaatcgcttcactgggcttccttgggcagggacctgttgcccggtagggaaggcaggactggagagaggaagagagagtgtgagtgtatgtgtgtgtgtttgtgtgtgtgtgtgtctctgtcttgtgtgtacacacaacgcggtgctccagggtgggaggagcaaagagagactgggaagaattcccaggtctgtccagccagtgccccagggcagcactccacccctgccacccctgcccagttttcccctagggcagcaggcctggcaccatcagagtgtcaggggctgggcgggaaagaggaggacctgacagtggtcttctccctcctagggccaggcatgagctgatacagagtcagtgcatggggccagccaggcagctaaagcacacttgaactttctagatggttccagccacctcctgccaaggcctgctgactcgagtcccacagccagacctagaacagtgggaccaggaccgcccacactgcccaggattgtgggccggcctctgtgcatggccagggcagcctggctgggagctgggaaggtgggcgtcttggtggaggagggcctggcaggcagtcctggctgtgaggtgttcctccaggtggccgggaccggttgctctaggaatctccccccacagcccccaccatgcacggctgctccctggattggggccacctctcctgaaatactctccttgcctccagcaggcagcagcccagcagggaggcacgtctgtgggtgccttgggtttctttccgttcgcagatgggaaagtgaggctctgagact

SEQ ID NO: 33642 - DNA, 1196 bp, Artificial sequence
  DNA replication origin
cgggcgggggcggcgagggctccgcggggcccgtttcccgctaccgggtcggtgtcctcggggccgccctggggttcgcactcaccggggtcgggcttgggccggggccgcagtgccgccgccgccccacgtcgcgcagcccggaccccgctccgcggaccgcgcggggaacagcgccgccgccgccgccagcgcggacccctctacctgggccaccgccgctgagaggagccgggcgcgtcgccgccgccgccacctttataggcccggacctgctctggccccgcccccgacgcaggctccgcccggcctcaccccctgcgcacgacgtgggcggagccagaagagggcgctctccgggaacccagtgcggctgcgcgctccggcggtggggcgtgtccgaaacggctagcgcacgcctgcgcagtgcggcgcacgggggtctcggtgcggaacctaggcagcgaccctgcggcgcgcccggagctggcctgtttttgccgcctgaggctcgcggggcccgtgggacctgcgaggccctgggccgtgtcctaccgcctggccccacacagggcaactcccttggcctgtcaacccaggcctagtataccccgactcccttggttcatgccctcgctctagaacctgccatggctccctcttgcagttctccagtgctggctccagcagtccccctcgtgcaccaccagcacgcttggagtcccagccactcccttctagtgctgggggaccagccaccgccacctactttcttcttcccctgggccaccctgcctggggagcactgagctccccgagtttgctttgtggttggcaggaaccagagtagagggtggggaccgaggtctgtgaaggacccttcctctgtcctcgaatagcatttcagggagaactgggacctgagacccactgggaaagagcccaaggggtggatggtcgccaggacaggaagtaaaacacagtcccattttggctggggccccaaaccaggcttagatagaatcagcctgtcctgagctgccagtcccccatcccacagcatcctggttcaaagtgctccccaggccccgggcctggggcacacaaggagtgggggttcccctgctgggtggactgtggtctcctcttctgcaggggtttccagaagcttcgcacagcccatcccaccatccccc

SEQ ID NO: 33643 - DNA, 1138 bp, Artificial sequence
  DNA replication origin
aggaagccaggtgaccggctgagtgctggcagggagtgggtggaggccagggacgctgctcagctccctgcagtgcccagggcggccccaccccagaggatgactgagccttgaacgtccacagggcgatggggaggaacccccggtggagcatccctagagccaggggtcatctgcctgtctctgagcttcctcagttttcccaattgctgcgcgagtttctttttttttgttgagacggagtctcgctctgttgcccaggctggagtgcagtggcgcgatctcagttcactgaaagctctgcctcccgggttcatgccagtctcctgcctcagcctcccgagtagctgggactataggcgcccgccaccacgcccggctgatttttgtatttttagtagagacggggtttcaccgtgttagccaggatggtctcgatctcctgacctcgtgatccgcctgcctcggcctcccaaagtgctgggattacaggcgagagccaccgcgcccggccattttttttgtatttttagtagagacggggtttcaccatgttggtcagactgatctcgaactcctgaccttgtgattggcccgcctcggcctcccatagtgctgggattatagacgtgtggcaccgcgcccggcccgcatgaggctcttgatggctcccacctgctggggctgtgggagaggacaggacctggggcagggcctggctatggtgccgggaacagacctgcccctctggcctggctcccagatcagcctttcctgtctggtgcctgagcttggctggacacagagcccaggcatgggctgagccttggttcaggtctgctcctcatggtcagggtgaatgttgaacccatgtcggtccacactgaaagatggacacagccccacacctgcaccaaggacagtgtgccacagccgcataccacgaaatggtcccacttactctgtggactgagctgagtctcccggaaaaacccatccatgtcctaaccctggtacctgtgaacgagaaactatttgaaaatagggtctttgcagatggaaccaagttaagatgagatcacactgagtgggccctaagccaatgactggcgtccttagaagaagaggagaccgggcg

SEQ ID NO: 33644 - DNA, 1182 bp, Artificial sequence
  DNA replication origin
gcgtctcccaggccctcctcttcactctggtgctcccccagggcaaccctgagctccctcccaggctggctgaccagcactggggtcatggacctgcggtcctggccccaggccctgcctgtcccacccacccacgtccgggccggctagtgcccaccctcactgccccagcccagaccacactgcaggaggatcaaggagacggtcacccggggcacggaccaggcttcctgcctcccaccaggcaggctttttcccccaccaaggcaggtgggggtctccctcccagggctccagctgggggtggaggtgggggcagggggcgaggctggcaggggtggccagcctggtagcgcccccaggggctggcacggcccaaagcagggcagggccaggcacggcccacagcagggcagggccaggcacggcccacacaggcaggtgggcgaccctccccttctccggaggccactggccatcccgcgcccccagcctgggcctgtctgcctgtccagggctggtctagggagaaggtcggctagagaggattctgcctctgttggggaggaaaggagaggagagggtgccaaggccccatccctgttggcatagcccctagcacacagaacaatcccgcccaaacgtccacactgttgaggctgacaaaccccttgtcgattatttggaaaatattgagttttctccctgctcacaccagacatcggataaacgccccatggggcagacagcgtaaaccagggggaaccccactgctgggattcacctcctttctctctccctgctcagggtgtggacttcaatgtgtgcagcctcccaggacctcaccaggtcagagcatcacgggatgcagagtttcttgggagggtccgtgaaatcccctaaaccagggggtctcaccccaggggagatcctgtccccaggggacactgggcaacacgtggggatatctgtggttgtcacgactaaggggagacaacagtctcaaaattctaactcagtcaggcgcggtggctcgtgcctgtaatcccagcactttgggaggccgaggcgggtggatcacaaggtcaggagttcgagacccgcctggccaagatggtgaaaccccgtctctacgaaaaatacaaaaattagccaggcgtggtggcacgtgcctgtagtccc

SEQ ID NO: 33645 - DNA, 811 bp, Artificial sequence
  DNA replication origin
aaaaagaagccacctgctggagatgctgccccccaccacccaccctggccaggtcccaggttatctggaagccattccaagccaccccagggccaggcaagacagtgcggtacagggtggtggccatgccaggaacgcagcagggggagcccactggagagtgggagggatgtcagtgcgttggcggagtgggggtctctgtccttgtgtctgggggcattgggcatttttcagctatggatttggtagtggtgcagccgggtgctgggtgctgggtgctggaggtggggcaggggttgaactgcagtgggagggaaggagagaggagggggaaggggaggaggggaggggaggaagaagaagggaggagggcaggaagggaggggaggaagaaggggggaggaggaggggggaggaggagaggggagggaggggaggggaggagaggaggggaggagaggagagaaggggtggaagggaggagaggaggaaggatgaggaggggaggagggagagaaggaccgagaggggaggaaaggaggggaggaggaaggagagaaggggacgagggaaggagggaggaaggggaggagaggagccagagatcggctccagctgatgctgattcctgtccgcagccacacctcatttcctgtttgtcctccttctggggctagcgtctcccaggccctcctcttcactctggtgctcccccagggcaaccctgagctccctcccaggctggctgaccagcactggggtcatggacctgcggtcctggccccaggccctgcctgtcccacccacccac

SEQ ID NO: 33646 - DNA, 922 bp, Artificial sequence
  DNA replication origin
ggtcaactctcacctgtcccagataatgaggctagctggtgactaggtgaggaggggctggggtgccctgggagaagccaccaggcctagcttgggttgggggggcccacagggtccagggcaggtcctgacccctccttaaaggagccgcagcacctcccagccaggatcgggttcaccttggccccagggccttggctgggccctgccgtgacctcccggaagaggaagccacggccaaaccccaagttaggcctggtgagggctccagggtgggggacccggggggttaggagagagaaagaagccacctgctaggctaggcgcagtggctcacgcctgtaatcccagcactctgggaggctgaggcaggcggatcacctgaggtcgggagttcaagaccagcctgaccaacatggagaaaccccgtctctagtaaaaatacaaaaattagccaggttgatggtgtgtgcctgtaatcccagctacttgggaggctgaggcaggagaatcgcttgagcccgggaggcagaggttatggtgagccgaaatggtgacattgcactctagcctgggcgacaagagcaaaactctgtctcaaaaaataaaaataaaaaaaaaagaagccacctgctggagatgctgccccccaccacccaccctggccaggtcccaggttatctggaagccattccaagccaccccagggccaggcaagacagtgcggtacagggtggtggccatgccaggaacgcagcagggggagcccactggagagtgggagggatgtcagtgcgttggcggagtgggggtctctgtccttgtgtctgggggcattgggcatttttcagctatggatttggtagtggtgcagccgggtgctgggtgctgggtgctggaggtggggcaggggttgaactgc

SEQ ID NO: 33647 - DNA, 1088 bp, Artificial sequence
  DNA replication origin
agcgagactccgtctcaaaacaaacaaacaaacaaacaaaaagcctccagacaatggagccccccataggatcccttgttgcacacatccagccgggccctgtgctgggtggtcgggggtggtcagggtgggctgtgtggccagcctccctggcttgagggagatgggtggagggagaagcccagggctggcaagtcaggacctgcctgggcacctcttctggggctttggggacaccctacatgccacacaggctgaaaatcgccctgcattctgcagaactaaagaaaaaaagcaaaaagaatcactctacagattgaggaagcgctcaaaggctggcaggaggcagacaggttgcccccaaggaagcgggggctgtgcacctttgggcagaggccggccaagcctgctccgagaccaggggcaggacaggtcgcctccagggagctgcaggacccggggcaggctgagcctttgggcctccaccgctggagtctcatggtggggtgggtggtgcggcctccactgtcacaaggcgtctgttgtcccaggaagtaagcaggagtctgtccctgtcctggagggaaggccgtgccacccagtggctgtgggaccctaggaagtagccgtgagggcgggaggtggcgcaggggtctgggtcaccccagggccggcctgcagggaactcgagctcatccctgaaccttctgtgtgctccaggccactctgccagggccctgggaggttgagggaggtgggaccagtggcgggtcagccagagaagaagctaggtttactgggggtctcctataggagaggggcatggggccagcatggcccagacagctgggatctccagtgcgggtcactgggtgctcactgggtgtccatgggggctgtacgtcggggtcaaagccagaaattgggcagagacagctcagccacaggtgagtcctggagcacatcccccgacccaccacaccctcaggtcagtcacccacctgtgtggccagttctggctccattccatcagcacctccctgggcctggcctgctccaagtgcacccaaagcaggttctgggctggg

SEQ ID NO: 33648 - DNA, 1151 bp, Artificial sequence
  DNA replication origin
cttggggactgtgcaggggctgaaccccagggaggtggggcatgcacgctgctcctgatgccactccgtcagagcagcgtggatggccccatggctgccccgggctcctggccagacacccacagcccgggcaggtaggcagccccaggctccaggccacacctgccctgcccactccctgcccccactggaggaccgcgggccctggctgtgtccccaggcaggcctgccgagccactggagtggagtgagtgtgagtcagccggcaagaagggacgcttgcggccacttacatcagatattcctgcctcgtggccccatggccagagctctcagccccgcaggggtcctgaaatgaccctgcccacggcccttcatagcaagggatggcccttgggccgtggttctggtccctggagagccaagcaggtgggaactgtgaggtggtctctcgtgccacccactacacttgcaagtgtgtacaggcgtgcacagcccacccccacctttcactcccacatgggcccatggctgaccctgcaaggacctaggcttggggcctcccccagggacgcctgcctccgcgggcacacagacacacgccccgatctgctcacactcgtacccacaccaagtttttttttttttatgttgtaggggaaaggtctttattgtcaccgccccccgcccccgtagggttgtctgatataatacggacaccaagctaactttgaatggcaaataaacagtgaataactgggcctggcgtggtgatcccagcattttgggaggctgaggcgggagaatcatttgaggccaggagttcaagaccagcctaggcaacatgttgagacccccccatctctaccgaaaataaaattagctgagcgttgctgggcgcggtggctcacgctttgggaggtggaggtgggtgggtcacctgagctcaggagttccagaccagcctggccaacagggcaaaagcccgtctctactaaaaatacaaaaattagcttgtcgtggtggtgcgcgcctgtagtcccaggtcgtcaggaggctgaagcatgaggatctcctgaacctgggaggtggaggttaccgtgagccgagatcgagccactgcactccagcctggcaacagagcgagactc

SEQ ID NO: 33649 - DNA, 1629 bp, Artificial sequence
  DNA replication origin
atttggagtcctactggtccagagcccgggccccgcctccctcgccctctgagcccgggcgccgcgccaggttcgctgacgcaaacgcgttgccccggcaacctctccccgtccccggggcaaaggggccccggcactggagccagtgcgcaggcgcgcggccgccgccggggagggggttcccagggcgcgcggcccggacccccgagtccgtgctctccgaccctcctgtcaccccgggacaccgtgtggggggcgcccagagccccggccgccgggaggaggaggaggcggcgcccggggactggcctagcgcgggtgcggtcggcgggcggggcgggagggcccgacccgtggctctgcggatttcaaaggcgcggggtcacacgcccagcagccgatcagccccggcatttggcgacgcagcaaatccagccctgcggggagggggccctgtccctgggccggccccatgcccaggctgcagggcctcgcccgcccccagccgcatctccctgcccctggcgcctcccaggacctgtgacagtccggggggcttgaccggggctgccctggcttcagccttctcatctgcacagtggaaactcaggaaaacaccgcctgtgtgagcctcctggagctgtgcaatgaatcacacacgtgcagtggcttgaaacgacccacatcgattctctcacggttctggaggtcagaaacccgacatgggggcctcactgggctaacatcaaggtgtgcgcagggctggtccctcctgggggctccaggggagaatccagttcctgcctttcccagcgtttagaggcgcccacatccttcagcttgggccccttcccactcacagccaagagcagcctcttccggtctctgactctcacccggctgcctcctctcatgaggaccctgtgaggacactgggctccccgatcatccagggtgatctcccatctcaaaatcctaacccagtcccacctgcagagtgccttgcgccttggaagtttccctggccatgcccttcccaggatgtgcaccctgaaaaacaccctgaaaaggccttgtggccgggcgcggtggctcacgcctgtaatcccagcactttgggaggctgaggtgggcggattttctgaggtggaagttcaagaccagcctggccaacatggtgaaaccccgtctctactaaatagtaaatacaaaaattagccgggggtggtgacatgcacctgtaatcccagctacttgggaagttgaggcgggacaattgcttgaacctgggaggcggaggttgcagtgagcagagatcctgccactgcactccagactgggcgaaagagcgagactccatctcaaaaaaacacaaaaaaacaacaaaaaaactaaggccttgttgggagacagatcagctgggaccagggcacagggcaccaggctcccagtggttctctgagagtcatctgggtgtcttctgggctccaccccctggtaataggaggaggagaggacgccaggagatcagcggagtgctttgttcacggtcactggggcagggcggtggcctttggccatctcctgggccagccctgccccacacttccttggggactgtgcaggggc

SEQ ID NO: 33650 - DNA, 1878 bp, Artificial sequence
  DNA replication origin
aagccccccggactgtcacaggtcctgggaggcgccaggggcagggagatgcggctgggggcgggcgaggccctgcagcctgggcatggggccggcccagggacagggccccctccccgcagggctggatttgctgcgtcgccaaatgccggggctgatcggctgctgggcgtgtgaccccgcgcctttgaaatccgcagagccacgggtcgggccctcccgccccgcccgccgaccgcacccgcgctaggccagtccccgggcgccgcctcctcctcctcccggcggccggggctctgggcgccccccacacggtgtcccggggtgacaggagggtcggagagcacggactcgggggtccgggccgcgcgccctgggaaccccctccccggcggcggccgcgcgcctgcgcactggctccagtgccggggcccctttgccccggggacggggagaggttgccggggcaacgcgtttgcgtcagcgaacctggcgcggcgcccgggctcagagggcgagggaggcggggcccgggctctggaccagtaggactccaaatatttagtgtgggggcgtggccagagatcacgctccagccaatggaattgttgttgtcggggccgcgcgatcagggccttgtgcctcttaaagggaccgtgcgcattactccacacttcgctcgccgctgtgttctgggcggaggcctagggctcagggttgggggtcagtgggcctggctgggggcagaggtaagggagggcgcagactcggagttggaggtcagcgggccgggcccagccccacgtcctcctgttttgcccgtttgtgtgactctgggtccggtctcggtctcccgagcttcagtttccgcaggtgcacagagctggagttgcggagttgtgggcgcgatgcattcacggctactcctcccctggcgggcgcccctgcatttatgcagcgcccacgttttgcactagcaccctatgcaacgaccggtctctctgcaggtcacagaggagctggggggggttgggggaccccagaaggtgaccaggcctggatgaccaggactgaaccgcaggccttggccctgcaccaacacctcttcctctgtggccaggaaacattccttccaaggacccctactggagggggtgggagggttggtcccccaggtcctccaggtcccgggcgctgtgcaactgagtgaaagcacagaggcaggtggtcagaatctgacccccagcggccacagccacaacccctcaccccaggcaggcctcactctccactgtagccctgatcaatgaatcacaagtgaggggcaggaaacgagattgaaggacccacggtgtagacagcaggggaggtgaccccaccaacccacccatctggcaccctctacgtcccaagtctggagtgtcccagtggcagccctcagggcatggataggctggaggcccggcacccctgccgaggctagcctagaagaatgggggtggcccctttggccatgggaagtggtacattcacagatcgcgggaatgacatgggcatctttgggggctgtgattcagccgaccacagagtgtctcaggcttcccccaaggatcccatcttcaccatgtaccgccctcctgctgggaccttggggtctcctgtctgcggccagcccaggaccctacgagttcctcattcctgcttctctcaggagagaccttttaaaggtctgcatttctctttgacttttttttccgcaatagttttcttcattatagaaatacacacgcagcctcactctgtggcccaggctggagtggagtggcacgatctcagctcactgcaatctctctccgggttcaggcagtcttgtgcttc

SEQ ID NO: 33651 - DNA, 2279 bp, Artificial sequence
  DNA replication origin
gagtcacgggctggcctggactccaccccttcggtcttttccctctgatctgttccttggcacagggtaaaaacttttgtgcttcattttcttttcttttctttttttttttttttgagacagcgtcttgctctgtcacacaggctggagtgcagtggtgccatctcggctcactgcaacctctgccgccagggttcaggcaattctcctgcctcagcctcccaagtagctgggatttaaaaaaaaaaaaaaaagaaagaaagaaagaaagaaagaaagaaaagctgagtagctgtctaaaaaaaaaaaaaaagaaagaaaaataaaaaagattttctcagccccaaagcctgaggctcacccctaggacagggcaccctgttaacactggcaggaaaacgacaccatttattccgacgtctgcgtctgtagttttattccgtatctggctgggggagggtggtctccgaggtggatggagtgagggtggaggggacagagatggtccctgctcccacctccccgagcccacctgggaagctgcgtggccgggctgctggagacatcccgagccctgggggagacagaggtgtgggtgtttgggcttcatcttccaggtacaaggagatacatttcatcaagcagttcctgatttcatggagttctttgagggctcggctgggaggtccctctccggggggctccaagtgccggacctggtggtttctggaaggatcaaggacaagtcctgggagtttcaggcttcggcagtaacagtgtgttaattgcacttgttcgattttctggcagaagccaggagagacggggacagcgtgcttctcttcggtgaccatcccaggcgcccagaggtgaccagacttctgtgtggtctgggacagtgcagggctcaggcaggaaggaccactgtggtgaaaggccactgacaattctggtgaggagtagggtggcaggggttcagccagggagaggaggtggctgccttttctcagggccctgctctcaccttccaaaggtctagggtacacagaactcatggattttggtctcgcagccccaggggccacacagaaaaaggggttcaactggaagtttgcagcatctgggaaaggccaattctggcagaactggaagattccagaccaggggagaggcgtccagggagagaagagtcctgcttgggttgatcataagcaaagtggacatcgttccgaagaggcagagagctcactatgttatcgataaaaaaattcttggccgggcacagtggctcacgcctgtaatcccagcactttgggaggctgaggctggtggatcacaaggtcaggagatcaagaccatcctggctaacacggtgaaaccctgtctctactaaaatacaaaaaaattagccgggtgtgacggtgggtgcctgtagtcccagctgctggggaggctgaggcaggagaatggcgtgaatctgggaggcggagcttgcagtgagccgagatcccaccactgcactccagcctggttaggccgggtgcagtagctcatgcctgtaatcccagcacttttggaggccaaggtaggcggatcacctgaagtcaggagtttgagaccagcctggccaacatggtgaaatcttgtctctactaaaactacaataatttcctgggcgtggtggcgcacacctgtaatcccagctacttgggaggctgaagcaggagaatcacttgaacccaggaggtggaggatgcagtgagccgagattgtgccactggactccagtctgggcgacagtgggagactccgttcaaaaaaaataaaaatctcaagatggttgtaaatgtgactataaaaatcaaaccctttatgatacacaaaggggcccttaggaaatgagtcagaagccggggtgcaggacgtggggtcccaggagtccaggaagccctggatacagtcagctgaatgtttcggaagaacggaagaagcagagtgcattgaggaagagagagggctgggtgcggtggctcacccctgtgattccagcactttgggaggccgaggatggaggatcactggaggccaggagttcagcgagacccctgtctctagtatgaccaaaaaaaaaaaaatctgtagaaaaatggaagagattggggagggaggaaagaggctgcctgggtccaggttgtgcctctgtgtgaagagacaccagcggctgccagtggggagtgcggagtaaaggcctgcgggaggagatgtccgctctcaggggc

SEQ ID NO: 33652 - DNA, 1914 bp, Artificial sequence
  DNA replication origin
ctctgtcacccaggctggagtgcagtggtgcgatctcggctcactgcaacctccgcctcccgagttcaagtgattctcctgcctcagcctcccaagtagctgggattacaggcacgcgccaccacgtccagctaattttttgtgtttttaggagagagggggtttcaccgtgttagccaggattgtctcgatggatctcctgaccatgtggtttgcccatctcagcctctcaaagtgctgggattacaggcgggagccactgtgcctggcctttttttttttttttttttttttggagatggagtctgcctccctcacccaggctggagtgcagtggcgccatcttggcttactgcaacccccaccttccgggttcaagcagttctcctgcctcagtctcctgagtagctgggattacaggcacgtgccaccacaccccgctaatttttgtatttttagtagagaccaggttttgccatgttggccaggctggtctcaaactcctgaactcaggtgatctccctgtctcggcctcccaaagtgctggaatgacagacaggagccaccgcacctgcctagattccacccgacttctgtagccagccgggtacctctgcatctgccctagcctgtctgctttccacgttaccaggttttatcgggagacgaacccagggaccagattcctcggtgtggggtccacatccctgaagccaatgttgcttcttgaaattggggcccacaattgtgtctcggtgatggggaccagcagtggagtgggtgcccgtgattcagggcctggcactggaacctgcccagaggctgcattgttccccaggctgctgggcgctgtatggatgtggggatcctgatgtgagagcgggaccccaccagcctccgagtagctgggaccacagccagcacgcccggctgattttttattgtgtgtagagatggggtctcactatgatgcccaggctggtctgaactcatggatgcaagcaatcctcccaccttggcctcccaaagtattcagatgacaggtgggagccaccactctcttacaactttaaaaaatggttaaaaatggacggacgaggtggctcccaccagtaatcccagccctttgggaggccaaagagggagaatcactcgagctcagaagtttgagaacagcctggacaacatagtgagacctcatctctacaaaaaatgaaaaaaatgagccaggcacagtggtgcgtgcctgtggtcctagctactcagggggctgagacaggagaattgcttgtgcctgggaggttgaggctgcagtaagccgagatcacgccactgtagtccagcctgggtgacagccagtaacctgtctcaaaaaaaaaaaaaaagaaaagaaaagattaaggcccggcgtggtggctcacgcctgtaatcccagcactttggaatgccaagacgggcagctcatgaggtcaggagttcaagaccagcctggccaacatggtgaaaccccatcgctactaaaaatacaaaaaattagctgggcatggtggcacgcgcctgtaattccagctactcgggaggctgaggcagaagaatcacttgaacccaggaggcagaggttgcagtgagctgagatcgcgccattgcactccagcctgggtgacagagcaagactctgtctcaggggaaaaaaaaaaattagccaggcatggtggtgggcacttgtgatcccagctactcaggaggctgaggcaggagaatcgtttgaacccaggaggtggaggttgcagtgagccaagattgcgccacagctctccagcctgaatgacagagtgaaactccgtctcaaaaaaaaaaaaagactaaaaacatcttcacataacttcctcatttttgtgcatcccctttcaggct

SEQ ID NO: 33653 - DNA, 1983 bp, Artificial sequence
  DNA replication origin
gcccacgacccgcccctcagaagactccgccactgggtgggccccgccccaaggccgcgccctacgcatgcgccaatggcccgtgcctgtgccaatggccggtgcccgctcctcggccggctcccgctgaggccccgccccgtgtcgcagccacggtgcaggctccgcccacaggccgcggccccggttgctaggcaacggagacctccgcccggcccggctcagggcatcccagggctgctgcccggaacttggctccgtgcgccttcgccgcccgggccccttaaagcccgcgggaccgagtctgggagacccctgcacgccgcttctgcgcggagccccgggccctttaaggaaagtaggtccggtccgcgggtgcggtcgggcatgcgtgtggggcgttcccgcggccgtgtccctccgcggcggctgcgaggcggtgcggcggctgaggcggccgaggcggccagttgggtaccgggaggggcgaaggcgggcggcagaggcgatcaggtgggtgtccgggaggggcgaaggcgggcggcagaggcggccaggtgggtgcccgggaggggtgaacttaggcggcgaggagaccgagttctcaggaagggcgaaccctggcggcggggaagctggatccctcagacgggcgaacttaggctacggggaggccgagccttcaggaagggcgaggccgggcgcggtggctcacgcctgtaatcccagcactttgggaggccgacgcgggtggatcacctgaggtcgggagttcgagaccagtctggccaacatggtgaaaccccgtctgtaccaaaaatacaaaattagccggacgaggtggcgcgcacctgtaatcccagctgctgaggaggctgaggcaggagaatcacttgaacccaggaggcagaggttgcagtgagccgagatcacatcactgcactccagcctgggcaaccagagcgggggaaaaaaaaaaaagaacaaaagaaaaaagaaaaaaggaagggcgaactcaggcggcagggaagccggatccttcaggaggggtgaacttaggcggcgaggaggccgatcccccaggaggggcgaacgcgggcggcggggagaccgattaccccggagggggatacagggtgcggggtcgagctgcgggggtgaactcctggccctgcccgctgccctcccgcaggaccccgcacctcccggtgtggattaaaattctgcagggcttcaggatccccaagccaacgcggcggtcgggccctttcgaataggcccttcttgctcggggtccccaaagtcgctggcagggcccccccaccccggaaggaggcgcccgccagggacaagctgcccctcctccctgcagcgaagaggggctagaaagtgtaagcgagggtgcattttattaggagtcactgagaggggaggggaaattggaaaatgcagtcacagagcagaaaatcagtgctccaagccgcagctcatcctgggggtaagatttccagtctttgtacacactgtttttttgtttgtttgtttgtttgtttgtttgtttttgagacggagtttggagtctcactcacgcccaggctggagagcagtggcgcgatctctgctcactgcaaactctgcctcccgggtgcaagtgatcctcctgcctcagcctcctgagtagctgggattacaggcgccaaccaccacacccagttaatttttgtacttttagtagagacggagtttcgccatgttggccaggctggtcttgagctcctgacctcaggtgatccgcccgcctcggcctcccaaagtgctgggattacaggcgtgagccaccgcgcccggcccacactgcttttttcgcacttgcttttttcttcgttttctccttaacagtttatacgggtttaattgacatgcaataaactgcccgtattcaaagcagatggttggataaatgttgacattgtgttttgcgtg

SEQ ID NO: 33654 - DNA, 2650 bp, Artificial sequence
  DNA replication origin
tgcaaagagaaacatcagggactttaatcacatcccgcagctctgcggacctgcccaggcgctgatgctgcgcacagcccacccccattccctccctcccgccctcctggccctggccagctcagctctgtccggggtcggagagggggtcctgaggcagcagcagcccagctccagagtgacaggcaggggctgtccagctgagtctccgcccccacgttgccctggggcaggcccagctgctgtcagtgctgcttgagacactcagcagcatcttccaaggtcaggttggccaagtgtgggggctccagacaccttaaggctggcgataccaggctgcggggagacgaggctgcctcagctctccatgtcccccaccccctgcctccctccctgggggccccaggcctctcctcccagctgggacgtgtggtcctatgtgtggccacatccacgacaccctcgtgcctgggatgtcagcagggtgtgcaggccgcggcacgctggtgttggcttacgagcaccccttctcccgaggcctcccttctctgggtcactcacaaggccggggtggctctgtgtgtcccaggccaggagaaggcagaggagcgtggtctgttcatgaaaccaccacatgggtgtggttgcagaggtgacatccagcaggtgtcccaggtatagggagagccccacctgcagtgcccccactgatctagaggaccccctagcccccctcctctctccctttaccccctccccctgaagtccaggtcagggcggccttacctcatgctcgtgtcctgtctgaaaggcaatgtggggcagtcagcccctccatggggcacccctaaccatcgtagggaaccctcccaggctctgaccacagacctgggatggggtggaaccagaccctatggggaccctttaggaaagatgcccgcctccagctgagggtcggagacctttgagggagaaaaggactgcagccgcctcctgcgcagagctgggttgaggttccacctcctcgggagcccctctaggacgtgggagctgagggagccagcctgtgccccacacatactcacccacgaggtgctcacatacacacactgcctgtgttggtttgaggaggggacttacttgtgccagttatttctacaaagacagtgggtttggactcaggaggccgagtggccgtggccagtgttccctcccaggcccaggtgagcttgctgccacccaaagaccccactcacatgtagttcaggaggccctggacagctgacttccactgcgccgaggacctgtgggacacaggcttggaagtggtgcgcccctgaacccacggccccgccctacccgatgacagccaggtggaaggcggggagccccctccaaggagagcctgggaccccagggacagtagggccctggcacgggtgggtgtgatgcctgagccctactcgcagttatagccaaagcaggcgacgtgcgagtctgtgcagttgttgcaggagatggtctcgtactggaagatgcctgaaacacgtacaagagccgccagggctcccctcagcctccagggccccgagctgccaccggcacgcccctcagcctggacggagccttgcttaccacagcggtgctgacagtcgatgcggcctgtgggagggcaggacagcgccatcttaccaggcccagccttgtccccagtcctgcctcctcccaaccctccaaagcctcagggcctgtccctcggcactggggcccaggctcacctggttttcatgtatgtgtgtccatggcccggagggaaggggtccccaggttgacccccagcgtgagatggagcaaacttcaggggagggcggtggcaacactcccagcgcctctgggggctacttaggggaggtccccgcggggtgatggcattgatccttcaggtgctaggctgggtccctccctggagagctgccctcctccccagctgcctggtgccaggtgccctgttcacatcactccagcctcagccaagccccgtgggtctccgaggctctgggcaacacctccctcctctgaagccttatttgctcactttcgatgatggcgttctggatgaggtgcacctgctcccggaagatgtttcgcagctcgttggggaaataccctgagtcgtcgaggcaggagaaggtcaggctcaggcggtgggcggggtgtcccggggtgggggggccccgcctcggtttcgcgccccttaccggggaagtacatcttcccctggtacagctgatccatcatctggtacactgctgtcgccacttggtccagcttctcccgggctgcgggcaggaggagaagccaggtgaccggcctgccccggggtctcgctggcggggtagtcgggactgggctgggctccggcactcactgatcttggcggggatggccaggtgcagctccttcatcgtgtcgtcgctccagtcggtgagcagcgcccctgacacggggatgtcgcccacccaccaggacttgaagttcacatggtggcggtagaaggagaacttcttggagaagttgctgtggcagtgcagacagccgtgggccagcgccgccgtcaggcacaccaggcacagcagcagggccatgcccg

SEQ ID NO: 33655 - DNA, 1557 bp, Artificial sequence
  DNA replication origin
ggccttgtgagtgacccagagaagggaggcctcgggagaaggggtgctcgtaagccaacaccagcgtgccgcggcctgcacaccctgctgacatcccaggcacgagggtgtcgtggatgtggccacacataggaccacacgtcccagctgggaggagaggcctggggcccccagggagggaggcagggggtgggggacatggagagctgaggcagcctcgtctccccgcagcctggtatcgccagccttaaggtgtctggagcccccacacttggccaacctgaccttggaagatgctgctgagtgtctcaagcagcactgacagcagctgggcctgccccagggcaacgtgggggcggagactcagctggacagcccctgcctgtcactctggagctgggctgctgctgcctcaggaccccctctccgaccccggacagagctgagctggccagggccaggagggcgggagggagggaatgggggtgggctgtgcgcagcatcagcgcctgggcaggtccgcagagctgcgggatgtgattaaagtccctgatgtttctctttgcagaagagttcttgttggggcagggggaagcctctaggggctggaggtgggcttctggggaggcctaaaggtcccagacagagcagggcaggtcctggccttgggtccacagccatgagggaccgacttggagccacactcacagggcctcagggagtgtccccggactcctaggtgtggggccgtggcccacctgagcacacatgggtaggctcacacaagcccacagagcacctgggttcttccacccaaagcgaggccacagtgtggttgagaccagggccagcactagtgcgtttaggtgttgcagtcacttacgtcagacccgagccaaggaacgcaggaactatgggctgtctcatctgtggcagtgacaggcgtggcatcatggccagagtcggggccacgacggcctgactctggctgatggggcctgacacacaggagggagggagtcgtgttccatctgtgcaggggcgcagctccaagtcccattctcactcgggcgacctcagcccggcagtctccttgcttcctcgagcgtccctttgctccggcattggggcggctgcaggacaccagcaagaacatcctcgagcacactgttgctgccaccatgggtcccacacactgtcttgtggccgcctcaggctcccgtcacgggaggggtgcacgggcacatttgctgaggtcaggaacggcgtgtgggaaggtcaccgagtgcctcccaggctccctgggacatgggagccacacgcatgttgggggagaatgtggtagtggccactggggacagtgtcaggagtgatggcgctgggtcctggctgtgaaggatgctgctttcgaggccggcaagcgtgtttaggtaacggcaaagaggctcgcggcaggtgctttcaaggcatggttttctagaaaggatgctggtgtgggccggggctggggtcccgtctgtgctgctctgagccccctgacatccaacgcccgccacc

SEQ ID NO: 33656 - DNA, 1228 bp, Artificial sequence
  DNA replication origin
gcccacacagggagggtcttatttttcaggtctgaaattcccactgggcccttcttgtatcttccatgtctttgctgatgccctggtgatctgttggagcattttcctaacagctactttaaagcttaggccagctgggcatggtggtgtgtgactgtggtcccagctacttgggaggctgaggcaggaggatcgcttgagccctggaggtcaagatcagcctgggaacatggcaagaccccaggtctacaaaaaattaaaaaaattagccagtactaagaaattagtacagtgagcctgtagtccctgctacttgggaggctggggtgggaggatctcttgagcccaggagtttaaggctacggtgagccctgattgtgccactgtactctagcctgggcaacagagtgagactccaaaaaaaaaaaaaaaaaaaaaaacttgtgtcagagagtcctagtgtccgtccaccttggtacgctgatggccttggtgttggggtctgcacgttggggtcttcgtgttggtttctgccaatggccttggcattggtgtcttggcgttggggtctgggtgttggtgtcttggcattggggtctgggcattggtgtcttggtgttggggtctgggcattggtgtcttggcgttggggtctgggtgttggcatcttggagttggtgcctcggcattggggtctgggtgttggcgtcttggagttggtgccttggcgttggggtctgggtgttggcgtctcagtgttgcggtctcggcattggggtctgggtgttggggtctgcgtgttggtgtcttggcgttggggtctgggtgttggcgtcttggagttggtgcctcggtgttggggtctgggtttcggcatctcggtgttggagtctcagtgttggtgtctcggtgttgcggtctcagcgttggtgtctcggtgttggagtctgagtgttggtgtcttggcgttggggtctgagtgttggcgtcttggagttggtgcctcggcgttggggtctgggtgttggtgtcttggtgttggtgtctgctcacggccttggtgttggggtcttgagcgtggggtcttggcattggtgcttcagcattagggtctgggtgttagtgtcttggtgtttggtctgctgatggccttggcattggtgccttggtgttggcatctgggtgatgtgatcttggcattggggtctaccgacggccttgccattag

SEQ ID NO: 33657 - DNA, 1058 bp, Artificial sequence
  DNA replication origin
ctccacatctctgccttgtttgtgttacgggctgttgacggcctgtggtttcttctacttcgtgtctcagcccctggagaccgctcagggaatgggaagggcccagagtcaccttgttggtgacgagcccaggcctcctaggtcctcacctgctagagaggagccccgggattggcatcctgggggctcacagtgtttcctgtcctcaggcatctgcaggaaccacaccacactttggaggccatgctgcggcccagagtcaccacgctgccaggccacatccaggccgtgtatgtgcagaacgtggtcaagctctacgcctccatcctgcagcagaaggagcaggccggggaggcagagggcgctcaggccgtcacccagctcatggtggaccggctgccccagtttgtgcagagcgcagacctggaggtgcaggagcgggtaagatccaacactccgtgttgggccgagcctcagggagccctcagtgcctttctgtccagtggcggccaggtcgacggggcctcgcttcctcttccgaagccactcactgagattcttttgttgccacttgtgccagctggggtttggggttagtcagtgggacctggaggtcagcaggacgggggatccgtcagtaggactggggcaggtctctggggtgctgggtatgtgagggtgctgctcctggccacaggaagaggttgtttcacatgcggcgagacagcaggtgtgagagcctggggctggcagtggctctttctggtggctgcaggtgacgtgggttctaggttgagcagactgtacacctgtgccaggcggtgcccaccacttcccaggtgtctgtttttctgcttgttttttgttttgttttgatttttcgagatggagtttcactcctttgcccaggctggagtcaagtggtgcgatctcagctcatgacaacctccatcccctgggttcaagggattcttctgcctcagcctccctagtagctgggattataggtacccgccaccacgcccggctaatttttgtatttttagtaaagacggagt

SEQ ID NO: 33658 - DNA, 1224 bp, Artificial sequence
  DNA replication origin
tgggttcagctgtgtgccctgtggctggggtggccctggcttaggttgtggcatctgtgcctcatgcccagccacccttagctgtccgtgagctggtttgggctagtcgggtgaacagtgagtactgggtacaggtgagaccctgccttgggccaagggtatctgctgctgctgctggaaagtcttctctgcgttcttccctgcactggctgggtgggaagaggagagctgacagcagctactacaacgtggtagtaggtaggggaggccttcctgagggagccggcatgggggcagcctgcaccccggctcccagggagggggctctgctagggcgacatccctcgtggtgagctccagctgggatacttgctctgtccacccccaggttgccaaggccaggcagcctcccgaggtggagacccggcccggagagccgtgggccctgcctgcaccctgctgcctgtgtccgtcccagtgacccggctctggcctctctctgcagtgaagtacctggggctgctggcaatgtccaagatcctgaagacccaccccaagtccgtgcagtcccacaaggacctcatcctgcagtgcctggacgacaaggacgagtccatccggctgcgggccctggacctgctctatgggatggtgcgtgccctctgtccgccgcccgcccgcctggccttagttctctaagggacattaagtgtcaggtgcagagccacgtggaatgcatggagtcccctcacactcggccatcagttagtgtggtggggcagggcagaggggcgccagtcctggtccatgcctgtcttccagggcctgtgtggagggggcggggccgagcctgcagaacagactgtgctgggccagttgttgctccctggctggggtcgtgtgcctctaacccagcccacatcgcaggggcctgctgcctccctggcatcgatctgtgaatccgggtccgcctgtgtcccgtggattctgtctcaggagcaggtgttgggtgtctcaccaagcaggccccaggctgggtccgctctcaccactgtctgtacacttttgcccaggtgtccaagaagaacctgatggagatcgtgaagaagctgatgacccacgtagacaaggcagagggtaccacctaccgtgacgagctgctcaccaagatcattgacatctgcagccagtccaactaccagtacatcaccaacttcgagtggt

SEQ ID NO: 33659 - DNA, 1805 bp, Artificial sequence
  DNA replication origin
gcgggggcgggccggctccacggggtgcagtgttggagcggcgggggcgggccggctccacggggtgcagtgtcggagcggcgggggcgggccggctccacggggtgcagtgtcggagctgtggggcgggccggctccacggggtgcagtgtcggagcggcgggggcgggccggctccacggggtgcagtgtcggagctgtggggcgggccggctccacggggtgcagtgtcggagcggcgggggcgggccggctccacggggtgcagtgtcggagctgtggggcgggccggctccacggggtgcagtgtcggagcggcgggggcgggccggctccacggggtgcagtgtcggagcggcgggggcgggccggctccacggggtgcagtgtcggagctgtggggcgggccggctccacggggtgcagtgtcggagctgtggggcgggccggctccacggggtgcagtgtcggagcggcgggggcgggccggctccacggggtgcagtgctggagtggctgcaagcccggccccagtgcggtacagcgggggctgggcgtgaagcagctgaaagatgactgtccgtcctagactggaagcctgtagtggcattcccggccactagactcttctccatgctgcttagagacgtttggggagtttgggttttctttgtgggtctccgcactgcaaggttgtggaatgggatcctatgttaggagccttttcaggccaggctgcctttggttgctagaaggggacactttaattcctcagaccaagtgctgaggcggagccaggacccctccccggcccccactgcagggaaggggaggggtgcagtgggccgcaggcagaggcgtcatcgccatgactttcagatgcagtcatgtgtcggcaacaaggacacattcacagaagggtgtcattagtacatttcaccatgtgagcagtgtagcatacgcgcacacggacttcactgctgaagctcgccacactcctaggctatggcgcgtggccattctcctggctgcggccctacgctgcaggtgactgtaaagctgtaagcagctgcgactccatggtgattatctgtgtgtctgaacacatcgaaacaccgaaaagggctgggagctgtggctcacgcctgtgatcccagcgctttgggaggccaaggcgagtagatcacttgaggtcaggagttcaagaccagtctaggcaacatggtgaaaccccgtctctacctaaaaaatacaaaaattagccgggcgtggtggtgcacgcttgcaatcccagctgcacgggaggctgaggcaggagaaccgcttgaacctgagaggcggaggtcgcagtgagccgaggccgcgccattgcactccggcctgggcaacagagcgagactccgtctcagaaaagacaaaaaacaaaacaaaaaaaactctagaaaagatgcagtaggaaggcggtattgccatctcacaggccgccgggggtgcgtggtccgtccctgcgtggatgctgtcacgggcctgcagttgcagagggattgctcacctgccctttctgggaagatgagacgatgaccagccgagcaccacaggccttggagagcaaggcacgggctccctcctggggcacactccctgagccgtggggcggaggccgtctccagctgagctgccggcactgggtcactgcatctgacgaggcccccagtcctcatgccgcttccctgtgttcctttccttagcacgtctgccatgtctctcctctatgaatgtgtgaacaccgtgattgcaggtgagaa

SEQ ID NO: 33660 - DNA, 4848 bp, Artificial sequence
  DNA replication origin
aactacaagtgtgcaccaccgtgtccgactaattttttttattttaggagagacagggtttcaccatgttggtcaggatggtctcgatctcctgacctcgtgatcttcccgcctcagactcccaaagtgctgggattacaggcgtgagccaccgcgcacggccactgtgtccttttaaaagaaccagttggccccgcactgtggctcacgcctgtaatcccagcactttgggaggccatggcgggcggatcatgagatcaagagttcaagaccagcctggccaacatggtaaaaccccatctgtactaaaaatacaaaaattagccaggcgtggtgacacgcacctgtaatcccagctacttgggaggctgaggcagagaattgcttgaacttgggaggtggaggttgcagtgagctgagatcgcaccactgcattccagcctgggggacagagtgagactcgtctcaaaaaaaaaaaagctggccttgtcatattttgaccacagaatattaaccctgaaaacggatcttggtagatgcatatatagatgaagtctcgggagtttccttaagaagatctctccccaagagcaggtttgtgatatcaagagaggatttatttccccaagtgctgacacaggagctggggcagattccgtgttttagtgagagctgcgggagtgaagagctggggcagagttcatgggagggcgtgggcagctgccagctgaactttgagagggacccatgggagctgttcctgggcccttcccctcagttgttgcggaaagggaccccaaatgggagcagggtctctgaggaccccatcctgtggggctttcctgcccattctgtgccaggcccagcaccgccgtctctgcaagctgggagctgccagtgatacgtgagggaagccctggttttaggcctggaacgctctgctcttgcacccggggtggcccttccccacacttggagtgacttgtgacaggcgcctctgtcccaggaggtgccaggaaactcggttgattcccacgcagagtgcttcagcctgtgcctcagacctctctgtccccagccctgcccatccaggaggagccaagaaacttggttgattcccacccacagagcgtttcagcctgtgcctcagacctcactgttcccagccgcgcccatcccggctcctctcttggtgacagagtctcccatgggctgtaaattcttcctccttgtccgagttcagcttcagacccctcagcagcaggggtgctaaggcacagctgcaccccaagaggatatgccgagtcctggggcatcctgggagaatttcgctcctgctgctcctggtgacccaggcgtcggatgtgccacccagggcatcctggccacggcccctttctctcactttccaggacttgagcagccccagccagtacgacacaggtgttgcactgacgggtctgtcctgcttcgtcaccccagaccttgccagagacctggcaaatgacatcatgacactggtgagtttgtaagcctgcccaccacccctgcatgtctgctctgggaaaaactcggtcaaagtggcatgcctgggaagcttggctatgcggaaaccggccggggtccccggtgcgtggcctgcctgaaatgggaaccaaatcactgtcagctggtggagcggctcttgggccgctttggttcctgcgtgtcttaagttgatatttgaaatcatcttgccgagaggagcaacagggtgtccctgacaggccaggcacggtgggggatgtttgccctgaggtctgacagtggctcctgtctgagctgccagtgggcttctgtgtggtcctctttcctccatccctggccacagcttgactcctccttgccactctgcttgtcaaaggctacgcccccggctgtgacagtctaaaacctgggaagcccctggaaattttggccccagaaacatctgttttgtgcctgacttaacctccagctcatgaggggacctttgttccttttcatttaaaacacagtagccagattaacagtgtggagcgggcatgctttcctccctgggaagcactgtcctcacatggctgcctgtccgcccggaggtgtctagatcgtggccgatgggcgctgtccccgcgtggctgcctgtccgcccggaggtgtctagatcgtggccgatgggcgcggtccccgtgtggctgcctgtccgcccggaggtgtctagatcgtggccgatgggcgcggtccccgcgtggctgcctgtccgcccggaggtgtctagatcgtggccgatgggcgcagtccccgcgtggctgcctgtccgcctggaggtgtctagatcgtggccgatgggcgctgtccccgcgtggctgcctgtccacctggtgtctagatcgtggccgatgggcgctgtccccgcgtggctgcctgtccaccgggtgcctagatcgtggccgatgggccctgtcccctcgtggctgcctgtccaccgggtgtctagatcgtggccgatgggccctgtcccctcgtggctgcctgtccacccggtgtctagatcgtggccgatgggcgctgtccccgcgtggctgcctgtccacctggtgtctagatcgtggccgatgggcactgtccccacgtggctgcctgtccacctggtgtctagatcgtggccgatgggcgccgtccccatgtggctgcctgtccacctggaggtgtctagatcgtggctgatggtcttggagattgtcagcacagcctgctaagcttctagatcagggatcagcaggctgcggcacagggccaaatccagccggctgcaccttcttttcacgtgttgtgttgtctctggtggccttggttgtgaaggcacagctgtgtggtcatgacagaggctgtctggcccatgaagctgaaaacactgactgctggccttcacagagtgccggctcctctagagtaaagcagtggggagcccacgagagggtggatgtcagtgccccatcatggattggctctgtcaggaccaggcagttcgaggcgactccctgggcctgttagatgggagggctcccgctggggaatttgagcagtcgcagggcacagccgtgaggagctgggctgtaggctgtgttcccagcacaccctcgttccctgtgtgactttcctctccagccttcctcccactgtgggacccaggaccctggggcaggaaggccacaagggaagagggctctctctggagggcaggcctgagtcaggggcacagtgaggctggcttccatgccatccaagatgctggtctgtggcccctgggactggtgtgcagccacagcgtcgggctggagggcatctcctctctgtggaggaggcggctgggaggggcgagagcagggatgaggcgcagaaagcccgcgcaggctgaagcccgctgccccgcagatgtcacacaccaagccctacatcaggaagaaggctgtgctgatcatgtacaaggtgttcctgaagtaccccgagtcgctgcgccctgcctttccccggctgaaggagaagctggaggaccccgaccccggtttgtggatttgagttaagcctcagggttgagggtgggggctcagccggtgccctgggaagaggtggtggcgtgttttggggggtgctgcggggagtggtgaagggctcagtccaggaacatgcctgttggaggtggctgggcctccccttgctggggcagccaggagggaggtgctggtggtgggggcagtaagatccaatgtggcagctggcggtgagtctggcgtgtccctgagcagaggtgtacccacccccgccagcccctcttaggaccagtgccaccaggaggcaccttccacagggcaggggatggtctagaccatatgtcccgtgcaggagctgcctccacctagtgtagctgttgtgtatttgtggtgtggtgactgcgggacgcggctgcagattcagtttcactgagtttccctgggctggtgtgtgaagcctctggcgtgtggcaggcgtgggtcggtggaccccaaagccagcccacaggaatcccaaggccctgtgtgcaggaggggagaccccagccctaagcccgggacccgatgggcgagcttctccctggagtggtgggcatggatgcagcaggaagactccctgagccccgatggctgggcagctgtttctggagccctcatgctgaaacccccactcagagggccgctgtcaggctgtcctgagcttggtgacgcttgtgcgcacttgttcctggcaacagtgccgagcaatgctttctcagcgccaggagctggctgctgtggcctgttccctggaggatcaggtctgtggctgctgtccctgtcaccaggaggaggtggcagagccagggccatgttcagtgggagctgctgcaggccccagaacttcctcgcgggccaggaagacagtaggatggttttctaggtggaaggacaggcatgctgatgagaaccccttgttccccaggggttcagtcggctgccgtcaatgtcatctgcgagctggccagacgcaaccctaagaactacctgtccctggccccgctctttttcaagctgatgacgtcctccaccaacaactgggtcctcatcaagatcatcaagctggcaagtactgcccgggaatgtggcctcctcaccctgtgtggggcattccctcaccctgtgtggggcattccctgcgggtgaccgaggccccccctgtccctcaccctgcgtggggcattccctgcgggtgaccgaggccctgctgtccccacagttcggtgctcttactcctttg

SEQ ID NO: 33661 - DNA, 1839 bp, Artificial sequence
  DNA replication origin
ctgctcactgggcctgctcggcctgccgcccgcccgggctctgtcttagttggaggtcccgcttagggctccggccctgcctggcctgggcctggggcgccgcccacctcctcggtcccccagcatcagtttccccacgaggggcgaaggccttggagcagcacatctcggatcctcgcctcatcggatcacctgggggaagcgctgttcaaaatgcaatgccctgggccccgcctataggtgccctccccctggaccctcagtttactctctcagagggagattcgggcccacctgcccccgtctcgggccaccctcccaggagacttgcgaggtctctgggcagagcttcttcaacctgagtgtgtttccgaatcaccgattaaaaatgcaggggcccgggccccgcccccggaccctccccgggagaccgaggcagggggtcctgggccgtccctggagaaactccttcttccttctgggtcgtgtaaatgcgtgtccaggtcgctccctgaggcctggctcggaaccaggcagggtcttggggcgttgcctccagtgcccccgttcccaggaaggtggggctgctgccaggagggaggaaggacagcggcatcctgatccccagtgaggtagcagcttgcgggaagctggaatggggaagctgacttcaagtaggaacctgaaagccagggcgaggaaatagttttccagaagtaaaattacaaccgtggggatcgtttccttcccgctcctcccttcccccaacctgtgacctagattgaagaagaatgggcagagtggccaccacgtgtctggcttcattaaggatacccgtgcagcccttgggcagtgggagccttagaaagtgtcctacttgagcgactgcctgcctgcttccctgcgtggacagcaaggcaggcctgaaagagagccgccgtctgataccgcaccagtcccagtaccagaggctgtgtccaggacgaggtgcccaggagggcagggaagttaagggacttgcttcctggcaccatgtccctcagcccatgtccctctctctgggaacccgagctcttgccgtattgttacacctttacactttcctggaagtggtgtggcttcgcctgcccccaccttaatgaggtcatttttgttcttctccaccccacttcccttcggcctccttggttttcttcatctcagaagctctccctaactgctttggttacaacgtgtaactaactggagtaatgttcagattctttgtgagttgaaagcatcgctgatgggcctggtttttactgagcttggttcagattggaaatgtggttcacttcccgagaggactttttctgcacaggcaggatctcccagcgcccgtccctgctcccttcagcgcatgtcactgagcagcctgttctgggaccctgacgatgggccagggggtctgtccagtggaggaccacacctctagtctggggcatggttttcagggggatgtgcctgtcttcactgggaagcccctgagcctggttttcttcctttggaattggtgtgagttgatagcgccttccccacaagtctgggccccttcaagggggtcttggtggtggaaactttttttttttttttttgagacggagtttcactcttgttgcccaggccggagtgcagaggcatgatcttggctcaccacaaccttcacctcccaggttcaagcgattctcctgccccagctcctgagtagctgggattacaggcatgcaccaccacacccagctaattttgtatttttagtagagacagggtttcaccatgttggtcgggctggtctcaaac

SEQ ID NO: 33662 - DNA, 807 bp, Artificial sequence
  DNA replication origin
cttccggggccggctcggctgggaccgggcgctcgtcgtcagctgacccgccgccatcttgtccgccatttgcaaggggcccggagcgggatcgcggcacctgccgagcgggtcgccgcctctgccgcggtccttggaccccgccgccgccctggcctgggagcttgccccgccgcagcggccggcagcgcggcgctccgcgggcggcaggcacgggccccgggccccctcacggcgcccagccgcgggcctcccgaggcaaaagcccgtgggccgccgcgatggccctcaagatggtgaagggcagcatcgaccgcatgttcgacaagaatctgcaggacttggtccgcggcatccgtaaccacaaggaggacgaggtgagcccggcgcgccaaggggctgctcggcctggtcacagccccggcccagggcccagccctgctcactgggcctgctcggcctgccgcccgcccgggctctgtcttagttggaggtcccgcttagggctccggccctgcctggcctgggcctggggcgccgcccacctcctcggtcccccagcatcagtttccccacgaggggcgaaggccttggagcagcacatctcggatcctcgcctcatcggatcacctgggggaagcgctgttcaaaatgcaatgccctgggccccgcctataggtgccctccccctggaccctcagtttactctctcagagggagattcgggcccacctgcccccgtctcgggccaccctcccaggagacttgcgaggtctctgggcagagcttcttcaacctgagtgtgtt

SEQ ID NO: 33663 - DNA, 1456 bp, Artificial sequence
  DNA replication origin
agagcccgggcgggcggcaggccgagcaggcccagtgagcagggctgggccctgggccggggctgtgaccaggccgagcagccccttggcgcgccgggctcacctcgtcctccttgtggttacggatgccgcggaccaagtcctgcagattcttgtcgaacatgcggtcgatgctgcccttcaccatcttgagggccatcgcggcggcccacgggcttttgcctcgggaggcccgcggctgggcgccgtgagggggcccggggcccgtgcctgccgcccgcggagcgccgcgctgccggccgctgcggcggggcaagctcccaggccagggcggcggcggggtccaaggaccgcggcagaggcggcgacccgctcggcaggtgccgcgatcccgctccgggccccttgcaaatggcggacaagatggcggcgggtcagctgacgacgagcgcccggtcccagccgagccggccccggaagccccgcctcccagaaagccccgccccgccacctccccggcagggagacgctgcgtttccctgacgacgacaggtagtccaatggaaatgtggcacctctttctcctgcgcgcggccccgccttttccggccccaaaacttgcgctctcattggtcagtggcctccggaactccgccttcttcctagttctgagccctagccacgccccttagaggctggtcctgaccctcccaccagctgacaggtgtgagcgtggctggatgtgggcggggcgcccacgtggagcttagccggcaagttcccgaggaagactggagctccgcctttcctgaatgtaatagctgacgcggcctgagagcctccaaacccaactcctgggtgggtgggggaacggatcctgtggttcccgcagcctcacaacatcctgtgaaatgggcaagacagacattaacatgcccacaggaagaaaatgaggccagagacaggactacgacattgtcattcattcagtaaacatttgtcgaaggcccattgtgtgccaggcatggtaaggggtgctgggcatgcagcggtaaatgagatatactgagtccctgccttccgagatacatcattgagattgtaaaaaaaagctctggaaacttggccagccgtggtggctcacgcctgtaatcccagcactttgagaggccgtaagcgggaagatcacttgaggtcaggagttcgaaaccagccaggccaacatggtgaaaccctgtctctactaaaaatacaaaaactagctgggtgtgatggtgggcacctgtaatcccagctattcgggagggtgagtcaggagaatcccttgaaaccagaaggcagaggttgcagtgagccgagatggcgccactgcactccagcctggcaacagagcaagactccgtctaaaaaaaaaagagagggagaaagaaagtaatcgcaataaaaactggggtaa

SEQ ID NO: 33664 - DNA, 941 bp, Artificial sequence
  DNA replication origin
gctggagtgcagtggcacgatctcgggtcactgcagcctctgcctcccggactcaagtgatttctcctgcctcagcctcatgagtagctgggactacaggcacgagtcaccacgcccggctaattttttgtatttttagtagagacggggtttcaccatgttagccaggatggtctcgatctcctgacctcgtgatccacccgcctcggcctcccaaagtgttgggattacaagcgtgagccaccgcacccggcccctgttgagatcttgatcaacactaaaggggccgggtgcggtggctgatgcctataaatctccgaatttcgaatttcgggaggctgaggagggcggatcacttgagtttgagattaggagttagagaccagcctggccaacatggcggaaatgcatctctactaaaactacaaaaattaaccgggcgtggtgactcgtgcctgtagtcccagctactcgggaggctgaggcaggagaaatctcttgagcctgggaggcagaggatgcagtgacccgagatcgtgccactgcactccagcctgggcgacagagcgagactgtgtgtcaaaaaacaaacccccccactcaaaaaaaaaaccccaaaaaacagtacaaggcacttgtacttgacactgaaaggctttaatcaccaggggctgtggcagtgactgcgggactctattgctgagaggaggaaagcatcggaggtcaagtgactctcccaacgtcacccagcagggaaggggtggggcagggctggaatctggctgggcagggagggtgttggtgtcccccggggacttggggaggtgctggtggtgaaaccgcctttgcaaaattatgactgagacagttaaagagatctaacttcaccgactccctcttccttctaacctccaagctgtccttgttcatccctgggcata

SEQ ID NO: 33665 - DNA, 923 bp, Artificial sequence
  DNA replication origin
gcccctcccccaaccgcccgcctagcatggtgcggcggccgcgcgcgcggacatgggggagaagctggagctgagactgaagtcgcccgtgggggctgagcccgccgtctacccgtggccgctgccggtctacgtgagtgccgccctccaccgtccctacctcccggcctcccctcctccgccgcccctggggacaccccaaacccccccaagccgcgctcaccggtcccccctgcggaacggagaccctggactccactgtcgctgctccacccccgttgcttcccggccgagggccccgcggctgtttcccgcagggtgggagccccgcgcgcctggggtgggagcgggagccggcgcccccgagccctaccgcggtgccgttgcccccgccgggctgtcccgggcgcggaacggaaggggtaactcgtgccggccgcgttttgactggaagcccgcccgcccgccccgctcgttcccggcgctgtcagtgtgtccgccgccttatttttctttttgagggcatcctttcctgtctcctcttctcttctttttaaaaattgggcgtttgtcacgcttttcctactcgggcacggcgggcccgaccctgcgaaggtgggagttaacgtccccttgagtgggcgggagcggtctgacctttggaaatggggaatttttgtccccgtaattttgagtgggtatgggctgccctggccctgggaaattaggcatctttgacctgttaatcctagttggttggggacaggctttatttatccttggaaattgggacttctccccgatcttgagtgggcaggattgggctcacccccggagttagtaaattttgtcttcttcatcttggtgaccgttggaaaatgacaggccgggtggaatgttacagaggcaccccaccgggtggt

SEQ ID NO: 33666 - DNA, 947 bp, Artificial sequence
  DNA replication origin
tttgtcttcttcatcttggtgaccgttggaaaatgacaggccgggtggaatgttacagaggcaccccaccgggtggttccagaaacccgcgtgcggctcccggggtgcgagtcccggcgtggcccctgaggaggcggggcgcgtgcgtccgcgcttgggaccctctggccacgctccgggctgggcagggcgcgttttcggggaaaagtgaagcaggcgctgtcagcgagcgtgtccggggcgcgagttttggggggcgcgtctgcagggcccggccgggcatccccgcgcgccctgggactcccgcgcgcgctgggcttgtgtcagtttttggaaacgtgctcgctgggggcggggtcaggacgcggagagcgctggggagcccgggctggctcactgccccgggtcggtgcgagtggatgggagagggagcgcagcttccagcctggccgcacgtcccgcgcgcggggctggcggggtagggccctggggctctggcttctctggttgggcagctccgggtgtgcgcctgggcggcctgagccgggatcccgccaggagaggtcctaggacaaaaactgaaagcagaggccgcgcttcagcgccccgaccggtttcctccctcgaaagttcaaactccagaacccttccagcctccacttctctctgttgggctctcatcgttttaggtggtagaaggcatatgaccataagagttctaactgtaactgactgaagatcaattgaggtggcttaccaccgtccgaccagccccagtacatggcttcacatttttttttttttttttgagacggagtctcgatctgtcgccaaagctggagtgcagcggcgcgatctcggctcgctgcaagctccgcctcccgggttcacgccattctcctgcctcagcctccccagtagctaggactataggcgcccgccaccac

SEQ ID NO: 33667 - DNA, 2148 bp, Artificial sequence
  DNA replication origin
gggactacaggcatgagcccctgtgcccggcctgtcttcatttgacaggtttcttgagactaagaatgctggggcggtggcggggggagaatattggcttgttgtcctctgtgcccccacaacactgagtattcagtagctgctgttggaatgaatcatgaataaatgtgctgctgcagctgcgtctgggcacggtggttcacgcctgtcatcccagcactctgggaggccgaggtggacggatcacctgaggtcaggagtttgagaccagcctggccaatatggtgaaaccctgtctctactaaaaatacaaaataagccaggcatggtggcacaggtctgtaatcccagctactggggaggctgaggcaggagaatcactgaaacctgggaggcggagcttgcagtgagtggagattgtgccactgcactccagcctgggcgatagagcaagactctgtctcaaaaaaaaaaaaaaaaaaagaaaagaaaagaaaatcagaaccacccctcacttcttgtgagaaagcaaaattcctcaacgggaacacagaaaatgacaaatgtcacggcgaggttgtcagaaggctgcctctggcacttgggcgaatgaagatgctgggcccggcagtgggccaaccagagcaggaagaggccgtagacggcgccaggaccagcacaccctgccaagccagggcctggccagggagggaaagacacggcacagtcccgcccaccactagaaagcccgctcccgccagctctcgcccttactatttacaatggagcactggccaggcagggcagcaggcatgcgggcggggacaccagggctgccttcacgtgaatgttcacttcagtaccaaggaaaaggcaaagggtccctggcaagaccactaccccaggccccgacgctgggttccagtgggtttcttagcactgacaagtggcaactgttgggatgcagatgttaaacagacgcttagcacaggccgtgcggtccacccctgagaacctcgccacgcgaacactgactttcaccaaaaatcccgccagtggtgtttagtgcgggtttattctaatcaccaaaaattggaaacagcccacagtcctgtgacccacaggcaaacacgtcaacaatctgtggcccaactgtccaatggatttacagtcagcaaaaaaatggggtaacttttgaaacctgcagcaacacggatttggccgcctgaaagccaccaggaccaaagggcaacatgctgttgattccattcagccaactttctgagaatggcagaactacaggtaaggccaggtggggagcagccaggagctcccaggcaagctgaggatgggggcgccgcagggaagctgggggttctgcacctggacggcagcactggtcagggcaccacccaatgagtttgtcaaaacgtatagaactgtaccctgcaaccagcgaactacgccctaggtgaactgaaagaggaagatatacgaataaatgtgaggccaggtgcggtggctcacccctgtaatcccggcactttgggaagccaaggcaggcggatcacctgaggttaggagttcgagaccagcctagccaacatgaagaaacctggtatctactaaaaatacaaaattagccggacgtggtggctcatgccagtaatcccagctactcaggaggctgaggcaggagaatcgcttgaacccgggaggcagacgatgcagtgagcagagatggcaccactgcactccagtctgggcaacaaaagcaacacttcctctcaaaaaataaataaatataaataaataaatgtgaggccaggcgaggtggctcgtgcctgtaatcccagcactttgggaggccgaggcaggcggatcaccagaggtcaggagttcaagagcagcctgatgaacatggagaaaccccgtctctactaaaaatacaaaattagcagggtgtggtggcgcatgcctgtaatcccacctaccagggaggccgaggcaggagaatcgcttgaacccgggaggctgaggtttcagtgagccgagatcgcaccattgcactccagcctgggcaacaagagcgaaactccgactccaaaaataacaacataacataacataacataacatataaatgtg

SEQ ID NO: 33668 - DNA, 1098 bp, Artificial sequence
  DNA replication origin
cctcagtgcataaggaaagctgggggggggtctcctatggtctggcctttggaggagagccagctggggtctctgtgtggcacccctcagtcaggcttggctgcttctctcagggttatactgaggttctgcatcctggcaggagccccacagatggggttgcgtcccgctgggccttgggaggctcgtggcggctgcgtgtctcactgtgatgacgctggccttgtgtttcgtcaggtggtgtccacaggtgccctgctggttgctttttctctgccctgggagaggctcgctgaggctgcacggctgcctgggagaggctcgctgaggctgcacggctgcctgggcggcctctgacgcgccctgtggactgcagcatccaggggatcgcgtctgcaactcttattgctttggcgtttacctattggggatttaaaaaaaaattgttcatttttataaaaaagacatgggctggctgggcacggtggctcaggcctgtaatcccaatactttgggaggctgaggtgggcggatcacctgaggtaaggatttcgagaccagcctgatcaacatggagaaaccctgtctctaccaaaaatacaaagttagccaggcgtggtggctcatgccagtaatcccagctactcgggaggctgaggcaggagaatcccttgaacctgggaggtggaggttgcagtgagccgagattgcaccacttcactccagcctgggcgacaaacaaacaaacaaacagaaaaaagacatgggctctcgctgtttcccaggctggcctcgaactcctggctcaagtgattcgctccctgcacccagcctgttgtgggtttatatcagcacagtagcacgcagacgcgacgaaagtgcacgtgtcctggtggcgtgcacttggtctctgattctcggtgatgggtgtggagtcggagaggcttgggtggccctgctgggtgtgaacctgcctttgacattggccttgtagagggagcgaagggcagggtgctggacggggagggatctgtgttaggccaaggaccttggttttagttgtggcaggttctgggctatggcgaggccgcccacgtg

SEQ ID NO: 33669 - DNA, 1276 bp, Artificial sequence
  DNA replication origin
atgggctctcgctgtttcccaggctggcctcgaactcctggctcaagtgattcgctccctgcacccagcctgttgtgggtttatatcagcacagtagcacgcagacgcgacgaaagtgcacgtgtcctggtggcgtgcacttggtctctgattctcggtgatgggtgtggagtcggagaggcttgggtggccctgctgggtgtgaacctgcctttgacattggccttgtagagggagcgaagggcagggtgctggacggggagggatctgtgttaggccaaggaccttggttttagttgtggcaggttctgggctatggcgaggccgcccacgtgggctagcccagtggtttttttcccatggtacagttggggaaacaggccccgtggaggctctatcacctgcggtcacataccaggcctttgccaacgcaggactcccagccaggctggagctccctggctggagcagcgtcgggagaattcccggtgggcctgcggagcgcggtctgagggacttgggctgtgttgagggatcaactgacctccagggaaaaaatggggagacatgtggagcggagcttggggcggccgtttgctttagggtgggagaggagcaggaccgggggccatagactccatcccaggccgctgcctgctcgctgcctgtagtaggacacagcgtgccagaataggtccccggcaaggtctgtgttcccttcgtggtccagggtctgggagtgtctctggtggtacccgctgggtggtgggcttgggagctgcaccagttgggaaatgaagagatgggaagttgacggcatcgcttgtccgggaagagagcgatgggctcacggggtggaggatggctctgcgtctcaaacttctctctctgtttcaggataaacatcacgatgctgctcatgaaatcatcgagaccatccggtgagtgcacggcctgcagtgtgttgtcttcacagccctgagccacttccgtggacacccgtgccctgcagattctgttgtggggatggctcctgcaggggtggactcctggaggtgttgtgaagcggatcaggggtgactcagggacgggtagagctgcttctcccagctccattcctggccagtgggtgcagaagtcttgagctgctggggtgtccagtgggtcctccaggggcgttgccctgccttcctctgtctccttgtcagtctccctgctgtgggttttgggccgaccttcaccctcacgcgccctcgacggcctcctgtgtctgtgc

SEQ ID NO: 33670 - DNA, 1363 bp, Artificial sequence
  DNA replication origin
agcccagctgcagcatgcttctggcggccagccgcctctctctgcctgggtttctcttgttgcagctgggggccaagactctgctggcgtgggcctctgtgggtgctcctcacagagggccgggcagtctttttaagaatgctcaagctgtgcacggtggctcacgcctataatcccagcgctttggaaggccaaggcagggagatcgcttgaggccaggagttcgagactggcctgggcaccttggggaaaccctgtctctactaaaaaaaaacacaaaaattagccgggtgaggtagcaggtgcctatagtcccagctactttggaggctgaggcaggagaatagcttgaacccagggggcggaggttgcagtgacccaagatggtgccactgcactgcagcctgggtgataagagtgagactccatctcaaaaataaataaataaataaataaataatgctcagctgggcatggtggctcacacctggaatcccagtgctttgagaggctgggagggttgatcacttgaatccaggagctggagattggccgggcaacataatgagaccccaagtctacaaaaaagtaaaaaattagctgggcatggtggtgcacacctgtggtcccagctacttgcggggctgaggtgggaggatcacttgagaccagtggcgctgtgattgtgccaccgccctccagccaggcaacagagtgagaccctgtctcaagaaacaaaacccaaacaagaaagagtgctccagggctgtggcttcccggggctgtgactgtgcaggttctgccagtgctgcccagacgtggtctctctgggttaggatctcggtgcagcaggggtggaagcccctctctgaccaggcgcttgctagtgtgtctggaggtgctcagcagcaggggagctgcacctgctccccatgggaaggggcctgcacagacttctggggtcagaggagaccccaggcccccggatctcaggcagtggcggtgagagtgcctctctggctgcatgctcgccttctgcagggctcggagctgactgtcttgtttgaaccttgtgtgttttctggggagcgcatctggagtctggagcttaagcgttgtagggagcagggtccaggcacaggggcgtgcaccaacacctgggcatccgcgacgtaggcagagacctcgaaactcgaacccccaccacctggagaggctgctttctcccgtgcatccccagcatgtggccagggttctcacggtgtggctgcacagaccttttctgtctcacttcctctagaaacaccgacgacgttcttacacagcaaacaccattcagtccccatacggccagtgtcccaag

SEQ ID NO: 33671 - DNA, 1327 bp, Artificial sequence
  DNA replication origin
acccccgcttcctatggggccggcatttcagactccagagggaagcagggttgcatataaaccacggtgtttgcaggaacagcttcggccccagagcccatcctgtcatggagcgtgggggaccccagggagggttcccagccccaggcctgtgatgcgagcccggatctgcttagtgctgctcaggacttgggatttgagtcatttcctgggtggcttgttcacggggaatgagggatgttcagagggtctgtcaggtgtggagagggaggagacgggtgtggggggtggcccagcacctgcagaggctcaggatggctcgcctgcgcacctcccatcccgtctcctcccctcctgggggcttcccgcggccttggagagcggaggatgtgcagctgctcctggccggggcgggtggccctgccctctggatctgcgtctgggtggacgagtggccctgtcctccgggcccgggggggtgtccctgtctctctggggctgagtgggtgggccaccctgttgcttggggcggcggcttgcttgcgttaccctctctgctcggggactccgtccccatcctgagagacgctgggtggggcgcgaggcctgtggctgttgtgtggaaaggagtgtcgctggtcctccctcggctcttggggtgctggtgtgggcttctgctgtggcccaggtgccctcacccccaactactccagcccccagcatgaatccccttcctgtctctggatgggcctgtcccggacatttcacagaaacaggatcacacactgcgtggccctctgtgtccggcgtctctcactgagcgtggcgtcctcaaggtgcatccgcgatgtggcctgggttggagcctggctcctgttctcattggggtcctgcttccaggtgtgcgcggcctcgctgtgctgtgttgatctttcatctgctgatggacgcttggctgcttccaccttttggctgtgatgagttgtgttggcttttggaggcatttgtgtccgggcttttgtgtggacatgtttttatttctcctgggaatggaggtggtagtgtttttgaaggatttgaaaggcggtgtcttgattgtccagatgctaccgtgttggacagctaggttaataagaggtgttttctcctggacggtgccaggtcttgaggtctggaggtggactggcgtcgggctgcagctggccttgctgtgagtgtggcgtggagctgtggggacagcgctgctgttagcaggccgtcagcggtgctcagggcagacgcccccagggactggcggctcagcttccctgtgtgcgtgtttcttgtg

SEQ ID NO: 33672 - DNA, 779 bp, Artificial sequence
  DNA replication origin
gggaggaagaggaatacagggaagatgaggaatgaggggaggacgaggaatgcggggaggacgagaggcgtggggaggacgaggaatgcggggaggacgaggaatgaggggaggatgaagaatgcggggaggacgaggaatacagggaagatgaggaatgcggggaggacgaggaatgtggggaggacgaggggcgcagagaggacaaagagtgctgggaggatgaggggagcagggaggatggcgggactgggggagcagggcccagccggctgctgaccccacctccccggctgccctcacaagcgccttgggcctccagggtccctggcacacgctggagtgctgtggccacacccaggctgggcagtggaaagcacgggggcccagcccaaccatacagagcccgtggccaccaggacaaacaggtggcggtggggacggacctggacagtgccctgagctcccaggcctgggtgcgaggtggcgcggaggggcaagcccaggcagtgcagagatggcttttgggaccacgaggggccgctccctcgagcagccctcatagtgctgtgtgggtgccagccactccagaagggatggatggagacaggaagacccccagaccaagcctgagcggggaggaggcccaggaaaccaggcgagaggggcccacagtgtcccaaagtcaaggggacaggcagcaggaacgggctcactgccagcagggtctgcagggccgacaggggctctgctgggcacgtctgctctgcgcgcccgca

SEQ ID NO: 33673 - DNA, 2051 bp, Artificial sequence
  DNA replication origin
ctccagggccaagcccacgcagctgagcgcacgccgtgggtttcaggtgcagggaaaaggcaactgcagcctcttctgagtggggccaaaaacagagggggcaggattcgtgaccaagtctcttattgtgaatcttggagtccagtgatctgggaaggttcacaagcagcccacacaaggtgggaagagcagccgtgaagtacccacaggccaagggaagaaggtgggtggccaaaaacagaggcccagcacggggctggactgcaacagggggcgccaagcagaggctcccgctcaactgctgcagagaccgcagacaacgggtcccaggtgaggcgcccttggcagcatttcagacactctggcaaggacaggggaaccagaggctcccctgcaggcccagcactgctttcccaggccaggcatcctcaaacgaggctccttgggctgcccgtgttccccactcaggaccgcacttagggaggctagacgtgaggtcggctgagctcaggtggccaaggtggctgagcggtgtgagccagaaagacctgggtaactgggtgttcagggaaggaagctccgtgatgcacacctccaaagccaccaccatcgtgagtcagacccaggaaagggaaaacaggctgaggccagagacagtgcaagatcccacaaccagtgggcagcctgtgggaggagtccctcctggtcaagacctgcacgctgtgcccagagccagagcaggctgagcctagggctggggctgcctgacaaggcagcgaggctggcagctcctggagaggaactgtgagagcctgggccgagcccagatgtcaacgggacgccagaaatctctcggcttcttaagagtttgttataagacagtaatcacggcctgaccactgcgggtccccctgcgctcccaccaccaccccatgggatggggacaccacagggtcagcacgattccctccagatggcagaacacccgccggcgggcacagcaccccaacccaaatggaagttcacacaggagagcgaacctaggaaacttttgggaaaagaaacccccattttctacttgttccccaaaccctgcccatgggggacactcaaccacaagccacgagcacacccgaggaagaagagcacagggaagacagcaggagcgagggtgcggggaggacgagaggcatggggaggatgaggaatgcagggagaaggaggggagcggggaggacgacgggcgcagggaggacgaggaatgcagggagaatgaggaatacagggaggatgacgggcatggggaggacgaggaatgcggggaggacgaggaatgaggggaggacgaggaatgcagggaggacgaggaatgcggggaggacgaggaatgaggggaggacgaggaatgcggggaggacgaggaatgaggggaggacgaggaatgcggggaggacgaggaatgcggggaggacgaggaatgcggggaggacgaggaatgaggggacgacgaggaatgcagggaggacgaggaatgcggggaggacgaggaatgcggggaggacgaggaatgcggggaggacgaggaatgaggggacgacgaggaatgaggggaggacgaggaatgcggggaggacgaggaatgcggggaggatgaggaatacggggaggacgaggaatgaggggaggatgaagaatgcggggaggaagaggaatacagggaagatgaggaatgaggggaggacgaggaatgcggggaggacgagaggcgtggggaggacgaggaatgcggggaggacgaggaatgaggggaggatgaagaatgcggggaggacgaggaatacagggaagatgaggaatgcggggaggacgaggaatgtggggaggacgaggggcgcagagaggacaaagagtgctgggaggatgaggggagcagggaggatggcgggactgggggagcagggcccagccggctgctgaccccacctccccggctgccctcacaagcgccttgggcctccagggtccctggcacacgctggagtgctgtggcc

SEQ ID NO: 33674 - DNA, 854 bp, Artificial sequence
  DNA replication origin
catgcagggcccttcacgctgttttctgaaccccaagccctggcgtagtttcaggagcggagaactcagcccatgacatcgattccagtcctgcagtcgagggtggtacccagaccacactctgtggactgcccattccctaaacatggagactgagcctgccattgtctcccagcccctgccagccctccagcaggacatagggcaggtttggggtcttccttgaggggattgtgctgcctgccttcctaggctctccaccaagccctgcagcaagcaccacctcatctgtatcctggcggacgtggcttccagagccactgctgggctcgaagacaggcgctctgggggtaccccctcttcctcccaactgctccccacctgtcctctctagggaggcctccagaggctaggggagaactgcggtgggctcctcaggcctcccaaacaaaacccagagggtctgcagctgccttcagcaccaacgccccacaacctgggggtttggagggtgcttgtgtgcctgtgtctgtgtgtgcgtgtctgtgtctctgtgcatgcctgtgtctctgtgtgtgcccgtgtgcctgtgtgtctgttagcgtgtctctgtgtgcgtgcctgtgcgtgcctgtgtctgcatgtctgtgcctgtgtgcatgcctgtgtgtgtgcgtgcccgtgtgcctccgtgtctatgtatgtgtctgcttgtttgtctgtgtgtgtgcatgcatgcctgtgtctctctgcgtctgtgtgccttgggagtttgtttgcatatctgtgtgtgtgtgtgcgtgtggcagtggtgtttctgacttatcttagaaccacgtgaggacaccatgctt

SEQ ID NO: 33675 - DNA, 1402 bp, Artificial sequence
  DNA replication origin
gcgcctggcagcgtagtgggttttttttttcttttgaggcagagtctctctctatcgcccaggctggagtgcagtggcgcgatctcgactcacttgcagcttccacctcccaggttcaagtgattctcctgcctcagcctcccgagtagctgggattacagatgtgcgccaccacacctggctagtttttgtatttttttagtagagacacggttttaccctgttagccaggctggcctcgggtgatccacctgcctcagcctcccaaagtgctgggattacaggcatgagccactgcaccgcgccgagaatgttttttaaagaagcattatttgtaggaggttgggcgtggtggctcacttgaggccaggagttccagacaagcctggccagcagggtgaaacccgctctctactaaaaatccaaaaattagccaggtgtggtggtgtgcgcctgtaatcacagctactcgcaaggctgaggcaggagaaccgcttgaaccagggaggtggaggttgcagtgagccgggagactctgtctcaaaaaaaaaaaaaaaaaaaaaaagttatttgtagaataggcttcaacttggaaggtgtttcctagtgttgcttgtaggcaggtggacaggacccggagcccagtgtgtgtgtgttccgtgtcattgttccttctctgtcaccttgagtggtgtctgctcttctgtttcctctctcctgtgtggcagtaagcagtgtctgtgtttcaggtggcagaatcgtgtcctcgaaaccctttgcacctctgaacttcagaataaacagtagaaacttgagtggtaagaaactctcatgttgttaatgatgaacacgggtaattttaaccatctgacacgcagtattcctaggtccctcttccttgaccctgtggacactggggctggatccttctgtggggtggggctgtcctgggcagtgcagggtgctgagcagcgtccctggtgtccacccactccatgccaggagcacccctggtcgcgacaaccacacacgtccccatagagcactgtgtgccatgggggtagaatcactcctcggggagaccccggcttcgaggggaggcgtgaaggatttacaggacttttgtggacagagacaggcccacggtgggaaggagccggcccctcccatgccccctgcctgccttactgtgctgcgtgctctgtcagctcccagccttgcggggcagcacggcctcctctgaggggcttccctgaggagcgcccacccgggaggtgcctgtgttgctggatgctggccgttcttgcagccgtgatctaagtcgcttccagatcttctccccctccttttccattccactcagctgggtttgtggctgtttttctgaggttggaggggccca

SEQ ID NO: 33676 - DNA, 935 bp, Artificial sequence
  DNA replication origin
taaaaagaagaaagagaaccctgattagaagggagtcccaatctctgttcggatttgtctggacacccaggtaacaacagcaacctggacagtggctggggaggctgttctggtatctggggacagcaggcatgcagctagagccccccagtggcaaacgcggatgtgactaacccagctgtggccaggcgtcaccctcaattcaccagcacgcgacgggtgggcggggctggtttaagccttcagaacagacacagggccctgggatgtgtctctgcttctggaagagggagggctttctgcacagaagaaccgcgcccgcctcagaggagaaggcgagaggctgcgccgagggcgtcagtgccagggcagctgaagcagcagcactgcgtggaggtgggggccgcacggtaggccaagcccccagagcctcagcctcagctcaccatgcctctcgtcccagggccctcgggggagcagtgggagggcggggtgcatctgcctggggctgtcggtccccagacggcaccagcgctccccaggcaggctctagtggaggctccgagcactggacagtgagggtgcagacacaccagcaccaccgtaaggaaaaccaccgctaccccaacaacaggaacagagtgcccaaccaaaggacgggaaagagaccaggggaagcctcccagccctggagggctggcgctgcccacatgccaggaggctcgggatactcgtgcccgggggggaagcaccgtgggaggcaggcaggccgcacactggcccagggctgtgtcagaggaccctggggaacacagggagggaagaagcatcccagaccccacccatggaccctggtgtctccccgctcaggaccctctcacatggaggaagctgggaacagggacgtgggactcctatccacaggggcctctgga

SEQ ID NO: 33677 - DNA, 771 bp, Artificial sequence
  DNA replication origin
tgcaactcaccccaccaccaaaactaagccaagccacctccccaaaaataagtattaacaaggggaaggatgtcccaggccaaaccatcaaagacaaggcaaagcatgaagacaggcaaagagacagagagagggtgggagagagagagaaacggagagggagggtgggggagagagagagagattgaatggtgagagaaaagggctgggagaggagaggaagagggggaggacagggaggaaagggtagggagaggaccaggagtgacagtggggaggagcaggaaggaggcgggaaagggcacagggccgggccccgaggggcggcagggctgtgctccagtcgtggctcctgaacccggctgcgcacggctttgcatttccccacatcagtgcatgcgtgttattaacccaagagaaaaaacacacaaacttaccctgagttttgggtttttcagactagaaaaatagttttcaagctaaaaagaagaaagagaaccctgattagaagggagtcccaatctctgttcggatttgtctggacacccaggtaacaacagcaacctggacagtggctggggaggctgttctggtatctggggacagcaggcatgcagctagagccccccagtggcaaacgcggatgtgactaacccagctgtggccaggcgtcaccctcaattcaccagcacgcgacgggtgggcggggctggtttaagccttcagaacagacacagggccctgggatgtgtctctgcttctggaagaggg

SEQ ID NO: 33678 - DNA, 973 bp, Artificial sequence
  DNA replication origin
tcttcgaaaggcaccgaggcccacacatgggacgccatgcacaagttctctgatgtgagttagtggagggcgcgacccacgggaaggggaacacagggtgcgccggccacctcgggccgttccctgctctccagggaagacccacatccccctaagcatggtgggaaggacagagggcccccgaggggtaccaggctctgaggccgggttggagcccagccctggctacaaatccaggcagtgacagagcccttcctgtacggggttctccgcatgctggtcttgtctgaccccctccaaaaggaaaggacgcccggacaaacatcctctcagctttggtggcaaataagcaggcaggtctgaggctgcagaagcgccagcgggcagggcggccactgtggctccccaagccaggctttcccaccgctgctttaaggtgggagaggaggggacagccctgcctccgacggtgcagcgcgtgcagggcgcgggggcccaggagctgcactctgcaccgagggtgggacaagcgcacatgtgtggccccccaggcctcaagagggggcagccagcagtgacgcacaagcttttcacccacccagcccttcagtgcaactcaccccaccaccaaaactaagccaagccacctccccaaaaataagtattaacaaggggaaggatgtcccaggccaaaccatcaaagacaaggcaaagcatgaagacaggcaaagagacagagagagggtgggagagagagagaaacggagagggagggtgggggagagagagagagattgaatggtgagagaaaagggctgggagaggagaggaagagggggaggacagggaggaaagggtagggagaggaccaggagtgacagtggggaggagcaggaaggaggcgggaaagggcacagggccgggccccgaggggcggcagggctgtgctccagtcgtggctcctgaacccggc

SEQ ID NO: 33679 - DNA, 1137 bp, Artificial sequence
  DNA replication origin
ctttcctccctgtcctccccctcttcctctcctctcccagcccttttctctcaccattcaatctctctctctctcccccaccctccctctccgtttctctctctctcccaccctctctctgtctctttgcctgtcttcatgctttgccttgtctttgatggtttggcctgggacatccttccccttgttaatacttatttttggggaggtggcttggcttagttttggtggtggggtgagttgcactgaagggctgggtgggtgaaaagcttgtgcgtcactgctggctgccccctcttgaggcctggggggccacacatgtgcgcttgtcccaccctcggtgcagagtgcagctcctgggcccccgcgccctgcacgcgctgcaccgtcggaggcagggctgtcccctcctctcccaccttaaagcagcggtgggaaagcctggcttggggagccacagtggccgccctgcccgctggcgcttctgcagcctcagacctgcctgcttatttgccaccaaagctgagaggatgtttgtccgggcgtcctttccttttggagggggtcagacaagaccagcatgcggagaaccccgtacaggaagggctctgtcactgcctggatttgtagccagggctgggctccaacccggcctcagagcctggtacccctcgggggccctctgtccttcccaccatgcttagggggatgtgggtcttccctggagagcagggaacggcccgaggtggccggcgcaccctgtgttccccttcccgtgggtcgcgccctccactaactcacatcagagaacttgtgcatggcgtcccatgtgtgggcctcggtgcctttcgaagagaggagagagggcaggggaggctgtgggctgtggcttctaggtcctgctgcctgaggggcttctcgtctcctgtcttggatgtggttctttttctctgtggctcacagtctggcttcttactgacaggcatctgtgattgtgggagtggctgtgaatgccgttatccgtgcccacgggtcacgtcctggcctgcggggccccaagcagcccactgctgtctctgggcctcagtttcctgatttgtgccacagaggacttgcagtggacagagttgggcccgt

SEQ ID NO: 33680 - DNA, 1482 bp, Artificial sequence
  DNA replication origin
ggcccctgcttggatcgctgatgcctgcttgtcagcctcccctgcccccgcttcccccggcttagttgccctcacccgaaccaaagaagtttagcctaagatgaaggtttaccagcctgcaaaagagctggctttgtctgttcttaatcagcctgcccagctacttagatcataagtcaaatacttgaacagtccctgagctgactgggattgcaatgcacaaaatgcagcaggacaaccctaaagaaaacacctacaaccgggcgtggtggctcatgcctgtaatcccagcactttgggagtccgaggcgggaggatcacgagattaggagatcaagaccatcctggccaacacagtgagaccccgtctctactaaaaatacaaaaaattagccggatgtggtggtgggtgcctgtagtcccagctacttgggaggctgaggcaggagaatggcgtgaacccgggaggcggagtttgcagtgagccgagatcacaccactgcactccagcccctgccgaaccaataggcgacaactgggaagactgtgacctcacagtactcagcctttgaggaaccgggggagggacctgtgcactagggggaaggttgcttgttcaaactgtgctgggtgtgcctatcagacaccaggtcttgcaaaaccatgattaaaagtctcattttcgctgttttccgggtctctcagtccattctttgggtttaaacgggtaggtttgtttctcgcagcaggtgagcagaggagggagcccactcaggcctgcgctccagggcctctgccacaggggacagatgcccaggaacaggaacgaactgcctctgtgcgggaaggcggaatgccaagggggccaggacccaccttctcctggcccagcagctcctgcaggctggccttgtactggggggtctttgtgtatgccaggaactgcaggtactggatcttgaaggactctgggaagagaggcggaacacaggtgagaagagagcagctgagactgagagggaagaggtgggagcagcccttgagaacgagtcccaggcctcggcaggtgtcaggcactcatgaggcaggagctcagcagagcctggcggggcccatgccacacgccccaagctcgcagagcactcaggccctctgacccctgcgcagccaagtgttcaccgcgtggggccatcctgggcactgcaaggccctgagcagcatccctggcctgcacccaccccatgccagcaacatccctaagttatgacaactgcagacgtcccaagtgtcacccagcatctcctgggtaagacctcagacaacccacaggctgcatctgagcctctactgacccctgcagcaggcagaccccaaccctgggtaaacttcagtggggtccagcatggaggtcacgggggctgctgcgaggtcagcgtcacaacccacggtcctcctgggatgaccccaagcccagaacccttc

SEQ ID NO: 33681 - DNA, 1294 bp, Artificial sequence
  DNA replication origin
aagcaggaggtgtcagtgtcgggagacccaggtatgaggccgagatggctgcagctgagcccgatccgcatcccagctcgtgggatgcaggaaagggtgtcagtaatgaggcgtggcggtttggggcagcagcccccatgatcaccccaggaagccctgttccactcccagcaacccagccctcctgcctgaagagcagcagcagcagcagagtcctgagggtagggcacaggaggggcgttacctgcgggggccagggcaaggcttctgctcccagcaccgtgggcattagcaccaatctgcttttcaagtgtggacgaggggtcacggggctgcagcacgggactgggggtgctcctctgcagagagaaaaccctgtgtgtcaggggcagcaggtgccccaggagacccagaacccagctggaaacagtgagtgttgaggcctgcagctggctgggggaggccgccggggtcaccgtccagtaccgcgtgggaagagggcagcgggggaacttgagcggggccccaggcgagtggcgcagcgagagtgcgcggtgcctgcgtgtgaatgggcagcgggcctgaggcagggaggtcaggaggcgggggtcccggggtccagctgtggggagggggtactgggcacaacccaagcaacccacagcccgccctcaccgggaagcggctgtgttctccaagcagcacaaatgccagcagtcgggtggggtgaggagggcgcttgcgagaacacacctgccggccaccacccactgcacttccccacaccacactccaagtccaacaaaggtcagtagagtgaccgcagaacccagtagctccactcccacatgggccaaagagcaaacctacatccacacagaaacctggaccccagcgctcacagcagaacgattcacaatcgccaaaacagggaatcaagccggggtccatcaactgggcacggatgaagatggcacactccatccacacagggaatgccctcacgtgccaagagaagggacaggcccagacatgagcgtgttcgggggcccgggggctgggggacgactagggagtgactgctgaggcgggcaacgctttttcccgggtgaagaaaatgtcctgaattagacagaggtgtataaaagtacaaaaaaccggccgggcacgggggctgacacttggaatcccagcactgtgggaggccgaggcgggtgggtcgactgaggccaggagttcgagaccaccctggccaacagggcaaaacctccacctctattaaaaatacaaaaat

SEQ ID NO: 33682 - DNA, 1274 bp, Artificial sequence
  DNA replication origin
ttccctgttttggcgattgtgaatcgttctgctgtgagcgctggggtccaggtttctgtgtggatgtaggtttgctctttggcccatgtgggagtggagctactgggttctgcggtcactctactgacctttgttggacttggagtgtggtgtggggaagtgcagtgggtggtggccggcaggtgtgttctcgcaagcgccctcctcaccccacccgactgctggcatttgtgctgcttggagaacacagccgcttcccggtgagggcgggctgtgggttgcttgggttgtgcccagtaccccctccccacagctggaccccgggacccccgcctcctgacctccctgcctcaggcccgctgcccattcacacgcaggcaccgcgcactctcgctgcgccactcgcctggggccccgctcaagttcccccgctgccctcttcccacgcggtactggacggtgaccccggcggcctcccccagccagctgcaggcctcaacactcactgtttccagctgggttctgggtctcctggggcacctgctgcccctgacacacagggttttctctctgcagaggagcacccccagtcccgtgctgcagccccgtgacccctcgtccacacttgaaaagcagattggtgctaatgcccacggtgctgggagcagaagccttgccctggcccccgcaggtaacgcccctcctgtgccctaccctcaggactctgctgctgctgctgctcttcaggcaggagggctgggttgctgggagtggaacagggcttcctggggtgatcatgggggctgctgccccaaaccgccacgcctcattactgacaccctttcctgcatcccacgagctgggatgcggatcgggctcagctgcagccatctcggcctcatacctgggtctcccgacactgacacctcctgcttgggtgtattaattcagcccgtgaggtcggccccagtgctctcgggggctcctgtactcacagctgggaggcccctgactcaggatcggctccacacacagcagtgcccaatggcacacgaccgtgggcctccgtgctggtagcggcatggtttctggttccttgagaaggtgccgcctgagcagtctctgctgttagcccagtttctgcagagagccagagaggatgccactttggcttttgttgacactgcaggcctgtctgttgtggaagccgcagagacagcatgtcagcgggcatggctgtgtgccagcaaaactgtacttaaaacagcagagga

SEQ ID NO: 33683 - DNA, 1561 bp, Artificial sequence
  DNA replication origin
cggcagggctcggcgcttgggggacacgcctgcgctcaagctgggcgtccccgcagatgctcgcttccgccggccgcgcctgcgactgtcctgcccgtggctcggcacacagtccccacgggcgctggcggtcagggggctgtgcttgctggagggcgactgcttggcactgcccgcaccagtggtgatggtgaacacaatcctcctcttggcttcactctcaggatctgagaagccggaatcggagggcaggtctcccttgctggcctcgggcaacgggccctgggcggccccaccaagccggggactggaggagagctggtgggcgggagaggcaggaagcgagttccggggctgtgccagcagcagggggtgctgtggcgtggagctgcgggaccccacggtggcaaaaaggctcccagagctggaggactcatccaaggtggccggctcggctccaggtgtgagagaggccgggctgcccgccaaggccccgctgatggccaccgagccagcgtaggagaagcctgccgggaaggacatgggggtctcaggggacacaggatggccaaagagaaagccttgctgtgggagcaccaccccctaggagctctgtgggctccaggagaggcggggaagtggggaaggggttgggagtctgaaaacggcccctctggggtggaaccagaaggctctgtgggcaagctcaaggctcagggctgaccctgtgcctcctcccgcccatctgggctgcctgtgccctgcaggtcccggctgagacgctgcctcccaagaagcctcctggtgcgggctccccgctgagctaggcttcctctgagtaagttgccctctggccccgtgatctcagagacaccatgaggaaagcccatggctgcgtggcctccctccctcctgttctcagaagacaactcagcttggatactccaagctatggccgccttgaaggccgcagccatgcttcccagcccacgatgagtggtgcacttccatgaccacccggggacaaagggcggcctccctgcttctgccaatgaggcctcagtgcaggggcgcagcaaggcgcttctggagttggctgtttgccacccagttgaaaatctcctgaaactgtcactgcctctcgcagagcagacctcaccccaagggcacaacccagccctgcgagggcagaactgcccgggcttcggtggcctctccagggccctcacgtggccaaccgtgaagcctgcccagcctccctagagcccctcctgtctcaatagcggccatgtacattttacttgttttgttgttgttttgtttttgagatggagttttactctttttgcccaggcgggagtgcagtggtgcgatctcagctcactgcaacctccacctcccaggatcaaacgattctcctgcctcagcctctcgagtggctgggattacaggcgtctgccaccacatccggctaatttttgtatttttagtacagacggtggtttcaccatgttggccaggctggtctcaaactcctgtcctcaggtgatccgcccacctc

SEQ ID NO: 33684 - DNA, 1357 bp, Artificial sequence
  DNA replication origin
gtcctccagctctgggagcctttttgccaccgtggggtcccgcagctccacgccacagcaccccctgctgctggcacagccccggaactcgcttcctgcctctcccgcccaccagctctcctccagtccccggcttggtggggccgcccagggcccgttgcccgaggccagcaagggagacctgccctccgattccggcttctcagatcctgagagtgaagccaagaggaggattgtgttcaccatcaccactggtgcgggcagtgccaagcagtcgccctccagcaagcacagccccctgaccgccagcgcccgtggggactgtgtgccgagccacgggcaggacagtcgcaggcgcggccggcggaagcgagcatctgcggggacgcccagcttgagcgcaggcgtgtcccccaagcgccgagccctgccgtccgtcgctggccttttcacacagccttcggggtctcccctcaacctcaactccatggtaaggatggggaccggcagggctggggagcgcggcctgtgaaagaaagaccagagggagaccgggcgcggtggctcacgcctgtaatcccagcattttgggaggccgaggcgggtggatcacaagatcaggacatcaagaccatcctggctaacacggtgaaaccccgtctctaccaaaaatacaaaagattagccgggcgtggtggcgggtgcctgggaggctgaggcaggagaatgatgtgaacccgggaggcggggcttgcagtgaactgagatcggccactgcctgggccacagagcgagactccctctcggggggacaaaaaaaaacacaaaaaaaaacaggtggaggcagggggccatgactgagcccggccatcctccaccacgtgcggcctggcagcctgggaagaggcggccgacagctgtctctggggttcggagtgcgatgcgctgcctgcaagcttcttcattctcggctgtggggccttagtggtggtgggcacatcaggagggggcatggggggctctgggattgcggggtggtgtgtgaggaccaggaagaaccaggacaggggctgtactggccgctgggcagggcatcagtttcctcaggagaccctggggtgcagacaggagcctcctggggcgggggggctctcctgccttggggtcccgggtctgtggtatgtgcatccattgtgtctgtctgccctcaggtcagtaacatcaaccagcccctggagattacagccatctcgtccccggagacctccctgaagagctcccctgtgccctaccaggaccacgaccagccccccgtgctcaagaaggagcggcctctgagccagaccaatggggcaca

SEQ ID NO: 33685 - DNA, 1070 bp, Artificial sequence
  DNA replication origin
gcctcctggggcgggggggctctcctgccttggggtcccgggtctgtggtatgtgcatccattgtgtctgtctgccctcaggtcagtaacatcaaccagcccctggagattacagccatctcgtccccggagacctccctgaagagctcccctgtgccctaccaggaccacgaccagccccccgtgctcaagaaggagcggcctctgagccagaccaatggggcacactactccccactcacctcagacgaggagccaggctctgaggacgagcccagcagtgctcggcgagtccaggggcccggaggggggcggggcctggcagcaggggcaggaggtgcctgctcactgtgtgtgtgtgggtgggtgggtggggaggaccggcaggctcttagggggtgccctggatgggaggaaggcgtctgttttgtgaggggcctccccacaggtcctgggccccgttccgggcagggccggcctcccgggccattcggggtgggacacgagcagggccatcggttagaagaggcaagctgaggaggagctgagcgcagcaggagagaagcttcagcagtgaggcgttggaggtctcatccacacgtcttgccgagtgtattacagtagctttattagataaaattcacatatcgtattctccatttaaagtgtgcaattcagaggtctttggtatatccacattaccactgcctaaatccagaaccttccatcatgtcctgagaaaatctcatcatccccttgaaacactcactccccttctcctcccaagagcccctggcaccccccgcccccatcctactttctgtctctgaatctgagggctctagggacctcctaggagcggagtcacacaggatgtggccttttgtgtctggcatctctcactgagcgtgacgtcctcaaggtgcatcctcggtccctgtcgtggctgggtggtgctccaccatccatccgccctccgtgctaggcttgcttaccctgggcggttgtgagcagcactgctgtggccatgggtgtgcgtgtttgtgtttgggagcaagtttcccgtttcc

SEQ ID NO: 33686 - DNA, 1088 bp, Artificial sequence
  DNA replication origin
aggccctgggctgcagtgagggcctcccagaggcagttctggaagcccagcgcccccagtgtcggcgcccacgcaggacacgacgcagcaggccagcaccacgcaggacacgacgcagcgggccagcaccatgcgggacacgatgcagcgggccagcaggtgggtcagcagcactgactgggcaccacggccacacggacaggcctggccacgccgcaaaacacttgttactcaccattttccaaggttttcgggggagatttgctttctaaggagattgttgcaatttttctctcaattctgttaagaaaaaaaggtcattaatgcttgaaacccagctgcatactaagaatgacacaaatgctgacagccaacagcccagggagctccggaggtggtgaacgagaagcactcggcccagacaggggacccgtgcagccaccctgggccaggcctggactgggtggctgggccctgggatccacccctgttgtgccacaagggtactgtcctggcagggactccagggcctctgctgggacaagcagccaagagatcaggcacagcagctgaatgggagaagcaatttcccagcacacagaagtgtgagaatcccagacagagctctcttcctacctccctctcccggcccctctcagacctcggtgcctcaggtggcaaacaatgccacagcattgcaggccagcacgtgaagacatgcccaaccacacactgcatggggtcgctttgatccaatgtcccaagaacacaccagggacacacaaattcctaaagatcctggaaaccactaagctgagcaatcccaatgcaaaacagagcatccaggtgctacaatgtttctcgtgtaacacgtgcacgcacacgtgggcaaggagcagaacgaactaacacagaacaccaccaaaagcacacttagggccggctgtgatggcgcacgctgggaggcactgggaggcagaaggcttgaggccaggagtttgagaccagcctgggcaacatggcaaaacccgatctctataaaacaaaaaaacgaacgaggcacggtggtagcgtgtgcctgtagacac

SEQ ID NO: 33687 - DNA, 1840 bp, Artificial sequence
  DNA replication origin
acaaccagagaacccaagacacacggactcagcgtgagccctctccccacaggactggagttcgccaccgtgcacggatggcgggggccggccggcaccaggggacctgcagctcagctcctgctgcaagagagtgcggaagggaacctgcaaaggaaggggcctccggcgggggccggggcggggggcggacggacggccgccctgcctacctccaactgtgccgcctgccaccccggaaaagctgcccatggcgtgcgagttggtcagtctggtggcagcggacgacacgtgcaccaggcctgcggcggccggcacagagctgaacagcgactgcagcacggaggagccggccacggagccgaggttggcctgcagggacatggggccgagcgcgaactgcggtcccggcgggaaggggcccaggaaggaccggtgcgtctgggcggaggacgccgcgccgcctgcggaggacgccgccggggccaggccggggccgctgaggaggcttccgggaggcacggccgccgcagagatgaagaggttgtggccattcttgaggtcgacctcgcggtcccgggccttggcggccttgccgctcagcagtggggtcttgtccgtgggcccgcacagcggtaggccgccctcccctgcctccttgccgcggctgccctcgcccttcagcccagccaggccgtccagctgcctcttgctcaggaaagggttggcgtccgagccctccttgccgcgctgcgaggggaagctcagcggggagctcaggccggccgcctcggggcccttgtggggaagagaagcaccatcactgaagctgtgtaaactcaggtccgcggccaggcccccgccgaaggtgcagccgttggcagggttggtgcccgggctgagtccgtcagcccccgacagggagccgggaaagcctttcctggggtgagcggccagcttggcatcggcagagggctcctccagggcgggccggaacgtgaacagggagttctggctgagggcggagctggcctgcagcgggctgtccgccgacttggccaggccgatgtcggagatgggcgagaaggtggacttccacttgctgctattgactggctcgccggcgggcgcgggcttccttcccgccaagccaccacctggcaaagaggaaaggcagaagccgtgagcccagagcacctgcccgggctacccatgaggctaaccggggctgctgccacggcccgggcaactctgcaggcagggctggtcacagacactcaagatgccaagcgggacaggatgggagaggacaggagggaaggggacgggaggggacaagatgggatgggacaggaggactacagcacaggatgagatggcaggggacgggactggatgggacaggagggcggaagacaggacagaggcagctgaagcgggtctcagaggccatgcgggatgagctctggggaaaatgctgaggtcagcagcctgcgggagggaaggtggggctgccccagagcaggtcagggtcctcactgaggacgcaggcaccactcggggggaaggccagggtgcaaagcaaacaggggacccaaggtgacgatccccgcaggtcagccacccactgtgagagcatggcgtgtgcgcggaggccctgggctgcagtgagggcctcccagaggcagttctggaagcccagcgcccccagtgtcggcgcccacgcaggacacgacgcagcaggccagcaccacgcaggacacgacgcagcgggccagcaccatgcgggacacgatgcagcgggccagcaggtgggtcagcagcactgactgggcaccac

SEQ ID NO: 33688 - DNA, 788 bp, Artificial sequence
  DNA replication origin
aagaccccactgctgagcggcaaggccgccaaggcccgggaccgcgaggtcgacctcaagaatggccacaacctcttcatctctgcggcggccgtgcctcccggaagcctcctcagcggccccggcctggccccggcggcgtcctccgcaggcggcgcggcgtcctccgcccagacgcaccggtccttcctgggccccttcccgccgggaccgcagttcgcgctcggccccatgtccctgcaggccaacctcggctccgtggccggctcctccgtgctgcagtcgctgttcagctctgtgccggccgccgcaggcctggtgcacgtgtcgtccgctgccaccagactgaccaactcgcacgccatgggcagcttttccggggtggcaggcggcacagttggaggtaggcagggcggccgtccgtccgccccccgccccggcccccgccggaggccccttcctttgcaggttcccttccgcactctcttgcagcaggagctgagctgcaggtcccctggtgccggccggcccccgccatccgtgcacggtggcgaactccagtcctgtggggagagggctcacgctgagtccgtgtgtcttgggttctctggttgtaaccgcgtccctcttgttttcagaaggccaccgtgcgcagggccaccagagcattactttctcccgtggaggtcacctgctaggtgtggccgcccgggctctggcaaggctctgggagctggtgttgggtaagagcgagtccccgcagtgcctgcccagacagggcggagagg

SEQ ID NO: 33689 - DNA, 764 bp, Artificial sequence
  DNA replication origin
agactgctctaggagctagagctcccagccccctggcctggcaccccgtgagcctcgcccacaggggctggcacagctgcccccagggctggcctcagtcctgcggcgtcaccgcaggaacccagctgcgggcagctggaacccaacacactcaggccactccatggctggtgcccgtcctgtagtccctcctctcgcgaccatctccctggtctccctggctctctccctcttccctcctcaggacccccggaacttctgccgagccctgtggccgtcttctctgccaaaggaaggacagttcagtgtctggagtgagccaccgcgcagggctctggccttaccttacacaatacgcactgctagctaagcaaggtctttatcgcggcttaacccccgaaaggtgcgcggcatagggaggcggcatgccgagggacacccacaccgcggacggccccgtggcgctggcctgtgggatcccgggcgcggcctgggccagggccagccggggcaggggctggtggtgcaccgtgaaggaggggcgggcgcccttgtgcgggagggaggtgagcttgatagacaaagaggcgttagcaggcggcagagaggcagcagaggtggggggcaagaaagcttggttaggcgggagggacgcgaggctctgcagaagcgcgggctcagggttagaggccagcagcgttgggggaggaggcaaggcggcgttaggtggagggggggcgtggaggacgggcggccccgcgggg

SEQ ID NO: 33690 - DNA, 819 bp, Artificial sequence
  DNA replication origin
ttccttctggtctcaaaggtgggcaccgtctacactaacctgcccagcttggtgctgacatctgagcagctgaaagcccctcggctgtgggccatgaccacagggcagtgtggccatcagccgtgtccagcaagggggcctcaacacgcagggcacagagcttgcctctcgaccccgccgggaacccatcagcccccaggcaggcagggcacttggggcttcactggctccctatgagggcatccgaggctactggccagacagccccgaccagaggcatccagccagccaccctggctctccaggacctctgcagccggcaccgtgcctgctacatgctgggcgcctggggaacagcaccaagccacgccacccgtcatgagtgacctgggcctggtgcggatggagccctggagactgctctaggagctagagctcccagccccctggcctggcaccccgtgagcctcgcccacaggggctggcacagctgcccccagggctggcctcagtcctgcggcgtcaccgcaggaacccagctgcgggcagctggaacccaacacactcaggccactccatggctggtgcccgtcctgtagtccctcctctcgcgaccatctccctggtctccctggctctctccctcttccctcctcaggacccccggaacttctgccgagccctgtggccgtcttctctgccaaaggaaggacagttcagtgtctggagtgagccaccgcgcagggctctggccttaccttacacaatacgcactgctagctaagcaaggtctttatcgcggcttaacccccgaaaggt

SEQ ID NO: 33691 - DNA, 1037 bp, Artificial sequence
  DNA replication origin
gcgccacggggccgtccgcggtgtgggtgtccctcggcatgccgcctccctatgccgcgcacctttcgggggttaagccgcgataaagaccttgcttagctagcagtgcgtattgtgtaaggtaaggccagagccctgcgcggtggctcactccagacactgaactgtccttcctttggcagagaagacggccacagggctcggcagaagttccgggggtcctgaggagggaagagggagagagccagggagaccagggagatggtcgcgagaggagggactacaggacgggcaccagccatggagtggcctgagtgtgttgggttccagctgcccgcagctgggttcctgcggtgacgccgcaggactgaggccagccctgggggcagctgtgccagcccctgtgggcgaggctcacggggtgccaggccagggggctgggagctctagctcctagagcagtctccagggctccatccgcaccaggcccaggtcactcatgacgggtggcgtggcttggtgctgttccccaggcgcccagcatgtagcaggcacggtgccggctgcagaggtcctggagagccagggtggctggctggatgcctctggtcggggctgtctggccagtagcctcggatgccctcatagggagccagtgaagccccaagtgccctgcctgcctgggggctgatgggttcccggcggggtcgagaggcaagctctgtgccctgcgtgttgaggcccccttgctggacacggctgatggccacactgccctgtggtcatggcccacagccgaggggctttcagctgctcagatgtcagcaccaagctgggcaggttagtgtagacggtgcccacctttgagaccagaaggaagttggaagcaggagtgattttgatgatgtgaggccttcagggaatgtcctgttcactcctcccccaagaggctgtggagactgtggccgctgacccctgagggcagttggccacccgtgccctccagggacatggcgtgcctggcggcgtagtgcaaa

SEQ ID NO: 33692 - DNA, 937 bp, Artificial sequence
  DNA replication origin
atgccctcatagggagccagtgaagccccaagtgccctgcctgcctgggggctgatgggttcccggcggggtcgagaggcaagctctgtgccctgcgtgttgaggcccccttgctggacacggctgatggccacactgccctgtggtcatggcccacagccgaggggctttcagctgctcagatgtcagcaccaagctgggcaggttagtgtagacggtgcccacctttgagaccagaaggaagttggaagcaggagtgattttgatgatgtgaggccttcagggaatgtcctgttcactcctcccccaagaggctgtggagactgtggccgctgacccctgagggcagttggccacccgtgccctccagggacatggcgtgcctggcggcgtagtgcaaaggtgccctctgcttgcccctggccttctgcctcaggggcccctgggacacaggccttcctgggcgagtccaaagcccaccgggcaaggagaggaggactgggagccaggagccaaggcggaggctgtggccagggctggtcagcctggcgggtcaatgcgggcacctgcgggctggacaagctatgctgggtctcttaggagatgagctgcaggtagggtggctttagctggactcggctgtgtgtctcctttggaggaaggctggagcttggccggcgtgtccaggtgtcaggctccctggtctgtcacggggcacgcccgtcgtctgttgtggttagaggagctggcactatgcctgtcatggtgctggccccaggtggcgtgtgtgctcgtgggaggcctcggtccccagcctgggtgagtgttgggctcccccaggcgcgatggtaacctcaggccgctcttcccgctgtgcccttctgcaggtaactaggatttctacctcaaccgcgagacctatgcaaggacggtgtgg

SEQ ID NO: 33693 - DNA, 1776 bp, Artificial sequence
  DNA replication origin
gggccgaggagggggtatcctagtttttagggttcctatcaattcctgagcaagagccactcccaggcgccgcccgcccacccacagtcagcagcagcagcacaggtccccgccagctgcccacggaaactcaggccaggtgccagcaccaggctccagatccccagtctccacagccaccctgccacccgccacacaccacccctcagtctgggagtgtctgagaagaacacaggcccagggctcagaacaggagggtgtccgcaggcagccaccacactagttcacgtgtggtgacacgcatatgacccagtgggctcaaggagacttctgcctgggccagtggctctgagacccagtgcgtgtcctgaacatacggtggcctgcgtgggcaggagccctgcatggccatctgcaggacccgtgatggcacccggactgccactgtcacctagagggaggcagaagtaatacagtgtttaaagaatgtgtcttgttctagaccagggactcggccgtctctgccatcaaccctgtggcgtatccggcccgtggcgacacagagcaggctgcctgtcctgaaggccaggctcggggcttggggctcaggcagaggcacagcaccttctagctgagagcaccaacgtggggtggggagggcactgggcaccacttaagaggacaggtccggagcaccatcttcagaactcagctatgttggagggtgggggtctgagaggttgttgggggctgggggaggcagcacccccctcaccaggcacaagcaggggtcttcaggccctcccacacaggactcccccacctagcaaccacagaagcctttcctccgtggctccctttggaggccacgtggtagggatgtgacgtgtgtccatcctgcccttgggaaccagaacacagggctggcagctccctggagggtggatctgtggcaccttggggaaggggctccccgatgccatctcacaggagcaagcacttgagaaggtgggctcagcaagtgccacacagcccagggccagatgcggggagctcagactcccagatcccatcctccagggagggcacagagccaccactgctcagacaacccaggccctgactgctcagggctccagaagcactggagtggccctgcctgcctgctacaccccggcctcagctcctctccttccacacccagtcccaggcacccgccaaggctgcagagtggggggccgacgtcaccctggggcctagggccagagaggccaggtttcagcagtgcaccctggccccagcacacccacagcagctgggagaaccagcacaggctccaagggatgggtgccaggcgtggccctgacaggaagggatgtggggcaggcaggggcgccggcagctctgtctgggctgctgggagctgcaactgaggggtctagggtcggggctgacgctggggccattttgtgcactgtttgaataaataaggttttttcccctcgcttttctttcctcttcactgtgcattataccatctaaaaataaaagctgtcaaatctatgaaatttataaattctcatcacatctctataaaatactgccactcattagtgtgactctctcctgtacagaaacaccaagggacccacgacaggcctgccccgcatcgcagggcatgctgcgagccatggacagccgagaaatacaaaagtaaatgcacttgttcaacgtgcccgcgccgtcctcacagcaccatcgcgcagcacatggcca

SEQ ID NO: 33694 - DNA, 2351 bp, Artificial sequence
  DNA replication origin
cagcacgtggcaccaggtgccaggccagttaggtggatcctggggccccagggagcgcagcttgctgggcagtttcataaaatgcagcccctgcccacacccacctggcttcaggctttggatgtctccaaaccaaaaacctcccactgaaaatccaggtgtgatggccgggtgtggcggctcatgcctgtgatccccgctacttgggaagctgaggcaggaggatcacttgagtccagaaggtcaaggtcacagtgagctgtggcaccactgcactctagcctgggcaacacagtgaaaccctgacccaaaaaccaaaaaccaaaacaaaacagatccaggcatggccaagcgattcatggctgggcagggccagtcccgtcccgctgcacgctgaccaccgtgccctgcgctcacgcctgcaagccactcagctggaacctggcctcctcggatatgccgaactgttccagggggtcctgtggggaggacgggtggccatgagccagggctggaggactgcctctgccacctgcagccccaccccggccctctgcagccctgcacacaccttgcccgtcaccttccggatttcgttcctgtagaagatgaggcttctccgcatgaactcgtagctggggaaaagggtggcacggggtcaaatgcccgctctgcatggctgctgtgcccaccccagcagtgcccaccaccgcctggccccacctggcccgacgcagagcctccatccactcctgacactgctcctcgctgctgcactcaaagtgatacttcctctcagggtcctcaatgaagcctggggatggaacacctgtggtcggtcctacccacagccacaagcagcttcctcttgccattgcccataaactgtcccttctctggcccccacaaagatgtgttcatgtcctgaccccccagaacccatgagtatggccctgtatataaacagggtctttgcatataaactagtcaaaatgaggttgtcgccaggtgcggtggctcatgcctataatcccagcgctttgagaggccaaggtgggaggattgcttgagctcaggagttcgagaccagcctgggtgacatggcaaaatccccatctctacaaaaacaaaaattagccaggtgtggtggtggggccttgtaggcccagccactccggagtcagaagtgggaggactgcttgagccaagggggttgaggctgcagtgagctgtgatcacgccactgcactccagcctcggaaacaaaagatcctgtctcaaaaataaagagggccgggtacggtggctcaagaccgtaatcccagcactttgggaggccgaggtgggaggatcacctgaggtcaggagttcgagagcagcctggccaatatggcgaaaccccgtctctactaaaaatacaaaaattagctgggcatggtggcgcgtgcctgtagtaccagctactcgggaggctgaggcaggagaatcacttgaacccgagagggggaagttacagggagccgagattgcaccactgcactccagcctgggcgacataccaagaccctgtctcaaaaaataagcaaataaaataataaagtgaagtaaaaaggggttgtcagggtgggccctaaattctgcttggcgtctgtgtagaaggggaaatgtgggcacagacgtgatgcaaggaggacaaggtgacgcttccacaagccaaggaacctggaggatactggccaccactaggaactgggagattcccctcggcctcagaaggattcggccccacccacaccttcatctaggatttctggcctccagaactgtagagaatgtttctgatatttaagccacctggcctgtggaattttgacagccactctgggcaaactagcagggactccatctttccccgcagaagggaatctcttaagacccaggagaacacccccctctcactcctcctacccccacctgggatttccagcccggggccatataacaatgctagacccatgctactcttggcagctggggaaacgctttgggtggggctggcccacctgccctgtaagtacagcctgggcccacagggaacaaagagcagagtctgggagggacccaagcttaagtggactcggcaggtgggaagggtggtgcccgccaggagaacttgaccttgagctgcccgtggacaatgcactcttgtgtttgaggagggtggcgccaggctggggacacagaggagaccttgggcgcccggggaggggaaagtgcggcgctgcgggtgccccgggctgcgggaagcgccgctggcttccctagccccactcactgatggagaaggtgcc

SEQ ID NO: 33695 - DNA, 948 bp, Artificial sequence
  DNA replication origin
gcctcgtctgtccgaaagtagaagaggaaattcaccaccagcttcaccagccgccgcttcagcactgcgggcacagcgcgcactcaggggcgcaggcagcccccgcccggaccccggcctcccgtccccggcgccccgacccggactccggcctccggcacccccgcccagaccccggccccggcctcccgcccctggcactgtctcggtctcccgggtcccgctcaccgctgcccttcttggggcccctcatgcccagctcggccgccatctcggccggctgccgggacagagcctgcagctccttctcgttgtaccgcatggctccgcggggaacgggaacccgggccgcgccctcccggccgccgtccccgctcaggctggggccggcgccaaaaatgtctcagggcgcagacacggaagcacccccagggctagtgcgcctgcgcaccttgggccagccatgccgcccgcctccgctgcgtggcgctggcgacccgtggctgctggcgtgggcggggtaccggttggtaggagagacggaccgttgttacataaccattaaactgaaataaaccggaccaaggtggaacagaatcaaggcaccccagcgatggctggcacccctttctagagcggccaggcgcaggcggagggagcgataacgtcgcccggagagtgtcagccgctccctcgcgaaagttggccccgtgcggccgcagcggaccgagggttcgttgagagcgttgtgcgcacgcgcagtttgccttccaggccgcgctttcagcctctccccctccagccttttccttcgcgcctcgggaccctctgactcacgccgctgggcgggccaggcatgcgcacaccagagggcccgtctcatttgccccggaagtgctttctttgcccgccgttcgccaaacgaagtcgtggaggtggcgaaacgag

SEQ ID NO: 33696 - DNA, 1612 bp, Artificial sequence
  DNA replication origin
tgaggggagatcaatttatttaaacctatgcaaaatacaactgataggtgtgtgagaggtgggagctttgtggggaaaaaacaaacagcaggtaaaagaaaatcaggctcatggtaaaaacaaagttaattagctttaagggaagatagaatggtacaagaaaagcctagctgaacatattacttgttttagcagccaacaatattttgcatcttatttagaaaacacaaccaatgaccaactatgctcatgacataaactcattcaggatatggaaggtgaaggtgcagtgggtggatgggagggagaagatctcaacagccgtgacaagaaatcagcagatgatgtctacaaattgataaatccatgaagaaatctgttacttactaaggtaaagatcaggggacagcctggccaacctggtaaaaccccatctctacaaaaaatacaaaaattagccgggtgcagtggctcatgcctgtaatcctaccactttgggaggccgtggcaggtggatcacctggtcaggagttcgagaccagcctgggcaacatggcgaaacctcgtctctacaaaaaatacaaaaattcgccggacatggtggtgagcacctgtgatcccagctactcgagaggttgaggcaggaggatggcttgagcatgggagtttgaggctggagtaagctgtgattgcaccactgcactcactccagcctgggtgacagagcaagaccctgtctcaaaacaaacaaaaaaccgatgacgaccaggggaaatgagcttaagaattgaggaaaagtggcctctgggacctgggactagaccattgagaaggaattagtttttcgtggcaacaccgttctctccttaacctagccaacaacctattttccagagctccgcctggctgtttggtgtcgtccaaggatacacaagaacaacggtcacagcggggtgcacctgcaaaatggggccagctaacgtgttctggtcgcctttggcatgatgttgaagccgtcactcccattttaagggaactgaggctcacaggaattacatcacagagccccagtcaactaacaggtatagatgagcatacagaagcgttctcggctacaaggaaggcggccgaaaccatttcagccgcgatcccgattcgaccccaacgaatcttggttgtttcttttttattttgtcaaacagggtcttgctctgttgtccaggctggagtgcaacggcacaatcacaactcactgcagcctcgacctcctggactcaagcgatcttcccgcttcagcctccagagtagctgggactacaggcgcgcgtcaccaaccacgcccggctaattttttttttttttttttttgcagtgatggggtctcgctatgttgcccaggctggagtgcagtggtgggatcatggctcactgcagcctcgacattccgagctcaagcgatcctctcgagtagctgggcctacaggtacaaccaccactcctggctaattttttaaaattttttgtagagatgggggtctcggtgtgttgtccaggctggtctcgaactcctggcctcaagcgatcctcccgccaaggcctccctgagcagtga

SEQ ID NO: 33697 - DNA, 1076 bp, Artificial sequence
  DNA replication origin
ggcacctgggagggcgggggacagagagggctcctggtccctgtgacctcagggcgaccatcaggcagggagcccgaggcactagcctccccagcccggactctaccctgggagcccaggagaaggctggtaagactttcgtggggcacagggttcagttctggagtgaaacagacctggcctcaatgctagcacgctgttggccccctccctgggcagtcaccgtttgtattatttgtttcctgatggccgccctgtccaggcatggggacaggctgtaggaagccctccagcagcctggcccaggaagtgaggtcacttggcaaaggcctcacaggcctggcgctcagccctgccggcctcccttctcattggcccagtggagcccaagcaggccctcctgcagagcccaatgggagaggtgccctgcccggcctgtgcagacccttctggctccgacttggggggggcccaggggaccccaagcccgatgggaggggcatcctgcccagcctatgcagatccttctggcttgcacatctcaagggggcccagggaaccccgcagccacgctaccttgaaggcaatggtctcgtagggctcggcggccatgagcaggtactgccagcgccggtccggaggctcgatcctctgctcgtacgcagacatgaagcggtgacgtggcatgatgccctcggcgatctcagggtagtcaatctgcagggacacggccgggtggcagagccgcctcttgggtgcctttggccgccccccacgcccaagtccctgatctcacctggaagaggaggctctgctggcccatctccgagtctctctgcttggtcactgcaacacagaaagctctcaggtcccggctgcttgtcctctccgaagctgaggaacctggggcaggctaatgccacccactgaacgagagcgggaccccgggggaggccctgcagctctggcaaccattagacaatctccgcccaggctctgggattctggtataggtgaaggcacaggtgcgccagagctgagctacctgcggagtcactcaggcagggaccgaggat

SEQ ID NO: 33698 - DNA, 1200 bp, Artificial sequence
  DNA replication origin
gggaggtatgttccctgggccttcggagggaagtgggggcctcagcattgggggcatgggagttggggggtgcaccccaggatttgaggggtgaactcccggaggctgagggtggaccccaggagccgacggatggaccccgggaggttgggggtggacccccggggcctgagggtgcatccctggggctggtgggtgcacccctggggcctgagggtgaacggcgggggctgctgggtgcacccccggggcctgggggtgaacccccgctgatgggggaggatggacccctggggctggtgggtgaaccccaggggctggtgggtggactccgggggctggtgggtgaaccccgggggctggagggtggactccaggagctggggggtggaccccagaggttggtgggtggaccccaggggctgggggatggacgccaggagctggggggtggacgccaggagctgggggatggaccccagatgcagggggatgcaccactggggccggggggtggacccctggagctggcgggggtagctggggtggtcccgggggccctgagggcgcaggccctgtggggggcatgggtggcagaggcaggcctcctggcgggggcggtggcaaagactcaggcagcggtggccgagggggcagaccgttcatcagcgggggtggaggccgcttcaccccaggggggccagcagggaggctgggtggagccgggggcttctccatcttaaagtggaactggaggaagaactagagagacggagaaaggttcagcaggcacgggtggggctagggcagggctagggccgccagggctgggtgggaaggagccaggctcggggcgagccactcacctgcttggtctcccggttccagtgtgtccagaacttgccctccgccttgtcgatctctctgctcggcacctgggagggcgggggacagagagggctcctggtccctgtgacctcagggcgaccatcaggcagggagcccgaggcactagcctccccagcccggactctaccctgggagcccaggagaaggctggtaagactttcgtggggcacagggttcagttctggagtgaaacagacctggcctcaatgctagcacgctgttggccccctccctgggcagtcaccgtttgtattatttgtttcctgatggccgccctgtccaggcatgggg

SEQ ID NO: 33699 - DNA, 1581 bp, Artificial sequence
  DNA replication origin
ggggagaaggcagcagctctctccctggcaccgaggcaggggcaagtctaagagctgggcttcggggacaggacagagtgtggtgcccaccttccaggccacggacccgcaacccagtcctaggaacaagaccacagcctccctgcccagggtgggggctctgccagcccctgatcttccctaggaggacccggcccacctgaaggaagacggcggtgccaagcttggggctgggccccacataccttcctccaggtgtaggaccaccaggcgctgccccccagggtcccgcagccaggcccccagccgccgtagagagggcaaggcagcctgcctgtcaccggtgttgcagaccccgaaggtggccaggtctcgggggccccagcgggccctctgcacggcccccaggaaggcctgctcataggcgcttagagcccccaccacccgcaggggggagctgctgccattgctgtccccgcccagtgccaccaggcacagaggctcttgtgggctgcctggaggccagtccaagtcttctcggaagatgaggccactggtgcccacagctggctcctctgctctgagggcctcagtccccagcagagcccccagggcagacagcactagggccaggctggtgagaggcaggtcccgcatcgtgggtgctgccaggggctgggctgcctgccttaagtgagccgagtggaaggtggggtgtttgtgcaggacagacccctatctcctctgccgcgaccttgggggacagtgcccggcgcccccactccaggcagagtggccttctcaaagagccctttctgtccctggcagcctatctccctccccagtgatagagctgggcctgatgtgtcaacatgccgtccttgagggccatccccagaagacacaggagtgggaaccaggctgggagtgacggccaggcaaccaaactagacagcgctgggggcggggggcccagatgtcctgggtgctgaggtgtgggcctggaggaggagggtcccaagtcagtgggggcgccctgtccctgctcaccctccccacccctggtgggctatctggagaccccaaggatatcgtggagtctgctcttccctccccagaacaggaccccagatcccctcctagctggctggtggggtctgtcctccaccaggccatctccaaggtacagccatctctcaggcctcccacaggtgtctcctggcgggccccaggccctccccagtcggcccaaactgggggatggtgctgtgcctggcactcccacacacactgacacagtagggcggcgctgcggacatcagtgcactcagggctgggggaggctgtttaatgagcggggggcagtacaaaagagcagccttctctcagtgggaaaaggcaagagcacctggcgctgggcttgctgggggagggagcagcttctcagttggttgggggagggggaggtatgttccctgggccttcggagggaagtgggggcctcagcattgggggcatgggagttggggggtgcaccccaggatttgaggggtgaactcccggaggctgagggtggacccc

SEQ ID NO: 33700 - DNA, 1505 bp, Artificial sequence
  DNA replication origin
cagggccaggcgcggcgcggaggcccgggccggggggacccgcagcgcccgcaccaggcgcgtgagcgtctccaggaaggggtctgcgctgggtggcgactcctcgagttccgcggatggcctggaacccgcaattggaggagttgagagcggccacgaggccacgccgcccccgcccgctcctgccccgtgtcccggtgcctgcgcgcacctgggcggcgggaagggcacggtgtccagctggccgtgcgcaggcagcggcgcgggctcggaccgcggcagcaggagcagggccggggtcatccgtgtgaagcagcggtggtcgtcgccgaacagcagtgcctgcagccgggcggtactcagccgggagtctgcggtgggtgggcacgcggctggctcaggggctgggggcccgggggcagtcgacccggctccccgtccctctccacgcggacctaccctctccgcggggctgcagggtcaaggccagcccggagccgcgccaggcccccgcagggcggtccaccgctaacaccaggtagcgggtgtctcgggaggggcagaggctctgcggagaccagggctcagcccggctggatggaggcttacccagccccgctctaccggtccccttcctcccatcgccactggttctacgctgttctcagtactgcagaccctgcaacaaatccatgccccccgccacggcccgggcactgccccatgcaactccctggtacctgggcacccggcagcccagccctcgtcacagtgacctcagggccaggcccagggtacagcaccagcagcgccagctctggggggccagctcctccaggcgggggctcctggaacctcagcgagggtgttggctcccaggtcactgcagccgggacagcaggggacgcctgagccattgaaggccacaccccccgggaatctttgggatctgtccctgccgctctggccactgtgcaggggacctcaagcgggggacaagggtgcccctcttagctgccttcctgcagccagggagcggtgacggcaggggcaggcaggggctgcgtctgaggctgtgggtggggctgccgccctggggtctctgggttggggtgcccgatgaagccccttccccgcagggagtatcttaggccagcggccctgagaacaggctggggctgtgggaagaagggttccactggccccgagccctgcgtcgtcttcaggggtggggagaaggcagcagctctctccctggcaccgaggcaggggcaagtctaagagctgggcttcggggacaggacagagtgtggtgcccaccttccaggccacggacccgcaacccagtcctaggaacaagaccacagcctccctgcccagggtgggggctctgccagcccctgatcttccctaggaggacccggcccacctgaaggaagacggcggtgccaagcttggggctgggccccacataccttcctccaggtgtaggaccaccaggcgct

SEQ ID NO: 33701 - DNA, 903 bp, Artificial sequence
  DNA replication origin
agcctaagttcgaggcccaggcgcctccatcagcgccgcctgcgccccgggccgaggcagaggtcagacccaagattcccgggagtcgggaggctgcagagaacgacgaagaggagcccggcgaggccaccggagaggccgtccgggaggaccgtgtgaccctcgcagaccggggacccaaggagaggcctcggagagaggggaagccgcggaaggagaagccgcggaaggaggagagacctaagaaagagaggccgcggaaagaggagaggccacgggccgccagggagccccgggaagccctaccccagcgctgggagtcacgcgaagggggccaccggccgtgggcacgggactccagggacgccgagcccaggaagaagcaggcctgggtgtccccgaggcgtcccgacgaggagcagcggcctgggagtcgccagaagctccgcgcaggcaaggggcgggactgagccggccccgcgccggagtccaggggccccttctggacgccccgcgactctggcgaaataaagcgagtgctgcggccgcagagtcacctgctcctttacgcctggacccggcaccaagtccggggcctgaaagacggtggtggggcgcttcaggcaggggagagacagcgagcgctacagggcggacccgggccgtgcgcgaggagagacggcaagggaggtcccacgggccccctaacacgcacggacaccccagccggttgcttgctggtctttattggggcgatgcttggggtccgaataaatatgggaaggggcgcgagctggggcgcgtccggaccctcggggcaggagtccgcgcggcgcaggggtcaccggcagccacactcggtggccaccatgttgggcacgtggtgcgcgctgatgcgctcct

SEQ ID NO: 33702 - DNA, 1676 bp, Artificial sequence
  DNA replication origin
tgtggggtgggaacggactggtgtgaggctcaggtgccggagctgggtccttggatcttggagggtggtgtcctggttgagtggcgtcgaagtgtggcaggcagcgagtcaacgggcagggagcctctactaatgcgtaataataccagctatgccactcagctccgggaagttaccttccagaaactctaggcatccccgtgcagctgcggggcacccggggctgggttcacctgcgcccggggccgcacaggcaggcagagagagccgggttcagggcacaggcctgtctcttgtcccctgcgcccggggaagggggcggcacagagccagtgaccacagcgcagcgcgcacttgcccccgcaggccctcggagcgtccccgcgcgcaagaaggcgcagaccgcgccgcccctgcagccgccgccgccgcccccggccctgagcgaggagctgccctggggagacctgtcgctcaacaagtgcctggtgctcgcctcgctggtggcgctgctgggctcggctttccagctgtgccgcggtgagcgcaggctccccagaggtggggcgaggctggggtccacctgtgcgcctattcctccaaggaaaggcgctgtgccgccagggtggggtctgggagcctcctctccagggctgggtcttgcacgcccccaaagttggtttgtgcatctccccttaagtgacgggccttgcgcgcccctctcacccggtgtggaccttttgcggggcccattcccctcgccgcgagtaggttctggcttccggatgaaccttgtgcaacccctcctgcctcgtagcgttctgccgcctttcccctgcgccctctctggggaccgctcagctcgtgagcgccccccgggggcactcctgcgacccctcccttgctaggggcctcctacagcccgtggtcggggggaagaatgaccaattgaaagagcgaggttcggagaaggggcgccgcggcagcggagtcccggagtcccttcccacggctcgggggcatccttagtctcagccgtaccgggggagccccactccaactgtccagggaggggggctctaggggtgagggagggatggacagtgtggaccgtgcctcggcccagctgactcgggtcccgaccctgtcgctgcagacgccgtccctggggaggcagcactccaagcacgtgtgcccgagccctgggtcccgccaagctcagccccgagggagccatcgtcgcccctggtaagagcttccttccactgaccgcgggcattgggaccttcatccccaaggaaagaaggagcccgggccggggggaaggtgggcgcttaccccaggaccccactctgtcttgcagcctaagttcgaggcccaggcgcctccatcagcgccgcctgcgccccgggccgaggcagaggtcagacccaagattcccgggagtcgggaggctgcagagaacgacgaagaggagcccggcgaggccaccggagaggccgtccgggaggaccgtgtgaccctcgcagaccggggacccaaggagaggcctcggagagaggggaagccgcggaaggagaagccgcggaaggaggagagacctaagaaagagaggccgcggaaagaggagaggccacgggccgccagggagccccgggaagccctaccccagcgct

SEQ ID NO: 33703 - DNA, 1345 bp, Artificial sequence
  DNA replication origin
agctgccaggccctggaggaccactctgcgctggccgagacccaggaggacagggcttcaggtacccttgtggcgctggcgggaggaagcccttccctgatggtccccttgagccaggaggcccatcttcagagactagagcttcttagcctcccacactggactggcttatagtgtgctccccatgttcaacccctggccctcatttctgcctcaggggtctgtaaggagcccccaaggaagacaggtgctgggccacacagatctaggttcgaatcccacgttgccactgaaatgctgggtgtctttgggcaaagctgtctccaagcctgtctgctttctttatatttttatatatttttattattattttttgagacagagcctcattctgtcttccatgctggagtacagtgacatgatcataagtcactgcagccttgacctcccaggctcaagtgatcctcctgcctcagcctcccaagtagctggggccacaggtgcaggccaccatgcctcgctaatttttttttttttttttttttagagatggggtctcactatgttgcccaggctggtctcaaactcctgggctcaggtgatcctcccacctcagtctccccaaaatgctggattccaggtgtgaaccactgtgctggcctccacctactttcttatctataagatggggttagtcacccgcacgtcacccagcagggccaggggagagggtgggattggcctgggggtccccacaaccttgactctgcctgtgttcccacagcgacacccaggctggccgactccggcagcgtgccccacgtgagtagctgggaccctcagcctttaacccaggacgcctggggagttggggacaagccgaccaagggaggcaggtgtctaaagcccacgggaagggtttggcactggaaggaaacatgtggaatgtctcgtgataaccacaggactctcaggtggctgaaggccccagtgtggacaccaggcccaagaagatggaaaaagagcctgccgccagggggaccccaggaacggggaaggagaggctgaaagccggagcgagtgggtttgcaggaggcatgggtgaggtgtggggtgggaacggactggtgtgaggctcaggtgccggagctgggtccttggatcttggagggtggtgtcctggttgagtggcgtcgaagtgtggcaggcagcgagtcaacgggcagggagcctctactaatgcgtaataataccagctatgccactcagctccgggaagttaccttccagaaactctaggcatccccgtgcagctgcggggcacccggggctgggttcacctgcg

SEQ ID NO: 33704 - DNA, 1461 bp, Artificial sequence
  DNA replication origin
ggggtgtgaaggggtgttgcagaggactgtaagggtccccaattcctggagctgcccccatgcacacccaggggccacacaccagcctcccatgcttcttgggcccctcccccactgccacgcaataggccccttccaggtcttggagccccagggctgggtggtttttcagcctagatacagggacaccctaatcccagcagccagaggccatggggaccctgaagagtacagctttgggtctgacttgaagctccttgcgacctccagccaatggcactgtctctagcctcggtttcctcatctgtcctatgggaacagagttagtgggacaaggcagggtactctgtgtcaggatcagaagacccccaaccacaaccgggaccctcctcccctgccccggcctgtcacgaccagagccaggatggttctgctgctggggcctgagcctgtagactcacagggtcacgcagcaggatgtgggtgcccagaatggcaagtcagggtggcccagagggagaccccatgagagcagaggcctgggaggggctggggcacctgttagcctgtcccgctggcctcaggcaccagataaaaatagtccctggtctcagagaacatgagctgactctggggccaagagtttcggtttggggtgcgtctgggactcattgctgtgttgtcctgcaggggctcccgccctctctgggccagagcagcctgggctactgtactgatggatactggaccccagtgaggctgggcggtagggaggggtcccagggcaggcatgcggggtcagagagatgcctggagtgggcgccgggccatgcctggcatgagtatgaatttgccgagtgaggaggggtgggaggacggggcctgttagttggtgtccgcagaacctccaggtcaggcccaggcctgtggcagagactcagtaaatgcaagaccttgttccccacccctcccagcctggcctgggacctgctgctgctccagccatgtccatgacaaccagagcctgggaggagctggatggcggcctgggcagctgccaggccctggaggaccactctgcgctggccgagacccaggaggacagggcttcaggtacccttgtggcgctggcgggaggaagcccttccctgatggtccccttgagccaggaggcccatcttcagagactagagcttcttagcctcccacactggactggcttatagtgtgctccccatgttcaacccctggccctcatttctgcctcaggggtctgtaaggagcccccaaggaagacaggtgctgggccacacagatctaggttcgaatcccacgttgccactgaaatgctgggtgtctttgggcaaagctgtctccaagcctgtctgctttctttatatttttatatatttttattattattttttgagacagagcctcattctgtcttccatgctggag

SEQ ID NO: 33705 - DNA, 2365 bp, Artificial sequence
  DNA replication origin
aataaatatggaactaataataaaatcacaagttacaaacagcggaaagaacatgtcaaactattaaacagtgtctgtttgggggcgggaagatgacaggtgctttacagtttttgctttcagcttctctttgtttcctgtttgtctctgccttgtgtcatacagaaaaaaatgagagccatttctttttttttttctttttgagacagagtctcgctctgtcgcccaggctggagtgcagtggtgccatctcggctcactgcaaactctgcctcccgggttcacgccattctcctgcctcagcctcccgagtagctgggactacaggcgcccgccacgacactcagctaattttttgtatttttagtagagacggggtttcaccgtgttagccaggagggtctcaatctcctgaccttgtgatccacctgccttggcctcccaaagtgctgggattacaggcgtgagccaccgcgcccggccgagagccgtttctaaagcggagggagtggggaccagggaaccccagcccttgctttgctgaaggcgggctggccttctgggtctcttggtagttcctggggaggccctattcactcagaattattattattatttgagacagagtctcactctgtcgcccaggctggagtgcaatgatgtgatctcggctcactgcaacctccacctcccgggttcaagcaattctcctgcctcagcctccccagtagctgggattacaggcatccactatcacgcctcactaatttttgtatttttaatagagacaagatttcaccatgttggccaggctggtgtcaaactcccgacctcaggcgatccgcccgcctcagcctcccacagtgctgggattacaggcgtgagccaccgcgcccggccattcactcaggatttttaacacacaggcctcaccaccaaaatccacttcccctcttccctcaggactcccagagtcaccatgctttgcaggtagggctcaaacatctgcctgcaggccttagaatgtgcctttgggggctgagagaccccgggtcctctccagagcagaggcgtcaggtttctctgcatgacggtgtgggagcaggcagttccgagtgtatgagcctgccagagccacagaaacaaatgaccccaaatacagtggctttaaacagcaggaatgaatgcattgcaggggctcccgcctgggatcccagcactttgggtggccaaggcgagcggatcacatggattacttgcggtcaggagttcgagagcagcctggccaacatagggaaaccctgtctctactgaaaaaaaaatacaaaaattagtccgggtgcagtggctcacgcctgtaattccagcaatttgggaggccaaggtgggcggattccgaggtcaggagaccgagaccatcctggctaacacggtgaaaccccatctctactaaaaatacaaaaaaaattagccgggcgcggtggcgggcgcctgtagtcccagctactcgggaggctgaggcacgggaatggcgtgaacccgggaggcggagcttgcagtgagtggagatcgcgccaccgcactccagcctgggagacagagcgagactccgtctcaaaaaaaattgaaaacttaccgggtgtgatggtgcgcgcctgtagtcccagctgcaggcgctacgtctccctgggtggcagtggcgagtgctgagtaggagcaatgccctgccctgctgcaatggcagggaagggtgggggactccccggctgtgacctcactccagcgggcatgctgattggcccacccgcggtctctggccacctgttgccgtccatcacggggccaccctccccatcctccgtcctgtccacaaggctcagcaaagcggctggcgggtaagcgaggctcgggggtaaggaagtgaggctgggggaatcccgggcagaggtgtgggctcccggggtgtgaaggggtgttgcagaggactgtaagggtccccaattcctggagctgcccccatgcacacccaggggccacacaccagcctcccatgcttcttgggcccctcccccactgccacgcaataggccccttccaggtcttggagccccagggctgggtggtttttcagcctagatacagggacaccctaatcccagcagccagaggccatggggaccctgaagagtacagctttgggtctgacttgaagctccttgcgacctccagccaatggcactgtctctagcctcggtttcctcatctgtcctatgggaacagagttagtgggacaaggcagggtactctgtgtcaggatcagaagacccccaaccacaaccgggaccctcctcccctgccccggcct

SEQ ID NO: 33706 - DNA, 716 bp, Artificial sequence
  DNA replication origin
atttaaaaaaataaaaccagtaatatcatcgatgattaccaggtgttactggaaataattctggcgcggttggacaaccccccaagcacccgggggcctacccaggggaggggtcccgctgcgtgaagggaccctagggagggcgacgtggaccacgacagacaaacgggcactcgaagacccccgaaaatcggccccagcgagccgcccccgcccccaaggcacgattgtgggggcggggacggctcggggcgcgcgcagcgcgtacccggcgccacggcagccccgcccccagaaggacgcgcgcaggagggggcgtggcccgaggctcaccaaccaatctccagagagcctcttcctttccctttccctttcaccaatcaggcgctgggaggggcgggcgcgactttttttcccggcggccccgcggctctgcccctcgtgcggtcgcgttcccggcggcgcggggggcgtggcctgggcgcagcatctataaaggcgggcggcggcagaggcgccattttgcgaacggcgagcagcggcggcggcgcggagagacgcagcggaggttttcctggtttcggaccccagcggccggatggtgaaatcctccctgcagcggatcctcaatagccactgcttcgccagagagaaggaaggggataaacccagcgccaccatccacgccagccgcaccatgccgctcctaagcctgc

SEQ ID NO: 33707 - DNA, 960 bp, Artificial sequence
  DNA replication origin
cggccccgcggctctgcccctcgtgcggtcgcgttcccggcggcgcggggggcgtggcctgggcgcagcatctataaaggcgggcggcggcagaggcgccattttgcgaacggcgagcagcggcggcggcgcggagagacgcagcggaggttttcctggtttcggaccccagcggccggatggtgaaatcctccctgcagcggatcctcaatagccactgcttcgccagagagaaggaaggggataaacccagcgccaccatccacgccagccgcaccatgccgctcctaagcctgcacagccgcggcggcagcagcagtgagaggtaagtgccccgcccccgtccgaagcttccagaagcgccggccgcgcaggcctgcggggggccgtcctcggggcgccagataggtccccggcgcgcgagatccgcccctttgtcaaggccagaatcgcgccggggacgaggtaggcgcagggcgggcctggaggtcccccccggccttagcagtgctctcgggggagtcgggtttggggggcaagggtgcggagttggatttggggggcaccgtccggggcgcctgatttgcgggaggggcatgggtcggaggtcggatttgggcgcaggacggggagtcgggggaggcgtgtgtcttttgcggggttcgcgggatgggactcggcttcggaggaggggagaggcttctggtcgagggttggatttgcggggcgcagactgggaattcggtttggaggaagggtgtgcggtcgggtcggatttgggaggcgcaggatggggcaatctggttgggggcggggtcggccttggggggctggtccgcggacaggcagggcccgcggggctggtgaatctgcacttttcggtcccggccgtcgagcgtgcgctgcgggagcggggagcgctttgcggtggacgagctcccgcgggtccctgttgcctcg

SEQ ID NO: 33708 - DNA, 1419 bp, Artificial sequence
  DNA replication origin
ggctgctggcgctgccggctgcgcgattgtgaaaatctcccccggggcgcgaggccgcgtctgcctggatgacgcaaccgggagggcccgggcctggagcgggggcgggggggcgggcggccgggagccggagcggggcgcgtcctccatgaggtcaggctaggcccgcccggtcttcgcggggacaagcaagagtcccagattttggccgtagtgcagggtggaaaggggaagccgcgacagaactgaaaaggggaagcgctggctgtcttggtggccggggggtgaggctctgccccggcggggctgcgtgaggggaaggggccccccgccctgggaaggttgggctgtcctgggcggcgccgcccgaggagtcggggctcagtgactgctgcccttgtaggtgcttggggcaggcgttggagctgccttcgggaagcctcgggggtgtgggaccgggtgggcccctgcctgggcggggcggggtcttttggccgaggcaggggtggggatgtgctgaaggccgcccggacgccctggaggggtctccgcccggagcctggcgctgcctcgtgacctgcatcatcttcagttccagggtctccctccactgctgtagtaacccgggtccggggcctcggtggtgctcctgatgcccctcacccacccctgaagatcccaggtgggcgagggaatagtcagagggatcacaatctttcagctaacttattctactccgtgagtatggggccgggcctgctggggctgctctggggccacaggtactttcttgtgcaccttgctgcccgtacctgtgattgaatgtaatcgtgggaaccctgagtttcatcagagccggcgcacagtctcctgcagcccaggcgttgcctgagctcaacacggcctaggcccaagctttagcgctgccgggttcttggagtcctgtggggtgagtcagggttctgaattgggctgcaccccctggacaggatgatcggctgaatgtaacagaggaactaacgtccaacgacaagacgaggattctcaacgtccagtccaggctcacagacgccaaacgcattaactggcgaacagtgctgagtggcggcagcctctacatcgagatcccgggcggcgcgctgcccgaggggagcaaggacaggtgaggggcaaggacaggcagggagtgctcacccaggggagcagggaccaggtgaggggcaaggacaggcggggagtgctcacccaggggagcagggaccaggtgcgggttgctgcccaaggggtgcagggacagatgagggagggcactgccttcaggcagcacatatgggggccaccatcgctttgttggtggggacagggtccccccttttttttttttttgagatggagtcttgcttttgttgcccaggctgg

SEQ ID NO: 33709 - DNA, 1247 bp, Artificial sequence
  DNA replication origin
gtgacgctggggactggtgggaggagtgcctgggaccacagagggccctgggtggaggggtcgcgggggatttggcacccaggcagctgcgggacccctcccacggaggagaccccctgggctgggaggccgggccctcagcttggcgccagccttgccactgctcgcttgaagccccttcctgcctcgcgtccccttccgccccagcctgggcctgcgcatggggatgtctgtgctcccaactcaacttttgagttcgccgtgttactggccgcccctagggacctgcagcgccgttcggggcagcagcacttccggcggggtcgtggcctggagcgcttccgggtctgcaaccccgccgtctgcccggccgcagcgccacctgccggccgcatccgggagcgccacccggaaaatcagggccaggcctggccgggaaaccggctggaaagaggaggaaaggaggaactcgaaaagattgtagacttggcgagcgggccggggggatattcagccgtctgagcggtggtggggtcggccgggaggacaaacctggacacagatacccccagctcatttgggcagcgcaaatgcagagaaggggcattagagctgaggccatgcaggatgaataggagtatgaagcagagtagagggggctgttttctggtgtaaaaaacaacttgggcaaaggcgtggaggctggaaagtaacctccagggatgaacgacatggggttggagactctgaggagactttggaagagccctgtatgtattctgaggcactggggagccatgggaggtgtttgagctggagagggacctcatatctggggttggaaagatcctcccaggactgccatggggaatggaatggaggggcaactctgagtctccaggaaggaagccacaggcaagggcagtgcagtgtgtcagaggcataaaggaagactccatccccctccagtgagtctcctctgtgcctgtttattacatcatcctgtggtattaagtgagcacctactgtgtgccaagcctggcctttgcccccagggaactcacagccttgtggacagtaacagaggaataaatgctcctgagagtgggcggagaacgcagggtaaggagctagcgatggcccagagtgggcacctttatttgtttagagaaagtgaaactgtagccgggcgcggtggctcacgcctgtaatcccagcactttgggaggccgaggcggacggatcac

SEQ ID NO: 33710 - DNA, 1332 bp, Artificial sequence
  DNA replication origin
ggaggggcaactctgagtctccaggaaggaagccacaggcaagggcagtgcagtgtgtcagaggcataaaggaagactccatccccctccagtgagtctcctctgtgcctgtttattacatcatcctgtggtattaagtgagcacctactgtgtgccaagcctggcctttgcccccagggaactcacagccttgtggacagtaacagaggaataaatgctcctgagagtgggcggagaacgcagggtaaggagctagcgatggcccagagtgggcacctttatttgtttagagaaagtgaaactgtagccgggcgcggtggctcacgcctgtaatcccagcactttgggaggccgaggcggacggatcacgaggtcaggagatggagaccatcctggctaacacggagaaaccccgtctctactaaaaatacaaaaaattagccgggcgtggtggcgggcgcctgtagtcccagctactcgggaggctgaggcaggagaatggcgtgaacccgggaggcggagcttgcagtaagccgagatcgtctcaaaaaaaaaaaaaaaaaaaaaagaaaaagaaagtggaactggaacagtatggcagagggaacagcctacacaaatgcttgggggcgcgaaagaagttggtgtgtcacggaggaacagggagggaggcagggtgggcgcagagggattgaggggaggtggcagggaaccgcggggactgttttagggaaggtgagtccagaccccgctgagatgagctgggtgtctaaggtcccagggagccttcccttcccgtgacaccaccaagcaattctccaccagggacaggggcattcacatgcccaaaatcactggccatcttcagcacaagggggtgctccagagccaggaatgcctctggtcccggcattggcctctcatggagacaatgacagaacccacgcggaagagcgccctggctgctggggaaggcagaacacagagagacattgatcagcggggttgtccacacctggaagtggcgtgggggccctggcttcagagagctgctgcccaacacaggaggcgctggccagcccccagccctggaggggcagctgcattcctgggaagcccttgacccacatccccagcacgggaggggaggctctggagtggggcattgctctctctgctgcgctcctggactctgcaggaagagggtgtcttggctatcatggagacgctgacctcagccccagccctgcctcctgggcaggcctggaccaggtgtgttcgccctgggttggggtcagtcccacagcagcgccagggcctggcccatcgag

SEQ ID NO: 33711 - DNA, 1721 bp, Artificial sequence
  DNA replication origin
agagcagcgcctgcagcgcgccccgcgtccgggacgccgagggccgcaagcgggtcagctgtgctgccaggagctccaggcccgcggccaaaggcgtggtcgagggcgcagcaaggctgagcagcgctcggaggaggctgcccagctgcggcgcgtgggggcccggggatcccgggggtccagggggctgcagacagacgcggccaaagtcagtgaggagcaggcgtgggggccccgtcgtcgcacagccccgaggtgccaccagcagcaagttctccggccgcaactcgactagggccgcgccccacgcctccaggaacttcagggccgcgctcagctgcagcagcagcagggccacagcccacacgaactcctccggcggctgcgtgcaggcctccgccagccactgcgccaccgtgcgctctggaacctcggctgccagcgccactgcgcctctccagggcgccccgggcagtgtgccttcaggcaccaggccacacagcccctgcagattgaagtgtggagacagggaggcctgcagctccaggccccacgggtggggcacgtccgccccgggcttgggcacctgcaaggcagagggggtgtcggggcctggatcactgggccccccacaagcaccgcctgccccagtgctacctgccccgaagcctcccacgcacacccccaaactgcccccactacggctaggggctgcctgcatccctccagcagcaggaggtcagtgttaatttggaagttagtcaccagtaaggactttcaggaaagttaagccagggaagaagatgttcctgggcaatgagttcgaaagcagattcctgggccgggcgcggtggctcacgccttcccagcactttgggaggcagggggatcgctgaggtcaggagttcgagaccagcctggccaacgcagggaacgctcgtctctactaaaaaatgcaaaactagctgggcgtggtggcgcgcctgtcatcccagctacttcggaggctgaggtgagagaatcgcttgagcccgggaggtggaggttgcagtgagccgagaacgcgccactgcactccagcctgggcaacagagtgagactctgtctcaaaaacaaaaaacaaaacaaaaaacacaaaagcagatccccggccagagaggtgtgggaggggttttgacaagagctccaaggccatacccatggccccatactttagaaacatggtttcctgggttaactgcgttgattcacgtgttagttgcaaaataaacaagtctaatatggtctggatctgtgtccccaccaaatctcattccccagtgttggaggtggggtctggtgggaggcgacttggatcttgggggtggtttatcatgaatggctcagcaccatctcccttggcactgtcgttgggataacgagtgagttctcgtgagatctggctgtgtaaaggtgagtagcacctcctccctcccttcctcctgctcccaccgtgtgagatgcctgctcccgcctcgccttccactatgattggaagcttcctgaggcctccccagaagcagaagccaccagaaccatgagccaattaaggcccttttctctataaattacccagtctccagtattcctttttcttttcttttcttttttcttctcttttgtttttcttttttgagacagagtctcactctgtcgcccaggctggagtgcaatagcccaat

SEQ ID NO: 33712 - DNA, 1065 bp, Artificial sequence
  DNA replication origin
ttgtatttttagtagaggctgggtttcaccatgttggccaggctggtcttgaactcctgacctcagctgatccgcccgccttggcctcccaaagtgctgggatgacaggcgtgagccaccgcgcccggctccagtatttctttacagcagtgtgagaactgactcacagaaaggccaaatgaaacaagccctgggttatgtctaagatggggcactggggacacctcagagagggtggggctgtggggctcaccttggcgaccaggatgtgccaggcgtcctcgtgcgcgcgcaccacgcggtaatacagggcgtccccgctctctgcgcagggtgagctgtctaggaggcggaagctgtggccggggtggcagggcccggggtggccccccatgagccgggcacggagccgggcatagatggtacggaggccctgcagctgccgcgcagccagtgcagtgtgcacagcctccgggctgtgcagatcgcggagggagaggcccagtggggcgtcagccgggccaaaggtcagctctgcagggagacaggctggtcccactgcagcctggctcttgtccacactgtgggaccccagaaagggtctccgaggcggctgtacttggatggagctgggatggagggtcctgcgggtgggcagtgactgggtccgggttaggatcttcttgggcaggggtgggggcaggggctctgggttggtggagagggacccaggggtccggaggcggcaggccttggagggcagcaggtgggcacggatctgacctgcagggagagacagtgggggagggttgaggacaggcggagtgggaacgggacacgtgactccacctctcagcctcggtttccccatctctaacatggaagtaatgaggctgggcgccggtggctcatgcttgtaatcccagcacttaggaaggtggaagccgaggcaggaggatcactggaacctagggtttgagaccagcctgggcaacatagtgagaccctgtctctgcaaaaattttttaaaaatttgccggacgcggccatgcacaatggctcatg

SEQ ID NO: 33713 - DNA, 1468 bp, Artificial sequence
  DNA replication origin
ggcagtgactgggtccgggttaggatcttcttgggcaggggtgggggcaggggctctgggttggtggagagggacccaggggtccggaggcggcaggccttggagggcagcaggtgggcacggatctgacctgcagggagagacagtgggggagggttgaggacaggcggagtgggaacgggacacgtgactccacctctcagcctcggtttccccatctctaacatggaagtaatgaggctgggcgccggtggctcatgcttgtaatcccagcacttaggaaggtggaagccgaggcaggaggatcactggaacctagggtttgagaccagcctgggcaacatagtgagaccctgtctctgcaaaaattttttaaaaatttgccggacgcggccatgcacaatggctcatgcctgtaattccagcactttgggaggccgagatgggtggatcacgaggtcaggagatcgagaccatcctggctaacacggtgaaaccccgtctttactaaaaatacaaaaaattagccgggcttggtggtgggcgcctgtggtcccagctactcgggaggctgaggcaggaaaattgtgtgaacttgagaagtggagcttgcagtgaaccgagattgtgccactgcactccagcctgggcggcagagcttacagaaggggaaactgaggcttataggaggatggatcagtttcagagagtgatgccacccagcactcagcgactcccacttacctccgtggctttgcacaagcgtctgtcttgctttttttcttttttgaagtcttgctctgtcgcccagcctggagtgcagtggcacgatctcggctcactgcaacctccgcctcctaggttcaagcgattctcctacctcagcctcccaagtagctgggactacaggtgcccgcccgccactatgcccagctaatttttgtatttttagtagagatggggtttcaccatgttagccaggctggtttcaaactcctgacctcaggtgatctgcctgactcggcctcccaaagtgctgggattacaggcttgaaccattgcacctggcctttttttttttttttttttttttttttgagatggagtctccctctgtcgcccaggctggagtgcggtggctcagtcttggctcactgcaccctctgcctcacaggttcaagcgattctcctgcctcagcctcccgagtagctggaattacaggcatgcaccaccatgtctggctaatttttgtatttttagcagagacaggttttgccatgttggccaggctggtcttgaactcctggcctcaagtgatcctcctccttggcctcccaaagtgctgggattaaagggtgggattacaggcatgagttaccgtgcccagcctctctctctttttaatggtatatatttttttctatttcatggctcactgcagccttgacctcctgggctcaagggatc

SEQ ID NO: 33714 - DNA, 2982 bp, Artificial sequence
  DNA replication origin
gagcccaccccagcgcctgctcagctgagcatctcccagccgacctcggggcctgggctcaggtcttgctgaggacccagcacacacggtggtcacagtcaggggtccacacgccctgtcctccgtcctccccacagcccagcagggctgtccacaagaaggagccatcaccccagccctccgcctccctccgctgccacgtgcttcccagaacagcaggcaagagagggccaccccacaagggagaggtggccaccctgccccggcccagaaccatggcttctggggtgctgagtgtccttccaaatgggtctactggagggacttttgcccctaggtacacatgacctctgagccggcctcagacaagccctgagcgtggccccatcatggccggccctgctgacccgtggctcaggtggggaacgagaccaaagagcacagggggttcccggggatcccggctacgtgcggtgcagtgtagtgacaagaacaaggccggaacaagggcttcaccctgcagggaggcctggacccgggtcctcgggagaaggtgatggaggaagctgggtctctgcacctgcagaggtggggcagatccaggaccaaagctggggtcacaggccgactgcagctctggtcaaggaagagcttccctgaggtcaccgcccggttgctctgcagatggtgggcatcctgtcacggggggcaaacaagcaggagctgaggttttgcagaaggattcaggcaccagaccgggaccacagggaccatctgtgacctggcctcctcacagccagttcttgcccctcccctccacatcctccagaggacagttaggacattgctgggggcagggacaggaaccactgttgggccaaaacctcagccagaaaggggcttggctgccaaccaagaggttaggacagaccctccaggactttgcgggaagggctcaaaagcagctctgctcctgcccggctatgtgatctcagctggtgactgaagaccacctagaccatcagtgtcctcatctgtaaaatgggtctgagggtcaaacctattaccctgtattcagaggccaggcctgcagatgagcttgatggcttgacttggatcctggatccctgaagactgctctgagatcgatcagccagagagaaacagagagaaagctggctcagccctgaaggctttgagcaaaagtttcagaaggagctggaaggagacaacagcccgttctccctgagctgtggccgggagggcccaggccagcaccacgatgtacagatggcccagggggctcgacatgagtgagggctgaagttcgtgcaaccccaaccgccacccctgaattgggcagaaccaatttttttcttagcacctgtctgactctgcttaccatgacaaccccaagggccccccagaattgatatccaagtgcctttagcctatcaaagacaggagggggtgcattctcggccaggttagggttcacagagcatccgtatattaggatttcccagccccctgagccccccaccccatcccaacatgaactaagacccctcagcacccccacccctcatcctgctgtatttggttcaaatccaataaaaatggaaccgatttaataacaaacttcagattttgttcttactcccatgggagcaacagggggcagggctgagggatgaggggctgctggggtccccaggggaagccaaccctgagggaattccacgccactagtgacatgtgataggccacacttctgcagcgcccatgctgttcccggcgctgttccaggcgctgtgtgtgttccctcctttcacgctgaggccagccctgtgagctgggtgggtcctgctaacgaacccattttacagatgggtcgagcaaggggcagagggtggagggaagccgctctgagaccccagctggggacaggtgggggctgagaagagtgggcaaagctgggccattgggaaactcctgccccaaactcaggccggggaagaaagaagacatgggtccccactgtgcctcctggaattggtctgtcggggagtctgggtgctgctgacagggtcccatgtctgccctgcctgtctctgagggctccgagaaaagccagggagtcttggctttggaagtgagactaataaagtgctttagccccaccccagtcctcactgacagatggggaaattgaggcacagagcggcaacagatggagaaaccgaggcacggagcggtgacaggtggggaaactgaggcacagtgggcatgaagtctcaaaccccacccgcccgggaaggcacagggagaagcttgtgctttttcaggatggaagtggacggaactaggatgcagaagacccggccaagagcagtctcccactcgccacagcccagtgtcactctctgggcctcggttcccccatttgaacctgggactaaggttcctttatttccctgcccttcgggggcagaacagaggcctgtcagggactgtgaggcggccctctctccatgcctggtttcaaggcagctggagggtgaggggggctctaagctgtgggactctcccgtggggactgatttcccgttctctcctacagcaaaggcaggtgaaactattgtcctgtaggcctcagagtccccgtccaggagagccgcctcttccctgtgcaatgctctgagtgcctgacatgaaccaggtgcaacctccaaggtttccatgaaccctgactcatttatggggtgcactcgggggagggcaggggagaccccagctgagaggccctccctgctcaggcagccaagacccagctaaagtaacacccatctccttggtggctggaaacctaagaggggacccctaaaaccaggaccagaccaagccatcctcacgccccatgtctgggtggcttctgaccaagcctgacttgacttcccctcccagacggagctaggacag

SEQ ID NO: 33715 - DNA, 1560 bp, Artificial sequence
  DNA replication origin
agccgggatccccgggaaccccctgtgctctttggtctcgttccccacctgagccacgggtcagcagggccggccatgatggggccacgctcagggcttgtctgaggccggctcagaggtcatgtgtacctaggggcaaaagtccctccagtagacccatttggaaggacactcagcaccccagaagccatggttctgggccggggcagggtggccacctctcccttgtggggtggccctctcttgcctgctgttctgggaagcacgtggcagcggagggaggcggagggctggggtgatggctccttcttgtggacagccctgctgggctgtggggaggacggaggacagggcgtgtggacccctgactgtgaccaccgtgtgtgctgggtcctcagcaagacctgagcccaggccccgaggtcggctgggagatgctcagctgagcaggcgctggggtgggctctgtgtcccaggtgtgagctgtgtctcagttatgcgttgtgcctgtcccaggtgtgaactgagcatgtccctggtgtgagctgtgctctcacgagagccctgcctgcctctgtggtcagctctggtgcccagggcttggttttagtgtcagctgggtgtgagggtgtgtgtctcgggtgtgagctgtgtgtgtcccagatgtgagttctgtgttctgggtgtgagctgtgtgttccagtgtgagctgagtgtgtcctgggtgtgagctgtatcccgggtgtgagctgtgtgttccactgtgagctgtccttgtatcaggtgtgagctgagtgtgtcctgcgtatgagctgtgtgtcccgggtgtgagctctgtgttccgggtgtgagctgtgtgtcccgggtgtgagctgtgtttcccgggtgtaagctgtgtgtcccgggtgtgagctgtgtgttctgggtgtgagctgtgtgtgtcctgggtgtgagctgtgtgtcccgggtgtgagttgcgcctgtcccgggtgtgagctttgctctcacgagagccctgcctgccccctgcggtcagctctggtgccccgggtctggttttagtgtcggctgggtgtgaggtgtgttgcacctgtgtgattgggttccaggtgtgagtgtgtctctgggtgtgaggtgtaggacggccaggtgtgagcaatgcagactttctgcgcaccctccccttggggctgtggggccctttgtgggacccgggtgtccaccgtctccccgatgcgatctgtgtacaaagggctgggggagcggaagcccagggcttgggggcagcagtcttgtgcctcctgggtgtgaattgcgggccctgaggatcctggggtctctgagcgcccccagccaccccgggttggtagacgggagcccatccccccatccttgcagcccgcacccccaccccccagctcagccaccatagcagggacaggaagacgggttgaaatctttagaaaacgcttgagaaactgcaaaaaagacgcatgctgatgaaaaacagtcctgcggttgggcgtctacaaaaaaaggggaagttctgcctggggagcg

SEQ ID NO: 33716 - DNA, 1172 bp, Artificial sequence
  DNA replication origin
gtgaggttgtccaggcgcgtgaagaccccgggcgggatgagcttcagctggttgccacggagacgcaggacgcgcaggcgcggcaggttggcgaaggcgccgggctccacgtgcgcgatggcgttctcgctcaggtccagctcctccagcgcgggcagcgcggccaggtcgcccgggttcaggcagcggatgcggttgcggctgagctccagcaggcgggtctcggccgggatgccgtcgggcacggcggtcaggcggcggcgcgtgcaggccaccgcgcgggtctgcacggtgcactcgcagcgggccgggcagcctccagccgggggcggcgccgcgggcagcaggagcaggggcaggctcaggacgcacagccagcaggtcatggtgcggagcgtgggcctagggccgcgccaccatcctcctgcgcacctgcgggcgggcggggagcgggcagcgttagcaccgttagcacccctccgcggcgcctctgccgccagcccgcccctaacccgtcccagcacggcggctcgctcctgtaaacccagcattttgggaggctgagatggaagaattgcttgagttcaagagttcgagaccagcctgcacaacatagcaagactcccatctctacaaaaaaataaaagatgagccgcatgtggtggtgtaggcctgtggtcccagctactcaggaggctgaggcaggaggatggcttgggcccaggaggtggaggctgcagtgagatatgcttgtgccactgcactccagcctgggcaacacggtgagacccctgtctcttaaaaaaaaaaaaattaaaaattagctggttttcaagtaattgtgaaatattgaaaagtttacccaggcatggtggcctgcacctgtggtcccagctactcaggaggctgagccaggaggattgcttgagcccagggggttgaggccacagtgagctgtgatcgtgccactgcactccagcctgggagatagagcaaaaaaccctgtctcaaaaaaaaaaaaaaaaaaaaaaaaaagcagcattgatccaccgtgtggctgcaattccaatctcctgggtttttttgttttgttttgtttgtgtttgtttgtctgtttgagatggaggctcactctgtcatccaggctggagtgcagtggcttgatctcggct

SEQ ID NO: 33717 - DNA, 2069 bp, Artificial sequence
  DNA replication origin
aaatccaaaaattagctgggcgtagtggcgcatgtctgtaatcccagctactcaggagactgaggcaggagaatcgctttaacccgggaggcagaggttgcagtgagcctagattgaaccattgcactccagcctggatgacagagtgagactgtctcaaaaaaaaaaaaaaaaaaaaactacccacaaataaataaataaaaataaaagaacagggactttctggcctctgttctctgttgtgtttccagttcatcgaagggcaactggtacattttcttttcttttcctcttttttttttttttttttttgagatggagtctcgctctgtcgcccaggctggagtgcagtggcgcgatctcagctcactgcaacctccaccttccgggttcacgccattctcctgcctcagcctcccaagtagctgggactacaggtgcccgccaccatgcccggctaattttttgtattttttagtagagacggggtttcaccatgttaaccaggatggtctccatctcttgaacttgtgatccgccctcctcggcctcccaaagtgctgggatgacgcgtgagccaccgcacccagccccggggtcgcgtcttgtacctgcttcctctctgctgtgtggccctgagcacgtcgccgtccgtctctgggtctccgcctccccgtgtaaaacaggctgaatcaccctggctcctcctggggcatgaactggaggcgcactgtgtgccagcgtcctctacagcaaggacccactcagggaggttctgccccgccggggactctgggccgtgtccagggacatttgtgcctgtcacgactgggaagggggtgctcctggcttggagtgggtagaggccagggacgcttctcagcacccggcagtgcccaagacagagagtcatccacataagatgtccatggggccaagaaagagagacctgcattaattatttaaattaaaaaaaaaaacactaaatctgtcccctgctcacaccagacaccaggatcaactcctgacccggcagacggtgtaaaccaggggtccccagctcctgggattcacctcctctctccctcccactcagggcgtggatttcaacgtgcacagcctcctgggacctcagcagggctgaggattgtgggatgcagagtctcttgggggtctgtggaatcccctaacccagagggtctgaaccagggtgattctgctcccaggggacatttggtaaagtctggggacatctgtggtgtccctggcatggagtgggtggaggccagggacgcttctcagcaccctgcagtgcccaggacggccccaccccagagaacgaccaggccccagtgttcacagagcctggggagaccgcggtttgcaggggctggcctgatcctccccctactccagttccatttggcagctggggacaccaatgccagaacaggaggagcgcgttgaatgttgggggcgaactggagcccggctggaaggaggggagttcggggtgggggacggaggcctggcagtggcgggaggcccagagcgagggaggactctggcctgtgggagaggaagggtggagctggggttggctccgcgtggccggggttacgctggggttctgtgggtcgccctgggagaggtcagggatggggctgggtccctgggctgcagttcaggtggctgggacacaccatcaggaggtatctgtgagcagatggtgttcccatcctgggaggatgggaggtaatgccccaggtgggtggcagcttcctgggaggggggtggtccgagggaccgatgaggatggagatagagagccctgaaagtgtcgccttcccccaggaccacagcatgaggacaagggaggggacagaggcccctaaagaatcagcctggggccgggcgcagtggctcatacctgtcatcctagcaccttgggaggctgaggcaggtggatcacctgaggtcaggagttcgagaccagcctggccaacaaggtgaaaccccgtctctactaaaactacaaaaatgagccaggtgtggtggcatgcaccttt

SEQ ID NO: 33718 - DNA, 1000 bp, Artificial sequence
  DNA replication origin
caggtgatcagcccgccccagcctcccaaagtgctgggatgacaggccctgagccacaatgcccggccccctgtccttaaggagcttacattctggtgcgggtgacaccgtgaaatcagtgtacgggacatcagctggtaataaacgtcacggaggtcagaacagctgtgtcctcgggtgacgtcacctcctcggctctgcgccccgccgtccacaggcgcgaagccggagctggggttggcgaccgagaaccttcctgcctcccctccccagcaaggggcacgtcccaccaggcccggactgcccgtctgcccctgcagggcccctcgctctggtggcgggctcggtgagctctgctgcccggtctcgggagtctgggggagcgcggcgtcgacccctgtggagggaggactcgtgtttcaaggacagagcctcattaccatgcacgaccagccgcagctgaggccgcagaggcctttggcaggggggccgggccggcggcagggacggcgttggcggtggtggacgggagtgggggtctgtcctgaacaggtgggggtggtccctgtgctggcccccgccatgcgatcgcaccccaggactctcctcctcttcctaagccccagcatgtgcctggtgccgcgcgggtgctggaggcacagcggcttccacgcagacgcccgcagcaccacagcctgtgcacggcgcatccacgccctgttacaaatgttccattcaacgccttctagcacattcacagatcgtccgcccgcacctctagttccagaacattccatcacccccaaaaggaagccccgtccccttcagcagtcactcccagcccctccccagcccggacccccacccatctgcttcctgtctctgcgaattggcccgtctggacatctcgcatcaatgcaatcggactggctgtggcccccagggactggcgtctttcccccagcgtcaaggtgggggcacaaacaggtgagaatcgtgc

SEQ ID NO: 33719 - DNA, 1250 bp, Artificial sequence
  DNA replication origin
cagcaccacagcctgtgcacggcgcatccacgccctgttacaaatgttccattcaacgccttctagcacattcacagatcgtccgcccgcacctctagttccagaacattccatcacccccaaaaggaagccccgtccccttcagcagtcactcccagcccctccccagcccggacccccacccatctgcttcctgtctctgcgaattggcccgtctggacatctcgcatcaatgcaatcggactggctgtggcccccagggactggcgtctttcccccagcgtcaaggtgggggcacaaacaggtgagaatcgtgcagcccagctaatgagcagattgtctgaaaaaagcgctgaggagcggagctagcagggagctgtgggggggggggtctgttccgggctgtggctgtgtttgacgggcccagggaagaccctgtctgagctgagacctggatggggagccggggtcagcagggtacagctaagcgaggggcgaggctggccgggggtgtgtctgcgcttgcgggggtgggagccctagctggcaacggcaaaaccacacggggcactgaacccccagggaggtgtccggacttgcatccacaggcaatggggagccatgggaggatatggagcaagagcatggcgagatctgggttgcagttggaaggcgcgtccagctctgcgtggtccgaccccaggtcgccctgcctcacccaaacctggaaagtcttgactctcggctgcacctccatctccagagagcagggcactattatctccctctccacccggttacccacacgcagagctgtggccaatgatggagcatggggaggctgaactggacaccaggtgctgaatcaatggccccttgtccactccagagccaggacaagaactcacgggtcctcacctgaatcggccactgactgccttgggcagagacatcgaagtctctgagcctcagtttcctcttctgcaaaagggaactgcagggttcccagtcacttccctgggctgagcgagtgagaagtcaggcaaggaggttccttccggggaagtctccattgggtgccggctggggtcaggagcccagagtcctaggccctggtttgctcctggccatgtgttcacctcattcattcattcaacaaacattcattcaacaagcattcattcattcattcaacaagcacttaaaaacaatgcctgtgtgccaggcactggttttaagagaaacagcag

SEQ ID NO: 33720 - DNA, 2784 bp, Artificial sequence
  DNA replication origin
gagccgggtctggtccagcctgggggtgcggagctggaagacgcaaagggtatctggggtccacaccggagcctgctccatcgctggagctgacggcccggcctggcggggagggacctgggggcatagggctgagtccccctgctctgggggcgtctgaatagcaccagaaatggtgggcctgggcaccctgagtgggtgccgccacctcccgggcctctggggcctggccaggggaggccctgagtcccattcaacaagtttaggggagcagcacctcgtgccttggtccgggcacaagaaaagccccgggtccttacgctggagaccaccatgtaactgggtttctcaacgtgtgcttggggcgctaacggtgccggtgtcccggcccccccagttctgaggagtcagaacttctgaggcgatgtgccccagaagctgcattttagcaagcggtccctggctaaaccatggacgcagcgaggctgcagacacccttgctccggcgggggtggggagcgggcgtctgctgtgcagtggtatttgcagagggacgatctggggcttggctggggggagccttcagggacaacagagctgtgagaaccagagcaacccaggagggctccctggaagtggcctggagaggatgcagaaggtgtgaggtgtgagtggtcaggtggaggacgcaggctggaaacaggttcagggagggtggtgctggctttatcaggaggctggtgtggggtgggctgccgcggcatggccttaccctggctgttctctgagccgaagcagcagccatcgtcggagacaggatctgagtgggaagaacccacgggcttcccctgtagacccagctcctgtccccatctcgatgatgtggggtggcaggaagggggcagccgggcggtgggatgggggcttaggagggttcaactcagccttccctgccctgcctgtctggtcttcaccggtgacttccggcaaatgacgtcccctctctcagatccaccccacatgggattaaatgagatgctgcccacctcggctgcagtgtggtgccaccataaaacagatgctcaggtcacgatggttacggcagcagccctgcctggcctccctcagcctcagccgtccacccccagggtaagccgggacctgaaggtgccttgctgagtgggaatagaaggcagtttgatgtctcttcccacagcactgtcattccccggcgccccctgagtcactacctcgtcaccaggtagagcctcttgaagaactctgcgagcaaagttggccccgggtgggccccatcaagccgcccaccaccacatgtcaatctcgggcctccaaagagcgcccttcaccctctagtggggagctgggattttgtgggtaggagctggcgtcagatccaggttcaaatgctgactgtctgcagctaagttgtgcagtgagctggggcccactctgaccctcagtctccttctctccaaaacgaactttattattccccctagtcagggctgggctagtgggtgaagtggccggtgtagacagtgggtgctccaaaactggttccagatccagaggccctgcctgcagagggcagtccacggccccccgtgtacaggctgggaaggaaagtgggtcgggaggcccccagcccctcgaggggttgacggggactaacagcagatggaagctaattagggcttaatgaattgtcatggatgaagccccgggagggcctggatctagggcagaggatgcaggggtcctgggggactggcagcgtgtccccaaaagcagaccttggagggccacgtgctgtgaggggctgggccccctcctcccatatccgtcttagaagctcaaacggggcatccagagcacactccccttactcccaccgccctggttgtggtggggggcagagggagggagatggaggtcactgtgggcctggaaacagaggggaccgctaccacacttctcactcctgccccctctgggtttggccggcctctaggagggcctttcccaagggagatgtcagcatcccttgccctgggcggggactggagggggatgtgtttgaggtaaccttgcaagagggaggggaagagccctgctcagaatagaggaggcggattggaagggccgggggcttagccaggagctgagggaaggagctgcccacaccaccaggcaccaagagggtagggccacctctgttctagggagggaccccggccactcacagccacactctgccttctccttgagctaagagcttccaggaccattaatccaggatccatatctaaggacagctgggggtacagggaagagaggcctccattgcccaggtcctgctgtgggggacagttttggggagggggtcctcaaggccggtgcctgcaccgtggttggtgcagatctcagaccccaaggagaggtcaatgtcccctgccttccacgccccagaaggcaggtgcacagatccgggaggcctcgagcgacctccctcttcaagactgcaatgaccctgatgagttctggctgctgtgacagcagtggctgggaaccacacacatttattattgcaccgttctggaggccagagtccaaaatgggcctcactggcgtaaaaccagggcatgaggctgggtgtggtggctcacgcttgtagtctgagcattttggaaggccgaggcaggcagatcactggagatcaggagttcgagaccagcctggccaacatggtgaaaccccatctct

SEQ ID NO: 33721 - DNA, 1207 bp, Artificial sequence
  DNA replication origin
atggtagcttccagaaggttccacacggaacaacctgctgcacttggggtgcccctgcgtttattgcacggcacggccgtctccgcaggctcacccaggccgtggggacaggaggtcctcggacacgaagcgcccgggatgcgcacggaggggttctgcacccgcgctcccagtgtccccgcacctgcgcccacgtggcctctcacacctgcggccccagccgccgcgcacgcggcccagcgcagcccccgcgcgcccccgccaggcgcgccgaggagaccggcgggcggttgcgcgcggcggcggcgcgcacggcggagcccgggaggcggcggcggcggcggcggcggcggcggcggctgctcgtgtcggctccgggcggcccccgcgccgcagcccgcgccgtgtccgcggcggagccgcccaggtgagtggccgtgccggggcccggcgtggggcgcgcccgcagacctggggacccctcacctgcaccctgcgaccctgccgcccaaagcccccaacccgcgaccccatcctcagccgggggaaattgccccgcgcacccctcccgggctcatcgctccttgccaggcccccgacgctccccctggaaactttgggggcgaactccccaccctggggccccccgcccctcctctggggcgccaaggagcggggaatcgggtgggcatctccccggggcactggggacgctgggaggatgcgctcctctccaggaggagatgaagggggcactggttgggtctggggtgtggggaacgtccgaatagagcctgcagcccgcgccttcctgccctgtctcccccgagccgggtctggtccagcctgggggtgcggagctggaagacgcaaagggtatctggggtccacaccggagcctgctccatcgctggagctgacggcccggcctggcggggagggacctgggggcatagggctgagtccccctgctctgggggcgtctgaatagcaccagaaatggtgggcctgggcaccctgagtgggtgccgccacctcccgggcctctggggcctggccaggggaggccctgagtcccattcaacaagtttaggggagcagcacctcgtgccttggtccgggcacaagaaaagccccgggtccttacgctggagaccaccatgtaactgggtttctcaacgtgtgcttggggcgctaacggtgccgg

SEQ ID NO: 33722 - DNA, 2113 bp, Artificial sequence
  DNA replication origin
cagctggcatccctcaccctccaggactcatagcaagtgtctcctcctccgggaagcctccctggcccctggcttcggtccgggacccggtgtcactactgcctcttccacgccgctttgtgacgatttcatatttcaggcatctgctccctctgtccgaagaaatcccccttgaggctggaagcgtctcctcctcctccctccagcccttggcctggtatacagtaggtgctcaatgaacaccttcctccaagagccctgagagccagctatcaggagcatcactttacagagaaagaaacacgttcagagagagaaggagacctcccctactggggtcacacagcacagcagcccagggccatttggtggggagagcatggggtgtcatgaagtccttctggacctctctggggccaggaattgaaccatacccgccccccacagcatcctgtggggggcctggcctgcagcctcccagggatgcggtttctgggcctccagccaacgcgacagtctgggaacagagcctgcttgagtcacaggtggctgcgtgagtgccaggccaccgccaaagccactgggaatacacagctggtggggaggactgcagagtgggtgaagggggcagacagggcaaggttacacacacaggttcccgaggcctccttctcacccctcacttgggacaaatggcatctcccagccttggtttgctcatctgtgagacagggaggctaaatgtggcttttagaagatgcagtgaggggccgggcatagtagctcacgtctgtcatcccagcactttgggaggccgaggcgggtggatcacctgaggtcaggagttcgagaccagcctggccaacatggtgaaactctatctcccctaaaaatacaaaaattagccaggcatggtcatgggcgcctgtaatcccagctacttgggagactgagacaggagaatcgcctgaacccgggaggtggaagttgcagtgagccaagattgcaccactgcactccagaatgggtgacgagagcaaaactccatttcaaaaaaaaaaaaaaaaaaaaaagacaaaaaaaaaggtaaaaaactttccatgagcactcgcagtgcacttggtgtgtgcgctgctgtgtgctaggcggaaggcacattggggaacaagcccattagacaaactgagaggctccaagctgctcgatggagggacagagagaaaggctgtccaagctgggcacagcgaagatcaaaggcctgggactggagggacttggcctgtttgaggaaggctgagggggtggagcccgggaaagagtgagtgaggacaggccagggggaaggaggtggtgcggcagaccaaacagtgcaggcagccgggcggtggctcacacctgtcatcccagcactttgggaggccgaggtgggtggatcacccgaggtcaggggtttgagaccagcctggccaacatgctgaaaatccgtctctaataaaaatacaaaaattagccgggcgtggtggcgggtgcctgtaatcccagctacttgggaggctgaggcaggagaatcgcttgaacccaggaggcggaggttgcagtgagccaagatggcaccgctgtactccagcctgggcaacagagcaagactccatctcaaaaaaaaaaagaaagaaagaaagaaagaaagaacgaaagaaagagaaattccagggtaggtggggtgcagacgggaccctcacggcaatagggaatcacggcaggttctggagcccagtggctaagcttcctctgaggggcttcctctgagggccacataaggaatgggcctgggctgggctgtggcagatgtccaggtgcagatggtggcggcctggactaggggtgggggacggggggcagaggaggcgatggtagcttccagaaggttccacacggaacaacctgctgcacttggggtgcccctgcgtttattgcacggcacggccgtctccgcaggctcacccaggccgtggggacaggaggtcctcggacacgaagcgcccgggatgcgcacggaggggttctgcacccgcgctcccagtgtccccgcacctgcgcccacgtggcctctcac

SEQ ID NO: 33723 - DNA, 1410 bp, Artificial sequence
  DNA replication origin
caagcgatcctcccacctcagcctcctgagtagctggggctacaggcatgcaacaccatgtccagataattttttttttaaagagatgagggtctcgctatgttgcccagactcctgagctcaagcgatcctcctgcctctccctcccaaagtgctgggattccaggcacgagccactacgcccggccattgtccccttcctgtcctcggtcagtgtctccccaccccttgtcctgagtggaagcctcctgagggcagggacggcgcctgagcctggcatggacgcagcacctagtaggagcccaggcgatgtcgagaagtgcagtttcttttgcatcctgcaggacgagggaggtgggtttgatgtcccgtggagcaccccaggcccagcagctcagctgctgggtgatcttggggtgtccctcaagtctctgggcccagcatccctggcaggatgcatctccctcggttcctcttggagagctgcccggggggcgggggcagggagagcgtgggagggggatgcaggcgcggctttgagcctcccaggcggtggggtgggagcacctggttgctaaggttacgaccacctgtgatgggacgttgccatggagacttaccacctgggcggagagggcggctccagatggggaagccgtgggagaggctggggggcagggaggcagcagcccgcagaggggggcatccttctggggacggccgtggtggggccgaggggtctcctgtcctgtgctctcctgcctgggaaaaccagcaggaactcttctgcagcaggaaccatttctaaaattaaaagccctcctcctctcgctcgctctctccagcgtgagggacgggaccagatgcgggcgggagtggcagtcatgtcccagggagggaggctgcgggggcaggtggcctgggagcctcccgtgtggccccagacaagtggccaccctctgtaactggggaaagagtccttggctgctaagaggcaaacgtgtagagtcctggaagccttgggctccagatgcctgaggtcaagccccagcttcagcaggcagatgctgtgtgacctgaggctagtgacctaacctctctgagtccccaaattctcatctgtaaagtgggaataataatgaatccaggccaggcacagtggctcacacatgtaatcccagcactttgggaggctgagatgggaggatcacttgaggccagttcaggactgcagtgagctatgattgcaccactgcactccagcctgggcaaaatagcaagaccctgttaattaaaagttaatctgggggccgggcaccgtggctcacgccggtgatcccagcactttgggaagccaaggcgggcagatcacgaggtcaggagattgagaccatcctggctaacatggcg

SEQ ID NO: 33724 - DNA, 833 bp, Artificial sequence
  DNA replication origin
ctgagatgatcatatggttttcctctcttatgctaatgtggttaatcacattgattcttgggtattaaaccaaccttgcattcctgggataaaccccacttggtggtcatgatggagaatcccttttatagacagctggattcaatttgttaatattaaggatttgtgcatcgatattcatgagggatattggcctttgattttcagtaatgtgttttggttacgctggcctcataaaacacattgggaagtgttccttcctcctctagtttctgaaagagtttgggtaggattggtgctgtttgttccttaaaagcttcaggatcaattctgttgttttccagagaagggggtctctctatgttgcccaggctggccttgaactcttgggctcaagccatcctcctgcctcggcctcccaaagcactgggatttcaggcgtgagccaccgtgcctggcctgggaacaattctgaaggtagaattgtcagcatttgctgatggctgggatgtgggaggcaagagaaacagcagggaagggcacccgagggtgtaagcctgaatcatggagctgtttccttggatgcagaaagctggagcggcacctggtggaaggagcattggtttggggtgtgcattaattttggggcgcctctggtgctggggcagagatgaggtcagggaaatggaagtcagaagcattttcaacaatgaaagcggaacccacgggcatctctgtctctgacttcgtgcccattacccccagcttcctgttcccttactgcttctggtctgtgttcactggccggcgtgcagaactctgtcttctgtcgg

SEQ ID NO: 33725 - DNA, 1041 bp, Artificial sequence
  DNA replication origin
gctccctgctggctcttcttctctcaaacccacaaaacctctgagttaccaacgtgaagcctcgtggcggccgatggacgggcttgagcgctcactggtcctagacgtcctcacaaagcaggaaaccccattgttgtggggcctggagagacgggagctgccagctcacccactggtctctacacactgacggggcgcccggcacagttagaggacaacctttttaaatgttttattattttaatttttgttaaattggtgacgtgagaggccaggcacaatggctcacacctataatcccagcgctttgggaggccaaggcaggaggatctcttgaggtcaggagtttgagaccagcctgaccaacatggtgaaaccccgtctccgctaaaaatgcaaaaaaattgctgggtgtggtggcgcatgcctgtaatcccagctgctcgggaggctgacgcaggagaatcgcttgaacctgggaggcggaggttgcagtgagccgagatggtgcaactgcactccagcctgagtaacagagtgagactccgtctcaaaaaaaagagataagctgaggtctcactgtgttgcccgggctggtctcgaactcctgggctcaagccatcctcctgcttcagcctcccacagtgctggggttccaggcgtgagctgtggcgcccagcggagagcagccttgctgtggggtagtgagcgtgccgtggggctcctctcgggcgcctttcctcttctgcccttgttaattcccgctatgaacgcagggtccctgtctcctccccagaggaccctccctcatttccctgcccccgctcgctcccctccccagtgaggccgccaagtcctcagactctcccccagaagctcctgcggcaagtccccagctggcaagtccccatcccggcccgggcactgggggaatgtcaggacttaggagagagagggtcttgccccttggatccattgatactgagacaagatttattcttgtagctggccatggtggctcatgcctgtaatcccagcact

SEQ ID NO: 33726 - DNA, 1287 bp, Artificial sequence
  DNA replication origin
aaaggagaggagccggggacagacccgcaaggtcacggccgagccccggcaccgccggccgacaacgcggggacggcggatccccgaggctggacccccaagacgggccgagcggggtcgttcctgcgcgtagcccggggacagagaggccgaagggccgcagcccgcggtgccgtcgggaccggtgccgcgctcacctgggccgcgaggagcagaaaggccgccaaaagccgcgccagcgcagccgccaccgctgccgccatgtcggccggtgcccgccgcaaccaacggcagatgtttcccagcaacgccccgagaccccgggccacgcatgcgccgcgcatgcgcgtgggggaggtcaaagggcgcggggcggtgcctgcgaagagccacacggcgcgacaagatggcggtgagcgcgcggcggaatctggagccggggggcgtggagctcgggccgcgctccaggtctcatgcgctctgctttccccgcaggataaggagaagaagaaaaaggagagcatcttggacttgtccaagtacatcgacaagacgatccgggtaaagttccagggaggccgcgaaggtgaggaggctcccgctgtcggtaccccctctttaaaaatttcaaataaacccagcaacagagatgatgaggacgcatgcggaagcacctcttttatttattttcattattttttttgagacgcagtctcgctctgtcacccgggctggagtgcagtggtgcgatctcagctcactgcaacctccgcctcccaggttcaagtgattcttgtgcctcagcctcccgagtagctggaattaatgtgtaccaccacgcccggctaatatttgtatttttagtagagaggccatgttggccaggatggtctcaaactcctggcctcaagcgatctgcctgcctcagccccctaaattgctgggatttcaggcatgagccaccatgcccagcctagcatttttgactgggcaagtgagctgccttctcctagcctccgtttcctcatttgtcaaatggggctggtaactccacccacttcacagggggtggtgagaatgaatggttacaggcatgtaatgtaattgaggcagctctcagcaggaagtaagcagtcagacaacacgtcacttattcaatagcctcttggatctttggtttcttttttttgtaagacggggacccaaacctctttgtccctggattgtagacaactgggtggcatgagagttattaaaaatcacagtgccccagccggacggggcggc

SEQ ID NO: 33727 - DNA, 1075 bp, Artificial sequence
  DNA replication origin
gcctgtcatcccagcactttgggtggccgaagcaggtggatcacctgaggtctgaagttcgagaccagcctgaccaacatggtgaaacctcgtctctactaaaaaaaaaaaaaaaaaaatttagccaggagtggtggcatgcacctgtaatcccagctattcgggaggctgaggtgggagaattgcttgaaccgggaggcagaggttgcagtgagcctagatcatgccactgcactccagcctgggcgacagagcgagactccgtctcaaaaaaaaaaaatagatctgcttcggaaaagccttcccaggcaaactgagtccctctctccacagagttctgtgatctttcttccacctctggctttccccctccttccaaatgtctggggagctctaggtgcctggctgcagaatggggggagtccaaagggggctgacagagcagctgggggtaggactggggttctcagaaagcttccgagggggcccgacagccttgcagagaccaggggcatctcagggtaagagaaaagactagagagtgaagcgactgcaatgagctgcaggcttccccagcagccaggtcacaactggacggcgcactcatctggatgcgacacggtctgacatactttgaaagggtcacccctgctgtgtcgaggatggactggggatgtggtggacaaaggcagccacagcagagggatagcggtggggctggaggagtggagactgaggagccaggtggcggcgacgccttaagagtgagaactctgagggggtagtgaaggttaagggctgcatttgtggggctgctccaggttccattgcctgagccaccgaactcaggagagagggaagatttggaattaagaaaataaaagatgcagttatgacagtgcgatctcgtagactgtccccactagaacctgacactctttacatcaaatgacacacaatgaacataatgaaggcctgttggccctgggcgctggtcaccctggacagaacctccagaatccacaccatagtcggtcctccttctgcacacgaattccatcgtccaaggtcacgg

SEQ ID NO: 33728 - DNA, 1138 bp, Artificial sequence
  DNA replication origin
tctgtcagccccctttggactccccccattctgcagccaggcacctagagctccccagacatttggaaggagggggaaagccagaggtggaagaaagatcacagaactctgtggagagagggactcagtttgcctgggaaggcttttccgaagcagatctattttttttttttgagacggagtctcgctctgtcgcccaggctggagtgcagtggcatgatctaggctcactgcaacctctgcctcccggttcaagcaattctcccacctcagcctcccgaatagctgggattacaggtgcatgccaccactcctggctaaatttttttttttttttttttagtagagacgaggtttcaccatgttggtcaggctggtctcgaacttcagacctcaggtgatccacctgcttcggccacccaaagtgctgggatgacaggcgtgagccaccgtgcccggccccgaggcaggtgttctgaatgatgagtaggagtttgccgggtcggcaggaggggaagggtgttggaagcaccagaagcagcataagcgggggctgggaggtgtgagagctggcaggttatttggggttggcaaggggtgggctgtggctggagtgtagggtggaataatgctggaaggaagggtttacaccctgaaagatgtcaccaccaaggaggcccggggggtgggccgtggagggttgctggagcaggggcacagaggagggggcagtggtgcgagtggccccaggcagagagtgaaggcagagcattcagcctcctagtctggatgacaggttgtctggtggaagccaggccgtggaaggcgcttggtgctggggtgcgtggactttaacctgggcgggctgaggagtgtgagctttatccggagggtggggagtcaaaggatgtgtcagagggacgtgagagagcaggtgttcctgccccttccagaaccctggttgtaaatacaccctgagacgcctgtccctggaggggggcagtgcttcgcggcagtggaaatttgagtccgattgcccaagaatgagacttgctctcagggcaggagcctggttggtgacagtcctcaactcgcttgcttgctaccattctgtgaccctgagcaaggaagtcgacct

SEQ ID NO: 33729 - DNA, 1420 bp, Artificial sequence
  DNA replication origin
gcggttgcaaagcgtttgtgctgcaattgtgaaggatttggaggtcgaggcttgggctttgagcctgtccttgtagcctgagctttttctgctcctccaaatttcggtgggcctgtctagaactcagggccctcttagagctgtggcctttggaagaattgttccccgttcctttaactcagcaggtgaggaaactcttcccggtgagatgccgcgttctctggcctttgatagaggcacaggcttgtttttttaatggaaaaccagttttgcgaattgtggagaggaaaatgcatgaatgtgcttttgtgcttttaaatgacccttttagagagaagcagagaagcagttctatcagttcccattttacacaaaagacacttttcaccagagtccctgatcccatagaacagagcttggcaagtgttttctgggaagggctagacagtagttttgctgggctctgtggcccacgtggcctctggtttggttgcttggtttctcctgttgttcttccagagccggagacccttccttaggaatgggcttggctgtgttccaataaaactttatttacaaacacagaaggtgggccggactgtggattcttggcctctgccgtgacccataacatccctcctggaggaggggttctggggggctgtgttggaaggggcaccctccgggctcggcaccggggccagactaaggggtgctctcacgggcaggcagtctggtgggcagaactggaaagaaagggctcctgactctgcctgggctctgggggaggtcacatgggaggtgcttggagtggggctggggcagctgtgggaaggaagcagcattagccaagagctatgagacccccagtcgattgtggggaccggggctccgtgggctttcaccatgctgccaccccgaggtcaccagggccttgacccagatgctcccagaccaggccggagactttgcatgatttcagtgatgagggcccggctgttggagagcccgtctgtgcctgtgtgctggggttggtgtctggcaccagggacctttgggacctttagccaagccagagctgtccttccccagtcctagcttggcagagctgcgtctgcactgttttcccttgtggcgttgtggtgtcggcccgtttggtgcgcagctcagcatccgttcagacatgtggctgccatcctgttcctgatgaggcaaatggctgtggcctgtttgtttccgtgacaggtcccctggggaccagggggtgcggctgtctctctgtctgggaggtttacagcctggcaggagccctgcagccccagaaggctgagggctgggtgctcctgagaacgggcaggcctagggcatggggtgggtctccttggtccctggcacgtggtttttcttctgggacccctcc

SEQ ID NO: 33730 - DNA, 1165 bp, Artificial sequence
  DNA replication origin
ctgtccttccccagtcctagcttggcagagctgcgtctgcactgttttcccttgtggcgttgtggtgtcggcccgtttggtgcgcagctcagcatccgttcagacatgtggctgccatcctgttcctgatgaggcaaatggctgtggcctgtttgtttccgtgacaggtcccctggggaccagggggtgcggctgtctctctgtctgggaggtttacagcctggcaggagccctgcagccccagaaggctgagggctgggtgctcctgagaacgggcaggcctagggcatggggtgggtctccttggtccctggcacgtggtttttcttctgggacccctcctccctgtgcaggccgggctcccctgggggcccacactgagggtctgcagtgtggcacagcagctgggacctgggccccatcgctgtgagaccctctggtgactggcatcctggcgagatggagatgtctttgtcagctgctgggtgggggccctgggcaggggagcagaaggaaggtggggatggcaggtgcgggcggctggactgggctctgctgggagggggagcaggaggagggtggggatggcaggtgcgggcggctggactgggctctgctgggagggggagcaggaggagggtggggatggcaggtgtgggcggctggactagactctgctgggaggggagcaggaggagggtggggatggcaggtgcaggcggctggactgggctctgctgggagggggagcaggaggagggtggggatggcaggtgcgggcggctggactagactctgctgggaggggagcaggaggagggtggggatggcaggtgcgggcagctggactgggctctgctgggaggggagcaggaggaggtggggacggcaggtgcgggaggctggactgggctttgcgggagcaggaggaaggtggggatggcaggtgcgggcggctggactgggctctgctgggaggaccgtggttctgcctaggccagagccctgcagtgtccgccgtggtccctgcggtgggaggcgtggtgagcagtgccagcttcctgcttgtggaatccgtctttcctcatagctccatcctgctctgttaagcattaaattgaagaggtgggggtcgtcccttctggtccaggcccgtctactccgc
